United States Patent Application Publication US 2022/0213167 A1 - sequence listing, part 33

SEQ ID NO: 699475 - protein, 11 aa, Homo sapiens
  CDR3 for alpha chain variable domain of TCR clone 349738 (TRAV17, TRAJ9)
CGFTGGFKTIF

SEQ ID NO: 699476 - protein, 14 aa, Homo sapiens
  CDR3 for beta chain variable domain of TCR clone 349738 (TRBV4-2, TRBJ2-1)
CASGLDRAYNEQFF

SEQ ID NO: 699477 - protein, 12 aa, Homo sapiens
  CDR3 for alpha chain variable domain of TCR clone 349739 (TRAV12-3, TRAJ17)
CAMTFTGNKLTF

SEQ ID NO: 699478 - protein, 14 aa, Homo sapiens
  CDR3 for beta chain variable domain of TCR clone 349739 (TRBV6-1, TRBJ1-3)
CASVQGGGGNTIYF

SEQ ID NO: 699479 - protein, 18 aa, Homo sapiens
  CDR3 for alpha chain variable domain of TCR clone 349740 (TRAV13-1, TRAJ52)
CAASKRSAGGTSYGKLTF

SEQ ID NO: 699480 - protein, 18 aa, Homo sapiens
  CDR3 for beta chain variable domain of TCR clone 349740 (TRBV12-4, TRBJ2-2)
CASSLVAGTRGRTGELFF

SEQ ID NO: 699481 - protein, 14 aa, Homo sapiens
  CDR3 for alpha chain variable domain of TCR clone 349741 (TRAV14/DV4, TRAJ54)
CAMREAPGAQKLVF

SEQ ID NO: 699482 - protein, 17 aa, Homo sapiens
  CDR3 for beta chain variable domain of TCR clone 349741 (TRBV13, TRBJ2-3)
CASSLSRVAGGRNTQYF

SEQ ID NO: 699483 - protein, 14 aa, Homo sapiens
  CDR3 for alpha chain variable domain of TCR clone 349742 (TRAV38-1, TRAJ45)
CVYYSGGGADGLTF

SEQ ID NO: 699484 - protein, 14 aa, Homo sapiens
  CDR3 for beta chain variable domain of TCR clone 349742 (TRBV25-1, TRBJ1-1)
CASTHLGGNTEAFF

SEQ ID NO: 699485 - protein, 21 aa, Homo sapiens
  CDR3 for alpha chain variable domain of TCR clone 349743 (TRAV36/DV7, TRAJ39)
TATQTGDSAIYLPNAGNMLTF

SEQ ID NO: 699486 - protein, 16 aa, Homo sapiens
  CDR3 for beta chain variable domain of TCR clone 349743 (TRBV11-2, TRBJ2-7)
CASSTVTAPKTYEQYF

SEQ ID NO: 699487 - protein, 16 aa, Homo sapiens
  CDR3 for alpha chain variable domain of TCR clone 349744 (TRAV20, TRAJ22)
CAVRLVSSGSARQLTF

SEQ ID NO: 699488 - protein, 16 aa, Homo sapiens
  CDR3 for beta chain variable domain of TCR clone 349744 (TRBV9, TRBJ1-2)
CASSVEEKVSPYGYTF

SEQ ID NO: 699489 - protein, 12 aa, Homo sapiens
  CDR3 for alpha chain variable domain of TCR clone 349745 (TRAV13-1, TRAJ21)
CAAKEGFNKFYF

SEQ ID NO: 699490 - protein, 15 aa, Homo sapiens
  CDR3 for beta chain variable domain of TCR clone 349745 (TRBV9, TRBJ1-6)
CASSVAGTGESPLHF

SEQ ID NO: 699491 - protein, 13 aa, Homo sapiens
  CDR3 for alpha chain variable domain of TCR clone 349746 (TRAV21, TRAJ20)
CAVGVFAAYKPSF

SEQ ID NO: 699492 - protein, 14 aa, Homo sapiens
  CDR3 for beta chain variable domain of TCR clone 349746 (TRBV4-2, TRBJ1-4)
CASSPSSGNEKLFF

SEQ ID NO: 699493 - protein, 12 aa, Homo sapiens
  CDR3 for alpha chain variable domain of TCR clone 349747 (TRAV21, TRAJ23)
CAVMLQGGKLIF

SEQ ID NO: 699494 - protein, 14 aa, Homo sapiens
  CDR3 for beta chain variable domain of TCR clone 349747 (TRBV7-9, TRBJ1-4)
CATTEGEANEKLFF

SEQ ID NO: 699495 - protein, 14 aa, Homo sapiens
  CDR3 for alpha chain variable domain of TCR clone 349748 (TRAV13-1, TRAJ35)
CAASKGGCGNVLHC

SEQ ID NO: 699496 - protein, 13 aa, Homo sapiens
  CDR3 for beta chain variable domain of TCR clone 349748 (TRBV7-2, TRBJ2-5)
CASSLYRQETQYF

SEQ ID NO: 699497 - protein, 14 aa, Homo sapiens
  CDR3 for alpha chain variable domain of TCR clone 349749 (TRAV26-1, TRAJ34)
CMVRVAYNTDKLIF

SEQ ID NO: 699498 - protein, 15 aa, Homo sapiens
  CDR3 for beta chain variable domain of TCR clone 349749 (TRBV20-1, TRBJ2-7)
CSARVPAAYFYEQYF

SEQ ID NO: 699499 - protein, 14 aa, Homo sapiens
  CDR3 for alpha chain variable domain of TCR clone 349750 (TRAV1-2, TRAJ16)
CAVNRFSDVQKLLF

SEQ ID NO: 699500 - protein, 17 aa, Homo sapiens
  CDR3 for beta chain variable domain of TCR clone 349750 (TRBV13, TRBJ2-3)
CASSLSRGAGGRNTQYF

SEQ ID NO: 699501 - protein, 13 aa, Homo sapiens
  CDR3 for alpha chain variable domain of TCR clone 349751 (TRAV35, TRAJ21)
CAGQLSNFNKFYF

SEQ ID NO: 699502 - protein, 11 aa, Homo sapiens
  CDR3 for beta chain variable domain of TCR clone 349751 (TRBV7-6, TRBJ2-5)
CASSSHETQYF

SEQ ID NO: 699503 - protein, 16 aa, Homo sapiens
  CDR3 for alpha chain variable domain of TCR clone 349752 (TRAV12-3, TRAJ53)
CALSPGSGGSNYKLTF

SEQ ID NO: 699504 - protein, 20 aa, Homo sapiens
  CDR3 for beta chain variable domain of TCR clone 349752 (TRBV7-8, TRBJ2-2)
CASSHLFPGPTIHITGELFF

SEQ ID NO: 699505 - protein, 13 aa, Homo sapiens
  CDR3 for alpha chain variable domain of TCR clone 349753 (TRAV20, TRAJ21)
FAVEGYNFNKFYF

SEQ ID NO: 699506 - protein, 18 aa, Homo sapiens
  CDR3 for beta chain variable domain of TCR clone 349753 (TRBV19, TRBJ1-1)
CASSIDGGDYTGNTEAFF

SEQ ID NO: 699507 - protein, 15 aa, Homo sapiens
  CDR3 for alpha chain variable domain of TCR clone 349754 (TRAV21, TRAJ52)
CAVRGGGTSYGKLTF

SEQ ID NO: 699508 - protein, 12 aa, Homo sapiens
  CDR3 for beta chain variable domain of TCR clone 349754 (TRBV28, TRBJ2-3)
CASSLYRDTQYF

SEQ ID NO: 699509 - protein, 13 aa, Homo sapiens
  CDR3 for alpha chain variable domain of TCR clone 349755 (TRAV36/DV7, TRAJ37)
CAVFSSNPRKLIF

SEQ ID NO: 699510 - protein, 15 aa, Homo sapiens
  CDR3 for beta chain variable domain of TCR clone 349755 (TRBV5-1, TRBJ2-2)
CASSSQGGNTGELFF

SEQ ID NO: 699511 - protein, 16 aa, Homo sapiens
  CDR3 for alpha chain variable domain of TCR clone 349756 (TRAV3, TRAJ28)
CAVLPRSGAGSSQLTF

SEQ ID NO: 699512 - protein, 13 aa, Homo sapiens
  CDR3 for beta chain variable domain of TCR clone 349756 (TRBV12-4, TRBJ2-5)
CASRLAVQETQYF

SEQ ID NO: 699513 - protein, 16 aa, Homo sapiens
  CDR3 for alpha chain variable domain of TCR clone 349757 (TRAV12-1, TRAJ28)
CVVIAYSGAGSCQLTF

SEQ ID NO: 699514 - protein, 17 aa, Homo sapiens
  CDR3 for beta chain variable domain of TCR clone 349757 (TRBV15, TRBJ1-1)
CATSRVGGADGDTEAFF

SEQ ID NO: 699515 - protein, 12 aa, Homo sapiens
  CDR3 for alpha chain variable domain of TCR clone 349758 (TRAV1-1, TRAJ9)
CAVDTGGFKTIF

SEQ ID NO: 699516 - protein, 14 aa, Homo sapiens
  CDR3 for beta chain variable domain of TCR clone 349758 (TRBV7-8, TRBJ2-5)
CASSATGGKETQYF

SEQ ID NO: 699517 - protein, 14 aa, Homo sapiens
  CDR3 for alpha chain variable domain of TCR clone 349759 (TRAV26-1, TRAJ26)
CIVRATFLGQNFVF

SEQ ID NO: 699518 - protein, 15 aa, Homo sapiens
  CDR3 for beta chain variable domain of TCR clone 349759 (TRBV19, TRBJ2-7)
CASSPAGSGEALRYF

SEQ ID NO: 699519 - protein, 18 aa, Homo sapiens
  CDR3 for alpha chain variable domain of TCR clone 349760 (TRAV13-1, TRAJ52)
CAAKNPNAGGTSYGKLTF

SEQ ID NO: 699520 - protein, 14 aa, Homo sapiens
  CDR3 for beta chain variable domain of TCR clone 349760 (TRBV5-4, TRBJ1-1)
CASSLDSRRDEAFF

SEQ ID NO: 699521 - protein, 11 aa, Homo sapiens
  CDR3 for alpha chain variable domain of TCR clone 349761 (TRAV13-2, TRAJ45)
VTGGGADGLTF

SEQ ID NO: 699522 - protein, 17 aa, Homo sapiens
  CDR3 for beta chain variable domain of TCR clone 349761 (TRBV19, TRBJ1-1)
CASSIAGRGLMNSEAFF

SEQ ID NO: 699523 - protein, 10 aa, Homo sapiens
  CDR3 for alpha chain variable domain of TCR clone 349762 (TRAV16, TRAJ26)
CALSGSEFCL

SEQ ID NO: 699524 - protein, 12 aa, Homo sapiens
  CDR3 for beta chain variable domain of TCR clone 349762 (TRBV11-2, TRBJ2-1)
CASSPGNNERFF

SEQ ID NO: 699525 - protein, 14 aa, Homo sapiens
  CDR3 for alpha chain variable domain of TCR clone 349763 (TRAV12-1, TRAJ13)
CVVIDSGGYQKVTF

SEQ ID NO: 699526 - protein, 17 aa, Homo sapiens
  CDR3 for beta chain variable domain of TCR clone 349763 (TRBV15, TRBJ1-5)
CATSRAPPGTRKQPQHF

SEQ ID NO: 699527 - protein, 16 aa, Homo sapiens
  CDR3 for alpha chain variable domain of TCR clone 349764 (TRAV26-1, TRAJ52)
CIVSNAGGTSYGKLTF

SEQ ID NO: 699528 - protein, 14 aa, Homo sapiens
  CDR3 for beta chain variable domain of TCR clone 349764 (TRBV18, TRBJ2-5)
CASSPPGHQETQYF

SEQ ID NO: 699529 - protein, 12 aa, Homo sapiens
  CDR3 for alpha chain variable domain of TCR clone 349765 (TRAV21, TRAJ11)
GAATSGYSTLTF

SEQ ID NO: 699530 - protein, 14 aa, Homo sapiens
  CDR3 for beta chain variable domain of TCR clone 349765 (TRBV20-1, TRBJ2-7)
CSAPELAGAGEQYF

SEQ ID NO: 699531 - protein, 13 aa, Homo sapiens
  CDR3 for alpha chain variable domain of TCR clone 349766 (TRAV29/DV5, TRAJ29)
CAASAAGKPPLFF

SEQ ID NO: 699532 - protein, 13 aa, Homo sapiens
  CDR3 for beta chain variable domain of TCR clone 349766 (TRBV7-2, TRBJ2-7)
CASSSPSGSEQYF

SEQ ID NO: 699533 - protein, 14 aa, Homo sapiens
  CDR3 for alpha chain variable domain of TCR clone 349767 (TRAV16, TRAJ40)
CALHEPYYLRTLQI

SEQ ID NO: 699534 - protein, 12 aa, Homo sapiens
  CDR3 for beta chain variable domain of TCR clone 349767 (TRBV7-3, TRBJ2-3)
CASSPLTDTHYF

SEQ ID NO: 699535 - protein, 13 aa, Homo sapiens
  CDR3 for alpha chain variable domain of TCR clone 349768 (TRAV13-1, TRAJ41)
CADAPTSGYALNF

SEQ ID NO: 699536 - protein, 13 aa, Homo sapiens
  CDR3 for beta chain variable domain of TCR clone 349768 (TRBV19, TRBJ2-7)
CASEGTTTYEQYF

SEQ ID NO: 699537 - protein, 14 aa, Homo sapiens
  CDR3 for alpha chain variable domain of TCR clone 349769 (TRAV8-3, TRAJ11)
CAVGSNSGYSTLTF

SEQ ID NO: 699538 - protein, 14 aa, Homo sapiens
  CDR3 for beta chain variable domain of TCR clone 349769 (TRBV5-1, TRBJ2-7)
CASSLASGGYEQYF

SEQ ID NO: 699539 - protein, 15 aa, Homo sapiens
  CDR3 for alpha chain variable domain of TCR clone 349770 (TRAV26-1, TRAJ29)
CIVRAAGSGNTPLVF

SEQ ID NO: 699540 - protein, 15 aa, Homo sapiens
  CDR3 for beta chain variable domain of TCR clone 349770 (TRBV7-9, TRBJ1-5)
CASSQGHQPNQPQHF

SEQ ID NO: 699541 - protein, 13 aa, Homo sapiens
  CDR3 for alpha chain variable domain of TCR clone 349771 (TRAV3, TRAJ41)
CAVSSNPGYALNF

SEQ ID NO: 699542 - protein, 13 aa, Homo sapiens
  CDR3 for beta chain variable domain of TCR clone 349771 (TRBV20-1, TRBJ2-2)
CSALSGGAGELFF

SEQ ID NO: 699543 - protein, 15 aa, Homo sapiens
  CDR3 for alpha chain variable domain of TCR clone 349772 (TRAV8-2, TRAJ40)
CVVLGTTPGTYKYIF

SEQ ID NO: 699544 - protein, 14 aa, Homo sapiens
  CDR3 for beta chain variable domain of TCR clone 349772 (TRBV25-1, TRBJ1-4)
CASSGGGQPEKLFF

SEQ ID NO: 699545 - protein, 15 aa, Homo sapiens
  CDR3 for alpha chain variable domain of TCR clone 349773 (TRAV21, TRAJ52)
CAVRGGGTSYGKLTF

SEQ ID NO: 699546 - protein, 15 aa, Homo sapiens
  CDR3 for beta chain variable domain of TCR clone 349773 (TRBV4-1, TRBJ2-7)
CASSQQGQGFDEQYF

SEQ ID NO: 699547 - protein, 11 aa, Homo sapiens
  CDR3 for alpha chain variable domain of TCR clone 349774 (TRAV26-1, TRAJ27)
CIYPNAGKSTF

SEQ ID NO: 699548 - protein, 18 aa, Homo sapiens
  CDR3 for beta chain variable domain of TCR clone 349774 (TRBV7-9, TRBJ2-6)
CASSFPGAGISGANVLTF

SEQ ID NO: 699549 - protein, 15 aa, Homo sapiens
  CDR3 for alpha chain variable domain of TCR clone 349775 (TRAV3, TRAJ4)
CAVSDGTGGYNNLIF

SEQ ID NO: 699550 - protein, 15 aa, Homo sapiens
  CDR3 for beta chain variable domain of TCR clone 349775 (TRBV27, TRBJ2-7)
CASSPDQGRLYEQYF

SEQ ID NO: 699551 - protein, 23 aa, Homo sapiens
  CDR3 for alpha chain variable domain of TCR clone 349776 (TRAV26-1, TRAJ38)
CIADNAGNNHIQNPDPAVYQLRD

SEQ ID NO: 699552 - protein, 14 aa, Homo sapiens
  CDR3 for beta chain variable domain of TCR clone 349776 (TRBV7-9, TRBJ2-1)
CASSDNSGYNEQFF

SEQ ID NO: 699553 - protein, 13 aa, Homo sapiens
  CDR3 for alpha chain variable domain of TCR clone 349777 (TRAV26-1, TRAJ33)
CIVRVEGNYQLIW

SEQ ID NO: 699554 - protein, 16 aa, Homo sapiens
  CDR3 for beta chain variable domain of TCR clone 349777 (TRBV15, TRBJ2-7)
CATSRDRGRRRGEQYI

SEQ ID NO: 699555 - protein, 13 aa, Homo sapiens
  CDR3 for alpha chain variable domain of TCR clone 349778 (TRAV3, TRAJ27)
CAVRPLGAGKSPF

SEQ ID NO: 699556 - protein, 16 aa, Homo sapiens
  CDR3 for beta chain variable domain of TCR clone 349778 (TRBV5-1, TRBJ2-7)
CASSLEGLAGLYEQYF

SEQ ID NO: 699557 - protein, 14 aa, Homo sapiens
  CDR3 for alpha chain variable domain of TCR clone 349779 (TRAV9-2, TRAJ39)
CALYIYNAGNMLTF

SEQ ID NO: 699558 - protein, 15 aa, Homo sapiens
  CDR3 for beta chain variable domain of TCR clone 349779 (TRBV11-1, TRBJ2-7)
CASSRGRFKTYEQYF

SEQ ID NO: 699559 - protein, 14 aa, Homo sapiens
  CDR3 for alpha chain variable domain of TCR clone 349780 (TRAV2, TRAJ9)
CAMEDRSGGFKTIF

SEQ ID NO: 699560 - protein, 12 aa, Homo sapiens
  CDR3 for beta chain variable domain of TCR clone 349780 (TRBV11-2, TRBJ2-2)
CASSLGGGELFF

SEQ ID NO: 699561 - protein, 14 aa, Homo sapiens
  CDR3 for alpha chain variable domain of TCR clone 349781 (TRAV36/DV7, TRAJ40)
CAVETTSGTYKYIF

SEQ ID NO: 699562 - protein, 13 aa, Homo sapiens
  CDR3 for beta chain variable domain of TCR clone 349781 (TRBV20-1, TRBJ2-5)
CSAREAFQETQYF

SEQ ID NO: 699563 - protein, 14 aa, Homo sapiens
  CDR3 for alpha chain variable domain of TCR clone 349782 (TRAV20, TRAJ39)
CAVQAGNAGNMLTF

SEQ ID NO: 699564 - protein, 14 aa, Homo sapiens
  CDR3 for beta chain variable domain of TCR clone 349782 (TRBV12-4, TRBJ1-1)
CASSLGTGGTEAFF

SEQ ID NO: 699565 - protein, 14 aa, Homo sapiens
  CDR3 for alpha chain variable domain of TCR clone 349783 (TRAV1-2, TRAJ8)
CAVREDTVFQKLVF

SEQ ID NO: 699566 - protein, 16 aa, Homo sapiens
  CDR3 for beta chain variable domain of TCR clone 349783 (TRBV7-9, TRBJ2-1)
CASSDVAGGSYNEQFF

SEQ ID NO: 699567 - protein, 19 aa, Homo sapiens
  CDR3 for alpha chain variable domain of TCR clone 349784 (TRAV26-1, TRAJ52)
CIVRAPRNAGGTSYGKLTF

SEQ ID NO: 699568 - protein, 15 aa, Homo sapiens
  CDR3 for beta chain variable domain of TCR clone 349784 (TRBV29-1, TRBJ2-1)
CSGRDRKSSYNKQFF

SEQ ID NO: 699569 - protein, 15 aa, Homo sapiens
  CDR3 for alpha chain variable domain of TCR clone 349785 (TRAV21, TRAJ53)
CATLNSGGSNYKLTF

SEQ ID NO: 699570 - protein, 13 aa, Homo sapiens
  CDR3 for beta chain variable domain of TCR clone 349785 (TRBV10-2, TRBJ2-7)
CASGASGGYEQYF

SEQ ID NO: 699571 - protein, 15 aa, Homo sapiens
  CDR3 for alpha chain variable domain of TCR clone 349786 (TRAV12-1, TRAJ9)
WVVSFGDTGGFKTIF

SEQ ID NO: 699572 - protein, 12 aa, Homo sapiens
  CDR3 for beta chain variable domain of TCR clone 349786 (TRBV11-3, TRBJ1-1)
CASSHRQGEAFF

SEQ ID NO: 699573 - protein, 12 aa, Homo sapiens
  CDR3 for alpha chain variable domain of TCR clone 349787 (TRAV36/DV7, TRAJ40)
CAVGTGTYKYIF

SEQ ID NO: 699574 - protein, 14 aa, Homo sapiens
  CDR3 for beta chain variable domain of TCR clone 349787 (TRBV18, TRBJ2-7)
CASSPRGGAYEQYF

SEQ ID NO: 699575 - protein, 14 aa, Homo sapiens
  CDR3 for alpha chain variable domain of TCR clone 349788 (TRAV8-2, TRAJ4)
CVVSPSGGYNKLIF

SEQ ID NO: 699576 - protein, 15 aa, Homo sapiens
  CDR3 for beta chain variable domain of TCR clone 349788 (TRBV10-2, TRBJ2-5)
CASRGSGGPKETQYF

SEQ ID NO: 699577 - protein, 15 aa, Homo sapiens
  CDR3 for alpha chain variable domain of TCR clone 349789 (TRAV12-2, )
CAVEDIQNPDPAVYQ

SEQ ID NO: 699578 - protein, 18 aa, Homo sapiens
  CDR3 for beta chain variable domain of TCR clone 349789 (TRBV11-2, TRBJ2-3)
CASSLGGASRGAPNTQYF

SEQ ID NO: 699579 - protein, 14 aa, Homo sapiens
  CDR3 for alpha chain variable domain of TCR clone 349790 (TRAV16, TRAJ48)
CALTPGFGNEKLPF

SEQ ID NO: 699580 - protein, 14 aa, Homo sapiens
  CDR3 for beta chain variable domain of TCR clone 349790 (TRBV7-2, TRBJ2-7)
CASSSISGFSEQYF

SEQ ID NO: 699581 - protein, 13 aa, Homo sapiens
  CDR3 for alpha chain variable domain of TCR clone 349791 (TRAV26-2, TRAJ37)
CIRGSSNTGELIF

SEQ ID NO: 699582 - protein, 16 aa, Homo sapiens
  CDR3 for beta chain variable domain of TCR clone 349791 (TRBV7-2, TRBJ2-5)
CASSPGGARRGETQYF

SEQ ID NO: 699583 - protein, 14 aa, Homo sapiens
  CDR3 for alpha chain variable domain of TCR clone 349792 (TRAV8-6, TRAJ49)
CAVSVRYAGTQFYF

SEQ ID NO: 699584 - protein, 19 aa, Homo sapiens
  CDR3 for beta chain variable domain of TCR clone 349792 (TRBV28, TRBJ2-1)
CASSFSIRGSGRTRYEQFF

SEQ ID NO: 699585 - protein, 15 aa, Homo sapiens
  CDR3 for alpha chain variable domain of TCR clone 349793 (TRAV8-2, TRAJ16)
CVVSDGFSDGQKLLF

SEQ ID NO: 699586 - protein, 14 aa, Homo sapiens
  CDR3 for beta chain variable domain of TCR clone 349793 (TRBV7-3, TRBJ1-1)
CAGSLGTGYTEAFF

SEQ ID NO: 699587 - protein, 11 aa, Homo sapiens
  CDR3 for alpha chain variable domain of TCR clone 349794 (TRAV3, TRAJ21)
CAVGNFNKFYF

SEQ ID NO: 699588 - protein, 14 aa, Homo sapiens
  CDR3 for beta chain variable domain of TCR clone 349794 (TRBV5-1, TRBJ2-7)
CASSLTQGLREQYF

SEQ ID NO: 699589 - protein, 16 aa, Homo sapiens
  CDR3 for alpha chain variable domain of TCR clone 349795 (TRAV3, TRAJ37)
CAVRGKRSGNTGKLIF

SEQ ID NO: 699590 - protein, 15 aa, Homo sapiens
  CDR3 for beta chain variable domain of TCR clone 349795 (TRBV6-6, TRBJ2-5)
CASSYGKIIQETQYF

SEQ ID NO: 699591 - protein, 13 aa, Homo sapiens
  CDR3 for alpha chain variable domain of TCR clone 349796 (TRAV27, TRAJ6)
CAGGTRGSYIPTF

SEQ ID NO: 699592 - protein, 14 aa, Homo sapiens
  CDR3 for beta chain variable domain of TCR clone 349796 (TRBV6-1, TRBJ1-3)
GASVQGGGGNTIYF

SEQ ID NO: 699593 - protein, 11 aa, Homo sapiens
  CDR3 for alpha chain variable domain of TCR clone 349797 (TRAV20, TRAJ23)
CACNQGGKIIF

SEQ ID NO: 699594 - protein, 16 aa, Homo sapiens
  CDR3 for beta chain variable domain of TCR clone 349797 (TRBV7-8, TRBJ2-5)
CASSFGGQPAQETQYF

SEQ ID NO: 699595 - protein, 12 aa, Homo sapiens
  CDR3 for alpha chain variable domain of TCR clone 349798 (TRAV13-1, TRAJ52)
PAGGTSYGKLTF

SEQ ID NO: 699596 - protein, 16 aa, Homo sapiens
  CDR3 for beta chain variable domain of TCR clone 349798 (TRBV12-4, TRBJ1-5)
CASSRPVGGYNQPQHF

SEQ ID NO: 699597 - protein, 14 aa, Homo sapiens
  CDR3 for alpha chain variable domain of TCR clone 349799 (TRAV12-1, TRAJ17)
CVVNPKAAGNKLTF

SEQ ID NO: 699598 - protein, 16 aa, Homo sapiens
  CDR3 for beta chain variable domain of TCR clone 349799 (TRBV20-1, TRBJ2-1)
CSASASGYSSYKEQFF

SEQ ID NO: 699599 - protein, 17 aa, Homo sapiens
  CDR3 for alpha chain variable domain of TCR clone 349800 (TRAV3, TRAJ6)
CAVRDGPRAGGSYIPTF

SEQ ID NO: 699600 - protein, 14 aa, Homo sapiens
  CDR3 for beta chain variable domain of TCR clone 349800 (TRBV11-2, TRBJ2-3)
CASSRLARTDTQYF

SEQ ID NO: 699601 - protein, 11 aa, Homo sapiens
  CDR3 for alpha chain variable domain of TCR clone 349801 (TRAV12-3, TRAJ27)
CAMANAGKSNF

SEQ ID NO: 699602 - protein, 12 aa, Homo sapiens
  CDR3 for beta chain variable domain of TCR clone 349801 (TRBV11-2, TRBJ2-2)
CASSLGGGELFF

SEQ ID NO: 699603 - protein, 17 aa, Homo sapiens
  CDR3 for alpha chain variable domain of TCR clone 349802 (TRAV23/DV6, TRAJ9)
CAASLSPPNTGGFKTLF

SEQ ID NO: 699604 - protein, 14 aa, Homo sapiens
  CDR3 for beta chain variable domain of TCR clone 349802 (TRBV11-2, TRBJ2-5)
CASGRTGGIETQYF

SEQ ID NO: 699605 - protein, 15 aa, Homo sapiens
  CDR3 for alpha chain variable domain of TCR clone 349803 (TRAV8-1, TRAJ6)
CAVNANPGGSYIPTF

SEQ ID NO: 699606 - protein, 13 aa, Homo sapiens
  CDR3 for beta chain variable domain of TCR clone 349803 (TRBV6-4, TRBJ1-5)
CASSADLNQPQHF

SEQ ID NO: 699607 - protein, 16 aa, Homo sapiens
  CDR3 for alpha chain variable domain of TCR clone 349804 (TRAV16, TRAJ4)
CALSRMFSVGYNKLIF

SEQ ID NO: 699608 - protein, 16 aa, Homo sapiens
  CDR3 for beta chain variable domain of TCR clone 349804 (TRBV12-4, TRBJ1-5)
CASSRPVGGSNQPQHF

SEQ ID NO: 699609 - protein, 14 aa, Homo sapiens
  CDR3 for alpha chain variable domain of TCR clone 349805 (TRAV8-3, TRAJ16)
CAVDRFSDGQKLLF

SEQ ID NO: 699610 - protein, 14 aa, Homo sapiens
  CDR3 for beta chain variable domain of TCR clone 349805 (TRBV13, TRBJ2-7)
CASSLKGASYEQYF

SEQ ID NO: 699611 - protein, 18 aa, Homo sapiens
  CDR3 for alpha chain variable domain of TCR clone 349806 (TRAV13-1, TRAJ52)
CAASKRSAGGTSYGKLTF

SEQ ID NO: 699612 - protein, 15 aa, Homo sapiens
  CDR3 for beta chain variable domain of TCR clone 349806 (TRBV4-1, TRBJ1-4)
CASSDTGGTNEKLFL

SEQ ID NO: 699613 - protein, 15 aa, Homo sapiens
  CDR3 for alpha chain variable domain of TCR clone 349807 (TRAV3, TRAJ5)
CAVRDLDTGRRALTF

SEQ ID NO: 699614 - protein, 15 aa, Homo sapiens
  CDR3 for beta chain variable domain of TCR clone 349807 (TRBV20-1, TRBJ2-7)
CSAESGTSGAYEQYF

SEQ ID NO: 699615 - protein, 16 aa, Homo sapiens
  CDR3 for alpha chain variable domain of TCR clone 349808 (TRAV20, TRAJ28)
CAVRDPSGAGSYQPTL

SEQ ID NO: 699616 - protein, 14 aa, Homo sapiens
  CDR3 for beta chain variable domain of TCR clone 349808 (TRBV19, TRBJ2-1)
CASPTFVLSGEQFF

SEQ ID NO: 699617 - protein, 15 aa, Homo sapiens
  CDR3 for alpha chain variable domain of TCR clone 349809 (TRAV12-3, TRAJ49)
CAMAVTPNTGNQFYF

SEQ ID NO: 699618 - protein, 18 aa, Homo sapiens
  CDR3 for beta chain variable domain of TCR clone 349809 (TRBV4-1, TRBJ1-5)
CASSRDPRGQGLNQAQHF

SEQ ID NO: 699619 - protein, 17 aa, Homo sapiens
  CDR3 for alpha chain variable domain of TCR clone 349810 (TRAV3, TRAJ42)
CAVRDRDYGGSQGNLIF

SEQ ID NO: 699620 - protein, 13 aa, Homo sapiens
  CDR3 for beta chain variable domain of TCR clone 349810 (TRBV12-4, TRBJ2-7)
CASSFVRGYEQYF

SEQ ID NO: 699621 - protein, 16 aa, Homo sapiens
  CDR3 for alpha chain variable domain of TCR clone 349811 (TRAV16, TRAJ4)
CALGRMFSGGYNKLIF

SEQ ID NO: 699622 - protein, 11 aa, Homo sapiens
  CDR3 for beta chain variable domain of TCR clone 349811 (TRBV29-1, TRBJ2-5)
CSEDRTGTQYF

SEQ ID NO: 699623 - protein, 13 aa, Homo sapiens
  CDR3 for alpha chain variable domain of TCR clone 349812 (TRAV20, TRAJ49)
CAVHSNTGNQFYF

SEQ ID NO: 699624 - protein, 14 aa, Homo sapiens
  CDR3 for beta chain variable domain of TCR clone 349812 (TRBV19, TRBJ2-2)
CASSTGQVAGELFF

SEQ ID NO: 699625 - protein, 12 aa, Homo sapiens
  CDR3 for alpha chain variable domain of TCR clone 349813 (TRAV23/DV6, TRAJ49)
CAATYTGDQFYF

SEQ ID NO: 699626 - protein, 17 aa, Homo sapiens
  CDR3 for beta chain variable domain of TCR clone 349813 (TRBV4-1, TRBJ2-3)
CASSQVLQGGGTDTQYF

SEQ ID NO: 699627 - protein, 14 aa, Homo sapiens
  CDR3 for alpha chain variable domain of TCR clone 349814 (TRAV16, TRAJ15)
CALSFNQAGTALIF

SEQ ID NO: 699628 - protein, 14 aa, Homo sapiens
  CDR3 for beta chain variable domain of TCR clone 349814 (TRBV7-2, TRBJ1-1)
CASSFLTGTTEAFF

SEQ ID NO: 699629 - protein, 14 aa, Homo sapiens
  CDR3 for alpha chain variable domain of TCR clone 349815 (TRAV14/DV4, TRAJ15)
CAMRRDQAGTALIF

SEQ ID NO: 699630 - protein, 12 aa, Homo sapiens
  CDR3 for beta chain variable domain of TCR clone 349815 (TRBV7-9, TRBJ2-7)
SASSFGSYEQYF

SEQ ID NO: 699631 - protein, 18 aa, Homo sapiens
  CDR3 for alpha chain variable domain of TCR clone 349816 (TRAV12-3, TRAJ52)
CAMSRTNAGGTSYGKLTF

SEQ ID NO: 699632 - protein, 13 aa, Homo sapiens
  CDR3 for beta chain variable domain of TCR clone 349816 (TRBV7-9, TRBJ1-2)
CASSLKQNYGDTF

SEQ ID NO: 699633 - protein, 11 aa, Homo sapiens
  CDR3 for alpha chain variable domain of TCR clone 349817 (TRAV2, TRAJ21)
CAVFNFNKFYF

SEQ ID NO: 699634 - protein, 12 aa, Homo sapiens
  CDR3 for beta chain variable domain of TCR clone 349817 (TRBV2, TRBJ2-1)
CAYGPPGNEQFF

SEQ ID NO: 699635 - protein, 15 aa, Homo sapiens
  CDR3 for alpha chain variable domain of TCR clone 349818 (TRAV23/DV6, TRAJ18)
CAASFRGSTLGRLYF

SEQ ID NO: 699636 - protein, 13 aa, Homo sapiens
  CDR3 for beta chain variable domain of TCR clone 349818 (TRBV9, TRBJ2-1)
CASSPSGGNEQFF

SEQ ID NO: 699637 - protein, 12 aa, Homo sapiens
  CDR3 for alpha chain variable domain of TCR clone 349819 (TRAV17, TRAJ30)
CATDARDDKIIF

SEQ ID NO: 699638 - protein, 16 aa, Homo sapiens
  CDR3 for beta chain variable domain of TCR clone 349819 (TRBV5-7, TRBJ2-7)
CASSPTSGRELEQQYF

SEQ ID NO: 699639 - protein, 14 aa, Homo sapiens
  CDR3 for alpha chain variable domain of TCR clone 349820 (TRAV1-2, TRAJ16)
CAVNRFSDGQKLLF

SEQ ID NO: 699640 - protein, 13 aa, Homo sapiens
  CDR3 for beta chain variable domain of TCR clone 349820 (TRBV10-2, TRBJ2-7)
CASGASGGCEQYF

SEQ ID NO: 699641 - protein, 14 aa, Homo sapiens
  CDR3 for alpha chain variable domain of TCR clone 349821 (TRAV12-1, TRAJ34)
CVVNLDYNTDKLIF

SEQ ID NO: 699642 - protein, 15 aa, Homo sapiens
  CDR3 for beta chain variable domain of TCR clone 349821 (TRBV7-2, TRBJ2-1)
CASSSGLAGGNEQFF

SEQ ID NO: 699643 - protein, 14 aa, Homo sapiens
  CDR3 for alpha chain variable domain of TCR clone 349822 (TRAV1-2, TRAJ16)
CVVNRFSDGQKLLF

SEQ ID NO: 699644 - protein, 16 aa, Homo sapiens
  CDR3 for beta chain variable domain of TCR clone 349822 (TRBV18, TRBJ1-3)
CASSLGILNGENTIYF

SEQ ID NO: 699645 - protein, 14 aa, Homo sapiens
  CDR3 for alpha chain variable domain of TCR clone 349823 (TRAV12-2, TRAJ44)
FAVNPAGTASKLTF

SEQ ID NO: 699646 - protein, 15 aa, Homo sapiens
  CDR3 for beta chain variable domain of TCR clone 349823 (TRBV28, TRBJ2-7)
CASSVRQVSSYEQYF

SEQ ID NO: 699647 - protein, 14 aa, Homo sapiens
  CDR3 for alpha chain variable domain of TCR clone 349824 (TRAV1-2, TRAJ8)
CAVREDTGFQKLVF

SEQ ID NO: 699648 - protein, 11 aa, Homo sapiens
  CDR3 for beta chain variable domain of TCR clone 349824 (TRBV7-8, TRBJ2-7)
CASSLSLEHYF

SEQ ID NO: 699649 - protein, 16 aa, Homo sapiens
  CDR3 for alpha chain variable domain of TCR clone 349825 (TRAV12-3, TRAJ53)
CAMSPGSGGSNYKLTF

SEQ ID NO: 699650 - protein, 12 aa, Homo sapiens
  CDR3 for beta chain variable domain of TCR clone 349825 (TRBV28, TRBJ2-6)
CAIQAGANVLTF

SEQ ID NO: 699651 - protein, 15 aa, Homo sapiens
  CDR3 for alpha chain variable domain of TCR clone 349826 (TRAV12-3, TRAJ27)
CAMSRLNTNACKSTF

SEQ ID NO: 699652 - protein, 16 aa, Homo sapiens
  CDR3 for beta chain variable domain of TCR clone 349826 (TRBV20-1, TRBJ1-4)
CSAPGQGLLTNEKLFF

SEQ ID NO: 699653 - protein, 16 aa, Homo sapiens
  CDR3 for alpha chain variable domain of TCR clone 349827 (TRAV16, TRAJ4)
CALSRMFSGGYNKLIF

SEQ ID NO: 699654 - protein, 14 aa, Homo sapiens
  CDR3 for beta chain variable domain of TCR clone 349827 (TRBV4-1, TRBJ2-2)
CASSQAVNTGEMFF

SEQ ID NO: 699655 - protein, 14 aa, Homo sapiens
  CDR3 for alpha chain variable domain of TCR clone 349828 (TRAV26-1, TRAJ5)
CIVRVRLNRRALTF

SEQ ID NO: 699656 - protein, 17 aa, Homo sapiens
  CDR3 for beta chain variable domain of TCR clone 349828 (TRBV29-1, TRBJ2-3)
CSVEVLAGETSTDTQYF

SEQ ID NO: 699657 - protein, 16 aa, Homo sapiens
  CDR3 for alpha chain variable domain of TCR clone 349829 (TRAV16, TRAJ4)
CALSRMFSGGYNKLIF

SEQ ID NO: 699658 - protein, 17 aa, Homo sapiens
  CDR3 for beta chain variable domain of TCR clone 349829 (TRBV3-1, TRBJ2-5)
CASSNWGGTSGQETQYF

SEQ ID NO: 699659 - protein, 17 aa, Homo sapiens
  CDR3 for alpha chain variable domain of TCR clone 349830 (TRAV3, TRAJ6)
CAVRDGPRAGGSYTPTF

SEQ ID NO: 699660 - protein, 15 aa, Homo sapiens
  CDR3 for beta chain variable domain of TCR clone 349830 (TRBV25-1, TRBJ1-4)
CASSPGDSTNEKLFF

SEQ ID NO: 699661 - protein, 13 aa, Homo sapiens
  CDR3 for alpha chain variable domain of TCR clone 349831 (TRAV13-2, TRAJ13)
CAERPGGYQKVTF

SEQ ID NO: 699662 - protein, 15 aa, Homo sapiens
  CDR3 for beta chain variable domain of TCR clone 349831 (TRBV11-3, TRBJ2-7)
CASSAGPASSYEQYF

SEQ ID NO: 699663 - protein, 12 aa, Homo sapiens
  CDR3 for alpha chain variable domain of TCR clone 349832 (TRAV21, TRAJ33)
CAKMDSNYQLNW

SEQ ID NO: 699664 - protein, 14 aa, Homo sapiens
  CDR3 for beta chain variable domain of TCR clone 349832 (TRBV2, TRBJ2-7)
CASSLTSGGYEQYF

SEQ ID NO: 699665 - protein, 16 aa, Homo sapiens
  CDR3 for alpha chain variable domain of TCR clone 349833 (TRAV20, TRAJ22)
CAVQASSSGSARQLTF

SEQ ID NO: 699666 - protein, 13 aa, Homo sapiens
  CDR3 for beta chain variable domain of TCR clone 349833 (TRBV20-1, TRBJ2-1)
CSASTGTSNEQFF

SEQ ID NO: 699667 - protein, 10 aa, Homo sapiens
  CDR3 for alpha chain variable domain of TCR clone 349834 (TRAV12-2, TRAJ49)
CAVRRNQFYF

SEQ ID NO: 699668 - protein, 14 aa, Homo sapiens
  CDR3 for beta chain variable domain of TCR clone 349834 (TRBV10-2, TRBJ1-5)
CASSSTGRNQPQHF

SEQ ID NO: 699669 - protein, 14 aa, Homo sapiens
  CDR3 for alpha chain variable domain of TCR clone 349835 (TRAV35, TRAJ22)
CAGLRPGSAWQLTF

SEQ ID NO: 699670 - protein, 13 aa, Homo sapiens
  CDR3 for beta chain variable domain of TCR clone 349835 (TRBV20-1, TRBJ1-1)
CSARGGGNTEAFF

SEQ ID NO: 699671 - protein, 18 aa, Homo sapiens
  CDR3 for alpha chain variable domain of TCR clone 349836 (TRAV26-1, TRAJ23)
CIVRVGLEVWNQGGKLIF

SEQ ID NO: 699672 - protein, 13 aa, Homo sapiens
  CDR3 for beta chain variable domain of TCR clone 349836 (TRBV18, TRBJ1-1)
CASSPETKPEAFF

SEQ ID NO: 699673 - protein, 15 aa, Homo sapiens
  CDR3 for alpha chain variable domain of TCR clone 349837 (TRAV12-3, TRAJ6)
CAMSATTGGSYIPTF

SEQ ID NO: 699674 - protein, 19 aa, Homo sapiens
  CDR3 for beta chain variable domain of TCR clone 349837 (TRBV25-1, TRBJ2-2)
CAILVYRVDRGRKTGGLFF

SEQ ID NO: 699675 - protein, 19 aa, Homo sapiens
  CDR3 for alpha chain variable domain of TCR clone 349838 (TRAV26-1, TRAJ22)
CIVSLNFFWFCNATDPLIW

SEQ ID NO: 699676 - protein, 15 aa, Homo sapiens
  CDR3 for beta chain variable domain of TCR clone 349838 (TRBV4-2, TRBJ1-2)
CASSQRTGGRDGYTF

SEQ ID NO: 699677 - protein, 15 aa, Homo sapiens
  CDR3 for alpha chain variable domain of TCR clone 349839 (TRAV25, TRAJ53)
CPTSNSGGSNYKLTF

SEQ ID NO: 699678 - protein, 14 aa, Homo sapiens
  CDR3 for beta chain variable domain of TCR clone 349839 (TRBV10-3, TRBJ1-2)
CAISAGGRVDGYTF

SEQ ID NO: 699679 - protein, 15 aa, Homo sapiens
  CDR3 for alpha chain variable domain of TCR clone 349840 (TRAV8-1, TRAJ6)
CAGNTPPGGSYIPTF

SEQ ID NO: 699680 - protein, 14 aa, Homo sapiens
  CDR3 for beta chain variable domain of TCR clone 349840 (TRBV12-4, TRBJ2-1)
CASSLGQGASEQFF

SEQ ID NO: 699681 - protein, 12 aa, Homo sapiens
  CDR3 for alpha chain variable domain of TCR clone 349841 (TRAV8-3, TRAJ43)
CAVGAGNNDMRF

SEQ ID NO: 699682 - protein, 14 aa, Homo sapiens
  CDR3 for beta chain variable domain of TCR clone 349841 (TRBV4-2, TRBJ1-5)
CASSRDMGNQPQHF

SEQ ID NO: 699683 - protein, 13 aa, Homo sapiens
  CDR3 for alpha chain variable domain of TCR clone 349842 (TRAV17, TRAJ9)
CATDYTGGFKTIF

SEQ ID NO: 699684 - protein, 15 aa, Homo sapiens
  CDR3 for beta chain variable domain of TCR clone 349842 (TRBV11-2, TRBJ2-3)
CASSGRDGLTDTQYF

SEQ ID NO: 699685 - protein, 14 aa, Homo sapiens
  CDR3 for alpha chain variable domain of TCR clone 349843 (TRAV3, TRAJ40)
CAVRDRRGTYTYIF

SEQ ID NO: 699686 - protein, 15 aa, Homo sapiens
  CDR3 for beta chain variable domain of TCR clone 349843 (TRBV11-1, TRBJ1-3)
CASTDPRAFGNTIYF

SEQ ID NO: 699687 - protein, 15 aa, Homo sapiens
  CDR3 for alpha chain variable domain of TCR clone 349844 (TRAV8-3, TRAJ20)
CAVEAKGSNDYKLSF

SEQ ID NO: 699688 - protein, 12 aa, Homo sapiens
  CDR3 for beta chain variable domain of TCR clone 349844 (TRBV11-2, TRBJ2-2)
CASSLGGGELFF

SEQ ID NO: 699689 - protein, 16 aa, Homo sapiens
  CDR3 for alpha chain variable domain of TCR clone 349845 (TRAV26-1, TRAJ23)
CIVRVERYNQGGKRIF

SEQ ID NO: 699690 - protein, 16 aa, Homo sapiens
  CDR3 for beta chain variable domain of TCR clone 349845 (TRBV9, TRBJ1-2)
CASSVDKGGGNYGYTF

SEQ ID NO: 699691 - protein, 10 aa, Homo sapiens
  CDR3 for alpha chain variable domain of TCR clone 349846 (TRAV23/DV6, TRAJ57)
CAASSTLSQG

SEQ ID NO: 699692 - protein, 14 aa, Homo sapiens
  CDR3 for beta chain variable domain of TCR clone 349846 (TRBV20-1, TRBJ2-7)
CSAKRGRTSYEQYF

SEQ ID NO: 699693 - protein, 12 aa, Homo sapiens
  CDR3 for alpha chain variable domain of TCR clone 349847 (TRAV16, TRAJ9)
CALRAGGFKPIF

SEQ ID NO: 699694 - protein, 13 aa, Homo sapiens
  CDR3 for beta chain variable domain of TCR clone 349847 (TRBV4-3, TRBJ1-1)
CASSQVEGSMAFF

SEQ ID NO: 699695 - protein, 12 aa, Homo sapiens
  CDR3 for alpha chain variable domain of TCR clone 349848 (TRAV17, TRAJ20)
CATLANDYTLSF

SEQ ID NO: 699696 - protein, 14 aa, Homo sapiens
  CDR3 for beta chain variable domain of TCR clone 349848 (TRBV10-3, TRBJ1-2)
CAISEDAPYYGYTF

SEQ ID NO: 699697 - protein, 14 aa, Homo sapiens
  CDR3 for alpha chain variable domain of TCR clone 349849 (TRAV8-3, TRAJ39)
CAVGANNAGNMFTF

SEQ ID NO: 699698 - protein, 12 aa, Homo sapiens
  CDR3 for beta chain variable domain of TCR clone 349849 (TRBV11-3, TRBJ1-1)
CDSSHRQGEAFF

SEQ ID NO: 699699 - protein, 13 aa, Homo sapiens
  CDR3 for alpha chain variable domain of TCR clone 349850 (TRAV20, TRAJ37)
CAGCSSNTDKLIF

SEQ ID NO: 699700 - protein, 14 aa, Homo sapiens
  CDR3 for beta chain variable domain of TCR clone 349850 (TRBV7-6, TRBJ2-3)
CASSLGTVTDTQYF

SEQ ID NO: 699701 - protein, 16 aa, Homo sapiens
  CDR3 for alpha chain variable domain of TCR clone 349851 (TRAV30, TRAJ24)
CGTEIVDADSWGKFKF

SEQ ID NO: 699702 - protein, 15 aa, Homo sapiens
  CDR3 for beta chain variable domain of TCR clone 349851 (TRBV6-4, TRBJ2-1)
CASSDSTGGYNEQFF

SEQ ID NO: 699703 - protein, 14 aa, Homo sapiens
  CDR3 for alpha chain variable domain of TCR clone 349852 (TRAV12-1, TRAJ17)
CVVNYKAAGNKLTF

SEQ ID NO: 699704 - protein, 14 aa, Homo sapiens
  CDR3 for beta chain variable domain of TCR clone 349852 (TRBV18, TRBJ2-1)
CQLTTECLHNEQFF

SEQ ID NO: 699705 - protein, 14 aa, Homo sapiens
  CDR3 for alpha chain variable domain of TCR clone 349853 (TRAV17, TRAJ54)
CATDANQGAQKLVF

SEQ ID NO: 699706 - protein, 16 aa, Homo sapiens
  CDR3 for beta chain variable domain of TCR clone 349853 (TRBV5-1, TRBJ1-1)
CASSSGGNSLNTEAFF

SEQ ID NO: 699707 - protein, 11 aa, Homo sapiens
  CDR3 for alpha chain variable domain of TCR clone 349854 (TRAV12-3, TRAJ43)
CAMSVSNDMRF

SEQ ID NO: 699708 - protein, 13 aa, Homo sapiens
  CDR3 for beta chain variable domain of TCR clone 349854 (TRBV20-1, TRBJ1-1)
CSAPLGGGTEGFF

SEQ ID NO: 699709 - protein, 16 aa, Homo sapiens
  CDR3 for alpha chain variable domain of TCR clone 349855 (TRAV30, TRAJ24)
CGTEIVDADSWGKFQF

SEQ ID NO: 699710 - protein, 13 aa, Homo sapiens
  CDR3 for beta chain variable domain of TCR clone 349855 (TRBV20-1, TRBJ1-1)
CSAPPGGNTEAFF

SEQ ID NO: 699711 - protein, 11 aa, Homo sapiens
  CDR3 for alpha chain variable domain of TCR clone 349856 (TRAV2, TRAJ13)
CASVGYQKVTF

SEQ ID NO: 699712 - protein, 16 aa, Homo sapiens
  CDR3 for beta chain variable domain of TCR clone 349856 (TRBV19, TRBJ1-1)
CASSPTRFWPGTEAFF

SEQ ID NO: 699713 - protein, 13 aa, Homo sapiens
  CDR3 for alpha chain variable domain of TCR clone 349857 (TRAV17, TRAJ34)
CATDLYNTDKLIF

SEQ ID NO: 699714 - protein, 14 aa, Homo sapiens
  CDR3 for beta chain variable domain of TCR clone 349857 (TRBV20-1, TRBJ1-1)
CSAQTRIGGTEAFF

SEQ ID NO: 699715 - protein, 15 aa, Homo sapiens
  CDR3 for alpha chain variable domain of TCR clone 349858 (TRAV26-2, TRAJ45)
CILRARVDQEEVLTD

SEQ ID NO: 699716 - protein, 15 aa, Homo sapiens
  CDR3 for beta chain variable domain of TCR clone 349858 (TRBV7-6, TRBJ2-5)
CASSKPTGPQETQYF

SEQ ID NO: 699717 - protein, 17 aa, Homo sapiens
  CDR3 for alpha chain variable domain of TCR clone 349859 (TRAV3, TRAJ42)
CAVRDRDYGGSQGNLLF

SEQ ID NO: 699718 - protein, 13 aa, Homo sapiens
  CDR3 for beta chain variable domain of TCR clone 349859 (TRBV20-1, TRBJ2-5)
CSARRGTGATQYF

SEQ ID NO: 699719 - protein, 14 aa, Homo sapiens
  CDR3 for alpha chain variable domain of TCR clone 349860 (TRAV1-2, TRAJ8)
CAVSEDTGFQKLVF

SEQ ID NO: 699720 - protein, 17 aa, Homo sapiens
  CDR3 for beta chain variable domain of TCR clone 349860 (TRBV7-8, TRBJ2-6)
CASSAGTGGAGANVLTF

SEQ ID NO: 699721 - protein, 13 aa, Homo sapiens
  CDR3 for alpha chain variable domain of TCR clone 349861 (TRAV12-1, TRAJ34)
CVVTGYNTDKLIF

SEQ ID NO: 699722 - protein, 17 aa, Homo sapiens
  CDR3 for beta chain variable domain of TCR clone 349861 (TRBV28, TRBJ2-5)
CASSTPEGDALQETQYF

SEQ ID NO: 699723 - protein, 14 aa, Homo sapiens
  CDR3 for alpha chain variable domain of TCR clone 349862 (TRAV12-3, TRAJ10)
SHLPLTGGGNKLTF

SEQ ID NO: 699724 - protein, 14 aa, Homo sapiens
  CDR3 for beta chain variable domain of TCR clone 349862 (TRBV5-1, TRBJ2-3)
CASSDRGSTDTQYF

SEQ ID NO: 699725 - protein, 19 aa, Homo sapiens
  CDR3 for alpha chain variable domain of TCR clone 349863 (TRAV29/DV5, TRAJ49)
CSVLLCSKLTVDTANQFYF

SEQ ID NO: 699726 - protein, 15 aa, Homo sapiens
  CDR3 for beta chain variable domain of TCR clone 349863 (TRBV4-3, TRBJ2-2)
CASSQGGTPTGELFF

SEQ ID NO: 699727 - protein, 12 aa, Homo sapiens
  CDR3 for alpha chain variable domain of TCR clone 349864 (TRAV12-1, TRAJ6)
CVVSERSYILTF

SEQ ID NO: 699728 - protein, 13 aa, Homo sapiens
  CDR3 for beta chain variable domain of TCR clone 349864 (TRBV14, TRBJ1-2)
CASSQQGYYGYTF

SEQ ID NO: 699729 - protein, 13 aa, Homo sapiens
  CDR3 for alpha chain variable domain of TCR clone 349865 (TRAV26-2, TRAJ37)
FIRGSSNTGKLIF

SEQ ID NO: 699730 - protein, 15 aa, Homo sapiens
  CDR3 for beta chain variable domain of TCR clone 349865 (TRBV7-9, TRBJ1-4)
CASSRTGGFNEKLFF

SEQ ID NO: 699731 - protein, 13 aa, Homo sapiens
  CDR3 for alpha chain variable domain of TCR clone 349866 (TRAV17, TRAJ9)
CATDYTGGFKTIF

SEQ ID NO: 699732 - protein, 15 aa, Homo sapiens
  CDR3 for beta chain variable domain of TCR clone 349866 (TRBV19, TRBJ2-1)
CASSISSGGYNEQFF

SEQ ID NO: 699733 - protein, 15 aa, Homo sapiens
  CDR3 for alpha chain variable domain of TCR clone 349867 (TRAV12-2, TRAJ53)
CAVNGGGGSNYKLTF

SEQ ID NO: 699734 - protein, 14 aa, Homo sapiens
  CDR3 for beta chain variable domain of TCR clone 349867 (TRBV11-2, TRBJ2-5)
CASSRTGGIGTQYF

SEQ ID NO: 699735 - protein, 13 aa, Homo sapiens
  CDR3 for alpha chain variable domain of TCR clone 349868 (TRAV3, TRAJ21)
CAVREPDFNKFYF

SEQ ID NO: 699736 - protein, 13 aa, Homo sapiens
  CDR3 for beta chain variable domain of TCR clone 349868 (TRBV20-1, TRBJ1-1)
CSAKGGGNTEAFF

SEQ ID NO: 699737 - protein, 17 aa, Homo sapiens
  CDR3 for alpha chain variable domain of TCR clone 349869 (TRAV3, TRAJ38)
CAVRDCLNAGNNRKLIW

SEQ ID NO: 699738 - protein, 14 aa, Homo sapiens
  CDR3 for beta chain variable domain of TCR clone 349869 (TRBV5-5, TRBJ1-5)
CASSGLGVDQPQHF

SEQ ID NO: 699739 - protein, 13 aa, Homo sapiens
  CDR3 for alpha chain variable domain of TCR clone 349870 (TRAV20, TRAJ48)
CAVQGVGNEKLTF

SEQ ID NO: 699740 - protein, 10 aa, Homo sapiens
  CDR3 for beta chain variable domain of TCR clone 349870 (TRBV2, TRBJ2-2)
CASSQRGLGG

SEQ ID NO: 699741 - protein, 14 aa, Homo sapiens
  CDR3 for alpha chain variable domain of TCR clone 349871 (TRAV23/DV6, TRAJ45)
CAASWGGGADGLTF

SEQ ID NO: 699742 - protein, 14 aa, Homo sapiens
  CDR3 for beta chain variable domain of TCR clone 349871 (TRBV7-8, TRBJ1-2)
CASSPDSLSYGYTF

SEQ ID NO: 699743 - protein, 16 aa, Homo sapiens
  CDR3 for alpha chain variable domain of TCR clone 349872 (TRAV29/DV5, TRAJ44)
CAASALGTASNSPSGL

SEQ ID NO: 699744 - protein, 13 aa, Homo sapiens
  CDR3 for beta chain variable domain of TCR clone 349872 (TRBV29-1, TRBJ2-7)
CSVKRGGNYEQYF

SEQ ID NO: 699745 - protein, 12 aa, Homo sapiens
  CDR3 for alpha chain variable domain of TCR clone 349873 (TRAV1-1, TRAJ8)
CAGGTGFQKLVF

SEQ ID NO: 699746 - protein, 15 aa, Homo sapiens
  CDR3 for beta chain variable domain of TCR clone 349873 (TRBV20-1, TRBJ2-7)
CSARDRVSGMDEQYV

SEQ ID NO: 699747 - protein, 14 aa, Homo sapiens
  CDR3 for alpha chain variable domain of TCR clone 349874 (TRAV1-2, TRAJ16)
CAVNRFSDGQKLLF

SEQ ID NO: 699748 - protein, 16 aa, Homo sapiens
  CDR3 for beta chain variable domain of TCR clone 349874 (TRBV4-1, TRBJ2-7)
CASRPSGGGADNEQYF

SEQ ID NO: 699749 - protein, 14 aa, Homo sapiens
  CDR3 for alpha chain variable domain of TCR clone 349875 (TRAV1-2, TRAJ8)
CAVREDTGFQKLIF

SEQ ID NO: 699750 - protein, 14 aa, Homo sapiens
  CDR3 for beta chain variable domain of TCR clone 349875 (TRBV7-2, TRBJ2-7)
CASSPKTSFYEQYF

SEQ ID NO: 699751 - protein, 16 aa, Homo sapiens
  CDR3 for alpha chain variable domain of TCR clone 349876 (TRAV1-2, TRAJ6)
CAVRDQGTGGSYIPTS

SEQ ID NO: 699752 - protein, 13 aa, Homo sapiens
  CDR3 for beta chain variable domain of TCR clone 349876 (TRBV28, TRBJ2-7)
CASTPGLAGEQYF

SEQ ID NO: 699753 - protein, 13 aa, Homo sapiens
  CDR3 for alpha chain variable domain of TCR clone 349877 (TRAV30, TRAJ24)
CGTVTDSWGKLQF

SEQ ID NO: 699754 - protein, 15 aa, Homo sapiens
  CDR3 for beta chain variable domain of TCR clone 349877 (TRBV7-3, TRBJ2-7)
CASSLTGLGKYEQYF

SEQ ID NO: 699755 - protein, 12 aa, Homo sapiens
  CDR3 for alpha chain variable domain of TCR clone 349878 (TRAV16, TRAJ10)
CSRTGGGNKLTF

SEQ ID NO: 699756 - protein, 13 aa, Homo sapiens
  CDR3 for beta chain variable domain of TCR clone 349878 (TRBV28, TRBJ2-5)
CASSFAGGETQYF

SEQ ID NO: 699757 - protein, 15 aa, Homo sapiens
  CDR3 for alpha chain variable domain of TCR clone 349879 (TRAV12-2, TRAJ9)
CAVNGGYTGGFKTIF

SEQ ID NO: 699758 - protein, 20 aa, Homo sapiens
  CDR3 for beta chain variable domain of TCR clone 349879 (TRBV28, TRBJ2-1)
CASTPIGRSPGLAGGNEQLF

SEQ ID NO: 699759 - protein, 12 aa, Homo sapiens
  CDR3 for alpha chain variable domain of TCR clone 349880 (TRAV12-2, TRAJ10)
WGVTGGGNKLTF

SEQ ID NO: 699760 - protein, 12 aa, Homo sapiens
  CDR3 for beta chain variable domain of TCR clone 349880 (TRBV3-1, TRBJ2-2)
CASSLFPGELFF

SEQ ID NO: 699761 - protein, 17 aa, Homo sapiens
  CDR3 for alpha chain variable domain of TCR clone 349881 (TRAV13-1, TRAJ28)
GAASPPYSGAGSYQLTF

SEQ ID NO: 699762 - protein, 15 aa, Homo sapiens
  CDR3 for beta chain variable domain of TCR clone 349881 (TRBV6-3, TRBJ2-2)
CASSFLATLTGELFF

SEQ ID NO: 699763 - protein, 17 aa, Homo sapiens
  CDR3 for alpha chain variable domain of TCR clone 349882 (TRAV8-3, TRAJ48)
LGMMVSLVPVPKVNYSF

SEQ ID NO: 699764 - protein, 15 aa, Homo sapiens
  CDR3 for beta chain variable domain of TCR clone 349882 (TRBV11-2, TRBJ2-1)
CASSSPSTRYNEQFF

SEQ ID NO: 699765 - protein, 14 aa, Homo sapiens
  CDR3 for alpha chain variable domain of TCR clone 349883 (TRAV35, TRAJ22)
CAGLRPGSARQLTF

SEQ ID NO: 699766 - protein, 14 aa, Homo sapiens
  CDR3 for beta chain variable domain of TCR clone 349883 (TRBV4-1, TRBJ2-7)
CSSSPVAGGDEQYF

SEQ ID NO: 699767 - protein, 14 aa, Homo sapiens
  CDR3 for alpha chain variable domain of TCR clone 349884 (TRAV29/DV5, TRAJ36)
CAARRKTGANNLFF

SEQ ID NO: 699768 - protein, 14 aa, Homo sapiens
  CDR3 for beta chain variable domain of TCR clone 349884 (TRBV20-1, TRBJ2-7)
CSAKRGRSSYEQYF

SEQ ID NO: 699769 - protein, 13 aa, Homo sapiens
  CDR3 for alpha chain variable domain of TCR clone 349885 (TRAV12-2, TRAJ20)
CAVYPSNDYKLSF

SEQ ID NO: 699770 - protein, 14 aa, Homo sapiens
  CDR3 for beta chain variable domain of TCR clone 349885 (TRBV12-5, TRBJ2-5)
CASGSRAHQETQYF

SEQ ID NO: 699771 - protein, 16 aa, Homo sapiens
  CDR3 for alpha chain variable domain of TCR clone 349886 (TRAV30, TRAJ24)
CGTEIVGADSWGKFQS

SEQ ID NO: 699772 - protein, 15 aa, Homo sapiens
  CDR3 for beta chain variable domain of TCR clone 349886 (TRBV7-9, TRBJ1-4)
CASSARTGGNEKLFF

SEQ ID NO: 699773 - protein, 13 aa, Homo sapiens
  CDR3 for alpha chain variable domain of TCR clone 349887 (TRAV12-1, TRAJ29)
CVVNGPGNTPLVF

SEQ ID NO: 699774 - protein, 14 aa, Homo sapiens
  CDR3 for beta chain variable domain of TCR clone 349887 (TRBV2, TRBJ2-1)
CASRTGSSYNEQFF

SEQ ID NO: 699775 - protein, 14 aa, Homo sapiens
  CDR3 for alpha chain variable domain of TCR clone 349888 (TRAV12-1, TRAJ38)
CVLHNAGNNRKLIW

SEQ ID NO: 699776 - protein, 13 aa, Homo sapiens
  CDR3 for beta chain variable domain of TCR clone 349888 (TRBV19, TRBJ2-1)
CATSRGVYNEQFF

SEQ ID NO: 699777 - protein, 15 aa, Homo sapiens
  CDR3 for alpha chain variable domain of TCR clone 349889 (TRAV2, TRAJ15)
CAVEDREQAGTALNF

SEQ ID NO: 699778 - protein, 13 aa, Homo sapiens
  CDR3 for beta chain variable domain of TCR clone 349889 (TRBV10-2, TRBJ2-3)
CASSESGDHTQYF

SEQ ID NO: 699779 - protein, 10 aa, Homo sapiens
  CDR3 for alpha chain variable domain of TCR clone 349890 (TRAV27, TRAJ43)
CAGANNDMRF

SEQ ID NO: 699780 - protein, 14 aa, Homo sapiens
  CDR3 for beta chain variable domain of TCR clone 349890 (TRBV7-3, TRBJ1-1)
CASSLKGGNTEAFF

SEQ ID NO: 699781 - protein, 15 aa, Homo sapiens
  CDR3 for alpha chain variable domain of TCR clone 349891 (TRAV21, TRAJ24)
CAARPSTDSWGKLPF

SEQ ID NO: 699782 - protein, 13 aa, Homo sapiens
  CDR3 for beta chain variable domain of TCR clone 349891 (TRBV11-2, TRBJ2-5)
CASSSTGEETQYF

SEQ ID NO: 699783 - protein, 11 aa, Homo sapiens
  CDR3 for alpha chain variable domain of TCR clone 349892 (TRAV21, TRAJ11)
CAVNGYSTLTF

SEQ ID NO: 699784 - protein, 15 aa, Homo sapiens
  CDR3 for beta chain variable domain of TCR clone 349892 (TRBV10-3, TRBJ2-1)
CAIRNGTSGHNEQFF

SEQ ID NO: 699785 - protein, 15 aa, Homo sapiens
  CDR3 for alpha chain variable domain of TCR clone 349893 (TRAV26-1, TRAJ29)
CIVRVEGSGNTPLVF

SEQ ID NO: 699786 - protein, 14 aa, Homo sapiens
  CDR3 for beta chain variable domain of TCR clone 349893 (TRBV28, TRBJ2-1)
CASSLNGRNNEQFF

SEQ ID NO: 699787 - protein, 11 aa, Homo sapiens
  CDR3 for alpha chain variable domain of TCR clone 349894 (TRAV16, TRAJ20)
CALSEGCKAAL

SEQ ID NO: 699788 - protein, 13 aa, Homo sapiens
  CDR3 for beta chain variable domain of TCR clone 349894 (TRBV7-3, TRBJ2-1)
CASSLDSYNEQFF

SEQ ID NO: 699789 - protein, 15 aa, Homo sapiens
  CDR3 for alpha chain variable domain of TCR clone 349895 (TRAV17, TRAJ57)
CATGPSQGGSEKLVF

SEQ ID NO: 699790 - protein, 16 aa, Homo sapiens
  CDR3 for beta chain variable domain of TCR clone 349895 (TRBV12-4, TRBJ1-5)
CASSRPVGGSIQPQHF

SEQ ID NO: 699791 - protein, 12 aa, Homo sapiens
  CDR3 for alpha chain variable domain of TCR clone 349896 (TRAV12-2, TRAJ42)
CAVGGSQGNLIF

SEQ ID NO: 699792 - protein, 13 aa, Homo sapiens
  CDR3 for beta chain variable domain of TCR clone 349896 (TRBV2, TRBJ1-1)
CASRWTVNTEAFF

SEQ ID NO: 699793 - protein, 15 aa, Homo sapiens
  CDR3 for alpha chain variable domain of TCR clone 349897 (TRAV8-3, TRAJ23)
CSVGDRYNQGGKLIF

SEQ ID NO: 699794 - protein, 17 aa, Homo sapiens
  CDR3 for beta chain variable domain of TCR clone 349897 (TRBV4-1, TRBJ1-4)
CASSQEGPRGVEEKLFF

SEQ ID NO: 699795 - protein, 13 aa, Homo sapiens
  CDR3 for alpha chain variable domain of TCR clone 349898 (TRAV12-2, TRAJ10)
CAVPTGGGNKLTF

SEQ ID NO: 699796 - protein, 18 aa, Homo sapiens
  CDR3 for beta chain variable domain of TCR clone 349898 (TRBV25-1, TRBJ2-2)
CHPSLPGGQGAQNRGAVF

SEQ ID NO: 699797 - protein, 16 aa, Homo sapiens
  CDR3 for alpha chain variable domain of TCR clone 349899 (TRAV30, TRAJ24)
CGTEFVDADSGGKFQF

SEQ ID NO: 699798 - protein, 14 aa, Homo sapiens
  CDR3 for beta chain variable domain of TCR clone 349899 (TRBV12-5, TRBJ2-5)
CASGSRTHQETQYF

SEQ ID NO: 699799 - protein, 14 aa, Homo sapiens
  CDR3 for alpha chain variable domain of TCR clone 349900 (TRAV35, TRAJ22)
CAGLRPGSARQLTF

SEQ ID NO: 699800 - protein, 16 aa, Homo sapiens
  CDR3 for beta chain variable domain of TCR clone 349900 (TRBV7-2, TRBJ2-7)
CASSLVMGVGSYEQYF

SEQ ID NO: 699801 - protein, 14 aa, Homo sapiens
  CDR3 for alpha chain variable domain of TCR clone 349901 (TRAV24, TRAJ42)
CAQNYGGSQGNLIF

SEQ ID NO: 699802 - protein, 15 aa, Homo sapiens
  CDR3 for beta chain variable domain of TCR clone 349901 (TRBV19, TRBJ1-5)
CASSITGGAGQPQHF

SEQ ID NO: 699803 - protein, 15 aa, Homo sapiens
  CDR3 for alpha chain variable domain of TCR clone 349902 (TRAV8-4, TRAJ3)
CAVTGENLVQQGFQD

SEQ ID NO: 699804 - protein, 15 aa, Homo sapiens
  CDR3 for beta chain variable domain of TCR clone 349902 (TRBV6-3, TRBJ2-7)
CASSSPGTVFYEQYF

SEQ ID NO: 699805 - protein, 17 aa, Homo sapiens
  CDR3 for alpha chain variable domain of TCR clone 349903 (TRAV17, TRAJ52)
CATDANAGGTSYGKLTF

SEQ ID NO: 699806 - protein, 13 aa, Homo sapiens
  CDR3 for beta chain variable domain of TCR clone 349903 (TRBV15, TRBJ1-2)
CATSREEGDGYTF

SEQ ID NO: 699807 - protein, 13 aa, Homo sapiens
  CDR3 for alpha chain variable domain of TCR clone 349904 (TRAV35, TRAJ37)
CAGSSGNTGKLIF

SEQ ID NO: 699808 - protein, 16 aa, Homo sapiens
  CDR3 for beta chain variable domain of TCR clone 349904 (TRBV10-3, TRBJ2-1)
CAISLTSGHSYNEQFF

SEQ ID NO: 699809 - protein, 17 aa, Homo sapiens
  CDR3 for alpha chain variable domain of TCR clone 349905 (TRAV3, TRAJ42)
FAVRDREYGGSQGNLIF

SEQ ID NO: 699810 - protein, 14 aa, Homo sapiens
  CDR3 for beta chain variable domain of TCR clone 349905 (TRBV19, TRBJ2-1)
CASKDPSSYNEQFF

SEQ ID NO: 699811 - protein, 10 aa, Homo sapiens
  CDR3 for alpha chain variable domain of TCR clone 349906 (TRAV1-2, TRAJ31)
CVSEDARLMF

SEQ ID NO: 699812 - protein, 15 aa, Homo sapiens
  CDR3 for beta chain variable domain of TCR clone 349906 (TRBV19, TRBJ1-1)
CASTSGQIQNTEAFF

SEQ ID NO: 699813 - protein, 15 aa, Homo sapiens
  CDR3 for alpha chain variable domain of TCR clone 349907 (TRAV12-2, TRAJ43)
CAFDMRFGAGTRLIV

SEQ ID NO: 699814 - protein, 18 aa, Homo sapiens
  CDR3 for beta chain variable domain of TCR clone 349907 (TRBV20-1, TRBJ2-3)
CCASGLAGGPGTTDTQYF

SEQ ID NO: 699815 - protein, 12 aa, Homo sapiens
  CDR3 for alpha chain variable domain of TCR clone 349908 (TRAV36/DV7, TRAJ54)
CAVVRGAQKLVF

SEQ ID NO: 699816 - protein, 16 aa, Homo sapiens
  CDR3 for beta chain variable domain of TCR clone 349908 (TRBV2, TRBJ2-7)
CASRKGSLGRVYEQYF

SEQ ID NO: 699817 - protein, 13 aa, Homo sapiens
  CDR3 for alpha chain variable domain of TCR clone 349909 (TRAV8-1, TRAJ34)
CAVNAGNTDKLII

SEQ ID NO: 699818 - protein, 13 aa, Homo sapiens
  CDR3 for beta chain variable domain of TCR clone 349909 (TRBV20-1, TRBJ2-1)
CSAGAGTYNEQFF

SEQ ID NO: 699819 - protein, 16 aa, Homo sapiens
  CDR3 for alpha chain variable domain of TCR clone 349910 (TRAV27, TRAJ13)
CAGATSDSGGYQKVTF

SEQ ID NO: 699820 - protein, 15 aa, Homo sapiens
  CDR3 for beta chain variable domain of TCR clone 349910 (TRBV29-1, TRBJ2-1)
CSVGRHALFYNEQLF

SEQ ID NO: 699821 - protein, 13 aa, Homo sapiens
  CDR3 for alpha chain variable domain of TCR clone 349911 (TRAV8-6, TRAJ50)
CAVIKTSYDKVIF

SEQ ID NO: 699822 - protein, 15 aa, Homo sapiens
  CDR3 for beta chain variable domain of TCR clone 349911 (TRBV11-3, TRBJ2-7)
CASSLGGGLNYEQYF

SEQ ID NO: 699823 - protein, 12 aa, Homo sapiens
  CDR3 for alpha chain variable domain of TCR clone 349912 (TRAV27, TRAJ34)
CAGAKNTDKLIF

SEQ ID NO: 699824 - protein, 13 aa, Homo sapiens
  CDR3 for beta chain variable domain of TCR clone 349912 (TRBV4-1, TRBJ2-1)
CASSQELQYEQFF

SEQ ID NO: 699825 - protein, 14 aa, Homo sapiens
  CDR3 for alpha chain variable domain of TCR clone 349913 (TRAV12-2, TRAJ13)
CAVKKTGGYQKVTF

SEQ ID NO: 699826 - protein, 14 aa, Homo sapiens
  CDR3 for beta chain variable domain of TCR clone 349913 (TRBV5-5, TRBJ2-7)
CASSVGQGTYEQYF

SEQ ID NO: 699827 - protein, 22 aa, Homo sapiens
  CDR3 for alpha chain variable domain of TCR clone 349914 (TRAV27, TRAJ41)
CAVRTQIPDIQNPDPAVYQLRD

SEQ ID NO: 699828 - protein, 16 aa, Homo sapiens
  CDR3 for beta chain variable domain of TCR clone 349914 (TRBV6-5, TRBJ2-1)
CASSETLAGHYNEQFF

SEQ ID NO: 699829 - protein, 18 aa, Homo sapiens
  CDR3 for alpha chain variable domain of TCR clone 349915 (TRAV12-3, TRAJ52)
CAMSVGGAGGTSYGKLTF

SEQ ID NO: 699830 - protein, 14 aa, Homo sapiens
  CDR3 for beta chain variable domain of TCR clone 349915 (TRBV7-9, TRBJ2-5)
CASSLDTAQETQYF

SEQ ID NO: 699831 - protein, 12 aa, Homo sapiens
  CDR3 for alpha chain variable domain of TCR clone 349916 (TRAV22, TRAJ43)
CAVELNNNDMRF

SEQ ID NO: 699832 - protein, 14 aa, Homo sapiens
  CDR3 for beta chain variable domain of TCR clone 349916 (TRBV7-2, TRBJ2-7)
CASRSQGAAYEQYF

SEQ ID NO: 699833 - protein, 14 aa, Homo sapiens
  CDR3 for alpha chain variable domain of TCR clone 349917 (TRAV3, TRAJ17)
CAVRDAAADNKLTF

SEQ ID NO: 699834 - protein, 16 aa, Homo sapiens
  CDR3 for beta chain variable domain of TCR clone 349917 (TRBV20-1, TRBJ1-2)
CSASMGQGVANYGYTF

SEQ ID NO: 699835 - protein, 15 aa, Homo sapiens
  CDR3 for alpha chain variable domain of TCR clone 349918 (TRAV2, TRAJ11)
CAVGGRNSGYSTLTF

SEQ ID NO: 699836 - protein, 12 aa, Homo sapiens
  CDR3 for beta chain variable domain of TCR clone 349918 (TRBV5-4, TRBJ2-7)
CASSLEAHEQYF

SEQ ID NO: 699837 - protein, 11 aa, Homo sapiens
  CDR3 for alpha chain variable domain of TCR clone 349919 (TRAV21, TRAJ31)
CAVRNNARLMF

SEQ ID NO: 699838 - protein, 12 aa, Homo sapiens
  CDR3 for beta chain variable domain of TCR clone 349919 (TRBV11-2, TRBJ2-2)
CASSLGGGELFF

SEQ ID NO: 699839 - protein, 15 aa, Homo sapiens
  CDR3 for alpha chain variable domain of TCR clone 349920 (TRAV27, TRAJ38)
CAARRNAGNNRKLIW

SEQ ID NO: 699840 - protein, 13 aa, Homo sapiens
  CDR3 for beta chain variable domain of TCR clone 349920 (TRBV7-3, TRBJ1-1)
CASSQDWGAEAFF

SEQ ID NO: 699841 - protein, 13 aa, Homo sapiens
  CDR3 for alpha chain variable domain of TCR clone 349921 (TRAV12-2, TRAJ4)
CAVFSGDYNKLIF

SEQ ID NO: 699842 - protein, 13 aa, Homo sapiens
  CDR3 for beta chain variable domain of TCR clone 349921 (TRBV19, TRBJ1-5)
CASSIDRDQPQHF

SEQ ID NO: 699843 - protein, 17 aa, Homo sapiens
  CDR3 for alpha chain variable domain of TCR clone 349922 (TRAV14/DV4, TRAJ12)
CAMRELPWMDSSYKLIF

SEQ ID NO: 699844 - protein, 12 aa, Homo sapiens
  CDR3 for beta chain variable domain of TCR clone 349922 (TRBV11-2, TRBJ2-2)
CASSLGGGELFF

SEQ ID NO: 699845 - protein, 13 aa, Homo sapiens
  CDR3 for alpha chain variable domain of TCR clone 349923 (TRAV35, TRAJ48)
CAGHEFGNARLTF

SEQ ID NO: 699846 - protein, 13 aa, Homo sapiens
  CDR3 for beta chain variable domain of TCR clone 349923 (TRBV7-2, TRBJ1-6)
CASSLVGSSPLHF

SEQ ID NO: 699847 - protein, 14 aa, Homo sapiens
  CDR3 for alpha chain variable domain of TCR clone 349924 (TRAV27, TRAJ36)
CAGPPKRGANNLFF

SEQ ID NO: 699848 - protein, 15 aa, Homo sapiens
  CDR3 for beta chain variable domain of TCR clone 349924 (TRBV20-1, TRBJ2-7)
CSARVPAAYFYEQYF

SEQ ID NO: 699849 - protein, 11 aa, Homo sapiens
  CDR3 for alpha chain variable domain of TCR clone 349925 (TRAV3, TRAJ21)
CAVGNFNKFYF

SEQ ID NO: 699850 - protein, 16 aa, Homo sapiens
  CDR3 for beta chain variable domain of TCR clone 349925 (TRBV7-3, TRBJ2-3)
CASSLSGYRPEDTQYF

SEQ ID NO: 699851 - protein, 11 aa, Homo sapiens
  CDR3 for alpha chain variable domain of TCR clone 349926 (TRAV13-1, TRAJ15)
CAATPGTALIF

SEQ ID NO: 699852 - protein, 15 aa, Homo sapiens
  CDR3 for beta chain variable domain of TCR clone 349926 (TRBV20-1, TRBJ1-1)
CSASRGVTGNTEAFF

SEQ ID NO: 699853 - protein, 11 aa, Homo sapiens
  CDR3 for alpha chain variable domain of TCR clone 349927 (TRAV2, TRAJ13)
CASGGYPKVTF

SEQ ID NO: 699854 - protein, 15 aa, Homo sapiens
  CDR3 for beta chain variable domain of TCR clone 349927 (TRBV6-1, TRBJ2-2)
CASSRLRGDTGELFF

SEQ ID NO: 699855 - protein, 11 aa, Homo sapiens
  CDR3 for alpha chain variable domain of TCR clone 349928 (TRAV2, TRAJ13)
CASGGYQKVTF

SEQ ID NO: 699856 - protein, 13 aa, Homo sapiens
  CDR3 for beta chain variable domain of TCR clone 349928 (TRBV10-3, TRBJ1-2)
CAISERASYGYTF

SEQ ID NO: 699857 - protein, 12 aa, Homo sapiens
  CDR3 for alpha chain variable domain of TCR clone 349929 (TRAV17, TRAJ30)
CATDAGDDKIIF

SEQ ID NO: 699858 - protein, 15 aa, Homo sapiens
  CDR3 for beta chain variable domain of TCR clone 349929 (TRBV4-1, TRBJ2-1)
CASSQGGELYNEQFF

SEQ ID NO: 699859 - protein, 14 aa, Homo sapiens
  CDR3 for alpha chain variable domain of TCR clone 349930 (TRAV12-1, TRAJ17)
CVVNYKAAGSKLTF

SEQ ID NO: 699860 - protein, 13 aa, Homo sapiens
  CDR3 for beta chain variable domain of TCR clone 349930 (TRBV7-3, TRBJ2-2)
CASSLWSVGELFF

SEQ ID NO: 699861 - protein, 13 aa, Homo sapiens
  CDR3 for alpha chain variable domain of TCR clone 349931 (TRAV5, TRAJ30)
CAEIANRDDKIIF

SEQ ID NO: 699862 - protein, 15 aa, Homo sapiens
  CDR3 for beta chain variable domain of TCR clone 349931 (TRBV7-2, TRBJ2-1)
CASSSGLAGGNEQFF

SEQ ID NO: 699863 - protein, 15 aa, Homo sapiens
  CDR3 for alpha chain variable domain of TCR clone 349932 (TRAV3, TRAJ5)
CAVRDLDTGRRALTF

SEQ ID NO: 699864 - protein, 17 aa, Homo sapiens
  CDR3 for beta chain variable domain of TCR clone 349932 (TRBV7-6, TRBJ2-1)
CIAVPAAWGGGADEQFF

SEQ ID NO: 699865 - protein, 11 aa, Homo sapiens
  CDR3 for alpha chain variable domain of TCR clone 349933 (TRAV2, TRAJ13)
CASGGYQKVTF

SEQ ID NO: 699866 - protein, 14 aa, Homo sapiens
  CDR3 for beta chain variable domain of TCR clone 349933 (TRBV27, TRBJ1-1)
CASSPQGKRADAFF

SEQ ID NO: 699867 - protein, 14 aa, Homo sapiens
  CDR3 for alpha chain variable domain of TCR clone 349934 (TRAV12-2, TRAJ9)
CAVNMEGGGFKTIL

SEQ ID NO: 699868 - protein, 14 aa, Homo sapiens
  CDR3 for beta chain variable domain of TCR clone 349934 (TRBV2, TRBJ2-5)
CASSEVLAQETQYF

SEQ ID NO: 699869 - protein, 12 aa, Homo sapiens
  CDR3 for alpha chain variable domain of TCR clone 349935 (TRAV12-1, TRAJ40)
CVVYSGTYKYSF

SEQ ID NO: 699870 - protein, 17 aa, Homo sapiens
  CDR3 for beta chain variable domain of TCR clone 349935 (TRBV11-3, TRBJ1-5)
CASSPLTGLRGNQPQHF

SEQ ID NO: 699871 - protein, 12 aa, Homo sapiens
  CDR3 for alpha chain variable domain of TCR clone 349936 (TRAV17, TRAJ20)
CATDGADYKLSF

SEQ ID NO: 699872 - protein, 14 aa, Homo sapiens
  CDR3 for beta chain variable domain of TCR clone 349936 (TRBV25-1, TRBJ1-1)
CASTHLGGNTEAFF

SEQ ID NO: 699873 - protein, 12 aa, Homo sapiens
  CDR3 for alpha chain variable domain of TCR clone 349937 (TRAV8-1, TRAJ26)
CAVNNYGQNFVF

SEQ ID NO: 699874 - protein, 12 aa, Homo sapiens
  CDR3 for beta chain variable domain of TCR clone 349937 (TRBV5-5, TRBJ2-5)
CASSYFGETQYL

SEQ ID NO: 699875 - protein, 13 aa, Homo sapiens
  CDR3 for alpha chain variable domain of TCR clone 349938 (TRAV17, TRAJ9)
CSTGSTGGFKTIF

SEQ ID NO: 699876 - protein, 14 aa, Homo sapiens
  CDR3 for beta chain variable domain of TCR clone 349938 (TRBV7-8, TRBJ2-7)
CASTFRGGPNEQYF

SEQ ID NO: 699877 - protein, 10 aa, Homo sapiens
  CDR3 for alpha chain variable domain of TCR clone 349939 (TRAV12-1, TRAJ37)
ARGNTGKLIF

SEQ ID NO: 699878 - protein, 15 aa, Homo sapiens
  CDR3 for beta chain variable domain of TCR clone 349939 (TRBV7-2, TRBJ2-3)
SASSLEQGGTDTQYF

SEQ ID NO: 699879 - protein, 11 aa, Homo sapiens
  CDR3 for alpha chain variable domain of TCR clone 349940 (TRAV25, TRAJ49)
CAGGSGNQFYF

SEQ ID NO: 699880 - protein, 12 aa, Homo sapiens
  CDR3 for beta chain variable domain of TCR clone 349940 (TRBV6-5, TRBJ2-1)
CASRNDRGQQFF

SEQ ID NO: 699881 - protein, 14 aa, Homo sapiens
  CDR3 for alpha chain variable domain of TCR clone 349941 (TRAV13-1, TRAJ13)
CAASRVGGYQKVTF

SEQ ID NO: 699882 - protein, 13 aa, Homo sapiens
  CDR3 for beta chain variable domain of TCR clone 349941 (TRBV7-2, TRBJ1-1)
CASNLKGAKVAFF

SEQ ID NO: 699883 - protein, 14 aa, Homo sapiens
  CDR3 for alpha chain variable domain of TCR clone 349942 (TRAV17, TRAJ39)
CATDPNNAGNMLTF

SEQ ID NO: 699884 - protein, 14 aa, Homo sapiens
  CDR3 for beta chain variable domain of TCR clone 349942 (TRBV7-7, TRBJ2-2)
CASSMGQNTGELFF

SEQ ID NO: 699885 - protein, 14 aa, Homo sapiens
  CDR3 for alpha chain variable domain of TCR clone 349943 (TRAV12-2, TRAJ44)
CAVNKAGTASKLTF

SEQ ID NO: 699886 - protein, 12 aa, Homo sapiens
  CDR3 for beta chain variable domain of TCR clone 349943 (TRBV19, TRBJ1-4)
CASEDWPRGLFF

SEQ ID NO: 699887 - protein, 14 aa, Homo sapiens
  CDR3 for alpha chain variable domain of TCR clone 349944 (TRAV20, TRAJ24)
CAVYNSWEIAVWSR

SEQ ID NO: 699888 - protein, 15 aa, Homo sapiens
  CDR3 for beta chain variable domain of TCR clone 349944 (TRBV20-1, TRBJ2-5)
CSARVPPSGRETQYF

SEQ ID NO: 699889 - protein, 16 aa, Homo sapiens
  CDR3 for alpha chain variable domain of TCR clone 349945 (TRAV16, TRAJ42)
CARMMNYGGSQGNLIF

SEQ ID NO: 699890 - protein, 13 aa, Homo sapiens
  CDR3 for beta chain variable domain of TCR clone 349945 (TRBV20-1, TRBJ2-7)
CSASPPSSYEQYF

SEQ ID NO: 699891 - protein, 13 aa, Homo sapiens
  CDR3 for alpha chain variable domain of TCR clone 349946 (TRAV20, TRAJ20)
CAVQALNDYKLSF

SEQ ID NO: 699892 - protein, 13 aa, Homo sapiens
  CDR3 for beta chain variable domain of TCR clone 349946 (TRBV7-9, TRBJ1-4)
CASSLQGIEKLFF

SEQ ID NO: 699893 - protein, 11 aa, Homo sapiens
  CDR3 for alpha chain variable domain of TCR clone 349947 (TRAV16, TRAJ33)
CALHSNYQLIW

SEQ ID NO: 699894 - protein, 17 aa, Homo sapiens
  CDR3 for beta chain variable domain of TCR clone 349947 (TRBV2, TRBJ1-4)
CASSKRELTQGEEKLFF

SEQ ID NO: 699895 - protein, 17 aa, Homo sapiens
  CDR3 for alpha chain variable domain of TCR clone 349948 (TRAV38-2/DV8, TRAJ23)
CALSRNLIFGQGTELSV

SEQ ID NO: 699896 - protein, 17 aa, Homo sapiens
  CDR3 for beta chain variable domain of TCR clone 349948 (TRBV5-4, TRBJ2-1)
CASSSAGGRGPYNEQFF

SEQ ID NO: 699897 - protein, 13 aa, Homo sapiens
  CDR3 for alpha chain variable domain of TCR clone 349949 (TRAV20, TRAJ49)
CAVQAGTGNQFYF

SEQ ID NO: 699898 - protein, 14 aa, Homo sapiens
  CDR3 for beta chain variable domain of TCR clone 349949 (TRBV5-1, TRBJ1-1)
CASSLQGASTEAFF

SEQ ID NO: 699899 - protein, 11 aa, Homo sapiens
  CDR3 for alpha chain variable domain of TCR clone 349950 (TRAV12-2, TRAJ54)
CAVEGAQKLVF

SEQ ID NO: 699900 - protein, 17 aa, Homo sapiens
  CDR3 for beta chain variable domain of TCR clone 349950 (TRBV18, TRBJ1-3)
CASSPYPTGPSGNTIYV

SEQ ID NO: 699901 - protein, 14 aa, Homo sapiens
  CDR3 for alpha chain variable domain of TCR clone 349951 (TRAV12-1, TRAJ17)
CVVNYKAAANKLTF

SEQ ID NO: 699902 - protein, 14 aa, Homo sapiens
  CDR3 for beta chain variable domain of TCR clone 349951 (TRBV7-8, TRBJ2-3)
CASSLEAGTDTQYF

SEQ ID NO: 699903 - protein, 17 aa, Homo sapiens
  CDR3 for alpha chain variable domain of TCR clone 349952 (TRAV3, TRAJ6)
CAVRDGPRAGGSDIPTF

SEQ ID NO: 699904 - protein, 14 aa, Homo sapiens
  CDR3 for beta chain variable domain of TCR clone 349952 (TRBV7-2, TRBJ2-7)
CASRSQGAAYEQYF

SEQ ID NO: 699905 - protein, 15 aa, Homo sapiens
  CDR3 for alpha chain variable domain of TCR clone 349953 (TRAV27, TRAJ37)
CAGIHGSSNTGKLIF

SEQ ID NO: 699906 - protein, 17 aa, Homo sapiens
  CDR3 for beta chain variable domain of TCR clone 349953 (TRBV7-2, TRBJ1-4)
CASSFKAGPTTNEKLFF

SEQ ID NO: 699907 - protein, 13 aa, Homo sapiens
  CDR3 for alpha chain variable domain of TCR clone 349954 (TRAV26-1, TRAJ48)
CIVRVVGDEKLTF

SEQ ID NO: 699908 - protein, 17 aa, Homo sapiens
  CDR3 for beta chain variable domain of TCR clone 349954 (TRBV7-3, TRBJ2-2)
CASSLSGTSGGTGELLF

SEQ ID NO: 699909 - protein, 13 aa, Homo sapiens
  CDR3 for alpha chain variable domain of TCR clone 349955 (TRAV29/DV5, TRAJ31)
CAASRNNNARIMF

SEQ ID NO: 699910 - protein, 12 aa, Homo sapiens
  CDR3 for beta chain variable domain of TCR clone 349955 (TRBV14, TRBJ2-5)
CASSHLKETQYF

SEQ ID NO: 699911 - protein, 13 aa, Homo sapiens
  CDR3 for alpha chain variable domain of TCR clone 349956 (TRAV2, TRAJ40)
CAVVTSGTYKYIF

SEQ ID NO: 699912 - protein, 14 aa, Homo sapiens
  CDR3 for beta chain variable domain of TCR clone 349956 (TRBV19, TRBJ2-1)
CASRTFVLGGEQFF

SEQ ID NO: 699913 - protein, 16 aa, Homo sapiens
  CDR3 for alpha chain variable domain of TCR clone 349957 (TRAV30, TRAJ24)
CGTEIVDADSWGTFQF

SEQ ID NO: 699914 - protein, 15 aa, Homo sapiens
  CDR3 for beta chain variable domain of TCR clone 349957 (TRBV12-4, TRBJ2-2)
CASSPNDSGTGELFF

SEQ ID NO: 699915 - protein, 12 aa, Homo sapiens
  CDR3 for alpha chain variable domain of TCR clone 349958 (TRAV13-2, TRAJ23)
CAERHRGGKLIF

SEQ ID NO: 699916 - protein, 15 aa, Homo sapiens
  CDR3 for beta chain variable domain of TCR clone 349958 (TRBV20-1, TRBJ2-7)
CIARDRVSGMDEQYF

SEQ ID NO: 699917 - protein, 13 aa, Homo sapiens
  CDR3 for alpha chain variable domain of TCR clone 349959 (TRAV13-2, TRAJ8)
CAFMNTGFQKLVF

SEQ ID NO: 699918 - protein, 17 aa, Homo sapiens
  CDR3 for beta chain variable domain of TCR clone 349959 (TRBV28, TRBJ2-1)
CASSSARQALTYNEKFF

SEQ ID NO: 699919 - protein, 14 aa, Homo sapiens
  CDR3 for alpha chain variable domain of TCR clone 349960 (TRAV2, TRAJ9)
CAVEDRSGGFKTIF

SEQ ID NO: 699920 - protein, 17 aa, Homo sapiens
  CDR3 for beta chain variable domain of TCR clone 349960 (TRBV24-1, TRBJ2-1)
CATSDVSTSGTYNEKFF

SEQ ID NO: 699921 - protein, 11 aa, Homo sapiens
  CDR3 for alpha chain variable domain of TCR clone 349961 (TRAV3, TRAJ31)
CAALPGARLMF

SEQ ID NO: 699922 - protein, 13 aa, Homo sapiens
  CDR3 for beta chain variable domain of TCR clone 349961 (TRBV12-4, TRBJ1-2)
CASSLRQGKGYTF

SEQ ID NO: 699923 - protein, 13 aa, Homo sapiens
  CDR3 for alpha chain variable domain of TCR clone 349962 (TRAV29/DV5, TRAJ31)
CAASRNNNARLMF

SEQ ID NO: 699924 - protein, 15 aa, Homo sapiens
  CDR3 for beta chain variable domain of TCR clone 349962 (TRBV19, TRBJ2-2)
CQPISRDRGHRELFF

SEQ ID NO: 699925 - protein, 15 aa, Homo sapiens
  CDR3 for alpha chain variable domain of TCR clone 349963 (TRAV2, TRAJ4)
CCEDRFSGGYNKLIF

SEQ ID NO: 699926 - protein, 13 aa, Homo sapiens
  CDR3 for beta chain variable domain of TCR clone 349963 (TRBV7-7, TRBJ2-5)
CASSRSGQETQYF

SEQ ID NO: 699927 - protein, 14 aa, Homo sapiens
  CDR3 for alpha chain variable domain of TCR clone 349964 (TRAV23/DV6, TRAJ8)
CAASKNTGFQKLVF

SEQ ID NO: 699928 - protein, 16 aa, Homo sapiens
  CDR3 for beta chain variable domain of TCR clone 349964 (TRBV4-1, TRBJ2-6)
CASSQVGDPGANVPTF

SEQ ID NO: 699929 - protein, 13 aa, Homo sapiens
  CDR3 for alpha chain variable domain of TCR clone 349965 (TRAV3, TRAJ21)
CAVREPDLKKFYF

SEQ ID NO: 699930 - protein, 13 aa, Homo sapiens
  CDR3 for beta chain variable domain of TCR clone 349965 (TRBV9, TRBJ2-1)
CASSPSGGNEQFF

SEQ ID NO: 699931 - protein, 12 aa, Homo sapiens
  CDR3 for alpha chain variable domain of TCR clone 349966 (TRAV30, TRAJ20)
CGTESNDYKLSF

SEQ ID NO: 699932 - protein, 15 aa, Homo sapiens
  CDR3 for beta chain variable domain of TCR clone 349966 (TRBV20-1, TRBJ2-7)
CSAGDRVSGMDEQYF

SEQ ID NO: 699933 - protein, 13 aa, Homo sapiens
  CDR3 for alpha chain variable domain of TCR clone 349967 (TRAV8-1, TRAJ23)
CAWRDNQGGKLIF

SEQ ID NO: 699934 - protein, 13 aa, Homo sapiens
  CDR3 for beta chain variable domain of TCR clone 349967 (TRBV7-6, TRBJ2-1)
CQQLGGGADEQFF

SEQ ID NO: 699935 - protein, 13 aa, Homo sapiens
  CDR3 for alpha chain variable domain of TCR clone 349968 (TRAV8-3, TRAJ34)
CAVGAYNTDKLIF

SEQ ID NO: 699936 - protein, 13 aa, Homo sapiens
  CDR3 for beta chain variable domain of TCR clone 349968 (TRBV28, TRBJ2-7)
CASSFGQVYEQYF

SEQ ID NO: 699937 - protein, 14 aa, Homo sapiens
  CDR3 for alpha chain variable domain of TCR clone 349969 (TRAV29/DV5, TRAJ45)
CAASFRGGADGLTF

SEQ ID NO: 699938 - protein, 11 aa, Homo sapiens
  CDR3 for beta chain variable domain of TCR clone 349969 (TRBV11-2, TRBJ2-2)
CASSLPGELCF

SEQ ID NO: 699939 - protein, 18 aa, Homo sapiens
  CDR3 for alpha chain variable domain of TCR clone 349970 (TRAV21, TRAJ52)
CAARPSPAGGTSYGKLTF

SEQ ID NO: 699940 - protein, 13 aa, Homo sapiens
  CDR3 for beta chain variable domain of TCR clone 349970 (TRBV2, TRBJ1-5)
CATAGPGNQPQHF

SEQ ID NO: 699941 - protein, 14 aa, Homo sapiens
  CDR3 for alpha chain variable domain of TCR clone 349971 (TRAV38-2/DV8, TRAJ42)
CAYPGGGSQGNLIF

SEQ ID NO: 699942 - protein, 15 aa, Homo sapiens
  CDR3 for beta chain variable domain of TCR clone 349971 (TRBV19, TRBJ2-1)
CASSTGTSSYNEQFF

SEQ ID NO: 699943 - protein, 14 aa, Homo sapiens
  CDR3 for alpha chain variable domain of TCR clone 349972 (TRAV12-2, TRAJ5)
CAVNSSTGRRALTF

SEQ ID NO: 699944 - protein, 12 aa, Homo sapiens
  CDR3 for beta chain variable domain of TCR clone 349972 (TRBV19, TRBJ1-5)
CASSRAQQPQHF

SEQ ID NO: 699945 - protein, 13 aa, Homo sapiens
  CDR3 for alpha chain variable domain of TCR clone 349973 (TRAV35, TRAJ42)
CAGFPGSQGNLIF

SEQ ID NO: 699946 - protein, 12 aa, Homo sapiens
  CDR3 for beta chain variable domain of TCR clone 349973 (TRBV5-1, TRBJ2-5)
CASSFSWETQYF

SEQ ID NO: 699947 - protein, 17 aa, Homo sapiens
  CDR3 for alpha chain variable domain of TCR clone 349974 (TRAV14/DV4, TRAJ28)
CSMRGTSSGAGSYQLTF

SEQ ID NO: 699948 - protein, 13 aa, Homo sapiens
  CDR3 for beta chain variable domain of TCR clone 349974 (TRBV28, TRBJ2-5)
CASSFAGGETQYF

SEQ ID NO: 699949 - protein, 15 aa, Homo sapiens
  CDR3 for alpha chain variable domain of TCR clone 349975 (TRAV3, TRAJ20)
CAMRDSRSNDYKLSF

SEQ ID NO: 699950 - protein, 14 aa, Homo sapiens
  CDR3 for beta chain variable domain of TCR clone 349975 (TRBV20-1, TRBJ2-7)
CSARRGNGIYEQYF

SEQ ID NO: 699951 - protein, 14 aa, Homo sapiens
  CDR3 for alpha chain variable domain of TCR clone 349976 (TRAV3, TRAJ6)
CAVRDSGRKLHTYI

SEQ ID NO: 699952 - protein, 15 aa, Homo sapiens
  CDR3 for beta chain variable domain of TCR clone 349976 (TRBV18, TRBJ2-7)
CASSPLQGRTYEQYF

SEQ ID NO: 699953 - protein, 18 aa, Homo sapiens
  CDR3 for alpha chain variable domain of TCR clone 349977 (TRAV9-2, TRAJ52)
CALSRHNAGVTSYGKLTF

SEQ ID NO: 699954 - protein, 15 aa, Homo sapiens
  CDR3 for beta chain variable domain of TCR clone 349977 (TRBV27, TRBJ2-1)
CASSNGGGSSNEQFV

SEQ ID NO: 699955 - protein, 14 aa, Homo sapiens
  CDR3 for alpha chain variable domain of TCR clone 349978 (TRAV12-3, TRAJ57)
CAMSAWGGSEKLFF

SEQ ID NO: 699956 - protein, 14 aa, Homo sapiens
  CDR3 for beta chain variable domain of TCR clone 349978 (TRBV18, TRBJ2-5)
CASSPGVSQETQYF

SEQ ID NO: 699957 - protein, 14 aa, Homo sapiens
  CDR3 for alpha chain variable domain of TCR clone 349979 (TRAV13-1, TRAJ40)
CAARSTSGTYKYIF

SEQ ID NO: 699958 - protein, 11 aa, Homo sapiens
  CDR3 for beta chain variable domain of TCR clone 349979 (TRBV27, TRBJ2-3)
CASSLGDTQYF

SEQ ID NO: 699959 - protein, 15 aa, Homo sapiens
  CDR3 for alpha chain variable domain of TCR clone 349980 (TRAV17, TRAJ57)
CATGPSQGGSEKLVF

SEQ ID NO: 699960 - protein, 12 aa, Homo sapiens
  CDR3 for beta chain variable domain of TCR clone 349980 (TRBV7-9, TRBJ1-1)
CASSPSSTEAFF

SEQ ID NO: 699961 - protein, 15 aa, Homo sapiens
  CDR3 for alpha chain variable domain of TCR clone 349981 (TRAV26-1, TRAJ9)
CIVRESNTGGFQTIF

SEQ ID NO: 699962 - protein, 11 aa, Homo sapiens
  CDR3 for beta chain variable domain of TCR clone 349981 (TRBV7-6, TRBJ2-5)
CASSFQETQYF

SEQ ID NO: 699963 - protein, 12 aa, Homo sapiens
  CDR3 for alpha chain variable domain of TCR clone 349982 (TRAV21, TRAJ29)
CAVTSGNTPLVF

SEQ ID NO: 699964 - protein, 11 aa, Homo sapiens
  CDR3 for beta chain variable domain of TCR clone 349982 (TRBV18, TRBJ2-7)
CASSQDREQYF

SEQ ID NO: 699965 - protein, 14 aa, Homo sapiens
  CDR3 for alpha chain variable domain of TCR clone 349983 (TRAV3, TRAJ21)
CAVESQANFNKFYF

SEQ ID NO: 699966 - protein, 12 aa, Homo sapiens
  CDR3 for beta chain variable domain of TCR clone 349983 (TRBV6-3, TRBJ2-7)
CASSLTPYEQYI

SEQ ID NO: 699967 - protein, 16 aa, Homo sapiens
  CDR3 for alpha chain variable domain of TCR clone 349984 (TRAV12-1, TRAJ8)
CVVNGRGNTGFQKLVF

SEQ ID NO: 699968 - protein, 14 aa, Homo sapiens
  CDR3 for beta chain variable domain of TCR clone 349984 (TRBV7-2, TRBJ2-7)
CASSPKTSFYEQYF

SEQ ID NO: 699969 - protein, 14 aa, Homo sapiens
  CDR3 for alpha chain variable domain of TCR clone 349985 (TRAV21, TRAJ15)
CAVSLNQAGTALIF

SEQ ID NO: 699970 - protein, 11 aa, Homo sapiens
  CDR3 for beta chain variable domain of TCR clone 349985 (TRBV20-1, TRBJ2-7)
CSAGTSYEQYS

SEQ ID NO: 699971 - protein, 13 aa, Homo sapiens
  CDR3 for alpha chain variable domain of TCR clone 349986 (TRAV13-1, TRAJ21)
CAARIYNFNKFYF

SEQ ID NO: 699972 - protein, 15 aa, Homo sapiens
  CDR3 for beta chain variable domain of TCR clone 349986 (TRBV5-5, TRBJ1-5)
CASSLKGGGEQPQHF

SEQ ID NO: 699973 - protein, 12 aa, Homo sapiens
  CDR3 for alpha chain variable domain of TCR clone 349987 (TRAV12-3, TRAJ17)
CAMTLTGNELTF

SEQ ID NO: 699974 - protein, 15 aa, Homo sapiens
  CDR3 for beta chain variable domain of TCR clone 349987 (TRBV20-1, TRBJ2-7)
SSARDRVSGMDEQYF

SEQ ID NO: 699975 - protein, 15 aa, Homo sapiens
  CDR3 for alpha chain variable domain of TCR clone 349988 (TRAV3, TRAJ5)
CAVRDRKTGRRGLTF

SEQ ID NO: 699976 - protein, 15 aa, Homo sapiens
  CDR3 for beta chain variable domain of TCR clone 349988 (TRBV7-9, TRBJ2-2)
CASGPLDTFPGELFF

SEQ ID NO: 699977 - protein, 14 aa, Homo sapiens
  CDR3 for alpha chain variable domain of TCR clone 349989 (TRAV1-2, TRAJ16)
CAVNRFSNGQKLLF

SEQ ID NO: 699978 - protein, 11 aa, Homo sapiens
  CDR3 for beta chain variable domain of TCR clone 349989 (TRBV11-2, TRBJ2-2)
CASSLPGELFF

SEQ ID NO: 699979 - protein, 17 aa, Homo sapiens
  CDR3 for alpha chain variable domain of TCR clone 349990 (TRAV27, TRAJ52)
CAGAGWAGGTSYGKLNF

SEQ ID NO: 699980 - protein, 16 aa, Homo sapiens
  CDR3 for beta chain variable domain of TCR clone 349990 (TRBV19, TRBJ2-1)
CASSKAGPSSYNEQFF

SEQ ID NO: 699981 - protein, 13 aa, Homo sapiens
  CDR3 for alpha chain variable domain of TCR clone 349991 (TRAV35, TRAJ32)
CPGVGGATNKLIF

SEQ ID NO: 699982 - protein, 17 aa, Homo sapiens
  CDR3 for beta chain variable domain of TCR clone 349991 (TRBV4-3, TRBJ2-1)
CASSQFSSGRASGEQFF

SEQ ID NO: 699983 - protein, 15 aa, Homo sapiens
  CDR3 for alpha chain variable domain of TCR clone 349992 (TRAV8-3, TRAJ28)
CAVAYSGAGSYQLTF

SEQ ID NO: 699984 - protein, 15 aa, Homo sapiens
  CDR3 for beta chain variable domain of TCR clone 349992 (TRBV19, TRBJ1-2)
CASSVGQVLNYGYTF

SEQ ID NO: 699985 - protein, 14 aa, Homo sapiens
  CDR3 for alpha chain variable domain of TCR clone 349993 (TRAV8-3, TRAJ4)
CAVGAAGGYNKLIF

SEQ ID NO: 699986 - protein, 15 aa, Homo sapiens
  CDR3 for beta chain variable domain of TCR clone 349993 (TRBV20-1, TRBJ2-7)
CSARKGLAESYEQYF

SEQ ID NO: 699987 - protein, 10 aa, Homo sapiens
  CDR3 for alpha chain variable domain of TCR clone 349994 (TRAV23/DV6, TRAJ57)
CAASPTLSQG

SEQ ID NO: 699988 - protein, 14 aa, Homo sapiens
  CDR3 for beta chain variable domain of TCR clone 349994 (TRBV13, TRBJ2-5)
CASSLGQGKETQYF

SEQ ID NO: 699989 - protein, 13 aa, Homo sapiens
  CDR3 for alpha chain variable domain of TCR clone 349995 (TRAV12-3, TRAJ33)
CAMSVNSNYQLIW

SEQ ID NO: 699990 - protein, 14 aa, Homo sapiens
  CDR3 for beta chain variable domain of TCR clone 349995 (TRBV7-2, TRBJ2-2)
CASSGQGIAGELSF

SEQ ID NO: 699991 - protein, 22 aa, Homo sapiens
  CDR3 for alpha chain variable domain of TCR clone 349996 (TRAV26-2, TRAJ45)
CCVLLHPERQGRSGGVAGGLTF

SEQ ID NO: 699992 - protein, 15 aa, Homo sapiens
  CDR3 for beta chain variable domain of TCR clone 349996 (TRBV7-6, TRBJ2-5)
CASSKPTGPQETQYF

SEQ ID NO: 699993 - protein, 13 aa, Homo sapiens
  CDR3 for alpha chain variable domain of TCR clone 349997 (TRAV13-1, TRAJ39)
CAASIWAGDMLTV

SEQ ID NO: 699994 - protein, 15 aa, Homo sapiens
  CDR3 for beta chain variable domain of TCR clone 349997 (TRBV7-9, TRBJ1-1)
CASSLLEQGGTEAFF

SEQ ID NO: 699995 - protein, 14 aa, Homo sapiens
  CDR3 for alpha chain variable domain of TCR clone 349998 (TRAV2, TRAJ37)
CAVDFTSNTGKRIF

SEQ ID NO: 699996 - protein, 15 aa, Homo sapiens
  CDR3 for beta chain variable domain of TCR clone 349998 (TRBV20-1, TRBJ1-1)
CSASRGVTGTTEDFF

SEQ ID NO: 699997 - protein, 14 aa, Homo sapiens
  CDR3 for alpha chain variable domain of TCR clone 349999 (TRAV12-2, TRAJ13)
CAVKKTGGYKKVTF

SEQ ID NO: 699998 - protein, 16 aa, Homo sapiens
  CDR3 for beta chain variable domain of TCR clone 349999 (TRBV20-1, TRBJ1-4)
CSAPGQGLLTNEKLFF

SEQ ID NO: 699999 - protein, 12 aa, Homo sapiens
  CDR3 for alpha chain variable domain of TCR clone 350000 (TRAV24, TRAJ37)
CASSSNTGKLIF

SEQ ID NO: 700000 - protein, 15 aa, Homo sapiens
  CDR3 for beta chain variable domain of TCR clone 350000 (TRBV5-4, TRBJ2-3)
CASSLDQRATDTQYF

SEQ ID NO: 700001 - protein, 11 aa, Homo sapiens
  CDR3 for alpha chain variable domain of TCR clone 350001 (TRAV21, TRAJ34)
CAHYNTDKLIF

SEQ ID NO: 700002 - protein, 14 aa, Homo sapiens
  CDR3 for beta chain variable domain of TCR clone 350001 (TRBV28, TRBJ1-2)
CASRIQGANYGYTF

SEQ ID NO: 700003 - protein, 14 aa, Homo sapiens
  CDR3 for alpha chain variable domain of TCR clone 350002 (TRAV38-1, TRAJ54)
CAFMSPSGAQKLVF

SEQ ID NO: 700004 - protein, 16 aa, Homo sapiens
  CDR3 for beta chain variable domain of TCR clone 350002 (TRBV28, TRBJ2-1)
CASSLGGGGSYNEQFF

SEQ ID NO: 700005 - protein, 12 aa, Homo sapiens
  CDR3 for alpha chain variable domain of TCR clone 350003 (TRAV12-2, TRAJ10)
WGVTGGGNKLTF

SEQ ID NO: 700006 - protein, 16 aa, Homo sapiens
  CDR3 for beta chain variable domain of TCR clone 350003 (TRBV6-4, TRBJ1-2)
CASSEAVGDHNYGYTF

SEQ ID NO: 700007 - protein, 13 aa, Homo sapiens
  CDR3 for alpha chain variable domain of TCR clone 350004 (TRAV17, TRAJ22)
CAHHSGSARQLIF

SEQ ID NO: 700008 - protein, 13 aa, Homo sapiens
  CDR3 for beta chain variable domain of TCR clone 350004 (TRBV27, TRBJ1-4)
CASSLMGDEKLFF

SEQ ID NO: 700009 - protein, 14 aa, Homo sapiens
  CDR3 for alpha chain variable domain of TCR clone 350005 (TRAV26-1, TRAJ57)
CIRAGQGGSEKLVF

SEQ ID NO: 700010 - protein, 13 aa, Homo sapiens
  CDR3 for beta chain variable domain of TCR clone 350005 (TRBV19, TRBJ2-7)
CASSRTTSYEQYF

SEQ ID NO: 700011 - protein, 23 aa, Homo sapiens
  CDR3 for alpha chain variable domain of TCR clone 350006 (TRAV26-1, )
CIADNAGNNHIQNPDPAAYQLRD

SEQ ID NO: 700012 - protein, 13 aa, Homo sapiens
  CDR3 for beta chain variable domain of TCR clone 350006 (TRBV20-1, TRBJ1-1)
CSARGGGNTEAFF

SEQ ID NO: 700013 - protein, 11 aa, Homo sapiens
  CDR3 for alpha chain variable domain of TCR clone 350007 (TRAV2, TRAJ33)
CAVDSNYQLIW

SEQ ID NO: 700014 - protein, 16 aa, Homo sapiens
  CDR3 for beta chain variable domain of TCR clone 350007 (TRBV7-9, TRBJ1-2)
CASSLGFSSGEDGYTL

SEQ ID NO: 700015 - protein, 15 aa, Homo sapiens
  CDR3 for alpha chain variable domain of TCR clone 350008 (TRAV3, TRAJ13)
CAVRDIGGGFQKVTF

SEQ ID NO: 700016 - protein, 13 aa, Homo sapiens
  CDR3 for beta chain variable domain of TCR clone 350008 (TRBV19, TRBJ1-2)
CASSVPGQDGYTF

SEQ ID NO: 700017 - protein, 13 aa, Homo sapiens
  CDR3 for alpha chain variable domain of TCR clone 350009 (TRAV6, TRAJ16)
CSLDDSDGQKLLF

SEQ ID NO: 700018 - protein, 14 aa, Homo sapiens
  CDR3 for beta chain variable domain of TCR clone 350009 (TRBV12-4, TRBJ1-6)
CASNLQGKGSPLHF

SEQ ID NO: 700019 - protein, 16 aa, Homo sapiens
  CDR3 for alpha chain variable domain of TCR clone 350010 (TRAV30, TRAJ24)
CGTEIVDADSCGKFQF

SEQ ID NO: 700020 - protein, 17 aa, Homo sapiens
  CDR3 for beta chain variable domain of TCR clone 350010 (TRBV20-1, TRBJ2-1)
CSAPPRLAGTRYNEQFF

SEQ ID NO: 700021 - protein, 14 aa, Homo sapiens
  CDR3 for alpha chain variable domain of TCR clone 350011 (TRAV12-2, TRAJ13)
CAVKKTGGYQKATF

SEQ ID NO: 700022 - protein, 17 aa, Homo sapiens
  CDR3 for beta chain variable domain of TCR clone 350011 (TRBV7-3, TRBJ2-5)
CASSLGSGRSGSETQYF

SEQ ID NO: 700023 - protein, 13 aa, Homo sapiens
  CDR3 for alpha chain variable domain of TCR clone 350012 (TRAV23/DV6, TRAJ34)
CAAIENNTGKLII

SEQ ID NO: 700024 - protein, 18 aa, Homo sapiens
  CDR3 for beta chain variable domain of TCR clone 350012 (TRBV20-1, TRBJ2-6)
CSAETTPTHGSGANVLTF

SEQ ID NO: 700025 - protein, 13 aa, Homo sapiens
  CDR3 for alpha chain variable domain of TCR clone 350013 (TRAV35, TRAJ48)
GRSRVFGSEKLTF

SEQ ID NO: 700026 - protein, 14 aa, Homo sapiens
  CDR3 for beta chain variable domain of TCR clone 350013 (TRBV20-1, TRBJ2-5)
CSALVPGYQETQYF

SEQ ID NO: 700027 - protein, 15 aa, Homo sapiens
  CDR3 for alpha chain variable domain of TCR clone 350014 (TRAV17, TRAJ57)
CATGPSQGGCEKLVF

SEQ ID NO: 700028 - protein, 14 aa, Homo sapiens
  CDR3 for beta chain variable domain of TCR clone 350014 (TRBV12-5, TRBJ2-5)
CASGSRTHQETQYF

SEQ ID NO: 700029 - protein, 13 aa, Homo sapiens
  CDR3 for alpha chain variable domain of TCR clone 350015 (TRAV16, TRAJ31)
CALSAHNNARLIF

SEQ ID NO: 700030 - protein, 17 aa, Homo sapiens
  CDR3 for beta chain variable domain of TCR clone 350015 (TRBV12-4, TRBJ2-1)
CASSPGLAGGRINEQFF

SEQ ID NO: 700031 - protein, 15 aa, Homo sapiens
  CDR3 for alpha chain variable domain of TCR clone 350016 (TRAV8-4, TRAJ13)
CAVSDWGGGYQKVTF

SEQ ID NO: 700032 - protein, 15 aa, Homo sapiens
  CDR3 for beta chain variable domain of TCR clone 350016 (TRBV25-1, TRBJ1-4)
CASSPGDSTNDKLFF

SEQ ID NO: 700033 - protein, 15 aa, Homo sapiens
  CDR3 for alpha chain variable domain of TCR clone 350017 (TRAV38-1, TRAJ37)
CAFIFGSGNTGKLIF

SEQ ID NO: 700034 - protein, 13 aa, Homo sapiens
  CDR3 for beta chain variable domain of TCR clone 350017 (TRBV12-4, TRBJ1-5)
CASSPDRAQPQHF

SEQ ID NO: 700035 - protein, 12 aa, Homo sapiens
  CDR3 for alpha chain variable domain of TCR clone 350018 (TRAV9-2, TRAJ26)
CALRGYGQNFVF

SEQ ID NO: 700036 - protein, 15 aa, Homo sapiens
  CDR3 for beta chain variable domain of TCR clone 350018 (TRBV20-1, TRBJ2-7)
CSARDRVSGMDEQYF

SEQ ID NO: 700037 - protein, 12 aa, Homo sapiens
  CDR3 for alpha chain variable domain of TCR clone 350019 (TRAV17, TRAJ4)
CAGSGGYNKLIF

SEQ ID NO: 700038 - protein, 13 aa, Homo sapiens
  CDR3 for beta chain variable domain of TCR clone 350019 (TRBV6-1, TRBJ1-1)
CASSEGWGTEAFF

SEQ ID NO: 700039 - protein, 12 aa, Homo sapiens
  CDR3 for alpha chain variable domain of TCR clone 350020 (TRAV21, TRAJ33)
CAKMDSNYQLIW

SEQ ID NO: 700040 - protein, 15 aa, Homo sapiens
  CDR3 for beta chain variable domain of TCR clone 350020 (TRBV9, TRBJ2-1)
CASSLAGSSYNEQFF

SEQ ID NO: 700041 - protein, 14 aa, Homo sapiens
  CDR3 for alpha chain variable domain of TCR clone 350021 (TRAV12-3, TRAJ43)
CAMSLGGAGTRLTV

SEQ ID NO: 700042 - protein, 16 aa, Homo sapiens
  CDR3 for beta chain variable domain of TCR clone 350021 (TRBV5-4, TRBJ2-1)
CASSLALAGAYNEQFF

SEQ ID NO: 700043 - protein, 14 aa, Homo sapiens
  CDR3 for alpha chain variable domain of TCR clone 350022 (TRAV1-2, TRAJ16)
CAVNRFSDGQKLLF

SEQ ID NO: 700044 - protein, 17 aa, Homo sapiens
  CDR3 for beta chain variable domain of TCR clone 350022 (TRBV4-3, TRBJ2-2)
CASSQDWGHLNTGELFF

SEQ ID NO: 700045 - protein, 16 aa, Homo sapiens
  CDR3 for alpha chain variable domain of TCR clone 350023 (TRAV27, TRAJ13)
CAGAKSDSGGYQKVTF

SEQ ID NO: 700046 - protein, 17 aa, Homo sapiens
  CDR3 for beta chain variable domain of TCR clone 350023 (TRBV7-3, TRBJ2-3)
CASSLMKRMRGADTQYF

SEQ ID NO: 700047 - protein, 17 aa, Homo sapiens
  CDR3 for alpha chain variable domain of TCR clone 350024 (TRAV3, TRAJ38)
CAVRDCLNAGNNRKLIW

SEQ ID NO: 700048 - protein, 14 aa, Homo sapiens
  CDR3 for beta chain variable domain of TCR clone 350024 (TRBV5-5, TRBJ1-5)
CASSGQVVDQPQHF

SEQ ID NO: 700049 - protein, 13 aa, Homo sapiens
  CDR3 for alpha chain variable domain of TCR clone 350025 (TRAV12-3, TRAJ13)
CAMTSGGYQKVTF

SEQ ID NO: 700050 - protein, 13 aa, Homo sapiens
  CDR3 for beta chain variable domain of TCR clone 350025 (TRBV7-9, TRBJ1-2)
CASGLKQNYGYTF

SEQ ID NO: 700051 - protein, 14 aa, Homo sapiens
  CDR3 for alpha chain variable domain of TCR clone 350026 (TRAV21, TRAJ47)
CAVGKLEYGNKLVF

SEQ ID NO: 700052 - protein, 17 aa, Homo sapiens
  CDR3 for beta chain variable domain of TCR clone 350026 (TRBV4-1, TRBJ2-3)
CASSQGYVSGGTDTQYF

SEQ ID NO: 700053 - protein, 17 aa, Homo sapiens
  CDR3 for alpha chain variable domain of TCR clone 350027 (TRAV3, TRAJ6)
CAVRDGPRAVGSYIPTF

SEQ ID NO: 700054 - protein, 15 aa, Homo sapiens
  CDR3 for beta chain variable domain of TCR clone 350027 (TRBV7-9, TRBJ2-7)
CASSLDLDRGYEQYF

SEQ ID NO: 700055 - protein, 12 aa, Homo sapiens
  CDR3 for alpha chain variable domain of TCR clone 350028 (TRAV1-1, TRAJ15)
CAVGQAGTALIF

SEQ ID NO: 700056 - protein, 16 aa, Homo sapiens
  CDR3 for beta chain variable domain of TCR clone 350028 (TRBV12-4, TRBJ2-7)
CASSPEGQVSSYEQYF

SEQ ID NO: 700057 - protein, 13 aa, Homo sapiens
  CDR3 for alpha chain variable domain of TCR clone 350029 (TRAV8-6, TRAJ8)
CAVSNTGFQKLVF

SEQ ID NO: 700058 - protein, 14 aa, Homo sapiens
  CDR3 for beta chain variable domain of TCR clone 350029 (TRBV7-2, TRBJ2-7)
CASSPKTSFYEQYF

SEQ ID NO: 700059 - protein, 17 aa, Homo sapiens
  CDR3 for alpha chain variable domain of TCR clone 350030 (TRAV8-3, TRAJ42)
CCGAGMNYGGSQGNLIF

SEQ ID NO: 700060 - protein, 11 aa, Homo sapiens
  CDR3 for beta chain variable domain of TCR clone 350030 (TRBV7-2, TRBJ2-3)
RASSSSDTQYF

SEQ ID NO: 700061 - protein, 13 aa, Homo sapiens
  CDR3 for alpha chain variable domain of TCR clone 350031 (TRAV13-1, TRAJ5)
CAASDTGRRALTF

SEQ ID NO: 700062 - protein, 12 aa, Homo sapiens
  CDR3 for beta chain variable domain of TCR clone 350031 (TRBV11-2, TRBJ2-2)
CASSRGGGELFF

SEQ ID NO: 700063 - protein, 13 aa, Homo sapiens
  CDR3 for alpha chain variable domain of TCR clone 350032 (TRAV12-2, TRAJ15)
CAVFNQAGTALIF

SEQ ID NO: 700064 - protein, 15 aa, Homo sapiens
  CDR3 for beta chain variable domain of TCR clone 350032 (TRBV7-8, TRBJ1-5)
CASSRGGGAGKPQHF

SEQ ID NO: 700065 - protein, 15 aa, Homo sapiens
  CDR3 for alpha chain variable domain of TCR clone 350033 (TRAV3, TRAJ3)
CAVRDRDSSASKIIF

SEQ ID NO: 700066 - protein, 15 aa, Homo sapiens
  CDR3 for beta chain variable domain of TCR clone 350033 (TRBV29-1, TRBJ2-7)
CSVEFFDRWSYEQYF

SEQ ID NO: 700067 - protein, 13 aa, Homo sapiens
  CDR3 for alpha chain variable domain of TCR clone 350034 (TRAV12-2, TRAJ12)
CAVNGDSSYKLIF

SEQ ID NO: 700068 - protein, 13 aa, Homo sapiens
  CDR3 for beta chain variable domain of TCR clone 350034 (TRBV19, TRBJ1-2)
CASSVPGQDGYTF

SEQ ID NO: 700069 - protein, 14 aa, Homo sapiens
  CDR3 for alpha chain variable domain of TCR clone 350035 (TRAV9-2, TRAJ39)
CALYIYNAGNMLTF

SEQ ID NO: 700070 - protein, 14 aa, Homo sapiens
  CDR3 for beta chain variable domain of TCR clone 350035 (TRBV7-2, TRBJ2-3)
CASSQTGSSYTQYF

SEQ ID NO: 700071 - protein, 16 aa, Homo sapiens
  CDR3 for alpha chain variable domain of TCR clone 350036 (TRAV26-1, TRAJ23)
CIVRVERYNQGGKLIF

SEQ ID NO: 700072 - protein, 15 aa, Homo sapiens
  CDR3 for beta chain variable domain of TCR clone 350036 (TRBV18, TRBJ2-7)
CGSSPRGGKGYEQYF

SEQ ID NO: 700073 - protein, 13 aa, Homo sapiens
  CDR3 for alpha chain variable domain of TCR clone 350037 (TRAV21, TRAJ27)
CAARPGTAGKSTF

SEQ ID NO: 700074 - protein, 13 aa, Homo sapiens
  CDR3 for beta chain variable domain of TCR clone 350037 (TRBV7-3, TRBJ1-1)
CASSQDWGAEAFF

SEQ ID NO: 700075 - protein, 15 aa, Homo sapiens
  CDR3 for alpha chain variable domain of TCR clone 350038 (TRAV1-1, TRAJ5)
CAVRHMDTGRRALTF

SEQ ID NO: 700076 - protein, 17 aa, Homo sapiens
  CDR3 for beta chain variable domain of TCR clone 350038 (TRBV28, TRBJ2-7)
CASSPGLAGGDSYEQYF

SEQ ID NO: 700077 - protein, 19 aa, Homo sapiens
  CDR3 for alpha chain variable domain of TCR clone 350039 (TRAV26-2, TRAJ57)
CCVLLHPERHTGGSEKLVF

SEQ ID NO: 700078 - protein, 15 aa, Homo sapiens
  CDR3 for beta chain variable domain of TCR clone 350039 (TRBV2, TRBJ2-1)
CASDIGLAGEGEQFF

SEQ ID NO: 700079 - protein, 11 aa, Homo sapiens
  CDR3 for alpha chain variable domain of TCR clone 350040 (TRAV2, TRAJ13)
CASGGYKKVTF

SEQ ID NO: 700080 - protein, 16 aa, Homo sapiens
  CDR3 for beta chain variable domain of TCR clone 350040 (TRBV19, TRBJ2-1)
CASSKAGPSSYNEQFF

SEQ ID NO: 700081 - protein, 11 aa, Homo sapiens
  CDR3 for alpha chain variable domain of TCR clone 350041 (TRAV3, TRAJ13)
CAVTSYQQVTF

SEQ ID NO: 700082 - protein, 15 aa, Homo sapiens
  CDR3 for beta chain variable domain of TCR clone 350041 (TRBV7-9, TRBJ2-7)
CACSSSGLAVYERYF

SEQ ID NO: 700083 - protein, 14 aa, Homo sapiens
  CDR3 for alpha chain variable domain of TCR clone 350042 (TRAV35, TRAJ58)
CAGLKETSGSRLTF

SEQ ID NO: 700084 - protein, 13 aa, Homo sapiens
  CDR3 for beta chain variable domain of TCR clone 350042 (TRBV25-1, TRBJ1-2)
CASRFGSNYGYTF

SEQ ID NO: 700085 - protein, 15 aa, Homo sapiens
  CDR3 for alpha chain variable domain of TCR clone 350043 (TRAV26-1, TRAJ18)
CIVRVMSSTRGRLYF

SEQ ID NO: 700086 - protein, 15 aa, Homo sapiens
  CDR3 for beta chain variable domain of TCR clone 350043 (TRBV6-3, TRBJ2-6)
CASNPGGSGANVLTF

SEQ ID NO: 700087 - protein, 12 aa, Homo sapiens
  CDR3 for alpha chain variable domain of TCR clone 350044 (TRAV13-1, TRAJ21)
WAAKEGFNKFYF

SEQ ID NO: 700088 - protein, 14 aa, Homo sapiens
  CDR3 for beta chain variable domain of TCR clone 350044 (TRBV5-4, TRBJ1-1)
CASSLDSRRDEAFF

SEQ ID NO: 700089 - protein, 12 aa, Homo sapiens
  CDR3 for alpha chain variable domain of TCR clone 350045 (TRAV3, TRAJ27)
CAVRDGAGKSTF

SEQ ID NO: 700090 - protein, 14 aa, Homo sapiens
  CDR3 for beta chain variable domain of TCR clone 350045 (TRBV4-1, TRBJ2-5)
CASSQYRDQETQYF

SEQ ID NO: 700091 - protein, 20 aa, Homo sapiens
  CDR3 for alpha chain variable domain of TCR clone 350046 (TRAV26-1, TRAJ47)
CCVLLHRQSSFMEYGNKLVF

SEQ ID NO: 700092 - protein, 14 aa, Homo sapiens
  CDR3 for beta chain variable domain of TCR clone 350046 (TRBV7-2, TRBJ1-2)
CASSRGGTNYGYAF

SEQ ID NO: 700093 - protein, 18 aa, Homo sapiens
  CDR3 for alpha chain variable domain of TCR clone 350047 (TRAV13-1, TRAJ52)
CAAKNPNAGGTSNGKLTF

SEQ ID NO: 700094 - protein, 14 aa, Homo sapiens
  CDR3 for beta chain variable domain of TCR clone 350047 (TRBV12-4, TRBJ2-1)
CASSLGQGASEHFF

SEQ ID NO: 700095 - protein, 16 aa, Homo sapiens
  CDR3 for alpha chain variable domain of TCR clone 350048 (TRAV12-3, TRAJ53)
CAMSPGSGGSNYKLTF

SEQ ID NO: 700096 - protein, 11 aa, Homo sapiens
  CDR3 for beta chain variable domain of TCR clone 350048 (TRBV29-1, TRBJ2-5)
CSEDRTGSHYF

SEQ ID NO: 700097 - protein, 12 aa, Homo sapiens
  CDR3 for alpha chain variable domain of TCR clone 350049 (TRAV12-3, TRAJ17)
CAMTLTGNKLTS

SEQ ID NO: 700098 - protein, 15 aa, Homo sapiens
  CDR3 for beta chain variable domain of TCR clone 350049 (TRBV20-1, TRBJ2-7)
CSARDRVSGIDEQYF

SEQ ID NO: 700099 - protein, 12 aa, Homo sapiens
  CDR3 for alpha chain variable domain of TCR clone 350050 (TRAV21, TRAJ3)
CCFYSSACKIIF

SEQ ID NO: 700100 - protein, 16 aa, Homo sapiens
  CDR3 for beta chain variable domain of TCR clone 350050 (TRBV19, TRBJ2-1)
CASSKAGPSSYNEQFF

SEQ ID NO: 700101 - protein, 16 aa, Homo sapiens
  CDR3 for alpha chain variable domain of TCR clone 350051 (TRAV3, TRAJ37)
CAVRQHGSGNTGKLIF

SEQ ID NO: 700102 - protein, 11 aa, Homo sapiens
  CDR3 for beta chain variable domain of TCR clone 350051 (TRBV10-3, TRBJ2-7)
CAISEGLEQYF

SEQ ID NO: 700103 - protein, 14 aa, Homo sapiens
  CDR3 for alpha chain variable domain of TCR clone 350052 (TRAV17, TRAJ12)
CATEEKDSSYKLSF

SEQ ID NO: 700104 - protein, 16 aa, Homo sapiens
  CDR3 for beta chain variable domain of TCR clone 350052 (TRBV11-2, TRBJ2-1)
CASSPRLAGVYNEQFF

SEQ ID NO: 700105 - protein, 16 aa, Homo sapiens
  CDR3 for alpha chain variable domain of TCR clone 350053 (TRAV12-2, TRAJ40)
CAVIRGGTSGTYKYIF

SEQ ID NO: 700106 - protein, 14 aa, Homo sapiens
  CDR3 for beta chain variable domain of TCR clone 350053 (TRBV7-2, TRBJ1-1)
CASSFLTGTTESFF

SEQ ID NO: 700107 - protein, 13 aa, Homo sapiens
  CDR3 for alpha chain variable domain of TCR clone 350054 (TRAV21, TRAJ20)
CAVGVFSDYKLSF

SEQ ID NO: 700108 - protein, 14 aa, Homo sapiens
  CDR3 for beta chain variable domain of TCR clone 350054 (TRBV4-2, TRBJ1-4)
CASSPSSGNEKLFF

SEQ ID NO: 700109 - protein, 14 aa, Homo sapiens
  CDR3 for alpha chain variable domain of TCR clone 350055 (TRAV29/DV5, TRAJ32)
CAAAYGGATNKLIF

SEQ ID NO: 700110 - protein, 14 aa, Homo sapiens
  CDR3 for beta chain variable domain of TCR clone 350055 (TRBV18, TRBJ2-7)
CASSPRGGAYEQYF

SEQ ID NO: 700111 - protein, 14 aa, Homo sapiens
  CDR3 for alpha chain variable domain of TCR clone 350056 (TRAV1-1, TRAJ35)
CAVRSIGFGNVLHC

SEQ ID NO: 700112 - protein, 13 aa, Homo sapiens
  CDR3 for beta chain variable domain of TCR clone 350056 (TRBV12-4, TRBJ1-2)
CASSLRQGKGYTF

SEQ ID NO: 700113 - protein, 14 aa, Homo sapiens
  CDR3 for alpha chain variable domain of TCR clone 350057 (TRAV13-2, TRAJ57)
CAENFQGGSEKLVF

SEQ ID NO: 700114 - protein, 15 aa, Homo sapiens
  CDR3 for beta chain variable domain of TCR clone 350057 (TRBV4-1, TRBJ1-1)
CASSQEWGHYTEAFF

SEQ ID NO: 700115 - protein, 23 aa, Homo sapiens
  CDR3 for alpha chain variable domain of TCR clone 350058 (TRAV12-2, TRAJ43)
SLLIRDSQPSDSATYLCAFDMRF

SEQ ID NO: 700116 - protein, 13 aa, Homo sapiens
  CDR3 for beta chain variable domain of TCR clone 350058 (TRBV6-1, TRBJ1-6)
CASSSSWDSPLHF

SEQ ID NO: 700117 - protein, 12 aa, Homo sapiens
  CDR3 for alpha chain variable domain of TCR clone 350059 (TRAV12-3, TRAJ43)
CAISSNNNDMRF

SEQ ID NO: 700118 - protein, 13 aa, Homo sapiens
  CDR3 for beta chain variable domain of TCR clone 350059 (TRBV4-1, TRBJ2-2)
CASSQENTGELFF

SEQ ID NO: 700119 - protein, 14 aa, Homo sapiens
  CDR3 for alpha chain variable domain of TCR clone 350060 (TRAV34, TRAJ44)
CGADGTGTASKLTF

SEQ ID NO: 700120 - protein, 15 aa, Homo sapiens
  CDR3 for beta chain variable domain of TCR clone 350060 (TRBV20-1, TRBJ2-7)
CSARKGLAESYEQYF

SEQ ID NO: 700121 - protein, 14 aa, Homo sapiens
  CDR3 for alpha chain variable domain of TCR clone 350061 (TRAV1-1, TRAJ28)
CAAPSGAGSYQPTF

SEQ ID NO: 700122 - protein, 15 aa, Homo sapiens
  CDR3 for beta chain variable domain of TCR clone 350061 (TRBV7-2, TRBJ1-2)
CASSLVSGGDYGYTF

SEQ ID NO: 700123 - protein, 10 aa, Homo sapiens
  CDR3 for alpha chain variable domain of TCR clone 350062 (TRAV38-2/DV8, TRAJ40)
CASGTYKYIF

SEQ ID NO: 700124 - protein, 13 aa, Homo sapiens
  CDR3 for beta chain variable domain of TCR clone 350062 (TRBV5-5, TRBJ1-2)
CASSFWRGEDYTF

SEQ ID NO: 700125 - protein, 14 aa, Homo sapiens
  CDR3 for alpha chain variable domain of TCR clone 350063 (TRAV17, TRAJ57)
CATDPQGGSEKLVF

SEQ ID NO: 700126 - protein, 18 aa, Homo sapiens
  CDR3 for beta chain variable domain of TCR clone 350063 (TRBV6-6, TRBJ1-3)
CASSYSKWDLISGNTMYF

SEQ ID NO: 700127 - protein, 15 aa, Homo sapiens
  CDR3 for alpha chain variable domain of TCR clone 350064 (TRAV12-1, TRAJ44)
CVVDTPQGTASKLTF

SEQ ID NO: 700128 - protein, 13 aa, Homo sapiens
  CDR3 for beta chain variable domain of TCR clone 350064 (TRBV27, TRBJ2-1)
CASSSGSYNEQSF

SEQ ID NO: 700129 - protein, 16 aa, Homo sapiens
  CDR3 for alpha chain variable domain of TCR clone 350065 (TRAV30, TRAJ24)
CGTEIVDADSWGKFQF

SEQ ID NO: 700130 - protein, 15 aa, Homo sapiens
  CDR3 for beta chain variable domain of TCR clone 350065 (TRBV7-9, TRBJ1-4)
CASSARTGGKEKLFF

SEQ ID NO: 700131 - protein, 12 aa, Homo sapiens
  CDR3 for alpha chain variable domain of TCR clone 350066 (TRAV35, TRAJ31)
CAAASNNARLMF

SEQ ID NO: 700132 - protein, 13 aa, Homo sapiens
  CDR3 for beta chain variable domain of TCR clone 350066 (TRBV2, TRBJ2-2)
CQQPVRGNGELFF

SEQ ID NO: 700133 - protein, 16 aa, Homo sapiens
  CDR3 for alpha chain variable domain of TCR clone 350067 (TRAV21, TRAJ52)
CTVTNAGGTSYGKLTF

SEQ ID NO: 700134 - protein, 13 aa, Homo sapiens
  CDR3 for beta chain variable domain of TCR clone 350067 (TRBV20-1, TRBJ2-3)
CSARLAGTDTQYF

SEQ ID NO: 700135 - protein, 14 aa, Homo sapiens
  CDR3 for alpha chain variable domain of TCR clone 350068 (TRAV12-1, TRAJ13)
CVVFDSGGYQKVTF

SEQ ID NO: 700136 - protein, 12 aa, Homo sapiens
  CDR3 for beta chain variable domain of TCR clone 350068 (TRBV29-1, TRBJ2-3)
CSVTGGADTQYF

SEQ ID NO: 700137 - protein, 12 aa, Homo sapiens
  CDR3 for alpha chain variable domain of TCR clone 350069 (TRAV3, TRAJ20)
CAVRDPDYKLSF

SEQ ID NO: 700138 - protein, 15 aa, Homo sapiens
  CDR3 for beta chain variable domain of TCR clone 350069 (TRBV2, TRBJ2-2)
CAISRETVGTGELFF

SEQ ID NO: 700139 - protein, 13 aa, Homo sapiens
  CDR3 for alpha chain variable domain of TCR clone 350070 (TRAV8-6, TRAJ40)
CAVSVTGTYKYIF

SEQ ID NO: 700140 - protein, 15 aa, Homo sapiens
  CDR3 for beta chain variable domain of TCR clone 350070 (TRBV4-1, TRBJ2-3)
CASSRGQGIPDTQYL

SEQ ID NO: 700141 - protein, 13 aa, Homo sapiens
  CDR3 for alpha chain variable domain of TCR clone 350071 (TRAV13-1, TRAJ5)
CAASDTGRRALTF

SEQ ID NO: 700142 - protein, 16 aa, Homo sapiens
  CDR3 for beta chain variable domain of TCR clone 350071 (TRBV27, TRBJ2-7)
CASSSERRDSAYEQYF

SEQ ID NO: 700143 - protein, 14 aa, Homo sapiens
  CDR3 for alpha chain variable domain of TCR clone 350072 (TRAV21, TRAJ32)
CCGDYCGATNKLIF

SEQ ID NO: 700144 - protein, 13 aa, Homo sapiens
  CDR3 for beta chain variable domain of TCR clone 350072 (TRBV2, TRBJ1-6)
CASGRGGISPLHF

SEQ ID NO: 700145 - protein, 13 aa, Homo sapiens
  CDR3 for alpha chain variable domain of TCR clone 350073 (TRAV29/DV5, TRAJ31)
CAASRNNNARLMF

SEQ ID NO: 700146 - protein, 13 aa, Homo sapiens
  CDR3 for beta chain variable domain of TCR clone 350073 (TRBV4-1, TRBJ2-7)
CASSQGQAYEQYF

SEQ ID NO: 700147 - protein, 11 aa, Homo sapiens
  CDR3 for alpha chain variable domain of TCR clone 350074 (TRAV35, TRAJ22)
CAGPGVGQLTF

SEQ ID NO: 700148 - protein, 12 aa, Homo sapiens
  CDR3 for beta chain variable domain of TCR clone 350074 (TRBV2, TRBJ1-2)
CASSGQTYGYTF

SEQ ID NO: 700149 - protein, 18 aa, Homo sapiens
  CDR3 for alpha chain variable domain of TCR clone 350075 (TRAV1-2, TRAJ18)
CAVRDMGARGSTLGRLYF

SEQ ID NO: 700150 - protein, 15 aa, Homo sapiens
  CDR3 for beta chain variable domain of TCR clone 350075 (TRBV7-9, TRBJ2-1)
CASSFVGAGKNEQFF

SEQ ID NO: 700151 - protein, 11 aa, Homo sapiens
  CDR3 for alpha chain variable domain of TCR clone 350076 (TRAV2, TRAJ33)
CSVESNYQLIW

SEQ ID NO: 700152 - protein, 16 aa, Homo sapiens
  CDR3 for beta chain variable domain of TCR clone 350076 (TRBV20-1, TRBJ1-4)
CSAPGQGLLTNEKLFF

SEQ ID NO: 700153 - protein, 12 aa, Homo sapiens
  CDR3 for alpha chain variable domain of TCR clone 350077 (TRAV12-3, TRAJ17)
CAMTLTGNKLTF

SEQ ID NO: 700154 - protein, 15 aa, Homo sapiens
  CDR3 for beta chain variable domain of TCR clone 350077 (TRBV12-4, TRBJ2-5)
CASSPATGLQATQYF

SEQ ID NO: 700155 - protein, 16 aa, Homo sapiens
  CDR3 for alpha chain variable domain of TCR clone 350078 (TRAV3, TRAJ10)
CAGRDMRAGGGNKLTF

SEQ ID NO: 700156 - protein, 14 aa, Homo sapiens
  CDR3 for beta chain variable domain of TCR clone 350078 (TRBV12-4, TRBJ1-4)
CASRMTGRSEKLFF

SEQ ID NO: 700157 - protein, 13 aa, Homo sapiens
  CDR3 for alpha chain variable domain of TCR clone 350079 (TRAV1-2, TRAJ9)
CAALNTGGFKTIF

SEQ ID NO: 700158 - protein, 13 aa, Homo sapiens
  CDR3 for beta chain variable domain of TCR clone 350079 (TRBV20-1, TRBJ2-2)
RSASAAGTGELFF

SEQ ID NO: 700159 - protein, 18 aa, Homo sapiens
  CDR3 for alpha chain variable domain of TCR clone 350080 (TRAV17, TRAJ45)
CPTSLDLYSGGGADGLTF

SEQ ID NO: 700160 - protein, 15 aa, Homo sapiens
  CDR3 for beta chain variable domain of TCR clone 350080 (TRBV11-2, TRBJ2-1)
CASSKNRGLIYEQFF

SEQ ID NO: 700161 - protein, 12 aa, Homo sapiens
  CDR3 for alpha chain variable domain of TCR clone 350081 (TRAV3, TRAJ43)
CAVRDPNNDMRF

SEQ ID NO: 700162 - protein, 17 aa, Homo sapiens
  CDR3 for beta chain variable domain of TCR clone 350081 (TRBV7-8, TRBJ2-6)
CACSAGTGGAGANVLTF

SEQ ID NO: 700163 - protein, 18 aa, Homo sapiens
  CDR3 for alpha chain variable domain of TCR clone 350082 (TRAV26-2, TRAJ54)
CILRDVEVGIQGAQTLVF

SEQ ID NO: 700164 - protein, 16 aa, Homo sapiens
  CDR3 for beta chain variable domain of TCR clone 350082 (TRBV6-1, TRBJ2-5)
CASSETLDRGAETQYF

SEQ ID NO: 700165 - protein, 13 aa, Homo sapiens
  CDR3 for alpha chain variable domain of TCR clone 350083 (TRAV30, TRAJ49)
CGTEPNTCNQFYF

SEQ ID NO: 700166 - protein, 14 aa, Homo sapiens
  CDR3 for beta chain variable domain of TCR clone 350083 (TRBV29-1, TRBJ2-1)
CSVEFRGIPFEQFF

SEQ ID NO: 700167 - protein, 10 aa, Homo sapiens
  CDR3 for alpha chain variable domain of TCR clone 350084 (TRAV21, TRAJ49)
CAVTGNQIYF

SEQ ID NO: 700168 - protein, 15 aa, Homo sapiens
  CDR3 for beta chain variable domain of TCR clone 350084 (TRBV6-1, TRBJ2-3)
CASTTLAGHTDTQYF

SEQ ID NO: 700169 - protein, 15 aa, Homo sapiens
  CDR3 for alpha chain variable domain of TCR clone 350085 (TRAV4, TRAJ39)
CLVGPNNNAGNMLTF

SEQ ID NO: 700170 - protein, 13 aa, Homo sapiens
  CDR3 for beta chain variable domain of TCR clone 350085 (TRBV11-3, TRBJ2-5)
CASSSTGEETEYF

SEQ ID NO: 700171 - protein, 15 aa, Homo sapiens
  CDR3 for alpha chain variable domain of TCR clone 350086 (TRAV16, TRAJ26)
CITVFQRNYGQNFVF

SEQ ID NO: 700172 - protein, 15 aa, Homo sapiens
  CDR3 for beta chain variable domain of TCR clone 350086 (TRBV7-2, TRBJ2-3)
CASSLTGTSTYTQYF

SEQ ID NO: 700173 - protein, 13 aa, Homo sapiens
  CDR3 for alpha chain variable domain of TCR clone 350087 (TRAV21, TRAJ20)
CAVGLRVDYRISV

SEQ ID NO: 700174 - protein, 13 aa, Homo sapiens
  CDR3 for beta chain variable domain of TCR clone 350087 (TRBV6-1, TRBJ1-1)
CASSRQGNAEAFF

SEQ ID NO: 700175 - protein, 12 aa, Homo sapiens
  CDR3 for alpha chain variable domain of TCR clone 350088 (TRAV8-1, TRAJ49)
CAVFRTGNQFYF

SEQ ID NO: 700176 - protein, 12 aa, Homo sapiens
  CDR3 for beta chain variable domain of TCR clone 350088 (TRBV28, TRBJ2-3)
CASSGGPDTQYF

SEQ ID NO: 700177 - protein, 13 aa, Homo sapiens
  CDR3 for alpha chain variable domain of TCR clone 350089 (TRAV8-2, TRAJ43)
CVVSEQGDNDMRF

SEQ ID NO: 700178 - protein, 12 aa, Homo sapiens
  CDR3 for beta chain variable domain of TCR clone 350089 (TRBV7-9, TRBJ2-7)
CASRTGFDEQYF

SEQ ID NO: 700179 - protein, 17 aa, Homo sapiens
  CDR3 for alpha chain variable domain of TCR clone 350090 (TRAV27, TRAJ26)
CAGARAPLDNYGQNFFF

SEQ ID NO: 700180 - protein, 15 aa, Homo sapiens
  CDR3 for beta chain variable domain of TCR clone 350090 (TRBV11-2, TRBJ2-5)
CASSPRSGGLETQYL

SEQ ID NO: 700181 - protein, 12 aa, Homo sapiens
  CDR3 for alpha chain variable domain of TCR clone 350091 (TRAV12-1, TRAJ23)
CVVNNPGGKLIF

SEQ ID NO: 700182 - protein, 16 aa, Homo sapiens
  CDR3 for beta chain variable domain of TCR clone 350091 (TRBV11-1, TRBJ2-7)
CASSAQTGTLSYEQYF

SEQ ID NO: 700183 - protein, 14 aa, Homo sapiens
  CDR3 for alpha chain variable domain of TCR clone 350092 (TRAV8-3, TRAJ31)
CAVGRSLNNARPMF

SEQ ID NO: 700184 - protein, 15 aa, Homo sapiens
  CDR3 for beta chain variable domain of TCR clone 350092 (TRBV7-3, TRBJ2-1)
CASSLSSGSFDEQFF

SEQ ID NO: 700185 - protein, 14 aa, Homo sapiens
  CDR3 for alpha chain variable domain of TCR clone 350093 (TRAV13-1, TRAJ40)
CAASMTSGTYKYIF

SEQ ID NO: 700186 - protein, 14 aa, Homo sapiens
  CDR3 for beta chain variable domain of TCR clone 350093 (TRBV7-2, TRBJ2-5)
CASSPRGSSETQYF

SEQ ID NO: 700187 - protein, 11 aa, Homo sapiens
  CDR3 for alpha chain variable domain of TCR clone 350094 (TRAV16, TRAJ20)
CALREGFKAAL

SEQ ID NO: 700188 - protein, 13 aa, Homo sapiens
  CDR3 for beta chain variable domain of TCR clone 350094 (TRBV7-3, TRBJ2-1)
RASSLDSYNEQFF

SEQ ID NO: 700189 - protein, 13 aa, Homo sapiens
  CDR3 for alpha chain variable domain of TCR clone 350095 (TRAV13-1, TRAJ21)
CAASIYNFNKFYF

SEQ ID NO: 700190 - protein, 13 aa, Homo sapiens
  CDR3 for beta chain variable domain of TCR clone 350095 (TRBV12-4, TRBJ2-5)
CASSLGGSRTQYF

SEQ ID NO: 700191 - protein, 12 aa, Homo sapiens
  CDR3 for alpha chain variable domain of TCR clone 350096 (TRAV22, TRAJ22)
CAPGGSARQLTF

SEQ ID NO: 700192 - protein, 13 aa, Homo sapiens
  CDR3 for beta chain variable domain of TCR clone 350096 (TRBV9, TRBJ2-1)
CASSPSGGNEQFF

SEQ ID NO: 700193 - protein, 11 aa, Homo sapiens
  CDR3 for alpha chain variable domain of TCR clone 350097 (TRAV21, TRAJ34)
RAVTNTDKLIF

SEQ ID NO: 700194 - protein, 16 aa, Homo sapiens
  CDR3 for beta chain variable domain of TCR clone 350097 (TRBV18, TRBJ1-1)
CASSPGVGGRGGEAFF

SEQ ID NO: 700195 - protein, 14 aa, Homo sapiens
  CDR3 for alpha chain variable domain of TCR clone 350098 (TRAV13-1, TRAJ40)
CAASMTSGTYKYIF

SEQ ID NO: 700196 - protein, 15 aa, Homo sapiens
  CDR3 for beta chain variable domain of TCR clone 350098 (TRBV7-8, TRBJ2-1)
CASSLADSLYNEQFF

SEQ ID NO: 700197 - protein, 14 aa, Homo sapiens
  CDR3 for alpha chain variable domain of TCR clone 350099 (TRAV8-3, TRAJ4)
YAVGASGGYNKLIF

SEQ ID NO: 700198 - protein, 17 aa, Homo sapiens
  CDR3 for beta chain variable domain of TCR clone 350099 (TRBV11-2, TRBJ2-1)
CASSLYPPGVEYNEQFF

SEQ ID NO: 700199 - protein, 13 aa, Homo sapiens
  CDR3 for alpha chain variable domain of TCR clone 350100 (TRAV21, TRAJ27)
CAARPGNAGKSTF

SEQ ID NO: 700200 - protein, 14 aa, Homo sapiens
  CDR3 for beta chain variable domain of TCR clone 350100 (TRBV7-2, TRBJ2-7)
CAISPKTSFYEQYF

SEQ ID NO: 700201 - protein, 13 aa, Homo sapiens
  CDR3 for alpha chain variable domain of TCR clone 350101 (TRAV8-4, TRAJ27)
CAVSPRNAGKSTF

SEQ ID NO: 700202 - protein, 14 aa, Homo sapiens
  CDR3 for beta chain variable domain of TCR clone 350101 (TRBV5-7, TRBJ1-5)
CASSRTGGGQPQHF

SEQ ID NO: 700203 - protein, 12 aa, Homo sapiens
  CDR3 for alpha chain variable domain of TCR clone 350102 (TRAV12-3, TRAJ17)
CAMTLTGNKLTF

SEQ ID NO: 700204 - protein, 15 aa, Homo sapiens
  CDR3 for beta chain variable domain of TCR clone 350102 (TRBV20-1, TRBJ2-7)
CSARVRVAGMDEQYF

SEQ ID NO: 700205 - protein, 14 aa, Homo sapiens
  CDR3 for alpha chain variable domain of TCR clone 350103 (TRAV17, TRAJ6)
CATDASGGSYIPTF

SEQ ID NO: 700206 - protein, 15 aa, Homo sapiens
  CDR3 for beta chain variable domain of TCR clone 350103 (TRBV10-3, TRBJ2-3)
CAISLTSGGTDTQYF

SEQ ID NO: 700207 - protein, 13 aa, Homo sapiens
  CDR3 for alpha chain variable domain of TCR clone 350104 (TRAV20, TRAJ31)
CAVRAIGGSRLMF

SEQ ID NO: 700208 - protein, 14 aa, Homo sapiens
  CDR3 for beta chain variable domain of TCR clone 350104 (TRBV2, TRBJ1-5)
CASSGTVSNQPQHF

SEQ ID NO: 700209 - protein, 11 aa, Homo sapiens
  CDR3 for alpha chain variable domain of TCR clone 350105 (TRAV21, TRAJ11)
CAVNGYSTLTF

SEQ ID NO: 700210 - protein, 14 aa, Homo sapiens
  CDR3 for beta chain variable domain of TCR clone 350105 (TRBV7-6, TRBJ2-3)
CASSLGTVTDTQYF

SEQ ID NO: 700211 - protein, 13 aa, Homo sapiens
  CDR3 for alpha chain variable domain of TCR clone 350106 (TRAV17, TRAJ5)
CALRGTGRRALTF

SEQ ID NO: 700212 - protein, 14 aa, Homo sapiens
  CDR3 for beta chain variable domain of TCR clone 350106 (TRBV4-1, TRBJ2-2)
CASSQAVNTGELFF

SEQ ID NO: 700213 - protein, 11 aa, Homo sapiens
  CDR3 for alpha chain variable domain of TCR clone 350107 (TRAV35, TRAJ57)
GSQGGSEKLVF

SEQ ID NO: 700214 - protein, 18 aa, Homo sapiens
  CDR3 for beta chain variable domain of TCR clone 350107 (TRBV11-2, TRBJ2-3)
CASSLGGASRGAPNTQYF

SEQ ID NO: 700215 - protein, 15 aa, Homo sapiens
  CDR3 for alpha chain variable domain of TCR clone 350108 (TRAV25, TRAJ53)
CPTSNSGGSNYKLTF

SEQ ID NO: 700216 - protein, 15 aa, Homo sapiens
  CDR3 for beta chain variable domain of TCR clone 350108 (TRBV5-1, TRBJ2-1)
CASSPPRAPYNEQFF

SEQ ID NO: 700217 - protein, 16 aa, Homo sapiens
  CDR3 for alpha chain variable domain of TCR clone 350109 (TRAV1-1, TRAJ36)
CAVRDTLLPGANNLFF

SEQ ID NO: 700218 - protein, 17 aa, Homo sapiens
  CDR3 for beta chain variable domain of TCR clone 350109 (TRBV13, TRBJ2-3)
CASSLSRVAGGRNTQYF

SEQ ID NO: 700219 - protein, 14 aa, Homo sapiens
  CDR3 for alpha chain variable domain of TCR clone 350110 (TRAV13-1, TRAJ35)
CAASKGGFGNVLHC

SEQ ID NO: 700220 - protein, 12 aa, Homo sapiens
  CDR3 for beta chain variable domain of TCR clone 350110 (TRBV29-1, TRBJ2-3)
CSVTGGADTQYF

SEQ ID NO: 700221 - protein, 14 aa, Homo sapiens
  CDR3 for alpha chain variable domain of TCR clone 350111 (TRAV1-1, TRAJ27)
CAVVYNTNAGKSTF

SEQ ID NO: 700222 - protein, 18 aa, Homo sapiens
  CDR3 for beta chain variable domain of TCR clone 350111 (TRBV7-3, TRBJ2-1)
CASSLTLASGRAMVSSSS

SEQ ID NO: 700223 - protein, 13 aa, Homo sapiens
  CDR3 for alpha chain variable domain of TCR clone 350112 (TRAV2, TRAJ15)
CAVASQAGTALIF

SEQ ID NO: 700224 - protein, 15 aa, Homo sapiens
  CDR3 for beta chain variable domain of TCR clone 350112 (TRBV7-9, TRBJ2-1)
CASSLMGGQYNEQFF

SEQ ID NO: 700225 - protein, 13 aa, Homo sapiens
  CDR3 for alpha chain variable domain of TCR clone 350113 (TRAV12-3, TRAJ21)
CAPGPHNSNKFYF

SEQ ID NO: 700226 - protein, 13 aa, Homo sapiens
  CDR3 for beta chain variable domain of TCR clone 350113 (TRBV4-2, TRBJ1-1)
CASSQAGNTEAFF

SEQ ID NO: 700227 - protein, 15 aa, Homo sapiens
  CDR3 for alpha chain variable domain of TCR clone 350114 (TRAV26-1, TRAJ56)
CITRVATGANSKLTF

SEQ ID NO: 700228 - protein, 15 aa, Homo sapiens
  CDR3 for beta chain variable domain of TCR clone 350114 (TRBV27, TRBJ2-7)
CASSPQREGQREQYF

SEQ ID NO: 700229 - protein, 17 aa, Homo sapiens
  CDR3 for alpha chain variable domain of TCR clone 350115 (TRAV3, TRAJ38)
CAVRDCLNAGTNRKLIW

SEQ ID NO: 700230 - protein, 12 aa, Homo sapiens
  CDR3 for beta chain variable domain of TCR clone 350115 (TRBV29-1, TRBJ2-3)
CSVTGGADTQYF

SEQ ID NO: 700231 - protein, 19 aa, Homo sapiens
  CDR3 for alpha chain variable domain of TCR clone 350116 (TRAV27, TRAJ44)
ASTSVQDGINTGTASKLTF

SEQ ID NO: 700232 - protein, 14 aa, Homo sapiens
  CDR3 for beta chain variable domain of TCR clone 350116 (TRBV7-2, TRBJ2-1)
CASSLGVDYNEQFF

SEQ ID NO: 700233 - protein, 12 aa, Homo sapiens
  CDR3 for alpha chain variable domain of TCR clone 350117 (TRAV13-2, TRAJ8)
CAPWLGFQKLVF

SEQ ID NO: 700234 - protein, 16 aa, Homo sapiens
  CDR3 for beta chain variable domain of TCR clone 350117 (TRBV3-1, TRBJ1-2)
CASSQGQGVQRDGYTF

SEQ ID NO: 700235 - protein, 14 aa, Homo sapiens
  CDR3 for alpha chain variable domain of TCR clone 350118 (TRAV12-3, TRAJ10)
SHLPLTGGGNKLTF

SEQ ID NO: 700236 - protein, 12 aa, Homo sapiens
  CDR3 for beta chain variable domain of TCR clone 350118 (TRBV14, TRBJ2-7)
CASSLYKDEQYF

SEQ ID NO: 700237 - protein, 14 aa, Homo sapiens
  CDR3 for alpha chain variable domain of TCR clone 350119 (TRAV13-1, TRAJ40)
CAARSTSGTYKYSF

SEQ ID NO: 700238 - protein, 15 aa, Homo sapiens
  CDR3 for beta chain variable domain of TCR clone 350119 (TRBV18, TRBJ1-5)
CASSETGGNNQPQHF

SEQ ID NO: 700239 - protein, 15 aa, Homo sapiens
  CDR3 for alpha chain variable domain of TCR clone 350120 (TRAV12-2, TRAJ53)
CAVNGGGGSNYKLTF

SEQ ID NO: 700240 - protein, 17 aa, Homo sapiens
  CDR3 for beta chain variable domain of TCR clone 350120 (TRBV7-3, TRBJ2-3)
CASSLMKRMRGAGTQYF

SEQ ID NO: 700241 - protein, 10 aa, Homo sapiens
  CDR3 for alpha chain variable domain of TCR clone 350121 (TRAV1-2, TRAJ31)
CAFFDARLMF

SEQ ID NO: 700242 - protein, 17 aa, Homo sapiens
  CDR3 for beta chain variable domain of TCR clone 350121 (TRBV7-3, TRBJ2-3)
CASSLMKRMRGADTQYF

SEQ ID NO: 700243 - protein, 14 aa, Homo sapiens
  CDR3 for alpha chain variable domain of TCR clone 350122 (TRAV26-1, TRAJ44)
CIVKSTGTACKLTF

SEQ ID NO: 700244 - protein, 15 aa, Homo sapiens
  CDR3 for beta chain variable domain of TCR clone 350122 (TRBV19, TRBJ2-4)
CASSDGGGAKNIQYF

SEQ ID NO: 700245 - protein, 14 aa, Homo sapiens
  CDR3 for alpha chain variable domain of TCR clone 350123 (TRAV8-3, TRAJ4)
CVVGASGGYNKLIF

SEQ ID NO: 700246 - protein, 13 aa, Homo sapiens
  CDR3 for beta chain variable domain of TCR clone 350123 (TRBV18, TRBJ2-5)
CASSLQGQETQYF

SEQ ID NO: 700247 - protein, 13 aa, Homo sapiens
  CDR3 for alpha chain variable domain of TCR clone 350124 (TRAV13-1, TRAJ39)
CSKYSNAGNMLTF

SEQ ID NO: 700248 - protein, 13 aa, Homo sapiens
  CDR3 for beta chain variable domain of TCR clone 350124 (TRBV20-1, TRBJ2-3)
CSARLAGTDTQYF

SEQ ID NO: 700249 - protein, 18 aa, Homo sapiens
  CDR3 for alpha chain variable domain of TCR clone 350125 (TRAV17, TRAJ45)
CATSLDLYSGGGADGLTF

SEQ ID NO: 700250 - protein, 15 aa, Homo sapiens
  CDR3 for beta chain variable domain of TCR clone 350125 (TRBV11-3, TRBJ2-3)
CASSAGTVVTNTQYF

SEQ ID NO: 700251 - protein, 15 aa, Homo sapiens
  CDR3 for alpha chain variable domain of TCR clone 350126 (TRAV21, TRAJ24)
CAARSSTDSWGKLQF

SEQ ID NO: 700252 - protein, 13 aa, Homo sapiens
  CDR3 for beta chain variable domain of TCR clone 350126 (TRBV11-2, TRBJ2-5)
CASSFSSQETQYF

SEQ ID NO: 700253 - protein, 13 aa, Homo sapiens
  CDR3 for alpha chain variable domain of TCR clone 350127 (TRAV2, TRAJ36)
CAVAQTGANNLFF

SEQ ID NO: 700254 - protein, 12 aa, Homo sapiens
  CDR3 for beta chain variable domain of TCR clone 350127 (TRBV19, TRBJ1-1)
CASMNRYTEAFF

SEQ ID NO: 700255 - protein, 14 aa, Homo sapiens
  CDR3 for alpha chain variable domain of TCR clone 350128 (TRAV12-3, TRAJ10)
SHLPLTGGGNKLTF

SEQ ID NO: 700256 - protein, 17 aa, Homo sapiens
  CDR3 for beta chain variable domain of TCR clone 350128 (TRBV4-2, TRBJ2-1)
CASSQVSGLAMNNEQFF

SEQ ID NO: 700257 - protein, 14 aa, Homo sapiens
  CDR3 for alpha chain variable domain of TCR clone 350129 (TRAV38-1, TRAJ43)
CAFMKHNNNNDMLF

SEQ ID NO: 700258 - protein, 15 aa, Homo sapiens
  CDR3 for beta chain variable domain of TCR clone 350129 (TRBV9, TRBJ1-6)
CASSVAGTGDSPLHF

SEQ ID NO: 700259 - protein, 12 aa, Homo sapiens
  CDR3 for alpha chain variable domain of TCR clone 350130 (TRAV13-1, TRAJ49)
CAAPNTGNQFYF

SEQ ID NO: 700260 - protein, 17 aa, Homo sapiens
  CDR3 for beta chain variable domain of TCR clone 350130 (TRBV25-1, TRBJ2-7)
WASSDARVVFSSYEQYF

SEQ ID NO: 700261 - protein, 15 aa, Homo sapiens
  CDR3 for alpha chain variable domain of TCR clone 350131 (TRAV12-1, TRAJ44)
CVVFVNTGTASKLTF

SEQ ID NO: 700262 - protein, 15 aa, Homo sapiens
  CDR3 for beta chain variable domain of TCR clone 350131 (TRBV7-8, TRBJ2-3)
CASSLSADSGGAQYF

SEQ ID NO: 700263 - protein, 14 aa, Homo sapiens
  CDR3 for alpha chain variable domain of TCR clone 350132 (TRAV13-2, TRAJ43)
CAEIPTYNNNDMRF

SEQ ID NO: 700264 - protein, 15 aa, Homo sapiens
  CDR3 for beta chain variable domain of TCR clone 350132 (TRBV7-9, TRBJ2-2)
CASGPLDTFPEELFF

SEQ ID NO: 700265 - protein, 11 aa, Homo sapiens
  CDR3 for alpha chain variable domain of TCR clone 350133 (TRAV38-2/DV8, TRAJ23)
CALSRKLIFGQ

SEQ ID NO: 700266 - protein, 12 aa, Homo sapiens
  CDR3 for beta chain variable domain of TCR clone 350133 (TRBV7-2, TRBJ2-2)
CASSLGGGDLFF

SEQ ID NO: 700267 - protein, 15 aa, Homo sapiens
  CDR3 for alpha chain variable domain of TCR clone 350134 (TRAV12-2, TRAJ53)
CAVNGGGGSDSKLTF

SEQ ID NO: 700268 - protein, 14 aa, Homo sapiens
  CDR3 for beta chain variable domain of TCR clone 350134 (TRBV12-5, TRBJ2-5)
CASGSRTHQETQYF

SEQ ID NO: 700269 - protein, 14 aa, Homo sapiens
  CDR3 for alpha chain variable domain of TCR clone 350135 (TRAV13-1, TRAJ40)
FAASMTSGTYKYIF

SEQ ID NO: 700270 - protein, 13 aa, Homo sapiens
  CDR3 for beta chain variable domain of TCR clone 350135 (TRBV4-1, TRBJ2-5)
CASSQEVQETQYF

SEQ ID NO: 700271 - protein, 16 aa, Homo sapiens
  CDR3 for alpha chain variable domain of TCR clone 350136 (TRAV8-3, TRAJ10)
FAVGPGVTGGGNKLTF

SEQ ID NO: 700272 - protein, 13 aa, Homo sapiens
  CDR3 for beta chain variable domain of TCR clone 350136 (TRBV18, TRBJ1-1)
CASSPGPSGEAFF

SEQ ID NO: 700273 - protein, 15 aa, Homo sapiens
  CDR3 for alpha chain variable domain of TCR clone 350137 (TRAV3, TRAJ5)
CAVRDLDTGRRALTF

SEQ ID NO: 700274 - protein, 15 aa, Homo sapiens
  CDR3 for beta chain variable domain of TCR clone 350137 (TRBV19, TRBJ1-2)
CASTPGQVANYGYTF

SEQ ID NO: 700275 - protein, 12 aa, Homo sapiens
  CDR3 for alpha chain variable domain of TCR clone 350138 (TRAV17, TRAJ20)
CATDGDDYKLSF

SEQ ID NO: 700276 - protein, 18 aa, Homo sapiens
  CDR3 for beta chain variable domain of TCR clone 350138 (TRBV6-5, TRBJ2-5)
CASSYSQAGGSYQDTQYF

SEQ ID NO: 700277 - protein, 14 aa, Homo sapiens
  CDR3 for alpha chain variable domain of TCR clone 350139 (TRAV1-2, TRAJ8)
CAVREDTGFQKLVF

SEQ ID NO: 700278 - protein, 16 aa, Homo sapiens
  CDR3 for beta chain variable domain of TCR clone 350139 (TRBV4-1, TRBJ2-3)
CASGQSTSGAEDTQYF

SEQ ID NO: 700279 - protein, 13 aa, Homo sapiens
  CDR3 for alpha chain variable domain of TCR clone 350140 (TRAV8-6, TRAJ15)
CCDFNQAGIALIF

SEQ ID NO: 700280 - protein, 14 aa, Homo sapiens
  CDR3 for beta chain variable domain of TCR clone 350140 (TRBV6-5, TRBJ2-7)
CAASRSGGSYEQYF

SEQ ID NO: 700281 - protein, 13 aa, Homo sapiens
  CDR3 for alpha chain variable domain of TCR clone 350141 (TRAV2, TRAJ40)
CAVVTSGTYKYIF

SEQ ID NO: 700282 - protein, 14 aa, Homo sapiens
  CDR3 for beta chain variable domain of TCR clone 350141 (TRBV6-1, TRBJ1-1)
CASSGTGLNTEAFF

SEQ ID NO: 700283 - protein, 16 aa, Homo sapiens
  CDR3 for alpha chain variable domain of TCR clone 350142 (TRAV23/DV6, )
CADIQNPDRAVYQLRD

SEQ ID NO: 700284 - protein, 13 aa, Homo sapiens
  CDR3 for beta chain variable domain of TCR clone 350142 (TRBV28, TRBJ2-7)
CASRSSGVYEQYF

SEQ ID NO: 700285 - protein, 11 aa, Homo sapiens
  CDR3 for alpha chain variable domain of TCR clone 350143 (TRAV1-2, TRAJ31)
CAVNNNARLMF

SEQ ID NO: 700286 - protein, 17 aa, Homo sapiens
  CDR3 for beta chain variable domain of TCR clone 350143 (TRBV15, TRBJ2-3)
CATSGTTSEEGTDTQYL

SEQ ID NO: 700287 - protein, 16 aa, Homo sapiens
  CDR3 for alpha chain variable domain of TCR clone 350144 (TRAV17, TRAJ52)
CATGIIGGTSYGKLTF

SEQ ID NO: 700288 - protein, 16 aa, Homo sapiens
  CDR3 for beta chain variable domain of TCR clone 350144 (TRBV7-7, TRBJ2-1)
CASSLASGTSYNEQFF

SEQ ID NO: 700289 - protein, 18 aa, Homo sapiens
  CDR3 for alpha chain variable domain of TCR clone 350145 (TRAV21, TRAJ52)
CAVRPSPAGGTSCGKLTF

SEQ ID NO: 700290 - protein, 17 aa, Homo sapiens
  CDR3 for beta chain variable domain of TCR clone 350145 (TRBV13, TRBJ2-3)
CASSLSRVAGGRNTLYF

SEQ ID NO: 700291 - protein, 13 aa, Homo sapiens
  CDR3 for alpha chain variable domain of TCR clone 350146 (TRAV12-1, TRAJ49)
CVVNTNTGNQFYF

SEQ ID NO: 700292 - protein, 12 aa, Homo sapiens
  CDR3 for beta chain variable domain of TCR clone 350146 (TRBV5-1, TRBJ2-5)
CASSFSWETQYF

SEQ ID NO: 700293 - protein, 10 aa, Homo sapiens
  CDR3 for alpha chain variable domain of TCR clone 350147 (TRAV2, TRAJ34)
CAVVNDKLIF

SEQ ID NO: 700294 - protein, 16 aa, Homo sapiens
  CDR3 for beta chain variable domain of TCR clone 350147 (TRBV5-1, TRBJ2-3)
CASSLGLAVYTDTKYF

SEQ ID NO: 700295 - protein, 14 aa, Homo sapiens
  CDR3 for alpha chain variable domain of TCR clone 350148 (TRAV8-3, TRAJ15)
CALVRHQAGTALIF

SEQ ID NO: 700296 - protein, 13 aa, Homo sapiens
  CDR3 for beta chain variable domain of TCR clone 350148 (TRBV9, TRBJ2-7)
CASSASDSYEQYF

SEQ ID NO: 700297 - protein, 14 aa, Homo sapiens
  CDR3 for alpha chain variable domain of TCR clone 350149 (TRAV8-4, TRAJ9)
CAVSDRTGGFKTIF

SEQ ID NO: 700298 - protein, 13 aa, Homo sapiens
  CDR3 for beta chain variable domain of TCR clone 350149 (TRBV11-2, TRBJ2-7)
CASSLGDPYEQYF

SEQ ID NO: 700299 - protein, 12 aa, Homo sapiens
  CDR3 for alpha chain variable domain of TCR clone 350150 (TRAV2, TRAJ31)
CAVEDNNARLMF

SEQ ID NO: 700300 - protein, 14 aa, Homo sapiens
  CDR3 for beta chain variable domain of TCR clone 350150 (TRBV12-4, TRBJ2-5)
CASSPGLAGSRRYF

SEQ ID NO: 700301 - protein, 13 aa, Homo sapiens
  CDR3 for alpha chain variable domain of TCR clone 350151 (TRAV9-2, TRAJ37)
CALHSSNPGKLIF

SEQ ID NO: 700302 - protein, 15 aa, Homo sapiens
  CDR3 for beta chain variable domain of TCR clone 350151 (TRBV7-2, TRBJ2-7)
CASSTPGLTRGEQYF

SEQ ID NO: 700303 - protein, 13 aa, Homo sapiens
  CDR3 for alpha chain variable domain of TCR clone 350152 (TRAV1-1, TRAJ20)
CAVRGSNDYKLSF

SEQ ID NO: 700304 - protein, 12 aa, Homo sapiens
  CDR3 for beta chain variable domain of TCR clone 350152 (TRBV11-2, TRBJ2-2)
CASSLGGGELFF

SEQ ID NO: 700305 - protein, 18 aa, Homo sapiens
  CDR3 for alpha chain variable domain of TCR clone 350153 (TRAV21, TRAJ52)
CAVRPSPAGGTSYGKLTF

SEQ ID NO: 700306 - protein, 14 aa, Homo sapiens
  CDR3 for beta chain variable domain of TCR clone 350153 (TRBV6-6, TRBJ2-7)
CASQQGIRSYEQYF

SEQ ID NO: 700307 - protein, 10 aa, Homo sapiens
  CDR3 for alpha chain variable domain of TCR clone 350154 (TRAV20, TRAJ22)
CDAPARQLTF

SEQ ID NO: 700308 - protein, 14 aa, Homo sapiens
  CDR3 for beta chain variable domain of TCR clone 350154 (TRBV19, TRBJ2-1)
CASSMGSGATEQFF

SEQ ID NO: 700309 - protein, 16 aa, Homo sapiens
  CDR3 for alpha chain variable domain of TCR clone 350155 (TRAV1-1, TRAJ45)
CAVRAYSGGDADGLTF

SEQ ID NO: 700310 - protein, 13 aa, Homo sapiens
  CDR3 for beta chain variable domain of TCR clone 350155 (TRBV20-1, TRBJ1-2)
CSARGTADYGYTF

SEQ ID NO: 700311 - protein, 12 aa, Homo sapiens
  CDR3 for alpha chain variable domain of TCR clone 350156 (TRAV13-1, TRAJ21)
CAAFFNFNKFYF

SEQ ID NO: 700312 - protein, 15 aa, Homo sapiens
  CDR3 for beta chain variable domain of TCR clone 350156 (TRBV27, TRBJ2-1)
CASSLAGGAYNEQFF

SEQ ID NO: 700313 - protein, 14 aa, Homo sapiens
  CDR3 for alpha chain variable domain of TCR clone 350157 (TRAV3, TRAJ9)
CAVRLNTGGFKTIF

SEQ ID NO: 700314 - protein, 14 aa, Homo sapiens
  CDR3 for beta chain variable domain of TCR clone 350157 (TRBV13, TRBJ2-5)
CASSLERVGETQYF

SEQ ID NO: 700315 - protein, 13 aa, Homo sapiens
  CDR3 for alpha chain variable domain of TCR clone 350158 (TRAV13-1, TRAJ40)
CATISPGTYKYIF

SEQ ID NO: 700316 - protein, 13 aa, Homo sapiens
  CDR3 for beta chain variable domain of TCR clone 350158 (TRBV10-3, TRBJ2-7)
CAIRAGGPHEQYF

SEQ ID NO: 700317 - protein, 16 aa, Homo sapiens
  CDR3 for alpha chain variable domain of TCR clone 350159 (TRAV39, TRAJ32)
CAVDMEYGGATNKLIF

SEQ ID NO: 700318 - protein, 15 aa, Homo sapiens
  CDR3 for beta chain variable domain of TCR clone 350159 (TRBV11-3, TRBJ2-3)
CASLKDGREGDTQYF

SEQ ID NO: 700319 - protein, 14 aa, Homo sapiens
  CDR3 for alpha chain variable domain of TCR clone 350160 (TRAV12-2, TRAJ13)
CAVKKTGGYQKDTF

SEQ ID NO: 700320 - protein, 15 aa, Homo sapiens
  CDR3 for beta chain variable domain of TCR clone 350160 (TRBV7-2, TRBJ2-1)
CASSSGLAGGNEQFF

SEQ ID NO: 700321 - protein, 14 aa, Homo sapiens
  CDR3 for alpha chain variable domain of TCR clone 350161 (TRAV17, TRAJ57)
CATDPQGGSEKLVF

SEQ ID NO: 700322 - protein, 14 aa, Homo sapiens
  CDR3 for beta chain variable domain of TCR clone 350161 (TRBV11-2, TRBJ2-3)
CASSLGRGANTQYF

SEQ ID NO: 700323 - protein, 15 aa, Homo sapiens
  CDR3 for alpha chain variable domain of TCR clone 350162 (TRAV9-2, TRAJ8)
CALRGLNTGFQKLVF

SEQ ID NO: 700324 - protein, 12 aa, Homo sapiens
  CDR3 for beta chain variable domain of TCR clone 350162 (TRBV12-5, TRBJ2-5)
FASGQGVETQFF

SEQ ID NO: 700325 - protein, 13 aa, Homo sapiens
  CDR3 for alpha chain variable domain of TCR clone 350163 (TRAV27, TRAJ29)
CAGAHSGNTPLVF

SEQ ID NO: 700326 - protein, 13 aa, Homo sapiens
  CDR3 for beta chain variable domain of TCR clone 350163 (TRBV7-9, TRBJ1-2)
CASSLKQNYGYTC

SEQ ID NO: 700327 - protein, 10 aa, Homo sapiens
  CDR3 for alpha chain variable domain of TCR clone 350164 (TRAV13-2, TRAJ34)
CAENTDKLIF

SEQ ID NO: 700328 - protein, 12 aa, Homo sapiens
  CDR3 for beta chain variable domain of TCR clone 350164 (TRBV19, TRBJ1-2)
CASSPDVYGYTF

SEQ ID NO: 700329 - protein, 14 aa, Homo sapiens
  CDR3 for alpha chain variable domain of TCR clone 350165 (TRAV3, TRAJ22)
CAVRDYGSARQLTF

SEQ ID NO: 700330 - protein, 13 aa, Homo sapiens
  CDR3 for beta chain variable domain of TCR clone 350165 (TRBV11-3, TRBJ2-5)
CASGNGAKETQYF

SEQ ID NO: 700331 - protein, 14 aa, Homo sapiens
  CDR3 for alpha chain variable domain of TCR clone 350166 (TRAV12-3, TRAJ9)
CAMSPNTGGFKTIF

SEQ ID NO: 700332 - protein, 11 aa, Homo sapiens
  CDR3 for beta chain variable domain of TCR clone 350166 (TRBV7-9, TRBJ2-3)
CASSPTDTQYF

SEQ ID NO: 700333 - protein, 14 aa, Homo sapiens
  CDR3 for alpha chain variable domain of TCR clone 350167 (TRAV2, TRAJ20)
CAVEDGTNDYKLSF

SEQ ID NO: 700334 - protein, 17 aa, Homo sapiens
  CDR3 for beta chain variable domain of TCR clone 350167 (TRBV11-2, TRBJ2-1)
CASSLYPPGVEYNEQFF

SEQ ID NO: 700335 - protein, 19 aa, Homo sapiens
  CDR3 for alpha chain variable domain of TCR clone 350168 (TRAV2, TRAJ20)
ILQVREADAAVYRDCKLSF

SEQ ID NO: 700336 - protein, 14 aa, Homo sapiens
  CDR3 for beta chain variable domain of TCR clone 350168 (TRBV20-1, TRBJ1-1)
CSAQTRIGGTEAFF

SEQ ID NO: 700337 - protein, 15 aa, Homo sapiens
  CDR3 for alpha chain variable domain of TCR clone 350169 (TRAV12-1, TRAJ44)
CVVFVNTGTASKLTF

SEQ ID NO: 700338 - protein, 23 aa, Homo sapiens
  CDR3 for beta chain variable domain of TCR clone 350169 (TRBV7-8, TRBJ2-6)
CASRADRGRWGQRPDFRGRQQAD

SEQ ID NO: 700339 - protein, 11 aa, Homo sapiens
  CDR3 for alpha chain variable domain of TCR clone 350170 (TRAV2, TRAJ23)
CAVETRGKLIF

SEQ ID NO: 700340 - protein, 13 aa, Homo sapiens
  CDR3 for beta chain variable domain of TCR clone 350170 (TRBV20-1, TRBJ2-2)
CSASAAGTGELFF

SEQ ID NO: 700341 - protein, 16 aa, Homo sapiens
  CDR3 for alpha chain variable domain of TCR clone 350171 (TRAV12-1, TRAJ53)
CVVTSVAGGSNYKLTF

SEQ ID NO: 700342 - protein, 15 aa, Homo sapiens
  CDR3 for beta chain variable domain of TCR clone 350171 (TRBV20-1, TRBJ2-7)
CSARDRVSGMDEQYF

SEQ ID NO: 700343 - protein, 15 aa, Homo sapiens
  CDR3 for alpha chain variable domain of TCR clone 350172 (TRAV8-3, TRAJ11)
CAVGLLNSGYSTLTF

SEQ ID NO: 700344 - protein, 16 aa, Homo sapiens
  CDR3 for beta chain variable domain of TCR clone 350172 (TRBV7-9, TRBJ1-2)
CASSLGFSSGEDGDTV

SEQ ID NO: 700345 - protein, 16 aa, Homo sapiens
  CDR3 for alpha chain variable domain of TCR clone 350173 (TRAV30, TRAJ24)
CGTEIVDADSWGKLQF

SEQ ID NO: 700346 - protein, 17 aa, Homo sapiens
  CDR3 for beta chain variable domain of TCR clone 350173 (TRBV13, TRBJ2-3)
CASSLSRVAGGRNTQYF

SEQ ID NO: 700347 - protein, 14 aa, Homo sapiens
  CDR3 for alpha chain variable domain of TCR clone 350174 (TRAV1-2, TRAJ16)
CAVNRFSDGQKLFF

SEQ ID NO: 700348 - protein, 15 aa, Homo sapiens
  CDR3 for beta chain variable domain of TCR clone 350174 (TRBV29-1, TRBJ2-7)
CSVEFFDRGSYEQYF

SEQ ID NO: 700349 - protein, 14 aa, Homo sapiens
  CDR3 for alpha chain variable domain of TCR clone 350175 (TRAV3, TRAJ6)
CAVRDWGGSYIPTF

SEQ ID NO: 700350 - protein, 17 aa, Homo sapiens
  CDR3 for beta chain variable domain of TCR clone 350175 (TRBV6-5, TRBJ2-1)
CASRLSGRFESYNEQFL

SEQ ID NO: 700351 - protein, 17 aa, Homo sapiens
  CDR3 for alpha chain variable domain of TCR clone 350176 (TRAV3, TRAJ42)
CAVRDRDYGGSQGNLIF

SEQ ID NO: 700352 - protein, 10 aa, Homo sapiens
  CDR3 for beta chain variable domain of TCR clone 350176 (TRBV2, TRBJ2-5)
CASSAATQYF

SEQ ID NO: 700353 - protein, 13 aa, Homo sapiens
  CDR3 for alpha chain variable domain of TCR clone 350177 (TRAV13-1, TRAJ39)
CAASIWAGNMFTF

SEQ ID NO: 700354 - protein, 13 aa, Homo sapiens
  CDR3 for beta chain variable domain of TCR clone 350177 (TRBV11-2, TRBJ1-3)
CASSLEPVNTIYF

SEQ ID NO: 700355 - protein, 14 aa, Homo sapiens
  CDR3 for alpha chain variable domain of TCR clone 350178 (TRAV8-2, TRAJ37)
CVVSISGNTGKLIF

SEQ ID NO: 700356 - protein, 12 aa, Homo sapiens
  CDR3 for beta chain variable domain of TCR clone 350178 (TRBV5-1, TRBJ1-2)
CASSQDTYGYTF

SEQ ID NO: 700357 - protein, 14 aa, Homo sapiens
  CDR3 for alpha chain variable domain of TCR clone 350179 (TRAV21, TRAJ38)
CAVANAGNNRKLIW

SEQ ID NO: 700358 - protein, 16 aa, Homo sapiens
  CDR3 for beta chain variable domain of TCR clone 350179 (TRBV5-4, TRBJ2-1)
CASSWALAGAYNEQFF

SEQ ID NO: 700359 - protein, 11 aa, Homo sapiens
  CDR3 for alpha chain variable domain of TCR clone 350180 (TRAV29/DV5, TRAJ31)
CAASYRDRLMF

SEQ ID NO: 700360 - protein, 19 aa, Homo sapiens
  CDR3 for beta chain variable domain of TCR clone 350180 (TRBV19, TRBJ2-5)
CASSIGQVTDFFLGETQYF

SEQ ID NO: 700361 - protein, 14 aa, Homo sapiens
  CDR3 for alpha chain variable domain of TCR clone 350181 (TRAV13-1, TRAJ44)
CAAKATGTASKLTF

SEQ ID NO: 700362 - protein, 15 aa, Homo sapiens
  CDR3 for beta chain variable domain of TCR clone 350181 (TRBV10-3, TRBJ2-1)
CAIGDVQDRAYEQSF

SEQ ID NO: 700363 - protein, 16 aa, Homo sapiens
  CDR3 for alpha chain variable domain of TCR clone 350182 (TRAV26-2, TRAJ45)
CTTASPIGGGADGLTF

SEQ ID NO: 700364 - protein, 14 aa, Homo sapiens
  CDR3 for beta chain variable domain of TCR clone 350182 (TRBV29-1, TRBJ2-5)
CSFWTPYAGETQYF

SEQ ID NO: 700365 - protein, 12 aa, Homo sapiens
  CDR3 for alpha chain variable domain of TCR clone 350183 (TRAV8-3, TRAJ4)
PAFSVGYNKLSF

SEQ ID NO: 700366 - protein, 13 aa, Homo sapiens
  CDR3 for beta chain variable domain of TCR clone 350183 (TRBV20-1, TRBJ1-3)
CSAGAYSGNTIYF

SEQ ID NO: 700367 - protein, 11 aa, Homo sapiens
  CDR3 for alpha chain variable domain of TCR clone 350184 (TRAV3, TRAJ21)
CAVGNFNKFYF

SEQ ID NO: 700368 - protein, 14 aa, Homo sapiens
  CDR3 for beta chain variable domain of TCR clone 350184 (TRBV19, TRBJ1-5)
CASSLGPGGEPQHF

SEQ ID NO: 700369 - protein, 14 aa, Homo sapiens
  CDR3 for alpha chain variable domain of TCR clone 350185 (TRAV3, TRAJ17)
CAVRDAAAGNKLTF

SEQ ID NO: 700370 - protein, 15 aa, Homo sapiens
  CDR3 for beta chain variable domain of TCR clone 350185 (TRBV9, TRBJ1-6)
CASSVAWTGDSPLHF

SEQ ID NO: 700371 - protein, 17 aa, Homo sapiens
  CDR3 for alpha chain variable domain of TCR clone 350186 (TRAV3, TRAJ6)
CAVRDGPRAGGSYIPTF

SEQ ID NO: 700372 - protein, 14 aa, Homo sapiens
  CDR3 for beta chain variable domain of TCR clone 350186 (TRBV9, TRBJ2-1)
CASSVDPRGKEQFF

SEQ ID NO: 700373 - protein, 12 aa, Homo sapiens
  CDR3 for alpha chain variable domain of TCR clone 350187 (TRAV3, TRAJ20)
CAVIDPDYKLSF

SEQ ID NO: 700374 - protein, 14 aa, Homo sapiens
  CDR3 for beta chain variable domain of TCR clone 350187 (TRBV4-2, TRBJ2-1)
CASGLDRAYNEQFF

SEQ ID NO: 700375 - protein, 12 aa, Homo sapiens
  CDR3 for alpha chain variable domain of TCR clone 350188 (TRAV38-1, TRAJ57)
CAFMKLPPTLVF

SEQ ID NO: 700376 - protein, 12 aa, Homo sapiens
  CDR3 for beta chain variable domain of TCR clone 350188 (TRBV11-2, TRBJ2-2)
CASSLGGGELFF

SEQ ID NO: 700377 - protein, 13 aa, Homo sapiens
  CDR3 for alpha chain variable domain of TCR clone 350189 (TRAV13-1, TRAJ5)
CAASDTGRRALTF

SEQ ID NO: 700378 - protein, 11 aa, Homo sapiens
  CDR3 for beta chain variable domain of TCR clone 350189 (TRBV28, TRBJ2-3)
CSSLYRDTQYF

SEQ ID NO: 700379 - protein, 17 aa, Homo sapiens
  CDR3 for alpha chain variable domain of TCR clone 350190 (TRAV1-1, TRAJ32)
CAVRVDELWWCYKQAHL

SEQ ID NO: 700380 - protein, 16 aa, Homo sapiens
  CDR3 for beta chain variable domain of TCR clone 350190 (TRBV5-4, TRBJ2-3)
CASQQTGAGGADTQYF

SEQ ID NO: 700381 - protein, 13 aa, Homo sapiens
  CDR3 for alpha chain variable domain of TCR clone 350191 (TRAV17, TRAJ6)
CATGFVGSYIPTF

SEQ ID NO: 700382 - protein, 14 aa, Homo sapiens
  CDR3 for beta chain variable domain of TCR clone 350191 (TRBV5-1, TRBJ2-5)
CASSFGGSQETQYF

SEQ ID NO: 700383 - protein, 13 aa, Homo sapiens
  CDR3 for alpha chain variable domain of TCR clone 350192 (TRAV8-2, TRAJ49)
GVVTPNTGNQFYF

SEQ ID NO: 700384 - protein, 15 aa, Homo sapiens
  CDR3 for beta chain variable domain of TCR clone 350192 (TRBV11-2, TRBJ2-1)
CASSLTSGGYNEQFF

SEQ ID NO: 700385 - protein, 14 aa, Homo sapiens
  CDR3 for alpha chain variable domain of TCR clone 350193 (TRAV12-3, TRAJ13)
CAMRSSGGYQKVTF

SEQ ID NO: 700386 - protein, 14 aa, Homo sapiens
  CDR3 for beta chain variable domain of TCR clone 350193 (TRBV4-1, TRBJ1-6)
CASSPGSDSSPLHF

SEQ ID NO: 700387 - protein, 15 aa, Homo sapiens
  CDR3 for alpha chain variable domain of TCR clone 350194 (TRAV12-2, TRAJ57)
CAVSRGQGGSEKLVF

SEQ ID NO: 700388 - protein, 15 aa, Homo sapiens
  CDR3 for beta chain variable domain of TCR clone 350194 (TRBV7-2, TRBJ2-1)
CASTHGTGIYNEQFF

SEQ ID NO: 700389 - protein, 13 aa, Homo sapiens
  CDR3 for alpha chain variable domain of TCR clone 350195 (TRAV12-3, TRAJ13)
CAMSSGGYQKVTF

SEQ ID NO: 700390 - protein, 18 aa, Homo sapiens
  CDR3 for beta chain variable domain of TCR clone 350195 (TRBV7-9, TRBJ2-7)
CASSLTTSGSRTWYEQYF

SEQ ID NO: 700391 - protein, 11 aa, Homo sapiens
  CDR3 for alpha chain variable domain of TCR clone 350196 (TRAV1-2, TRAJ31)
CAVNNNARLMF

SEQ ID NO: 700392 - protein, 20 aa, Homo sapiens
  CDR3 for beta chain variable domain of TCR clone 350196 (TRBV7-8, TRBJ2-2)
CASSHLFPGPTIHITGELFF

SEQ ID NO: 700393 - protein, 16 aa, Homo sapiens
  CDR3 for alpha chain variable domain of TCR clone 350197 (TRAV30, TRAJ24)
CGTEIVDADSWGKFQF

SEQ ID NO: 700394 - protein, 16 aa, Homo sapiens
  CDR3 for beta chain variable domain of TCR clone 350197 (TRBV12-5, TRBJ2-5)
CASGPQTSGNQETQYF

SEQ ID NO: 700395 - protein, 17 aa, Homo sapiens
  CDR3 for alpha chain variable domain of TCR clone 350198 (TRAV38-1, TRAJ28)
CAFMKPTFGAGSYQLTF

SEQ ID NO: 700396 - protein, 15 aa, Homo sapiens
  CDR3 for beta chain variable domain of TCR clone 350198 (TRBV5-1, TRBJ2-4)
CASSLGGGGSYIQYF

SEQ ID NO: 700397 - protein, 14 aa, Homo sapiens
  CDR3 for alpha chain variable domain of TCR clone 350199 (TRAV2, TRAJ11)
CAVVPNSGYITLTF

SEQ ID NO: 700398 - protein, 15 aa, Homo sapiens
  CDR3 for beta chain variable domain of TCR clone 350199 (TRBV20-1, TRBJ2-7)
CSARDRVSGMDEQYF

SEQ ID NO: 700399 - protein, 13 aa, Homo sapiens
  CDR3 for alpha chain variable domain of TCR clone 350200 (TRAV20, TRAJ37)
CAGCSSNTGKLIF

SEQ ID NO: 700400 - protein, 14 aa, Homo sapiens
  CDR3 for beta chain variable domain of TCR clone 350200 (TRBV20-1, TRBJ2-5)
CSARDGRAGETKYF

SEQ ID NO: 700401 - protein, 16 aa, Homo sapiens
  CDR3 for alpha chain variable domain of TCR clone 350201 (TRAV36/DV7, TRAJ30)
CAVETYGLARDDKIIF

SEQ ID NO: 700402 - protein, 15 aa, Homo sapiens
  CDR3 for beta chain variable domain of TCR clone 350201 (TRBV4-1, TRBJ1-4)
CASSDTGGTNEKLFF

SEQ ID NO: 700403 - protein, 14 aa, Homo sapiens
  CDR3 for alpha chain variable domain of TCR clone 350202 (TRAV12-1, TRAJ17)
CLVNSKAAGNKLTF

SEQ ID NO: 700404 - protein, 15 aa, Homo sapiens
  CDR3 for beta chain variable domain of TCR clone 350202 (TRBV7-2, TRBJ2-1)
CASTHGTGIDNEQFF

SEQ ID NO: 700405 - protein, 14 aa, Homo sapiens
  CDR3 for alpha chain variable domain of TCR clone 350203 (TRAV12-2, TRAJ13)
CAVKKTGGYQKVTF

SEQ ID NO: 700406 - protein, 15 aa, Homo sapiens
  CDR3 for beta chain variable domain of TCR clone 350203 (TRBV4-1, TRBJ2-5)
CASSQASGEYETQYF

SEQ ID NO: 700407 - protein, 12 aa, Homo sapiens
  CDR3 for alpha chain variable domain of TCR clone 350204 (TRAV12-1, TRAJ40)
CVVYSGTYKYIF

SEQ ID NO: 700408 - protein, 13 aa, Homo sapiens
  CDR3 for beta chain variable domain of TCR clone 350204 (TRBV7-3, TRBJ1-1)
CASSQEWGAEAFF

SEQ ID NO: 700409 - protein, 14 aa, Homo sapiens
  CDR3 for alpha chain variable domain of TCR clone 350205 (TRAV26-1, TRAJ45)
CIVREGEGADGLTF

SEQ ID NO: 700410 - protein, 14 aa, Homo sapiens
  CDR3 for beta chain variable domain of TCR clone 350205 (TRBV2, TRBJ1-2)
CASNEGTGPYGYTF

SEQ ID NO: 700411 - protein, 18 aa, Homo sapiens
  CDR3 for alpha chain variable domain of TCR clone 350206 (TRAV9-2, TRAJ52)
CALSRHNAGGTSYGKLTF

SEQ ID NO: 700412 - protein, 15 aa, Homo sapiens
  CDR3 for beta chain variable domain of TCR clone 350206 (TRBV27, TRBJ2-1)
CASSNGGGSSIEQFF

SEQ ID NO: 700413 - protein, 14 aa, Homo sapiens
  CDR3 for alpha chain variable domain of TCR clone 350207 (TRAV1-2, TRAJ16)
CAVNRVSDGQKLLF

SEQ ID NO: 700414 - protein, 14 aa, Homo sapiens
  CDR3 for beta chain variable domain of TCR clone 350207 (TRBV7-8, TRBJ1-2)
CASSPDSLSYGYTF

SEQ ID NO: 700415 - protein, 13 aa, Homo sapiens
  CDR3 for alpha chain variable domain of TCR clone 350208 (TRAV27, TRAJ42)
CAGARGSQGNLIF

SEQ ID NO: 700416 - protein, 14 aa, Homo sapiens
  CDR3 for beta chain variable domain of TCR clone 350208 (TRBV2, TRBJ2-1)
CASRTGSSYNEQFF

SEQ ID NO: 700417 - protein, 17 aa, Homo sapiens
  CDR3 for alpha chain variable domain of TCR clone 350209 (TRAV24, TRAJ42)
CAFRVKNYGGSQGNLIF

SEQ ID NO: 700418 - protein, 14 aa, Homo sapiens
  CDR3 for beta chain variable domain of TCR clone 350209 (TRBV4-1, TRBJ2-2)
CASSQAVNTGELFF

SEQ ID NO: 700419 - protein, 12 aa, Homo sapiens
  CDR3 for alpha chain variable domain of TCR clone 350210 (TRAV12-3, TRAJ20)
CAMVRGDYKLSF

SEQ ID NO: 700420 - protein, 14 aa, Homo sapiens
  CDR3 for beta chain variable domain of TCR clone 350210 (TRBV27, TRBJ2-5)
CASSSLKGWETQYF

SEQ ID NO: 700421 - protein, 14 aa, Homo sapiens
  CDR3 for alpha chain variable domain of TCR clone 350211 (TRAV35, TRAJ13)
CAGSPSGGYQKVTF

SEQ ID NO: 700422 - protein, 14 aa, Homo sapiens
  CDR3 for beta chain variable domain of TCR clone 350211 (TRBV12-5, TRBJ2-5)
CASGTRTHQETQYF

SEQ ID NO: 700423 - protein, 14 aa, Homo sapiens
  CDR3 for alpha chain variable domain of TCR clone 350212 (TRAV13-1, TRAJ44)
CAPKATGTASKLTF

SEQ ID NO: 700424 - protein, 17 aa, Homo sapiens
  CDR3 for beta chain variable domain of TCR clone 350212 (TRBV7-3, TRBJ2-3)
CASSLMKRMRGADTQYF

SEQ ID NO: 700425 - protein, 12 aa, Homo sapiens
  CDR3 for alpha chain variable domain of TCR clone 350213 (TRAV1-1, TRAJ39)
CAVPVVGNMLTF

SEQ ID NO: 700426 - protein, 14 aa, Homo sapiens
  CDR3 for beta chain variable domain of TCR clone 350213 (TRBV7-8, TRBJ2-7)
CASSPRDRVYEQYF

SEQ ID NO: 700427 - protein, 15 aa, Homo sapiens
  CDR3 for alpha chain variable domain of TCR clone 350214 (TRAV27, TRAJ38)
CAARRNAGNNRKLIW

SEQ ID NO: 700428 - protein, 14 aa, Homo sapiens
  CDR3 for beta chain variable domain of TCR clone 350214 (TRBV18, TRBJ1-2)
CASSPPGQAYGYTF

SEQ ID NO: 700429 - protein, 14 aa, Homo sapiens
  CDR3 for alpha chain variable domain of TCR clone 350215 (TRAV26-1, TRAJ38)
CIADNAGNNRKLIW

SEQ ID NO: 700430 - protein, 16 aa, Homo sapiens
  CDR3 for beta chain variable domain of TCR clone 350215 (TRBV12-4, TRBJ2-5)
CASSFFVRGRQETQYF

SEQ ID NO: 700431 - protein, 16 aa, Homo sapiens
  CDR3 for alpha chain variable domain of TCR clone 350216 (TRAV26-1, TRAJ36)
CIVRVSYQTGANHLFF

SEQ ID NO: 700432 - protein, 13 aa, Homo sapiens
  CDR3 for beta chain variable domain of TCR clone 350216 (TRBV5-5, TRBJ1-5)
CASSLGIGGDQHF

SEQ ID NO: 700433 - protein, 17 aa, Homo sapiens
  CDR3 for alpha chain variable domain of TCR clone 350217 (TRAV14/DV4, TRAJ4)
CAMREASGMGGYNKLIF

SEQ ID NO: 700434 - protein, 14 aa, Homo sapiens
  CDR3 for beta chain variable domain of TCR clone 350217 (TRBV19, TRBJ2-7)
CASSMGQGAIEQYF

SEQ ID NO: 700435 - protein, 15 aa, Homo sapiens
  CDR3 for alpha chain variable domain of TCR clone 350218 (TRAV26-1, TRAJ40)
CIVRAVPSGTYKYIF

SEQ ID NO: 700436 - protein, 14 aa, Homo sapiens
  CDR3 for beta chain variable domain of TCR clone 350218 (TRBV27, TRBJ2-2)
CASRPGVNTGELFF

SEQ ID NO: 700437 - protein, 12 aa, Homo sapiens
  CDR3 for alpha chain variable domain of TCR clone 350219 (TRAV27, TRAJ35)
CAGTDFGNVLHC

SEQ ID NO: 700438 - protein, 16 aa, Homo sapiens
  CDR3 for beta chain variable domain of TCR clone 350219 (TRBV6-1, TRBJ2-1)
CASILRQGSSYNEQFF

SEQ ID NO: 700439 - protein, 16 aa, Homo sapiens
  CDR3 for alpha chain variable domain of TCR clone 350220 (TRAV23/DV6, TRAJ57)
CAASSTLSQGGSENLF

SEQ ID NO: 700440 - protein, 14 aa, Homo sapiens
  CDR3 for beta chain variable domain of TCR clone 350220 (TRBV25-1, TRBJ1-1)
CASTHLGGNTEAFF

SEQ ID NO: 700441 - protein, 14 aa, Homo sapiens
  CDR3 for alpha chain variable domain of TCR clone 350221 (TRAV1-2, TRAJ8)
CAGREDTGFQKLVF

SEQ ID NO: 700442 - protein, 13 aa, Homo sapiens
  CDR3 for beta chain variable domain of TCR clone 350221 (TRBV10-3, TRBJ1-2)
CAISERDSYGYTF

SEQ ID NO: 700443 - protein, 15 aa, Homo sapiens
  CDR3 for alpha chain variable domain of TCR clone 350222 (TRAV3, TRAJ17)
CAVRDTGAAGNKLTF

SEQ ID NO: 700444 - protein, 14 aa, Homo sapiens
  CDR3 for beta chain variable domain of TCR clone 350222 (TRBV6-3, TRBJ1-1)
CASSNLLPGAEAFC

SEQ ID NO: 700445 - protein, 16 aa, Homo sapiens
  CDR3 for alpha chain variable domain of TCR clone 350223 (TRAV12-1, TRAJ15)
CVVSPAGQSGRNCSDL

SEQ ID NO: 700446 - protein, 13 aa, Homo sapiens
  CDR3 for beta chain variable domain of TCR clone 350223 (TRBV7-2, TRBJ2-4)
CASSREHANIQYF

SEQ ID NO: 700447 - protein, 18 aa, Homo sapiens
  CDR3 for alpha chain variable domain of TCR clone 350224 (TRAV26-2, TRAJ45)
CILRVDKYSGGGADGLTF

SEQ ID NO: 700448 - protein, 14 aa, Homo sapiens
  CDR3 for beta chain variable domain of TCR clone 350224 (TRBV7-2, TRBJ2-7)
CASRSQGAAYEQYC

SEQ ID NO: 700449 - protein, 14 aa, Homo sapiens
  CDR3 for alpha chain variable domain of TCR clone 350225 (TRAV17, TRAJ57)
CSKDPQGGSEKLVF

SEQ ID NO: 700450 - protein, 16 aa, Homo sapiens
  CDR3 for beta chain variable domain of TCR clone 350225 (TRBV20-1, TRBJ1-4)
CSAPGQGLLTNEKLFF

SEQ ID NO: 700451 - protein, 16 aa, Homo sapiens
  CDR3 for alpha chain variable domain of TCR clone 350226 (TRAV17, TRAJ22)
CATDSISSGSARQLTF

SEQ ID NO: 700452 - protein, 15 aa, Homo sapiens
  CDR3 for beta chain variable domain of TCR clone 350226 (TRBV5-1, TRBJ2-1)
CASSPPRAPYNEQFF

SEQ ID NO: 700453 - protein, 10 aa, Homo sapiens
  CDR3 for alpha chain variable domain of TCR clone 350227 (TRAV1-2, TRAJ31)
CVSEDARLMF

SEQ ID NO: 700454 - protein, 14 aa, Homo sapiens
  CDR3 for beta chain variable domain of TCR clone 350227 (TRBV19, TRBJ2-1)
CASPNFVLSGEQFF

SEQ ID NO: 700455 - protein, 14 aa, Homo sapiens
  CDR3 for alpha chain variable domain of TCR clone 350228 (TRAV1-2, TRAJ16)
CAVNRFSDGQKLLF

SEQ ID NO: 700456 - protein, 14 aa, Homo sapiens
  CDR3 for beta chain variable domain of TCR clone 350228 (TRBV7-9, TRBJ2-3)
CASSLEDGTDTQYV

SEQ ID NO: 700457 - protein, 17 aa, Homo sapiens
  CDR3 for alpha chain variable domain of TCR clone 350229 (TRAV3, TRAJ6)
CAVRDGPRAGGSYIPTF

SEQ ID NO: 700458 - protein, 18 aa, Homo sapiens
  CDR3 for beta chain variable domain of TCR clone 350229 (TRBV7-6, TRBJ2-1)
CASSPRTSGMSSYNEQFF

SEQ ID NO: 700459 - protein, 13 aa, Homo sapiens
  CDR3 for alpha chain variable domain of TCR clone 350230 (TRAV35, TRAJ42)
CAGFPGSQGNLIF

SEQ ID NO: 700460 - protein, 15 aa, Homo sapiens
  CDR3 for beta chain variable domain of TCR clone 350230 (TRBV11-2, TRBJ1-3)
CASSLDGTVGNTIYF

SEQ ID NO: 700461 - protein, 15 aa, Homo sapiens
  CDR3 for alpha chain variable domain of TCR clone 350231 (TRAV2, TRAJ15)
CVVEDREQAGTALIF

SEQ ID NO: 700462 - protein, 13 aa, Homo sapiens
  CDR3 for beta chain variable domain of TCR clone 350231 (TRBV10-2, TRBJ2-3)
CASSESGDHTQYF

SEQ ID NO: 700463 - protein, 13 aa, Homo sapiens
  CDR3 for alpha chain variable domain of TCR clone 350232 (TRAV38-1, TRAJ42)
CARWGGSQGNLIF

SEQ ID NO: 700464 - protein, 12 aa, Homo sapiens
  CDR3 for beta chain variable domain of TCR clone 350232 (TRBV24-1, TRBJ1-1)
CATLYPDTEAFF

SEQ ID NO: 700465 - protein, 23 aa, Homo sapiens
  CDR3 for alpha chain variable domain of TCR clone 350233 (TRAV26-1, TRAJ52)
CCVYCIVRAHRNAGGTSYGKLTF

SEQ ID NO: 700466 - protein, 15 aa, Homo sapiens
  CDR3 for beta chain variable domain of TCR clone 350233 (TRBV29-1, TRBJ2-1)
CSGRDRKSSYNEQFF

SEQ ID NO: 700467 - protein, 13 aa, Homo sapiens
  CDR3 for alpha chain variable domain of TCR clone 350234 (TRAV12-1, TRAJ39)
CVVNYNAGNMLTF

SEQ ID NO: 700468 - protein, 14 aa, Homo sapiens
  CDR3 for beta chain variable domain of TCR clone 350234 (TRBV7-2, TRBJ2-7)
CASRSQGAAYEQYF

SEQ ID NO: 700469 - protein, 17 aa, Homo sapiens
  CDR3 for alpha chain variable domain of TCR clone 350235 (TRAV3, TRAJ42)
CAVRDRDYGGSKGNLIF

SEQ ID NO: 700470 - protein, 15 aa, Homo sapiens
  CDR3 for beta chain variable domain of TCR clone 350235 (TRBV6-6, TRBJ2-7)
CASSYSYGGSYGQYF

SEQ ID NO: 700471 - protein, 13 aa, Homo sapiens
  CDR3 for alpha chain variable domain of TCR clone 350236 (TRAV13-2, TRAJ13)
CADLSGGYHKVTF

SEQ ID NO: 700472 - protein, 15 aa, Homo sapiens
  CDR3 for beta chain variable domain of TCR clone 350236 (TRBV19, TRBJ1-1)
CASSIGGGRNTEAFF

SEQ ID NO: 700473 - protein, 14 aa, Homo sapiens
  CDR3 for alpha chain variable domain of TCR clone 350237 (TRAV17, TRAJ12)
CAILPMDSSYKLIF

SEQ ID NO: 700474 - protein, 16 aa, Homo sapiens
  CDR3 for beta chain variable domain of TCR clone 350237 (TRBV19, TRBJ2-1)
CASSKAGPSSYNEQFF

SEQ ID NO: 700475 - protein, 13 aa, Homo sapiens
  CDR3 for alpha chain variable domain of TCR clone 350238 (TRAV13-1, TRAJ39)
CAASIWAGDMLTF

SEQ ID NO: 700476 - protein, 17 aa, Homo sapiens
  CDR3 for beta chain variable domain of TCR clone 350238 (TRBV7-9, TRBJ1-1)
CASSLLEQGALKLSLDK

SEQ ID NO: 700477 - protein, 10 aa, Homo sapiens
  CDR3 for alpha chain variable domain of TCR clone 350239 (TRAV1-2, TRAJ23)
CAAWAGKLII

SEQ ID NO: 700478 - protein, 13 aa, Homo sapiens
  CDR3 for beta chain variable domain of TCR clone 350239 (TRBV7-3, TRBJ1-1)
CASSQDWGAEAFF

SEQ ID NO: 700479 - protein, 10 aa, Homo sapiens
  CDR3 for alpha chain variable domain of TCR clone 350240 (TRAV1-2, TRAJ20)
CACNDYKLSF

SEQ ID NO: 700480 - protein, 12 aa, Homo sapiens
  CDR3 for beta chain variable domain of TCR clone 350240 (TRBV11-2, TRBJ2-4)
CASSSASGSEYF

SEQ ID NO: 700481 - protein, 17 aa, Homo sapiens
  CDR3 for alpha chain variable domain of TCR clone 350241 (TRAV19, TRAJ53)
CALSEADSGGSNYQLTF

SEQ ID NO: 700482 - protein, 13 aa, Homo sapiens
  CDR3 for beta chain variable domain of TCR clone 350241 (TRBV29-1, TRBJ1-1)
CSVGDSRNTEAFF

SEQ ID NO: 700483 - protein, 14 aa, Homo sapiens
  CDR3 for alpha chain variable domain of TCR clone 350242 (TRAV26-1, TRAJ34)
CIVRVAYNTDKLIF

SEQ ID NO: 700484 - protein, 14 aa, Homo sapiens
  CDR3 for beta chain variable domain of TCR clone 350242 (TRBV7-2, TRBJ2-5)
CASSPRGSSETQYC

SEQ ID NO: 700485 - protein, 13 aa, Homo sapiens
  CDR3 for alpha chain variable domain of TCR clone 350243 (TRAV12-2, TRAJ37)
CAGGSGNTGKLIF

SEQ ID NO: 700486 - protein, 13 aa, Homo sapiens
  CDR3 for beta chain variable domain of TCR clone 350243 (TRBV12-5, TRBJ2-3)
CASGDRQSDTQYF

SEQ ID NO: 700487 - protein, 12 aa, Homo sapiens
  CDR3 for alpha chain variable domain of TCR clone 350244 (TRAV8-3, TRAJ26)
CACDNYGQNFVF

SEQ ID NO: 700488 - protein, 14 aa, Homo sapiens
  CDR3 for beta chain variable domain of TCR clone 350244 (TRBV5-5, TRBJ1-5)
CASSGQGVDQPQHF

SEQ ID NO: 700489 - protein, 13 aa, Homo sapiens
  CDR3 for alpha chain variable domain of TCR clone 350245 (TRAV13-2, TRAJ53)
CAEDMGSNYKLTF

SEQ ID NO: 700490 - protein, 19 aa, Homo sapiens
  CDR3 for beta chain variable domain of TCR clone 350245 (TRBV7-2, TRBJ2-3)
CASSFLSRNWGGGTDTQYF

SEQ ID NO: 700491 - protein, 15 aa, Homo sapiens
  CDR3 for alpha chain variable domain of TCR clone 350246 (TRAV3, TRAJ22)
CAVRDRGGSERQLTF

SEQ ID NO: 700492 - protein, 15 aa, Homo sapiens
  CDR3 for beta chain variable domain of TCR clone 350246 (TRBV11-2, TRBJ1-1)
CASSSRSSLLLSLDK

SEQ ID NO: 700493 - protein, 13 aa, Homo sapiens
  CDR3 for alpha chain variable domain of TCR clone 350247 (TRAV38-1, TRAJ42)
CARWGASQGNLIF

SEQ ID NO: 700494 - protein, 10 aa, Homo sapiens
  CDR3 for beta chain variable domain of TCR clone 350247 (TRBV2, TRBJ2-5)
CASSAATQYF

SEQ ID NO: 700495 - protein, 13 aa, Homo sapiens
  CDR3 for alpha chain variable domain of TCR clone 350248 (TRAV21, TRAJ9)
CAVRRSGGFKTIF

SEQ ID NO: 700496 - protein, 13 aa, Homo sapiens
  CDR3 for beta chain variable domain of TCR clone 350248 (TRBV7-2, TRBJ2-2)
CASSLAVTGELFF

SEQ ID NO: 700497 - protein, 15 aa, Homo sapiens
  CDR3 for alpha chain variable domain of TCR clone 350249 (TRAV13-2, TRAJ5)
CADNPHWTGRRALTF

SEQ ID NO: 700498 - protein, 16 aa, Homo sapiens
  CDR3 for beta chain variable domain of TCR clone 350249 (TRBV7-9, TRBJ1-3)
CASSQTSGLRMGTIYF

SEQ ID NO: 700499 - protein, 15 aa, Homo sapiens
  CDR3 for alpha chain variable domain of TCR clone 350250 (TRAV16, TRAJ12)
CSKWPLRDSSYKLIF

SEQ ID NO: 700500 - protein, 13 aa, Homo sapiens
  CDR3 for beta chain variable domain of TCR clone 350250 (TRBV4-2, TRBJ1-1)
CASSQAGKTEAFF

SEQ ID NO: 700501 - protein, 12 aa, Homo sapiens
  CDR3 for alpha chain variable domain of TCR clone 350251 (TRAV26-1, TRAJ54)
CIGGWGAQKLVF

SEQ ID NO: 700502 - protein, 11 aa, Homo sapiens
  CDR3 for beta chain variable domain of TCR clone 350251 (TRBV11-2, TRBJ1-2)
CASSSGKPGMA

SEQ ID NO: 700503 - protein, 18 aa, Homo sapiens
  CDR3 for alpha chain variable domain of TCR clone 350252 (TRAV26-1, TRAJ23)
CIVRVGLEVWNQGGKLIF

SEQ ID NO: 700504 - protein, 17 aa, Homo sapiens
  CDR3 for beta chain variable domain of TCR clone 350252 (TRBV4-1, TRBJ1-4)
CASSQEGPRGVEEKLFF

SEQ ID NO: 700505 - protein, 11 aa, Homo sapiens
  CDR3 for alpha chain variable domain of TCR clone 350253 (TRAV35, TRAJ30)
CAPGGDDKIIF

SEQ ID NO: 700506 - protein, 18 aa, Homo sapiens
  CDR3 for beta chain variable domain of TCR clone 350253 (TRBV7-6, TRBJ2-1)
GHVSLRQQLGGGADEQFF

SEQ ID NO: 700507 - protein, 14 aa, Homo sapiens
  CDR3 for alpha chain variable domain of TCR clone 350254 (TRAV12-2, TRAJ13)
CAVKKTGGYQKVTF

SEQ ID NO: 700508 - protein, 15 aa, Homo sapiens
  CDR3 for beta chain variable domain of TCR clone 350254 (TRBV6-3, TRBJ2-7)
CVSSSPGTVFYEQYF

SEQ ID NO: 700509 - protein, 14 aa, Homo sapiens
  CDR3 for alpha chain variable domain of TCR clone 350255 (TRAV17, TRAJ42)
CAQNYGGSQGNPIF

SEQ ID NO: 700510 - protein, 13 aa, Homo sapiens
  CDR3 for beta chain variable domain of TCR clone 350255 (TRBV20-1, TRBJ1-2)
CSAPRSGRYGYTF

SEQ ID NO: 700511 - protein, 12 aa, Homo sapiens
  CDR3 for alpha chain variable domain of TCR clone 350256 (TRAV29/DV5, TRAJ34)
CAASDNTDKPIF

SEQ ID NO: 700512 - protein, 11 aa, Homo sapiens
  CDR3 for beta chain variable domain of TCR clone 350256 (TRBV29-1, TRBJ2-5)
CSEDRTGTQYF

SEQ ID NO: 700513 - protein, 15 aa, Homo sapiens
  CDR3 for alpha chain variable domain of TCR clone 350257 (TRAV27, TRAJ45)
CAPVDSGGGADGRTF

SEQ ID NO: 700514 - protein, 15 aa, Homo sapiens
  CDR3 for beta chain variable domain of TCR clone 350257 (TRBV23-1, TRBJ1-5)
CASSQSRGQGWGAYI

SEQ ID NO: 700515 - protein, 13 aa, Homo sapiens
  CDR3 for alpha chain variable domain of TCR clone 350258 (TRAV13-2, TRAJ48)
CAEMDFGNEKLTF

SEQ ID NO: 700516 - protein, 13 aa, Homo sapiens
  CDR3 for beta chain variable domain of TCR clone 350258 (TRBV13, TRBJ2-5)
CASSPEVGENQYF

SEQ ID NO: 700517 - protein, 13 aa, Homo sapiens
  CDR3 for alpha chain variable domain of TCR clone 350259 (TRAV13-1, TRAJ40)
CAASKGGTYKYTF

SEQ ID NO: 700518 - protein, 13 aa, Homo sapiens
  CDR3 for beta chain variable domain of TCR clone 350259 (TRBV7-6, TRBJ1-2)
CASSLVADYGYTF

SEQ ID NO: 700519 - protein, 18 aa, Homo sapiens
  CDR3 for alpha chain variable domain of TCR clone 350260 (TRAV12-3, TRAJ52)
CAMSVGGAGGTSYGKLTF

SEQ ID NO: 700520 - protein, 14 aa, Homo sapiens
  CDR3 for beta chain variable domain of TCR clone 350260 (TRBV11-1, TRBJ1-1)
CASSLEHPNTEAFF

SEQ ID NO: 700521 - protein, 13 aa, Homo sapiens
  CDR3 for alpha chain variable domain of TCR clone 350261 (TRAV8-4, TRAJ47)
CAVTALHGNKLVF

SEQ ID NO: 700522 - protein, 14 aa, Homo sapiens
  CDR3 for beta chain variable domain of TCR clone 350261 (TRBV19, TRBJ2-7)
CASSIGGAVAEQYF

SEQ ID NO: 700523 - protein, 11 aa, Homo sapiens
  CDR3 for alpha chain variable domain of TCR clone 350262 (TRAV30, TRAJ23)
CGAEIAGKLIF

SEQ ID NO: 700524 - protein, 16 aa, Homo sapiens
  CDR3 for beta chain variable domain of TCR clone 350262 (TRBV7-2, TRBJ2-7)
CASTSQASSGGYEQYF

SEQ ID NO: 700525 - protein, 13 aa, Homo sapiens
  CDR3 for alpha chain variable domain of TCR clone 350263 (TRAV2, TRAJ40)
CAVVTSGTYKYIF

SEQ ID NO: 700526 - protein, 16 aa, Homo sapiens
  CDR3 for beta chain variable domain of TCR clone 350263 (TRBV9, TRBJ1-2)
CASSVEEKVSPYGYTF

SEQ ID NO: 700527 - protein, 14 aa, Homo sapiens
  CDR3 for alpha chain variable domain of TCR clone 350264 (TRAV12-3, TRAJ12)
CAMSGVDSSYKLIF

SEQ ID NO: 700528 - protein, 12 aa, Homo sapiens
  CDR3 for beta chain variable domain of TCR clone 350264 (TRBV18, TRBJ1-4)
CASSPSREKLFF

SEQ ID NO: 700529 - protein, 13 aa, Homo sapiens
  CDR3 for alpha chain variable domain of TCR clone 350265 (TRAV38-1, TRAJ42)
GARWGGSQGNLIF

SEQ ID NO: 700530 - protein, 17 aa, Homo sapiens
  CDR3 for beta chain variable domain of TCR clone 350265 (TRBV20-1, TRBJ2-1)
CSARDPLAGVWDNEQFF

SEQ ID NO: 700531 - protein, 14 aa, Homo sapiens
  CDR3 for alpha chain variable domain of TCR clone 350266 (TRAV30, TRAJ26)
CGTELVSYGQNFVF

SEQ ID NO: 700532 - protein, 13 aa, Homo sapiens
  CDR3 for beta chain variable domain of TCR clone 350266 (TRBV20-1, TRBJ2-2)
CSASAAGTGELFF

SEQ ID NO: 700533 - protein, 19 aa, Homo sapiens
  CDR3 for alpha chain variable domain of TCR clone 350267 (TRAV16, )
CALSGDIQNPDPAVYQLRN

SEQ ID NO: 700534 - protein, 16 aa, Homo sapiens
  CDR3 for beta chain variable domain of TCR clone 350267 (TRBV12-5, TRBJ2-5)
CASGPRTSGNQETQYF

SEQ ID NO: 700535 - protein, 13 aa, Homo sapiens
  CDR3 for alpha chain variable domain of TCR clone 350268 (TRAV12-1, TRAJ6)
CVVFPGGSYIPTF

SEQ ID NO: 700536 - protein, 15 aa, Homo sapiens
  CDR3 for beta chain variable domain of TCR clone 350268 (TRBV2, TRBJ2-7)
CASSEGLARSYEQYF

SEQ ID NO: 700537 - protein, 19 aa, Homo sapiens
  CDR3 for alpha chain variable domain of TCR clone 350269 (TRAV2, TRAJ20)
ILQVREADAAVYRDRKLSF

SEQ ID NO: 700538 - protein, 17 aa, Homo sapiens
  CDR3 for beta chain variable domain of TCR clone 350269 (TRBV11-2, TRBJ2-1)
CASSLYPPGVEYNEQFF

SEQ ID NO: 700539 - protein, 13 aa, Homo sapiens
  CDR3 for alpha chain variable domain of TCR clone 350270 (TRAV8-6, TRAJ8)
CAVRNTGFQKLVF

SEQ ID NO: 700540 - protein, 15 aa, Homo sapiens
  CDR3 for beta chain variable domain of TCR clone 350270 (TRBV28, TRBJ2-5)
CASSSGRTIQETQYL

SEQ ID NO: 700541 - protein, 16 aa, Homo sapiens
  CDR3 for alpha chain variable domain of TCR clone 350271 (TRAV30, TRAJ24)
CGTEIVDADSWGNSSL

SEQ ID NO: 700542 - protein, 14 aa, Homo sapiens
  CDR3 for beta chain variable domain of TCR clone 350271 (TRBV12-5, TRBJ2-5)
CASCSRTHQETQYV

SEQ ID NO: 700543 - protein, 14 aa, Homo sapiens
  CDR3 for alpha chain variable domain of TCR clone 350272 (TRAV38-1, TRAJ40)
CALRPTSGTYKYIF

SEQ ID NO: 700544 - protein, 13 aa, Homo sapiens
  CDR3 for beta chain variable domain of TCR clone 350272 (TRBV7-9, TRBJ1-1)
CASTQGMNTEAFF

SEQ ID NO: 700545 - protein, 12 aa, Homo sapiens
  CDR3 for alpha chain variable domain of TCR clone 350273 (TRAV2, TRAJ26)
CAGSPGRLLSEF

SEQ ID NO: 700546 - protein, 16 aa, Homo sapiens
  CDR3 for beta chain variable domain of TCR clone 350273 (TRBV13, TRBJ2-2)
CASSPRTGEHTGELLF

SEQ ID NO: 700547 - protein, 13 aa, Homo sapiens
  CDR3 for alpha chain variable domain of TCR clone 350274 (TRAV2, TRAJ29)
CAAQNSGNTPLVF

SEQ ID NO: 700548 - protein, 17 aa, Homo sapiens
  CDR3 for beta chain variable domain of TCR clone 350274 (TRBV13, TRBJ2-3)
CASSLSRVAGGRNTQYF

SEQ ID NO: 700549 - protein, 13 aa, Homo sapiens
  CDR3 for alpha chain variable domain of TCR clone 350275 (TRAV8-3, TRAJ48)
CALVPFGNEKLTF

SEQ ID NO: 700550 - protein, 12 aa, Homo sapiens
  CDR3 for beta chain variable domain of TCR clone 350275 (TRBV11-2, TRBJ2-2)
CASSLGGGELFF

SEQ ID NO: 700551 - protein, 16 aa, Homo sapiens
  CDR3 for alpha chain variable domain of TCR clone 350276 (TRAV30, TRAJ24)
CGTEIVDADSWGKFQF

SEQ ID NO: 700552 - protein, 13 aa, Homo sapiens
  CDR3 for beta chain variable domain of TCR clone 350276 (TRBV7-9, TRBJ1-1)
CASSLVSASEAFF

SEQ ID NO: 700553 - protein, 14 aa, Homo sapiens
  CDR3 for alpha chain variable domain of TCR clone 350277 (TRAV1-2, TRAJ8)
CAVREDPGFHKLVF

SEQ ID NO: 700554 - protein, 16 aa, Homo sapiens
  CDR3 for beta chain variable domain of TCR clone 350277 (TRBV5-1, TRBJ2-2)
CASSLWDTTNTGELFF

SEQ ID NO: 700555 - protein, 16 aa, Homo sapiens
  CDR3 for alpha chain variable domain of TCR clone 350278 (TRAV38-2/DV8, TRAJ47)
CAYRSAIMEYGHKLVF

SEQ ID NO: 700556 - protein, 14 aa, Homo sapiens
  CDR3 for beta chain variable domain of TCR clone 350278 (TRBV19, TRBJ2-7)
CASSIFAGTYEQYF

SEQ ID NO: 700557 - protein, 14 aa, Homo sapiens
  CDR3 for alpha chain variable domain of TCR clone 350279 (TRAV12-2, TRAJ24)
CAVTPADSWGKLQF

SEQ ID NO: 700558 - protein, 15 aa, Homo sapiens
  CDR3 for beta chain variable domain of TCR clone 350279 (TRBV9, TRBJ2-7)
CASSRGTLLGYEQYF

SEQ ID NO: 700559 - protein, 14 aa, Homo sapiens
  CDR3 for alpha chain variable domain of TCR clone 350280 (TRAV9-2, TRAJ39)
CALYIYNAGNMLTF

SEQ ID NO: 700560 - protein, 13 aa, Homo sapiens
  CDR3 for beta chain variable domain of TCR clone 350280 (TRBV7-3, TRBJ2-3)
SLSGYRPEDTRYF

SEQ ID NO: 700561 - protein, 14 aa, Homo sapiens
  CDR3 for alpha chain variable domain of TCR clone 350281 (TRAV9-2, TRAJ39)
CALYIYNAGNMLTF

SEQ ID NO: 700562 - protein, 16 aa, Homo sapiens
  CDR3 for beta chain variable domain of TCR clone 350281 (TRBV4-2, TRBJ2-5)
CASSQELVGSQETQYF

SEQ ID NO: 700563 - protein, 10 aa, Homo sapiens
  CDR3 for alpha chain variable domain of TCR clone 350282 (TRAV26-1, TRAJ46)
KKSSGDKLTF

SEQ ID NO: 700564 - protein, 16 aa, Homo sapiens
  CDR3 for beta chain variable domain of TCR clone 350282 (TRBV27, TRBJ2-2)
CASSFRGLVRTGELFF

SEQ ID NO: 700565 - protein, 15 aa, Homo sapiens
  CDR3 for alpha chain variable domain of TCR clone 350283 (TRAV26-1, TRAJ42)
FIVRVKGGSQGNLIF

SEQ ID NO: 700566 - protein, 14 aa, Homo sapiens
  CDR3 for beta chain variable domain of TCR clone 350283 (TRBV19, TRBJ2-2)
CATTGHANTGELFF

SEQ ID NO: 700567 - protein, 17 aa, Homo sapiens
  CDR3 for alpha chain variable domain of TCR clone 350284 (TRAV26-1, TRAJ37)
CIVRVITVSSNTGKLIF

SEQ ID NO: 700568 - protein, 13 aa, Homo sapiens
  CDR3 for beta chain variable domain of TCR clone 350284 (TRBV4-1, TRBJ2-7)
CASSQGQAYEQYF

SEQ ID NO: 700569 - protein, 15 aa, Homo sapiens
  CDR3 for alpha chain variable domain of TCR clone 350285 (TRAV14/DV4, TRAJ10)
CAMRELTGGGNKLTF

SEQ ID NO: 700570 - protein, 16 aa, Homo sapiens
  CDR3 for beta chain variable domain of TCR clone 350285 (TRBV27, TRBJ2-5)
CASSFGPGGTKETQYF

SEQ ID NO: 700571 - protein, 22 aa, Homo sapiens
  CDR3 for alpha chain variable domain of TCR clone 350286 (TRAV12-2, TRAJ53)
SPVIQPPTSVPPILSSNYKLTF

SEQ ID NO: 700572 - protein, 14 aa, Homo sapiens
  CDR3 for beta chain variable domain of TCR clone 350286 (TRBV19, TRBJ2-5)
CASSLTGGEETQYF

SEQ ID NO: 700573 - protein, 16 aa, Homo sapiens
  CDR3 for alpha chain variable domain of TCR clone 350287 (TRAV26-1, TRAJ37)
CIIRGDGSGNTGKLIL

SEQ ID NO: 700574 - protein, 17 aa, Homo sapiens
  CDR3 for beta chain variable domain of TCR clone 350287 (TRBV4-1, TRBJ2-7)
CASSRDPLGVRGGEQYF

SEQ ID NO: 700575 - protein, 16 aa, Homo sapiens
  CDR3 for alpha chain variable domain of TCR clone 350288 (TRAV12-2, TRAJ32)
CAVNLGQGGAINKLIF

SEQ ID NO: 700576 - protein, 15 aa, Homo sapiens
  CDR3 for beta chain variable domain of TCR clone 350288 (TRBV20-1, TRBJ2-7)
GSARGPLAGGREQYF

SEQ ID NO: 700577 - protein, 12 aa, Homo sapiens
  CDR3 for alpha chain variable domain of TCR clone 350289 (TRAV13-1, TRAJ21)
CAAKEGFNKFYF

SEQ ID NO: 700578 - protein, 12 aa, Homo sapiens
  CDR3 for beta chain variable domain of TCR clone 350289 (TRBV7-6, TRBJ2-7)
CASSLDPVEQYF

SEQ ID NO: 700579 - protein, 14 aa, Homo sapiens
  CDR3 for alpha chain variable domain of TCR clone 350290 (TRAV1-2, TRAJ16)
CAVNRFSDGPKLLF

SEQ ID NO: 700580 - protein, 16 aa, Homo sapiens
  CDR3 for beta chain variable domain of TCR clone 350290 (TRBV12-4, TRBJ1-5)
CASSRPVGGSNQPQHF

SEQ ID NO: 700581 - protein, 17 aa, Homo sapiens
  CDR3 for alpha chain variable domain of TCR clone 350291 (TRAV4, TRAJ18)
CLVGERSVGSTLGRLYF

SEQ ID NO: 700582 - protein, 17 aa, Homo sapiens
  CDR3 for beta chain variable domain of TCR clone 350291 (TRBV11-2, TRBJ2-1)
CASSLYPPGVEYNEQFF

SEQ ID NO: 700583 - protein, 15 aa, Homo sapiens
  CDR3 for alpha chain variable domain of TCR clone 350292 (TRAV17, TRAJ57)
CATGPSQGGSEKLVF

SEQ ID NO: 700584 - protein, 16 aa, Homo sapiens
  CDR3 for beta chain variable domain of TCR clone 350292 (TRBV12-4, TRBJ1-5)
CASSRPVGGANQAQHF

SEQ ID NO: 700585 - protein, 13 aa, Homo sapiens
  CDR3 for alpha chain variable domain of TCR clone 350293 (TRAV25, TRAJ30)
CAGRVDRDDKIIF

SEQ ID NO: 700586 - protein, 17 aa, Homo sapiens
  CDR3 for beta chain variable domain of TCR clone 350293 (TRBV7-9, TRBJ2-6)
CASSFGAGYSGANDPTF

SEQ ID NO: 700587 - protein, 15 aa, Homo sapiens
  CDR3 for alpha chain variable domain of TCR clone 350294 (TRAV26-1, TRAJ29)
CIVRVEGSGNTPLVF

SEQ ID NO: 700588 - protein, 14 aa, Homo sapiens
  CDR3 for beta chain variable domain of TCR clone 350294 (TRBV7-7, TRBJ2-2)
CATRQDSDTGELFF

SEQ ID NO: 700589 - protein, 14 aa, Homo sapiens
  CDR3 for alpha chain variable domain of TCR clone 350295 (TRAV12-3, TRAJ10)
SHLPLTGGGNKLTF

SEQ ID NO: 700590 - protein, 15 aa, Homo sapiens
  CDR3 for beta chain variable domain of TCR clone 350295 (TRBV10-3, TRBJ2-1)
CHQWSGDGGGGEQFF

SEQ ID NO: 700591 - protein, 15 aa, Homo sapiens
  CDR3 for alpha chain variable domain of TCR clone 350296 (TRAV2, TRAJ9)
CAVEDRGTGGFKTIF

SEQ ID NO: 700592 - protein, 13 aa, Homo sapiens
  CDR3 for beta chain variable domain of TCR clone 350296 (TRBV20-1, TRBJ1-1)
CSARVGGNTEAFF

SEQ ID NO: 700593 - protein, 14 aa, Homo sapiens
  CDR3 for alpha chain variable domain of TCR clone 350297 (TRAV17, TRAJ15)
CATDRGHAGTALIF

SEQ ID NO: 700594 - protein, 17 aa, Homo sapiens
  CDR3 for beta chain variable domain of TCR clone 350297 (TRBV29-1, TRBJ2-1)
CSVVGLAGAYSYNEQFF

SEQ ID NO: 700595 - protein, 14 aa, Homo sapiens
  CDR3 for alpha chain variable domain of TCR clone 350298 (TRAV17, TRAJ15)
CATMGIQAGTALIF

SEQ ID NO: 700596 - protein, 17 aa, Homo sapiens
  CDR3 for beta chain variable domain of TCR clone 350298 (TRBV13, TRBJ2-3)
CASSLSRVAGGRNTQYF

SEQ ID NO: 700597 - protein, 14 aa, Homo sapiens
  CDR3 for alpha chain variable domain of TCR clone 350299 (TRAV12-2, TRAJ53)
CRERGGGSNYKLTF

SEQ ID NO: 700598 - protein, 17 aa, Homo sapiens
  CDR3 for beta chain variable domain of TCR clone 350299 (TRBV7-3, TRBJ2-3)
RASSLVKRMRGADTQYF

SEQ ID NO: 700599 - protein, 18 aa, Homo sapiens
  CDR3 for alpha chain variable domain of TCR clone 350300 (TRAV26-2, TRAJ33)
CCVLLHPEEPASNSQLIW

SEQ ID NO: 700600 - protein, 13 aa, Homo sapiens
  CDR3 for beta chain variable domain of TCR clone 350300 (TRBV24-1, TRBJ2-2)
CATSDWSTGELFF

SEQ ID NO: 700601 - protein, 17 aa, Homo sapiens
  CDR3 for alpha chain variable domain of TCR clone 350301 (TRAV3, TRAJ6)
CAVRDGPRSVGSYIPTF

SEQ ID NO: 700602 - protein, 20 aa, Homo sapiens
  CDR3 for beta chain variable domain of TCR clone 350301 (TRBV28, TRBJ2-1)
CASTPIARSPGLAGGNEQFF

SEQ ID NO: 700603 - protein, 11 aa, Homo sapiens
  CDR3 for alpha chain variable domain of TCR clone 350302 (TRAV12-1, TRAJ34)
CVVNKGRELIF

SEQ ID NO: 700604 - protein, 12 aa, Homo sapiens
  CDR3 for beta chain variable domain of TCR clone 350302 (TRBV2, TRBJ2-1)
CAYGPPGNAQFF

SEQ ID NO: 700605 - protein, 16 aa, Homo sapiens
  CDR3 for alpha chain variable domain of TCR clone 350303 (TRAV30, TRAJ24)
CGTEIVDADSWGKFQF

SEQ ID NO: 700606 - protein, 14 aa, Homo sapiens
  CDR3 for beta chain variable domain of TCR clone 350303 (TRBV2, TRBJ1-2)
CASNEGTGPYGYTF

SEQ ID NO: 700607 - protein, 15 aa, Homo sapiens
  CDR3 for alpha chain variable domain of TCR clone 350304 (TRAV3, TRAJ12)
CAWRDIRDSSYKLIF

SEQ ID NO: 700608 - protein, 15 aa, Homo sapiens
  CDR3 for beta chain variable domain of TCR clone 350304 (TRBV27, TRBJ2-7)
CASSLRNEQGYEQYF

SEQ ID NO: 700609 - protein, 17 aa, Homo sapiens
  CDR3 for alpha chain variable domain of TCR clone 350305 (TRAV21, TRAJ24)
CAGIRLRSTDSGGKLQF

SEQ ID NO: 700610 - protein, 15 aa, Homo sapiens
  CDR3 for beta chain variable domain of TCR clone 350305 (TRBV7-2, TRBJ2-3)
CASSPRGLSTDTQYF

SEQ ID NO: 700611 - protein, 13 aa, Homo sapiens
  CDR3 for alpha chain variable domain of TCR clone 350306 (TRAV8-4, TRAJ48)
CAVSLFGNEKLTF

SEQ ID NO: 700612 - protein, 15 aa, Homo sapiens
  CDR3 for beta chain variable domain of TCR clone 350306 (TRBV20-1, TRBJ2-7)
CSARKGLAESYEQYF

SEQ ID NO: 700613 - protein, 12 aa, Homo sapiens
  CDR3 for alpha chain variable domain of TCR clone 350307 (TRAV8-4, TRAJ31)
CAVSDSNARPMF

SEQ ID NO: 700614 - protein, 15 aa, Homo sapiens
  CDR3 for beta chain variable domain of TCR clone 350307 (TRBV27, TRBJ2-7)
CASRFWGQGADEQYF

SEQ ID NO: 700615 - protein, 14 aa, Homo sapiens
  CDR3 for alpha chain variable domain of TCR clone 350308 (TRAV12-2, TRAJ13)
CAVKKTGGYQKVTF

SEQ ID NO: 700616 - protein, 14 aa, Homo sapiens
  CDR3 for beta chain variable domain of TCR clone 350308 (TRBV19, TRBJ2-1)
CASPTFVLSGQQFF

SEQ ID NO: 700617 - protein, 18 aa, Homo sapiens
  CDR3 for alpha chain variable domain of TCR clone 350309 (TRAV26-1, TRAJ23)
CIVRAGLEVWNQGGKLIF

SEQ ID NO: 700618 - protein, 13 aa, Homo sapiens
  CDR3 for beta chain variable domain of TCR clone 350309 (TRBV7-2, TRBJ2-2)
CASSLAVTGELFF

SEQ ID NO: 700619 - protein, 15 aa, Homo sapiens
  CDR3 for alpha chain variable domain of TCR clone 350310 (TRAV12-1, TRAJ44)
CVVFVNTGTASKLTF

SEQ ID NO: 700620 - protein, 17 aa, Homo sapiens
  CDR3 for beta chain variable domain of TCR clone 350310 (TRBV7-8, TRBJ2-6)
CASSAGTGGAGANVLLS

SEQ ID NO: 700621 - protein, 13 aa, Homo sapiens
  CDR3 for alpha chain variable domain of TCR clone 350311 (TRAV8-6, TRAJ49)
CAVITNTGNQFYF

SEQ ID NO: 700622 - protein, 11 aa, Homo sapiens
  CDR3 for beta chain variable domain of TCR clone 350311 (TRBV6-3, TRBJ2-3)
CATGQADTQYF

SEQ ID NO: 700623 - protein, 17 aa, Homo sapiens
  CDR3 for alpha chain variable domain of TCR clone 350312 (TRAV26-2, TRAJ42)
CILRDESYGGSQGNLIF

SEQ ID NO: 700624 - protein, 12 aa, Homo sapiens
  CDR3 for beta chain variable domain of TCR clone 350312 (TRBV11-2, TRBJ2-7)
CASSLPTYEQYF

SEQ ID NO: 700625 - protein, 13 aa, Homo sapiens
  CDR3 for alpha chain variable domain of TCR clone 350313 (TRAV27, TRAJ37)
CAGGPSNAGKLIF

SEQ ID NO: 700626 - protein, 16 aa, Homo sapiens
  CDR3 for beta chain variable domain of TCR clone 350313 (TRBV19, TRBJ2-2)
CASSFPGQGLAGELFF

SEQ ID NO: 700627 - protein, 11 aa, Homo sapiens
  CDR3 for alpha chain variable domain of TCR clone 350314 (TRAV2, TRAJ13)
CASGGYQKVTF

SEQ ID NO: 700628 - protein, 18 aa, Homo sapiens
  CDR3 for beta chain variable domain of TCR clone 350314 (TRBV11-2, TRBJ2-3)
CASSVGGASRGAPNTQYF

SEQ ID NO: 700629 - protein, 16 aa, Homo sapiens
  CDR3 for alpha chain variable domain of TCR clone 350315 (TRAV26-1, TRAJ37)
CIVRGYGSGNTGKLIF

SEQ ID NO: 700630 - protein, 17 aa, Homo sapiens
  CDR3 for beta chain variable domain of TCR clone 350315 (TRBV4-1, TRBJ2-7)
CASSRDPLGVRGGEQYF

SEQ ID NO: 700631 - protein, 16 aa, Homo sapiens
  CDR3 for alpha chain variable domain of TCR clone 350316 (TRAV3, TRAJ37)
CAVRGKGFGNTGKLIF

SEQ ID NO: 700632 - protein, 13 aa, Homo sapiens
  CDR3 for beta chain variable domain of TCR clone 350316 (TRBV7-2, TRBJ2-2)
CASSSVRAGELFF

SEQ ID NO: 700633 - protein, 15 aa, Homo sapiens
  CDR3 for alpha chain variable domain of TCR clone 350317 (TRAV23/DV6, TRAJ45)
CAAKNGGGGADGITF

SEQ ID NO: 700634 - protein, 13 aa, Homo sapiens
  CDR3 for beta chain variable domain of TCR clone 350317 (TRBV20-1, TRBJ1-1)
CSARGGGNTEAFF

SEQ ID NO: 700635 - protein, 11 aa, Homo sapiens
  CDR3 for alpha chain variable domain of TCR clone 350318 (TRAV1-2, TRAJ31)
CAVNNNARLMF

SEQ ID NO: 700636 - protein, 17 aa, Homo sapiens
  CDR3 for beta chain variable domain of TCR clone 350318 (TRBV20-1, TRBJ2-1)
CSARDPLAGVWDNEQFF

SEQ ID NO: 700637 - protein, 14 aa, Homo sapiens
  CDR3 for alpha chain variable domain of TCR clone 350319 (TRAV1-2, TRAJ8)
CAVREDTGFQKLVF

SEQ ID NO: 700638 - protein, 12 aa, Homo sapiens
  CDR3 for beta chain variable domain of TCR clone 350319 (TRBV11-2, TRBJ2-2)
CASSRPTGELFF

SEQ ID NO: 700639 - protein, 12 aa, Homo sapiens
  CDR3 for alpha chain variable domain of TCR clone 350320 (TRAV12-2, TRAJ7)
CAVMRGNKRLAF

SEQ ID NO: 700640 - protein, 13 aa, Homo sapiens
  CDR3 for beta chain variable domain of TCR clone 350320 (TRBV14, TRBJ1-1)
CASSREFGTEAFF

SEQ ID NO: 700641 - protein, 15 aa, Homo sapiens
  CDR3 for alpha chain variable domain of TCR clone 350321 (TRAV26-1, TRAJ23)
CIVRVLNNQGGKLIF

SEQ ID NO: 700642 - protein, 15 aa, Homo sapiens
  CDR3 for beta chain variable domain of TCR clone 350321 (TRBV28, TRBJ2-1)
CASSIIAGGRSEQFF

SEQ ID NO: 700643 - protein, 14 aa, Homo sapiens
  CDR3 for alpha chain variable domain of TCR clone 350322 (TRAV35, TRAJ50)
CAGHRKTSCDKVIF

SEQ ID NO: 700644 - protein, 13 aa, Homo sapiens
  CDR3 for beta chain variable domain of TCR clone 350322 (TRBV7-7, TRBJ2-3)
CASSLSRADTQYF

SEQ ID NO: 700645 - protein, 19 aa, Homo sapiens
  CDR3 for alpha chain variable domain of TCR clone 350323 (TRAV26-2, TRAJ13)
CCVLLHPRDLSGGYQKVTF

SEQ ID NO: 700646 - protein, 11 aa, Homo sapiens
  CDR3 for beta chain variable domain of TCR clone 350323 (TRBV7-9, TRBJ2-3)
CASSYTDTQYF

SEQ ID NO: 700647 - protein, 16 aa, Homo sapiens
  CDR3 for alpha chain variable domain of TCR clone 350324 (TRAV3, TRAJ10)
CALRDMRAGGGNKLTF

SEQ ID NO: 700648 - protein, 17 aa, Homo sapiens
  CDR3 for beta chain variable domain of TCR clone 350324 (TRBV28, TRBJ2-5)
CASSTPEGDALQETQYF

SEQ ID NO: 700649 - protein, 15 aa, Homo sapiens
  CDR3 for alpha chain variable domain of TCR clone 350325 (TRAV1-2, TRAJ28)
CAVQYSGPGSYQLTF

SEQ ID NO: 700650 - protein, 13 aa, Homo sapiens
  CDR3 for beta chain variable domain of TCR clone 350325 (TRBV20-1, TRBJ2-7)
CSATHTSGYEQYF

SEQ ID NO: 700651 - protein, 13 aa, Homo sapiens
  CDR3 for alpha chain variable domain of TCR clone 350326 (TRAV20, TRAJ37)
CAGCSSNTGKLIF

SEQ ID NO: 700652 - protein, 16 aa, Homo sapiens
  CDR3 for beta chain variable domain of TCR clone 350326 (TRBV4-2, TRBJ2-1)
CASSQAGTFAAGEQFF

SEQ ID NO: 700653 - protein, 16 aa, Homo sapiens
  CDR3 for alpha chain variable domain of TCR clone 350327 (TRAV20, TRAJ22)
CAVQASSSGSARQLTF

SEQ ID NO: 700654 - protein, 13 aa, Homo sapiens
  CDR3 for beta chain variable domain of TCR clone 350327 (TRBV7-2, TRBJ2-5)
CDSSQTSVETQYF

SEQ ID NO: 700655 - protein, 11 aa, Homo sapiens
  CDR3 for alpha chain variable domain of TCR clone 350328 (TRAV8-3, TRAJ15)
CAVGPGTALIF

SEQ ID NO: 700656 - protein, 18 aa, Homo sapiens
  CDR3 for beta chain variable domain of TCR clone 350328 (TRBV18, TRBJ2-3)
CASSYTSVAAGGTDTQYF

SEQ ID NO: 700657 - protein, 12 aa, Homo sapiens
  CDR3 for alpha chain variable domain of TCR clone 350329 (TRAV25, TRAJ30)
CAGPDRDDKIIF

SEQ ID NO: 700658 - protein, 14 aa, Homo sapiens
  CDR3 for beta chain variable domain of TCR clone 350329 (TRBV7-2, TRBJ2-7)
CASSPKTSFYEQYF

SEQ ID NO: 700659 - protein, 13 aa, Homo sapiens
  CDR3 for alpha chain variable domain of TCR clone 350330 (TRAV3, TRAJ41)
CAVRSNSGYSLNF

SEQ ID NO: 700660 - protein, 13 aa, Homo sapiens
  CDR3 for beta chain variable domain of TCR clone 350330 (TRBV20-1, TRBJ2-2)
CSALSGGAGELFF

SEQ ID NO: 700661 - protein, 14 aa, Homo sapiens
  CDR3 for alpha chain variable domain of TCR clone 350331 (TRAV12-3, TRAJ50)
CAISPKTSYDKVIF

SEQ ID NO: 700662 - protein, 14 aa, Homo sapiens
  CDR3 for beta chain variable domain of TCR clone 350331 (TRBV19, TRBJ1-1)
CASSMGRNAFEAFF

SEQ ID NO: 700663 - protein, 13 aa, Homo sapiens
  CDR3 for alpha chain variable domain of TCR clone 350332 (TRAV29/DV5, TRAJ31)
CAASRNNNARLMF

SEQ ID NO: 700664 - protein, 17 aa, Homo sapiens
  CDR3 for beta chain variable domain of TCR clone 350332 (TRBV20-1, TRBJ2-1)
CSASSSGLGDPTMSSSS

SEQ ID NO: 700665 - protein, 13 aa, Homo sapiens
  CDR3 for alpha chain variable domain of TCR clone 350333 (TRAV27, TRAJ29)
CAGAPSGNTPLVF

SEQ ID NO: 700666 - protein, 18 aa, Homo sapiens
  CDR3 for beta chain variable domain of TCR clone 350333 (TRBV6-6, TRBJ1-3)
CASSYSKWDSISGNTIYF

SEQ ID NO: 700667 - protein, 14 aa, Homo sapiens
  CDR3 for alpha chain variable domain of TCR clone 350334 (TRAV1-2, TRAJ8)
CAMREDTGFQKLVF

SEQ ID NO: 700668 - protein, 12 aa, Homo sapiens
  CDR3 for beta chain variable domain of TCR clone 350334 (TRBV24-1, TRBJ1-1)
CATLYPDTEAFF

SEQ ID NO: 700669 - protein, 12 aa, Homo sapiens
  CDR3 for alpha chain variable domain of TCR clone 350335 (TRAV26-1, TRAJ26)
CIVYNYGQNLVF

SEQ ID NO: 700670 - protein, 15 aa, Homo sapiens
  CDR3 for beta chain variable domain of TCR clone 350335 (TRBV7-2, TRBJ2-3)
CASSLRGGSTDTQYF

SEQ ID NO: 700671 - protein, 13 aa, Homo sapiens
  CDR3 for alpha chain variable domain of TCR clone 350336 (TRAV13-1, TRAJ6)
CAASRGGSYIPTF

SEQ ID NO: 700672 - protein, 13 aa, Homo sapiens
  CDR3 for beta chain variable domain of TCR clone 350336 (TRBV7-9, TRBJ1-2)
CASSLKQNYGYTF

SEQ ID NO: 700673 - protein, 12 aa, Homo sapiens
  CDR3 for alpha chain variable domain of TCR clone 350337 (TRAV23/DV6, TRAJ30)
CAASKWDDKIIF

SEQ ID NO: 700674 - protein, 14 aa, Homo sapiens
  CDR3 for beta chain variable domain of TCR clone 350337 (TRBV13, TRBJ2-5)
CASSLGPRGETQYF

SEQ ID NO: 700675 - protein, 19 aa, Homo sapiens
  CDR3 for alpha chain variable domain of TCR clone 350338 (TRAV29/DV5, TRAJ49)
CSVLLCSKLTVDTGNQFYF

SEQ ID NO: 700676 - protein, 14 aa, Homo sapiens
  CDR3 for beta chain variable domain of TCR clone 350338 (TRBV25-1, TRBJ1-1)
CASTHLGGNTEAFF

SEQ ID NO: 700677 - protein, 12 aa, Homo sapiens
  CDR3 for alpha chain variable domain of TCR clone 350339 (TRAV12-3, TRAJ17)
CAMTLTGNKLTF

SEQ ID NO: 700678 - protein, 15 aa, Homo sapiens
  CDR3 for beta chain variable domain of TCR clone 350339 (TRBV28, TRBJ2-5)
CASSSGRRIQETQYF

SEQ ID NO: 700679 - protein, 16 aa, Homo sapiens
  CDR3 for alpha chain variable domain of TCR clone 350340 (TRAV27, TRAJ52)
CAGAGAGGTSYGKLTF

SEQ ID NO: 700680 - protein, 17 aa, Homo sapiens
  CDR3 for beta chain variable domain of TCR clone 350340 (TRBV24-1, TRBJ2-3)
CATSDLPSEEGTDTQYF

SEQ ID NO: 700681 - protein, 16 aa, Homo sapiens
  CDR3 for alpha chain variable domain of TCR clone 350341 (TRAV3, TRAJ37)
CAVRGKGSGNTAKLIF

SEQ ID NO: 700682 - protein, 13 aa, Homo sapiens
  CDR3 for beta chain variable domain of TCR clone 350341 (TRBV14, TRBJ2-7)
CASSQDRRYDQYF

SEQ ID NO: 700683 - protein, 13 aa, Homo sapiens
  CDR3 for alpha chain variable domain of TCR clone 350342 (TRAV29/DV5, TRAJ31)
CAASRNNNARRMF

SEQ ID NO: 700684 - protein, 12 aa, Homo sapiens
  CDR3 for beta chain variable domain of TCR clone 350342 (TRBV14, TRBJ1-1)
CASSQLKGLAFF

SEQ ID NO: 700685 - protein, 12 aa, Homo sapiens
  CDR3 for alpha chain variable domain of TCR clone 350343 (TRAV12-1, TRAJ40)
VVFYSGTYKYIF

SEQ ID NO: 700686 - protein, 18 aa, Homo sapiens
  CDR3 for beta chain variable domain of TCR clone 350343 (TRBV12-4, TRBJ2-2)
CASSLVAGTRGRTGELFF

SEQ ID NO: 700687 - protein, 14 aa, Homo sapiens
  CDR3 for alpha chain variable domain of TCR clone 350344 (TRAV12-3, TRAJ10)
SHLPLTGGGNKLTF

SEQ ID NO: 700688 - protein, 16 aa, Homo sapiens
  CDR3 for beta chain variable domain of TCR clone 350344 (TRBV4-3, TRBJ2-2)
CASSRLQGSGTGELFF

SEQ ID NO: 700689 - protein, 15 aa, Homo sapiens
  CDR3 for alpha chain variable domain of TCR clone 350345 (TRAV17, TRAJ57)
CATGPSQGGSEKLVF

SEQ ID NO: 700690 - protein, 14 aa, Homo sapiens
  CDR3 for beta chain variable domain of TCR clone 350345 (TRBV7-2, TRBJ2-5)
CASSPLGQSETQYF

SEQ ID NO: 700691 - protein, 16 aa, Homo sapiens
  CDR3 for alpha chain variable domain of TCR clone 350346 (TRAV14/DV4, TRAJ53)
CAMREGGGGSNYKLTF

SEQ ID NO: 700692 - protein, 16 aa, Homo sapiens
  CDR3 for beta chain variable domain of TCR clone 350346 (TRBV15, TRBJ2-7)
CATSRDGGIPSYEQYF

SEQ ID NO: 700693 - protein, 14 aa, Homo sapiens
  CDR3 for alpha chain variable domain of TCR clone 350347 (TRAV8-3, TRAJ4)
CAVVAAGGDDKLIF

SEQ ID NO: 700694 - protein, 15 aa, Homo sapiens
  CDR3 for beta chain variable domain of TCR clone 350347 (TRBV6-5, TRBJ2-1)
CASSYDAGAGNEQFF

SEQ ID NO: 700695 - protein, 12 aa, Homo sapiens
  CDR3 for alpha chain variable domain of TCR clone 350348 (TRAV29/DV5, TRAJ49)
CAATDTGNQFNF

SEQ ID NO: 700696 - protein, 13 aa, Homo sapiens
  CDR3 for beta chain variable domain of TCR clone 350348 (TRBV11-2, TRBJ1-3)
CASSLEPVNTICF

SEQ ID NO: 700697 - protein, 14 aa, Homo sapiens
  CDR3 for alpha chain variable domain of TCR clone 350349 (TRAV26-1, TRAJ38)
CIADNAGNNRKLIW

SEQ ID NO: 700698 - protein, 18 aa, Homo sapiens
  CDR3 for beta chain variable domain of TCR clone 350349 (TRBV11-2, TRBJ2-6)
CASSLNPFLGTGANVLTF

SEQ ID NO: 700699 - protein, 10 aa, Homo sapiens
  CDR3 for alpha chain variable domain of TCR clone 350350 (TRAV12-2, TRAJ16)
CAVRGQKLLF

SEQ ID NO: 700700 - protein, 13 aa, Homo sapiens
  CDR3 for beta chain variable domain of TCR clone 350350 (TRBV20-1, TRBJ1-1)
CSARGGGNTEAFF

SEQ ID NO: 700701 - protein, 15 aa, Homo sapiens
  CDR3 for alpha chain variable domain of TCR clone 350351 (TRAV3, TRAJ5)
CAVRDRKPGRRALTF

SEQ ID NO: 700702 - protein, 15 aa, Homo sapiens
  CDR3 for beta chain variable domain of TCR clone 350351 (TRBV7-8, TRBJ2-1)
CASSLADSLYNEHFF

SEQ ID NO: 700703 - protein, 13 aa, Homo sapiens
  CDR3 for alpha chain variable domain of TCR clone 350352 (TRAV3, TRAJ20)
CAVRSLNDSKLSF

SEQ ID NO: 700704 - protein, 15 aa, Homo sapiens
  CDR3 for beta chain variable domain of TCR clone 350352 (TRBV20-1, TRBJ2-7)
CSARDRVSGMDEQYF

SEQ ID NO: 700705 - protein, 14 aa, Homo sapiens
  CDR3 for alpha chain variable domain of TCR clone 350353 (TRAV8-1, TRAJ23)
CAVGTYNQGGKLIF

SEQ ID NO: 700706 - protein, 16 aa, Homo sapiens
  CDR3 for beta chain variable domain of TCR clone 350353 (TRBV18, TRBJ1-5)
CASSPSTGNRNQPQHS

SEQ ID NO: 700707 - protein, 17 aa, Homo sapiens
  CDR3 for alpha chain variable domain of TCR clone 350354 (TRAV3, TRAJ12)
CAVRDRGRMDSSYKLIF

SEQ ID NO: 700708 - protein, 15 aa, Homo sapiens
  CDR3 for beta chain variable domain of TCR clone 350354 (TRBV5-1, TRBJ2-3)
CASSVTSGSTDTQYF

SEQ ID NO: 700709 - protein, 12 aa, Homo sapiens
  CDR3 for alpha chain variable domain of TCR clone 350355 (TRAV1-2, TRAJ33)
CAALDSNYQLIW

SEQ ID NO: 700710 - protein, 16 aa, Homo sapiens
  CDR3 for beta chain variable domain of TCR clone 350355 (TRBV6-4, TRBJ1-2)
CASSEAVGDPNYGYTL

SEQ ID NO: 700711 - protein, 13 aa, Homo sapiens
  CDR3 for alpha chain variable domain of TCR clone 350356 (TRAV8-3, TRAJ28)
CAGGAVGSSQLTF

SEQ ID NO: 700712 - protein, 14 aa, Homo sapiens
  CDR3 for beta chain variable domain of TCR clone 350356 (TRBV7-2, TRBJ2-7)
CASRSQGAAYEQYF

SEQ ID NO: 700713 - protein, 11 aa, Homo sapiens
  CDR3 for alpha chain variable domain of TCR clone 350357 (TRAV1-2, TRAJ31)
CAVNNNARLMF

SEQ ID NO: 700714 - protein, 16 aa, Homo sapiens
  CDR3 for beta chain variable domain of TCR clone 350357 (TRBV7-7, TRBJ2-1)
CASSLASGTSYNEQFF

SEQ ID NO: 700715 - protein, 18 aa, Homo sapiens
  CDR3 for alpha chain variable domain of TCR clone 350358 (TRAV38-1, TRAJ32)
CAFMKPPGRGGATNKLIF

SEQ ID NO: 700716 - protein, 17 aa, Homo sapiens
  CDR3 for beta chain variable domain of TCR clone 350358 (TRBV11-2, TRBJ2-1)
CASSLYPPGVEYNEQFF

SEQ ID NO: 700717 - protein, 16 aa, Homo sapiens
  CDR3 for alpha chain variable domain of TCR clone 350359 (TRAV25, TRAJ52)
CAGPRAGGTSYGKLTF

SEQ ID NO: 700718 - protein, 15 aa, Homo sapiens
  CDR3 for beta chain variable domain of TCR clone 350359 (TRBV12-4, TRBJ2-5)
CASSLGGQGRETQYF

SEQ ID NO: 700719 - protein, 14 aa, Homo sapiens
  CDR3 for alpha chain variable domain of TCR clone 350360 (TRAV1-2, TRAJ8)
CAVREDTGFQKLVF

SEQ ID NO: 700720 - protein, 13 aa, Homo sapiens
  CDR3 for beta chain variable domain of TCR clone 350360 (TRBV12-5, TRBJ2-3)
CASQNRGTDTQYF

SEQ ID NO: 700721 - protein, 17 aa, Homo sapiens
  CDR3 for alpha chain variable domain of TCR clone 350361 (TRAV23/DV6, TRAJ57)
LAASSTLSQGGSEKLVF

SEQ ID NO: 700722 - protein, 14 aa, Homo sapiens
  CDR3 for beta chain variable domain of TCR clone 350361 (TRBV25-1, TRBJ1-1)
CASTHLGGNTEAFF

SEQ ID NO: 700723 - protein, 14 aa, Homo sapiens
  CDR3 for alpha chain variable domain of TCR clone 350362 (TRAV20, TRAJ56)
CAVQFGGANSKLTF

SEQ ID NO: 700724 - protein, 14 aa, Homo sapiens
  CDR3 for beta chain variable domain of TCR clone 350362 (TRBV20-1, TRBJ2-7)
CSANRGGSSYEQYF

SEQ ID NO: 700725 - protein, 15 aa, Homo sapiens
  CDR3 for alpha chain variable domain of TCR clone 350363 (TRAV12-1, TRAJ9)
CVLSFGYTGGFKTIF

SEQ ID NO: 700726 - protein, 12 aa, Homo sapiens
  CDR3 for beta chain variable domain of TCR clone 350363 (TRBV12-4, TRBJ2-7)
CASSLGGYEQYF

SEQ ID NO: 700727 - protein, 14 aa, Homo sapiens
  CDR3 for alpha chain variable domain of TCR clone 350364 (TRAV1-2, TRAJ8)
CAVRDDTGFQKLVF

SEQ ID NO: 700728 - protein, 14 aa, Homo sapiens
  CDR3 for beta chain variable domain of TCR clone 350364 (TRBV7-9, TRBJ1-1)
CASSLGGANTEAFF

SEQ ID NO: 700729 - protein, 10 aa, Homo sapiens
  CDR3 for alpha chain variable domain of TCR clone 350365 (TRAV26-1, TRAJ22)
CIVSLNFFWF

SEQ ID NO: 700730 - protein, 12 aa, Homo sapiens
  CDR3 for beta chain variable domain of TCR clone 350365 (TRBV5-1, TRBJ2-3)
CASSLYSDTQYF

SEQ ID NO: 700731 - protein, 14 aa, Homo sapiens
  CDR3 for alpha chain variable domain of TCR clone 350366 (TRAV26-1, TRAJ40)
CIVRLLSGTYKYIF

SEQ ID NO: 700732 - protein, 18 aa, Homo sapiens
  CDR3 for beta chain variable domain of TCR clone 350366 (TRBV15, TRBJ2-7)
CATSRDRGIRAVLQAGHQ

SEQ ID NO: 700733 - protein, 15 aa, Homo sapiens
  CDR3 for alpha chain variable domain of TCR clone 350367 (TRAV17, TRAJ6)
CATDLPSGGSYIPTF

SEQ ID NO: 700734 - protein, 16 aa, Homo sapiens
  CDR3 for beta chain variable domain of TCR clone 350367 (TRBV4-1, TRBJ2-7)
CASSQDTTGYSYEQYF

SEQ ID NO: 700735 - protein, 14 aa, Homo sapiens
  CDR3 for alpha chain variable domain of TCR clone 350368 (TRAV12-2, TRAJ13)
CAVKKTGGYQKVTF

SEQ ID NO: 700736 - protein, 13 aa, Homo sapiens
  CDR3 for beta chain variable domain of TCR clone 350368 (TRBV10-3, TRBJ2-7)
CTSKLAVNYEQYF

SEQ ID NO: 700737 - protein, 16 aa, Homo sapiens
  CDR3 for alpha chain variable domain of TCR clone 350369 (TRAV3, TRAJ18)
CAVRDGRGSTLGRPYF

SEQ ID NO: 700738 - protein, 17 aa, Homo sapiens
  CDR3 for beta chain variable domain of TCR clone 350369 (TRBV5-1, TRBJ2-3)
CASSKIGLADRTDTQYF

SEQ ID NO: 700739 - protein, 13 aa, Homo sapiens
  CDR3 for alpha chain variable domain of TCR clone 350370 (TRAV29/DV5, TRAJ31)
CTASRNNNARLMF

SEQ ID NO: 700740 - protein, 15 aa, Homo sapiens
  CDR3 for beta chain variable domain of TCR clone 350370 (TRBV27, TRBJ2-1)
CASSNGGGSSNEQFF

SEQ ID NO: 700741 - protein, 14 aa, Homo sapiens
  CDR3 for alpha chain variable domain of TCR clone 350371 (TRAV30, TRAJ33)
CGTVAPRSNYQLIW

SEQ ID NO: 700742 - protein, 13 aa, Homo sapiens
  CDR3 for beta chain variable domain of TCR clone 350371 (TRBV20-1, TRBJ1-5)
CSASWGRSQPQHF

SEQ ID NO: 700743 - protein, 14 aa, Homo sapiens
  CDR3 for alpha chain variable domain of TCR clone 350372 (TRAV17, TRAJ22)
CATVLSGSARQLTV

SEQ ID NO: 700744 - protein, 13 aa, Homo sapiens
  CDR3 for beta chain variable domain of TCR clone 350372 (TRBV15, TRBJ1-6)
CATSGGLNSPLHF

SEQ ID NO: 700745 - protein, 13 aa, Homo sapiens
  CDR3 for alpha chain variable domain of TCR clone 350373 (TRAV12-3, TRAJ13)
CAMTSGGYQKVPF

SEQ ID NO: 700746 - protein, 13 aa, Homo sapiens
  CDR3 for beta chain variable domain of TCR clone 350373 (TRBV20-1, TRBJ2-2)
CSALSGGAGELFF

SEQ ID NO: 700747 - protein, 14 aa, Homo sapiens
  CDR3 for alpha chain variable domain of TCR clone 350374 (TRAV12-2, TRAJ17)
CAVLFKAAGNKLTF

SEQ ID NO: 700748 - protein, 16 aa, Homo sapiens
  CDR3 for beta chain variable domain of TCR clone 350374 (TRBV4-1, TRBJ2-3)
CASSQRAGGLTDTQYF

SEQ ID NO: 700749 - protein, 12 aa, Homo sapiens
  CDR3 for alpha chain variable domain of TCR clone 350375 (TRAV8-6, TRAJ43)
CAVSHNHNDMRF

SEQ ID NO: 700750 - protein, 13 aa, Homo sapiens
  CDR3 for beta chain variable domain of TCR clone 350375 (TRBV7-3, TRBJ1-1)
CASSQDWGAEAFF

SEQ ID NO: 700751 - protein, 14 aa, Homo sapiens
  CDR3 for alpha chain variable domain of TCR clone 350376 (TRAV13-1, TRAJ9)
CAATALTGGFKTIF

SEQ ID NO: 700752 - protein, 13 aa, Homo sapiens
  CDR3 for beta chain variable domain of TCR clone 350376 (TRBV20-1, TRBJ1-1)
CSAGTVGNTEAFF

SEQ ID NO: 700753 - protein, 12 aa, Homo sapiens
  CDR3 for alpha chain variable domain of TCR clone 350377 (TRAV3, TRAJ31)
CAVRDGNARLIV

SEQ ID NO: 700754 - protein, 18 aa, Homo sapiens
  CDR3 for beta chain variable domain of TCR clone 350377 (TRBV7-2, TRBJ2-3)
CASSLKREGSGITDTQYF

SEQ ID NO: 700755 - protein, 18 aa, Homo sapiens
  CDR3 for alpha chain variable domain of TCR clone 350378 (TRAV14/DV4, TRAJ3)
CAMREGSGGDSSDSKIIF

SEQ ID NO: 700756 - protein, 15 aa, Homo sapiens
  CDR3 for beta chain variable domain of TCR clone 350378 (TRBV6-6, TRBJ2-5)
CASSPGGGLEETQYF

SEQ ID NO: 700757 - protein, 14 aa, Homo sapiens
  CDR3 for alpha chain variable domain of TCR clone 350379 (TRAV16, TRAJ17)
CALSEGAAGNKLTF

SEQ ID NO: 700758 - protein, 14 aa, Homo sapiens
  CDR3 for beta chain variable domain of TCR clone 350379 (TRBV28, TRBJ2-2)
CASRIRSGTRELFF

SEQ ID NO: 700759 - protein, 14 aa, Homo sapiens
  CDR3 for alpha chain variable domain of TCR clone 350380 (TRAV17, TRAJ57)
CATDPQGGSEKLGF

SEQ ID NO: 700760 - protein, 15 aa, Homo sapiens
  CDR3 for beta chain variable domain of TCR clone 350380 (TRBV5-4, TRBJ2-1)
CASSSGLAELNEQFF

SEQ ID NO: 700761 - protein, 14 aa, Homo sapiens
  CDR3 for alpha chain variable domain of TCR clone 350381 (TRAV13-1, TRAJ35)
CAASKGGFGNVLHC

SEQ ID NO: 700762 - protein, 13 aa, Homo sapiens
  CDR3 for beta chain variable domain of TCR clone 350381 (TRBV7-3, TRBJ1-1)
CASSHDWGAEAFF

SEQ ID NO: 700763 - protein, 14 aa, Homo sapiens
  CDR3 for alpha chain variable domain of TCR clone 350382 (TRAV1-2, TRAJ16)
CAVNRFSDDQKLLF

SEQ ID NO: 700764 - protein, 16 aa, Homo sapiens
  CDR3 for beta chain variable domain of TCR clone 350382 (TRBV3-1, TRBJ1-1)
CASSQRGRGGNTEAFF

SEQ ID NO: 700765 - protein, 13 aa, Homo sapiens
  CDR3 for alpha chain variable domain of TCR clone 350383 (TRAV3, TRAJ21)
CAVREPDFNKFYF

SEQ ID NO: 700766 - protein, 15 aa, Homo sapiens
  CDR3 for beta chain variable domain of TCR clone 350383 (TRBV5-1, TRBJ2-7)
CASSLYPDGGYEQYF

SEQ ID NO: 700767 - protein, 14 aa, Homo sapiens
  CDR3 for alpha chain variable domain of TCR clone 350384 (TRAV17, TRAJ39)
CATDPVRAGSMLTF

SEQ ID NO: 700768 - protein, 13 aa, Homo sapiens
  CDR3 for beta chain variable domain of TCR clone 350384 (TRBV20-1, TRBJ1-1)
CSAPLGGGTEAFF

SEQ ID NO: 700769 - protein, 13 aa, Homo sapiens
  CDR3 for alpha chain variable domain of TCR clone 350385 (TRAV9-2, TRAJ12)
CARGEDSSYKLIF

SEQ ID NO: 700770 - protein, 15 aa, Homo sapiens
  CDR3 for beta chain variable domain of TCR clone 350385 (TRBV10-3, TRBJ2-7)
CATREQGLRSYEQYF

SEQ ID NO: 700771 - protein, 14 aa, Homo sapiens
  CDR3 for alpha chain variable domain of TCR clone 350386 (TRAV12-2, TRAJ13)
CAVKKTGGSQKVTF

SEQ ID NO: 700772 - protein, 16 aa, Homo sapiens
  CDR3 for beta chain variable domain of TCR clone 350386 (TRBV12-5, TRBJ2-5)
CASGPRTSGNQETQYF

SEQ ID NO: 700773 - protein, 16 aa, Homo sapiens
  CDR3 for alpha chain variable domain of TCR clone 350387 (TRAV3, TRAJ37)
CAVRPHGSGNTGKLIF

SEQ ID NO: 700774 - protein, 17 aa, Homo sapiens
  CDR3 for beta chain variable domain of TCR clone 350387 (TRBV5-1, TRBJ2-5)
CASSTVALGQNQETQYF

SEQ ID NO: 700775 - protein, 13 aa, Homo sapiens
  CDR3 for alpha chain variable domain of TCR clone 350388 (TRAV30, TRAJ24)
CGTVTDSWGKLRF

SEQ ID NO: 700776 - protein, 15 aa, Homo sapiens
  CDR3 for beta chain variable domain of TCR clone 350388 (TRBV19, TRBJ1-1)
CASTSGQIQNTEAFF

SEQ ID NO: 700777 - protein, 13 aa, Homo sapiens
  CDR3 for alpha chain variable domain of TCR clone 350389 (TRAV2, TRAJ40)
CAAVTSGTYNYIF

SEQ ID NO: 700778 - protein, 14 aa, Homo sapiens
  CDR3 for beta chain variable domain of TCR clone 350389 (TRBV19, TRBJ2-1)
CASPTFVLSGEQFF

SEQ ID NO: 700779 - protein, 15 aa, Homo sapiens
  CDR3 for alpha chain variable domain of TCR clone 350390 (TRAV12-2, TRAJ48)
CAAQLSNFGNEKLTF

SEQ ID NO: 700780 - protein, 14 aa, Homo sapiens
  CDR3 for beta chain variable domain of TCR clone 350390 (TRBV19, TRBJ2-1)
CASPTFVLSGEQFF

SEQ ID NO: 700781 - protein, 13 aa, Homo sapiens
  CDR3 for alpha chain variable domain of TCR clone 350391 (TRAV12-1, TRAJ40)
CVVPTSGTYKHIF

SEQ ID NO: 700782 - protein, 18 aa, Homo sapiens
  CDR3 for beta chain variable domain of TCR clone 350391 (TRBV7-6, TRBJ2-1)
CASSPRSSGMGSYNEQFF

SEQ ID NO: 700783 - protein, 12 aa, Homo sapiens
  CDR3 for alpha chain variable domain of TCR clone 350392 (TRAV8-3, TRAJ26)
CVGDNYGQNFVF

SEQ ID NO: 700784 - protein, 14 aa, Homo sapiens
  CDR3 for beta chain variable domain of TCR clone 350392 (TRBV6-1, TRBJ1-3)
CASVQGGGGNTIYF

SEQ ID NO: 700785 - protein, 13 aa, Homo sapiens
  CDR3 for alpha chain variable domain of TCR clone 350393 (TRAV12-1, TRAJ39)
CVVNYNAGNMLTF

SEQ ID NO: 700786 - protein, 14 aa, Homo sapiens
  CDR3 for beta chain variable domain of TCR clone 350393 (TRBV27, TRBJ2-3)
CASSPLGTTDRQYF

SEQ ID NO: 700787 - protein, 15 aa, Homo sapiens
  CDR3 for alpha chain variable domain of TCR clone 350394 (TRAV13-1, TRAJ3)
CAASKLASSASKIIF

SEQ ID NO: 700788 - protein, 16 aa, Homo sapiens
  CDR3 for beta chain variable domain of TCR clone 350394 (TRBV25-1, TRBJ1-5)
CACGAPTVNSNQPQHF

SEQ ID NO: 700789 - protein, 14 aa, Homo sapiens
  CDR3 for alpha chain variable domain of TCR clone 350395 (TRAV12-1, TRAJ30)
CVVRGMNRDDKIIF

SEQ ID NO: 700790 - protein, 14 aa, Homo sapiens
  CDR3 for beta chain variable domain of TCR clone 350395 (TRBV7-2, TRBJ2-1)
CASSLTSGNRRHFF

SEQ ID NO: 700791 - protein, 14 aa, Homo sapiens
  CDR3 for alpha chain variable domain of TCR clone 350396 (TRAV12-3, TRAJ13)
CAMRNSWGYQKVTF

SEQ ID NO: 700792 - protein, 14 aa, Homo sapiens
  CDR3 for beta chain variable domain of TCR clone 350396 (TRBV4-1, TRBJ1-6)
CASSPGSDSSPLHF

SEQ ID NO: 700793 - protein, 14 aa, Homo sapiens
  CDR3 for alpha chain variable domain of TCR clone 350397 (TRAV30, TRAJ33)
CGTVAPRSNYQLIW

SEQ ID NO: 700794 - protein, 16 aa, Homo sapiens
  CDR3 for beta chain variable domain of TCR clone 350397 (TRBV3-1, TRBJ2-5)
CAISPGQFNGFGTQYF

SEQ ID NO: 700795 - protein, 12 aa, Homo sapiens
  CDR3 for alpha chain variable domain of TCR clone 350398 (TRAV12-3, TRAJ17)
CALRLTGNKLTF

SEQ ID NO: 700796 - protein, 15 aa, Homo sapiens
  CDR3 for beta chain variable domain of TCR clone 350398 (TRBV20-1, TRBJ2-7)
CSARDRVSGMDEQYF

SEQ ID NO: 700797 - protein, 12 aa, Homo sapiens
  CDR3 for alpha chain variable domain of TCR clone 350399 (TRAV3, TRAJ31)
FAAQRANARPMF

SEQ ID NO: 700798 - protein, 16 aa, Homo sapiens
  CDR3 for beta chain variable domain of TCR clone 350399 (TRBV4-2, TRBJ1-1)
CASSPSPGRAAPEAFF

SEQ ID NO: 700799 - protein, 23 aa, Homo sapiens
  CDR3 for alpha chain variable domain of TCR clone 350400 (TRAV26-1, TRAJ38)
CIADNAGNNHIQNPDPAGYQLRD

SEQ ID NO: 700800 - protein, 13 aa, Homo sapiens
  CDR3 for beta chain variable domain of TCR clone 350400 (TRBV20-1, TRBJ1-1)
CSARGGGNTEAVF

SEQ ID NO: 700801 - protein, 11 aa, Homo sapiens
  CDR3 for alpha chain variable domain of TCR clone 350401 (TRAV12-2, TRAJ31)
CAVTRWARLMF

SEQ ID NO: 700802 - protein, 15 aa, Homo sapiens
  CDR3 for beta chain variable domain of TCR clone 350401 (TRBV19, TRBJ2-7)
CASSIEGGLVNEQYF

SEQ ID NO: 700803 - protein, 15 aa, Homo sapiens
  CDR3 for alpha chain variable domain of TCR clone 350402 (TRAV17, TRAJ4)
CATGTWSGGYNKLIF

SEQ ID NO: 700804 - protein, 13 aa, Homo sapiens
  CDR3 for beta chain variable domain of TCR clone 350402 (TRBV6-6, TRBJ2-7)
CASSPKHLGEQYF

SEQ ID NO: 700805 - protein, 12 aa, Homo sapiens
  CDR3 for alpha chain variable domain of TCR clone 350403 (TRAV12-3, TRAJ17)
CAMTLTGNKLTF

SEQ ID NO: 700806 - protein, 15 aa, Homo sapiens
  CDR3 for beta chain variable domain of TCR clone 350403 (TRBV20-1, TRBJ2-7)
WGARDRVSGMDEQYF

SEQ ID NO: 700807 - protein, 14 aa, Homo sapiens
  CDR3 for alpha chain variable domain of TCR clone 350404 (TRAV12-2, TRAJ5)
CAVNRSTGRSALTF

SEQ ID NO: 700808 - protein, 15 aa, Homo sapiens
  CDR3 for beta chain variable domain of TCR clone 350404 (TRBV15, TRBJ1-5)
CATSREQGGNQPQHF

SEQ ID NO: 700809 - protein, 13 aa, Homo sapiens
  CDR3 for alpha chain variable domain of TCR clone 350405 (TRAV3, TRAJ30)
CAVRDRGDDKIIL

SEQ ID NO: 700810 - protein, 16 aa, Homo sapiens
  CDR3 for beta chain variable domain of TCR clone 350405 (TRBV7-3, TRBJ2-2)
CASSLKRGALSGELFF

SEQ ID NO: 700811 - protein, 11 aa, Homo sapiens
  CDR3 for alpha chain variable domain of TCR clone 350406 (TRAV2, TRAJ13)
CASGGYQKVTF

SEQ ID NO: 700812 - protein, 14 aa, Homo sapiens
  CDR3 for beta chain variable domain of TCR clone 350406 (TRBV19, TRBJ2-1)
CARGARSFQWQQFF

SEQ ID NO: 700813 - protein, 13 aa, Homo sapiens
  CDR3 for alpha chain variable domain of TCR clone 350407 (TRAV21, TRAJ11)
CAVPNSGYSTLTF

SEQ ID NO: 700814 - protein, 12 aa, Homo sapiens
  CDR3 for beta chain variable domain of TCR clone 350407 (TRBV12-5, TRBJ2-5)
CASGQGVETQYF

SEQ ID NO: 700815 - protein, 15 aa, Homo sapiens
  CDR3 for alpha chain variable domain of TCR clone 350408 (TRAV16, TRAJ4)
CALEDPSGGYYKLIF

SEQ ID NO: 700816 - protein, 13 aa, Homo sapiens
  CDR3 for beta chain variable domain of TCR clone 350408 (TRBV7-3, TRBJ2-7)
CASSQAGGYEQYF

SEQ ID NO: 700817 - protein, 10 aa, Homo sapiens
  CDR3 for alpha chain variable domain of TCR clone 350409 (TRAV8-4, TRAJ43)
CAVSADDMRF

SEQ ID NO: 700818 - protein, 13 aa, Homo sapiens
  CDR3 for beta chain variable domain of TCR clone 350409 (TRBV12-4, TRBJ2-5)
CASSRGTEETQYF

SEQ ID NO: 700819 - protein, 13 aa, Homo sapiens
  CDR3 for alpha chain variable domain of TCR clone 350410 (TRAV21, TRAJ37)
CAVSSVNTGKLIF

SEQ ID NO: 700820 - protein, 13 aa, Homo sapiens
  CDR3 for beta chain variable domain of TCR clone 350410 (TRBV7-6, TRBJ2-3)
CASSLRSDNTQYF

SEQ ID NO: 700821 - protein, 16 aa, Homo sapiens
  CDR3 for alpha chain variable domain of TCR clone 350411 (TRAV8-4, TRAJ52)
CAAANAGGTSYGKLTF

SEQ ID NO: 700822 - protein, 15 aa, Homo sapiens
  CDR3 for beta chain variable domain of TCR clone 350411 (TRBV6-3, TRBJ2-7)
CASSSPETVFYEQYF

SEQ ID NO: 700823 - protein, 18 aa, Homo sapiens
  CDR3 for alpha chain variable domain of TCR clone 350412 (TRAV13-1, TRAJ52)
CAAKNPNAGGTSYGKLTF

SEQ ID NO: 700824 - protein, 14 aa, Homo sapiens
  CDR3 for beta chain variable domain of TCR clone 350412 (TRBV2, TRBJ2-1)
CASRAYGIYNEQFF

SEQ ID NO: 700825 - protein, 14 aa, Homo sapiens
  CDR3 for alpha chain variable domain of TCR clone 350413 (TRAV41, TRAJ54)
CAVRSNQGAQKLGF

SEQ ID NO: 700826 - protein, 15 aa, Homo sapiens
  CDR3 for beta chain variable domain of TCR clone 350413 (TRBV20-1, TRBJ2-7)
CSAESGTSGAYEQYF

SEQ ID NO: 700827 - protein, 15 aa, Homo sapiens
  CDR3 for alpha chain variable domain of TCR clone 350414 (TRAV29/DV5, TRAJ53)
CAASASGGSNYKLKF

SEQ ID NO: 700828 - protein, 19 aa, Homo sapiens
  CDR3 for beta chain variable domain of TCR clone 350414 (TRBV5-1, TRBJ2-3)
CASSLWLAGGITTTDTQYF

SEQ ID NO: 700829 - protein, 13 aa, Homo sapiens
  CDR3 for alpha chain variable domain of TCR clone 350415 (TRAV3, TRAJ20)
CAVRLSNDYKLSF

SEQ ID NO: 700830 - protein, 14 aa, Homo sapiens
  CDR3 for beta chain variable domain of TCR clone 350415 (TRBV7-8, TRBJ2-3)
CASSLEAGTNTQYF

SEQ ID NO: 700831 - protein, 23 aa, Homo sapiens
  CDR3 for alpha chain variable domain of TCR clone 350416 (TRAV26-1, TRAJ38)
CIADNAGNNHIQNPDPAVYQLRD

SEQ ID NO: 700832 - protein, 16 aa, Homo sapiens
  CDR3 for beta chain variable domain of TCR clone 350416 (TRBV20-1, TRBJ2-4)
CSATSLAELAKNIQYF

SEQ ID NO: 700833 - protein, 15 aa, Homo sapiens
  CDR3 for alpha chain variable domain of TCR clone 350417 (TRAV12-2, TRAJ53)
CAVDGGGGSNYKLTF

SEQ ID NO: 700834 - protein, 17 aa, Homo sapiens
  CDR3 for beta chain variable domain of TCR clone 350417 (TRBV7-3, TRBJ2-3)
CASSLMRRMRGADTQYF

SEQ ID NO: 700835 - protein, 19 aa, Homo sapiens
  CDR3 for alpha chain variable domain of TCR clone 350418 (TRAV26-1, TRAJ52)
CIVRAHRNAGGTSYGKLTC

SEQ ID NO: 700836 - protein, 15 aa, Homo sapiens
  CDR3 for beta chain variable domain of TCR clone 350418 (TRBV12-4, TRBJ2-5)
CASSPPTGLQETQYF

SEQ ID NO: 700837 - protein, 11 aa, Homo sapiens
  CDR3 for alpha chain variable domain of TCR clone 350419 (TRAV2, TRAJ21)
CAVFNFNKFYF

SEQ ID NO: 700838 - protein, 17 aa, Homo sapiens
  CDR3 for beta chain variable domain of TCR clone 350419 (TRBV15, TRBJ1-5)
CATSRAPPGTRNQPQHF

SEQ ID NO: 700839 - protein, 14 aa, Homo sapiens
  CDR3 for alpha chain variable domain of TCR clone 350420 (TRAV1-2, TRAJ16)
FAVNRFSDGQKLLF

SEQ ID NO: 700840 - protein, 12 aa, Homo sapiens
  CDR3 for beta chain variable domain of TCR clone 350420 (TRBV11-2, TRBJ2-1)
CASSPGNNEQFF

SEQ ID NO: 700841 - protein, 17 aa, Homo sapiens
  CDR3 for alpha chain variable domain of TCR clone 350421 (TRAV17, TRAJ28)
CATDAVYSGAVSYQLTF

SEQ ID NO: 700842 - protein, 16 aa, Homo sapiens
  CDR3 for beta chain variable domain of TCR clone 350421 (TRBV6-1, TRBJ2-5)
CASSETLDRGAETQYF

SEQ ID NO: 700843 - protein, 18 aa, Homo sapiens
  CDR3 for alpha chain variable domain of TCR clone 350422 (TRAV13-1, TRAJ52)
CAASKRSAGGTSYGKLTF

SEQ ID NO: 700844 - protein, 14 aa, Homo sapiens
  CDR3 for beta chain variable domain of TCR clone 350422 (TRBV19, TRBJ1-1)
CASTGHRLNTEAFF

SEQ ID NO: 700845 - protein, 13 aa, Homo sapiens
  CDR3 for alpha chain variable domain of TCR clone 350423 (TRAV12-2, TRAJ20)
CAVNRFDDSKLSF

SEQ ID NO: 700846 - protein, 12 aa, Homo sapiens
  CDR3 for beta chain variable domain of TCR clone 350423 (TRBV28, TRBJ2-3)
CASSLYRDTQYF

SEQ ID NO: 700847 - protein, 15 aa, Homo sapiens
  CDR3 for alpha chain variable domain of TCR clone 350424 (TRAV8-3, TRAJ45)
CASSYSGGGAAGLTF

SEQ ID NO: 700848 - protein, 13 aa, Homo sapiens
  CDR3 for beta chain variable domain of TCR clone 350424 (TRBV10-3, TRBJ2-7)
SASKLAVNYEQYF

SEQ ID NO: 700849 - protein, 15 aa, Homo sapiens
  CDR3 for alpha chain variable domain of TCR clone 350425 (TRAV1-2, TRAJ39)
CAVRDGNNAGNMLTF

SEQ ID NO: 700850 - protein, 18 aa, Homo sapiens
  CDR3 for beta chain variable domain of TCR clone 350425 (TRBV12-4, TRBJ2-4)
CASSRTGAVDVAKNIQYF

SEQ ID NO: 700851 - protein, 14 aa, Homo sapiens
  CDR3 for alpha chain variable domain of TCR clone 350426 (TRAV2, TRAJ9)
CAVEDRSGGFKTSF

SEQ ID NO: 700852 - protein, 13 aa, Homo sapiens
  CDR3 for beta chain variable domain of TCR clone 350426 (TRBV12-4, TRBJ1-5)
CASSPDRAQPQHF

SEQ ID NO: 700853 - protein, 11 aa, Homo sapiens
  CDR3 for alpha chain variable domain of TCR clone 350427 (TRAV12-2, TRAJ21)
CAVINFNKFYF

SEQ ID NO: 700854 - protein, 12 aa, Homo sapiens
  CDR3 for beta chain variable domain of TCR clone 350427 (TRBV12-5, TRBJ2-5)
CASGQGVETQYF

SEQ ID NO: 700855 - protein, 13 aa, Homo sapiens
  CDR3 for alpha chain variable domain of TCR clone 350428 (TRAV12-2, TRAJ43)
CAVSGDNNNDMRF

SEQ ID NO: 700856 - protein, 15 aa, Homo sapiens
  CDR3 for beta chain variable domain of TCR clone 350428 (TRBV6-5, TRBJ2-1)
CASSYDAGAGNEQFF

SEQ ID NO: 700857 - protein, 14 aa, Homo sapiens
  CDR3 for alpha chain variable domain of TCR clone 350429 (TRAV8-2, TRAJ36)
CVVSGGTGANNLFF

SEQ ID NO: 700858 - protein, 14 aa, Homo sapiens
  CDR3 for beta chain variable domain of TCR clone 350429 (TRBV2, TRBJ2-3)
CASSEGQNTDTQYF

SEQ ID NO: 700859 - protein, 16 aa, Homo sapiens
  CDR3 for alpha chain variable domain of TCR clone 350430 (TRAV35, TRAJ28)
CAGSLYSGAGSYQLTF

SEQ ID NO: 700860 - protein, 16 aa, Homo sapiens
  CDR3 for beta chain variable domain of TCR clone 350430 (TRBV5-1, TRBJ2-1)
CASSHGLAGPQNEQFF

SEQ ID NO: 700861 - protein, 14 aa, Homo sapiens
  CDR3 for alpha chain variable domain of TCR clone 350431 (TRAV1-1, TRAJ30)
CAVRSLNRDDKIIF

SEQ ID NO: 700862 - protein, 15 aa, Homo sapiens
  CDR3 for beta chain variable domain of TCR clone 350431 (TRBV6-1, TRBJ2-1)
CASSELRGQYNEQFF

SEQ ID NO: 700863 - protein, 13 aa, Homo sapiens
  CDR3 for alpha chain variable domain of TCR clone 350432 (TRAV12-1, TRAJ6)
CVVLPGGSYIPTF

SEQ ID NO: 700864 - protein, 14 aa, Homo sapiens
  CDR3 for beta chain variable domain of TCR clone 350432 (TRBV20-1, TRBJ1-3)
CSASPTGAGNTMYF

SEQ ID NO: 700865 - protein, 10 aa, Homo sapiens
  CDR3 for alpha chain variable domain of TCR clone 350433 (TRAV30, TRAJ48)
CGIGNEKLTF

SEQ ID NO: 700866 - protein, 16 aa, Homo sapiens
  CDR3 for beta chain variable domain of TCR clone 350433 (TRBV12-5, TRBJ2-5)
CASGPRTSGNQETQYF

SEQ ID NO: 700867 - protein, 16 aa, Homo sapiens
  CDR3 for alpha chain variable domain of TCR clone 350434 (TRAV12-3, TRAJ53)
CAMSPGSGGSNYKLTF

SEQ ID NO: 700868 - protein, 14 aa, Homo sapiens
  CDR3 for beta chain variable domain of TCR clone 350434 (TRBV2, TRBJ2-7)
CASSLTSGCYEQYF

SEQ ID NO: 700869 - protein, 12 aa, Homo sapiens
  CDR3 for alpha chain variable domain of TCR clone 350435 (TRAV27, TRAJ9)
CAGESGGFKTIF

SEQ ID NO: 700870 - protein, 16 aa, Homo sapiens
  CDR3 for beta chain variable domain of TCR clone 350435 (TRBV7-3, TRBJ2-2)
CASSLKRGTLSGELFF

SEQ ID NO: 700871 - protein, 23 aa, Homo sapiens
  CDR3 for alpha chain variable domain of TCR clone 350436 (TRAV26-1, TRAJ38)
CIADNAGNNHIQNPDPAVYQLRD

SEQ ID NO: 700872 - protein, 12 aa, Homo sapiens
  CDR3 for beta chain variable domain of TCR clone 350436 (TRBV11-2, TRBJ2-2)
CASSLGGWELFF

SEQ ID NO: 700873 - protein, 15 aa, Homo sapiens
  CDR3 for alpha chain variable domain of TCR clone 350437 (TRAV36/DV7, TRAJ53)
CAVEGSGGSNYKLTF

SEQ ID NO: 700874 - protein, 16 aa, Homo sapiens
  CDR3 for beta chain variable domain of TCR clone 350437 (TRBV27, TRBJ2-2)
CASSLSGFWVTGELFF

SEQ ID NO: 700875 - protein, 13 aa, Homo sapiens
  CDR3 for alpha chain variable domain of TCR clone 350438 (TRAV30, TRAJ24)
CGTVTDSWGTLQF

SEQ ID NO: 700876 - protein, 16 aa, Homo sapiens
  CDR3 for beta chain variable domain of TCR clone 350438 (TRBV7-3, TRBJ2-2)
CASSLKRGTLSGELFF

SEQ ID NO: 700877 - protein, 11 aa, Homo sapiens
  CDR3 for alpha chain variable domain of TCR clone 350439 (TRAV1-1, TRAJ23)
CAVRQGGKLIF

SEQ ID NO: 700878 - protein, 12 aa, Homo sapiens
  CDR3 for beta chain variable domain of TCR clone 350439 (TRBV14, TRBJ2-7)
CASSLYKDEQYF

SEQ ID NO: 700879 - protein, 14 aa, Homo sapiens
  CDR3 for alpha chain variable domain of TCR clone 350440 (TRAV12-2, TRAJ13)
CAVKKTGGYQKVTF

SEQ ID NO: 700880 - protein, 16 aa, Homo sapiens
  CDR3 for beta chain variable domain of TCR clone 350440 (TRBV7-7, TRBJ2-1)
RASSPGLAGGFNEQFF

SEQ ID NO: 700881 - protein, 14 aa, Homo sapiens
  CDR3 for alpha chain variable domain of TCR clone 350441 (TRAV12-3, TRAJ20)
CAMSARRGDYRLSF

SEQ ID NO: 700882 - protein, 14 aa, Homo sapiens
  CDR3 for beta chain variable domain of TCR clone 350441 (TRBV7-3, TRBJ2-3)
CASSPSARTDTQYF

SEQ ID NO: 700883 - protein, 18 aa, Homo sapiens
  CDR3 for alpha chain variable domain of TCR clone 350442 (TRAV12-3, TRAJ52)
CAMSRTNAGGTSYGKLTF

SEQ ID NO: 700884 - protein, 14 aa, Homo sapiens
  CDR3 for beta chain variable domain of TCR clone 350442 (TRBV12-4, TRBJ2-5)
CASSLWQKQETQYF

SEQ ID NO: 700885 - protein, 14 aa, Homo sapiens
  CDR3 for alpha chain variable domain of TCR clone 350443 (TRAV13-2, TRAJ17)
CAENSKAAGNKLTF

SEQ ID NO: 700886 - protein, 16 aa, Homo sapiens
  CDR3 for beta chain variable domain of TCR clone 350443 (TRBV12-4, TRBJ1-5)
CASSRPVGGSNQTQHS

SEQ ID NO: 700887 - protein, 16 aa, Homo sapiens
  CDR3 for alpha chain variable domain of TCR clone 350444 (TRAV30, TRAJ24)
CGTGIVDADSWVKFQF

SEQ ID NO: 700888 - protein, 14 aa, Homo sapiens
  CDR3 for beta chain variable domain of TCR clone 350444 (TRBV12-5, TRBJ2-5)
CASGSRTHQETQYF

SEQ ID NO: 700889 - protein, 18 aa, Homo sapiens
  CDR3 for alpha chain variable domain of TCR clone 350445 (TRAV21, TRAJ52)
CAVRPSPAGCTSYGKLTF

SEQ ID NO: 700890 - protein, 14 aa, Homo sapiens
  CDR3 for beta chain variable domain of TCR clone 350445 (TRBV4-1, TRBJ2-2)
CASSQAVNTGELFF

SEQ ID NO: 700891 - protein, 15 aa, Homo sapiens
  CDR3 for alpha chain variable domain of TCR clone 350446 (TRAV21, TRAJ53)
CATLNSGGRNYKLTF

SEQ ID NO: 700892 - protein, 14 aa, Homo sapiens
  CDR3 for beta chain variable domain of TCR clone 350446 (TRBV7-2, TRBJ2-7)
CASRSQGAAYEQNF

SEQ ID NO: 700893 - protein, 15 aa, Homo sapiens
  CDR3 for alpha chain variable domain of TCR clone 350447 (TRAV29/DV5, TRAJ29)
CAASERSSGNTPLVF

SEQ ID NO: 700894 - protein, 12 aa, Homo sapiens
  CDR3 for beta chain variable domain of TCR clone 350447 (TRBV7-9, TRBJ1-5)
CASSSDQAPQHF

SEQ ID NO: 700895 - protein, 16 aa, Homo sapiens
  CDR3 for alpha chain variable domain of TCR clone 350448 (TRAV17, TRAJ35)
CATAEGGIGFGNGLHC

SEQ ID NO: 700896 - protein, 19 aa, Homo sapiens
  CDR3 for beta chain variable domain of TCR clone 350448 (TRBV19, TRBJ2-5)
CASSIGQVTDFFLGETQYF

SEQ ID NO: 700897 - protein, 19 aa, Homo sapiens
  CDR3 for alpha chain variable domain of TCR clone 350449 (TRAV38-1, TRAJ53)
CAFMKHGLESGGSNYKLTF

SEQ ID NO: 700898 - protein, 13 aa, Homo sapiens
  CDR3 for beta chain variable domain of TCR clone 350449 (TRBV4-1, TRBJ2-1)
CASSQEVQYEQFF

SEQ ID NO: 700899 - protein, 12 aa, Homo sapiens
  CDR3 for alpha chain variable domain of TCR clone 350450 (TRAV3, TRAJ43)
CAVRDPNNDMRF

SEQ ID NO: 700900 - protein, 15 aa, Homo sapiens
  CDR3 for beta chain variable domain of TCR clone 350450 (TRBV2, TRBJ2-3)
CASSDFEKATDTQYF

SEQ ID NO: 700901 - protein, 16 aa, Homo sapiens
  CDR3 for alpha chain variable domain of TCR clone 350451 (TRAV12-2, TRAJ48)
CAVNPTSNFGNEKLTF

SEQ ID NO: 700902 - protein, 12 aa, Homo sapiens
  CDR3 for beta chain variable domain of TCR clone 350451 (TRBV9, TRBJ2-3)
WASSLRAGTQYF

SEQ ID NO: 700903 - protein, 11 aa, Homo sapiens
  CDR3 for alpha chain variable domain of TCR clone 350452 (TRAV2, TRAJ13)
CASGGYQKVTF

SEQ ID NO: 700904 - protein, 17 aa, Homo sapiens
  CDR3 for beta chain variable domain of TCR clone 350452 (TRBV7-8, TRBJ2-1)
CASSPPTGTLAYNEQFF

SEQ ID NO: 700905 - protein, 12 aa, Homo sapiens
  CDR3 for alpha chain variable domain of TCR clone 350453 (TRAV13-2, TRAJ8)
CAPWLGFQKLVF

SEQ ID NO: 700906 - protein, 15 aa, Homo sapiens
  CDR3 for beta chain variable domain of TCR clone 350453 (TRBV18, TRBJ2-7)
CASSPTFMDNYEQYF

SEQ ID NO: 700907 - protein, 14 aa, Homo sapiens
  CDR3 for alpha chain variable domain of TCR clone 350454 (TRAV38-1, TRAJ45)
CAYYSGGGAVGLTF

SEQ ID NO: 700908 - protein, 20 aa, Homo sapiens
  CDR3 for beta chain variable domain of TCR clone 350454 (TRBV28, TRBJ2-1)
CASTPIGRSPGLAEGNEQFF

SEQ ID NO: 700909 - protein, 15 aa, Homo sapiens
  CDR3 for alpha chain variable domain of TCR clone 350455 (TRAV26-2, TRAJ39)
CSLRGNHNAGNMLTF

SEQ ID NO: 700910 - protein, 16 aa, Homo sapiens
  CDR3 for beta chain variable domain of TCR clone 350455 (TRBV12-4, TRBJ2-5)
CASSCFVRGGQETQYF

SEQ ID NO: 700911 - protein, 12 aa, Homo sapiens
  CDR3 for alpha chain variable domain of TCR clone 350456 (TRAV3, TRAJ26)
CAVRDYGQNVVF

SEQ ID NO: 700912 - protein, 16 aa, Homo sapiens
  CDR3 for beta chain variable domain of TCR clone 350456 (TRBV11-2, TRBJ1-2)
CASSPSGRQANYGYTF

SEQ ID NO: 700913 - protein, 14 aa, Homo sapiens
  CDR3 for alpha chain variable domain of TCR clone 350457 (TRAV13-1, TRAJ10)
CAAKEPGGGNKPTF

SEQ ID NO: 700914 - protein, 15 aa, Homo sapiens
  CDR3 for beta chain variable domain of TCR clone 350457 (TRBV4-1, TRBJ2-5)
CASSQWDLYQETQYF

SEQ ID NO: 700915 - protein, 13 aa, Homo sapiens
  CDR3 for alpha chain variable domain of TCR clone 350458 (TRAV36/DV7, TRAJ29)
CAVEPSGNTPLVF

SEQ ID NO: 700916 - protein, 11 aa, Homo sapiens
  CDR3 for beta chain variable domain of TCR clone 350458 (TRBV12-4, TRBJ2-3)
CASTATDTQYF

SEQ ID NO: 700917 - protein, 12 aa, Homo sapiens
  CDR3 for alpha chain variable domain of TCR clone 350459 (TRAV21, TRAJ33)
CAKMDSNYQIIW

SEQ ID NO: 700918 - protein, 14 aa, Homo sapiens
  CDR3 for beta chain variable domain of TCR clone 350459 (TRBV2, TRBJ2-7)
CASSLTAGGYEQYF

SEQ ID NO: 700919 - protein, 13 aa, Homo sapiens
  CDR3 for alpha chain variable domain of TCR clone 350460 (TRAV35, TRAJ32)
FAGVGGATNKLIF

SEQ ID NO: 700920 - protein, 17 aa, Homo sapiens
  CDR3 for beta chain variable domain of TCR clone 350460 (TRBV4-3, TRBJ2-1)
CASSQFSSGRASGEQFF

SEQ ID NO: 700921 - protein, 12 aa, Homo sapiens
  CDR3 for alpha chain variable domain of TCR clone 350461 (TRAV12-3, TRAJ40)
CAMSSGTYKYIF

SEQ ID NO: 700922 - protein, 15 aa, Homo sapiens
  CDR3 for beta chain variable domain of TCR clone 350461 (TRBV7-3, TRBJ2-2)
CASSETGQGTEELFF

SEQ ID NO: 700923 - protein, 15 aa, Homo sapiens
  CDR3 for alpha chain variable domain of TCR clone 350462 (TRAV16, TRAJ4)
CALPSLSGGYNKLIF

SEQ ID NO: 700924 - protein, 13 aa, Homo sapiens
  CDR3 for beta chain variable domain of TCR clone 350462 (TRBV19, TRBJ2-2)
CASSQRSTGELFF

SEQ ID NO: 700925 - protein, 14 aa, Homo sapiens
  CDR3 for alpha chain variable domain of TCR clone 350463 (TRAV8-2, TRAJ4)
CVVSPSGGYNKLIF

SEQ ID NO: 700926 - protein, 15 aa, Homo sapiens
  CDR3 for beta chain variable domain of TCR clone 350463 (TRBV4-1, TRBJ1-4)
CASSDTGGTNEQLFC

SEQ ID NO: 700927 - protein, 11 aa, Homo sapiens
  CDR3 for alpha chain variable domain of TCR clone 350464 (TRAV12-3, TRAJ27)
CAMANAGKSTF

SEQ ID NO: 700928 - protein, 15 aa, Homo sapiens
  CDR3 for beta chain variable domain of TCR clone 350464 (TRBV27, TRBJ2-1)
CASSNGGGSSNEQFF

SEQ ID NO: 700929 - protein, 18 aa, Homo sapiens
  CDR3 for alpha chain variable domain of TCR clone 350465 (TRAV21, TRAJ52)
CAVRPSPAGGTSYGKLTF

SEQ ID NO: 700930 - protein, 11 aa, Homo sapiens
  CDR3 for beta chain variable domain of TCR clone 350465 (TRBV7-3, TRBJ2-2)
CASSLKRDLVR

SEQ ID NO: 700931 - protein, 11 aa, Homo sapiens
  CDR3 for alpha chain variable domain of TCR clone 350466 (TRAV35, TRAJ34)
CWARNTDKLIF

SEQ ID NO: 700932 - protein, 17 aa, Homo sapiens
  CDR3 for beta chain variable domain of TCR clone 350466 (TRBV11-2, TRBJ2-1)
CASSLYPPGVEYNEQFF

SEQ ID NO: 700933 - protein, 11 aa, Homo sapiens
  CDR3 for alpha chain variable domain of TCR clone 350467 (TRAV12-3, TRAJ17)
CNDAYRQQATF

SEQ ID NO: 700934 - protein, 15 aa, Homo sapiens
  CDR3 for beta chain variable domain of TCR clone 350467 (TRBV27, TRBJ2-1)
CASSNGGGSSNEQFF

SEQ ID NO: 700935 - protein, 12 aa, Homo sapiens
  CDR3 for alpha chain variable domain of TCR clone 350468 (TRAV17, TRAJ22)
CATSGSARQLTF

SEQ ID NO: 700936 - protein, 13 aa, Homo sapiens
  CDR3 for beta chain variable domain of TCR clone 350468 (TRBV20-1, TRBJ2-5)
CSARGDYQETQYF

SEQ ID NO: 700937 - protein, 14 aa, Homo sapiens
  CDR3 for alpha chain variable domain of TCR clone 350469 (TRAV12-1, TRAJ3)
CVVNAIGVQQCFQD

SEQ ID NO: 700938 - protein, 17 aa, Homo sapiens
  CDR3 for beta chain variable domain of TCR clone 350469 (TRBV4-1, TRBJ2-3)
CASSQVLQGGGTDTQYF

SEQ ID NO: 700939 - protein, 15 aa, Homo sapiens
  CDR3 for alpha chain variable domain of TCR clone 350470 (TRAV8-3, TRAJ45)
GASSYSGGGADGLTF

SEQ ID NO: 700940 - protein, 13 aa, Homo sapiens
  CDR3 for beta chain variable domain of TCR clone 350470 (TRBV10-3, TRBJ2-7)
CASRLAVNYEQYF

SEQ ID NO: 700941 - protein, 13 aa, Homo sapiens
  CDR3 for alpha chain variable domain of TCR clone 350471 (TRAV12-1, TRAJ7)
CVVNMRGNNRLAF

SEQ ID NO: 700942 - protein, 12 aa, Homo sapiens
  CDR3 for beta chain variable domain of TCR clone 350471 (TRBV18, TRBJ1-4)
CASSPSREKLFF

SEQ ID NO: 700943 - protein, 12 aa, Homo sapiens
  CDR3 for alpha chain variable domain of TCR clone 350472 (TRAV1-2, TRAJ26)
CAVRDLITMVRI

SEQ ID NO: 700944 - protein, 15 aa, Homo sapiens
  CDR3 for beta chain variable domain of TCR clone 350472 (TRBV27, TRBJ2-1)
CARSNGGGSSNEQFF

SEQ ID NO: 700945 - protein, 14 aa, Homo sapiens
  CDR3 for alpha chain variable domain of TCR clone 350473 (TRAV1-2, TRAJ16)
CAVNRFSDGQKLLV

SEQ ID NO: 700946 - protein, 14 aa, Homo sapiens
  CDR3 for beta chain variable domain of TCR clone 350473 (TRBV20-1, TRBJ1-5)
CSAPGTGVGQPQHF

SEQ ID NO: 700947 - protein, 14 aa, Homo sapiens
  CDR3 for alpha chain variable domain of TCR clone 350474 (TRAV12-3, TRAJ10)
SYLPLTGGGNKLTF

SEQ ID NO: 700948 - protein, 16 aa, Homo sapiens
  CDR3 for beta chain variable domain of TCR clone 350474 (TRBV27, TRBJ2-2)
CASSFRGLVRTGELFF

SEQ ID NO: 700949 - protein, 13 aa, Homo sapiens
  CDR3 for alpha chain variable domain of TCR clone 350475 (TRAV3, TRAJ21)
CAVREPDFNKFYF

SEQ ID NO: 700950 - protein, 14 aa, Homo sapiens
  CDR3 for beta chain variable domain of TCR clone 350475 (TRBV5-7, TRBJ1-1)
CASSLAGDWTEAFF

SEQ ID NO: 700951 - protein, 13 aa, Homo sapiens
  CDR3 for alpha chain variable domain of TCR clone 350476 (TRAV21, TRAJ27)
CAARPGNAGTSTF

SEQ ID NO: 700952 - protein, 15 aa, Homo sapiens
  CDR3 for beta chain variable domain of TCR clone 350476 (TRBV2, TRBJ2-3)
CASSDAGGPPDTQYF

SEQ ID NO: 700953 - protein, 12 aa, Homo sapiens
  CDR3 for alpha chain variable domain of TCR clone 350477 (TRAV3, TRAJ31)
CAVRDGTARLMF

SEQ ID NO: 700954 - protein, 16 aa, Homo sapiens
  CDR3 for beta chain variable domain of TCR clone 350477 (TRBV19, TRBJ2-2)
CASRSPGTGATGELFF

SEQ ID NO: 700955 - protein, 15 aa, Homo sapiens
  CDR3 for alpha chain variable domain of TCR clone 350478 (TRAV2, TRAJ32)
CAVATYGGATNKLIF

SEQ ID NO: 700956 - protein, 15 aa, Homo sapiens
  CDR3 for beta chain variable domain of TCR clone 350478 (TRBV7-7, TRBJ2-5)
CASSQLERAEETQYF

SEQ ID NO: 700957 - protein, 12 aa, Homo sapiens
  CDR3 for alpha chain variable domain of TCR clone 350479 (TRAV3, TRAJ20)
CAVRDHDYKLSF

SEQ ID NO: 700958 - protein, 15 aa, Homo sapiens
  CDR3 for beta chain variable domain of TCR clone 350479 (TRBV9, TRBJ1-6)
CASSVAGIGDSPLHF

SEQ ID NO: 700959 - protein, 14 aa, Homo sapiens
  CDR3 for alpha chain variable domain of TCR clone 350480 (TRAV26-1, TRAJ21)
CIVRPPYNFNKFYF

SEQ ID NO: 700960 - protein, 14 aa, Homo sapiens
  CDR3 for beta chain variable domain of TCR clone 350480 (TRBV11-3, TRBJ2-1)
CASSATTSGSIQFC

SEQ ID NO: 700961 - protein, 11 aa, Homo sapiens
  CDR3 for alpha chain variable domain of TCR clone 350481 (TRAV17, TRAJ36)
CAPTGANNLFF

SEQ ID NO: 700962 - protein, 13 aa, Homo sapiens
  CDR3 for beta chain variable domain of TCR clone 350481 (TRBV19, TRBJ2-2)
CASSGRGTGELFF

SEQ ID NO: 700963 - protein, 14 aa, Homo sapiens
  CDR3 for alpha chain variable domain of TCR clone 350482 (TRAV12-3, TRAJ58)
CAMSTETSGSRLTF

SEQ ID NO: 700964 - protein, 12 aa, Homo sapiens
  CDR3 for beta chain variable domain of TCR clone 350482 (TRBV7-8, TRBJ2-7)
CASSLGDREKYF

SEQ ID NO: 700965 - protein, 16 aa, Homo sapiens
  CDR3 for alpha chain variable domain of TCR clone 350483 (TRAV12-3, TRAJ45)
CAMGWGSGGGADGLTF

SEQ ID NO: 700966 - protein, 16 aa, Homo sapiens
  CDR3 for beta chain variable domain of TCR clone 350483 (TRBV12-4, TRBJ2-7)
CASSLIGGTGTYEQYF

SEQ ID NO: 700967 - protein, 15 aa, Homo sapiens
  CDR3 for alpha chain variable domain of TCR clone 350484 (TRAV8-1, TRAJ6)
CAVNAGAGGSYIPTF

SEQ ID NO: 700968 - protein, 14 aa, Homo sapiens
  CDR3 for beta chain variable domain of TCR clone 350484 (TRBV25-1, TRBJ1-6)
YASSLSADISPLHF

SEQ ID NO: 700969 - protein, 12 aa, Homo sapiens
  CDR3 for alpha chain variable domain of TCR clone 350485 (TRAV36/DV7, TRAJ54)
CAVVRGAQKLVF

SEQ ID NO: 700970 - protein, 15 aa, Homo sapiens
  CDR3 for beta chain variable domain of TCR clone 350485 (TRBV7-2, TRBJ2-7)
CASSLALGSAYEQYF

SEQ ID NO: 700971 - protein, 14 aa, Homo sapiens
  CDR3 for alpha chain variable domain of TCR clone 350486 (TRAV1-2, TRAJ16)
CAVNRFSDGQTLLF

SEQ ID NO: 700972 - protein, 15 aa, Homo sapiens
  CDR3 for beta chain variable domain of TCR clone 350486 (TRBV7-9, TRBJ1-6)
CASSSPGRGNSPLLF

SEQ ID NO: 700973 - protein, 13 aa, Homo sapiens
  CDR3 for alpha chain variable domain of TCR clone 350487 (TRAV30, TRAJ39)
CGTEKNAGNLLTF

SEQ ID NO: 700974 - protein, 12 aa, Homo sapiens
  CDR3 for beta chain variable domain of TCR clone 350487 (TRBV12-4, TRBJ2-5)
CASSSAQETQYF

SEQ ID NO: 700975 - protein, 14 aa, Homo sapiens
  CDR3 for alpha chain variable domain of TCR clone 350488 (TRAV8-4, TRAJ34)
CAVSDPGDTAKLIF

SEQ ID NO: 700976 - protein, 13 aa, Homo sapiens
  CDR3 for beta chain variable domain of TCR clone 350488 (TRBV7-9, TRBJ2-5)
CASLSPGQETQYF

SEQ ID NO: 700977 - protein, 14 aa, Homo sapiens
  CDR3 for alpha chain variable domain of TCR clone 350489 (TRAV3, TRAJ34)
CAVRDINNTNKLIF

SEQ ID NO: 700978 - protein, 15 aa, Homo sapiens
  CDR3 for beta chain variable domain of TCR clone 350489 (TRBV20-1, TRBJ2-7)
CSARDRVAGMDEQYF

SEQ ID NO: 700979 - protein, 14 aa, Homo sapiens
  CDR3 for alpha chain variable domain of TCR clone 350490 (TRAV21, TRAJ35)
CSVMPIGFGNVLHC

SEQ ID NO: 700980 - protein, 13 aa, Homo sapiens
  CDR3 for beta chain variable domain of TCR clone 350490 (TRBV13, TRBJ2-5)
CASSPEVGETQYF

SEQ ID NO: 700981 - protein, 14 aa, Homo sapiens
  CDR3 for alpha chain variable domain of TCR clone 350491 (TRAV8-2, TRAJ6)
CVVISSGGSYIPTF

SEQ ID NO: 700982 - protein, 16 aa, Homo sapiens
  CDR3 for beta chain variable domain of TCR clone 350491 (TRBV7-6, TRBJ2-6)
CASSLPGLSGANVLTF

SEQ ID NO: 700983 - protein, 12 aa, Homo sapiens
  CDR3 for alpha chain variable domain of TCR clone 350492 (TRAV35, TRAJ49)
CAGWNTGNQFYF

SEQ ID NO: 700984 - protein, 16 aa, Homo sapiens
  CDR3 for beta chain variable domain of TCR clone 350492 (TRBV12-4, TRBJ1-5)
CASSRPVGGSNQPQHF

SEQ ID NO: 700985 - protein, 16 aa, Homo sapiens
  CDR3 for alpha chain variable domain of TCR clone 350493 (TRAV16, TRAJ4)
CALSRMFSGGCNKLIF

SEQ ID NO: 700986 - protein, 14 aa, Homo sapiens
  CDR3 for beta chain variable domain of TCR clone 350493 (TRBV18, TRBJ2-5)
CASSPGVSQETQYF

SEQ ID NO: 700987 - protein, 14 aa, Homo sapiens
  CDR3 for alpha chain variable domain of TCR clone 350494 (TRAV8-3, TRAJ13)
CAVGAEEGYQKVTF

SEQ ID NO: 700988 - protein, 13 aa, Homo sapiens
  CDR3 for beta chain variable domain of TCR clone 350494 (TRBV11-2, TRBJ2-5)
CASSSTGEETQYF

SEQ ID NO: 700989 - protein, 13 aa, Homo sapiens
  CDR3 for alpha chain variable domain of TCR clone 350495 (TRAV20, TRAJ37)
CAGCSSNTGKLIF

SEQ ID NO: 700990 - protein, 11 aa, Homo sapiens
  CDR3 for beta chain variable domain of TCR clone 350495 (TRBV12-4, TRBJ2-3)
CASTTTDTQYV

SEQ ID NO: 700991 - protein, 14 aa, Homo sapiens
  CDR3 for alpha chain variable domain of TCR clone 350496 (TRAV1-1, TRAJ23)
CAVSIYNQGGKLIF

SEQ ID NO: 700992 - protein, 15 aa, Homo sapiens
  CDR3 for beta chain variable domain of TCR clone 350496 (TRBV5-8, TRBJ2-2)
CASSLDRGAAGELFF

SEQ ID NO: 700993 - protein, 14 aa, Homo sapiens
  CDR3 for alpha chain variable domain of TCR clone 350497 (TRAV8-4, TRAJ15)
CAVTIREAGTALIF

SEQ ID NO: 700994 - protein, 13 aa, Homo sapiens
  CDR3 for beta chain variable domain of TCR clone 350497 (TRBV10-3, TRBJ2-7)
CAISEKGWYEQYF

SEQ ID NO: 700995 - protein, 13 aa, Homo sapiens
  CDR3 for alpha chain variable domain of TCR clone 350498 (TRAV13-2, TRAJ48)
CAEMDFGNEKLSF

SEQ ID NO: 700996 - protein, 15 aa, Homo sapiens
  CDR3 for beta chain variable domain of TCR clone 350498 (TRBV7-9, TRBJ1-6)
CASSSPGRGNSPLHF

SEQ ID NO: 700997 - protein, 15 aa, Homo sapiens
  CDR3 for alpha chain variable domain of TCR clone 350499 (TRAV21, TRAJ10)
CAVRGLTGGGNKLTF

SEQ ID NO: 700998 - protein, 14 aa, Homo sapiens
  CDR3 for beta chain variable domain of TCR clone 350499 (TRBV19, TRBJ2-1)
CASPTFVLSGEQFF

SEQ ID NO: 700999 - protein, 12 aa, Homo sapiens
  CDR3 for alpha chain variable domain of TCR clone 350500 (TRAV4, TRAJ26)
CLVGDYGQNFVF

SEQ ID NO: 701000 - protein, 14 aa, Homo sapiens
  CDR3 for beta chain variable domain of TCR clone 350500 (TRBV5-4, TRBJ1-1)
CASSLDSRRDEAFF

SEQ ID NO: 701001 - protein, 12 aa, Homo sapiens
  CDR3 for alpha chain variable domain of TCR clone 350501 (TRAV27, TRAJ21)
CAGVRQLQQILL

SEQ ID NO: 701002 - protein, 14 aa, Homo sapiens
  CDR3 for beta chain variable domain of TCR clone 350501 (TRBV7-9, TRBJ1-4)
CASSLEGLSEKLFC

SEQ ID NO: 701003 - protein, 15 aa, Homo sapiens
  CDR3 for alpha chain variable domain of TCR clone 350502 (TRAV29/DV5, TRAJ24)
CAASWATDSWGKFKF

SEQ ID NO: 701004 - protein, 14 aa, Homo sapiens
  CDR3 for beta chain variable domain of TCR clone 350502 (TRBV12-5, TRBJ2-5)
CASGSRTHQETQYF

SEQ ID NO: 701005 - protein, 14 aa, Homo sapiens
  CDR3 for alpha chain variable domain of TCR clone 350503 (TRAV17, TRAJ22)
CATSPSGSARQLTF

SEQ ID NO: 701006 - protein, 12 aa, Homo sapiens
  CDR3 for beta chain variable domain of TCR clone 350503 (TRBV12-4, TRBJ2-7)
CASSLGGYEQYF

SEQ ID NO: 701007 - protein, 11 aa, Homo sapiens
  CDR3 for alpha chain variable domain of TCR clone 350504 (TRAV21, TRAJ11)
WAVNGYSTLTF

SEQ ID NO: 701008 - protein, 15 aa, Homo sapiens
  CDR3 for beta chain variable domain of TCR clone 350504 (TRBV6-3, TRBJ2-7)
CASSSPGTVFYEQYF

SEQ ID NO: 701009 - protein, 12 aa, Homo sapiens
  CDR3 for alpha chain variable domain of TCR clone 350505 (TRAV21, TRAJ58)
CAVTPIQTRLTF

SEQ ID NO: 701010 - protein, 13 aa, Homo sapiens
  CDR3 for beta chain variable domain of TCR clone 350505 (TRBV19, TRBJ1-2)
CASSVPGQDGYTF

SEQ ID NO: 701011 - protein, 14 aa, Homo sapiens
  CDR3 for alpha chain variable domain of TCR clone 350506 (TRAV4, TRAJ26)
CLVGPHNYGQNSVF

SEQ ID NO: 701012 - protein, 13 aa, Homo sapiens
  CDR3 for beta chain variable domain of TCR clone 350506 (TRBV20-1, TRBJ1-1)
CSAPLGGGTEAFF

SEQ ID NO: 701013 - protein, 12 aa, Homo sapiens
  CDR3 for alpha chain variable domain of TCR clone 350507 (TRAV13-1, TRAJ48)
CAANFGNEKLTF

SEQ ID NO: 701014 - protein, 13 aa, Homo sapiens
  CDR3 for beta chain variable domain of TCR clone 350507 (TRBV4-1, TRBJ1-1)
CASSRKMNTEAFF

SEQ ID NO: 701015 - protein, 14 aa, Homo sapiens
  CDR3 for alpha chain variable domain of TCR clone 350508 (TRAV26-1, TRAJ48)
CIVRVPFGNEKLTF

SEQ ID NO: 701016 - protein, 16 aa, Homo sapiens
  CDR3 for beta chain variable domain of TCR clone 350508 (TRBV18, TRBJ2-1)
CANSPYLSIRGDEQFF

SEQ ID NO: 701017 - protein, 14 aa, Homo sapiens
  CDR3 for alpha chain variable domain of TCR clone 350509 (TRAV13-1, TRAJ35)
CAASKGGFGNVLHC

SEQ ID NO: 701018 - protein, 20 aa, Homo sapiens
  CDR3 for beta chain variable domain of TCR clone 350509 (TRBV28, TRBJ2-1)
CASTPIGRSSGLAGGNEQFF

SEQ ID NO: 701019 - protein, 20 aa, Homo sapiens
  CDR3 for alpha chain variable domain of TCR clone 350510 (TRAV26-2, TRAJ42)
CCVLLHRQTYYGGSQGNLIF

SEQ ID NO: 701020 - protein, 16 aa, Homo sapiens
  CDR3 for beta chain variable domain of TCR clone 350510 (TRBV4-1, TRBJ1-1)
CASSSMSERPNTEAFF

SEQ ID NO: 701021 - protein, 20 aa, Homo sapiens
  CDR3 for alpha chain variable domain of TCR clone 350511 (TRAV1-2, TRAJ34)
LLKELQMKDSASPNTDKLIF

SEQ ID NO: 701022 - protein, 18 aa, Homo sapiens
  CDR3 for beta chain variable domain of TCR clone 350511 (TRBV3-1, TRBJ2-5)
CASSQAGSSGGGRETQYF

SEQ ID NO: 701023 - protein, 12 aa, Homo sapiens
  CDR3 for alpha chain variable domain of TCR clone 350512 (TRAV12-1, TRAJ6)
CVVNFRSYIPTF

SEQ ID NO: 701024 - protein, 17 aa, Homo sapiens
  CDR3 for beta chain variable domain of TCR clone 350512 (TRBV11-2, TRBJ2-1)
CASSLYPPGVEYNEQFF

SEQ ID NO: 701025 - protein, 14 aa, Homo sapiens
  CDR3 for alpha chain variable domain of TCR clone 350513 (TRAV12-3, TRAJ9)
CAMSPNTGGFKTIF

SEQ ID NO: 701026 - protein, 15 aa, Homo sapiens
  CDR3 for beta chain variable domain of TCR clone 350513 (TRBV20-1, TRBJ2-1)
CSARVGMAGFNEQFF

SEQ ID NO: 701027 - protein, 17 aa, Homo sapiens
  CDR3 for alpha chain variable domain of TCR clone 350514 (TRAV4, TRAJ13)
CLVGVQGSSGGYQKVTF

SEQ ID NO: 701028 - protein, 13 aa, Homo sapiens
  CDR3 for beta chain variable domain of TCR clone 350514 (TRBV10-3, TRBJ2-7)
CASKQAVNYEQYF

SEQ ID NO: 701029 - protein, 13 aa, Homo sapiens
  CDR3 for alpha chain variable domain of TCR clone 350515 (TRAV13-2, TRAJ48)
CAEIDFGNEKLAF

SEQ ID NO: 701030 - protein, 15 aa, Homo sapiens
  CDR3 for beta chain variable domain of TCR clone 350515 (TRBV7-9, TRBJ1-6)
CASSSPGRGNSPLHF

SEQ ID NO: 701031 - protein, 14 aa, Homo sapiens
  CDR3 for alpha chain variable domain of TCR clone 350516 (TRAV16, TRAJ37)
CALDISGHTGKLIF

SEQ ID NO: 701032 - protein, 11 aa, Homo sapiens
  CDR3 for beta chain variable domain of TCR clone 350516 (TRBV6-1, TRBJ2-1)
CASISSNEQFF

SEQ ID NO: 701033 - protein, 15 aa, Homo sapiens
  CDR3 for alpha chain variable domain of TCR clone 350517 (TRAV4, TRAJ10)
CLVGDGSGGGNKLTF

SEQ ID NO: 701034 - protein, 15 aa, Homo sapiens
  CDR3 for beta chain variable domain of TCR clone 350517 (TRBV27, TRBJ2-3)
CASSSLAGVIDTQYC

SEQ ID NO: 701035 - protein, 12 aa, Homo sapiens
  CDR3 for alpha chain variable domain of TCR clone 350518 (TRAV12-2, TRAJ30)
CAVRNRDAKIIF

SEQ ID NO: 701036 - protein, 15 aa, Homo sapiens
  CDR3 for beta chain variable domain of TCR clone 350518 (TRBV6-3, TRBJ1-5)
CASRVDRWSNQPQHF

SEQ ID NO: 701037 - protein, 12 aa, Homo sapiens
  CDR3 for alpha chain variable domain of TCR clone 350519 (TRAV12-3, TRAJ40)
CAMSSGTYKYIF

SEQ ID NO: 701038 - protein, 16 aa, Homo sapiens
  CDR3 for beta chain variable domain of TCR clone 350519 (TRBV12-4, TRBJ2-5)
CASSLSTSGGRETQYF

SEQ ID NO: 701039 - protein, 15 aa, Homo sapiens
  CDR3 for alpha chain variable domain of TCR clone 350520 (TRAV13-2, TRAJ45)
CAENNSGGGADGLTF

SEQ ID NO: 701040 - protein, 13 aa, Homo sapiens
  CDR3 for beta chain variable domain of TCR clone 350520 (TRBV25-1, TRBJ2-6)
CASRGPGANVLPF

SEQ ID NO: 701041 - protein, 16 aa, Homo sapiens
  CDR3 for alpha chain variable domain of TCR clone 350521 (TRAV30, TRAJ24)
CGTEIVDVDSWGKFQF

SEQ ID NO: 701042 - protein, 11 aa, Homo sapiens
  CDR3 for beta chain variable domain of TCR clone 350521 (TRBV7-9, TRBJ2-5)
CASTYDETQYF

SEQ ID NO: 701043 - protein, 12 aa, Homo sapiens
  CDR3 for alpha chain variable domain of TCR clone 350522 (TRAV3, TRAJ9)
CAVLPAGFKTIF

SEQ ID NO: 701044 - protein, 14 aa, Homo sapiens
  CDR3 for beta chain variable domain of TCR clone 350522 (TRBV7-2, TRBJ2-7)
CASRSQGAAYEQYF

SEQ ID NO: 701045 - protein, 13 aa, Homo sapiens
  CDR3 for alpha chain variable domain of TCR clone 350523 (TRAV16, TRAJ5)
CALTNTGRRALTF

SEQ ID NO: 701046 - protein, 15 aa, Homo sapiens
  CDR3 for beta chain variable domain of TCR clone 350523 (TRBV11-2, TRBJ2-4)
CAGSRPGTGINIQYF

SEQ ID NO: 701047 - protein, 16 aa, Homo sapiens
  CDR3 for alpha chain variable domain of TCR clone 350524 (TRAV16, TRAJ42)
CALSGYYGGSQGNLIF

SEQ ID NO: 701048 - protein, 14 aa, Homo sapiens
  CDR3 for beta chain variable domain of TCR clone 350524 (TRBV3-1, TRBJ2-5)
CASSQAVIQETQYF

SEQ ID NO: 701049 - protein, 20 aa, Homo sapiens
  CDR3 for alpha chain variable domain of TCR clone 350525 (TRAV26-1, TRAJ42)
CCVLLHRQTYYGGSQGNLIV

SEQ ID NO: 701050 - protein, 16 aa, Homo sapiens
  CDR3 for beta chain variable domain of TCR clone 350525 (TRBV7-3, TRBJ2-2)
CASSLKRGTLSGELFF

SEQ ID NO: 701051 - protein, 14 aa, Homo sapiens
  CDR3 for alpha chain variable domain of TCR clone 350526 (TRAV12-2, TRAJ15)
CAPHTGQAGTALIF

SEQ ID NO: 701052 - protein, 16 aa, Homo sapiens
  CDR3 for beta chain variable domain of TCR clone 350526 (TRBV13, TRBJ2-2)
CASSPRTGEHTGELFF

SEQ ID NO: 701053 - protein, 16 aa, Homo sapiens
  CDR3 for alpha chain variable domain of TCR clone 350527 (TRAV12-2, TRAJ32)
CTVNLGQGGATTKLIF

SEQ ID NO: 701054 - protein, 15 aa, Homo sapiens
  CDR3 for beta chain variable domain of TCR clone 350527 (TRBV20-1, TRBJ2-7)
CSARGPLAGGREQYF

SEQ ID NO: 701055 - protein, 11 aa, Homo sapiens
  CDR3 for alpha chain variable domain of TCR clone 350528 (TRAV1-1, TRAJ23)
CAVRQGGKPIF

SEQ ID NO: 701056 - protein, 12 aa, Homo sapiens
  CDR3 for beta chain variable domain of TCR clone 350528 (TRBV19, TRBJ1-5)
CASSIAQQPQHF

SEQ ID NO: 701057 - protein, 15 aa, Homo sapiens
  CDR3 for alpha chain variable domain of TCR clone 350529 (TRAV40, TRAJ39)
CLLPPRGNAGNMLTF

SEQ ID NO: 701058 - protein, 15 aa, Homo sapiens
  CDR3 for beta chain variable domain of TCR clone 350529 (TRBV19, TRBJ2-2)
CASSFGRLNTGELFF

SEQ ID NO: 701059 - protein, 17 aa, Homo sapiens
  CDR3 for alpha chain variable domain of TCR clone 350530 (TRAV3, TRAJ38)
CAVRDCLNAGHNRKLIW

SEQ ID NO: 701060 - protein, 14 aa, Homo sapiens
  CDR3 for beta chain variable domain of TCR clone 350530 (TRBV5-5, TRBJ1-5)
CASSGQGVDQPQHF

SEQ ID NO: 701061 - protein, 16 aa, Homo sapiens
  CDR3 for alpha chain variable domain of TCR clone 350531 (TRAV3, TRAJ27)
CAVRDPQGTNAGKSTF

SEQ ID NO: 701062 - protein, 15 aa, Homo sapiens
  CDR3 for beta chain variable domain of TCR clone 350531 (TRBV20-1, TRBJ2-7)
CSVRDRVSGMDEQYF

SEQ ID NO: 701063 - protein, 13 aa, Homo sapiens
  CDR3 for alpha chain variable domain of TCR clone 350532 (TRAV12-2, TRAJ20)
CAVYPSNDYKLSF

SEQ ID NO: 701064 - protein, 14 aa, Homo sapiens
  CDR3 for beta chain variable domain of TCR clone 350532 (TRBV6-6, TRBJ2-7)
CASSDSGAGYEQYF

SEQ ID NO: 701065 - protein, 12 aa, Homo sapiens
  CDR3 for alpha chain variable domain of TCR clone 350533 (TRAV23/DV6, TRAJ26)
CAASKFGQNFVF

SEQ ID NO: 701066 - protein, 15 aa, Homo sapiens
  CDR3 for beta chain variable domain of TCR clone 350533 (TRBV7-2, TRBJ2-1)
CASSSGLAGGNEQFF

SEQ ID NO: 701067 - protein, 14 aa, Homo sapiens
  CDR3 for alpha chain variable domain of TCR clone 350534 (TRAV12-3, TRAJ10)
SHLPLTGGGNKLTF

SEQ ID NO: 701068 - protein, 15 aa, Homo sapiens
  CDR3 for beta chain variable domain of TCR clone 350534 (TRBV7-6, TRBJ2-7)
CASSGRRDAFGEQYF

SEQ ID NO: 701069 - protein, 16 aa, Homo sapiens
  CDR3 for alpha chain variable domain of TCR clone 350535 (TRAV30, TRAJ24)
CGTEIVDADSWGKFQF

SEQ ID NO: 701070 - protein, 15 aa, Homo sapiens
  CDR3 for beta chain variable domain of TCR clone 350535 (TRBV28, TRBJ2-1)
CASSIIAGGRSQQFF

SEQ ID NO: 701071 - protein, 12 aa, Homo sapiens
  CDR3 for alpha chain variable domain of TCR clone 350536 (TRAV1-1, TRAJ16)
CAEMARSCSLQG

SEQ ID NO: 701072 - protein, 16 aa, Homo sapiens
  CDR3 for beta chain variable domain of TCR clone 350536 (TRBV27, TRBJ2-2)
CASSSSGVSNTGELFF

SEQ ID NO: 701073 - protein, 15 aa, Homo sapiens
  CDR3 for alpha chain variable domain of TCR clone 350537 (TRAV12-2, TRAJ8)
CAVREENTGFQKLVF

SEQ ID NO: 701074 - protein, 15 aa, Homo sapiens
  CDR3 for beta chain variable domain of TCR clone 350537 (TRBV28, TRBJ2-4)
CAAGSGTLLMRIQYL

SEQ ID NO: 701075 - protein, 13 aa, Homo sapiens
  CDR3 for alpha chain variable domain of TCR clone 350538 (TRAV13-1, TRAJ5)
YAARVTGRRALTF

SEQ ID NO: 701076 - protein, 15 aa, Homo sapiens
  CDR3 for beta chain variable domain of TCR clone 350538 (TRBV7-9, TRBJ2-7)
CASSPGGGLTYEQYF

SEQ ID NO: 701077 - protein, 14 aa, Homo sapiens
  CDR3 for alpha chain variable domain of TCR clone 350539 (TRAV26-1, TRAJ38)
CIADNAGINRKPIW

SEQ ID NO: 701078 - protein, 13 aa, Homo sapiens
  CDR3 for beta chain variable domain of TCR clone 350539 (TRBV20-1, TRBJ1-1)
CSARGGGNTEAFF

SEQ ID NO: 701079 - protein, 16 aa, Homo sapiens
  CDR3 for alpha chain variable domain of TCR clone 350540 (TRAV30, TRAJ24)
CGIEIVDADSWGNFQF

SEQ ID NO: 701080 - protein, 14 aa, Homo sapiens
  CDR3 for beta chain variable domain of TCR clone 350540 (TRBV12-5, TRBJ2-5)
CASGSRTHQETQYF

SEQ ID NO: 701081 - protein, 17 aa, Homo sapiens
  CDR3 for alpha chain variable domain of TCR clone 350541 (TRAV13-1, TRAJ28)
CAASPPYSGAGSYQLTS

SEQ ID NO: 701082 - protein, 15 aa, Homo sapiens
  CDR3 for beta chain variable domain of TCR clone 350541 (TRBV6-3, TRBJ2-2)
CASSFLATLTGELFF

SEQ ID NO: 701083 - protein, 22 aa, Homo sapiens
  CDR3 for alpha chain variable domain of TCR clone 350542 (TRAV2, TRAJ9)
CAVEDRSGGFKLSLEQEQDYLL

SEQ ID NO: 701084 - protein, 16 aa, Homo sapiens
  CDR3 for beta chain variable domain of TCR clone 350542 (TRBV7-3, TRBJ2-1)
CASSLEGYRSYNEQFF

SEQ ID NO: 701085 - protein, 14 aa, Homo sapiens
  CDR3 for alpha chain variable domain of TCR clone 350543 (TRAV8-1, TRAJ34)
CAVITTYNTDKLIF

SEQ ID NO: 701086 - protein, 14 aa, Homo sapiens
  CDR3 for beta chain variable domain of TCR clone 350543 (TRBV11-3, TRBJ1-3)
CASSHNGQGNTLYF

SEQ ID NO: 701087 - protein, 15 aa, Homo sapiens
  CDR3 for alpha chain variable domain of TCR clone 350544 (TRAV2, TRAJ44)
CAVEAYTGTASKLTF

SEQ ID NO: 701088 - protein, 15 aa, Homo sapiens
  CDR3 for beta chain variable domain of TCR clone 350544 (TRBV6-5, TRBJ2-1)
CASSYDAGAGNEQFF

SEQ ID NO: 701089 - protein, 12 aa, Homo sapiens
  CDR3 for alpha chain variable domain of TCR clone 350545 (TRAV17, TRAJ12)
CATLRCSYKLIF

SEQ ID NO: 701090 - protein, 14 aa, Homo sapiens
  CDR3 for beta chain variable domain of TCR clone 350545 (TRBV19, TRBJ2-1)
CARGARSFQWEQFF

SEQ ID NO: 701091 - protein, 14 aa, Homo sapiens
  CDR3 for alpha chain variable domain of TCR clone 350546 (TRAV1-2, TRAJ16)
CAVNRFSDGQTLPF

SEQ ID NO: 701092 - protein, 15 aa, Homo sapiens
  CDR3 for beta chain variable domain of TCR clone 350546 (TRBV9, TRBJ1-6)
CASSVAGTGDSPLRF

SEQ ID NO: 701093 - protein, 15 aa, Homo sapiens
  CDR3 for alpha chain variable domain of TCR clone 350547 (TRAV9-2, TRAJ24)
CALSDFWASWGKLQL

SEQ ID NO: 701094 - protein, 14 aa, Homo sapiens
  CDR3 for beta chain variable domain of TCR clone 350547 (TRBV19, TRBJ2-7)
CASSIFAGTYEQYF

SEQ ID NO: 701095 - protein, 13 aa, Homo sapiens
  CDR3 for alpha chain variable domain of TCR clone 350548 (TRAV12-1, TRAJ39)
CVVNYNVGNMLTF

SEQ ID NO: 701096 - protein, 12 aa, Homo sapiens
  CDR3 for beta chain variable domain of TCR clone 350548 (TRBV5-7, TRBJ1-1)
CASSLGRGKAFF

SEQ ID NO: 701097 - protein, 14 aa, Homo sapiens
  CDR3 for alpha chain variable domain of TCR clone 350549 (TRAV35, TRAJ50)
CAGHRKTSYDKVIF

SEQ ID NO: 701098 - protein, 14 aa, Homo sapiens
  CDR3 for beta chain variable domain of TCR clone 350549 (TRBV7-2, TRBJ1-6)
CASSLQGANSPLHF

SEQ ID NO: 701099 - protein, 11 aa, Homo sapiens
  CDR3 for alpha chain variable domain of TCR clone 350550 (TRAV1-2, TRAJ20)
CAVADDYKLSF

SEQ ID NO: 701100 - protein, 16 aa, Homo sapiens
  CDR3 for beta chain variable domain of TCR clone 350550 (TRBV4-3, TRBJ1-6)
CASSQDPGVYNSPLHF

SEQ ID NO: 701101 - protein, 14 aa, Homo sapiens
  CDR3 for alpha chain variable domain of TCR clone 350551 (TRAV26-1, TRAJ21)
CIVRVVYNFNKFYF

SEQ ID NO: 701102 - protein, 11 aa, Homo sapiens
  CDR3 for beta chain variable domain of TCR clone 350551 (TRBV5-7, TRBJ2-5)
CASSLERTQYL

SEQ ID NO: 701103 - protein, 17 aa, Homo sapiens
  CDR3 for alpha chain variable domain of TCR clone 350552 (TRAV36/DV7, TRAJ52)
CAVAQRAGGTSYGKLTF

SEQ ID NO: 701104 - protein, 14 aa, Homo sapiens
  CDR3 for beta chain variable domain of TCR clone 350552 (TRBV19, TRBJ2-1)
CASPTFVLSGEQFV

SEQ ID NO: 701105 - protein, 12 aa, Homo sapiens
  CDR3 for alpha chain variable domain of TCR clone 350553 (TRAV20, TRAJ20)
CAVRFNDYKLSF

SEQ ID NO: 701106 - protein, 12 aa, Homo sapiens
  CDR3 for beta chain variable domain of TCR clone 350553 (TRBV7-9, TRBJ2-7)
CASSLEGYEQYF

SEQ ID NO: 701107 - protein, 14 aa, Homo sapiens
  CDR3 for alpha chain variable domain of TCR clone 350554 (TRAV12-2, TRAJ13)
CAVKKTGGYQKVTF

SEQ ID NO: 701108 - protein, 20 aa, Homo sapiens
  CDR3 for beta chain variable domain of TCR clone 350554 (TRBV7-8, TRBJ2-2)
CASSHLFTGPTIHITGELFF

SEQ ID NO: 701109 - protein, 13 aa, Homo sapiens
  CDR3 for alpha chain variable domain of TCR clone 350555 (TRAV27, TRAJ29)
CAGAPSGNPPLVF

SEQ ID NO: 701110 - protein, 14 aa, Homo sapiens
  CDR3 for beta chain variable domain of TCR clone 350555 (TRBV7-9, TRBJ2-7)
CASSIGQGAGEQYF

SEQ ID NO: 701111 - protein, 15 aa, Homo sapiens
  CDR3 for alpha chain variable domain of TCR clone 350556 (TRAV4, TRAJ15)
CLVGDIRRAGTALIF

SEQ ID NO: 701112 - protein, 15 aa, Homo sapiens
  CDR3 for beta chain variable domain of TCR clone 350556 (TRBV12-5, TRBJ2-5)
ASGPRTSGNQETQYF

SEQ ID NO: 701113 - protein, 15 aa, Homo sapiens
  CDR3 for alpha chain variable domain of TCR clone 350557 (TRAV14/DV4, TRAJ33)
CAMREGRDSNYQLIW

SEQ ID NO: 701114 - protein, 12 aa, Homo sapiens
  CDR3 for beta chain variable domain of TCR clone 350557 (TRBV7-9, TRBJ2-7)
CASSFGSYEQYF

SEQ ID NO: 701115 - protein, 14 aa, Homo sapiens
  CDR3 for alpha chain variable domain of TCR clone 350558 (TRAV8-6, TRAJ34)
CAVSDQGNTDKLIF

SEQ ID NO: 701116 - protein, 15 aa, Homo sapiens
  CDR3 for beta chain variable domain of TCR clone 350558 (TRBV27, TRBJ2-1)
CASSNVGVSSNEQFF

SEQ ID NO: 701117 - protein, 13 aa, Homo sapiens
  CDR3 for alpha chain variable domain of TCR clone 350559 (TRAV3, TRAJ21)
CAVREPDFNKFYF

SEQ ID NO: 701118 - protein, 13 aa, Homo sapiens
  CDR3 for beta chain variable domain of TCR clone 350559 (TRBV10-3, TRBJ2-7)
CASKLAVNYEQNF

SEQ ID NO: 701119 - protein, 14 aa, Homo sapiens
  CDR3 for alpha chain variable domain of TCR clone 350560 (TRAV8-3, TRAJ37)
GAVGSSGNTGKLIF

SEQ ID NO: 701120 - protein, 15 aa, Homo sapiens
  CDR3 for beta chain variable domain of TCR clone 350560 (TRBV11-2, TRBJ1-3)
CASSLSPLVRDTIYF

SEQ ID NO: 701121 - protein, 11 aa, Homo sapiens
  CDR3 for alpha chain variable domain of TCR clone 350561 (TRAV1-2, TRAJ20)
CAVANDYKLSF

SEQ ID NO: 701122 - protein, 17 aa, Homo sapiens
  CDR3 for beta chain variable domain of TCR clone 350561 (TRBV7-8, TRBJ2-6)
RASSAGTGGAGANVLTF

SEQ ID NO: 701123 - protein, 14 aa, Homo sapiens
  CDR3 for alpha chain variable domain of TCR clone 350562 (TRAV12-2, TRAJ13)
CAVNPSGGYQKVTF

SEQ ID NO: 701124 - protein, 12 aa, Homo sapiens
  CDR3 for beta chain variable domain of TCR clone 350562 (TRBV19, TRBJ2-1)
CASSRQGAEQFF

SEQ ID NO: 701125 - protein, 14 aa, Homo sapiens
  CDR3 for alpha chain variable domain of TCR clone 350563 (TRAV29/DV5, TRAJ20)
CAASAPIEDYKLSF

SEQ ID NO: 701126 - protein, 16 aa, Homo sapiens
  CDR3 for beta chain variable domain of TCR clone 350563 (TRBV5-1, TRBJ2-2)
CASSLWDTTNTGELFF

SEQ ID NO: 701127 - protein, 11 aa, Homo sapiens
  CDR3 for alpha chain variable domain of TCR clone 350564 (TRAV21, TRAJ41)
CAVRSGYALNF

SEQ ID NO: 701128 - protein, 13 aa, Homo sapiens
  CDR3 for beta chain variable domain of TCR clone 350564 (TRBV7-9, TRBJ1-2)
CASSLRQNYGYTF

SEQ ID NO: 701129 - protein, 16 aa, Homo sapiens
  CDR3 for alpha chain variable domain of TCR clone 350565 (TRAV4, TRAJ18)
CCVLLIGGSTLGRLYF

SEQ ID NO: 701130 - protein, 16 aa, Homo sapiens
  CDR3 for beta chain variable domain of TCR clone 350565 (TRBV12-4, TRBJ2-7)
CASSLIGGTGTYAQYF

SEQ ID NO: 701131 - protein, 12 aa, Homo sapiens
  CDR3 for alpha chain variable domain of TCR clone 350566 (TRAV13-2, TRAJ23)
CAERHRGGKLIF

SEQ ID NO: 701132 - protein, 15 aa, Homo sapiens
  CDR3 for beta chain variable domain of TCR clone 350566 (TRBV11-1, TRBJ2-1)
CASSGPAEPYNEQFF

SEQ ID NO: 701133 - protein, 12 aa, Homo sapiens
  CDR3 for alpha chain variable domain of TCR clone 350567 (TRAV13-1, TRAJ53)
AASGGNNYKLTF

SEQ ID NO: 701134 - protein, 12 aa, Homo sapiens
  CDR3 for beta chain variable domain of TCR clone 350567 (TRBV18, TRBJ1-4)
CASSPSREKLFF

SEQ ID NO: 701135 - protein, 15 aa, Homo sapiens
  CDR3 for alpha chain variable domain of TCR clone 350568 (TRAV26-1, TRAJ29)
CIVRVEGSGNTPLAF

SEQ ID NO: 701136 - protein, 13 aa, Homo sapiens
  CDR3 for beta chain variable domain of TCR clone 350568 (TRBV28, TRBJ1-1)
CASSKQGWTEAFF

SEQ ID NO: 701137 - protein, 14 aa, Homo sapiens
  CDR3 for alpha chain variable domain of TCR clone 350569 (TRAV12-3, TRAJ10)
SHLPLTGGGNKLTF

SEQ ID NO: 701138 - protein, 22 aa, Homo sapiens
  CDR3 for beta chain variable domain of TCR clone 350569 (TRBV11-2, TRBJ1-3)
CASSLDDGRKHHIFWRGKLAHC

SEQ ID NO: 701139 - protein, 15 aa, Homo sapiens
  CDR3 for alpha chain variable domain of TCR clone 350570 (TRAV8-6, TRAJ38)
CAVSSNAGNNRKLIW

SEQ ID NO: 701140 - protein, 15 aa, Homo sapiens
  CDR3 for beta chain variable domain of TCR clone 350570 (TRBV13, TRBJ1-2)
CASSLGRQPGYGYTF

SEQ ID NO: 701141 - protein, 15 aa, Homo sapiens
  CDR3 for alpha chain variable domain of TCR clone 350571 (TRAV8-3, TRAJ11)
CAVGPLNSGYSTLTF

SEQ ID NO: 701142 - protein, 14 aa, Homo sapiens
  CDR3 for beta chain variable domain of TCR clone 350571 (TRBV4-1, TRBJ2-5)
CASSRSGSGETQYF

SEQ ID NO: 701143 - protein, 12 aa, Homo sapiens
  CDR3 for alpha chain variable domain of TCR clone 350572 (TRAV12-3, TRAJ20)
CAMVRGDYKLSF

SEQ ID NO: 701144 - protein, 12 aa, Homo sapiens
  CDR3 for beta chain variable domain of TCR clone 350572 (TRBV19, TRBJ2-1)
CASSMQDTEQFF

SEQ ID NO: 701145 - protein, 21 aa, Homo sapiens
  CDR3 for alpha chain variable domain of TCR clone 350573 (TRAV8-4, TRAJ47)
NLTKPSAHMSDAAERGNKLVF

SEQ ID NO: 701146 - protein, 14 aa, Homo sapiens
  CDR3 for beta chain variable domain of TCR clone 350573 (TRBV7-9, TRBJ2-1)
CASSPRDSLYEQFF

SEQ ID NO: 701147 - protein, 15 aa, Homo sapiens
  CDR3 for alpha chain variable domain of TCR clone 350574 (TRAV3, TRAJ5)
CAVRDLDTGRRALTF

SEQ ID NO: 701148 - protein, 15 aa, Homo sapiens
  CDR3 for beta chain variable domain of TCR clone 350574 (TRBV5-1, TRBJ1-2)
CASSSYGEFDYGYTF

SEQ ID NO: 701149 - protein, 16 aa, Homo sapiens
  CDR3 for alpha chain variable domain of TCR clone 350575 (TRAV23/DV6, TRAJ9)
CAASIGGNTGGFKTLF

SEQ ID NO: 701150 - protein, 14 aa, Homo sapiens
  CDR3 for beta chain variable domain of TCR clone 350575 (TRBV19, TRBJ2-1)
CASPTFVLSGEQFF

SEQ ID NO: 701151 - protein, 13 aa, Homo sapiens
  CDR3 for alpha chain variable domain of TCR clone 350576 (TRAV21, TRAJ20)
CAVGPRVDYKLSF

SEQ ID NO: 701152 - protein, 18 aa, Homo sapiens
  CDR3 for beta chain variable domain of TCR clone 350576 (TRBV7-6, TRBJ2-1)
CASSPRTSGMSSYNEQFF

SEQ ID NO: 701153 - protein, 11 aa, Homo sapiens
  CDR3 for alpha chain variable domain of TCR clone 350577 (TRAV35, TRAJ30)
CAPGGDDKIIF

SEQ ID NO: 701154 - protein, 12 aa, Homo sapiens
  CDR3 for beta chain variable domain of TCR clone 350577 (TRBV7-8, TRBJ2-7)
CASSLGDREQYF

SEQ ID NO: 701155 - protein, 12 aa, Homo sapiens
  CDR3 for alpha chain variable domain of TCR clone 350578 (TRAV21, TRAJ29)
CAVTSGNTPLVF

SEQ ID NO: 701156 - protein, 15 aa, Homo sapiens
  CDR3 for beta chain variable domain of TCR clone 350578 (TRBV19, TRBJ2-2)
CASSLNRGVTGELFF

SEQ ID NO: 701157 - protein, 10 aa, Homo sapiens
  CDR3 for alpha chain variable domain of TCR clone 350579 (TRAV2, TRAJ34)
CAVVIDKLIF

SEQ ID NO: 701158 - protein, 20 aa, Homo sapiens
  CDR3 for beta chain variable domain of TCR clone 350579 (TRBV19, TRBJ2-1)
CASSISRTVTSTRLNNEQFF

SEQ ID NO: 701159 - protein, 13 aa, Homo sapiens
  CDR3 for alpha chain variable domain of TCR clone 350580 (TRAV16, TRAJ22)
SAMLAGSARQLTF

SEQ ID NO: 701160 - protein, 12 aa, Homo sapiens
  CDR3 for beta chain variable domain of TCR clone 350580 (TRBV19, TRBJ2-1)
CASSMQDTEQFF

SEQ ID NO: 701161 - protein, 13 aa, Homo sapiens
  CDR3 for alpha chain variable domain of TCR clone 350581 (TRAV8-1, TRAJ23)
YAMTGGQGGKLIF

SEQ ID NO: 701162 - protein, 15 aa, Homo sapiens
  CDR3 for beta chain variable domain of TCR clone 350581 (TRBV20-1, TRBJ2-2)
CSAIPGHSNTGELFF

SEQ ID NO: 701163 - protein, 14 aa, Homo sapiens
  CDR3 for alpha chain variable domain of TCR clone 350582 (TRAV12-2, TRAJ13)
CAVKKPGGYQKVTF

SEQ ID NO: 701164 - protein, 14 aa, Homo sapiens
  CDR3 for beta chain variable domain of TCR clone 350582 (TRBV18, TRBJ2-7)
CASSPRGGAYEQYF

SEQ ID NO: 701165 - protein, 17 aa, Homo sapiens
  CDR3 for alpha chain variable domain of TCR clone 350583 (TRAV2, TRAJ13)
CLLLCCPNSGGYQKVTF

SEQ ID NO: 701166 - protein, 14 aa, Homo sapiens
  CDR3 for beta chain variable domain of TCR clone 350583 (TRBV19, TRBJ2-1)
CASEVTGARNEQFF

SEQ ID NO: 701167 - protein, 13 aa, Homo sapiens
  CDR3 for alpha chain variable domain of TCR clone 350584 (TRAV3, TRAJ21)
CAVREPDFKKFYF

SEQ ID NO: 701168 - protein, 17 aa, Homo sapiens
  CDR3 for beta chain variable domain of TCR clone 350584 (TRBV7-8, TRBJ2-6)
CASSAGTGGAGANVLTF

SEQ ID NO: 701169 - protein, 16 aa, Homo sapiens
  CDR3 for alpha chain variable domain of TCR clone 350585 (TRAV8-3, TRAJ6)
CAVGAEHQEEATYLHF

SEQ ID NO: 701170 - protein, 14 aa, Homo sapiens
  CDR3 for beta chain variable domain of TCR clone 350585 (TRBV6-6, TRBJ2-7)
CASSDSGAGYEQYF

SEQ ID NO: 701171 - protein, 14 aa, Homo sapiens
  CDR3 for alpha chain variable domain of TCR clone 350586 (TRAV25, TRAJ9)
CAGPGNTGGFKTIF

SEQ ID NO: 701172 - protein, 20 aa, Homo sapiens
  CDR3 for beta chain variable domain of TCR clone 350586 (TRBV11-3, TRBJ2-7)
CASSQRTSRSLRAVLRAGHQ

SEQ ID NO: 701173 - protein, 12 aa, Homo sapiens
  CDR3 for alpha chain variable domain of TCR clone 350587 (TRAV12-2, TRAJ8)
CAVNTGFQKLVF

SEQ ID NO: 701174 - protein, 14 aa, Homo sapiens
  CDR3 for beta chain variable domain of TCR clone 350587 (TRBV20-1, TRBJ1-1)
CSAQTRIGGTEAFC

SEQ ID NO: 701175 - protein, 15 aa, Homo sapiens
  CDR3 for alpha chain variable domain of TCR clone 350588 (TRAV12-1, TRAJ10)
CVVNKLTGGGNKLTF

SEQ ID NO: 701176 - protein, 17 aa, Homo sapiens
  CDR3 for beta chain variable domain of TCR clone 350588 (TRBV5-1, TRBJ1-6)
CASSPSLQVSDNSPLHF

SEQ ID NO: 701177 - protein, 13 aa, Homo sapiens
  CDR3 for alpha chain variable domain of TCR clone 350589 (TRAV22, TRAJ49)
CAVGMYTGNKFYF

SEQ ID NO: 701178 - protein, 15 aa, Homo sapiens
  CDR3 for beta chain variable domain of TCR clone 350589 (TRBV6-3, TRBJ2-7)
CASSSPGTVFYEQYF

SEQ ID NO: 701179 - protein, 17 aa, Homo sapiens
  CDR3 for alpha chain variable domain of TCR clone 350590 (TRAV3, TRAJ38)
CAVRDCLNAGNNHKLIW

SEQ ID NO: 701180 - protein, 13 aa, Homo sapiens
  CDR3 for beta chain variable domain of TCR clone 350590 (TRBV23-1, TRBJ1-4)
CASRGKFNEKLFF

SEQ ID NO: 701181 - protein, 17 aa, Homo sapiens
  CDR3 for alpha chain variable domain of TCR clone 350591 (TRAV3, TRAJ6)
CAARDGPRAGGCYIPTF

SEQ ID NO: 701182 - protein, 20 aa, Homo sapiens
  CDR3 for beta chain variable domain of TCR clone 350591 (TRBV28, TRBJ2-1)
CASTPIGRSPGLAGGNEQFF

SEQ ID NO: 701183 - protein, 12 aa, Homo sapiens
  CDR3 for alpha chain variable domain of TCR clone 350592 (TRAV3, TRAJ27)
CAMRDGAGKSTF

SEQ ID NO: 701184 - protein, 15 aa, Homo sapiens
  CDR3 for beta chain variable domain of TCR clone 350592 (TRBV13, TRBJ2-2)
CASGYRGRRTGELFF

SEQ ID NO: 701185 - protein, 14 aa, Homo sapiens
  CDR3 for alpha chain variable domain of TCR clone 350593 (TRAV12-2, TRAJ15)
CAPHTGQAGTALIF

SEQ ID NO: 701186 - protein, 14 aa, Homo sapiens
  CDR3 for beta chain variable domain of TCR clone 350593 (TRBV11-3, TRBJ2-2)
CASSPRRDTGELFF

SEQ ID NO: 701187 - protein, 15 aa, Homo sapiens
  CDR3 for alpha chain variable domain of TCR clone 350594 (TRAV26-1, TRAJ37)
CIVRVADGNTGKLIF

SEQ ID NO: 701188 - protein, 14 aa, Homo sapiens
  CDR3 for beta chain variable domain of TCR clone 350594 (TRBV10-3, TRBJ2-2)
CATFGQRNTGELFF

SEQ ID NO: 701189 - protein, 12 aa, Homo sapiens
  CDR3 for alpha chain variable domain of TCR clone 350595 (TRAV2, TRAJ24)
CAATDSWGKFQF

SEQ ID NO: 701190 - protein, 15 aa, Homo sapiens
  CDR3 for beta chain variable domain of TCR clone 350595 (TRBV27, TRBJ2-1)
CASSNGGGSSNEQFF

SEQ ID NO: 701191 - protein, 14 aa, Homo sapiens
  CDR3 for alpha chain variable domain of TCR clone 350596 (TRAV2, TRAJ9)
CAVEDRSGGFNTIF

SEQ ID NO: 701192 - protein, 12 aa, Homo sapiens
  CDR3 for beta chain variable domain of TCR clone 350596 (TRBV12-4, TRBJ2-4)
CASSSSGNIQYF

SEQ ID NO: 701193 - protein, 14 aa, Homo sapiens
  CDR3 for alpha chain variable domain of TCR clone 350597 (TRAV1-2, TRAJ8)
CAVREDTGFQKLVF

SEQ ID NO: 701194 - protein, 13 aa, Homo sapiens
  CDR3 for beta chain variable domain of TCR clone 350597 (TRBV12-4, TRBJ1-2)
CASSLRQGKGYAF

SEQ ID NO: 701195 - protein, 14 aa, Homo sapiens
  CDR3 for alpha chain variable domain of TCR clone 350598 (TRAV12-2, TRAJ40)
FAVKIPSGTYKYIF

SEQ ID NO: 701196 - protein, 20 aa, Homo sapiens
  CDR3 for beta chain variable domain of TCR clone 350598 (TRBV28, TRBJ2-1)
CASTPIGRSPGLAGGNEQFF

SEQ ID NO: 701197 - protein, 12 aa, Homo sapiens
  CDR3 for alpha chain variable domain of TCR clone 350599 (TRAV29/DV5, TRAJ49)
CAATDTGNQFYF

SEQ ID NO: 701198 - protein, 15 aa, Homo sapiens
  CDR3 for beta chain variable domain of TCR clone 350599 (TRBV7-3, TRBJ2-1)
CASSPTGGGEVEQFF

SEQ ID NO: 701199 - protein, 14 aa, Homo sapiens
  CDR3 for alpha chain variable domain of TCR clone 350600 (TRAV12-1, TRAJ26)
CVVKGSNYGKNFVF

SEQ ID NO: 701200 - protein, 17 aa, Homo sapiens
  CDR3 for beta chain variable domain of TCR clone 350600 (TRBV11-2, TRBJ2-6)
CASSQRDIFSGANVLTF

SEQ ID NO: 701201 - protein, 15 aa, Homo sapiens
  CDR3 for alpha chain variable domain of TCR clone 350601 (TRAV26-1, TRAJ3)
CIVRAGYSSASKIIF

SEQ ID NO: 701202 - protein, 14 aa, Homo sapiens
  CDR3 for beta chain variable domain of TCR clone 350601 (TRBV13, TRBJ2-5)
CASYRRLAEETQYF

SEQ ID NO: 701203 - protein, 12 aa, Homo sapiens
  CDR3 for alpha chain variable domain of TCR clone 350602 (TRAV21, TRAJ15)
CAVNQAGTALIF

SEQ ID NO: 701204 - protein, 13 aa, Homo sapiens
  CDR3 for beta chain variable domain of TCR clone 350602 (TRBV11-2, TRBJ2-5)
CASSSTGEETPYF

SEQ ID NO: 701205 - protein, 16 aa, Homo sapiens
  CDR3 for alpha chain variable domain of TCR clone 350603 (TRAV12-3, TRAJ53)
CAMSPGSGGSNYKLPF

SEQ ID NO: 701206 - protein, 11 aa, Homo sapiens
  CDR3 for beta chain variable domain of TCR clone 350603 (TRBV29-1, TRBJ2-5)
CSEDRTGTQCF

SEQ ID NO: 701207 - protein, 13 aa, Homo sapiens
  CDR3 for alpha chain variable domain of TCR clone 350604 (TRAV13-1, TRAJ5)
CAASDTGRRALTY

SEQ ID NO: 701208 - protein, 12 aa, Homo sapiens
  CDR3 for beta chain variable domain of TCR clone 350604 (TRBV28, TRBJ2-3)
CASSLYRDTQYF

SEQ ID NO: 701209 - protein, 12 aa, Homo sapiens
  CDR3 for alpha chain variable domain of TCR clone 350605 (TRAV12-1, TRAJ40)
CVVYSGTYKYIF

SEQ ID NO: 701210 - protein, 17 aa, Homo sapiens
  CDR3 for beta chain variable domain of TCR clone 350605 (TRBV28, TRBJ2-5)
CASSRQGGLAGAETQYF

SEQ ID NO: 701211 - protein, 16 aa, Homo sapiens
  CDR3 for alpha chain variable domain of TCR clone 350606 (TRAV30, TRAJ24)
CGTEIVDADSWGKFQF

SEQ ID NO: 701212 - protein, 15 aa, Homo sapiens
  CDR3 for beta chain variable domain of TCR clone 350606 (TRBV5-1, TRBJ1-1)
CASSSTTGTNTEAFV

SEQ ID NO: 701213 - protein, 17 aa, Homo sapiens
  CDR3 for alpha chain variable domain of TCR clone 350607 (TRAV3, TRAJ6)
CAVRDGPRAGGSSIPTF

SEQ ID NO: 701214 - protein, 16 aa, Homo sapiens
  CDR3 for beta chain variable domain of TCR clone 350607 (TRBV6-1, TRBJ1-2)
CASSGAWQGRSHGYTF

SEQ ID NO: 701215 - protein, 13 aa, Homo sapiens
  CDR3 for alpha chain variable domain of TCR clone 350608 (TRAV1-2, TRAJ12)
CAVSMDSSYKLIF

SEQ ID NO: 701216 - protein, 17 aa, Homo sapiens
  CDR3 for beta chain variable domain of TCR clone 350608 (TRBV20-1, TRBJ2-1)
CSAPPRLAGTRYNEQFF

SEQ ID NO: 701217 - protein, 12 aa, Homo sapiens
  CDR3 for alpha chain variable domain of TCR clone 350609 (TRAV8-3, TRAJ20)
CAVDFNDSSSAL

SEQ ID NO: 701218 - protein, 17 aa, Homo sapiens
  CDR3 for beta chain variable domain of TCR clone 350609 (TRBV7-8, TRBJ2-6)
CASSAGTGGAGANVLTF

SEQ ID NO: 701219 - protein, 12 aa, Homo sapiens
  CDR3 for alpha chain variable domain of TCR clone 350610 (TRAV16, TRAJ10)
CSRTGGGNNLTS

SEQ ID NO: 701220 - protein, 15 aa, Homo sapiens
  CDR3 for beta chain variable domain of TCR clone 350610 (TRBV6-3, TRBJ2-7)
CASSSPGTVFYEQYF

SEQ ID NO: 701221 - protein, 17 aa, Homo sapiens
  CDR3 for alpha chain variable domain of TCR clone 350611 (TRAV3, TRAJ6)
CAVRDGRRAGGSYIPTF

SEQ ID NO: 701222 - protein, 14 aa, Homo sapiens
  CDR3 for beta chain variable domain of TCR clone 350611 (TRBV6-1, TRBJ1-3)
CASVQGGGGNTIYF

SEQ ID NO: 701223 - protein, 15 aa, Homo sapiens
  CDR3 for alpha chain variable domain of TCR clone 350612 (TRAV12-2, TRAJ50)
CAMNGLETSYDKVIF

SEQ ID NO: 701224 - protein, 16 aa, Homo sapiens
  CDR3 for beta chain variable domain of TCR clone 350612 (TRBV6-5, TRBJ2-7)
CASSSDPTSGFYEQYF

SEQ ID NO: 701225 - protein, 14 aa, Homo sapiens
  CDR3 for alpha chain variable domain of TCR clone 350613 (TRAV17, TRAJ57)
CATDPQGGSEKLVL

SEQ ID NO: 701226 - protein, 14 aa, Homo sapiens
  CDR3 for beta chain variable domain of TCR clone 350613 (TRBV25-1, TRBJ1-1)
CASTHLGGNTEAFF

SEQ ID NO: 701227 - protein, 14 aa, Homo sapiens
  CDR3 for alpha chain variable domain of TCR clone 350614 (TRAV1-2, TRAJ8)
CAVREDTGFQKLVF

SEQ ID NO: 701228 - protein, 16 aa, Homo sapiens
  CDR3 for beta chain variable domain of TCR clone 350614 (TRBV19, TRBJ1-1)
CASSPTRFWPGTEAFI

SEQ ID NO: 701229 - protein, 11 aa, Homo sapiens
  CDR3 for alpha chain variable domain of TCR clone 350615 (TRAV3, TRAJ9)
CAETKYWRLQN

SEQ ID NO: 701230 - protein, 15 aa, Homo sapiens
  CDR3 for beta chain variable domain of TCR clone 350615 (TRBV7-2, TRBJ2-1)
CASSLASGRVNEQFF

SEQ ID NO: 701231 - protein, 15 aa, Homo sapiens
  CDR3 for alpha chain variable domain of TCR clone 350616 (TRAV13-2, TRAJ10)
CAENRDTGGENKLTF

SEQ ID NO: 701232 - protein, 16 aa, Homo sapiens
  CDR3 for beta chain variable domain of TCR clone 350616 (TRBV2, TRBJ1-3)
CASSRTGGSTGNTIYF

SEQ ID NO: 701233 - protein, 14 aa, Homo sapiens
  CDR3 for alpha chain variable domain of TCR clone 350617 (TRAV27, TRAJ22)
CAGLPSGSARQLTF

SEQ ID NO: 701234 - protein, 16 aa, Homo sapiens
  CDR3 for beta chain variable domain of TCR clone 350617 (TRBV7-3, TRBJ2-2)
CASSLKRGTLSGELLF

SEQ ID NO: 701235 - protein, 14 aa, Homo sapiens
  CDR3 for alpha chain variable domain of TCR clone 350618 (TRAV12-2, TRAJ44)
CAVNPAGTASKLTF

SEQ ID NO: 701236 - protein, 15 aa, Homo sapiens
  CDR3 for beta chain variable domain of TCR clone 350618 (TRBV28, TRBJ2-1)
CASSIIAGGRSEQFF

SEQ ID NO: 701237 - protein, 13 aa, Homo sapiens
  CDR3 for alpha chain variable domain of TCR clone 350619 (TRAV8-4, TRAJ30)
CAVSVSRDDKIIF

SEQ ID NO: 701238 - protein, 15 aa, Homo sapiens
  CDR3 for beta chain variable domain of TCR clone 350619 (TRBV9, TRBJ1-6)
CASSVAGTGDSPLHF

SEQ ID NO: 701239 - protein, 11 aa, Homo sapiens
  CDR3 for alpha chain variable domain of TCR clone 350620 (TRAV17, TRAJ9)
CATTGGFKTIF

SEQ ID NO: 701240 - protein, 14 aa, Homo sapiens
  CDR3 for beta chain variable domain of TCR clone 350620 (TRBV7-9, TRBJ1-1)
CASSLVPVWTEAFF

SEQ ID NO: 701241 - protein, 15 aa, Homo sapiens
  CDR3 for alpha chain variable domain of TCR clone 350621 (TRAV8-3, TRAJ45)
CASSYSGGGADGLTF

SEQ ID NO: 701242 - protein, 15 aa, Homo sapiens
  CDR3 for beta chain variable domain of TCR clone 350621 (TRBV7-2, TRBJ2-1)
CASSSGLAGGNEQFF

SEQ ID NO: 701243 - protein, 13 aa, Homo sapiens
  CDR3 for alpha chain variable domain of TCR clone 350622 (TRAV6, TRAJ33)
CSLPMDSNYQLIW

SEQ ID NO: 701244 - protein, 15 aa, Homo sapiens
  CDR3 for beta chain variable domain of TCR clone 350622 (TRBV11-2, TRBJ2-2)
CASRGLAANTGELFF

SEQ ID NO: 701245 - protein, 16 aa, Homo sapiens
  CDR3 for alpha chain variable domain of TCR clone 350623 (TRAV3, TRAJ37)
CAVGVRGSGNTGNLIF

SEQ ID NO: 701246 - protein, 16 aa, Homo sapiens
  CDR3 for beta chain variable domain of TCR clone 350623 (TRBV11-2, TRBJ2-7)
CASSPTTGGVSYEQYF

SEQ ID NO: 701247 - protein, 13 aa, Homo sapiens
  CDR3 for alpha chain variable domain of TCR clone 350624 (TRAV17, TRAJ5)
CAPMDTGRRGLTF

SEQ ID NO: 701248 - protein, 16 aa, Homo sapiens
  CDR3 for beta chain variable domain of TCR clone 350624 (TRBV27, TRBJ2-7)
CASSSERRDSAYEQYF

SEQ ID NO: 701249 - protein, 12 aa, Homo sapiens
  CDR3 for alpha chain variable domain of TCR clone 350625 (TRAV12-3, TRAJ17)
CATTLTGNELTF

SEQ ID NO: 701250 - protein, 15 aa, Homo sapiens
  CDR3 for beta chain variable domain of TCR clone 350625 (TRBV20-1, TRBJ2-7)
CSARDRVSGMDEQYF

SEQ ID NO: 701251 - protein, 17 aa, Homo sapiens
  CDR3 for alpha chain variable domain of TCR clone 350626 (TRAV23/DV6, TRAJ57)
CAASSTLSQGGSEKLVF

SEQ ID NO: 701252 - protein, 14 aa, Homo sapiens
  CDR3 for beta chain variable domain of TCR clone 350626 (TRBV25-1, TRBJ1-1)
CASTHLGGNTQAFF

SEQ ID NO: 701253 - protein, 16 aa, Homo sapiens
  CDR3 for alpha chain variable domain of TCR clone 350627 (TRAV12-3, TRAJ53)
CAMSPGSGGSNFKLTF

SEQ ID NO: 701254 - protein, 15 aa, Homo sapiens
  CDR3 for beta chain variable domain of TCR clone 350627 (TRBV27, TRBJ2-1)
CASSNGGGSSNEQFF

SEQ ID NO: 701255 - protein, 14 aa, Homo sapiens
  CDR3 for alpha chain variable domain of TCR clone 350628 (TRAV12-2, TRAJ13)
CAVKKTGGYTKVTF

SEQ ID NO: 701256 - protein, 15 aa, Homo sapiens
  CDR3 for beta chain variable domain of TCR clone 350628 (TRBV27, TRBJ2-1)
CASSDGGGSSNEQFF

SEQ ID NO: 701257 - protein, 14 aa, Homo sapiens
  CDR3 for alpha chain variable domain of TCR clone 350629 (TRAV20, TRAJ10)
CAVRVEGGGNKLTF

SEQ ID NO: 701258 - protein, 13 aa, Homo sapiens
  CDR3 for beta chain variable domain of TCR clone 350629 (TRBV13, TRBJ2-2)
CASSPGLTGELFL

SEQ ID NO: 701259 - protein, 12 aa, Homo sapiens
  CDR3 for alpha chain variable domain of TCR clone 350630 (TRAV1-1, TRAJ9)
CAVDIGGFKTIF

SEQ ID NO: 701260 - protein, 15 aa, Homo sapiens
  CDR3 for beta chain variable domain of TCR clone 350630 (TRBV6-3, TRBJ2-7)
CASSSPGTVFYEQYF

SEQ ID NO: 701261 - protein, 13 aa, Homo sapiens
  CDR3 for alpha chain variable domain of TCR clone 350631 (TRAV29/DV5, TRAJ31)
CAASRNNNARLMF

SEQ ID NO: 701262 - protein, 12 aa, Homo sapiens
  CDR3 for beta chain variable domain of TCR clone 350631 (TRBV14, TRBJ1-1)
CASSQLKGLTFF

SEQ ID NO: 701263 - protein, 12 aa, Homo sapiens
  CDR3 for alpha chain variable domain of TCR clone 350632 (TRAV20, TRAJ39)
CAVGNAGNMLTF

SEQ ID NO: 701264 - protein, 14 aa, Homo sapiens
  CDR3 for beta chain variable domain of TCR clone 350632 (TRBV7-6, TRBJ2-3)
CASSLGTATDTQYF

SEQ ID NO: 701265 - protein, 13 aa, Homo sapiens
  CDR3 for alpha chain variable domain of TCR clone 350633 (TRAV2, TRAJ40)
CAVVTSGTYKYIF

SEQ ID NO: 701266 - protein, 16 aa, Homo sapiens
  CDR3 for beta chain variable domain of TCR clone 350633 (TRBV7-9, TRBJ1-3)
CASSLGAGRSGNTIYF

SEQ ID NO: 701267 - protein, 13 aa, Homo sapiens
  CDR3 for alpha chain variable domain of TCR clone 350634 (TRAV20, TRAJ29)
CAVQAVGNTPPVF

SEQ ID NO: 701268 - protein, 15 aa, Homo sapiens
  CDR3 for beta chain variable domain of TCR clone 350634 (TRBV5-1, TRBJ2-3)
CASSVTSGSTDTQYF

SEQ ID NO: 701269 - protein, 13 aa, Homo sapiens
  CDR3 for alpha chain variable domain of TCR clone 350635 (TRAV20, TRAJ40)
CAVRTSGTYKYIF

SEQ ID NO: 701270 - protein, 15 aa, Homo sapiens
  CDR3 for beta chain variable domain of TCR clone 350635 (TRBV28, TRBJ2-1)
CASSGLAEVDNEQFF

SEQ ID NO: 701271 - protein, 10 aa, Homo sapiens
  CDR3 for alpha chain variable domain of TCR clone 350636 (TRAV8-4, TRAJ43)
CAVSAYDMRF

SEQ ID NO: 701272 - protein, 15 aa, Homo sapiens
  CDR3 for beta chain variable domain of TCR clone 350636 (TRBV5-1, TRBJ2-3)
CASSVTSGSTDTQYF

SEQ ID NO: 701273 - protein, 15 aa, Homo sapiens
  CDR3 for alpha chain variable domain of TCR clone 350637 (TRAV27, TRAJ38)
CAARRNAGNNRKLIW

SEQ ID NO: 701274 - protein, 15 aa, Homo sapiens
  CDR3 for beta chain variable domain of TCR clone 350637 (TRBV7-3, TRBJ2-7)
CASSPPVALNYEQYF

SEQ ID NO: 701275 - protein, 18 aa, Homo sapiens
  CDR3 for alpha chain variable domain of TCR clone 350638 (TRAV21, TRAJ52)
CAVSPSPAGGTSYGQLTF

SEQ ID NO: 701276 - protein, 12 aa, Homo sapiens
  CDR3 for beta chain variable domain of TCR clone 350638 (TRBV11-2, TRBJ2-2)
CASSLGGGELFF

SEQ ID NO: 701277 - protein, 12 aa, Homo sapiens
  CDR3 for alpha chain variable domain of TCR clone 350639 (TRAV17, TRAJ54)
CATDKGAQKLVF

SEQ ID NO: 701278 - protein, 15 aa, Homo sapiens
  CDR3 for beta chain variable domain of TCR clone 350639 (TRBV28, TRBJ1-5)
CASSPPGTGGQPQHF

SEQ ID NO: 701279 - protein, 13 aa, Homo sapiens
  CDR3 for alpha chain variable domain of TCR clone 350640 (TRAV12-2, TRAJ9)
CAVKWAGGFNTIF

SEQ ID NO: 701280 - protein, 15 aa, Homo sapiens
  CDR3 for beta chain variable domain of TCR clone 350640 (TRBV5-1, TRBJ1-4)
CASSLTADSDEKLFF

SEQ ID NO: 701281 - protein, 15 aa, Homo sapiens
  CDR3 for alpha chain variable domain of TCR clone 350641 (TRAV27, TRAJ38)
CAARRNAGNNRKLIL

SEQ ID NO: 701282 - protein, 13 aa, Homo sapiens
  CDR3 for beta chain variable domain of TCR clone 350641 (TRBV12-5, TRBJ2-3)
CASGDRQSDTQYV

SEQ ID NO: 701283 - protein, 14 aa, Homo sapiens
  CDR3 for alpha chain variable domain of TCR clone 350642 (TRAV38-2/DV8, TRAJ30)
CAYMDGLGGDKIIF

SEQ ID NO: 701284 - protein, 15 aa, Homo sapiens
  CDR3 for beta chain variable domain of TCR clone 350642 (TRBV7-9, TRBJ2-2)
CASRPADRGTGELFF

SEQ ID NO: 701285 - protein, 20 aa, Homo sapiens
  CDR3 for alpha chain variable domain of TCR clone 350643 (TRAV8-3, TRAJ4)
CAVGARPDFKRSWWLQQADF

SEQ ID NO: 701286 - protein, 13 aa, Homo sapiens
  CDR3 for beta chain variable domain of TCR clone 350643 (TRBV20-1, TRBJ1-2)
CSATGIQGSGYTF

SEQ ID NO: 701287 - protein, 14 aa, Homo sapiens
  CDR3 for alpha chain variable domain of TCR clone 350644 (TRAV26-1, TRAJ38)
CIADNAGNNRKLIW

SEQ ID NO: 701288 - protein, 18 aa, Homo sapiens
  CDR3 for beta chain variable domain of TCR clone 350644 (TRBV18, TRBJ2-3)
CASSYTSGAAGGTDTQYF

SEQ ID NO: 701289 - protein, 15 aa, Homo sapiens
  CDR3 for alpha chain variable domain of TCR clone 350645 (TRAV8-3, TRAJ45)
CASSYSGGGADGLTF

SEQ ID NO: 701290 - protein, 16 aa, Homo sapiens
  CDR3 for beta chain variable domain of TCR clone 350645 (TRBV7-9, TRBJ2-2)
CASSAFGGANTGELFF

SEQ ID NO: 701291 - protein, 14 aa, Homo sapiens
  CDR3 for alpha chain variable domain of TCR clone 350646 (TRAV12-2, TRAJ17)
CAVLFKAAGHKLTF

SEQ ID NO: 701292 - protein, 11 aa, Homo sapiens
  CDR3 for beta chain variable domain of TCR clone 350646 (TRBV29-1, TRBJ2-5)
CSEDRTGTQYF

SEQ ID NO: 701293 - protein, 15 aa, Homo sapiens
  CDR3 for alpha chain variable domain of TCR clone 350647 (TRAV26-1, TRAJ29)
CIVRVEGSGNTPHVF

SEQ ID NO: 701294 - protein, 15 aa, Homo sapiens
  CDR3 for beta chain variable domain of TCR clone 350647 (TRBV7-9, TRBJ1-5)
CASSQGHQPKQPQHF

SEQ ID NO: 701295 - protein, 16 aa, Homo sapiens
  CDR3 for alpha chain variable domain of TCR clone 350648 (TRAV3, TRAJ37)
CAGRGKGSGNTGKLIF

SEQ ID NO: 701296 - protein, 14 aa, Homo sapiens
  CDR3 for beta chain variable domain of TCR clone 350648 (TRBV7-2, TRBJ2-7)
CASSPKTSFYEQYF

SEQ ID NO: 701297 - protein, 16 aa, Homo sapiens
  CDR3 for alpha chain variable domain of TCR clone 350649 (TRAV30, TRAJ24)
CGTEIVDADSWGKFQF

SEQ ID NO: 701298 - protein, 13 aa, Homo sapiens
  CDR3 for beta chain variable domain of TCR clone 350649 (TRBV7-3, TRBJ1-1)
CASSQDLGAEAFF

SEQ ID NO: 701299 - protein, 14 aa, Homo sapiens
  CDR3 for alpha chain variable domain of TCR clone 350650 (TRAV12-1, TRAJ30)
CAMSLLNRDDKIIF

SEQ ID NO: 701300 - protein, 12 aa, Homo sapiens
  CDR3 for beta chain variable domain of TCR clone 350650 (TRBV11-2, TRBJ2-2)
CASSLGGGELFF

SEQ ID NO: 701301 - protein, 13 aa, Homo sapiens
  CDR3 for alpha chain variable domain of TCR clone 350651 (TRAV38-2/DV8, TRAJ45)
CAYVGGGADGITF

SEQ ID NO: 701302 - protein, 13 aa, Homo sapiens
  CDR3 for beta chain variable domain of TCR clone 350651 (TRBV29-1, TRBJ2-1)
CSVEGGRVNEQFF

SEQ ID NO: 701303 - protein, 14 aa, Homo sapiens
  CDR3 for alpha chain variable domain of TCR clone 350652 (TRAV2, TRAJ9)
CAVEDRSGGFKTIF

SEQ ID NO: 701304 - protein, 16 aa, Homo sapiens
  CDR3 for beta chain variable domain of TCR clone 350652 (TRBV7-3, TRBJ2-1)
CASSLEGYRSYDEQFF

SEQ ID NO: 701305 - protein, 13 aa, Homo sapiens
  CDR3 for alpha chain variable domain of TCR clone 350653 (TRAV8-6, TRAJ49)
CAVITNTGNQFYL

SEQ ID NO: 701306 - protein, 14 aa, Homo sapiens
  CDR3 for beta chain variable domain of TCR clone 350653 (TRBV12-5, TRBJ2-5)
CASGSRTHQETQYF

SEQ ID NO: 701307 - protein, 12 aa, Homo sapiens
  CDR3 for alpha chain variable domain of TCR clone 350654 (TRAV17, TRAJ20)
CATDGDDYKLSF

SEQ ID NO: 701308 - protein, 12 aa, Homo sapiens
  CDR3 for beta chain variable domain of TCR clone 350654 (TRBV6-5, TRBJ2-5)
QAGGSYQETQYF

SEQ ID NO: 701309 - protein, 12 aa, Homo sapiens
  CDR3 for alpha chain variable domain of TCR clone 350655 (TRAV8-4, TRAJ37)
CAKSSNTGKRIF

SEQ ID NO: 701310 - protein, 16 aa, Homo sapiens
  CDR3 for beta chain variable domain of TCR clone 350655 (TRBV18, TRBJ1-1)
CASSPGVGGRGGEAFF

SEQ ID NO: 701311 - protein, 15 aa, Homo sapiens
  CDR3 for alpha chain variable domain of TCR clone 350656 (TRAV27, TRAJ38)
CAARRNAGNKRKLIW

SEQ ID NO: 701312 - protein, 13 aa, Homo sapiens
  CDR3 for beta chain variable domain of TCR clone 350656 (TRBV20-1, TRBJ1-1)
CSARGGGNTEAFF

SEQ ID NO: 701313 - protein, 14 aa, Homo sapiens
  CDR3 for alpha chain variable domain of TCR clone 350657 (TRAV2, TRAJ9)
CAVEDRSGVFKTIF

SEQ ID NO: 701314 - protein, 17 aa, Homo sapiens
  CDR3 for beta chain variable domain of TCR clone 350657 (TRBV4-1, TRBJ2-7)
CASSRDPLGVRGGEQYF

SEQ ID NO: 701315 - protein, 13 aa, Homo sapiens
  CDR3 for alpha chain variable domain of TCR clone 350658 (TRAV36/DV7, TRAJ37)
FAVFSSNTGKLIF

SEQ ID NO: 701316 - protein, 12 aa, Homo sapiens
  CDR3 for beta chain variable domain of TCR clone 350658 (TRBV11-2, TRBJ2-2)
CASSLGGGELFF

SEQ ID NO: 701317 - protein, 12 aa, Homo sapiens
  CDR3 for alpha chain variable domain of TCR clone 350659 (TRAV1-1, TRAJ23)
CAVTNQGGKLIF

SEQ ID NO: 701318 - protein, 15 aa, Homo sapiens
  CDR3 for beta chain variable domain of TCR clone 350659 (TRBV12-4, TRBJ1-1)
CASSLAVSRGAEAFF

SEQ ID NO: 701319 - protein, 14 aa, Homo sapiens
  CDR3 for alpha chain variable domain of TCR clone 350660 (TRAV17, TRAJ22)
CATSPSGSARQLTF

SEQ ID NO: 701320 - protein, 15 aa, Homo sapiens
  CDR3 for beta chain variable domain of TCR clone 350660 (TRBV6-6, TRBJ2-7)
CASSYSYGGSYEQYF

SEQ ID NO: 701321 - protein, 15 aa, Homo sapiens
  CDR3 for alpha chain variable domain of TCR clone 350661 (TRAV17, TRAJ57)
CATCPSQGGSEKLVF

SEQ ID NO: 701322 - protein, 13 aa, Homo sapiens
  CDR3 for beta chain variable domain of TCR clone 350661 (TRBV6-5, TRBJ2-5)
CASSPQGGETQYF

SEQ ID NO: 701323 - protein, 16 aa, Homo sapiens
  CDR3 for alpha chain variable domain of TCR clone 350662 (TRAV13-1, TRAJ18)
CAASRMRGSTLGRLYF

SEQ ID NO: 701324 - protein, 16 aa, Homo sapiens
  CDR3 for beta chain variable domain of TCR clone 350662 (TRBV27, TRBJ1-1)
CASSSRGRTRYTEAFF

SEQ ID NO: 701325 - protein, 16 aa, Homo sapiens
  CDR3 for alpha chain variable domain of TCR clone 350663 (TRAV3, TRAJ21)
CAVRDIERGNFNKFYF

SEQ ID NO: 701326 - protein, 15 aa, Homo sapiens
  CDR3 for beta chain variable domain of TCR clone 350663 (TRBV18, TRBJ2-1)
CASSPPSASYNEQFF

SEQ ID NO: 701327 - protein, 12 aa, Homo sapiens
  CDR3 for alpha chain variable domain of TCR clone 350664 (TRAV12-3, TRAJ17)
CAMTLTGTKLTF

SEQ ID NO: 701328 - protein, 15 aa, Homo sapiens
  CDR3 for beta chain variable domain of TCR clone 350664 (TRBV7-2, TRBJ2-1)
CASSLASGRVNEQFF

SEQ ID NO: 701329 - protein, 22 aa, Homo sapiens
  CDR3 for alpha chain variable domain of TCR clone 350665 (TRAV2, TRAJ38)
CAVEDFPNAGNNHIQNPDPAVY

SEQ ID NO: 701330 - protein, 14 aa, Homo sapiens
  CDR3 for beta chain variable domain of TCR clone 350665 (TRBV29-1, TRBJ1-4)
CSISGRQGGEKLFF

SEQ ID NO: 701331 - protein, 18 aa, Homo sapiens
  CDR3 for alpha chain variable domain of TCR clone 350666 (TRAV8-6, TRAJ52)
CAVSRANAGGTSYGKLTF

SEQ ID NO: 701332 - protein, 17 aa, Homo sapiens
  CDR3 for beta chain variable domain of TCR clone 350666 (TRBV6-1, TRBJ1-2)
CASSGTHSQRGNYGYTL

SEQ ID NO: 701333 - protein, 14 aa, Homo sapiens
  CDR3 for alpha chain variable domain of TCR clone 350667 (TRAV13-2, TRAJ17)
CAENSEAAGNKLTF

SEQ ID NO: 701334 - protein, 11 aa, Homo sapiens
  CDR3 for beta chain variable domain of TCR clone 350667 (TRBV6-3, TRBJ2-3)
CATGQADTQYF

SEQ ID NO: 701335 - protein, 12 aa, Homo sapiens
  CDR3 for alpha chain variable domain of TCR clone 350668 (TRAV12-2, TRAJ52)
CRHGTSYGKLTF

SEQ ID NO: 701336 - protein, 15 aa, Homo sapiens
  CDR3 for beta chain variable domain of TCR clone 350668 (TRBV10-3, TRBJ2-7)
CAISTFSGVKGEQYF

SEQ ID NO: 701337 - protein, 14 aa, Homo sapiens
  CDR3 for alpha chain variable domain of TCR clone 350669 (TRAV12-1, TRAJ12)
CVVSGRDSSYKLIF

SEQ ID NO: 701338 - protein, 13 aa, Homo sapiens
  CDR3 for beta chain variable domain of TCR clone 350669 (TRBV28, TRBJ2-2)
CASIRESTGELFF

SEQ ID NO: 701339 - protein, 18 aa, Homo sapiens
  CDR3 for alpha chain variable domain of TCR clone 350670 (TRAV21, TRAJ52)
CAVRPSPAGGTSYGKLTF

SEQ ID NO: 701340 - protein, 17 aa, Homo sapiens
  CDR3 for beta chain variable domain of TCR clone 350670 (TRBV25-1, TRBJ2-1)
CASSAYGQGRGVYEHFF

SEQ ID NO: 701341 - protein, 14 aa, Homo sapiens
  CDR3 for alpha chain variable domain of TCR clone 350671 (TRAV21, TRAJ45)
CAVSSGGGADGLTF

SEQ ID NO: 701342 - protein, 14 aa, Homo sapiens
  CDR3 for beta chain variable domain of TCR clone 350671 (TRBV7-9, TRBJ2-7)
CASSIGQGAGEQYF

SEQ ID NO: 701343 - protein, 14 aa, Homo sapiens
  CDR3 for alpha chain variable domain of TCR clone 350672 (TRAV1-2, TRAJ16)
CAVNRFSVGQKLLF

SEQ ID NO: 701344 - protein, 16 aa, Homo sapiens
  CDR3 for beta chain variable domain of TCR clone 350672 (TRBV19, TRBJ2-1)
CASSKAGPSSYNEQFF

SEQ ID NO: 701345 - protein, 12 aa, Homo sapiens
  CDR3 for alpha chain variable domain of TCR clone 350673 (TRAV21, TRAJ49)
CAVTNTGNQFYF

SEQ ID NO: 701346 - protein, 17 aa, Homo sapiens
  CDR3 for beta chain variable domain of TCR clone 350673 (TRBV13, TRBJ2-3)
CASSLSRVAGGRNTHYF

SEQ ID NO: 701347 - protein, 15 aa, Homo sapiens
  CDR3 for alpha chain variable domain of TCR clone 350674 (TRAV3, TRAJ4)
CAVRDGTGGYNKLIF

SEQ ID NO: 701348 - protein, 14 aa, Homo sapiens
  CDR3 for beta chain variable domain of TCR clone 350674 (TRBV2, TRBJ2-7)
CASSRDRSSYEQYF

SEQ ID NO: 701349 - protein, 12 aa, Homo sapiens
  CDR3 for alpha chain variable domain of TCR clone 350675 (TRAV13-2, TRAJ8)
CAPWLGFQKLLF

SEQ ID NO: 701350 - protein, 14 aa, Homo sapiens
  CDR3 for beta chain variable domain of TCR clone 350675 (TRBV18, TRBJ2-7)
CASSPRGGAYEQYF

SEQ ID NO: 701351 - protein, 13 aa, Homo sapiens
  CDR3 for alpha chain variable domain of TCR clone 350676 (TRAV17, TRAJ9)
CATDYTGSFKTIF

SEQ ID NO: 701352 - protein, 13 aa, Homo sapiens
  CDR3 for beta chain variable domain of TCR clone 350676 (TRBV10-3, TRBJ2-7)
CAISEKGGYEQYF

SEQ ID NO: 701353 - protein, 15 aa, Homo sapiens
  CDR3 for alpha chain variable domain of TCR clone 350677 (TRAV12-1, TRAJ31)
CVVNPARDNNARLMF

SEQ ID NO: 701354 - protein, 13 aa, Homo sapiens
  CDR3 for beta chain variable domain of TCR clone 350677 (TRBV2, TRBJ1-5)
CASSQGGSQPQHF

SEQ ID NO: 701355 - protein, 17 aa, Homo sapiens
  CDR3 for alpha chain variable domain of TCR clone 350678 (TRAV3, TRAJ6)
CAVRDGPRAGGSYIPTF

SEQ ID NO: 701356 - protein, 14 aa, Homo sapiens
  CDR3 for beta chain variable domain of TCR clone 350678 (TRBV13, TRBJ2-1)
CASYRRLAEETQYF

SEQ ID NO: 701357 - protein, 12 aa, Homo sapiens
  CDR3 for alpha chain variable domain of TCR clone 350679 (TRAV13-2, TRAJ23)
CAERHRGGKLNF

SEQ ID NO: 701358 - protein, 12 aa, Homo sapiens
  CDR3 for beta chain variable domain of TCR clone 350679 (TRBV12-4, TRBJ1-2)
CASSFIWLHLRF

SEQ ID NO: 701359 - protein, 11 aa, Homo sapiens
  CDR3 for alpha chain variable domain of TCR clone 350680 (TRAV2, TRAJ33)
CAVDSNYRLIW

SEQ ID NO: 701360 - protein, 12 aa, Homo sapiens
  CDR3 for beta chain variable domain of TCR clone 350680 (TRBV11-2, TRBJ2-2)
CASSLGGGELFF

SEQ ID NO: 701361 - protein, 12 aa, Homo sapiens
  CDR3 for alpha chain variable domain of TCR clone 350681 (TRAV30, TRAJ43)
CGTEERGNDMRF

SEQ ID NO: 701362 - protein, 16 aa, Homo sapiens
  CDR3 for beta chain variable domain of TCR clone 350681 (TRBV19, TRBJ2-1)
CASSRAGPSSYNEQFF

SEQ ID NO: 701363 - protein, 14 aa, Homo sapiens
  CDR3 for alpha chain variable domain of TCR clone 350682 (TRAV26-1, TRAJ39)
CIVRGSRAGNMLTF

SEQ ID NO: 701364 - protein, 12 aa, Homo sapiens
  CDR3 for beta chain variable domain of TCR clone 350682 (TRBV5-7, TRBJ1-2)
CASSLVQNGYTF

SEQ ID NO: 701365 - protein, 14 aa, Homo sapiens
  CDR3 for alpha chain variable domain of TCR clone 350683 (TRAV39, TRAJ33)
CAVDIKNSNYQLTW

SEQ ID NO: 701366 - protein, 13 aa, Homo sapiens
  CDR3 for beta chain variable domain of TCR clone 350683 (TRBV4-2, TRBJ2-1)
CASSPGTYNAQFF

SEQ ID NO: 701367 - protein, 14 aa, Homo sapiens
  CDR3 for alpha chain variable domain of TCR clone 350684 (TRAV14/DV4, TRAJ54)
CAMREAPGAQKLVF

SEQ ID NO: 701368 - protein, 15 aa, Homo sapiens
  CDR3 for beta chain variable domain of TCR clone 350684 (TRBV5-1, TRBJ2-7)
CASSLNGGPARVQYF

SEQ ID NO: 701369 - protein, 17 aa, Homo sapiens
  CDR3 for alpha chain variable domain of TCR clone 350685 (TRAV3, TRAJ6)
CAVRAGPRAGGSYIPTL

SEQ ID NO: 701370 - protein, 15 aa, Homo sapiens
  CDR3 for beta chain variable domain of TCR clone 350685 (TRBV11-3, TRBJ2-7)
CASSPGPASSYEQYF

SEQ ID NO: 701371 - protein, 15 aa, Homo sapiens
  CDR3 for alpha chain variable domain of TCR clone 350686 (TRAV26-1, TRAJ44)
CIVRANTGTASKLTF

SEQ ID NO: 701372 - protein, 15 aa, Homo sapiens
  CDR3 for beta chain variable domain of TCR clone 350686 (TRBV7-6, TRBJ1-5)
CASSQSSGINQAQHF

SEQ ID NO: 701373 - protein, 14 aa, Homo sapiens
  CDR3 for alpha chain variable domain of TCR clone 350687 (TRAV13-2, TRAJ26)
CAENLGNYGQNFVF

SEQ ID NO: 701374 - protein, 14 aa, Homo sapiens
  CDR3 for beta chain variable domain of TCR clone 350687 (TRBV19, TRBJ1-3)
CASNRGNSGNTIYF

SEQ ID NO: 701375 - protein, 14 aa, Homo sapiens
  CDR3 for alpha chain variable domain of TCR clone 350688 (TRAV3, TRAJ37)
CAVKESGNTGKLIF

SEQ ID NO: 701376 - protein, 14 aa, Homo sapiens
  CDR3 for beta chain variable domain of TCR clone 350688 (TRBV20-1, TRBJ2-5)
CSAHRQGLWETQYF

SEQ ID NO: 701377 - protein, 14 aa, Homo sapiens
  CDR3 for alpha chain variable domain of TCR clone 350689 (TRAV3, TRAJ21)
CVVRDAHDFNKFYF

SEQ ID NO: 701378 - protein, 15 aa, Homo sapiens
  CDR3 for beta chain variable domain of TCR clone 350689 (TRBV6-5, TRBJ1-5)
CASSYSWDSNQPQHF

SEQ ID NO: 701379 - protein, 14 aa, Homo sapiens
  CDR3 for alpha chain variable domain of TCR clone 350690 (TRAV1-2, TRAJ16)
CAVNRFSDGKKLLF

SEQ ID NO: 701380 - protein, 15 aa, Homo sapiens
  CDR3 for beta chain variable domain of TCR clone 350690 (TRBV20-1, TRBJ1-5)
CSAFKNAQRNQPQHF

SEQ ID NO: 701381 - protein, 17 aa, Homo sapiens
  CDR3 for alpha chain variable domain of TCR clone 350691 (TRAV13-1, TRAJ53)
CAASWKSSGGSNYKLTF

SEQ ID NO: 701382 - protein, 19 aa, Homo sapiens
  CDR3 for beta chain variable domain of TCR clone 350691 (TRBV7-9, TRBJ2-1)
CASSHSRGALLRTYNEQFF

SEQ ID NO: 701383 - protein, 17 aa, Homo sapiens
  CDR3 for alpha chain variable domain of TCR clone 350692 (TRAV3, TRAJ42)
CAARDRDYGGSQGNLIF

SEQ ID NO: 701384 - protein, 15 aa, Homo sapiens
  CDR3 for beta chain variable domain of TCR clone 350692 (TRBV27, TRBJ1-6)
CASSFDRGLGSPLHF

SEQ ID NO: 701385 - protein, 12 aa, Homo sapiens
  CDR3 for alpha chain variable domain of TCR clone 350693 (TRAV20, TRAJ24)
CAVYNSWGKLQF

SEQ ID NO: 701386 - protein, 15 aa, Homo sapiens
  CDR3 for beta chain variable domain of TCR clone 350693 (TRBV20-1, TRBJ2-5)
CSARVPPSGRETQYV

SEQ ID NO: 701387 - protein, 13 aa, Homo sapiens
  CDR3 for alpha chain variable domain of TCR clone 350694 (TRAV36/DV7, TRAJ37)
CAVFSSNTGELLF

SEQ ID NO: 701388 - protein, 16 aa, Homo sapiens
  CDR3 for beta chain variable domain of TCR clone 350694 (TRBV3-1, TRBJ2-5)
CASSPGQFNGFGTQYF

SEQ ID NO: 701389 - protein, 14 aa, Homo sapiens
  CDR3 for alpha chain variable domain of TCR clone 350695 (TRAV3, TRAJ9)
CAVRLNTGGLKTIF

SEQ ID NO: 701390 - protein, 15 aa, Homo sapiens
  CDR3 for beta chain variable domain of TCR clone 350695 (TRBV11-3, TRBJ2-3)
CASLKDGREGDTQYF

SEQ ID NO: 701391 - protein, 13 aa, Homo sapiens
  CDR3 for alpha chain variable domain of TCR clone 350696 (TRAV21, TRAJ20)
CAVGLRVDYKLSF

SEQ ID NO: 701392 - protein, 15 aa, Homo sapiens
  CDR3 for beta chain variable domain of TCR clone 350696 (TRBV28, TRBJ2-1)
CASSIIAGGRSEQFF

SEQ ID NO: 701393 - protein, 13 aa, Homo sapiens
  CDR3 for alpha chain variable domain of TCR clone 350697 (TRAV12-2, TRAJ18)
CAVRGSTLGRLYF

SEQ ID NO: 701394 - protein, 10 aa, Homo sapiens
  CDR3 for beta chain variable domain of TCR clone 350697 (TRBV15, TRBJ2-7)
AETVGYEQYF

SEQ ID NO: 701395 - protein, 14 aa, Homo sapiens
  CDR3 for alpha chain variable domain of TCR clone 350698 (TRAV12-2, TRAJ24)
CAVTPADSWGKLQF

SEQ ID NO: 701396 - protein, 15 aa, Homo sapiens
  CDR3 for beta chain variable domain of TCR clone 350698 (TRBV27, TRBJ2-7)
CASTLLGSGATEQYF

SEQ ID NO: 701397 - protein, 13 aa, Homo sapiens
  CDR3 for alpha chain variable domain of TCR clone 350699 (TRAV12-1, TRAJ29)
CVVNGPGNTPLVF

SEQ ID NO: 701398 - protein, 13 aa, Homo sapiens
  CDR3 for beta chain variable domain of TCR clone 350699 (TRBV7-2, TRBJ2-5)
RASSRGGLETQYF

SEQ ID NO: 701399 - protein, 15 aa, Homo sapiens
  CDR3 for alpha chain variable domain of TCR clone 350700 (TRAV13-1, TRAJ36)
CAASIRQTGANNLFF

SEQ ID NO: 701400 - protein, 13 aa, Homo sapiens
  CDR3 for beta chain variable domain of TCR clone 350700 (TRBV7-7, TRBJ2-3)
CASSLSRADTQYF

SEQ ID NO: 701401 - protein, 13 aa, Homo sapiens
  CDR3 for alpha chain variable domain of TCR clone 350701 (TRAV12-1, TRAJ9)
CVVLITGGFKTIF

SEQ ID NO: 701402 - protein, 13 aa, Homo sapiens
  CDR3 for beta chain variable domain of TCR clone 350701 (TRBV19, TRBJ1-2)
CASSVPGQDGYTF

SEQ ID NO: 701403 - protein, 12 aa, Homo sapiens
  CDR3 for alpha chain variable domain of TCR clone 350702 (TRAV17, TRAJ12)
CATLRSSYKLIF

SEQ ID NO: 701404 - protein, 15 aa, Homo sapiens
  CDR3 for beta chain variable domain of TCR clone 350702 (TRBV11-3, TRBJ2-7)
CASSPGPASSYEQYF

SEQ ID NO: 701405 - protein, 13 aa, Homo sapiens
  CDR3 for alpha chain variable domain of TCR clone 350703 (TRAV36/DV7, TRAJ7)
CAGTRYGNNRLAF

SEQ ID NO: 701406 - protein, 14 aa, Homo sapiens
  CDR3 for beta chain variable domain of TCR clone 350703 (TRBV19, TRBJ2-1)
CASPTFVLSGEQSF

SEQ ID NO: 701407 - protein, 15 aa, Homo sapiens
  CDR3 for alpha chain variable domain of TCR clone 350704 (TRAV10, TRAJ39)
CVVSARNNAGNMLTF

SEQ ID NO: 701408 - protein, 15 aa, Homo sapiens
  CDR3 for beta chain variable domain of TCR clone 350704 (TRBV27, TRBJ2-1)
CASSNGGGSSNEQFF

SEQ ID NO: 701409 - protein, 14 aa, Homo sapiens
  CDR3 for alpha chain variable domain of TCR clone 350705 (TRAV17, TRAJ57)
CATDPQGGSERLVF

SEQ ID NO: 701410 - protein, 11 aa, Homo sapiens
  CDR3 for beta chain variable domain of TCR clone 350705 (TRBV29-1, TRBJ2-5)
CSEDRTGTQYF

SEQ ID NO: 701411 - protein, 14 aa, Homo sapiens
  CDR3 for alpha chain variable domain of TCR clone 350706 (TRAV1-2, TRAJ8)
CAVREDTGFQKLVF

SEQ ID NO: 701412 - protein, 13 aa, Homo sapiens
  CDR3 for beta chain variable domain of TCR clone 350706 (TRBV12-4, TRBJ1-5)
CASSTDRAQPQHF

SEQ ID NO: 701413 - protein, 11 aa, Homo sapiens
  CDR3 for alpha chain variable domain of TCR clone 350707 (TRAV27, TRAJ47)
CRSNQGNKLVF

SEQ ID NO: 701414 - protein, 16 aa, Homo sapiens
  CDR3 for beta chain variable domain of TCR clone 350707 (TRBV7-9, TRBJ2-1)
CASSDVAGGCYNEQFF

SEQ ID NO: 701415 - protein, 13 aa, Homo sapiens
  CDR3 for alpha chain variable domain of TCR clone 350708 (TRAV27, TRAJ49)
CAPRPYTGNEFYF

SEQ ID NO: 701416 - protein, 16 aa, Homo sapiens
  CDR3 for beta chain variable domain of TCR clone 350708 (TRBV4-1, TRBJ1-2)
CASSQDAGQVLYGYTF

SEQ ID NO: 701417 - protein, 15 aa, Homo sapiens
  CDR3 for alpha chain variable domain of TCR clone 350709 (TRAV23/DV6, TRAJ18)
CAARYRGSTLGRLYF

SEQ ID NO: 701418 - protein, 13 aa, Homo sapiens
  CDR3 for beta chain variable domain of TCR clone 350709 (TRBV2, TRBJ1-1)
CASNLLRNTEAFF

SEQ ID NO: 701419 - protein, 14 aa, Homo sapiens
  CDR3 for alpha chain variable domain of TCR clone 350710 (TRAV1-2, TRAJ16)
CAVNRFSDGQKLLF

SEQ ID NO: 701420 - protein, 15 aa, Homo sapiens
  CDR3 for beta chain variable domain of TCR clone 350710 (TRBV7-2, TRBJ2-2)
CASSLTGSFTGELFF

SEQ ID NO: 701421 - protein, 14 aa, Homo sapiens
  CDR3 for alpha chain variable domain of TCR clone 350711 (TRAV17, TRAJ6)
CATNPAGGSYIPTF

SEQ ID NO: 701422 - protein, 13 aa, Homo sapiens
  CDR3 for beta chain variable domain of TCR clone 350711 (TRBV20-1, TRBJ1-1)
CSARGGGNTEAFF

SEQ ID NO: 701423 - protein, 12 aa, Homo sapiens
  CDR3 for alpha chain variable domain of TCR clone 350712 (TRAV1-2, TRAJ42)
CVAGGSQGNLIF

SEQ ID NO: 701424 - protein, 16 aa, Homo sapiens
  CDR3 for beta chain variable domain of TCR clone 350712 (TRBV4-2, TRBJ2-7)
CASSQEGLANSYEQYF

SEQ ID NO: 701425 - protein, 15 aa, Homo sapiens
  CDR3 for alpha chain variable domain of TCR clone 350713 (TRAV12-1, TRAJ9)
CVVSFGDTGGFKTIF

SEQ ID NO: 701426 - protein, 12 aa, Homo sapiens
  CDR3 for beta chain variable domain of TCR clone 350713 (TRBV11-3, TRBJ1-1)
CASSHRQGEAFS

SEQ ID NO: 701427 - protein, 15 aa, Homo sapiens
  CDR3 for alpha chain variable domain of TCR clone 350714 (TRAV8-2, TRAJ40)
CVVLGTTSGTYKYIF

SEQ ID NO: 701428 - protein, 16 aa, Homo sapiens
  CDR3 for beta chain variable domain of TCR clone 350714 (TRBV7-3, TRBJ2-1)
CASSLEGYSSYNEQFF

SEQ ID NO: 701429 - protein, 13 aa, Homo sapiens
  CDR3 for alpha chain variable domain of TCR clone 350715 (TRAV27, TRAJ57)
CRSAQGGSEKLVF

SEQ ID NO: 701430 - protein, 11 aa, Homo sapiens
  CDR3 for beta chain variable domain of TCR clone 350715 (TRBV11-2, TRBJ1-1)
CANSINTEAFF

SEQ ID NO: 701431 - protein, 12 aa, Homo sapiens
  CDR3 for alpha chain variable domain of TCR clone 350716 (TRAV17, TRAJ12)
CAGGDSSDKLIF

SEQ ID NO: 701432 - protein, 12 aa, Homo sapiens
  CDR3 for beta chain variable domain of TCR clone 350716 (TRBV29-1, TRBJ1-1)
CSESDGNTEAFF

SEQ ID NO: 701433 - protein, 14 aa, Homo sapiens
  CDR3 for alpha chain variable domain of TCR clone 350717 (TRAV16, TRAJ30)
CAPPSLNRDDKIIF

SEQ ID NO: 701434 - protein, 14 aa, Homo sapiens
  CDR3 for beta chain variable domain of TCR clone 350717 (TRBV12-5, TRBJ2-5)
CASGSRTHQETQYF

SEQ ID NO: 701435 - protein, 14 aa, Homo sapiens
  CDR3 for alpha chain variable domain of TCR clone 350718 (TRAV12-2, TRAJ13)
CAVKKTGGYQKVTF

SEQ ID NO: 701436 - protein, 15 aa, Homo sapiens
  CDR3 for beta chain variable domain of TCR clone 350718 (TRBV20-1, TRBJ2-7)
CSARDRVSGMDEQYF

SEQ ID NO: 701437 - protein, 12 aa, Homo sapiens
  CDR3 for alpha chain variable domain of TCR clone 350719 (TRAV2, TRAJ33)
CAVPDSNYQLLW

SEQ ID NO: 701438 - protein, 15 aa, Homo sapiens
  CDR3 for beta chain variable domain of TCR clone 350719 (TRBV15, TRBJ1-5)
CATSRDPVSNQPQHF

SEQ ID NO: 701439 - protein, 13 aa, Homo sapiens
  CDR3 for alpha chain variable domain of TCR clone 350720 (TRAV13-2, TRAJ40)
CAEFTSGTYKYIF

SEQ ID NO: 701440 - protein, 14 aa, Homo sapiens
  CDR3 for beta chain variable domain of TCR clone 350720 (TRBV10-2, TRBJ1-5)
CASNSTGRNQPQHF

SEQ ID NO: 701441 - protein, 16 aa, Homo sapiens
  CDR3 for alpha chain variable domain of TCR clone 350721 (TRAV12-2, TRAJ40)
CAVIRGGTSGTYKSIF

SEQ ID NO: 701442 - protein, 16 aa, Homo sapiens
  CDR3 for beta chain variable domain of TCR clone 350721 (TRBV7-9, TRBJ2-1)
CASSDVAGGSYNEQFF

SEQ ID NO: 701443 - protein, 17 aa, Homo sapiens
  CDR3 for alpha chain variable domain of TCR clone 350722 (TRAV14/DV4, TRAJ3)
CAMREGPEYSRASKIIF

SEQ ID NO: 701444 - protein, 11 aa, Homo sapiens
  CDR3 for beta chain variable domain of TCR clone 350722 (TRBV7-8, TRBJ2-7)
CASSLSLEQYF

SEQ ID NO: 701445 - protein, 16 aa, Homo sapiens
  CDR3 for alpha chain variable domain of TCR clone 350723 (TRAV30, TRAJ24)
CGAEIVDADSWGKFQF

SEQ ID NO: 701446 - protein, 13 aa, Homo sapiens
  CDR3 for beta chain variable domain of TCR clone 350723 (TRBV12-5, TRBJ2-3)
CASGDRQSDTQYF

SEQ ID NO: 701447 - protein, 15 aa, Homo sapiens
  CDR3 for alpha chain variable domain of TCR clone 350724 (TRAV8-6, TRAJ11)
CAVNFMNSGYSTLTF

SEQ ID NO: 701448 - protein, 15 aa, Homo sapiens
  CDR3 for beta chain variable domain of TCR clone 350724 (TRBV7-2, TRBJ2-3)
CASSLAGAFIDTQYF

SEQ ID NO: 701449 - protein, 12 aa, Homo sapiens
  CDR3 for alpha chain variable domain of TCR clone 350725 (TRAV20, TRAJ26)
CAVRGDGQNFVF

SEQ ID NO: 701450 - protein, 14 aa, Homo sapiens
  CDR3 for beta chain variable domain of TCR clone 350725 (TRBV19, TRBJ2-1)
CASSDNQGANEQFF

SEQ ID NO: 701451 - protein, 15 aa, Homo sapiens
  CDR3 for alpha chain variable domain of TCR clone 350726 (TRAV26-1, TRAJ38)
CIVRAEGGNNRKLIW

SEQ ID NO: 701452 - protein, 14 aa, Homo sapiens
  CDR3 for beta chain variable domain of TCR clone 350726 (TRBV7-6, TRBJ2-5)
CASSSPSGSETQHF

SEQ ID NO: 701453 - protein, 15 aa, Homo sapiens
  CDR3 for alpha chain variable domain of TCR clone 350727 (TRAV2, TRAJ9)
CAVEDRGTGGFKTIF

SEQ ID NO: 701454 - protein, 15 aa, Homo sapiens
  CDR3 for beta chain variable domain of TCR clone 350727 (TRBV19, TRBJ1-2)
CASSVGQVLNYGYTF

SEQ ID NO: 701455 - protein, 15 aa, Homo sapiens
  CDR3 for alpha chain variable domain of TCR clone 350728 (TRAV12-2, TRAJ53)
CAVNGGGGSNYKLTF

SEQ ID NO: 701456 - protein, 15 aa, Homo sapiens
  CDR3 for beta chain variable domain of TCR clone 350728 (TRBV2, TRBJ2-1)
CASSELAGSYNEQFF

SEQ ID NO: 701457 - protein, 11 aa, Homo sapiens
  CDR3 for alpha chain variable domain of TCR clone 350729 (TRAV4, TRAJ31)
CLVGDNARLMF

SEQ ID NO: 701458 - protein, 16 aa, Homo sapiens
  CDR3 for beta chain variable domain of TCR clone 350729 (TRBV2, TRBJ2-4)
CASSPPGQGVSDIQYF

SEQ ID NO: 701459 - protein, 13 aa, Homo sapiens
  CDR3 for alpha chain variable domain of TCR clone 350730 (TRAV25, TRAJ26)
CAGMDNYGQNFVF

SEQ ID NO: 701460 - protein, 10 aa, Homo sapiens
  CDR3 for beta chain variable domain of TCR clone 350730 (TRBV2, TRBJ2-5)
CASSAATQYF

SEQ ID NO: 701461 - protein, 13 aa, Homo sapiens
  CDR3 for alpha chain variable domain of TCR clone 350731 (TRAV2, TRAJ40)
CAVVTSGTYKYIF

SEQ ID NO: 701462 - protein, 14 aa, Homo sapiens
  CDR3 for beta chain variable domain of TCR clone 350731 (TRBV27, TRBJ2-5)
CASSWREGLETQYF

SEQ ID NO: 701463 - protein, 13 aa, Homo sapiens
  CDR3 for alpha chain variable domain of TCR clone 350732 (TRAV1-2, TRAJ9)
CAALNTGGFKTIF

SEQ ID NO: 701464 - protein, 13 aa, Homo sapiens
  CDR3 for beta chain variable domain of TCR clone 350732 (TRBV19, TRBJ1-2)
CASSVRGRDAYTF

SEQ ID NO: 701465 - protein, 16 aa, Homo sapiens
  CDR3 for alpha chain variable domain of TCR clone 350733 (TRAV21, TRAJ52)
CAVTNAGGTSYGKLTF

SEQ ID NO: 701466 - protein, 17 aa, Homo sapiens
  CDR3 for beta chain variable domain of TCR clone 350733 (TRBV18, TRBJ2-2)
CASSPSDPWQNTGELFF

SEQ ID NO: 701467 - protein, 15 aa, Homo sapiens
  CDR3 for alpha chain variable domain of TCR clone 350734 (TRAV17, TRAJ57)
CATGPSQGGSEKLAF

SEQ ID NO: 701468 - protein, 14 aa, Homo sapiens
  CDR3 for beta chain variable domain of TCR clone 350734 (TRBV12-5, TRBJ2-5)
CASGSRTHQETQYF

SEQ ID NO: 701469 - protein, 13 aa, Homo sapiens
  CDR3 for alpha chain variable domain of TCR clone 350735 (TRAV16, TRAJ54)
CALMFQGAQKLVF

SEQ ID NO: 701470 - protein, 12 aa, Homo sapiens
  CDR3 for beta chain variable domain of TCR clone 350735 (TRBV18, TRBJ2-7)
CASSTAMGEQYF

SEQ ID NO: 701471 - protein, 13 aa, Homo sapiens
  CDR3 for alpha chain variable domain of TCR clone 350736 (TRAV8-4, TRAJ48)
CGVSLFGNEKLTF

SEQ ID NO: 701472 - protein, 15 aa, Homo sapiens
  CDR3 for beta chain variable domain of TCR clone 350736 (TRBV20-1, TRBJ2-7)
CSARKGLAESYEQYF

SEQ ID NO: 701473 - protein, 16 aa, Homo sapiens
  CDR3 for alpha chain variable domain of TCR clone 350737 (TRAV30, TRAJ24)
CGTEIVDADSWGKFQF

SEQ ID NO: 701474 - protein, 15 aa, Homo sapiens
  CDR3 for beta chain variable domain of TCR clone 350737 (TRBV11-2, TRBJ2-7)
CASSLSQGSSYEQYF

SEQ ID NO: 701475 - protein, 12 aa, Homo sapiens
  CDR3 for alpha chain variable domain of TCR clone 350738 (TRAV12-1, TRAJ40)
CVVYSGTYKYIF

SEQ ID NO: 701476 - protein, 18 aa, Homo sapiens
  CDR3 for beta chain variable domain of TCR clone 350738 (TRBV11-3, TRBJ2-3)
CASSFGGASREATNTQYF

SEQ ID NO: 701477 - protein, 14 aa, Homo sapiens
  CDR3 for alpha chain variable domain of TCR clone 350739 (TRAV13-1, TRAJ40)
CAARSTSGTYKYIF

SEQ ID NO: 701478 - protein, 15 aa, Homo sapiens
  CDR3 for beta chain variable domain of TCR clone 350739 (TRBV18, TRBJ1-5)
FASSETGGNNQPQHF

SEQ ID NO: 701479 - protein, 15 aa, Homo sapiens
  CDR3 for alpha chain variable domain of TCR clone 350740 (TRAV20, TRAJ43)
CAVQAWKSSNNDMRF

SEQ ID NO: 701480 - protein, 15 aa, Homo sapiens
  CDR3 for beta chain variable domain of TCR clone 350740 (TRBV19, TRBJ1-1)
CASTSGQIQNTEAFF

SEQ ID NO: 701481 - protein, 13 aa, Homo sapiens
  CDR3 for alpha chain variable domain of TCR clone 350741 (TRAV21, TRAJ27)
CAARPGNAGKSTL

SEQ ID NO: 701482 - protein, 17 aa, Homo sapiens
  CDR3 for beta chain variable domain of TCR clone 350741 (TRBV4-1, TRBJ1-4)
CASSQEGPRGVEEKLFF

SEQ ID NO: 701483 - protein, 12 aa, Homo sapiens
  CDR3 for alpha chain variable domain of TCR clone 350742 (TRAV12-3, TRAJ17)
CAMTLTGNKLTF

SEQ ID NO: 701484 - protein, 14 aa, Homo sapiens
  CDR3 for beta chain variable domain of TCR clone 350742 (TRBV7-9, TRBJ2-7)
CASSIGQGAGEQYF

SEQ ID NO: 701485 - protein, 14 aa, Homo sapiens
  CDR3 for alpha chain variable domain of TCR clone 350743 (TRAV3, TRAJ24)
CCERQNDSWGKLQF

SEQ ID NO: 701486 - protein, 14 aa, Homo sapiens
  CDR3 for beta chain variable domain of TCR clone 350743 (TRBV7-2, TRBJ2-3)
RASSQTGSSYTQYF

SEQ ID NO: 701487 - protein, 14 aa, Homo sapiens
  CDR3 for alpha chain variable domain of TCR clone 350744 (TRAV16, TRAJ15)
CALSGPQAGTALNF

SEQ ID NO: 701488 - protein, 12 aa, Homo sapiens
  CDR3 for beta chain variable domain of TCR clone 350744 (TRBV18, TRBJ2-5)
CASSPSKETQYF

SEQ ID NO: 701489 - protein, 16 aa, Homo sapiens
  CDR3 for alpha chain variable domain of TCR clone 350745 (TRAV12-1, TRAJ42)
CVVTPYYGGSQGNIIF

SEQ ID NO: 701490 - protein, 15 aa, Homo sapiens
  CDR3 for beta chain variable domain of TCR clone 350745 (TRBV4-3, TRBJ2-7)
CASSQGGRGIYEQYF

SEQ ID NO: 701491 - protein, 14 aa, Homo sapiens
  CDR3 for alpha chain variable domain of TCR clone 350746 (TRAV26-1, TRAJ38)
CIADNAGNNRKLIW

SEQ ID NO: 701492 - protein, 13 aa, Homo sapiens
  CDR3 for beta chain variable domain of TCR clone 350746 (TRBV20-1, TRBJ1-1)
CSARGGGNSEAFF

SEQ ID NO: 701493 - protein, 14 aa, Homo sapiens
  CDR3 for alpha chain variable domain of TCR clone 350747 (TRAV27, TRAJ22)
CAGLPSGSARQLTF

SEQ ID NO: 701494 - protein, 16 aa, Homo sapiens
  CDR3 for beta chain variable domain of TCR clone 350747 (TRBV20-1, TRBJ1-4)
CSAPGQGLLTNEKLFF

SEQ ID NO: 701495 - protein, 14 aa, Homo sapiens
  CDR3 for alpha chain variable domain of TCR clone 350748 (TRAV27, TRAJ45)
CAGAQEEVLPDSPV

SEQ ID NO: 701496 - protein, 17 aa, Homo sapiens
  CDR3 for beta chain variable domain of TCR clone 350748 (TRBV11-2, TRBJ2-1)
CASSLYPPGVEYNEQFF

SEQ ID NO: 701497 - protein, 12 aa, Homo sapiens
  CDR3 for alpha chain variable domain of TCR clone 350749 (TRAV1-1, TRAJ30)
CAVGGRDDKIIF

SEQ ID NO: 701498 - protein, 14 aa, Homo sapiens
  CDR3 for beta chain variable domain of TCR clone 350749 (TRBV6-1, TRBJ1-3)
CASVQGGGGNTIYF

SEQ ID NO: 701499 - protein, 16 aa, Homo sapiens
  CDR3 for alpha chain variable domain of TCR clone 350750 (TRAV16, TRAJ24)
CALSGGSTDSWGKMQF

SEQ ID NO: 701500 - protein, 15 aa, Homo sapiens
  CDR3 for beta chain variable domain of TCR clone 350750 (TRBV27, TRBJ2-1)
CASSNGGGSSNEQFF

SEQ ID NO: 701501 - protein, 11 aa, Homo sapiens
  CDR3 for alpha chain variable domain of TCR clone 350751 (TRAV2, TRAJ33)
CAVDGNYQLIW

SEQ ID NO: 701502 - protein, 14 aa, Homo sapiens
  CDR3 for beta chain variable domain of TCR clone 350751 (TRBV11-2, TRBJ2-3)
CASSRLDRTDTQYF

SEQ ID NO: 701503 - protein, 13 aa, Homo sapiens
  CDR3 for alpha chain variable domain of TCR clone 350752 (TRAV8-3, TRAJ4)
WVFYSGGYNKLIF

SEQ ID NO: 701504 - protein, 13 aa, Homo sapiens
  CDR3 for beta chain variable domain of TCR clone 350752 (TRBV7-9, TRBJ1-1)
CASSQAGNTEAFF

SEQ ID NO: 701505 - protein, 21 aa, Homo sapiens
  CDR3 for alpha chain variable domain of TCR clone 350753 (TRAV21, TRAJ41)
SLVTQPPTSVQFLYSGYALNF

SEQ ID NO: 701506 - protein, 13 aa, Homo sapiens
  CDR3 for beta chain variable domain of TCR clone 350753 (TRBV12-4, TRBJ1-2)
CASSLRQGKGYTF

SEQ ID NO: 701507 - protein, 14 aa, Homo sapiens
  CDR3 for alpha chain variable domain of TCR clone 350754 (TRAV2, TRAJ9)
CAVEDRSGGVKTIF

SEQ ID NO: 701508 - protein, 16 aa, Homo sapiens
  CDR3 for beta chain variable domain of TCR clone 350754 (TRBV7-2, TRBJ1-2)
CASSSNQDRRGHGYTF

SEQ ID NO: 701509 - protein, 14 aa, Homo sapiens
  CDR3 for alpha chain variable domain of TCR clone 350755 (TRAV17, TRAJ42)
CATDAPGSQGNLIF

SEQ ID NO: 701510 - protein, 13 aa, Homo sapiens
  CDR3 for beta chain variable domain of TCR clone 350755 (TRBV7-7, TRBJ1-5)
CASSPGKKQPQHF

SEQ ID NO: 701511 - protein, 16 aa, Homo sapiens
  CDR3 for alpha chain variable domain of TCR clone 350756 (TRAV12-1, TRAJ43)
CVVNPHRFGAGTRLTV

SEQ ID NO: 701512 - protein, 16 aa, Homo sapiens
  CDR3 for beta chain variable domain of TCR clone 350756 (TRBV27, TRBJ2-2)
CASSSTGGVDTGELFF

SEQ ID NO: 701513 - protein, 14 aa, Homo sapiens
  CDR3 for alpha chain variable domain of TCR clone 350757 (TRAV29/DV5, TRAJ45)
CAASFRGGADGLTF

SEQ ID NO: 701514 - protein, 16 aa, Homo sapiens
  CDR3 for beta chain variable domain of TCR clone 350757 (TRBV12-4, TRBJ2-5)
CASSFFVRGRQETQYF

SEQ ID NO: 701515 - protein, 11 aa, Homo sapiens
  CDR3 for alpha chain variable domain of TCR clone 350758 (TRAV12-2, TRAJ33)
CAVGSNYQLIW

SEQ ID NO: 701516 - protein, 15 aa, Homo sapiens
  CDR3 for beta chain variable domain of TCR clone 350758 (TRBV10-3, TRBJ2-3)
CAISLTSGDTDTQYF

SEQ ID NO: 701517 - protein, 16 aa, Homo sapiens
  CDR3 for alpha chain variable domain of TCR clone 350759 (TRAV13-1, TRAJ10)
CAAGYILTGGGNKLTF

SEQ ID NO: 701518 - protein, 15 aa, Homo sapiens
  CDR3 for beta chain variable domain of TCR clone 350759 (TRBV12-4, TRBJ2-7)
CASSQTGAIAYEQYF

SEQ ID NO: 701519 - protein, 13 aa, Homo sapiens
  CDR3 for alpha chain variable domain of TCR clone 350760 (TRAV3, TRAJ41)
CAVSSTSGYALNF

SEQ ID NO: 701520 - protein, 13 aa, Homo sapiens
  CDR3 for beta chain variable domain of TCR clone 350760 (TRBV20-1, TRBJ2-2)
CSALSGGAGELFF

SEQ ID NO: 701521 - protein, 13 aa, Homo sapiens
  CDR3 for alpha chain variable domain of TCR clone 350761 (TRAV8-1, TRAJ34)
CAVRLYNTDKLIF

SEQ ID NO: 701522 - protein, 15 aa, Homo sapiens
  CDR3 for beta chain variable domain of TCR clone 350761 (TRBV7-9, TRBJ1-3)
CASSLRSGSGNTIYF

SEQ ID NO: 701523 - protein, 13 aa, Homo sapiens
  CDR3 for alpha chain variable domain of TCR clone 350762 (TRAV13-2, TRAJ13)
CAERPGGYQKFTF

SEQ ID NO: 701524 - protein, 14 aa, Homo sapiens
  CDR3 for beta chain variable domain of TCR clone 350762 (TRBV20-1, TRBJ2-5)
CSARYRGLQETQYF

SEQ ID NO: 701525 - protein, 19 aa, Homo sapiens
  CDR3 for alpha chain variable domain of TCR clone 350763 (TRAV26-1, TRAJ52)
CIVRVANNAGGTSYGKLTF

SEQ ID NO: 701526 - protein, 14 aa, Homo sapiens
  CDR3 for beta chain variable domain of TCR clone 350763 (TRBV19, TRBJ1-2)
RASSIGAGSYGYTF

SEQ ID NO: 701527 - protein, 14 aa, Homo sapiens
  CDR3 for alpha chain variable domain of TCR clone 350764 (TRAV8-3, TRAJ27)
CAGGRNTNAGKSTF

SEQ ID NO: 701528 - protein, 15 aa, Homo sapiens
  CDR3 for beta chain variable domain of TCR clone 350764 (TRBV11-3, TRBJ2-5)
CAISLRGRVQETQHF

SEQ ID NO: 701529 - protein, 16 aa, Homo sapiens
  CDR3 for alpha chain variable domain of TCR clone 350765 (TRAV30, TRAJ24)
CGTEIVDADSWGKFQF

SEQ ID NO: 701530 - protein, 17 aa, Homo sapiens
  CDR3 for beta chain variable domain of TCR clone 350765 (TRBV20-1, TRBJ2-7)
CSASGTSGRVGESEQYF

SEQ ID NO: 701531 - protein, 11 aa, Homo sapiens
  CDR3 for alpha chain variable domain of TCR clone 350766 (TRAV35, TRAJ30)
CAGPGDDKIIF

SEQ ID NO: 701532 - protein, 12 aa, Homo sapiens
  CDR3 for beta chain variable domain of TCR clone 350766 (TRBV27, TRBJ2-1)
CASRGFYNDQFF

SEQ ID NO: 701533 - protein, 14 aa, Homo sapiens
  CDR3 for alpha chain variable domain of TCR clone 350767 (TRAV12-2, TRAJ53)
CAVKGGGSNYKLTF

SEQ ID NO: 701534 - protein, 15 aa, Homo sapiens
  CDR3 for beta chain variable domain of TCR clone 350767 (TRBV11-2, TRBJ2-2)
CASSSYRVNAGELFF

SEQ ID NO: 701535 - protein, 17 aa, Homo sapiens
  CDR3 for alpha chain variable domain of TCR clone 350768 (TRAV16, TRAJ37)
CAFWPKNGSSNTGKLIF

SEQ ID NO: 701536 - protein, 15 aa, Homo sapiens
  CDR3 for beta chain variable domain of TCR clone 350768 (TRBV19, TRBJ2-7)
CASSPAGSGEALRYF

SEQ ID NO: 701537 - protein, 13 aa, Homo sapiens
  CDR3 for alpha chain variable domain of TCR clone 350769 (TRAV21, TRAJ27)
CSSRPGNAGKSTF

SEQ ID NO: 701538 - protein, 14 aa, Homo sapiens
  CDR3 for beta chain variable domain of TCR clone 350769 (TRBV7-6, TRBJ2-3)
CASSLGTVTDTQYF

SEQ ID NO: 701539 - protein, 11 aa, Homo sapiens
  CDR3 for alpha chain variable domain of TCR clone 350770 (TRAV2, TRAJ13)
CASGGYQKATF

SEQ ID NO: 701540 - protein, 16 aa, Homo sapiens
  CDR3 for beta chain variable domain of TCR clone 350770 (TRBV19, TRBJ2-1)
CASSKAGPSSYNEQFF

SEQ ID NO: 701541 - protein, 15 aa, Homo sapiens
  CDR3 for alpha chain variable domain of TCR clone 350771 (TRAV13-2, TRAJ42)
CAGLNYGGSQGNLIF

SEQ ID NO: 701542 - protein, 15 aa, Homo sapiens
  CDR3 for beta chain variable domain of TCR clone 350771 (TRBV5-5, TRBJ1-1)
CASSLVGKDNTEAFF

SEQ ID NO: 701543 - protein, 12 aa, Homo sapiens
  CDR3 for alpha chain variable domain of TCR clone 350772 (TRAV21, TRAJ31)
CVLAGNNARLMF

SEQ ID NO: 701544 - protein, 16 aa, Homo sapiens
  CDR3 for beta chain variable domain of TCR clone 350772 (TRBV27, TRBJ2-5)
CASSFGPGGTKENQYF

SEQ ID NO: 701545 - protein, 14 aa, Homo sapiens
  CDR3 for alpha chain variable domain of TCR clone 350773 (TRAV12-3, TRAJ10)
SHLPLTGGGNKLSF

SEQ ID NO: 701546 - protein, 16 aa, Homo sapiens
  CDR3 for beta chain variable domain of TCR clone 350773 (TRBV4-1, TRBJ1-4)
CASSQDLRRGGEKLFF

SEQ ID NO: 701547 - protein, 17 aa, Homo sapiens
  CDR3 for alpha chain variable domain of TCR clone 350774 (TRAV3, TRAJ6)
CAVRDGPRAGGSYIPTF

SEQ ID NO: 701548 - protein, 20 aa, Homo sapiens
  CDR3 for beta chain variable domain of TCR clone 350774 (TRBV28, TRBJ2-1)
CARTPIGRSPGLAGGNEQSF

SEQ ID NO: 701549 - protein, 11 aa, Homo sapiens
  CDR3 for alpha chain variable domain of TCR clone 350775 (TRAV8-3, TRAJ49)
CAVNTGNQFYF

SEQ ID NO: 701550 - protein, 20 aa, Homo sapiens
  CDR3 for beta chain variable domain of TCR clone 350775 (TRBV11-2, TRBJ2-7)
LRTRPCISVPAAPPADEQYF

SEQ ID NO: 701551 - protein, 15 aa, Homo sapiens
  CDR3 for alpha chain variable domain of TCR clone 350776 (TRAV3, TRAJ22)
CAVRDRGGSARQLTF

SEQ ID NO: 701552 - protein, 12 aa, Homo sapiens
  CDR3 for beta chain variable domain of TCR clone 350776 (TRBV14, TRBJ2-7)
CASSLYKDEQYF

SEQ ID NO: 701553 - protein, 12 aa, Homo sapiens
  CDR3 for alpha chain variable domain of TCR clone 350777 (TRAV29/DV5, TRAJ41)
CAAISSGYALNF

SEQ ID NO: 701554 - protein, 17 aa, Homo sapiens
  CDR3 for beta chain variable domain of TCR clone 350777 (TRBV18, TRBJ2-1)
CASSTGLSGGTDNEQFF

SEQ ID NO: 701555 - protein, 11 aa, Homo sapiens
  CDR3 for alpha chain variable domain of TCR clone 350778 (TRAV2, TRAJ21)
CAVFNFNKFYF

SEQ ID NO: 701556 - protein, 14 aa, Homo sapiens
  CDR3 for beta chain variable domain of TCR clone 350778 (TRBV12-4, TRBJ2-3)
CASSLVPSTDTQYF

SEQ ID NO: 701557 - protein, 13 aa, Homo sapiens
  CDR3 for alpha chain variable domain of TCR clone 350779 (TRAV12-1, TRAJ11)
CVVNRAGSSTLTF

SEQ ID NO: 701558 - protein, 16 aa, Homo sapiens
  CDR3 for beta chain variable domain of TCR clone 350779 (TRBV27, TRBJ2-2)
CASSLRPGGAPGELFF

SEQ ID NO: 701559 - protein, 12 aa, Homo sapiens
  CDR3 for alpha chain variable domain of TCR clone 350780 (TRAV29/DV5, TRAJ49)
CAATDTGNQFYF

SEQ ID NO: 701560 - protein, 11 aa, Homo sapiens
  CDR3 for beta chain variable domain of TCR clone 350780 (TRBV10-3, TRBJ2-1)
CAISDRGLQFF

SEQ ID NO: 701561 - protein, 17 aa, Homo sapiens
  CDR3 for alpha chain variable domain of TCR clone 350781 (TRAV8-3, TRAJ10)
EASNTVILTGGGNELTF

SEQ ID NO: 701562 - protein, 16 aa, Homo sapiens
  CDR3 for beta chain variable domain of TCR clone 350781 (TRBV7-9, TRBJ1-2)
CASSLGFSSGEDGYTF

SEQ ID NO: 701563 - protein, 12 aa, Homo sapiens
  CDR3 for alpha chain variable domain of TCR clone 350782 (TRAV35, TRAJ53)
CAGLGSNYKLTF

SEQ ID NO: 701564 - protein, 15 aa, Homo sapiens
  CDR3 for beta chain variable domain of TCR clone 350782 (TRBV13, TRBJ2-5)
CASSLTPGRGETQYF

SEQ ID NO: 701565 - protein, 14 aa, Homo sapiens
  CDR3 for alpha chain variable domain of TCR clone 350783 (TRAV35, TRAJ50)
CAGHRKTSYYKVIF

SEQ ID NO: 701566 - protein, 13 aa, Homo sapiens
  CDR3 for beta chain variable domain of TCR clone 350783 (TRBV7-7, TRBJ2-3)
CASSLSRADTQYF

SEQ ID NO: 701567 - protein, 16 aa, Homo sapiens
  CDR3 for alpha chain variable domain of TCR clone 350784 (TRAV13-2, TRAJ28)
CAEKSYSGAGSYQLPF

SEQ ID NO: 701568 - protein, 16 aa, Homo sapiens
  CDR3 for beta chain variable domain of TCR clone 350784 (TRBV19, TRBJ2-1)
CASSKAGPSSYNEQFF

SEQ ID NO: 701569 - protein, 12 aa, Homo sapiens
  CDR3 for alpha chain variable domain of TCR clone 350785 (TRAV27, TRAJ41)
CAGSNSGYALNF

SEQ ID NO: 701570 - protein, 13 aa, Homo sapiens
  CDR3 for beta chain variable domain of TCR clone 350785 (TRBV12-4, TRBJ1-1)
CARSPGTGFEAFF

SEQ ID NO: 701571 - protein, 16 aa, Homo sapiens
  CDR3 for alpha chain variable domain of TCR clone 350786 (TRAV30, TRAJ24)
CGAEIVDADSWGKFQF

SEQ ID NO: 701572 - protein, 12 aa, Homo sapiens
  CDR3 for beta chain variable domain of TCR clone 350786 (TRBV7-8, TRBJ2-7)
CASSLGDREQYF

SEQ ID NO: 701573 - protein, 14 aa, Homo sapiens
  CDR3 for alpha chain variable domain of TCR clone 350787 (TRAV1-2, TRAJ16)
CVVNRFSDGQKLLF

SEQ ID NO: 701574 - protein, 15 aa, Homo sapiens
  CDR3 for beta chain variable domain of TCR clone 350787 (TRBV7-9, TRBJ1-4)
CASSARTGGNEKLFF

SEQ ID NO: 701575 - protein, 15 aa, Homo sapiens
  CDR3 for alpha chain variable domain of TCR clone 350788 (TRAV26-2, TRAJ13)
CILRDLSGGYQTVTF

SEQ ID NO: 701576 - protein, 11 aa, Homo sapiens
  CDR3 for beta chain variable domain of TCR clone 350788 (TRBV7-9, TRBJ2-3)
CASSYTDTQYF

SEQ ID NO: 701577 - protein, 13 aa, Homo sapiens
  CDR3 for alpha chain variable domain of TCR clone 350789 (TRAV27, TRAJ45)
CRSSGGGADGLTF

SEQ ID NO: 701578 - protein, 17 aa, Homo sapiens
  CDR3 for beta chain variable domain of TCR clone 350789 (TRBV11-2, TRBJ2-1)
CASSLYARGVEYNEQFF

SEQ ID NO: 701579 - protein, 13 aa, Homo sapiens
  CDR3 for alpha chain variable domain of TCR clone 350790 (TRAV12-3, TRAJ33)
CAMSVNSNYQLIW

SEQ ID NO: 701580 - protein, 12 aa, Homo sapiens
  CDR3 for beta chain variable domain of TCR clone 350790 (TRBV7-2, TRBJ2-2)
CQQLSCHRELFF

SEQ ID NO: 701581 - protein, 14 aa, Homo sapiens
  CDR3 for alpha chain variable domain of TCR clone 350791 (TRAV12-3, TRAJ54)
CAMRGIQGAQKLVF

SEQ ID NO: 701582 - protein, 14 aa, Homo sapiens
  CDR3 for beta chain variable domain of TCR clone 350791 (TRBV4-1, TRBJ2-2)
CASSQAVNTGELFF

SEQ ID NO: 701583 - protein, 13 aa, Homo sapiens
  CDR3 for alpha chain variable domain of TCR clone 350792 (TRAV20, TRAJ15)
CAPINQAGTALIF

SEQ ID NO: 701584 - protein, 13 aa, Homo sapiens
  CDR3 for beta chain variable domain of TCR clone 350792 (TRBV12-4, TRBJ2-1)
CASRQPSNNEQFF

SEQ ID NO: 701585 - protein, 12 aa, Homo sapiens
  CDR3 for alpha chain variable domain of TCR clone 350793 (TRAV13-1, TRAJ21)
CAAKEGFNKFYF

SEQ ID NO: 701586 - protein, 14 aa, Homo sapiens
  CDR3 for beta chain variable domain of TCR clone 350793 (TRBV5-1, TRBJ2-7)
CASSRVESLYEQYF

SEQ ID NO: 701587 - protein, 13 aa, Homo sapiens
  CDR3 for alpha chain variable domain of TCR clone 350794 (TRAV13-1, TRAJ30)
CAGREDRDDKIIF

SEQ ID NO: 701588 - protein, 17 aa, Homo sapiens
  CDR3 for beta chain variable domain of TCR clone 350794 (TRBV7-9, TRBJ2-6)
CASSFGAGYSGANVLTF

SEQ ID NO: 701589 - protein, 12 aa, Homo sapiens
  CDR3 for alpha chain variable domain of TCR clone 350795 (TRAV27, TRAJ9)
CAGESGGFKTIF

SEQ ID NO: 701590 - protein, 15 aa, Homo sapiens
  CDR3 for beta chain variable domain of TCR clone 350795 (TRBV19, TRBJ2-1)
WASSRPGQNYNEQFF

SEQ ID NO: 701591 - protein, 14 aa, Homo sapiens
  CDR3 for alpha chain variable domain of TCR clone 350796 (TRAV12-2, TRAJ41)
CAVTLGLSGYALNF

SEQ ID NO: 701592 - protein, 13 aa, Homo sapiens
  CDR3 for beta chain variable domain of TCR clone 350796 (TRBV20-1, TRBJ1-1)
CSARGGGNTEAFF

SEQ ID NO: 701593 - protein, 16 aa, Homo sapiens
  CDR3 for alpha chain variable domain of TCR clone 350797 (TRAV26-1, TRAJ28)
CIVRPYSGAGGYQLTF

SEQ ID NO: 701594 - protein, 18 aa, Homo sapiens
  CDR3 for beta chain variable domain of TCR clone 350797 (TRBV20-1, TRBJ2-2)
CSARDLTSGSMDTGELFF

SEQ ID NO: 701595 - protein, 17 aa, Homo sapiens
  CDR3 for alpha chain variable domain of TCR clone 350798 (TRAV13-1, TRAJ31)
CAPRDRLIFGDGTQLVV

SEQ ID NO: 701596 - protein, 15 aa, Homo sapiens
  CDR3 for beta chain variable domain of TCR clone 350798 (TRBV6-5, TRBJ2-1)
CASSYDAGAGNEQFF

SEQ ID NO: 701597 - protein, 15 aa, Homo sapiens
  CDR3 for alpha chain variable domain of TCR clone 350799 (TRAV3, TRAJ47)
CAVRDIGEYGNKLVF

SEQ ID NO: 701598 - protein, 14 aa, Homo sapiens
  CDR3 for beta chain variable domain of TCR clone 350799 (TRBV13, TRBJ2-5)
CASSLERVGENQYF

SEQ ID NO: 701599 - protein, 14 aa, Homo sapiens
  CDR3 for alpha chain variable domain of TCR clone 350800 (TRAV13-1, TRAJ5)
CAAHPDTGRRALTF

SEQ ID NO: 701600 - protein, 13 aa, Homo sapiens
  CDR3 for beta chain variable domain of TCR clone 350800 (TRBV28, TRBJ2-1)
CASRSGGLNEQFF

SEQ ID NO: 701601 - protein, 14 aa, Homo sapiens
  CDR3 for alpha chain variable domain of TCR clone 350801 (TRAV17, TRAJ22)
CATSPSGSARQLTF

SEQ ID NO: 701602 - protein, 15 aa, Homo sapiens
  CDR3 for beta chain variable domain of TCR clone 350801 (TRBV7-2, TRBJ2-1)
CASSSRTSREDEQFF

SEQ ID NO: 701603 - protein, 10 aa, Homo sapiens
  CDR3 for alpha chain variable domain of TCR clone 350802 (TRAV12-1, TRAJ37)
ARRNTGKLIF

SEQ ID NO: 701604 - protein, 15 aa, Homo sapiens
  CDR3 for beta chain variable domain of TCR clone 350802 (TRBV7-2, TRBJ2-3)
CASSLEQGGTDTQYF

SEQ ID NO: 701605 - protein, 13 aa, Homo sapiens
  CDR3 for alpha chain variable domain of TCR clone 350803 (TRAV12-1, TRAJ6)
CVVFPGGSYIPTF

SEQ ID NO: 701606 - protein, 14 aa, Homo sapiens
  CDR3 for beta chain variable domain of TCR clone 350803 (TRBV20-1, TRBJ1-3)
CSASPTGAGDTIYF

SEQ ID NO: 701607 - protein, 14 aa, Homo sapiens
  CDR3 for alpha chain variable domain of TCR clone 350804 (TRAV12-2, TRAJ13)
CAVKKTGGYQKVTF

SEQ ID NO: 701608 - protein, 12 aa, Homo sapiens
  CDR3 for beta chain variable domain of TCR clone 350804 (TRBV12-4, TRBJ1-2)
CASSFIGLHLRF

SEQ ID NO: 701609 - protein, 17 aa, Homo sapiens
  CDR3 for alpha chain variable domain of TCR clone 350805 (TRAV21, TRAJ52)
CAVGTNAGGTSYGKLTF

SEQ ID NO: 701610 - protein, 15 aa, Homo sapiens
  CDR3 for beta chain variable domain of TCR clone 350805 (TRBV2, TRBJ1-2)
CASSESRTVNYGYTF

SEQ ID NO: 701611 - protein, 15 aa, Homo sapiens
  CDR3 for alpha chain variable domain of TCR clone 350806 (TRAV26-1, TRAJ29)
CIVRVEGSGNTPLVF

SEQ ID NO: 701612 - protein, 15 aa, Homo sapiens
  CDR3 for beta chain variable domain of TCR clone 350806 (TRBV28, TRBJ2-5)
CASSSGRTIQETQYF

SEQ ID NO: 701613 - protein, 11 aa, Homo sapiens
  CDR3 for alpha chain variable domain of TCR clone 350807 (TRAV17, TRAJ43)
CATPRSNDMRF

SEQ ID NO: 701614 - protein, 14 aa, Homo sapiens
  CDR3 for beta chain variable domain of TCR clone 350807 (TRBV7-2, TRBJ2-7)
CASGPKTSFYEQYF

SEQ ID NO: 701615 - protein, 14 aa, Homo sapiens
  CDR3 for alpha chain variable domain of TCR clone 350808 (TRAV8-4, TRAJ4)
CAVSPSGGYNKLIF

SEQ ID NO: 701616 - protein, 15 aa, Homo sapiens
  CDR3 for beta chain variable domain of TCR clone 350808 (TRBV6-3, TRBJ2-7)
CASSSPGTVFYEQYF

SEQ ID NO: 701617 - protein, 15 aa, Homo sapiens
  CDR3 for alpha chain variable domain of TCR clone 350809 (TRAV13-1, TRAJ44)
YAASRGGGTASKLTF

SEQ ID NO: 701618 - protein, 14 aa, Homo sapiens
  CDR3 for beta chain variable domain of TCR clone 350809 (TRBV7-2, TRBJ2-5)
CASSPRGSSETQYF

SEQ ID NO: 701619 - protein, 13 aa, Homo sapiens
  CDR3 for alpha chain variable domain of TCR clone 350810 (TRAV35, TRAJ22)
CAGLSGSARQLTF

SEQ ID NO: 701620 - protein, 16 aa, Homo sapiens
  CDR3 for beta chain variable domain of TCR clone 350810 (TRBV7-9, TRBJ2-1)
CAGSLVLTGQGNEQFF

SEQ ID NO: 701621 - protein, 17 aa, Homo sapiens
  CDR3 for alpha chain variable domain of TCR clone 350811 (TRAV30, TRAJ49)
EPTSVAQSGITGNQFYF

SEQ ID NO: 701622 - protein, 14 aa, Homo sapiens
  CDR3 for beta chain variable domain of TCR clone 350811 (TRBV19, TRBJ2-1)
CASGKSTQYNEQFF

SEQ ID NO: 701623 - protein, 13 aa, Homo sapiens
  CDR3 for alpha chain variable domain of TCR clone 350812 (TRAV23/DV6, TRAJ22)
CAPYSGSARQLTL

SEQ ID NO: 701624 - protein, 11 aa, Homo sapiens
  CDR3 for beta chain variable domain of TCR clone 350812 (TRBV12-4, TRBJ2-3)
CASTATDTQYF

SEQ ID NO: 701625 - protein, 13 aa, Homo sapiens
  CDR3 for alpha chain variable domain of TCR clone 350813 (TRAV1-2, TRAJ12)
CAVSMDSSYKLIF

SEQ ID NO: 701626 - protein, 20 aa, Homo sapiens
  CDR3 for beta chain variable domain of TCR clone 350813 (TRBV27, TRBJ2-5)
CASSLIPTGGGDPVLRARHA

SEQ ID NO: 701627 - protein, 16 aa, Homo sapiens
  CDR3 for alpha chain variable domain of TCR clone 350814 (TRAV8-3, TRAJ22)
CAVDLLGPGSARHLTF

SEQ ID NO: 701628 - protein, 14 aa, Homo sapiens
  CDR3 for beta chain variable domain of TCR clone 350814 (TRBV11-2, TRBJ2-7)
CASSLELEGYEQYF

SEQ ID NO: 701629 - protein, 12 aa, Homo sapiens
  CDR3 for alpha chain variable domain of TCR clone 350815 (TRAV2, TRAJ9)
CAVGAGVFKTIF

SEQ ID NO: 701630 - protein, 11 aa, Homo sapiens
  CDR3 for beta chain variable domain of TCR clone 350815 (TRBV13, TRBJ2-2)
CASSPRTGEHT

SEQ ID NO: 701631 - protein, 16 aa, Homo sapiens
  CDR3 for alpha chain variable domain of TCR clone 350816 (TRAV12-3, TRAJ58)
CAMTDTEETSSSRLTF

SEQ ID NO: 701632 - protein, 21 aa, Homo sapiens
  CDR3 for beta chain variable domain of TCR clone 350816 (TRBV23-1, TRBJ2-7)
RQQSAPGLGQGYVGGGYEQYF

SEQ ID NO: 701633 - protein, 14 aa, Homo sapiens
  CDR3 for alpha chain variable domain of TCR clone 350817 (TRAV8-4, TRAJ13)
CAVTLSGGYQKVTF

SEQ ID NO: 701634 - protein, 14 aa, Homo sapiens
  CDR3 for beta chain variable domain of TCR clone 350817 (TRBV7-2, TRBJ1-2)
CASSQTGSTYGFTF

SEQ ID NO: 701635 - protein, 13 aa, Homo sapiens
  CDR3 for alpha chain variable domain of TCR clone 350818 (TRAV36/DV7, TRAJ37)
CAVFSSNTGKLIF

SEQ ID NO: 701636 - protein, 13 aa, Homo sapiens
  CDR3 for beta chain variable domain of TCR clone 350818 (TRBV7-9, TRBJ1-2)
CASSPSNFWGYTF

SEQ ID NO: 701637 - protein, 10 aa, Homo sapiens
  CDR3 for alpha chain variable domain of TCR clone 350819 (TRAV4, TRAJ15)
CLPFWTALIF

SEQ ID NO: 701638 - protein, 15 aa, Homo sapiens
  CDR3 for beta chain variable domain of TCR clone 350819 (TRBV5-1, TRBJ2-1)
CASSCSGTGYNEQFF

SEQ ID NO: 701639 - protein, 14 aa, Homo sapiens
  CDR3 for alpha chain variable domain of TCR clone 350820 (TRAV2, TRAJ37)
CAVDFTSNTGKLIF

SEQ ID NO: 701640 - protein, 17 aa, Homo sapiens
  CDR3 for beta chain variable domain of TCR clone 350820 (TRBV20-1, TRBJ1-1)
CSAGRGVTGNTELSLDK

SEQ ID NO: 701641 - protein, 14 aa, Homo sapiens
  CDR3 for alpha chain variable domain of TCR clone 350821 (TRAV8-4, TRAJ29)
CAVSAVEGNKPLVF

SEQ ID NO: 701642 - protein, 13 aa, Homo sapiens
  CDR3 for beta chain variable domain of TCR clone 350821 (TRBV12-4, TRBJ2-7)
CASSFQGRYEQYF

SEQ ID NO: 701643 - protein, 10 aa, Homo sapiens
  CDR3 for alpha chain variable domain of TCR clone 350822 (TRAV13-1, TRAJ15)
INQAGTALIF

SEQ ID NO: 701644 - protein, 14 aa, Homo sapiens
  CDR3 for beta chain variable domain of TCR clone 350822 (TRBV7-9, TRBJ2-1)
CASSDNSGYKEQFF

SEQ ID NO: 701645 - protein, 12 aa, Homo sapiens
  CDR3 for alpha chain variable domain of TCR clone 350823 (TRAV30, TRAJ39)
CGRGNAGNMLTF

SEQ ID NO: 701646 - protein, 15 aa, Homo sapiens
  CDR3 for beta chain variable domain of TCR clone 350823 (TRBV5-1, TRBJ1-1)
CASSPTGFDVTEAFF

SEQ ID NO: 701647 - protein, 14 aa, Homo sapiens
  CDR3 for alpha chain variable domain of TCR clone 350824 (TRAV1-2, TRAJ16)
CAVNRFSDGQKLLF

SEQ ID NO: 701648 - protein, 13 aa, Homo sapiens
  CDR3 for beta chain variable domain of TCR clone 350824 (TRBV7-9, TRBJ2-7)
CASSLQGSYEQYF

SEQ ID NO: 701649 - protein, 15 aa, Homo sapiens
  CDR3 for alpha chain variable domain of TCR clone 350825 (TRAV27, TRAJ17)
CRSTMIKAAGNKLTF

SEQ ID NO: 701650 - protein, 13 aa, Homo sapiens
  CDR3 for beta chain variable domain of TCR clone 350825 (TRBV12-4, TRBJ2-7)
CASSPTETYEQYF

SEQ ID NO: 701651 - protein, 13 aa, Homo sapiens
  CDR3 for alpha chain variable domain of TCR clone 350826 (TRAV16, TRAJ28)
CALTGAGSYQLTF

SEQ ID NO: 701652 - protein, 13 aa, Homo sapiens
  CDR3 for beta chain variable domain of TCR clone 350826 (TRBV7-7, TRBJ2-5)
CASSRSGQETQYF

SEQ ID NO: 701653 - protein, 13 aa, Homo sapiens
  CDR3 for alpha chain variable domain of TCR clone 350827 (TRAV17, TRAJ21)
CATDGNNFNRFYF

SEQ ID NO: 701654 - protein, 12 aa, Homo sapiens
  CDR3 for beta chain variable domain of TCR clone 350827 (TRBV20-1, TRBJ1-1)
CSARGGNTEAFF

SEQ ID NO: 701655 - protein, 13 aa, Homo sapiens
  CDR3 for alpha chain variable domain of TCR clone 350828 (TRAV35, TRAJ33)
CAGRHDSNYQLIW

SEQ ID NO: 701656 - protein, 19 aa, Homo sapiens
  CDR3 for beta chain variable domain of TCR clone 350828 (TRBV6-3, TRBJ2-1)
CASNYSWTSGRATYNEQFF

SEQ ID NO: 701657 - protein, 11 aa, Homo sapiens
  CDR3 for alpha chain variable domain of TCR clone 350829 (TRAV1-2, TRAJ20)
CAVSNDYKLSF

SEQ ID NO: 701658 - protein, 16 aa, Homo sapiens
  CDR3 for beta chain variable domain of TCR clone 350829 (TRBV29-1, TRBJ2-6)
CSVEDITCSGANDLTF

SEQ ID NO: 701659 - protein, 19 aa, Homo sapiens
  CDR3 for alpha chain variable domain of TCR clone 350830 (TRAV26-1, TRAJ52)
CIVRAHRNAGGTSYGKRTF

SEQ ID NO: 701660 - protein, 15 aa, Homo sapiens
  CDR3 for beta chain variable domain of TCR clone 350830 (TRBV12-4, TRBJ2-5)
CASSPPTGLQETQYF

SEQ ID NO: 701661 - protein, 12 aa, Homo sapiens
  CDR3 for alpha chain variable domain of TCR clone 350831 (TRAV12-3, TRAJ40)
CAMSSGTYEYIF

SEQ ID NO: 701662 - protein, 20 aa, Homo sapiens
  CDR3 for beta chain variable domain of TCR clone 350831 (TRBV7-8, TRBJ2-2)
CASSHLFPGPTIHITGELFF

SEQ ID NO: 701663 - protein, 15 aa, Homo sapiens
  CDR3 for alpha chain variable domain of TCR clone 350832 (TRAV3, TRAJ22)
CAVRDRGGSARQLTF

SEQ ID NO: 701664 - protein, 16 aa, Homo sapiens
  CDR3 for beta chain variable domain of TCR clone 350832 (TRBV19, TRBJ2-2)
CASSFPGQGLAGELFF

SEQ ID NO: 701665 - protein, 14 aa, Homo sapiens
  CDR3 for alpha chain variable domain of TCR clone 350833 (TRAV26-1, TRAJ38)
CIADNAGNNRKLIW

SEQ ID NO: 701666 - protein, 15 aa, Homo sapiens
  CDR3 for beta chain variable domain of TCR clone 350833 (TRBV19, TRBJ2-1)
CASIKGRGPYNEQFF

SEQ ID NO: 701667 - protein, 14 aa, Homo sapiens
  CDR3 for alpha chain variable domain of TCR clone 350834 (TRAV1-2, TRAJ16)
CAVNRFSDGQKLLF

SEQ ID NO: 701668 - protein, 16 aa, Homo sapiens
  CDR3 for beta chain variable domain of TCR clone 350834 (TRBV20-1, TRBJ1-4)
CSAPGQGLFTNEKLFF

SEQ ID NO: 701669 - protein, 12 aa, Homo sapiens
  CDR3 for alpha chain variable domain of TCR clone 350835 (TRAV8-3, TRAJ26)
CAGDNYGQNFVF

SEQ ID NO: 701670 - protein, 15 aa, Homo sapiens
  CDR3 for beta chain variable domain of TCR clone 350835 (TRBV9, TRBJ2-1)
CASSLAGSSYNQQFF

SEQ ID NO: 701671 - protein, 15 aa, Homo sapiens
  CDR3 for alpha chain variable domain of TCR clone 350836 (TRAV12-2, TRAJ53)
CAVNGGGGSNYKLTF

SEQ ID NO: 701672 - protein, 13 aa, Homo sapiens
  CDR3 for beta chain variable domain of TCR clone 350836 (TRBV10-2, TRBJ1-1)
CASNDQMNTEAFF

SEQ ID NO: 701673 - protein, 12 aa, Homo sapiens
  CDR3 for alpha chain variable domain of TCR clone 350837 (TRAV12-2, TRAJ8)
CAVNTGFQKLVF

SEQ ID NO: 701674 - protein, 15 aa, Homo sapiens
  CDR3 for beta chain variable domain of TCR clone 350837 (TRBV7-8, TRBJ1-5)
CASSLERRGLEPQLF

SEQ ID NO: 701675 - protein, 15 aa, Homo sapiens
  CDR3 for alpha chain variable domain of TCR clone 350838 (TRAV3, TRAJ22)
CAVRDRGGSARQLTF

SEQ ID NO: 701676 - protein, 13 aa, Homo sapiens
  CDR3 for beta chain variable domain of TCR clone 350838 (TRBV7-2, TRBJ1-2)
CASSSRGAYGYTF

SEQ ID NO: 701677 - protein, 13 aa, Homo sapiens
  CDR3 for alpha chain variable domain of TCR clone 350839 (TRAV12-2, TRAJ18)
CAVSGSTLGRLYF

SEQ ID NO: 701678 - protein, 18 aa, Homo sapiens
  CDR3 for beta chain variable domain of TCR clone 350839 (TRBV27, TRBJ2-3)
CASSLSGTSGRGTDTQYF

SEQ ID NO: 701679 - protein, 12 aa, Homo sapiens
  CDR3 for alpha chain variable domain of TCR clone 350840 (TRAV12-3, TRAJ17)
CAMTLTGNKLTF

SEQ ID NO: 701680 - protein, 14 aa, Homo sapiens
  CDR3 for beta chain variable domain of TCR clone 350840 (TRBV18, TRBJ2-7)
CASSARGGAYEQYF

SEQ ID NO: 701681 - protein, 11 aa, Homo sapiens
  CDR3 for alpha chain variable domain of TCR clone 350841 (TRAV1-2, TRAJ20)
CAVANDYKLSF

SEQ ID NO: 701682 - protein, 16 aa, Homo sapiens
  CDR3 for beta chain variable domain of TCR clone 350841 (TRBV13, TRBJ2-2)
CASSEVFGANTGELFF

SEQ ID NO: 701683 - protein, 13 aa, Homo sapiens
  CDR3 for alpha chain variable domain of TCR clone 350842 (TRAV12-1, TRAJ26)
CVVRRNYGQNFVS

SEQ ID NO: 701684 - protein, 17 aa, Homo sapiens
  CDR3 for beta chain variable domain of TCR clone 350842 (TRBV13, TRBJ2-3)
CASSLSRVAGGRNTQYF

SEQ ID NO: 701685 - protein, 17 aa, Homo sapiens
  CDR3 for alpha chain variable domain of TCR clone 350843 (TRAV2, TRAJ22)
ILQVREADAAEQRQLTF

SEQ ID NO: 701686 - protein, 15 aa, Homo sapiens
  CDR3 for beta chain variable domain of TCR clone 350843 (TRBV5-1, TRBJ2-2)
CASSSQGGNTGELFF

SEQ ID NO: 701687 - protein, 15 aa, Homo sapiens
  CDR3 for alpha chain variable domain of TCR clone 350844 (TRAV23/DV6, TRAJ18)
CAASFRGSTRGRLYF

SEQ ID NO: 701688 - protein, 13 aa, Homo sapiens
  CDR3 for beta chain variable domain of TCR clone 350844 (TRBV28, TRBJ2-7)
CAILDRAGGEQYF

SEQ ID NO: 701689 - protein, 15 aa, Homo sapiens
  CDR3 for alpha chain variable domain of TCR clone 350845 (TRAV3, TRAJ29)
CAVRDLYSGNTPLVF

SEQ ID NO: 701690 - protein, 17 aa, Homo sapiens
  CDR3 for beta chain variable domain of TCR clone 350845 (TRBV20-1, TRBJ2-1)
CSARDPLTGVWDNEQFF

SEQ ID NO: 701691 - protein, 12 aa, Homo sapiens
  CDR3 for alpha chain variable domain of TCR clone 350846 (TRAV12-1, TRAJ23)
CVVNIPGGKLIF

SEQ ID NO: 701692 - protein, 15 aa, Homo sapiens
  CDR3 for beta chain variable domain of TCR clone 350846 (TRBV7-2, TRBJ2-7)
CASSLVSSGSYEQYV

SEQ ID NO: 701693 - protein, 13 aa, Homo sapiens
  CDR3 for alpha chain variable domain of TCR clone 350847 (TRAV25, TRAJ30)
CAGRVDRDDKIFF

SEQ ID NO: 701694 - protein, 17 aa, Homo sapiens
  CDR3 for beta chain variable domain of TCR clone 350847 (TRBV7-9, TRBJ2-6)
CASSFGAGYFGANVLTF

SEQ ID NO: 701695 - protein, 12 aa, Homo sapiens
  CDR3 for alpha chain variable domain of TCR clone 350848 (TRAV41, TRAJ58)
CAVETSGSRLTF

SEQ ID NO: 701696 - protein, 12 aa, Homo sapiens
  CDR3 for beta chain variable domain of TCR clone 350848 (TRBV7-8, TRBJ2-7)
CASEGGPHGQYF

SEQ ID NO: 701697 - protein, 12 aa, Homo sapiens
  CDR3 for alpha chain variable domain of TCR clone 350849 (TRAV3, TRAJ43)
CAVRDPNNDMRF

SEQ ID NO: 701698 - protein, 15 aa, Homo sapiens
  CDR3 for beta chain variable domain of TCR clone 350849 (TRBV27, TRBJ1-5)
CASSLGTGFDRPQHF

SEQ ID NO: 701699 - protein, 13 aa, Homo sapiens
  CDR3 for alpha chain variable domain of TCR clone 350850 (TRAV13-1, TRAJ43)
CAASIPNNNDMRF

SEQ ID NO: 701700 - protein, 14 aa, Homo sapiens
  CDR3 for beta chain variable domain of TCR clone 350850 (TRBV7-2, TRBJ1-1)
CASSFLTGTTEAFF

SEQ ID NO: 701701 - protein, 17 aa, Homo sapiens
  CDR3 for alpha chain variable domain of TCR clone 350851 (TRAV1-2, TRAJ8)
CAVRDPDENTGFQKLVF

SEQ ID NO: 701702 - protein, 16 aa, Homo sapiens
  CDR3 for beta chain variable domain of TCR clone 350851 (TRBV7-9, TRBJ2-2)
CASSGFGGANTGEMFF

SEQ ID NO: 701703 - protein, 14 aa, Homo sapiens
  CDR3 for alpha chain variable domain of TCR clone 350852 (TRAV12-2, TRAJ15)
CAPHTGQAGTALIF

SEQ ID NO: 701704 - protein, 17 aa, Homo sapiens
  CDR3 for beta chain variable domain of TCR clone 350852 (TRBV5-5, TRBJ1-2)
CASSLVSLDGQSEGYTF

SEQ ID NO: 701705 - protein, 11 aa, Homo sapiens
  CDR3 for alpha chain variable domain of TCR clone 350853 (TRAV2, TRAJ13)
CASGGYQKVTF

SEQ ID NO: 701706 - protein, 14 aa, Homo sapiens
  CDR3 for beta chain variable domain of TCR clone 350853 (TRBV14, TRBJ2-1)
CASSQVQGRGEQFF

SEQ ID NO: 701707 - protein, 12 aa, Homo sapiens
  CDR3 for alpha chain variable domain of TCR clone 350854 (TRAV12-3, TRAJ17)
CAMTLAGNKLTF

SEQ ID NO: 701708 - protein, 14 aa, Homo sapiens
  CDR3 for beta chain variable domain of TCR clone 350854 (TRBV7-3, TRBJ2-1)
CASSLAGGTNEQFF

SEQ ID NO: 701709 - protein, 13 aa, Homo sapiens
  CDR3 for alpha chain variable domain of TCR clone 350855 (TRAV21, TRAJ27)
CAARPGNAGKSTF

SEQ ID NO: 701710 - protein, 14 aa, Homo sapiens
  CDR3 for beta chain variable domain of TCR clone 350855 (TRBV23-1, TRBJ2-5)
CASSFLRSQETQYF

SEQ ID NO: 701711 - protein, 14 aa, Homo sapiens
  CDR3 for alpha chain variable domain of TCR clone 350856 (TRAV35, TRAJ33)
CAGSSQDSNYQLIW

SEQ ID NO: 701712 - protein, 12 aa, Homo sapiens
  CDR3 for beta chain variable domain of TCR clone 350856 (TRBV5-1, TRBJ1-1)
CASSLTGAEAFF

SEQ ID NO: 701713 - protein, 14 aa, Homo sapiens
  CDR3 for alpha chain variable domain of TCR clone 350857 (TRAV1-2, TRAJ16)
CAVNRFSDCQKLLF

SEQ ID NO: 701714 - protein, 14 aa, Homo sapiens
  CDR3 for beta chain variable domain of TCR clone 350857 (TRBV6-1, TRBJ1-3)
CASVQGGGGNTIYF

SEQ ID NO: 701715 - protein, 13 aa, Homo sapiens
  CDR3 for alpha chain variable domain of TCR clone 350858 (TRAV35, TRAJ42)
CAGFPGSQGNLIF

SEQ ID NO: 701716 - protein, 15 aa, Homo sapiens
  CDR3 for beta chain variable domain of TCR clone 350858 (TRBV13, TRBJ1-2)
CASSLGRQPGYGYTF

SEQ ID NO: 701717 - protein, 14 aa, Homo sapiens
  CDR3 for alpha chain variable domain of TCR clone 350859 (TRAV12-2, TRAJ13)
CAVKKTGGYQKVTF

SEQ ID NO: 701718 - protein, 13 aa, Homo sapiens
  CDR3 for beta chain variable domain of TCR clone 350859 (TRBV12-5, TRBJ2-3)
CASGDRQSDTQYF

SEQ ID NO: 701719 - protein, 11 aa, Homo sapiens
  CDR3 for alpha chain variable domain of TCR clone 350860 (TRAV12-2, TRAJ31)
CAILNNAGLMF

SEQ ID NO: 701720 - protein, 13 aa, Homo sapiens
  CDR3 for beta chain variable domain of TCR clone 350860 (TRBV20-1, TRBJ1-1)
CSARLGQGTEAFF

SEQ ID NO: 701721 - protein, 22 aa, Homo sapiens
  CDR3 for alpha chain variable domain of TCR clone 350861 (TRAV1-1, TRAJ38)
CASNAGNNHIQNPDPAVYQLRD

SEQ ID NO: 701722 - protein, 14 aa, Homo sapiens
  CDR3 for beta chain variable domain of TCR clone 350861 (TRBV15, TRBJ2-1)
CATSGVEDYDEQFF

SEQ ID NO: 701723 - protein, 11 aa, Homo sapiens
  CDR3 for alpha chain variable domain of TCR clone 350862 (TRAV12-2, TRAJ43)
CASPIGNDMRF

SEQ ID NO: 701724 - protein, 14 aa, Homo sapiens
  CDR3 for beta chain variable domain of TCR clone 350862 (TRBV7-2, TRBJ1-1)
CASSFLTGTTEAFF

SEQ ID NO: 701725 - protein, 12 aa, Homo sapiens
  CDR3 for alpha chain variable domain of TCR clone 350863 (TRAV12-3, TRAJ5)
CAMDTCRRALTF

SEQ ID NO: 701726 - protein, 13 aa, Homo sapiens
  CDR3 for beta chain variable domain of TCR clone 350863 (TRBV7-7, TRBJ2-2)
CASSLTSAGELFF

SEQ ID NO: 701727 - protein, 15 aa, Homo sapiens
  CDR3 for alpha chain variable domain of TCR clone 350864 (TRAV25, TRAJ53)
CPTSNSGGSNYKLTF

SEQ ID NO: 701728 - protein, 14 aa, Homo sapiens
  CDR3 for beta chain variable domain of TCR clone 350864 (TRBV19, TRBJ2-1)
CASEVTGARNEQFF

SEQ ID NO: 701729 - protein, 16 aa, Homo sapiens
  CDR3 for alpha chain variable domain of TCR clone 350865 (TRAV36/DV7, TRAJ30)
CAVETYGLDRDDKTIF

SEQ ID NO: 701730 - protein, 15 aa, Homo sapiens
  CDR3 for beta chain variable domain of TCR clone 350865 (TRBV6-6, TRBJ2-5)
CASSYGKIIQETQYF

SEQ ID NO: 701731 - protein, 21 aa, Homo sapiens
  CDR3 for alpha chain variable domain of TCR clone 350866 (TRAV36/DV7, TRAJ39)
TATQTGDSAIYLPNAGNMLTF

SEQ ID NO: 701732 - protein, 11 aa, Homo sapiens
  CDR3 for beta chain variable domain of TCR clone 350866 (TRBV18, TRBJ1-2)
CASSPLNGYTF

SEQ ID NO: 701733 - protein, 15 aa, Homo sapiens
  CDR3 for alpha chain variable domain of TCR clone 350867 (TRAV12-2, TRAJ53)
CAVNGGGGSNYKLTF

SEQ ID NO: 701734 - protein, 15 aa, Homo sapiens
  CDR3 for beta chain variable domain of TCR clone 350867 (TRBV20-1, TRBJ2-7)
CSARDRVSGMDEQYF

SEQ ID NO: 701735 - protein, 15 aa, Homo sapiens
  CDR3 for alpha chain variable domain of TCR clone 350868 (TRAV12-3, TRAJ13)
CAMSARSGGYQQVTF

SEQ ID NO: 701736 - protein, 18 aa, Homo sapiens
  CDR3 for beta chain variable domain of TCR clone 350868 (TRBV3-1, TRBJ2-7)
CASSQEGGGRSWHYEQYF

SEQ ID NO: 701737 - protein, 13 aa, Homo sapiens
  CDR3 for alpha chain variable domain of TCR clone 350869 (TRAV8-6, TRAJ49)
CAVITNTGNQFYF

SEQ ID NO: 701738 - protein, 16 aa, Homo sapiens
  CDR3 for beta chain variable domain of TCR clone 350869 (TRBV12-4, TRBJ2-5)
CASSFFVRGRQETQYF

SEQ ID NO: 701739 - protein, 17 aa, Homo sapiens
  CDR3 for alpha chain variable domain of TCR clone 350870 (TRAV3, TRAJ6)
CAVRDGPRAGGSYRPTF

SEQ ID NO: 701740 - protein, 17 aa, Homo sapiens
  CDR3 for beta chain variable domain of TCR clone 350870 (TRBV7-8, TRBJ2-6)
CASSAGTGGAGANVLTF

SEQ ID NO: 701741 - protein, 14 aa, Homo sapiens
  CDR3 for alpha chain variable domain of TCR clone 350871 (TRAV1-2, TRAJ8)
CDVREDTGFQKLVF

SEQ ID NO: 701742 - protein, 14 aa, Homo sapiens
  CDR3 for beta chain variable domain of TCR clone 350871 (TRBV7-9, TRBJ1-1)
CASSLGGANTEAFF

SEQ ID NO: 701743 - protein, 14 aa, Homo sapiens
  CDR3 for alpha chain variable domain of TCR clone 350872 (TRAV1-2, TRAJ16)
CAVNRFSDGQKLRF

SEQ ID NO: 701744 - protein, 14 aa, Homo sapiens
  CDR3 for beta chain variable domain of TCR clone 350872 (TRBV19, TRBJ2-7)
CASSVDSESYEHYF

SEQ ID NO: 701745 - protein, 15 aa, Homo sapiens
  CDR3 for alpha chain variable domain of TCR clone 350873 (TRAV27, TRAJ38)
CAARRNAGNNRKLIW

SEQ ID NO: 701746 - protein, 14 aa, Homo sapiens
  CDR3 for beta chain variable domain of TCR clone 350873 (TRBV5-1, TRBJ2-7)
CASSFASGVNEQYF

SEQ ID NO: 701747 - protein, 10 aa, Homo sapiens
  CDR3 for alpha chain variable domain of TCR clone 350874 (TRAV26-1, TRAJ22)
CIVSLNFFWF

SEQ ID NO: 701748 - protein, 15 aa, Homo sapiens
  CDR3 for beta chain variable domain of TCR clone 350874 (TRBV7-9, TRBJ1-4)
CASSARTGGNEKLFF

SEQ ID NO: 701749 - protein, 14 aa, Homo sapiens
  CDR3 for alpha chain variable domain of TCR clone 350875 (TRAV38-1, TRAJ45)
CAYYSGGGADGLTF

SEQ ID NO: 701750 - protein, 15 aa, Homo sapiens
  CDR3 for beta chain variable domain of TCR clone 350875 (TRBV11-2, TRBJ2-1)
CASSKNRGLIYEQFS

SEQ ID NO: 701751 - protein, 14 aa, Homo sapiens
  CDR3 for alpha chain variable domain of TCR clone 350876 (TRAV38-1, TRAJ40)
CALRPTSGTYKYIF

SEQ ID NO: 701752 - protein, 14 aa, Homo sapiens
  CDR3 for beta chain variable domain of TCR clone 350876 (TRBV11-2, TRBJ2-5)
CASSRTGGIETQYF

SEQ ID NO: 701753 - protein, 15 aa, Homo sapiens
  CDR3 for alpha chain variable domain of TCR clone 350877 (TRAV38-1, TRAJ57)
CAFMDSQGGSEKLDF

SEQ ID NO: 701754 - protein, 16 aa, Homo sapiens
  CDR3 for beta chain variable domain of TCR clone 350877 (TRBV10-3, TRBJ2-1)
CAIRGGGRGDYNEQFF

SEQ ID NO: 701755 - protein, 14 aa, Homo sapiens
  CDR3 for alpha chain variable domain of TCR clone 350878 (TRAV3, TRAJ22)
CAVRDSGSARQLTF

SEQ ID NO: 701756 - protein, 15 aa, Homo sapiens
  CDR3 for beta chain variable domain of TCR clone 350878 (TRBV11-2, TRBJ2-5)
CASSLASYSGEIQYF

SEQ ID NO: 701757 - protein, 12 aa, Homo sapiens
  CDR3 for alpha chain variable domain of TCR clone 350879 (TRAV26-1, TRAJ48)
CIAVFGNEKLTF

SEQ ID NO: 701758 - protein, 17 aa, Homo sapiens
  CDR3 for beta chain variable domain of TCR clone 350879 (TRBV7-6, TRBJ2-1)
CASSFGLAGGTYNEQFI

SEQ ID NO: 701759 - protein, 16 aa, Homo sapiens
  CDR3 for alpha chain variable domain of TCR clone 350880 (TRAV3, TRAJ18)
CAVRDGRGSTLGRLYF

SEQ ID NO: 701760 - protein, 15 aa, Homo sapiens
  CDR3 for beta chain variable domain of TCR clone 350880 (TRBV7-9, TRBJ1-6)
CASSSPGRGNLPLHF

SEQ ID NO: 701761 - protein, 14 aa, Homo sapiens
  CDR3 for alpha chain variable domain of TCR clone 350881 (TRAV1-2, TRAJ16)
CAVNRFSDGQKLLF

SEQ ID NO: 701762 - protein, 16 aa, Homo sapiens
  CDR3 for beta chain variable domain of TCR clone 350881 (TRBV19, TRBJ2-3)
CASSPGWDRGTDTQYF

SEQ ID NO: 701763 - protein, 14 aa, Homo sapiens
  CDR3 for alpha chain variable domain of TCR clone 350882 (TRAV8-3, TRAJ4)
CAVGAAGGYNKLIF

SEQ ID NO: 701764 - protein, 15 aa, Homo sapiens
  CDR3 for beta chain variable domain of TCR clone 350882 (TRBV6-6, TRBJ1-5)
CASSSIQGTNQPQHF

SEQ ID NO: 701765 - protein, 17 aa, Homo sapiens
  CDR3 for alpha chain variable domain of TCR clone 350883 (TRAV3, TRAJ6)
CAVRDGPRAGGSYIPTF

SEQ ID NO: 701766 - protein, 14 aa, Homo sapiens
  CDR3 for beta chain variable domain of TCR clone 350883 (TRBV7-3, TRBJ2-1)
CASSTSGVWDEQFF

SEQ ID NO: 701767 - protein, 13 aa, Homo sapiens
  CDR3 for alpha chain variable domain of TCR clone 350884 (TRAV23/DV6, TRAJ35)
CAAQLGFGNVLHC

SEQ ID NO: 701768 - protein, 15 aa, Homo sapiens
  CDR3 for beta chain variable domain of TCR clone 350884 (TRBV27, TRBJ2-2)
CASSKPGASTGELFF

SEQ ID NO: 701769 - protein, 18 aa, Homo sapiens
  CDR3 for alpha chain variable domain of TCR clone 350885 (TRAV12-3, TRAJ52)
CAMSVGGAGGTSHGKLTF

SEQ ID NO: 701770 - protein, 15 aa, Homo sapiens
  CDR3 for beta chain variable domain of TCR clone 350885 (TRBV27, TRBJ1-6)
CASSFDRGLGSPLHL

SEQ ID NO: 701771 - protein, 13 aa, Homo sapiens
  CDR3 for alpha chain variable domain of TCR clone 350886 (TRAV12-3, TRAJ40)
CAMSDSETYKYIF

SEQ ID NO: 701772 - protein, 14 aa, Homo sapiens
  CDR3 for beta chain variable domain of TCR clone 350886 (TRBV7-2, TRBJ1-5)
CASSTQGAGQPQHF

SEQ ID NO: 701773 - protein, 15 aa, Homo sapiens
  CDR3 for alpha chain variable domain of TCR clone 350887 (TRAV34, TRAJ38)
CGADFTPGNNRKLIW

SEQ ID NO: 701774 - protein, 13 aa, Homo sapiens
  CDR3 for beta chain variable domain of TCR clone 350887 (TRBV7-9, TRBJ2-3)
CASSPGSTDTQYF

SEQ ID NO: 701775 - protein, 17 aa, Homo sapiens
  CDR3 for alpha chain variable domain of TCR clone 350888 (TRAV3, TRAJ6)
CAVRDGPRAGGSYIPTF

SEQ ID NO: 701776 - protein, 12 aa, Homo sapiens
  CDR3 for beta chain variable domain of TCR clone 350888 (TRBV5-1, TRBJ2-3)
CASSLAADTQYF

SEQ ID NO: 701777 - protein, 12 aa, Homo sapiens
  CDR3 for alpha chain variable domain of TCR clone 350889 (TRAV21, TRAJ29)
CAVTSGNTLLVF

SEQ ID NO: 701778 - protein, 13 aa, Homo sapiens
  CDR3 for beta chain variable domain of TCR clone 350889 (TRBV4-2, TRBJ1-1)
CASSQAGNTEAFF

SEQ ID NO: 701779 - protein, 11 aa, Homo sapiens
  CDR3 for alpha chain variable domain of TCR clone 350890 (TRAV21, TRAJ27)
CAVRMQANQPL

SEQ ID NO: 701780 - protein, 13 aa, Homo sapiens
  CDR3 for beta chain variable domain of TCR clone 350890 (TRBV7-9, TRBJ1-2)
CASSLKQNYGYAF

SEQ ID NO: 701781 - protein, 14 aa, Homo sapiens
  CDR3 for alpha chain variable domain of TCR clone 350891 (TRAV12-1, TRAJ9)
CVVNIYTGGFKTIF

SEQ ID NO: 701782 - protein, 13 aa, Homo sapiens
  CDR3 for beta chain variable domain of TCR clone 350891 (TRBV28, TRBJ2-7)
CASSLGGAYEQYF

SEQ ID NO: 701783 - protein, 14 aa, Homo sapiens
  CDR3 for alpha chain variable domain of TCR clone 350892 (TRAV8-3, TRAJ4)
CAVGASGGYNKLIF

SEQ ID NO: 701784 - protein, 13 aa, Homo sapiens
  CDR3 for beta chain variable domain of TCR clone 350892 (TRBV7-3, TRBJ1-1)
CASSQDWGAEAFF

SEQ ID NO: 701785 - protein, 14 aa, Homo sapiens
  CDR3 for alpha chain variable domain of TCR clone 350893 (TRAV1-2, TRAJ8)
CAVREDTGFQRLVF

SEQ ID NO: 701786 - protein, 14 aa, Homo sapiens
  CDR3 for beta chain variable domain of TCR clone 350893 (TRBV19, TRBJ2-1)
CASPTFVLSGEQFF

SEQ ID NO: 701787 - protein, 14 aa, Homo sapiens
  CDR3 for alpha chain variable domain of TCR clone 350894 (TRAV13-1, TRAJ10)
CAAKEPGVGNKLTF

SEQ ID NO: 701788 - protein, 14 aa, Homo sapiens
  CDR3 for beta chain variable domain of TCR clone 350894 (TRBV6-6, TRBJ2-7)
CASSDSGAGYEQYF

SEQ ID NO: 701789 - protein, 14 aa, Homo sapiens
  CDR3 for alpha chain variable domain of TCR clone 350895 (TRAV1-2, TRAJ15)
CAVRDRQAGTALIF

SEQ ID NO: 701790 - protein, 14 aa, Homo sapiens
  CDR3 for beta chain variable domain of TCR clone 350895 (TRBV4-1, TRBJ2-2)
CASSQAVNTGDLFF

SEQ ID NO: 701791 - protein, 15 aa, Homo sapiens
  CDR3 for alpha chain variable domain of TCR clone 350896 (TRAV29/DV5, TRAJ53)
CAASASGGSNYKLTF

SEQ ID NO: 701792 - protein, 19 aa, Homo sapiens
  CDR3 for beta chain variable domain of TCR clone 350896 (TRBV5-1, TRBJ2-3)
CASSLWLAGGITTTYTQYF

SEQ ID NO: 701793 - protein, 14 aa, Homo sapiens
  CDR3 for alpha chain variable domain of TCR clone 350897 (TRAV12-1, TRAJ9)
CVVNIITGGFKTIF

SEQ ID NO: 701794 - protein, 17 aa, Homo sapiens
  CDR3 for beta chain variable domain of TCR clone 350897 (TRBV9, TRBJ2-1)
CASSVEPTGMARDEKFF

SEQ ID NO: 701795 - protein, 13 aa, Homo sapiens
  CDR3 for alpha chain variable domain of TCR clone 350898 (TRAV36/DV7, TRAJ49)
CAVEAHTGNQFYF

SEQ ID NO: 701796 - protein, 13 aa, Homo sapiens
  CDR3 for beta chain variable domain of TCR clone 350898 (TRBV10-3, TRBJ2-7)
CASKLAVNYEQYF

SEQ ID NO: 701797 - protein, 12 aa, Homo sapiens
  CDR3 for alpha chain variable domain of TCR clone 350899 (TRAV1-2, TRAJ9)
CAGYTGGFETIF

SEQ ID NO: 701798 - protein, 15 aa, Homo sapiens
  CDR3 for beta chain variable domain of TCR clone 350899 (TRBV11-2, TRBJ2-1)
CASSPAGQSLNEQFF

SEQ ID NO: 701799 - protein, 13 aa, Homo sapiens
  CDR3 for alpha chain variable domain of TCR clone 350900 (TRAV2, TRAJ40)
CAVVTSGTYKHIF

SEQ ID NO: 701800 - protein, 14 aa, Homo sapiens
  CDR3 for beta chain variable domain of TCR clone 350900 (TRBV7-2, TRBJ2-7)
CASSPKTSFYEQYF

SEQ ID NO: 701801 - protein, 14 aa, Homo sapiens
  CDR3 for alpha chain variable domain of TCR clone 350901 (TRAV17, TRAJ34)
CATDSLEGTDKLIF

SEQ ID NO: 701802 - protein, 22 aa, Homo sapiens
  CDR3 for beta chain variable domain of TCR clone 350901 (TRBV7-2, TRBJ1-4)
CASSFDPYSKTVFWQWNPALCL

SEQ ID NO: 701803 - protein, 14 aa, Homo sapiens
  CDR3 for alpha chain variable domain of TCR clone 350902 (TRAV17, TRAJ12)
WAILPMDSSYKLIF

SEQ ID NO: 701804 - protein, 15 aa, Homo sapiens
  CDR3 for beta chain variable domain of TCR clone 350902 (TRBV5-1, TRBJ1-1)
CASSLGEGENTEAFF

SEQ ID NO: 701805 - protein, 14 aa, Homo sapiens
  CDR3 for alpha chain variable domain of TCR clone 350903 (TRAV34, TRAJ44)
CGADGTGTASKLTF

SEQ ID NO: 701806 - protein, 17 aa, Homo sapiens
  CDR3 for beta chain variable domain of TCR clone 350903 (TRBV13, TRBJ2-3)
CASSLSRVAGGRNTQYF

SEQ ID NO: 701807 - protein, 10 aa, Homo sapiens
  CDR3 for alpha chain variable domain of TCR clone 350904 (TRAV25, TRAJ32)
CAVNDYKLIF

SEQ ID NO: 701808 - protein, 17 aa, Homo sapiens
  CDR3 for beta chain variable domain of TCR clone 350904 (TRBV5-4, TRBJ2-1)
CASSSAGGRGPYNEQFF

SEQ ID NO: 701809 - protein, 14 aa, Homo sapiens
  CDR3 for alpha chain variable domain of TCR clone 350905 (TRAV12-2, TRAJ29)
CAVRRNSGNTPLVF

SEQ ID NO: 701810 - protein, 14 aa, Homo sapiens
  CDR3 for beta chain variable domain of TCR clone 350905 (TRBV23-1, TRBJ2-7)
CASSQWGQNYEQYF

SEQ ID NO: 701811 - protein, 15 aa, Homo sapiens
  CDR3 for alpha chain variable domain of TCR clone 350906 (TRAV26-1, TRAJ37)
CIVKTGSSNTGKPVF

SEQ ID NO: 701812 - protein, 12 aa, Homo sapiens
  CDR3 for beta chain variable domain of TCR clone 350906 (TRBV7-8, TRBJ2-7)
CASSLGDREQYF

SEQ ID NO: 701813 - protein, 13 aa, Homo sapiens
  CDR3 for alpha chain variable domain of TCR clone 350907 (TRAV3, TRAJ20)
CAVRPLNDYKLSF

SEQ ID NO: 701814 - protein, 14 aa, Homo sapiens
  CDR3 for beta chain variable domain of TCR clone 350907 (TRBV11-2, TRBJ1-2)
YASSLYRGNYGYTF

SEQ ID NO: 701815 - protein, 12 aa, Homo sapiens
  CDR3 for alpha chain variable domain of TCR clone 350908 (TRAV8-3, TRAJ32)
CCGGGATNELIF

SEQ ID NO: 701816 - protein, 15 aa, Homo sapiens
  CDR3 for beta chain variable domain of TCR clone 350908 (TRBV7-2, TRBJ2-1)
CASSSRTSREDEQFF

SEQ ID NO: 701817 - protein, 14 aa, Homo sapiens
  CDR3 for alpha chain variable domain of TCR clone 350909 (TRAV14/DV4, TRAJ34)
CAMRGHYNTDKLIF

SEQ ID NO: 701818 - protein, 14 aa, Homo sapiens
  CDR3 for beta chain variable domain of TCR clone 350909 (TRBV10-2, TRBJ1-5)
CASSSTGRNQPQHF

SEQ ID NO: 701819 - protein, 13 aa, Homo sapiens
  CDR3 for alpha chain variable domain of TCR clone 350910 (TRAV13-2, TRAJ13)
CAERPGGYQKVTF

SEQ ID NO: 701820 - protein, 15 aa, Homo sapiens
  CDR3 for beta chain variable domain of TCR clone 350910 (TRBV19, TRBJ2-7)
CASSPAGSGEALRYF

SEQ ID NO: 701821 - protein, 14 aa, Homo sapiens
  CDR3 for alpha chain variable domain of TCR clone 350911 (TRAV12-2, TRAJ3)
CAVSLYSSASKIIF

SEQ ID NO: 701822 - protein, 16 aa, Homo sapiens
  CDR3 for beta chain variable domain of TCR clone 350911 (TRBV4-3, TRBJ2-7)
CASSPRTSGRSYEQYF

SEQ ID NO: 701823 - protein, 13 aa, Homo sapiens
  CDR3 for alpha chain variable domain of TCR clone 350912 (TRAV26-1, )
CIVSHRVQGFWNQ

SEQ ID NO: 701824 - protein, 14 aa, Homo sapiens
  CDR3 for beta chain variable domain of TCR clone 350912 (TRBV20-1, TRBJ2-7)
CSAWTALSSYEQYF

SEQ ID NO: 701825 - protein, 13 aa, Homo sapiens
  CDR3 for alpha chain variable domain of TCR clone 350913 (TRAV3, TRAJ27)
CAVRPLGAGKSTF

SEQ ID NO: 701826 - protein, 16 aa, Homo sapiens
  CDR3 for beta chain variable domain of TCR clone 350913 (TRBV2, TRBJ2-1)
CASRSPAGGKYNEQFF

SEQ ID NO: 701827 - protein, 17 aa, Homo sapiens
  CDR3 for alpha chain variable domain of TCR clone 350914 (TRAV26-1, TRAJ47)
CIVPSLLYMEYGNKLVF

SEQ ID NO: 701828 - protein, 14 aa, Homo sapiens
  CDR3 for beta chain variable domain of TCR clone 350914 (TRBV7-3, TRBJ1-5)
RASSFSGCNQPQHF

SEQ ID NO: 701829 - protein, 13 aa, Homo sapiens
  CDR3 for alpha chain variable domain of TCR clone 350915 (TRAV26-1, TRAJ36)
CIVVGTGANNLLF

SEQ ID NO: 701830 - protein, 13 aa, Homo sapiens
  CDR3 for beta chain variable domain of TCR clone 350915 (TRBV6-5, TRBJ2-6)
CASSTSGPRRLDF

SEQ ID NO: 701831 - protein, 10 aa, Homo sapiens
  CDR3 for alpha chain variable domain of TCR clone 350916 (TRAV8-4, TRAJ43)
CAVSADDMRF

SEQ ID NO: 701832 - protein, 12 aa, Homo sapiens
  CDR3 for beta chain variable domain of TCR clone 350916 (TRBV11-2, TRBJ2-1)
CASSPGNNEQFF

SEQ ID NO: 701833 - protein, 14 aa, Homo sapiens
  CDR3 for alpha chain variable domain of TCR clone 350917 (TRAV13-2, TRAJ24)
FVQRTTDSWGKLQF

SEQ ID NO: 701834 - protein, 13 aa, Homo sapiens
  CDR3 for beta chain variable domain of TCR clone 350917 (TRBV29-1, TRBJ2-1)
CSVEGGRVNEQFF

SEQ ID NO: 701835 - protein, 15 aa, Homo sapiens
  CDR3 for alpha chain variable domain of TCR clone 350918 (TRAV8-1, TRAJ37)
CAVKKGSGNTGKPIF

SEQ ID NO: 701836 - protein, 13 aa, Homo sapiens
  CDR3 for beta chain variable domain of TCR clone 350918 (TRBV12-4, TRBJ1-5)
CASSPDRAQTQHF

SEQ ID NO: 701837 - protein, 15 aa, Homo sapiens
  CDR3 for alpha chain variable domain of TCR clone 350919 (TRAV3, TRAJ22)
CAVRDRGGFARQPTF

SEQ ID NO: 701838 - protein, 14 aa, Homo sapiens
  CDR3 for beta chain variable domain of TCR clone 350919 (TRBV19, TRBJ1-5)
CASSLGLIGQPQHF

SEQ ID NO: 701839 - protein, 13 aa, Homo sapiens
  CDR3 for alpha chain variable domain of TCR clone 350920 (TRAV12-2, TRAJ20)
CAVYPSNDYKLSF

SEQ ID NO: 701840 - protein, 14 aa, Homo sapiens
  CDR3 for beta chain variable domain of TCR clone 350920 (TRBV7-2, TRBJ2-1)
CASSLGVGYNEQFF

SEQ ID NO: 701841 - protein, 17 aa, Homo sapiens
  CDR3 for alpha chain variable domain of TCR clone 350921 (TRAV35, TRAJ28)
CAGLQVYSGAGSYQLTF

SEQ ID NO: 701842 - protein, 15 aa, Homo sapiens
  CDR3 for beta chain variable domain of TCR clone 350921 (TRBV2, TRBJ1-2)
CASSEIGGANYGHTF

SEQ ID NO: 701843 - protein, 14 aa, Homo sapiens
  CDR3 for alpha chain variable domain of TCR clone 350922 (TRAV12-1, TRAJ12)
CVVTSGDSSYKLIF

SEQ ID NO: 701844 - protein, 15 aa, Homo sapiens
  CDR3 for beta chain variable domain of TCR clone 350922 (TRBV7-3, TRBJ2-1)
CASSPTGGGEVEQFF

SEQ ID NO: 701845 - protein, 13 aa, Homo sapiens
  CDR3 for alpha chain variable domain of TCR clone 350923 (TRAV3, TRAJ21)
CAVREPDLNKFYF

SEQ ID NO: 701846 - protein, 13 aa, Homo sapiens
  CDR3 for beta chain variable domain of TCR clone 350923 (TRBV9, TRBJ2-1)
CASSPSGGNGQFF

SEQ ID NO: 701847 - protein, 14 aa, Homo sapiens
  CDR3 for alpha chain variable domain of TCR clone 350924 (TRAV1-2, TRAJ16)
SAVNRFSDGQKLLF

SEQ ID NO: 701848 - protein, 14 aa, Homo sapiens
  CDR3 for beta chain variable domain of TCR clone 350924 (TRBV23-1, TRBJ2-5)
CASSFLRSQETQYF

SEQ ID NO: 701849 - protein, 14 aa, Homo sapiens
  CDR3 for alpha chain variable domain of TCR clone 350925 (TRAV12-2, TRAJ13)
CAVKKTGGYQKLTF

SEQ ID NO: 701850 - protein, 15 aa, Homo sapiens
  CDR3 for beta chain variable domain of TCR clone 350925 (TRBV20-1, TRBJ2-7)
CSARDRVSGMDEQYF

SEQ ID NO: 701851 - protein, 12 aa, Homo sapiens
  CDR3 for alpha chain variable domain of TCR clone 350926 (TRAV13-1, TRAJ27)
CAAHTNAGKSTF

SEQ ID NO: 701852 - protein, 14 aa, Homo sapiens
  CDR3 for beta chain variable domain of TCR clone 350926 (TRBV19, TRBJ2-2)
CASIGQGIAGELFF

SEQ ID NO: 701853 - protein, 13 aa, Homo sapiens
  CDR3 for alpha chain variable domain of TCR clone 350927 (TRAV26-1, TRAJ29)
CIVRRSGNTPLVF

SEQ ID NO: 701854 - protein, 13 aa, Homo sapiens
  CDR3 for beta chain variable domain of TCR clone 350927 (TRBV11-3, TRBJ1-1)
CATEEGLNTEAFF

SEQ ID NO: 701855 - protein, 14 aa, Homo sapiens
  CDR3 for alpha chain variable domain of TCR clone 350928 (TRAV12-3, TRAJ21)
CAATDLYNVNKFYF

SEQ ID NO: 701856 - protein, 13 aa, Homo sapiens
  CDR3 for beta chain variable domain of TCR clone 350928 (TRBV19, TRBJ2-2)
CASSSKNTGELFF

SEQ ID NO: 701857 - protein, 17 aa, Homo sapiens
  CDR3 for alpha chain variable domain of TCR clone 350929 (TRAV3, TRAJ6)
CAARDGPRAGGSYILTF

SEQ ID NO: 701858 - protein, 14 aa, Homo sapiens
  CDR3 for beta chain variable domain of TCR clone 350929 (TRBV7-2, TRBJ2-7)
CASSPKTSFYEQYF

SEQ ID NO: 701859 - protein, 15 aa, Homo sapiens
  CDR3 for alpha chain variable domain of TCR clone 350930 (TRAV17, TRAJ35)
CATAFVIGFRNVLHC

SEQ ID NO: 701860 - protein, 16 aa, Homo sapiens
  CDR3 for beta chain variable domain of TCR clone 350930 (TRBV11-2, TRBJ2-7)
CASSPLAGGPRYEQYF

SEQ ID NO: 701861 - protein, 14 aa, Homo sapiens
  CDR3 for alpha chain variable domain of TCR clone 350931 (TRAV26-1, TRAJ48)
CIVRVGFGNEKLTF

SEQ ID NO: 701862 - protein, 13 aa, Homo sapiens
  CDR3 for beta chain variable domain of TCR clone 350931 (TRBV11-3, TRBJ2-3)
CASSHDTKDTQYC

SEQ ID NO: 701863 - protein, 12 aa, Homo sapiens
  CDR3 for alpha chain variable domain of TCR clone 350932 (TRAV3, TRAJ31)
CAVRPRGPRLMF

SEQ ID NO: 701864 - protein, 17 aa, Homo sapiens
  CDR3 for beta chain variable domain of TCR clone 350932 (TRBV7-3, TRBJ2-3)
CAGSLMKRMRGADTQYF

SEQ ID NO: 701865 - protein, 14 aa, Homo sapiens
  CDR3 for alpha chain variable domain of TCR clone 350933 (TRAV1-2, TRAJ16)
CAVNRFSDGQKLLF

SEQ ID NO: 701866 - protein, 16 aa, Homo sapiens
  CDR3 for beta chain variable domain of TCR clone 350933 (TRBV19, TRBJ2-6)
CASSMSGLSGANVLTF

SEQ ID NO: 701867 - protein, 14 aa, Homo sapiens
  CDR3 for alpha chain variable domain of TCR clone 350934 (TRAV13-2, TRAJ26)
CAENLGNYGQNFVF

SEQ ID NO: 701868 - protein, 11 aa, Homo sapiens
  CDR3 for beta chain variable domain of TCR clone 350934 (TRBV12-4, TRBJ2-2)
CASSSAGELFF

SEQ ID NO: 701869 - protein, 14 aa, Homo sapiens
  CDR3 for alpha chain variable domain of TCR clone 350935 (TRAV1-2, TRAJ16)
CAVNRLSDGQKLLF

SEQ ID NO: 701870 - protein, 13 aa, Homo sapiens
  CDR3 for beta chain variable domain of TCR clone 350935 (TRBV7-2, TRBJ2-5)
CASSQTSVETQYF

SEQ ID NO: 701871 - protein, 12 aa, Homo sapiens
  CDR3 for alpha chain variable domain of TCR clone 350936 (TRAV17, TRAJ20)
CATALNDYKLSF

SEQ ID NO: 701872 - protein, 13 aa, Homo sapiens
  CDR3 for beta chain variable domain of TCR clone 350936 (TRBV10-3, TRBJ2-7)
CASKLAVNYEQYF

SEQ ID NO: 701873 - protein, 17 aa, Homo sapiens
  CDR3 for alpha chain variable domain of TCR clone 350937 (TRAV3, TRAJ6)
CAVRDGPRAGGSYIPTF

SEQ ID NO: 701874 - protein, 11 aa, Homo sapiens
  CDR3 for beta chain variable domain of TCR clone 350937 (TRBV19, TRBJ2-2)
CASRYSGELFF

SEQ ID NO: 701875 - protein, 11 aa, Homo sapiens
  CDR3 for alpha chain variable domain of TCR clone 350938 (TRAV21, TRAJ9)
CAVPGGFKTIF

SEQ ID NO: 701876 - protein, 13 aa, Homo sapiens
  CDR3 for beta chain variable domain of TCR clone 350938 (TRBV27, TRBJ2-7)
CASSFGDSHEQYF

SEQ ID NO: 701877 - protein, 16 aa, Homo sapiens
  CDR3 for alpha chain variable domain of TCR clone 350939 (TRAV17, TRAJ52)
CATDGAGGTSYGKLTF

SEQ ID NO: 701878 - protein, 16 aa, Homo sapiens
  CDR3 for beta chain variable domain of TCR clone 350939 (TRBV15, TRBJ2-1)
CATSRERLAGAYEQFF

SEQ ID NO: 701879 - protein, 11 aa, Homo sapiens
  CDR3 for alpha chain variable domain of TCR clone 350940 (TRAV4, TRAJ28)
CLVGDNRAETL

SEQ ID NO: 701880 - protein, 13 aa, Homo sapiens
  CDR3 for beta chain variable domain of TCR clone 350940 (TRBV20-1, TRBJ2-7)
CSATRTSGYEQYF

SEQ ID NO: 701881 - protein, 14 aa, Homo sapiens
  CDR3 for alpha chain variable domain of TCR clone 350941 (TRAV9-2, TRAJ39)
CALYIYNSGNMLTF

SEQ ID NO: 701882 - protein, 14 aa, Homo sapiens
  CDR3 for beta chain variable domain of TCR clone 350941 (TRBV7-9, TRBJ2-1)
CASSPRDSLYEQFF

SEQ ID NO: 701883 - protein, 23 aa, Homo sapiens
  CDR3 for alpha chain variable domain of TCR clone 350942 (TRAV8-3, )
CALVTTRIPDIQNPDPAVYQLRD

SEQ ID NO: 701884 - protein, 14 aa, Homo sapiens
  CDR3 for beta chain variable domain of TCR clone 350942 (TRBV11-2, TRBJ2-7)
CASSPSTTSYEQYF

SEQ ID NO: 701885 - protein, 15 aa, Homo sapiens
  CDR3 for alpha chain variable domain of TCR clone 350943 (TRAV8-4, TRAJ40)
CAVSDDASGTYKYIF

SEQ ID NO: 701886 - protein, 11 aa, Homo sapiens
  CDR3 for beta chain variable domain of TCR clone 350943 (TRBV19, TRBJ1-2)
CASSISSGYTF

SEQ ID NO: 701887 - protein, 16 aa, Homo sapiens
  CDR3 for alpha chain variable domain of TCR clone 350944 (TRAV30, TRAJ24)
CGTEIVDAYSWGKFQF

SEQ ID NO: 701888 - protein, 17 aa, Homo sapiens
  CDR3 for beta chain variable domain of TCR clone 350944 (TRBV20-1, TRBJ2-1)
CSAPPRLAGTRYNEQFF

SEQ ID NO: 701889 - protein, 13 aa, Homo sapiens
  CDR3 for alpha chain variable domain of TCR clone 350945 (TRAV27, TRAJ3)
ASLRGSSASKIIF

SEQ ID NO: 701890 - protein, 14 aa, Homo sapiens
  CDR3 for beta chain variable domain of TCR clone 350945 (TRBV19, TRBJ2-5)
CASSSSGIQETQYF

SEQ ID NO: 701891 - protein, 15 aa, Homo sapiens
  CDR3 for alpha chain variable domain of TCR clone 350946 (TRAV8-4, TRAJ36)
CAVRKSWTGANNLFF

SEQ ID NO: 701892 - protein, 15 aa, Homo sapiens
  CDR3 for beta chain variable domain of TCR clone 350946 (TRBV7-9, TRBJ2-7)
CASSFGTSGAYEQYF

SEQ ID NO: 701893 - protein, 16 aa, Homo sapiens
  CDR3 for alpha chain variable domain of TCR clone 350947 (TRAV1-2, TRAJ10)
CAVRGALAGGGNKLTF

SEQ ID NO: 701894 - protein, 12 aa, Homo sapiens
  CDR3 for beta chain variable domain of TCR clone 350947 (TRBV7-8, TRBJ2-7)
CARSLGDREQYF

SEQ ID NO: 701895 - protein, 18 aa, Homo sapiens
  CDR3 for alpha chain variable domain of TCR clone 350948 (TRAV21, TRAJ52)
CAVRPSSAGGTSYGKLTF

SEQ ID NO: 701896 - protein, 13 aa, Homo sapiens
  CDR3 for beta chain variable domain of TCR clone 350948 (TRBV7-3, TRBJ1-1)
RASSQDWGAEAFF

SEQ ID NO: 701897 - protein, 14 aa, Homo sapiens
  CDR3 for alpha chain variable domain of TCR clone 350949 (TRAV12-2, TRAJ33)
CAVDYPDSNYQLIW

SEQ ID NO: 701898 - protein, 15 aa, Homo sapiens
  CDR3 for beta chain variable domain of TCR clone 350949 (TRBV20-1, TRBJ2-7)
CSARDQVSGMDEQYF

SEQ ID NO: 701899 - protein, 12 aa, Homo sapiens
  CDR3 for alpha chain variable domain of TCR clone 350950 (TRAV21, TRAJ49)
CAVNDGGNQFYF

SEQ ID NO: 701900 - protein, 14 aa, Homo sapiens
  CDR3 for beta chain variable domain of TCR clone 350950 (TRBV27, TRBJ1-1)
CASSLLSGLSEAFF

SEQ ID NO: 701901 - protein, 15 aa, Homo sapiens
  CDR3 for alpha chain variable domain of TCR clone 350951 (TRAV21, TRAJ24)
CAARSSTDSWGKLQF

SEQ ID NO: 701902 - protein, 15 aa, Homo sapiens
  CDR3 for beta chain variable domain of TCR clone 350951 (TRBV6-3, TRBJ2-3)
RLIHYSVGQADTQYF

SEQ ID NO: 701903 - protein, 14 aa, Homo sapiens
  CDR3 for alpha chain variable domain of TCR clone 350952 (TRAV12-2, TRAJ6)
CAVVASGGSYIPTF

SEQ ID NO: 701904 - protein, 16 aa, Homo sapiens
  CDR3 for beta chain variable domain of TCR clone 350952 (TRBV9, TRBJ2-2)
CASSTGLAGETGELFF

SEQ ID NO: 701905 - protein, 16 aa, Homo sapiens
  CDR3 for alpha chain variable domain of TCR clone 350953 (TRAV8-6, TRAJ28)
CAVTSKPGAGSYQLTF

SEQ ID NO: 701906 - protein, 16 aa, Homo sapiens
  CDR3 for beta chain variable domain of TCR clone 350953 (TRBV2, TRBJ2-1)
CASSVGGSLSYNEQFF

SEQ ID NO: 701907 - protein, 15 aa, Homo sapiens
  CDR3 for alpha chain variable domain of TCR clone 350954 (TRAV12-3, TRAJ8)
CAMSLLNTGFQKLVF

SEQ ID NO: 701908 - protein, 23 aa, Homo sapiens
  CDR3 for beta chain variable domain of TCR clone 350954 (TRBV7-3, TRBJ1-6)
CASSLTSRDEASDPSSYNSPLHF

SEQ ID NO: 701909 - protein, 16 aa, Homo sapiens
  CDR3 for alpha chain variable domain of TCR clone 350955 (TRAV8-3, TRAJ13)
CAVGAYPSGGYQKVTF

SEQ ID NO: 701910 - protein, 14 aa, Homo sapiens
  CDR3 for beta chain variable domain of TCR clone 350955 (TRBV7-2, TRBJ2-7)
CASSLRWEVNEQYF

SEQ ID NO: 701911 - protein, 15 aa, Homo sapiens
  CDR3 for alpha chain variable domain of TCR clone 350956 (TRAV8-4, TRAJ49)
CAVRDKLNTGNQFYF

SEQ ID NO: 701912 - protein, 14 aa, Homo sapiens
  CDR3 for beta chain variable domain of TCR clone 350956 (TRBV19, TRBJ1-1)
CASRRGQGNTEAFF

SEQ ID NO: 701913 - protein, 13 aa, Homo sapiens
  CDR3 for alpha chain variable domain of TCR clone 350957 (TRAV20, TRAJ34)
CAVSSYNTDKRIF

SEQ ID NO: 701914 - protein, 15 aa, Homo sapiens
  CDR3 for beta chain variable domain of TCR clone 350957 (TRBV20-1, TRBJ1-2)
CSAAGEGARIYGYTF

SEQ ID NO: 701915 - protein, 18 aa, Homo sapiens
  CDR3 for alpha chain variable domain of TCR clone 350958 (TRAV12-3, TRAJ52)
CAMSVGGAGGTSYGNLTF

SEQ ID NO: 701916 - protein, 14 aa, Homo sapiens
  CDR3 for beta chain variable domain of TCR clone 350958 (TRBV6-1, TRBJ1-3)
CASVQGGGGNTIYF

SEQ ID NO: 701917 - protein, 11 aa, Homo sapiens
  CDR3 for alpha chain variable domain of TCR clone 350959 (TRAV12-2, TRAJ23)
CARGRGGRLIF

SEQ ID NO: 701918 - protein, 14 aa, Homo sapiens
  CDR3 for beta chain variable domain of TCR clone 350959 (TRBV28, TRBJ2-5)
CASSLGDRAETQYF

SEQ ID NO: 701919 - protein, 20 aa, Homo sapiens
  CDR3 for alpha chain variable domain of TCR clone 350960 (TRAV26-1, TRAJ42)
CCVLCHRQTYYGGSQGNLIF

SEQ ID NO: 701920 - protein, 16 aa, Homo sapiens
  CDR3 for beta chain variable domain of TCR clone 350960 (TRBV7-3, TRBJ2-2)
CASSLKRGTLSGELFF

SEQ ID NO: 701921 - protein, 13 aa, Homo sapiens
  CDR3 for alpha chain variable domain of TCR clone 350961 (TRAV16, TRAJ27)
CALRRTDAGKSTF

SEQ ID NO: 701922 - protein, 15 aa, Homo sapiens
  CDR3 for beta chain variable domain of TCR clone 350961 (TRBV18, TRBJ2-1)
CASSPPSASYNEQFF

SEQ ID NO: 701923 - protein, 16 aa, Homo sapiens
  CDR3 for alpha chain variable domain of TCR clone 350962 (TRAV27, TRAJ53)
CADPEGSGGGNYKLTF

SEQ ID NO: 701924 - protein, 14 aa, Homo sapiens
  CDR3 for beta chain variable domain of TCR clone 350962 (TRBV4-3, TRBJ1-5)
CASSQGGQGWPQHF

SEQ ID NO: 701925 - protein, 15 aa, Homo sapiens
  CDR3 for alpha chain variable domain of TCR clone 350963 (TRAV12-1, TRAJ41)
CVVNGAANSGYALNF

SEQ ID NO: 701926 - protein, 15 aa, Homo sapiens
  CDR3 for beta chain variable domain of TCR clone 350963 (TRBV7-2, TRBJ1-5)
CASSSTGVDNQPQHF

SEQ ID NO: 701927 - protein, 15 aa, Homo sapiens
  CDR3 for alpha chain variable domain of TCR clone 350964 (TRAV2, TRAJ22)
CAVPSRGGSARQLTF

SEQ ID NO: 701928 - protein, 16 aa, Homo sapiens
  CDR3 for beta chain variable domain of TCR clone 350964 (TRBV12-4, TRBJ1-5)
CASSRPVGGSNQHQHF

SEQ ID NO: 701929 - protein, 13 aa, Homo sapiens
  CDR3 for alpha chain variable domain of TCR clone 350965 (TRAV20, TRAJ31)
CAVQAWNNARLMF

SEQ ID NO: 701930 - protein, 14 aa, Homo sapiens
  CDR3 for beta chain variable domain of TCR clone 350965 (TRBV19, TRBJ2-1)
CASPTFVLSGEQFF

SEQ ID NO: 701931 - protein, 16 aa, Homo sapiens
  CDR3 for alpha chain variable domain of TCR clone 350966 (TRAV30, TRAJ24)
CGTEIVDADSWGKFQF

SEQ ID NO: 701932 - protein, 13 aa, Homo sapiens
  CDR3 for beta chain variable domain of TCR clone 350966 (TRBV15, TRBJ2-5)
CATSQIGEETQYF

SEQ ID NO: 701933 - protein, 11 aa, Homo sapiens
  CDR3 for alpha chain variable domain of TCR clone 350967 (TRAV39, TRAJ49)
CAVDISTQFYF

SEQ ID NO: 701934 - protein, 11 aa, Homo sapiens
  CDR3 for beta chain variable domain of TCR clone 350967 (TRBV7-8, TRBJ2-7)
RAGSLSLEQYF

SEQ ID NO: 701935 - protein, 15 aa, Homo sapiens
  CDR3 for alpha chain variable domain of TCR clone 350968 (TRAV23/DV6, TRAJ13)
CAAWPGGGGYQKVTF

SEQ ID NO: 701936 - protein, 17 aa, Homo sapiens
  CDR3 for beta chain variable domain of TCR clone 350968 (TRBV19, TRBJ2-7)
CASSISFYDSYTYEQYF

SEQ ID NO: 701937 - protein, 14 aa, Homo sapiens
  CDR3 for alpha chain variable domain of TCR clone 350969 (TRAV12-2, TRAJ13)
CAVKKTGGYQKVTF

SEQ ID NO: 701938 - protein, 15 aa, Homo sapiens
  CDR3 for beta chain variable domain of TCR clone 350969 (TRBV3-1, TRBJ2-7)
CASSQVRQGAYEQHF

SEQ ID NO: 701939 - protein, 14 aa, Homo sapiens
  CDR3 for alpha chain variable domain of TCR clone 350970 (TRAV12-2, TRAJ45)
CAVNKGGGADGLTF

SEQ ID NO: 701940 - protein, 17 aa, Homo sapiens
  CDR3 for beta chain variable domain of TCR clone 350970 (TRBV13, TRBJ2-3)
CASSLSRVAGGRNTQYF

SEQ ID NO: 701941 - protein, 14 aa, Homo sapiens
  CDR3 for alpha chain variable domain of TCR clone 350971 (TRAV8-4, TRAJ16)
CAVSPVGRWPETAL

SEQ ID NO: 701942 - protein, 15 aa, Homo sapiens
  CDR3 for beta chain variable domain of TCR clone 350971 (TRBV7-3, TRBJ1-6)
CASSLGRGAGSPLHF

SEQ ID NO: 701943 - protein, 14 aa, Homo sapiens
  CDR3 for alpha chain variable domain of TCR clone 350972 (TRAV12-2, TRAJ13)
CAVKKTGGYQKVTF

SEQ ID NO: 701944 - protein, 15 aa, Homo sapiens
  CDR3 for beta chain variable domain of TCR clone 350972 (TRBV5-1, TRBJ2-1)
CASSPPRAPYNEQFY

SEQ ID NO: 701945 - protein, 16 aa, Homo sapiens
  CDR3 for alpha chain variable domain of TCR clone 350973 (TRAV14/DV4, TRAJ53)
CAMREGGGGSNYKLTF

SEQ ID NO: 701946 - protein, 14 aa, Homo sapiens
  CDR3 for beta chain variable domain of TCR clone 350973 (TRBV4-2, TRBJ1-4)
CASSQGATNEKLFF

SEQ ID NO: 701947 - protein, 13 aa, Homo sapiens
  CDR3 for alpha chain variable domain of TCR clone 350974 (TRAV12-2, TRAJ42)
CAGKRGSQGNLIF

SEQ ID NO: 701948 - protein, 18 aa, Homo sapiens
  CDR3 for beta chain variable domain of TCR clone 350974 (TRBV11-2, TRBJ2-3)
CASSLGGASRGAPNTQYF

SEQ ID NO: 701949 - protein, 14 aa, Homo sapiens
  CDR3 for alpha chain variable domain of TCR clone 350975 (TRAV34, TRAJ22)
CGADTSGSARQLTF

SEQ ID NO: 701950 - protein, 16 aa, Homo sapiens
  CDR3 for beta chain variable domain of TCR clone 350975 (TRBV19, TRBJ2-3)
CASSPGLAGLTDTQYF

SEQ ID NO: 701951 - protein, 11 aa, Homo sapiens
  CDR3 for alpha chain variable domain of TCR clone 350976 (TRAV3, TRAJ31)
CAVRPDARLMF

SEQ ID NO: 701952 - protein, 15 aa, Homo sapiens
  CDR3 for beta chain variable domain of TCR clone 350976 (TRBV5-7, TRBJ2-2)
CASSLASSNTGELFF

SEQ ID NO: 701953 - protein, 10 aa, Homo sapiens
  CDR3 for alpha chain variable domain of TCR clone 350977 (TRAV12-2, TRAJ52)
RSTSYGKLTF

SEQ ID NO: 701954 - protein, 11 aa, Homo sapiens
  CDR3 for beta chain variable domain of TCR clone 350977 (TRBV11-3, TRBJ2-2)
CASGLPGELFF

SEQ ID NO: 701955 - protein, 13 aa, Homo sapiens
  CDR3 for alpha chain variable domain of TCR clone 350978 (TRAV2, TRAJ9)
CAVESTGGFKTIF

SEQ ID NO: 701956 - protein, 15 aa, Homo sapiens
  CDR3 for beta chain variable domain of TCR clone 350978 (TRBV10-3, TRBJ2-1)
CAITFGGGTENEQFF

SEQ ID NO: 701957 - protein, 16 aa, Homo sapiens
  CDR3 for alpha chain variable domain of TCR clone 350979 (TRAV3, TRAJ3)
CAVRDRAKSSASKISF

SEQ ID NO: 701958 - protein, 13 aa, Homo sapiens
  CDR3 for beta chain variable domain of TCR clone 350979 (TRBV10-3, TRBJ2-7)
CASKLAVNYEQYF

SEQ ID NO: 701959 - protein, 14 aa, Homo sapiens
  CDR3 for alpha chain variable domain of TCR clone 350980 (TRAV2, TRAJ9)
CAVEDRSGGFKTIF

SEQ ID NO: 701960 - protein, 13 aa, Homo sapiens
  CDR3 for beta chain variable domain of TCR clone 350980 (TRBV10-3, TRBJ1-2)
CAINADLNYGYTF

SEQ ID NO: 701961 - protein, 15 aa, Homo sapiens
  CDR3 for alpha chain variable domain of TCR clone 350981 (TRAV14/DV4, TRAJ33)
CAMRERRDSNYQLIW

SEQ ID NO: 701962 - protein, 15 aa, Homo sapiens
  CDR3 for beta chain variable domain of TCR clone 350981 (TRBV5-5, TRBJ1-5)
CASSSTPGSNQPQHF

SEQ ID NO: 701963 - protein, 17 aa, Homo sapiens
  CDR3 for alpha chain variable domain of TCR clone 350982 (TRAV13-1, TRAJ53)
CAARWKSSGGSNYKLTF

SEQ ID NO: 701964 - protein, 19 aa, Homo sapiens
  CDR3 for beta chain variable domain of TCR clone 350982 (TRBV7-9, TRBJ2-1)
WASSHNRGALLRSYNEQFF

SEQ ID NO: 701965 - protein, 14 aa, Homo sapiens
  CDR3 for alpha chain variable domain of TCR clone 350983 (TRAV8-1, TRAJ22)
CAAPSSGSARQLTF

SEQ ID NO: 701966 - protein, 12 aa, Homo sapiens
  CDR3 for beta chain variable domain of TCR clone 350983 (TRBV11-2, TRBJ2-2)
CASSLPTGELFF

SEQ ID NO: 701967 - protein, 13 aa, Homo sapiens
  CDR3 for alpha chain variable domain of TCR clone 350984 (TRAV1-2, TRAJ9)
CAALNTGGFKTIF

SEQ ID NO: 701968 - protein, 16 aa, Homo sapiens
  CDR3 for beta chain variable domain of TCR clone 350984 (TRBV6-1, TRBJ2-2)
CASSFGQGANTGELFF

SEQ ID NO: 701969 - protein, 13 aa, Homo sapiens
  CDR3 for alpha chain variable domain of TCR clone 350985 (TRAV3, TRAJ21)
CAVREPDFNKFHF

SEQ ID NO: 701970 - protein, 15 aa, Homo sapiens
  CDR3 for beta chain variable domain of TCR clone 350985 (TRBV20-1, TRBJ1-1)
CSASRGVTGNTEAFF

SEQ ID NO: 701971 - protein, 15 aa, Homo sapiens
  CDR3 for alpha chain variable domain of TCR clone 350986 (TRAV3, TRAJ13)
CAVRVYSGGYQKVTF

SEQ ID NO: 701972 - protein, 16 aa, Homo sapiens
  CDR3 for beta chain variable domain of TCR clone 350986 (TRBV10-2, TRBJ2-7)
CASSESPGSSGFEQYF

SEQ ID NO: 701973 - protein, 13 aa, Homo sapiens
  CDR3 for alpha chain variable domain of TCR clone 350987 (TRAV12-3, TRAJ7)
CAMSASGNNRLPF

SEQ ID NO: 701974 - protein, 14 aa, Homo sapiens
  CDR3 for beta chain variable domain of TCR clone 350987 (TRBV13, TRBJ2-5)
CASSLGPRGETQYF

SEQ ID NO: 701975 - protein, 14 aa, Homo sapiens
  CDR3 for alpha chain variable domain of TCR clone 350988 (TRAV13-1, TRAJ39)
CAASEGNAGNMLTF

SEQ ID NO: 701976 - protein, 13 aa, Homo sapiens
  CDR3 for beta chain variable domain of TCR clone 350988 (TRBV7-9, TRBJ1-2)
CASSLKQNYGYTF

SEQ ID NO: 701977 - protein, 14 aa, Homo sapiens
  CDR3 for alpha chain variable domain of TCR clone 350989 (TRAV12-1, TRAJ17)
CVVNYKAAGNKLTF

SEQ ID NO: 701978 - protein, 16 aa, Homo sapiens
  CDR3 for beta chain variable domain of TCR clone 350989 (TRBV2, TRBJ2-3)
CASSTSVEGVTDTQYF

SEQ ID NO: 701979 - protein, 15 aa, Homo sapiens
  CDR3 for alpha chain variable domain of TCR clone 350990 (TRAV4, TRAJ39)
CLVGANNNAGNMLTF

SEQ ID NO: 701980 - protein, 13 aa, Homo sapiens
  CDR3 for beta chain variable domain of TCR clone 350990 (TRBV11-2, TRBJ2-5)
CASSSTGEETQYF

SEQ ID NO: 701981 - protein, 16 aa, Homo sapiens
  CDR3 for alpha chain variable domain of TCR clone 350991 (TRAV3, TRAJ21)
CAGRDIERGNFNKFYF

SEQ ID NO: 701982 - protein, 16 aa, Homo sapiens
  CDR3 for beta chain variable domain of TCR clone 350991 (TRBV12-4, TRBJ1-5)
CASSRPVGGSNQTQHF

SEQ ID NO: 701983 - protein, 12 aa, Homo sapiens
  CDR3 for alpha chain variable domain of TCR clone 350992 (TRAV21, TRAJ11)
CAAPSGYSILTF

SEQ ID NO: 701984 - protein, 14 aa, Homo sapiens
  CDR3 for beta chain variable domain of TCR clone 350992 (TRBV20-1, TRBJ2-7)
CSAPELAGVGEQYF

SEQ ID NO: 701985 - protein, 11 aa, Homo sapiens
  CDR3 for alpha chain variable domain of TCR clone 350993 (TRAV2, TRAJ13)
CAFGGYQKVTF

SEQ ID NO: 701986 - protein, 16 aa, Homo sapiens
  CDR3 for beta chain variable domain of TCR clone 350993 (TRBV6-1, TRBJ2-5)
CASSETLDRGAETQYL

SEQ ID NO: 701987 - protein, 12 aa, Homo sapiens
  CDR3 for alpha chain variable domain of TCR clone 350994 (TRAV12-3, TRAJ17)
CAMTLTGNKITS

SEQ ID NO: 701988 - protein, 15 aa, Homo sapiens
  CDR3 for beta chain variable domain of TCR clone 350994 (TRBV20-1, TRBJ2-7)
CSARDRVSGMDEQYF

SEQ ID NO: 701989 - protein, 15 aa, Homo sapiens
  CDR3 for alpha chain variable domain of TCR clone 350995 (TRAV8-3, TRAJ40)
CAAPSLGSGTYKYIF

SEQ ID NO: 701990 - protein, 16 aa, Homo sapiens
  CDR3 for beta chain variable domain of TCR clone 350995 (TRBV5-1, TRBJ2-3)
CASSLGLAVYTDTQYF

SEQ ID NO: 701991 - protein, 16 aa, Homo sapiens
  CDR3 for alpha chain variable domain of TCR clone 350996 (TRAV30, TRAJ24)
CGTEIVDADSWGKFQF

SEQ ID NO: 701992 - protein, 16 aa, Homo sapiens
  CDR3 for beta chain variable domain of TCR clone 350996 (TRBV28, TRBJ2-6)
CASSNRRGSGANVLTS

SEQ ID NO: 701993 - protein, 13 aa, Homo sapiens
  CDR3 for alpha chain variable domain of TCR clone 350997 (TRAV20, TRAJ31)
CAVQAWNNARLMF

SEQ ID NO: 701994 - protein, 15 aa, Homo sapiens
  CDR3 for beta chain variable domain of TCR clone 350997 (TRBV7-3, TRBJ2-1)
CASSLSSGSFDEQFF

SEQ ID NO: 701995 - protein, 13 aa, Homo sapiens
  CDR3 for alpha chain variable domain of TCR clone 350998 (TRAV1-2, TRAJ20)
CAVRDGNDYKLSF

SEQ ID NO: 701996 - protein, 19 aa, Homo sapiens
  CDR3 for beta chain variable domain of TCR clone 350998 (TRBV7-2, TRBJ2-3)
GRLSLGQQLRGGGRDTQYF

SEQ ID NO: 701997 - protein, 15 aa, Homo sapiens
  CDR3 for alpha chain variable domain of TCR clone 350999 (TRAV8-3, TRAJ11)
CAVGLLNSGYSTLTF

SEQ ID NO: 701998 - protein, 12 aa, Homo sapiens
  CDR3 for beta chain variable domain of TCR clone 350999 (TRBV27, TRBJ2-2)
CASKLFTGELFF

SEQ ID NO: 701999 - protein, 14 aa, Homo sapiens
  CDR3 for alpha chain variable domain of TCR clone 351000 (TRAV38-2/DV8, TRAJ23)
CAYRSQNQGGKRIF

SEQ ID NO: 702000 - protein, 13 aa, Homo sapiens
  CDR3 for beta chain variable domain of TCR clone 351000 (TRBV24-1, TRBJ2-1)
CATSAGPYNEQFF

SEQ ID NO: 702001 - protein, 12 aa, Homo sapiens
  CDR3 for alpha chain variable domain of TCR clone 351001 (TRAV30, TRAJ39)
CGRGKAGNMLTF

SEQ ID NO: 702002 - protein, 12 aa, Homo sapiens
  CDR3 for beta chain variable domain of TCR clone 351001 (TRBV10-3, TRBJ1-1)
CATMDRPPEAFF

SEQ ID NO: 702003 - protein, 13 aa, Homo sapiens
  CDR3 for alpha chain variable domain of TCR clone 351002 (TRAV2, TRAJ47)
CAVDREYGNKLVF

SEQ ID NO: 702004 - protein, 13 aa, Homo sapiens
  CDR3 for beta chain variable domain of TCR clone 351002 (TRBV12-4, TRBJ1-2)
CASSSGLTVISTF

SEQ ID NO: 702005 - protein, 11 aa, Homo sapiens
  CDR3 for alpha chain variable domain of TCR clone 351003 (TRAV13-1, TRAJ6)
CATLGSYIPTF

SEQ ID NO: 702006 - protein, 11 aa, Homo sapiens
  CDR3 for beta chain variable domain of TCR clone 351003 (TRBV11-2, TRBJ2-1)
CQQPRNNEQFF

SEQ ID NO: 702007 - protein, 11 aa, Homo sapiens
  CDR3 for alpha chain variable domain of TCR clone 351004 (TRAV3, TRAJ21)
FAVGNFNKFYF

SEQ ID NO: 702008 - protein, 16 aa, Homo sapiens
  CDR3 for beta chain variable domain of TCR clone 351004 (TRBV4-2, TRBJ1-1)
CASSPSPGRAAPEAFF

SEQ ID NO: 702009 - protein, 14 aa, Homo sapiens
  CDR3 for alpha chain variable domain of TCR clone 351005 (TRAV17, TRAJ9)
CATVTLGGGFKTIF

SEQ ID NO: 702010 - protein, 14 aa, Homo sapiens
  CDR3 for beta chain variable domain of TCR clone 351005 (TRBV5-1, TRBJ2-7)
CGSSRGESLYEQYF

SEQ ID NO: 702011 - protein, 15 aa, Homo sapiens
  CDR3 for alpha chain variable domain of TCR clone 351006 (TRAV8-3, TRAJ27)
CAVGPSKTNAGKSTF

SEQ ID NO: 702012 - protein, 14 aa, Homo sapiens
  CDR3 for beta chain variable domain of TCR clone 351006 (TRBV19, TRBJ2-7)
CASSIFAGTYEQYF

SEQ ID NO: 702013 - protein, 16 aa, Homo sapiens
  CDR3 for alpha chain variable domain of TCR clone 351007 (TRAV12-2, TRAJ50)
CAVGTATKTSYDKVIF

SEQ ID NO: 702014 - protein, 15 aa, Homo sapiens
  CDR3 for beta chain variable domain of TCR clone 351007 (TRBV2, TRBJ2-1)
CASSEEREGDNEQFF

SEQ ID NO: 702015 - protein, 17 aa, Homo sapiens
  CDR3 for alpha chain variable domain of TCR clone 351008 (TRAV8-1, TRAJ43)
CAVTNDMRFGAGTRLTG

SEQ ID NO: 702016 - protein, 12 aa, Homo sapiens
  CDR3 for beta chain variable domain of TCR clone 351008 (TRBV11-2, TRBJ2-2)
CASSLGGGELFF

SEQ ID NO: 702017 - protein, 14 aa, Homo sapiens
  CDR3 for alpha chain variable domain of TCR clone 351009 (TRAV13-1, TRAJ6)
CAASGPGGSYIPTF

SEQ ID NO: 702018 - protein, 20 aa, Homo sapiens
  CDR3 for beta chain variable domain of TCR clone 351009 (TRBV7-8, TRBJ2-2)
CASSHLFPGPTIHITGELFF

SEQ ID NO: 702019 - protein, 16 aa, Homo sapiens
  CDR3 for alpha chain variable domain of TCR clone 351010 (TRAV26-1, TRAJ21)
CCVLFHRPYNFNKFYF

SEQ ID NO: 702020 - protein, 15 aa, Homo sapiens
  CDR3 for beta chain variable domain of TCR clone 351010 (TRBV20-1, TRBJ2-7)
CSARDRVSGMDEQYF

SEQ ID NO: 702021 - protein, 15 aa, Homo sapiens
  CDR3 for alpha chain variable domain of TCR clone 351011 (TRAV23/DV6, TRAJ13)
CAAWPGGGGYQKVTF

SEQ ID NO: 702022 - protein, 14 aa, Homo sapiens
  CDR3 for beta chain variable domain of TCR clone 351011 (TRBV20-1, TRBJ2-5)
CSAHRQGLWETQYF

SEQ ID NO: 702023 - protein, 15 aa, Homo sapiens
  CDR3 for alpha chain variable domain of TCR clone 351012 (TRAV2, TRAJ15)
CAVEDRGQAGTALIF

SEQ ID NO: 702024 - protein, 17 aa, Homo sapiens
  CDR3 for beta chain variable domain of TCR clone 351012 (TRBV7-9, TRBJ2-1)
CASSLLWGQGYNNEQFF

SEQ ID NO: 702025 - protein, 12 aa, Homo sapiens
  CDR3 for alpha chain variable domain of TCR clone 351013 (TRAV2, TRAJ33)
CAVPDSNYRLIW

SEQ ID NO: 702026 - protein, 17 aa, Homo sapiens
  CDR3 for beta chain variable domain of TCR clone 351013 (TRBV6-5, TRBJ2-3)
CASSYGTSLYKSDTQYF

SEQ ID NO: 702027 - protein, 13 aa, Homo sapiens
  CDR3 for alpha chain variable domain of TCR clone 351014 (TRAV36/DV7, TRAJ37)
CAVFSSNTDKLIF

SEQ ID NO: 702028 - protein, 17 aa, Homo sapiens
  CDR3 for beta chain variable domain of TCR clone 351014 (TRBV28, TRBJ2-3)
CASSPTPAGGRVDTQYF

SEQ ID NO: 702029 - protein, 17 aa, Homo sapiens
  CDR3 for alpha chain variable domain of TCR clone 351015 (TRAV3, TRAJ28)
CAVREAYFGAGSDQLTF

SEQ ID NO: 702030 - protein, 17 aa, Homo sapiens
  CDR3 for beta chain variable domain of TCR clone 351015 (TRBV20-1, TRBJ2-1)
CSASSSGLAGSYNEQFF

SEQ ID NO: 702031 - protein, 13 aa, Homo sapiens
  CDR3 for alpha chain variable domain of TCR clone 351016 (TRAV3, TRAJ21)
CAVREPDFTKFYF

SEQ ID NO: 702032 - protein, 12 aa, Homo sapiens
  CDR3 for beta chain variable domain of TCR clone 351016 (TRBV11-2, TRBJ2-2)
CASSLGGGELFF

SEQ ID NO: 702033 - protein, 14 aa, Homo sapiens
  CDR3 for alpha chain variable domain of TCR clone 351017 (TRAV38-1, TRAJ45)
CAYYSGGGADGLTF

SEQ ID NO: 702034 - protein, 17 aa, Homo sapiens
  CDR3 for beta chain variable domain of TCR clone 351017 (TRBV28, TRBJ2-1)
CASSSARQALTYNEQFF

SEQ ID NO: 702035 - protein, 14 aa, Homo sapiens
  CDR3 for alpha chain variable domain of TCR clone 351018 (TRAV13-2, TRAJ32)
CAESLGGAANKLIF

SEQ ID NO: 702036 - protein, 15 aa, Homo sapiens
  CDR3 for beta chain variable domain of TCR clone 351018 (TRBV5-1, TRBJ1-1)
WASSWTGRGNTEAFF

SEQ ID NO: 702037 - protein, 12 aa, Homo sapiens
  CDR3 for alpha chain variable domain of TCR clone 351019 (TRAV13-1, TRAJ49)
CAASPMGNQFYF

SEQ ID NO: 702038 - protein, 13 aa, Homo sapiens
  CDR3 for beta chain variable domain of TCR clone 351019 (TRBV20-1, TRBJ2-2)
CSASAAGTWQLFF

SEQ ID NO: 702039 - protein, 12 aa, Homo sapiens
  CDR3 for alpha chain variable domain of TCR clone 351020 (TRAV12-3, TRAJ17)
CAMTLTGNELTF

SEQ ID NO: 702040 - protein, 15 aa, Homo sapiens
  CDR3 for beta chain variable domain of TCR clone 351020 (TRBV20-1, TRBJ2-7)
CSARDWVSGMDEQYF

SEQ ID NO: 702041 - protein, 12 aa, Homo sapiens
  CDR3 for alpha chain variable domain of TCR clone 351021 (TRAV2, TRAJ26)
CAVGEYGQNFVF

SEQ ID NO: 702042 - protein, 18 aa, Homo sapiens
  CDR3 for beta chain variable domain of TCR clone 351021 (TRBV11-2, TRBJ2-3)
CASSLGGASRGAPNTQYF

SEQ ID NO: 702043 - protein, 14 aa, Homo sapiens
  CDR3 for alpha chain variable domain of TCR clone 351022 (TRAV12-3, TRAJ10)
SHLPLPGGGNKLTF

SEQ ID NO: 702044 - protein, 15 aa, Homo sapiens
  CDR3 for beta chain variable domain of TCR clone 351022 (TRBV7-3, TRBJ2-2)
CASSETGQGTGELFF

SEQ ID NO: 702045 - protein, 15 aa, Homo sapiens
  CDR3 for alpha chain variable domain of TCR clone 351023 (TRAV3, TRAJ22)
CAVRDRGGSASQLTV

SEQ ID NO: 702046 - protein, 16 aa, Homo sapiens
  CDR3 for beta chain variable domain of TCR clone 351023 (TRBV5-4, TRBJ2-3)
CASQQPGAGGADTQYF

SEQ ID NO: 702047 - protein, 13 aa, Homo sapiens
  CDR3 for alpha chain variable domain of TCR clone 351024 (TRAV2, TRAJ40)
CAVVPSGTYKYIF

SEQ ID NO: 702048 - protein, 17 aa, Homo sapiens
  CDR3 for beta chain variable domain of TCR clone 351024 (TRBV11-2, TRBJ2-1)
CASSLYPPGVEYNEQFF

SEQ ID NO: 702049 - protein, 13 aa, Homo sapiens
  CDR3 for alpha chain variable domain of TCR clone 351025 (TRAV2, TRAJ15)
CAVASQAGTALIF

SEQ ID NO: 702050 - protein, 12 aa, Homo sapiens
  CDR3 for beta chain variable domain of TCR clone 351025 (TRBV12-4, TRBJ1-2)
CASSFIWRHLRF

SEQ ID NO: 702051 - protein, 13 aa, Homo sapiens
  CDR3 for alpha chain variable domain of TCR clone 351026 (TRAV8-3, TRAJ37)
CAVPSSNTGKLIF

SEQ ID NO: 702052 - protein, 12 aa, Homo sapiens
  CDR3 for beta chain variable domain of TCR clone 351026 (TRBV11-2, TRBJ2-1)
CASSHGNNERFF

SEQ ID NO: 702053 - protein, 16 aa, Homo sapiens
  CDR3 for alpha chain variable domain of TCR clone 351027 (TRAV26-1, TRAJ37)
CIVRGDGSGNTGKLIF

SEQ ID NO: 702054 - protein, 17 aa, Homo sapiens
  CDR3 for beta chain variable domain of TCR clone 351027 (TRBV4-1, TRBJ2-1)
CASSRDPLGVRGGEQYF

SEQ ID NO: 702055 - protein, 13 aa, Homo sapiens
  CDR3 for alpha chain variable domain of TCR clone 351028 (TRAV8-1, TRAJ39)
CAVANNAGNMLTF

SEQ ID NO: 702056 - protein, 15 aa, Homo sapiens
  CDR3 for beta chain variable domain of TCR clone 351028 (TRBV7-2, TRBJ2-1)
CASSLNRGAYKEQFF

SEQ ID NO: 702057 - protein, 13 aa, Homo sapiens
  CDR3 for alpha chain variable domain of TCR clone 351029 (TRAV13-1, TRAJ48)
CAEASFGNEKLTF

SEQ ID NO: 702058 - protein, 14 aa, Homo sapiens
  CDR3 for beta chain variable domain of TCR clone 351029 (TRBV18, TRBJ2-1)
CASSPGTSETEQFF

SEQ ID NO: 702059 - protein, 17 aa, Homo sapiens
  CDR3 for alpha chain variable domain of TCR clone 351030 (TRAV13-1, TRAJ52)
CAASSGAGVTSYGKLTF

SEQ ID NO: 702060 - protein, 15 aa, Homo sapiens
  CDR3 for beta chain variable domain of TCR clone 351030 (TRBV2, TRBJ2-1)
CASSELVGSYNEQFF

SEQ ID NO: 702061 - protein, 15 aa, Homo sapiens
  CDR3 for alpha chain variable domain of TCR clone 351031 (TRAV23/DV6, TRAJ13)
CAAWPGGGGYRKVTF

SEQ ID NO: 702062 - protein, 17 aa, Homo sapiens
  CDR3 for beta chain variable domain of TCR clone 351031 (TRBV19, TRBJ2-7)
CASSIYFYDSYPYEQYF

SEQ ID NO: 702063 - protein, 14 aa, Homo sapiens
  CDR3 for alpha chain variable domain of TCR clone 351032 (TRAV23/DV6, TRAJ4)
CAAPSSGGYNKLIF

SEQ ID NO: 702064 - protein, 16 aa, Homo sapiens
  CDR3 for beta chain variable domain of TCR clone 351032 (TRBV19, TRBJ1-1)
CASRVGGPVTGTEAFF

SEQ ID NO: 702065 - protein, 23 aa, Homo sapiens
  CDR3 for alpha chain variable domain of TCR clone 351033 (TRAV12-2, TRAJ22)
CAVSFRVHPGPPIVSGSPRQLTF

SEQ ID NO: 702066 - protein, 13 aa, Homo sapiens
  CDR3 for beta chain variable domain of TCR clone 351033 (TRBV12-4, TRBJ1-2)
CASSLDSNYGYTF

SEQ ID NO: 702067 - protein, 14 aa, Homo sapiens
  CDR3 for alpha chain variable domain of TCR clone 351034 (TRAV8-3, TRAJ4)
CAVGASGGYHKLIF

SEQ ID NO: 702068 - protein, 16 aa, Homo sapiens
  CDR3 for beta chain variable domain of TCR clone 351034 (TRBV4-3, TRBJ2-2)
CASSHLQGSGTGELFF

SEQ ID NO: 702069 - protein, 14 aa, Homo sapiens
  CDR3 for alpha chain variable domain of TCR clone 351035 (TRAV30, TRAJ26)
CGTEIVSYGQNFVF

SEQ ID NO: 702070 - protein, 15 aa, Homo sapiens
  CDR3 for beta chain variable domain of TCR clone 351035 (TRBV7-3, TRBJ2-1)
CASSPTGGGEVEQFF

SEQ ID NO: 702071 - protein, 12 aa, Homo sapiens
  CDR3 for alpha chain variable domain of TCR clone 351036 (TRAV3, TRAJ26)
CAVRDYGQNFVF

SEQ ID NO: 702072 - protein, 15 aa, Homo sapiens
  CDR3 for beta chain variable domain of TCR clone 351036 (TRBV7-2, TRBJ2-7)
CASSLAVGQVYEQYF

SEQ ID NO: 702073 - protein, 12 aa, Homo sapiens
  CDR3 for alpha chain variable domain of TCR clone 351037 (TRAV12-1, TRAJ40)
CVVYSGTYKYFF

SEQ ID NO: 702074 - protein, 18 aa, Homo sapiens
  CDR3 for beta chain variable domain of TCR clone 351037 (TRBV11-2, TRBJ2-3)
CASSLGGASRGAPNTQYF

SEQ ID NO: 702075 - protein, 14 aa, Homo sapiens
  CDR3 for alpha chain variable domain of TCR clone 351038 (TRAV8-3, TRAJ4)
CAVGAAGGYNKLIF

SEQ ID NO: 702076 - protein, 15 aa, Homo sapiens
  CDR3 for beta chain variable domain of TCR clone 351038 (TRBV6-3, TRBJ2-7)
CASSSPGTVFYEQYS

SEQ ID NO: 702077 - protein, 13 aa, Homo sapiens
  CDR3 for alpha chain variable domain of TCR clone 351039 (TRAV35, TRAJ44)
CAGLSGTASKLTF

SEQ ID NO: 702078 - protein, 12 aa, Homo sapiens
  CDR3 for beta chain variable domain of TCR clone 351039 (TRBV10-3, TRBJ1-1)
CATMDRPPEAFF

SEQ ID NO: 702079 - protein, 14 aa, Homo sapiens
  CDR3 for alpha chain variable domain of TCR clone 351040 (TRAV14/DV4, TRAJ41)
CARGGPDSGYALNF

SEQ ID NO: 702080 - protein, 16 aa, Homo sapiens
  CDR3 for beta chain variable domain of TCR clone 351040 (TRBV4-2, TRBJ2-2)
CASSQDPSGREGELFF

SEQ ID NO: 702081 - protein, 12 aa, Homo sapiens
  CDR3 for alpha chain variable domain of TCR clone 351041 (TRAV12-3, TRAJ17)
CVMTLTGNKLTF

SEQ ID NO: 702082 - protein, 18 aa, Homo sapiens
  CDR3 for beta chain variable domain of TCR clone 351041 (TRBV28, TRBJ2-1)
CQHPYWTVTGTSGSIQFF

SEQ ID NO: 702083 - protein, 13 aa, Homo sapiens
  CDR3 for alpha chain variable domain of TCR clone 351042 (TRAV13-2, TRAJ4)
CAESPGGYNKLIF

SEQ ID NO: 702084 - protein, 15 aa, Homo sapiens
  CDR3 for beta chain variable domain of TCR clone 351042 (TRBV9, TRBJ1-6)
CASSVAGTGDSPLHF

SEQ ID NO: 702085 - protein, 16 aa, Homo sapiens
  CDR3 for alpha chain variable domain of TCR clone 351043 (TRAV1-1, TRAJ29)
CAVRSTRNSGNTPLVF

SEQ ID NO: 702086 - protein, 16 aa, Homo sapiens
  CDR3 for beta chain variable domain of TCR clone 351043 (TRBV27, TRBJ1-1)
CASSSRGRTRYTEAFF

SEQ ID NO: 702087 - protein, 15 aa, Homo sapiens
  CDR3 for alpha chain variable domain of TCR clone 351044 (TRAV12-3, TRAJ27)
CAMRAYNTNAGKATF

SEQ ID NO: 702088 - protein, 13 aa, Homo sapiens
  CDR3 for beta chain variable domain of TCR clone 351044 (TRBV11-2, TRBJ2-5)
CASSRGPSETQYF

SEQ ID NO: 702089 - protein, 12 aa, Homo sapiens
  CDR3 for alpha chain variable domain of TCR clone 351045 (TRAV12-1, TRAJ23)
CVVNIPGGKRIF

SEQ ID NO: 702090 - protein, 15 aa, Homo sapiens
  CDR3 for beta chain variable domain of TCR clone 351045 (TRBV7-2, TRBJ2-7)
CASSLVSSGSYEQYF

SEQ ID NO: 702091 - protein, 14 aa, Homo sapiens
  CDR3 for alpha chain variable domain of TCR clone 351046 (TRAV12-2, TRAJ40)
CAVNIPSGAYKYIF

SEQ ID NO: 702092 - protein, 14 aa, Homo sapiens
  CDR3 for beta chain variable domain of TCR clone 351046 (TRBV20-1, TRBJ1-1)
CSAQTRIGGTEAFF

SEQ ID NO: 702093 - protein, 18 aa, Homo sapiens
  CDR3 for alpha chain variable domain of TCR clone 351047 (TRAV4, TRAJ20)
CCVLLPRGLQGNDYKLSF

SEQ ID NO: 702094 - protein, 17 aa, Homo sapiens
  CDR3 for beta chain variable domain of TCR clone 351047 (TRBV18, TRBJ2-1)
CASSKGLSGGADNEQFF

SEQ ID NO: 702095 - protein, 13 aa, Homo sapiens
  CDR3 for alpha chain variable domain of TCR clone 351048 (TRAV2, TRAJ15)
CAVAAQAGTALIF

SEQ ID NO: 702096 - protein, 14 aa, Homo sapiens
  CDR3 for beta chain variable domain of TCR clone 351048 (TRBV25-1, TRBJ1-1)
CASTHLGGNTEAFF

SEQ ID NO: 702097 - protein, 13 aa, Homo sapiens
  CDR3 for alpha chain variable domain of TCR clone 351049 (TRAV1-1, TRAJ23)
CAVVANQGGKLIF

SEQ ID NO: 702098 - protein, 16 aa, Homo sapiens
  CDR3 for beta chain variable domain of TCR clone 351049 (TRBV5-5, TRBJ1-2)
CASSPTWGRGLYGYIF

SEQ ID NO: 702099 - protein, 14 aa, Homo sapiens
  CDR3 for alpha chain variable domain of TCR clone 351050 (TRAV1-2, TRAJ8)
CAVREDTGFQKLVF

SEQ ID NO: 702100 - protein, 14 aa, Homo sapiens
  CDR3 for beta chain variable domain of TCR clone 351050 (TRBV19, TRBJ2-1)
CASKDPGLANEQFF

SEQ ID NO: 702101 - protein, 17 aa, Homo sapiens
  CDR3 for alpha chain variable domain of TCR clone 351051 (TRAV13-1, TRAJ52)
CAASSGAGGTSYGKLSF

SEQ ID NO: 702102 - protein, 15 aa, Homo sapiens
  CDR3 for beta chain variable domain of TCR clone 351051 (TRBV2, TRBJ2-1)
CASSELAGSYNEQFF

SEQ ID NO: 702103 - protein, 14 aa, Homo sapiens
  CDR3 for alpha chain variable domain of TCR clone 351052 (TRAV36/DV7, TRAJ48)
CAQRRDFGNEKLTF

SEQ ID NO: 702104 - protein, 15 aa, Homo sapiens
  CDR3 for beta chain variable domain of TCR clone 351052 (TRBV28, TRBJ2-1)
CASSIIAGGRSEQFF

SEQ ID NO: 702105 - protein, 16 aa, Homo sapiens
  CDR3 for alpha chain variable domain of TCR clone 351053 (TRAV3, TRAJ13)
CAVRDPNSGGFQKVTF

SEQ ID NO: 702106 - protein, 13 aa, Homo sapiens
  CDR3 for beta chain variable domain of TCR clone 351053 (TRBV7-9, TRBJ2-7)
CASRLQGSYEQYF

SEQ ID NO: 702107 - protein, 16 aa, Homo sapiens
  CDR3 for alpha chain variable domain of TCR clone 351054 (TRAV8-3, TRAJ44)
CAVGASNTGTASKLTF

SEQ ID NO: 702108 - protein, 17 aa, Homo sapiens
  CDR3 for beta chain variable domain of TCR clone 351054 (TRBV7-8, TRBJ2-6)
CASSAGTGGAGANVLTF

SEQ ID NO: 702109 - protein, 21 aa, Homo sapiens
  CDR3 for alpha chain variable domain of TCR clone 351055 (TRAV2, TRAJ26)
CAGSPGRLWSEFCLWSRNQIF

SEQ ID NO: 702110 - protein, 16 aa, Homo sapiens
  CDR3 for beta chain variable domain of TCR clone 351055 (TRBV13, TRBJ2-2)
CASSPRTGEHAGELFF

SEQ ID NO: 702111 - protein, 13 aa, Homo sapiens
  CDR3 for alpha chain variable domain of TCR clone 351056 (TRAV12-2, TRAJ13)
CREPFWGYQKVTF

SEQ ID NO: 702112 - protein, 13 aa, Homo sapiens
  CDR3 for beta chain variable domain of TCR clone 351056 (TRBV20-1, TRBJ1-6)
CSAKLGGTSPLHF

SEQ ID NO: 702113 - protein, 17 aa, Homo sapiens
  CDR3 for alpha chain variable domain of TCR clone 351057 (TRAV3, TRAJ42)
CAVRDRDYGGSQGNLIF

SEQ ID NO: 702114 - protein, 15 aa, Homo sapiens
  CDR3 for beta chain variable domain of TCR clone 351057 (TRBV7-9, TRBJ1-4)
CASSARTGGNEKLFF

SEQ ID NO: 702115 - protein, 13 aa, Homo sapiens
  CDR3 for alpha chain variable domain of TCR clone 351058 (TRAV21, TRAJ27)
CAARPGNAVKSPF

SEQ ID NO: 702116 - protein, 14 aa, Homo sapiens
  CDR3 for beta chain variable domain of TCR clone 351058 (TRBV7-6, TRBJ2-3)
CASSLGTVTDTQYF

SEQ ID NO: 702117 - protein, 15 aa, Homo sapiens
  CDR3 for alpha chain variable domain of TCR clone 351059 (TRAV21, TRAJ53)
CATLNSGGSNYKLTF

SEQ ID NO: 702118 - protein, 15 aa, Homo sapiens
  CDR3 for beta chain variable domain of TCR clone 351059 (TRBV10-1, TRBJ2-3)
CASSRAGTLGDTQYF

SEQ ID NO: 702119 - protein, 11 aa, Homo sapiens
  CDR3 for alpha chain variable domain of TCR clone 351060 (TRAV38-2/DV8, TRAJ31)
CAYFSNARHMF

SEQ ID NO: 702120 - protein, 13 aa, Homo sapiens
  CDR3 for beta chain variable domain of TCR clone 351060 (TRBV20-1, TRBJ2-7)
CSARDGKSYEQYF

SEQ ID NO: 702121 - protein, 14 aa, Homo sapiens
  CDR3 for alpha chain variable domain of TCR clone 351061 (TRAV1-2, TRAJ8)
CAVREDTGFHKLAF

SEQ ID NO: 702122 - protein, 15 aa, Homo sapiens
  CDR3 for beta chain variable domain of TCR clone 351061 (TRBV6-3, TRBJ2-7)
CASSSPGTVFYEQYF

SEQ ID NO: 702123 - protein, 12 aa, Homo sapiens
  CDR3 for alpha chain variable domain of TCR clone 351062 (TRAV35, TRAJ30)
CGGLNRDDKIIF

SEQ ID NO: 702124 - protein, 15 aa, Homo sapiens
  CDR3 for beta chain variable domain of TCR clone 351062 (TRBV9, TRBJ1-6)
CASSVAGTGDSPLHF

SEQ ID NO: 702125 - protein, 15 aa, Homo sapiens
  CDR3 for alpha chain variable domain of TCR clone 351063 (TRAV36/DV7, TRAJ54)
CAVEKPVQGAQKLVF

SEQ ID NO: 702126 - protein, 17 aa, Homo sapiens
  CDR3 for beta chain variable domain of TCR clone 351063 (TRBV13, TRBJ2-3)
CASSLSRVAGGRNTQYF

SEQ ID NO: 702127 - protein, 16 aa, Homo sapiens
  CDR3 for alpha chain variable domain of TCR clone 351064 (TRAV3, TRAJ5)
CAVRNLMDTGRRALTF

SEQ ID NO: 702128 - protein, 16 aa, Homo sapiens
  CDR3 for beta chain variable domain of TCR clone 351064 (TRBV4-2, TRBJ2-7)
CASSQEGLANSYEQYL

SEQ ID NO: 702129 - protein, 12 aa, Homo sapiens
  CDR3 for alpha chain variable domain of TCR clone 351065 (TRAV12-2, TRAJ33)
CAVGDSNYQLIW

SEQ ID NO: 702130 - protein, 13 aa, Homo sapiens
  CDR3 for beta chain variable domain of TCR clone 351065 (TRBV6-1, TRBJ1-2)
CGSSAREGYGYTF

SEQ ID NO: 702131 - protein, 12 aa, Homo sapiens
  CDR3 for alpha chain variable domain of TCR clone 351066 (TRAV8-4, TRAJ37)
CAVRSNTGKLIF

SEQ ID NO: 702132 - protein, 16 aa, Homo sapiens
  CDR3 for beta chain variable domain of TCR clone 351066 (TRBV7-2, TRBJ2-3)
CASSLVGDASTDTQYL

SEQ ID NO: 702133 - protein, 11 aa, Homo sapiens
  CDR3 for alpha chain variable domain of TCR clone 351067 (TRAV21, TRAJ9)
CAVPGGFKSIF

SEQ ID NO: 702134 - protein, 17 aa, Homo sapiens
  CDR3 for beta chain variable domain of TCR clone 351067 (TRBV7-9, TRBJ2-5)
CATSGGARDPVLRARHA

SEQ ID NO: 702135 - protein, 13 aa, Homo sapiens
  CDR3 for alpha chain variable domain of TCR clone 351068 (TRAV13-1, TRAJ12)
CSKYMGSSYKLIF

SEQ ID NO: 702136 - protein, 12 aa, Homo sapiens
  CDR3 for beta chain variable domain of TCR clone 351068 (TRBV6-1, TRBJ2-7)
CASSDYSYEQYF

SEQ ID NO: 702137 - protein, 15 aa, Homo sapiens
  CDR3 for alpha chain variable domain of TCR clone 351069 (TRAV21, TRAJ24)
CAARSSTDSWGKLQF

SEQ ID NO: 702138 - protein, 13 aa, Homo sapiens
  CDR3 for beta chain variable domain of TCR clone 351069 (TRBV11-2, TRBJ2-5)
CAGSSTAEETQYF

SEQ ID NO: 702139 - protein, 12 aa, Homo sapiens
  CDR3 for alpha chain variable domain of TCR clone 351070 (TRAV21, TRAJ13)
PGPSGGYQKVTF

SEQ ID NO: 702140 - protein, 16 aa, Homo sapiens
  CDR3 for beta chain variable domain of TCR clone 351070 (TRBV4-1, TRBJ1-5)
CASSQGGHTTNQTQHF

SEQ ID NO: 702141 - protein, 14 aa, Homo sapiens
  CDR3 for alpha chain variable domain of TCR clone 351071 (TRAV12-2, TRAJ13)
CAVKKTGGYQKVTF

SEQ ID NO: 702142 - protein, 13 aa, Homo sapiens
  CDR3 for beta chain variable domain of TCR clone 351071 (TRBV12-4, TRBJ1-2)
CASSFIWLHLRFS

SEQ ID NO: 702143 - protein, 15 aa, Homo sapiens
  CDR3 for alpha chain variable domain of TCR clone 351072 (TRAV8-4, TRAJ37)
CAVTYGSSNTGKLIF

SEQ ID NO: 702144 - protein, 15 aa, Homo sapiens
  CDR3 for beta chain variable domain of TCR clone 351072 (TRBV11-2, TRBJ2-2)
CASSSDRVNAGELFF

SEQ ID NO: 702145 - protein, 16 aa, Homo sapiens
  CDR3 for alpha chain variable domain of TCR clone 351073 (TRAV3, TRAJ28)
CAFLPRSGAGGYQLTF

SEQ ID NO: 702146 - protein, 13 aa, Homo sapiens
  CDR3 for beta chain variable domain of TCR clone 351073 (TRBV12-4, TRBJ2-5)
CASRLAVQETQYF

SEQ ID NO: 702147 - protein, 17 aa, Homo sapiens
  CDR3 for alpha chain variable domain of TCR clone 351074 (TRAV13-1, TRAJ52)
CAASSGAGGTSYGRLTF

SEQ ID NO: 702148 - protein, 14 aa, Homo sapiens
  CDR3 for beta chain variable domain of TCR clone 351074 (TRBV12-4, TRBJ2-5)
CASSFGDRGETQYF

SEQ ID NO: 702149 - protein, 14 aa, Homo sapiens
  CDR3 for alpha chain variable domain of TCR clone 351075 (TRAV3, TRAJ34)
CAVRAPGNTDKIIL

SEQ ID NO: 702150 - protein, 17 aa, Homo sapiens
  CDR3 for beta chain variable domain of TCR clone 351075 (TRBV20-1, TRBJ2-7)
CSAAPGLARGISYEQYF

SEQ ID NO: 702151 - protein, 13 aa, Homo sapiens
  CDR3 for alpha chain variable domain of TCR clone 351076 (TRAV21, TRAJ27)
CAARPGNAGKSTF

SEQ ID NO: 702152 - protein, 13 aa, Homo sapiens
  CDR3 for beta chain variable domain of TCR clone 351076 (TRBV13, TRBJ2-1)
CASILGERGEQFF

SEQ ID NO: 702153 - protein, 15 aa, Homo sapiens
  CDR3 for alpha chain variable domain of TCR clone 351077 (TRAV38-1, TRAJ37)
CAFIHASGNTGKLIF

SEQ ID NO: 702154 - protein, 14 aa, Homo sapiens
  CDR3 for beta chain variable domain of TCR clone 351077 (TRBV29-1, TRBJ2-5)
CSVETSGSGETQYF

SEQ ID NO: 702155 - protein, 11 aa, Homo sapiens
  CDR3 for alpha chain variable domain of TCR clone 351078 (TRAV20, TRAJ34)
CTRDNTDKLIF

SEQ ID NO: 702156 - protein, 15 aa, Homo sapiens
  CDR3 for beta chain variable domain of TCR clone 351078 (TRBV2, TRBJ2-1)
CASRVTSEGTDEQFF

SEQ ID NO: 702157 - protein, 16 aa, Homo sapiens
  CDR3 for alpha chain variable domain of TCR clone 351079 (TRAV12-1, TRAJ22)
CVVNSISSGSARQLTF

SEQ ID NO: 702158 - protein, 14 aa, Homo sapiens
  CDR3 for beta chain variable domain of TCR clone 351079 (TRBV4-1, TRBJ2-2)
CASSQAVNTGELFF

SEQ ID NO: 702159 - protein, 15 aa, Homo sapiens
  CDR3 for alpha chain variable domain of TCR clone 351080 (TRAV21, TRAJ53)
CATLNSGGSNSKLTF

SEQ ID NO: 702160 - protein, 15 aa, Homo sapiens
  CDR3 for beta chain variable domain of TCR clone 351080 (TRBV5-1, TRBJ2-3)
CASSYTSGSTDTQYF

SEQ ID NO: 702161 - protein, 13 aa, Homo sapiens
  CDR3 for alpha chain variable domain of TCR clone 351081 (TRAV16, TRAJ34)
CAPRTWNTDKLIF

SEQ ID NO: 702162 - protein, 16 aa, Homo sapiens
  CDR3 for beta chain variable domain of TCR clone 351081 (TRBV2, TRBJ1-3)
CASSERGVNSGNTIYF

SEQ ID NO: 702163 - protein, 15 aa, Homo sapiens
  CDR3 for alpha chain variable domain of TCR clone 351082 (TRAV17, TRAJ4)
CATGTWSGGYNKLIF

SEQ ID NO: 702164 - protein, 14 aa, Homo sapiens
  CDR3 for beta chain variable domain of TCR clone 351082 (TRBV7-8, TRBJ2-3)
CASSLEAGTDTQYF

SEQ ID NO: 702165 - protein, 10 aa, Homo sapiens
  CDR3 for alpha chain variable domain of TCR clone 351083 (TRAV2, TRAJ34)
CAVVNDKLIF

SEQ ID NO: 702166 - protein, 14 aa, Homo sapiens
  CDR3 for beta chain variable domain of TCR clone 351083 (TRBV7-2, TRBJ2-2)
CASRGQGAAGELFF

SEQ ID NO: 702167 - protein, 16 aa, Homo sapiens
  CDR3 for alpha chain variable domain of TCR clone 351084 (TRAV3, TRAJ21)
CAVRDIERVNFTKFYF

SEQ ID NO: 702168 - protein, 16 aa, Homo sapiens
  CDR3 for beta chain variable domain of TCR clone 351084 (TRBV12-4, TRBJ1-5)
CASSRPVGGSNQPQHF

SEQ ID NO: 702169 - protein, 13 aa, Homo sapiens
  CDR3 for alpha chain variable domain of TCR clone 351085 (TRAV8-6, TRAJ9)
CAVWDTGGYKTIF

SEQ ID NO: 702170 - protein, 14 aa, Homo sapiens
  CDR3 for beta chain variable domain of TCR clone 351085 (TRBV2, TRBJ2-1)
CASSEALIYNEQFF

SEQ ID NO: 702171 - protein, 12 aa, Homo sapiens
  CDR3 for alpha chain variable domain of TCR clone 351086 (TRAV21, TRAJ33)
FAKMDSNYQLIW

SEQ ID NO: 702172 - protein, 14 aa, Homo sapiens
  CDR3 for beta chain variable domain of TCR clone 351086 (TRBV12-4, TRBJ2-3)
CASTIAGWGDTQYF

SEQ ID NO: 702173 - protein, 11 aa, Homo sapiens
  CDR3 for alpha chain variable domain of TCR clone 351087 (TRAV12-2, TRAJ31)
CGVTRWARLMF

SEQ ID NO: 702174 - protein, 15 aa, Homo sapiens
  CDR3 for beta chain variable domain of TCR clone 351087 (TRBV19, TRBJ2-7)
CASSIGGGLVNEQYF

SEQ ID NO: 702175 - protein, 12 aa, Homo sapiens
  CDR3 for alpha chain variable domain of TCR clone 351088 (TRAV26-1, TRAJ36)
CIVRVRADNLFF

SEQ ID NO: 702176 - protein, 13 aa, Homo sapiens
  CDR3 for beta chain variable domain of TCR clone 351088 (TRBV11-2, TRBJ2-5)
CASGRGPSETQYF

SEQ ID NO: 702177 - protein, 12 aa, Homo sapiens
  CDR3 for alpha chain variable domain of TCR clone 351089 (TRAV17, TRAJ39)
CATGAAGNMLTF

SEQ ID NO: 702178 - protein, 14 aa, Homo sapiens
  CDR3 for beta chain variable domain of TCR clone 351089 (TRBV7-9, TRBJ1-2)
CASSRQGPNYGYTF

SEQ ID NO: 702179 - protein, 14 aa, Homo sapiens
  CDR3 for alpha chain variable domain of TCR clone 351090 (TRAV8-2, TRAJ37)
CVVSIPGNTGKLIF

SEQ ID NO: 702180 - protein, 17 aa, Homo sapiens
  CDR3 for beta chain variable domain of TCR clone 351090 (TRBV7-9, TRBJ2-3)
CASSPTVAGDLTDTQYF

SEQ ID NO: 702181 - protein, 14 aa, Homo sapiens
  CDR3 for alpha chain variable domain of TCR clone 351091 (TRAV1-2, TRAJ8)
CALREDTGFQKLVF

SEQ ID NO: 702182 - protein, 15 aa, Homo sapiens
  CDR3 for beta chain variable domain of TCR clone 351091 (TRBV5-7, TRBJ2-3)
CASSPGLATTDTQYF

SEQ ID NO: 702183 - protein, 14 aa, Homo sapiens
  CDR3 for alpha chain variable domain of TCR clone 351092 (TRAV2, TRAJ9)
CAVEDRGGGFKTIF

SEQ ID NO: 702184 - protein, 17 aa, Homo sapiens
  CDR3 for beta chain variable domain of TCR clone 351092 (TRBV7-8, TRBJ2-6)
CASSAGTGGAGANVLTF

SEQ ID NO: 702185 - protein, 15 aa, Homo sapiens
  CDR3 for alpha chain variable domain of TCR clone 351093 (TRAV21, TRAJ53)
CATLNSGGSNYKLTF

SEQ ID NO: 702186 - protein, 12 aa, Homo sapiens
  CDR3 for beta chain variable domain of TCR clone 351093 (TRBV11-2, TRBJ2-3)
CASRPGTDTQYF

SEQ ID NO: 702187 - protein, 17 aa, Homo sapiens
  CDR3 for alpha chain variable domain of TCR clone 351094 (TRAV8-3, TRAJ40)
CGAPSLAQEPTNTSLEQ

SEQ ID NO: 702188 - protein, 16 aa, Homo sapiens
  CDR3 for beta chain variable domain of TCR clone 351094 (TRBV7-3, TRBJ2-3)
CASSLSGYRPEDTQYF

SEQ ID NO: 702189 - protein, 14 aa, Homo sapiens
  CDR3 for alpha chain variable domain of TCR clone 351095 (TRAV8-3, TRAJ4)
CAVGASGGYNKLIF

SEQ ID NO: 702190 - protein, 13 aa, Homo sapiens
  CDR3 for beta chain variable domain of TCR clone 351095 (TRBV18, TRBJ2-5)
CASSLQGHETQYF

SEQ ID NO: 702191 - protein, 14 aa, Homo sapiens
  CDR3 for alpha chain variable domain of TCR clone 351096 (TRAV12-2, TRAJ24)
CSVTPADSWGKLQF

SEQ ID NO: 702192 - protein, 15 aa, Homo sapiens
  CDR3 for beta chain variable domain of TCR clone 351096 (TRBV27, TRBJ2-1)
CASSNGGGSSNEQFF

SEQ ID NO: 702193 - protein, 13 aa, Homo sapiens
  CDR3 for alpha chain variable domain of TCR clone 351097 (TRAV30, TRAJ24)
CGTVTDSWGKLQF

SEQ ID NO: 702194 - protein, 15 aa, Homo sapiens
  CDR3 for beta chain variable domain of TCR clone 351097 (TRBV5-5, TRBJ1-5)
CASSSTPGSNQPQHF

SEQ ID NO: 702195 - protein, 13 aa, Homo sapiens
  CDR3 for alpha chain variable domain of TCR clone 351098 (TRAV26-1, TRAJ48)
CIVRVVGDEKLTF

SEQ ID NO: 702196 - protein, 14 aa, Homo sapiens
  CDR3 for beta chain variable domain of TCR clone 351098 (TRBV7-8, TRBJ2-5)
CASSATGGQETQYF

SEQ ID NO: 702197 - protein, 16 aa, Homo sapiens
  CDR3 for alpha chain variable domain of TCR clone 351099 (TRAV3, TRAJ10)
CAVRDMRAGGGNKLTF

SEQ ID NO: 702198 - protein, 19 aa, Homo sapiens
  CDR3 for beta chain variable domain of TCR clone 351099 (TRBV6-3, TRBJ1-2)
CASSYSKGRTGPPNCGYTF

SEQ ID NO: 702199 - protein, 16 aa, Homo sapiens
  CDR3 for alpha chain variable domain of TCR clone 351100 (TRAV30, TRAJ24)
CGTEIVDAVSWGKFQF

SEQ ID NO: 702200 - protein, 12 aa, Homo sapiens
  CDR3 for beta chain variable domain of TCR clone 351100 (TRBV11-2, TRBJ2-2)
CASSLGGGELFF

SEQ ID NO: 702201 - protein, 13 aa, Homo sapiens
  CDR3 for alpha chain variable domain of TCR clone 351101 (TRAV36/DV7, TRAJ34)
CAGRPYNTAKLIF

SEQ ID NO: 702202 - protein, 15 aa, Homo sapiens
  CDR3 for beta chain variable domain of TCR clone 351101 (TRBV27, TRBJ1-6)
CASSFDRGLGSPLHF

SEQ ID NO: 702203 - protein, 13 aa, Homo sapiens
  CDR3 for alpha chain variable domain of TCR clone 351102 (TRAV21, TRAJ20)
CAVGLRVDYKLSL

SEQ ID NO: 702204 - protein, 14 aa, Homo sapiens
  CDR3 for beta chain variable domain of TCR clone 351102 (TRBV12-5, TRBJ2-5)
CASGSRTHQETQYF

SEQ ID NO: 702205 - protein, 14 aa, Homo sapiens
  CDR3 for alpha chain variable domain of TCR clone 351103 (TRAV13-2, TRAJ9)
CAENLETGGFKTIF

SEQ ID NO: 702206 - protein, 13 aa, Homo sapiens
  CDR3 for beta chain variable domain of TCR clone 351103 (TRBV9, TRBJ2-1)
CASSPSGGNEQVF

SEQ ID NO: 702207 - protein, 14 aa, Homo sapiens
  CDR3 for alpha chain variable domain of TCR clone 351104 (TRAV14/DV4, TRAJ11)
CAMREVSGYSTLTF

SEQ ID NO: 702208 - protein, 13 aa, Homo sapiens
  CDR3 for beta chain variable domain of TCR clone 351104 (TRBV7-2, TRBJ1-1)
CASNLKGAKVAFF

SEQ ID NO: 702209 - protein, 14 aa, Homo sapiens
  CDR3 for alpha chain variable domain of TCR clone 351105 (TRAV25, TRAJ6)
CAGRESGGSYIPKF

SEQ ID NO: 702210 - protein, 14 aa, Homo sapiens
  CDR3 for beta chain variable domain of TCR clone 351105 (TRBV25-1, TRBJ1-1)
CASTHLGGNTEAFF

SEQ ID NO: 702211 - protein, 16 aa, Homo sapiens
  CDR3 for alpha chain variable domain of TCR clone 351106 (TRAV3, TRAJ4)
CAVRAFFSGGYNKLIF

SEQ ID NO: 702212 - protein, 17 aa, Homo sapiens
  CDR3 for beta chain variable domain of TCR clone 351106 (TRBV11-2, TRBJ2-1)
CASSLYPPGVEYNEQFF

SEQ ID NO: 702213 - protein, 12 aa, Homo sapiens
  CDR3 for alpha chain variable domain of TCR clone 351107 (TRAV4, TRAJ26)
CLVGDYGQNFVF

SEQ ID NO: 702214 - protein, 17 aa, Homo sapiens
  CDR3 for beta chain variable domain of TCR clone 351107 (TRBV5-4, TRBJ2-3)
CISVPAVLTASIDTQYF

SEQ ID NO: 702215 - protein, 17 aa, Homo sapiens
  CDR3 for alpha chain variable domain of TCR clone 351108 (TRAV3, TRAJ42)
CAVRDRDYGGSQGNLIF

SEQ ID NO: 702216 - protein, 18 aa, Homo sapiens
  CDR3 for beta chain variable domain of TCR clone 351108 (TRBV20-1, TRBJ2-3)
CSAPGLAGGPGTTDTQYF

SEQ ID NO: 702217 - protein, 12 aa, Homo sapiens
  CDR3 for alpha chain variable domain of TCR clone 351109 (TRAV3, TRAJ20)
CAVRDGDYKLSF

SEQ ID NO: 702218 - protein, 15 aa, Homo sapiens
  CDR3 for beta chain variable domain of TCR clone 351109 (TRBV10-1, TRBJ2-3)
CASSATSGGFDTQYF

SEQ ID NO: 702219 - protein, 17 aa, Homo sapiens
  CDR3 for alpha chain variable domain of TCR clone 351110 (TRAV3, TRAJ6)
CAVRDGPRAGGSYIPTF

SEQ ID NO: 702220 - protein, 20 aa, Homo sapiens
  CDR3 for beta chain variable domain of TCR clone 351110 (TRBV28, TRBJ2-1)
CASTPIGRSPGQAGGNEQFF

SEQ ID NO: 702221 - protein, 15 aa, Homo sapiens
  CDR3 for alpha chain variable domain of TCR clone 351111 (TRAV3, TRAJ22)
CAVRDRGGSARPLTF

SEQ ID NO: 702222 - protein, 14 aa, Homo sapiens
  CDR3 for beta chain variable domain of TCR clone 351111 (TRBV7-9, TRBJ2-1)
GASSPRDSLYEQFF

SEQ ID NO: 702223 - protein, 12 aa, Homo sapiens
  CDR3 for alpha chain variable domain of TCR clone 351112 (TRAV8-3, TRAJ26)
CADDNYCQNFVF

SEQ ID NO: 702224 - protein, 15 aa, Homo sapiens
  CDR3 for beta chain variable domain of TCR clone 351112 (TRBV9, TRBJ2-1)
CASSLAGSSYNEQFF

SEQ ID NO: 702225 - protein, 13 aa, Homo sapiens
  CDR3 for alpha chain variable domain of TCR clone 351113 (TRAV13-1, TRAJ39)
CSKYSNAGNVLTF

SEQ ID NO: 702226 - protein, 16 aa, Homo sapiens
  CDR3 for beta chain variable domain of TCR clone 351113 (TRBV20-1, TRBJ1-4)
CSVPGQGLLTNEKLFF

SEQ ID NO: 702227 - protein, 14 aa, Homo sapiens
  CDR3 for alpha chain variable domain of TCR clone 351114 (TRAV1-2, TRAJ16)
CAVNRFSDGQKLLF

SEQ ID NO: 702228 - protein, 16 aa, Homo sapiens
  CDR3 for beta chain variable domain of TCR clone 351114 (TRBV12-5, TRBJ2-5)
CASGPRTSGNQETEYF

SEQ ID NO: 702229 - protein, 12 aa, Homo sapiens
  CDR3 for alpha chain variable domain of TCR clone 351115 (TRAV21, TRAJ33)
CAKMDSNYQLIW

SEQ ID NO: 702230 - protein, 19 aa, Homo sapiens
  CDR3 for beta chain variable domain of TCR clone 351115 (TRBV7-9, TRBJ2-6)
CASSLESATVLPGANVLTF

SEQ ID NO: 702231 - protein, 17 aa, Homo sapiens
  CDR3 for alpha chain variable domain of TCR clone 351116 (TRAV16, TRAJ42)
CALSPKLYGGSKGNLIF

SEQ ID NO: 702232 - protein, 13 aa, Homo sapiens
  CDR3 for beta chain variable domain of TCR clone 351116 (TRBV19, TRBJ1-5)
CASSTRRDQTQHF

SEQ ID NO: 702233 - protein, 13 aa, Homo sapiens
  CDR3 for alpha chain variable domain of TCR clone 351117 (TRAV3, TRAJ20)
CAVRDTPRYKLSF

SEQ ID NO: 702234 - protein, 14 aa, Homo sapiens
  CDR3 for beta chain variable domain of TCR clone 351117 (TRBV7-3, TRBJ2-1)
CASSLAGGTNEQFF

SEQ ID NO: 702235 - protein, 15 aa, Homo sapiens
  CDR3 for alpha chain variable domain of TCR clone 351118 (TRAV8-3, TRAJ11)
CAVGLLSSGYSTLTF

SEQ ID NO: 702236 - protein, 14 aa, Homo sapiens
  CDR3 for beta chain variable domain of TCR clone 351118 (TRBV3-1, TRBJ2-3)
CASSWSGVGDTQYF

SEQ ID NO: 702237 - protein, 16 aa, Homo sapiens
  CDR3 for alpha chain variable domain of TCR clone 351119 (TRAV39, TRAJ32)
CAVVMEYGGATNKLIF

SEQ ID NO: 702238 - protein, 14 aa, Homo sapiens
  CDR3 for beta chain variable domain of TCR clone 351119 (TRBV9, TRBJ2-4)
CASSPSGTSGLQYF

SEQ ID NO: 702239 - protein, 16 aa, Homo sapiens
  CDR3 for alpha chain variable domain of TCR clone 351120 (TRAV3, TRAJ18)
CAVRDGRGSTLGRLYF

SEQ ID NO: 702240 - protein, 17 aa, Homo sapiens
  CDR3 for beta chain variable domain of TCR clone 351120 (TRBV7-9, TRBJ1-6)
CASSSPGRGNSPPTLGT

SEQ ID NO: 702241 - protein, 17 aa, Homo sapiens
  CDR3 for alpha chain variable domain of TCR clone 351121 (TRAV26-1, TRAJ37)
CIVRVITVSSNTDKPIF

SEQ ID NO: 702242 - protein, 15 aa, Homo sapiens
  CDR3 for beta chain variable domain of TCR clone 351121 (TRBV10-1, TRBJ2-3)
CASSATSGGFDTQYF

SEQ ID NO: 702243 - protein, 13 aa, Homo sapiens
  CDR3 for alpha chain variable domain of TCR clone 351122 (TRAV21, TRAJ10)
CAVPTGGGNKRTF

SEQ ID NO: 702244 - protein, 22 aa, Homo sapiens
  CDR3 for beta chain variable domain of TCR clone 351122 (TRBV19, TRBJ2-1)
CASSVRDRVTGTSGRIYNEQFF

SEQ ID NO: 702245 - protein, 16 aa, Homo sapiens
  CDR3 for alpha chain variable domain of TCR clone 351123 (TRAV8-3, TRAJ18)
CAVALDRGSTLGRLYF

SEQ ID NO: 702246 - protein, 13 aa, Homo sapiens
  CDR3 for beta chain variable domain of TCR clone 351123 (TRBV4-1, TRBJ2-2)
CASSQENTGELFF

SEQ ID NO: 702247 - protein, 16 aa, Homo sapiens
  CDR3 for alpha chain variable domain of TCR clone 351124 (TRAV26-1, TRAJ28)
CIVRPYSGAGSYQLTF

SEQ ID NO: 702248 - protein, 16 aa, Homo sapiens
  CDR3 for beta chain variable domain of TCR clone 351124 (TRBV27, TRBJ2-2)
CASSFRGLVRTGELFF

SEQ ID NO: 702249 - protein, 17 aa, Homo sapiens
  CDR3 for alpha chain variable domain of TCR clone 351125 (TRAV8-6, TRAJ58)
CAVSSWVGDTSGSRLTF

SEQ ID NO: 702250 - protein, 14 aa, Homo sapiens
  CDR3 for beta chain variable domain of TCR clone 351125 (TRBV4-2, TRBJ2-1)
CASGLDSAYNQQFF

SEQ ID NO: 702251 - protein, 16 aa, Homo sapiens
  CDR3 for alpha chain variable domain of TCR clone 351126 (TRAV26-1, TRAJ45)
CIAEKYSGGGADGLTF

SEQ ID NO: 702252 - protein, 15 aa, Homo sapiens
  CDR3 for beta chain variable domain of TCR clone 351126 (TRBV15, TRBJ2-7)
CHQQRPIQQAYEQYF

SEQ ID NO: 702253 - protein, 11 aa, Homo sapiens
  CDR3 for alpha chain variable domain of TCR clone 351127 (TRAV3, TRAJ21)
CAVGNFNKFYF

SEQ ID NO: 702254 - protein, 12 aa, Homo sapiens
  CDR3 for beta chain variable domain of TCR clone 351127 (TRBV7-8, TRBJ2-4)
CASSLGGNIQYF

SEQ ID NO: 702255 - protein, 18 aa, Homo sapiens
  CDR3 for alpha chain variable domain of TCR clone 351128 (TRAV1-2, TRAJ18)
CAVRDMGDRGSTLGRLYF

SEQ ID NO: 702256 - protein, 13 aa, Homo sapiens
  CDR3 for beta chain variable domain of TCR clone 351128 (TRBV27, TRBJ1-1)
CASSLSIGAEAFF

SEQ ID NO: 702257 - protein, 14 aa, Homo sapiens
  CDR3 for alpha chain variable domain of TCR clone 351129 (TRAV35, TRAJ33)
CAGSSQDSNYQLIW

SEQ ID NO: 702258 - protein, 13 aa, Homo sapiens
  CDR3 for beta chain variable domain of TCR clone 351129 (TRBV20-1, TRBJ1-1)
CSARGGGNTEAFF

SEQ ID NO: 702259 - protein, 11 aa, Homo sapiens
  CDR3 for alpha chain variable domain of TCR clone 351130 (TRAV3, TRAJ21)
CAVGNFNTFYF

SEQ ID NO: 702260 - protein, 14 aa, Homo sapiens
  CDR3 for beta chain variable domain of TCR clone 351130 (TRBV25-1, TRBJ1-1)
CASTHLGGNTEAFF

SEQ ID NO: 702261 - protein, 11 aa, Homo sapiens
  CDR3 for alpha chain variable domain of TCR clone 351131 (TRAV2, TRAJ13)
CASGGYQKDTF

SEQ ID NO: 702262 - protein, 15 aa, Homo sapiens
  CDR3 for beta chain variable domain of TCR clone 351131 (TRBV29-1, TRBJ2-1)
CSGRDRKSSYNEQFF

SEQ ID NO: 702263 - protein, 13 aa, Homo sapiens
  CDR3 for alpha chain variable domain of TCR clone 351132 (TRAV23/DV6, TRAJ9)
CAASTTGGFKTIF

SEQ ID NO: 702264 - protein, 13 aa, Homo sapiens
  CDR3 for beta chain variable domain of TCR clone 351132 (TRBV12-5, TRBJ1-2)
CASGVRTGNGYTF

SEQ ID NO: 702265 - protein, 15 aa, Homo sapiens
  CDR3 for alpha chain variable domain of TCR clone 351133 (TRAV3, TRAJ13)
CAVRVYSGGYQKVTF

SEQ ID NO: 702266 - protein, 22 aa, Homo sapiens
  CDR3 for beta chain variable domain of TCR clone 351133 (TRBV6-1, TRBJ1-3)
CASVQGGGWKHHIFWRGKLAHC

SEQ ID NO: 702267 - protein, 10 aa, Homo sapiens
  CDR3 for alpha chain variable domain of TCR clone 351134 (TRAV8-4, TRAJ43)
CAVSADDMRF

SEQ ID NO: 702268 - protein, 14 aa, Homo sapiens
  CDR3 for beta chain variable domain of TCR clone 351134 (TRBV4-2, TRBJ1-2)
CASSPGGSNYGYTF

SEQ ID NO: 702269 - protein, 13 aa, Homo sapiens
  CDR3 for alpha chain variable domain of TCR clone 351135 (TRAV13-1, TRAJ21)
CAASIYNFNKFYF

SEQ ID NO: 702270 - protein, 13 aa, Homo sapiens
  CDR3 for beta chain variable domain of TCR clone 351135 (TRBV27, TRBJ1-4)
CASRLMGDEKLLF

SEQ ID NO: 702271 - protein, 19 aa, Homo sapiens
  CDR3 for alpha chain variable domain of TCR clone 351136 (TRAV40, )
CLPIPDIQNPDPAVYQLRD

SEQ ID NO: 702272 - protein, 15 aa, Homo sapiens
  CDR3 for beta chain variable domain of TCR clone 351136 (TRBV2, TRBJ1-2)
CASSEIGGANYGYTV

SEQ ID NO: 702273 - protein, 14 aa, Homo sapiens
  CDR3 for alpha chain variable domain of TCR clone 351137 (TRAV26-1, TRAJ38)
CIADNAGNNRKLIW

SEQ ID NO: 702274 - protein, 15 aa, Homo sapiens
  CDR3 for beta chain variable domain of TCR clone 351137 (TRBV20-1, TRBJ2-3)
CSASPPQVSTDTQYF

SEQ ID NO: 702275 - protein, 16 aa, Homo sapiens
  CDR3 for alpha chain variable domain of TCR clone 351138 (TRAV30, TRAJ24)
CGTETVDADSWGKFQF

SEQ ID NO: 702276 - protein, 13 aa, Homo sapiens
  CDR3 for beta chain variable domain of TCR clone 351138 (TRBV19, TRBJ1-2)
CASSVPGQDGYTF

SEQ ID NO: 702277 - protein, 13 aa, Homo sapiens
  CDR3 for alpha chain variable domain of TCR clone 351139 (TRAV21, TRAJ57)
CAVTQGGSEQLVF

SEQ ID NO: 702278 - protein, 15 aa, Homo sapiens
  CDR3 for beta chain variable domain of TCR clone 351139 (TRBV18, TRBJ2-1)
CASLPDRGRDNEQFF

SEQ ID NO: 702279 - protein, 15 aa, Homo sapiens
  CDR3 for alpha chain variable domain of TCR clone 351140 (TRAV3, TRAJ24)
CAGRDKMTAGGNCSL

SEQ ID NO: 702280 - protein, 14 aa, Homo sapiens
  CDR3 for beta chain variable domain of TCR clone 351140 (TRBV7-2, TRBJ2-3)
CASSQTGSSYTQYF

SEQ ID NO: 702281 - protein, 14 aa, Homo sapiens
  CDR3 for alpha chain variable domain of TCR clone 351141 (TRAV26-1, TRAJ44)
CIVKSTGTASKLTF

SEQ ID NO: 702282 - protein, 13 aa, Homo sapiens
  CDR3 for beta chain variable domain of TCR clone 351141 (TRBV7-9, TRBJ1-2)
CASSLKQNYGYTF

SEQ ID NO: 702283 - protein, 13 aa, Homo sapiens
  CDR3 for alpha chain variable domain of TCR clone 351142 (TRAV12-2, TRAJ39)
CAVNNNAGNMLTF

SEQ ID NO: 702284 - protein, 13 aa, Homo sapiens
  CDR3 for beta chain variable domain of TCR clone 351142 (TRBV7-2, TRBJ2-7)
CASSSPSGSEQYF

SEQ ID NO: 702285 - protein, 14 aa, Homo sapiens
  CDR3 for alpha chain variable domain of TCR clone 351143 (TRAV1-2, TRAJ8)
CAVREDTGFQTLVF

SEQ ID NO: 702286 - protein, 16 aa, Homo sapiens
  CDR3 for beta chain variable domain of TCR clone 351143 (TRBV5-7, TRBJ2-5)
CASTLAPAGGRETQYF

SEQ ID NO: 702287 - protein, 17 aa, Homo sapiens
  CDR3 for alpha chain variable domain of TCR clone 351144 (TRAV3, TRAJ42)
CAVRDRDCGGSQGNLIF

SEQ ID NO: 702288 - protein, 14 aa, Homo sapiens
  CDR3 for beta chain variable domain of TCR clone 351144 (TRBV19, TRBJ2-5)
CASSMTGQQETQYF

SEQ ID NO: 702289 - protein, 13 aa, Homo sapiens
  CDR3 for alpha chain variable domain of TCR clone 351145 (TRAV27, TRAJ6)
CAGGTRGSYIPTF

SEQ ID NO: 702290 - protein, 15 aa, Homo sapiens
  CDR3 for beta chain variable domain of TCR clone 351145 (TRBV11-2, TRBJ1-3)
CASSLSPLVRDSIYF

SEQ ID NO: 702291 - protein, 14 aa, Homo sapiens
  CDR3 for alpha chain variable domain of TCR clone 351146 (TRAV3, TRAJ21)
CAVRDAYNFNKFYF

SEQ ID NO: 702292 - protein, 15 aa, Homo sapiens
  CDR3 for beta chain variable domain of TCR clone 351146 (TRBV6-5, TRBJ1-5)
CASSYSGDSNQPQHF

SEQ ID NO: 702293 - protein, 13 aa, Homo sapiens
  CDR3 for alpha chain variable domain of TCR clone 351147 (TRAV12-1, TRAJ22)
CVVYSGSTRQLTF

SEQ ID NO: 702294 - protein, 10 aa, Homo sapiens
  CDR3 for beta chain variable domain of TCR clone 351147 (TRBV6-3, TRBJ2-2)
CASRDGELFF

SEQ ID NO: 702295 - protein, 13 aa, Homo sapiens
  CDR3 for alpha chain variable domain of TCR clone 351148 (TRAV23/DV6, TRAJ58)
CAASEIGVSRLTF

SEQ ID NO: 702296 - protein, 15 aa, Homo sapiens
  CDR3 for beta chain variable domain of TCR clone 351148 (TRBV19, TRBJ1-1)
CASTSGQIQNTEAFF

SEQ ID NO: 702297 - protein, 15 aa, Homo sapiens
  CDR3 for alpha chain variable domain of TCR clone 351149 (TRAV27, TRAJ38)
CAARRNAGNNRKLIG

SEQ ID NO: 702298 - protein, 15 aa, Homo sapiens
  CDR3 for beta chain variable domain of TCR clone 351149 (TRBV5-1, TRBJ2-1)
CASSPPRAPYNEQFF

SEQ ID NO: 702299 - protein, 16 aa, Homo sapiens
  CDR3 for alpha chain variable domain of TCR clone 351150 (TRAV38-2/DV8, TRAJ57)
CAYRRRAQGGSEKLVF

SEQ ID NO: 702300 - protein, 16 aa, Homo sapiens
  CDR3 for beta chain variable domain of TCR clone 351150 (TRBV13, TRBJ2-2)
CASSPRTGEHTGELFF

SEQ ID NO: 702301 - protein, 12 aa, Homo sapiens
  CDR3 for alpha chain variable domain of TCR clone 351151 (TRAV1-2, TRAJ29)
CAVPSGNTPLVV

SEQ ID NO: 702302 - protein, 12 aa, Homo sapiens
  CDR3 for beta chain variable domain of TCR clone 351151 (TRBV12-4, TRBJ2-7)
CASSLGGYEQYF

SEQ ID NO: 702303 - protein, 11 aa, Homo sapiens
  CDR3 for alpha chain variable domain of TCR clone 351152 (TRAV3, TRAJ21)
CAVGNVNKFYF

SEQ ID NO: 702304 - protein, 12 aa, Homo sapiens
  CDR3 for beta chain variable domain of TCR clone 351152 (TRBV11-2, TRBJ2-2)
CASSLGGGELFF

SEQ ID NO: 702305 - protein, 18 aa, Homo sapiens
  CDR3 for alpha chain variable domain of TCR clone 351153 (TRAV21, TRAJ52)
CAVRPSPAGGISYGKLTF

SEQ ID NO: 702306 - protein, 17 aa, Homo sapiens
  CDR3 for beta chain variable domain of TCR clone 351153 (TRBV13, TRBJ2-3)
GASSLSRVAGGRNTQYF

SEQ ID NO: 702307 - protein, 16 aa, Homo sapiens
  CDR3 for alpha chain variable domain of TCR clone 351154 (TRAV3, TRAJ37)
CAVRQHGSGNTAKLIF

SEQ ID NO: 702308 - protein, 15 aa, Homo sapiens
  CDR3 for beta chain variable domain of TCR clone 351154 (TRBV10-3, TRBJ2-3)
CAISLTSGGTDTQYF

SEQ ID NO: 702309 - protein, 13 aa, Homo sapiens
  CDR3 for alpha chain variable domain of TCR clone 351155 (TRAV8-3, TRAJ49)
CAVGPPTGNQVYF

SEQ ID NO: 702310 - protein, 19 aa, Homo sapiens
  CDR3 for beta chain variable domain of TCR clone 351155 (TRBV19, TRBJ2-5)
CASSIGQVTDFFLGETQYF

SEQ ID NO: 702311 - protein, 15 aa, Homo sapiens
  CDR3 for alpha chain variable domain of TCR clone 351156 (TRAV27, TRAJ38)
CAGRFNAGNNRKLIW

SEQ ID NO: 702312 - protein, 15 aa, Homo sapiens
  CDR3 for beta chain variable domain of TCR clone 351156 (TRBV27, TRBJ2-1)
CASSNGGGSSNEQFF

SEQ ID NO: 702313 - protein, 13 aa, Homo sapiens
  CDR3 for alpha chain variable domain of TCR clone 351157 (TRAV8-6, TRAJ13)
CAVSSGGYKKVTF

SEQ ID NO: 702314 - protein, 15 aa, Homo sapiens
  CDR3 for beta chain variable domain of TCR clone 351157 (TRBV7-9, TRBJ2-7)
CASSLPMGQANEQYF

SEQ ID NO: 702315 - protein, 16 aa, Homo sapiens
  CDR3 for alpha chain variable domain of TCR clone 351158 (TRAV23/DV6, TRAJ22)
CAAAAISSGSARQLTF

SEQ ID NO: 702316 - protein, 14 aa, Homo sapiens
  CDR3 for beta chain variable domain of TCR clone 351158 (TRBV25-1, TRBJ1-1)
CASTHLGGNTEAFF

SEQ ID NO: 702317 - protein, 14 aa, Homo sapiens
  CDR3 for alpha chain variable domain of TCR clone 351159 (TRAV13-2, TRAJ39)
CADHPPGAGNMLTF

SEQ ID NO: 702318 - protein, 14 aa, Homo sapiens
  CDR3 for beta chain variable domain of TCR clone 351159 (TRBV18, TRBJ2-7)
CASSPRGGAYEQYF

SEQ ID NO: 702319 - protein, 18 aa, Homo sapiens
  CDR3 for alpha chain variable domain of TCR clone 351160 (TRAV26-1, TRAJ23)
CIVRVGLEVWKQGGKLIF

SEQ ID NO: 702320 - protein, 16 aa, Homo sapiens
  CDR3 for beta chain variable domain of TCR clone 351160 (TRBV12-4, TRBJ2-5)
CASSFFVRGREETQYF

SEQ ID NO: 702321 - protein, 17 aa, Homo sapiens
  CDR3 for alpha chain variable domain of TCR clone 351161 (TRAV3, TRAJ6)
CAVRDGPRAGGSYIPTF

SEQ ID NO: 702322 - protein, 14 aa, Homo sapiens
  CDR3 for beta chain variable domain of TCR clone 351161 (TRBV6-6, TRBJ2-7)
CASSLTQVVYEQYF

SEQ ID NO: 702323 - protein, 11 aa, Homo sapiens
  CDR3 for alpha chain variable domain of TCR clone 351162 (TRAV35, TRAJ34)
CWARNTDKLIF

SEQ ID NO: 702324 - protein, 14 aa, Homo sapiens
  CDR3 for beta chain variable domain of TCR clone 351162 (TRBV4-1, TRBJ2-2)
CASSQAVNTGELFF

SEQ ID NO: 702325 - protein, 14 aa, Homo sapiens
  CDR3 for alpha chain variable domain of TCR clone 351163 (TRAV17, TRAJ35)
CATDRPGFGNVLHC

SEQ ID NO: 702326 - protein, 14 aa, Homo sapiens
  CDR3 for beta chain variable domain of TCR clone 351163 (TRBV7-8, TRBJ2-3)
CASSLEAGTDTQYV

SEQ ID NO: 702327 - protein, 18 aa, Homo sapiens
  CDR3 for alpha chain variable domain of TCR clone 351164 (TRAV21, TRAJ52)
CAVRPSPAGGNSYGKLTF

SEQ ID NO: 702328 - protein, 19 aa, Homo sapiens
  CDR3 for beta chain variable domain of TCR clone 351164 (TRBV7-2, TRBJ2-3)
CASSFLSRNWGGGTDTQYF

SEQ ID NO: 702329 - protein, 12 aa, Homo sapiens
  CDR3 for alpha chain variable domain of TCR clone 351165 (TRAV20, TRAJ20)
CAVQVNDYKLSF

SEQ ID NO: 702330 - protein, 14 aa, Homo sapiens
  CDR3 for beta chain variable domain of TCR clone 351165 (TRBV4-1, TRBJ2-2)
CASSQAVNTGELFF

SEQ ID NO: 702331 - protein, 15 aa, Homo sapiens
  CDR3 for alpha chain variable domain of TCR clone 351166 (TRAV3, TRAJ20)
CAVRDIKLSDYKLSF

SEQ ID NO: 702332 - protein, 16 aa, Homo sapiens
  CDR3 for beta chain variable domain of TCR clone 351166 (TRBV3-1, TRBJ2-5)
CASSQDWASGQETQYF

SEQ ID NO: 702333 - protein, 14 aa, Homo sapiens
  CDR3 for alpha chain variable domain of TCR clone 351167 (TRAV1-2, TRAJ8)
CAVREDTGFQKLAF

SEQ ID NO: 702334 - protein, 12 aa, Homo sapiens
  CDR3 for beta chain variable domain of TCR clone 351167 (TRBV7-9, TRBJ2-7)
CAISFGSYEQYF

SEQ ID NO: 702335 - protein, 13 aa, Homo sapiens
  CDR3 for alpha chain variable domain of TCR clone 351168 (TRAV12-3, TRAJ47)
CAMKKEYGNKLVF

SEQ ID NO: 702336 - protein, 15 aa, Homo sapiens
  CDR3 for beta chain variable domain of TCR clone 351168 (TRBV11-3, TRBJ2-7)
CASSPGPASSYEQYF

SEQ ID NO: 702337 - protein, 14 aa, Homo sapiens
  CDR3 for alpha chain variable domain of TCR clone 351169 (TRAV29/DV5, TRAJ57)
CTASEMGGSEKLVF

SEQ ID NO: 702338 - protein, 16 aa, Homo sapiens
  CDR3 for beta chain variable domain of TCR clone 351169 (TRBV6-1, TRBJ2-5)
CASSETLDRGAETQYF

SEQ ID NO: 702339 - protein, 14 aa, Homo sapiens
  CDR3 for alpha chain variable domain of TCR clone 351170 (TRAV17, TRAJ45)
CATASGGGADGLTF

SEQ ID NO: 702340 - protein, 13 aa, Homo sapiens
  CDR3 for beta chain variable domain of TCR clone 351170 (TRBV7-6, TRBJ1-2)
CASSLVADYGYTF

SEQ ID NO: 702341 - protein, 11 aa, Homo sapiens
  CDR3 for alpha chain variable domain of TCR clone 351171 (TRAV2, TRAJ33)
CAVDGNYQLIW

SEQ ID NO: 702342 - protein, 15 aa, Homo sapiens
  CDR3 for beta chain variable domain of TCR clone 351171 (TRBV19, TRBJ1-1)
CASTSGQIQNTEAFF

SEQ ID NO: 702343 - protein, 14 aa, Homo sapiens
  CDR3 for alpha chain variable domain of TCR clone 351172 (TRAV21, TRAJ45)
CAVSSGGGADGLTF

SEQ ID NO: 702344 - protein, 15 aa, Homo sapiens
  CDR3 for beta chain variable domain of TCR clone 351172 (TRBV11-3, TRBJ2-3)
CASLKDGREGDTQYF

SEQ ID NO: 702345 - protein, 12 aa, Homo sapiens
  CDR3 for alpha chain variable domain of TCR clone 351173 (TRAV21, TRAJ13)
PGPSGGYQKVTF

SEQ ID NO: 702346 - protein, 17 aa, Homo sapiens
  CDR3 for beta chain variable domain of TCR clone 351173 (TRBV7-9, TRBJ1-6)
CASSSPGREIHPSTLGT

SEQ ID NO: 702347 - protein, 13 aa, Homo sapiens
  CDR3 for alpha chain variable domain of TCR clone 351174 (TRAV17, TRAJ9)
CATDYTGGFKTIF

SEQ ID NO: 702348 - protein, 16 aa, Homo sapiens
  CDR3 for beta chain variable domain of TCR clone 351174 (TRBV7-7, TRBJ2-1)
CASSLASGISYNEQFF

SEQ ID NO: 702349 - protein, 12 aa, Homo sapiens
  CDR3 for alpha chain variable domain of TCR clone 351175 (TRAV27, TRAJ9)
CAGESGGFKTIF

SEQ ID NO: 702350 - protein, 11 aa, Homo sapiens
  CDR3 for beta chain variable domain of TCR clone 351175 (TRBV29-1, TRBJ2-5)
CSEDRTGTQYF

SEQ ID NO: 702351 - protein, 18 aa, Homo sapiens
  CDR3 for alpha chain variable domain of TCR clone 351176 (TRAV13-1, TRAJ52)
CAAKNPNAGGTSYGKLTF

SEQ ID NO: 702352 - protein, 14 aa, Homo sapiens
  CDR3 for beta chain variable domain of TCR clone 351176 (TRBV2, TRBJ2-2)
CQQQGNSRHRGAVF

SEQ ID NO: 702353 - protein, 13 aa, Homo sapiens
  CDR3 for alpha chain variable domain of TCR clone 351177 (TRAV1-2, TRAJ11)
CAVRDSGYSTLTF

SEQ ID NO: 702354 - protein, 15 aa, Homo sapiens
  CDR3 for beta chain variable domain of TCR clone 351177 (TRBV2, TRBJ2-7)
CARTLLGSGATEQYF

SEQ ID NO: 702355 - protein, 14 aa, Homo sapiens
  CDR3 for alpha chain variable domain of TCR clone 351178 (TRAV12-2, TRAJ17)
CAVLFKAAGNKLTF

SEQ ID NO: 702356 - protein, 17 aa, Homo sapiens
  CDR3 for beta chain variable domain of TCR clone 351178 (TRBV11-2, TRBJ2-1)
CASRLYPPGVEYNEQFF

SEQ ID NO: 702357 - protein, 17 aa, Homo sapiens
  CDR3 for alpha chain variable domain of TCR clone 351179 (TRAV3, TRAJ6)
CAVRDGPRAGGSYIPTF

SEQ ID NO: 702358 - protein, 13 aa, Homo sapiens
  CDR3 for beta chain variable domain of TCR clone 351179 (TRBV6-4, TRBJ1-1)
CASSLDREGIAFF

SEQ ID NO: 702359 - protein, 10 aa, Homo sapiens
  CDR3 for alpha chain variable domain of TCR clone 351180 (TRAV1-2, TRAJ31)
CAFFDARLMF

SEQ ID NO: 702360 - protein, 15 aa, Homo sapiens
  CDR3 for beta chain variable domain of TCR clone 351180 (TRBV4-2, TRBJ2-6)
CASSLQGTGANVLTF

SEQ ID NO: 702361 - protein, 11 aa, Homo sapiens
  CDR3 for alpha chain variable domain of TCR clone 351181 (TRAV1-1, TRAJ23)
CAVRQGGKLIF

SEQ ID NO: 702362 - protein, 14 aa, Homo sapiens
  CDR3 for beta chain variable domain of TCR clone 351181 (TRBV11-3, TRBJ2-1)
CASSATTSGSSQFF

SEQ ID NO: 702363 - protein, 14 aa, Homo sapiens
  CDR3 for alpha chain variable domain of TCR clone 351182 (TRAV1-2, TRAJ8)
CAVREDTGFQKLVF

SEQ ID NO: 702364 - protein, 15 aa, Homo sapiens
  CDR3 for beta chain variable domain of TCR clone 351182 (TRBV20-1, TRBJ2-7)
SSARDRVSGMDEQYF

SEQ ID NO: 702365 - protein, 23 aa, Homo sapiens
  CDR3 for alpha chain variable domain of TCR clone 351183 (TRAV26-1, TRAJ38)
CIADNAGNNPVQNPDPAVYQLRD

SEQ ID NO: 702366 - protein, 13 aa, Homo sapiens
  CDR3 for beta chain variable domain of TCR clone 351183 (TRBV20-1, TRBJ1-1)
CSARGRGNTEAFF

SEQ ID NO: 702367 - protein, 14 aa, Homo sapiens
  CDR3 for alpha chain variable domain of TCR clone 351184 (TRAV8-1, TRAJ4)
CAVPFSGGYNKLIF

SEQ ID NO: 702368 - protein, 20 aa, Homo sapiens
  CDR3 for beta chain variable domain of TCR clone 351184 (TRBV7-8, TRBJ2-2)
CASSHLFPGPTIHITGELFF

SEQ ID NO: 702369 - protein, 16 aa, Homo sapiens
  CDR3 for alpha chain variable domain of TCR clone 351185 (TRAV3, TRAJ10)
CAVRDMRAGGGNKLTF

SEQ ID NO: 702370 - protein, 17 aa, Homo sapiens
  CDR3 for beta chain variable domain of TCR clone 351185 (TRBV6-5, TRBJ2-4)
CASRPAPGQGSKNIQYF

SEQ ID NO: 702371 - protein, 16 aa, Homo sapiens
  CDR3 for alpha chain variable domain of TCR clone 351186 (TRAV8-2, TRAJ7)
CVVSEGPYYGNNRPAF

SEQ ID NO: 702372 - protein, 15 aa, Homo sapiens
  CDR3 for beta chain variable domain of TCR clone 351186 (TRBV27, TRBJ2-3)
CASSLRLAATDTQYF

SEQ ID NO: 702373 - protein, 11 aa, Homo sapiens
  CDR3 for alpha chain variable domain of TCR clone 351187 (TRAV26-1, TRAJ37)
CIVRVGRKLIF

SEQ ID NO: 702374 - protein, 12 aa, Homo sapiens
  CDR3 for beta chain variable domain of TCR clone 351187 (TRBV7-9, TRBJ1-1)
CASSLEGTEAFF

SEQ ID NO: 702375 - protein, 15 aa, Homo sapiens
  CDR3 for alpha chain variable domain of TCR clone 351188 (TRAV3, TRAJ22)
CSVRDRGGSARQLTF

SEQ ID NO: 702376 - protein, 14 aa, Homo sapiens
  CDR3 for beta chain variable domain of TCR clone 351188 (TRBV19, TRBJ2-1)
CASSKGFAENEQFF

SEQ ID NO: 702377 - protein, 15 aa, Homo sapiens
  CDR3 for alpha chain variable domain of TCR clone 351189 (TRAV34, TRAJ38)
CGADFTPGNNRKLIW

SEQ ID NO: 702378 - protein, 15 aa, Homo sapiens
  CDR3 for beta chain variable domain of TCR clone 351189 (TRBV3-1, TRBJ2-1)
CASSQQPSGGNEQFF

SEQ ID NO: 702379 - protein, 18 aa, Homo sapiens
  CDR3 for alpha chain variable domain of TCR clone 351190 (TRAV9-2, TRAJ52)
CALSRHNSGGTSSGKLTF

SEQ ID NO: 702380 - protein, 13 aa, Homo sapiens
  CDR3 for beta chain variable domain of TCR clone 351190 (TRBV7-9, TRBJ1-2)
CASSLKQNYGYTF

SEQ ID NO: 702381 - protein, 15 aa, Homo sapiens
  CDR3 for alpha chain variable domain of TCR clone 351191 (TRAV8-3, TRAJ40)
CAAPSLGSGTYSYIF

SEQ ID NO: 702382 - protein, 12 aa, Homo sapiens
  CDR3 for beta chain variable domain of TCR clone 351191 (TRBV11-2, TRBJ2-2)
CASSLGGGELFF

SEQ ID NO: 702383 - protein, 12 aa, Homo sapiens
  CDR3 for alpha chain variable domain of TCR clone 351192 (TRAV29/DV5, TRAJ15)
CASNQAGTALIF

SEQ ID NO: 702384 - protein, 15 aa, Homo sapiens
  CDR3 for beta chain variable domain of TCR clone 351192 (TRBV11-2, TRBJ2-2)
CASSLDRVNAGELFF

SEQ ID NO: 702385 - protein, 13 aa, Homo sapiens
  CDR3 for alpha chain variable domain of TCR clone 351193 (TRAV8-6, TRAJ49)
CAVITKTGNQFYF

SEQ ID NO: 702386 - protein, 15 aa, Homo sapiens
  CDR3 for beta chain variable domain of TCR clone 351193 (TRBV18, TRBJ2-1)
CASPPPSASYNEQFF

SEQ ID NO: 702387 - protein, 18 aa, Homo sapiens
  CDR3 for alpha chain variable domain of TCR clone 351194 (TRAV12-3, TRAJ52)
CAMSVGGAGGTSYGKLTF

SEQ ID NO: 702388 - protein, 12 aa, Homo sapiens
  CDR3 for beta chain variable domain of TCR clone 351194 (TRBV14, TRBJ1-1)
CASRPYETEAFF

SEQ ID NO: 702389 - protein, 14 aa, Homo sapiens
  CDR3 for alpha chain variable domain of TCR clone 351195 (TRAV1-2, TRAJ16)
CAVNRLSDGQKLLF

SEQ ID NO: 702390 - protein, 11 aa, Homo sapiens
  CDR3 for beta chain variable domain of TCR clone 351195 (TRBV12-4, TRBJ2-2)
CASSSAGELFF

SEQ ID NO: 702391 - protein, 14 aa, Homo sapiens
  CDR3 for alpha chain variable domain of TCR clone 351196 (TRAV17, TRAJ11)
CATDTSRGYSTLTF

SEQ ID NO: 702392 - protein, 13 aa, Homo sapiens
  CDR3 for beta chain variable domain of TCR clone 351196 (TRBV19, TRBJ2-5)
CARRDSGRETQYF

SEQ ID NO: 702393 - protein, 16 aa, Homo sapiens
  CDR3 for alpha chain variable domain of TCR clone 351197 (TRAV35, TRAJ28)
CAGQRYSGAGSYRLTF

SEQ ID NO: 702394 - protein, 14 aa, Homo sapiens
  CDR3 for beta chain variable domain of TCR clone 351197 (TRBV18, TRBJ2-7)
CASSPRGGAYEQYF

SEQ ID NO: 702395 - protein, 12 aa, Homo sapiens
  CDR3 for alpha chain variable domain of TCR clone 351198 (TRAV3, TRAJ43)
CAVRDPNNGIRF

SEQ ID NO: 702396 - protein, 15 aa, Homo sapiens
  CDR3 for beta chain variable domain of TCR clone 351198 (TRBV27, TRBJ1-5)
CASSLGTGFDQPQHF

SEQ ID NO: 702397 - protein, 17 aa, Homo sapiens
  CDR3 for alpha chain variable domain of TCR clone 351199 (TRAV13-1, TRAJ38)
CAASTARFAGNNRKLIW

SEQ ID NO: 702398 - protein, 16 aa, Homo sapiens
  CDR3 for beta chain variable domain of TCR clone 351199 (TRBV5-1, TRBJ2-1)
CASSLSSLRESNEQFF

SEQ ID NO: 702399 - protein, 11 aa, Homo sapiens
  CDR3 for alpha chain variable domain of TCR clone 351200 (TRAV21, TRAJ11)
CAVNGYSTLTF

SEQ ID NO: 702400 - protein, 15 aa, Homo sapiens
  CDR3 for beta chain variable domain of TCR clone 351200 (TRBV7-9, TRBJ1-5)
CASSQGHQPNQPQHF

SEQ ID NO: 702401 - protein, 14 aa, Homo sapiens
  CDR3 for alpha chain variable domain of TCR clone 351201 (TRAV38-1, TRAJ29)
CAFITPLGKTPLVF

SEQ ID NO: 702402 - protein, 14 aa, Homo sapiens
  CDR3 for beta chain variable domain of TCR clone 351201 (TRBV18, TRBJ2-7)
CASSPRGGAYEQYF

SEQ ID NO: 702403 - protein, 15 aa, Homo sapiens
  CDR3 for alpha chain variable domain of TCR clone 351202 (TRAV5, TRAJ33)
CAEAPAMDSNYQLIW

SEQ ID NO: 702404 - protein, 13 aa, Homo sapiens
  CDR3 for beta chain variable domain of TCR clone 351202 (TRBV7-2, TRBJ2-2)
CASSLAVTGELFF

SEQ ID NO: 702405 - protein, 22 aa, Homo sapiens
  CDR3 for alpha chain variable domain of TCR clone 351203 (TRAV2, TRAJ26)
CAGSPGRLWSEFCLWSRNQLVL

SEQ ID NO: 702406 - protein, 13 aa, Homo sapiens
  CDR3 for beta chain variable domain of TCR clone 351203 (TRBV7-9, TRBJ1-2)
CASSLKQNYGYTF

SEQ ID NO: 702407 - protein, 18 aa, Homo sapiens
  CDR3 for alpha chain variable domain of TCR clone 351204 (TRAV12-3, TRAJ52)
CAMSVGGAGGTSHGKLTF

SEQ ID NO: 702408 - protein, 15 aa, Homo sapiens
  CDR3 for beta chain variable domain of TCR clone 351204 (TRBV7-2, TRBJ1-2)
CASSPRAGWNYGYTF

SEQ ID NO: 702409 - protein, 12 aa, Homo sapiens
  CDR3 for alpha chain variable domain of TCR clone 351205 (TRAV12-3, TRAJ17)
CAMTITSNKLTF

SEQ ID NO: 702410 - protein, 15 aa, Homo sapiens
  CDR3 for beta chain variable domain of TCR clone 351205 (TRBV20-1, TRBJ2-7)
CSAGDRVSGMDEQYF

SEQ ID NO: 702411 - protein, 13 aa, Homo sapiens
  CDR3 for alpha chain variable domain of TCR clone 351206 (TRAV1-1, TRAJ28)
CVTSGAGSYQLTF

SEQ ID NO: 702412 - protein, 17 aa, Homo sapiens
  CDR3 for beta chain variable domain of TCR clone 351206 (TRBV18, TRBJ2-2)
CASSQRSSGQGPGELCF

SEQ ID NO: 702413 - protein, 14 aa, Homo sapiens
  CDR3 for alpha chain variable domain of TCR clone 351207 (TRAV26-1, TRAJ38)
CIAANAGNNRKLIW

SEQ ID NO: 702414 - protein, 13 aa, Homo sapiens
  CDR3 for beta chain variable domain of TCR clone 351207 (TRBV20-1, TRBJ1-1)
CSARGGGNTEAVF

SEQ ID NO: 702415 - protein, 12 aa, Homo sapiens
  CDR3 for alpha chain variable domain of TCR clone 351208 (TRAV17, TRAJ20)
CATDSNDYKLSF

SEQ ID NO: 702416 - protein, 14 aa, Homo sapiens
  CDR3 for beta chain variable domain of TCR clone 351208 (TRBV19, TRBJ2-1)
CASPTFVLGGEQFF

SEQ ID NO: 702417 - protein, 13 aa, Homo sapiens
  CDR3 for alpha chain variable domain of TCR clone 351209 (TRAV30, TRAJ24)
CGTVTHSWGKLQF

SEQ ID NO: 702418 - protein, 15 aa, Homo sapiens
  CDR3 for beta chain variable domain of TCR clone 351209 (TRBV25-1, TRBJ1-4)
CASSPGDSTNEKLFF

SEQ ID NO: 702419 - protein, 14 aa, Homo sapiens
  CDR3 for alpha chain variable domain of TCR clone 351210 (TRAV16, TRAJ39)
CALSKNNAGNMLTF

SEQ ID NO: 702420 - protein, 15 aa, Homo sapiens
  CDR3 for beta chain variable domain of TCR clone 351210 (TRBV7-9, TRBJ2-7)
CASSSSGLAVYEQYF

SEQ ID NO: 702421 - protein, 15 aa, Homo sapiens
  CDR3 for alpha chain variable domain of TCR clone 351211 (TRAV12-1, TRAJ9)
RVVSFGDTAGFKTIF

SEQ ID NO: 702422 - protein, 13 aa, Homo sapiens
  CDR3 for beta chain variable domain of TCR clone 351211 (TRBV2, TRBJ1-4)
CASSERAGEKLFF

SEQ ID NO: 702423 - protein, 12 aa, Homo sapiens
  CDR3 for alpha chain variable domain of TCR clone 351212 (TRAV23/DV6, TRAJ33)
CAAEDSNYQLIC

SEQ ID NO: 702424 - protein, 15 aa, Homo sapiens
  CDR3 for beta chain variable domain of TCR clone 351212 (TRBV20-1, TRBJ2-7)
CSARDRVSGMDEQYF

SEQ ID NO: 702425 - protein, 16 aa, Homo sapiens
  CDR3 for alpha chain variable domain of TCR clone 351213 (TRAV30, TRAJ24)
CGTEIVDADSWGKFQF

SEQ ID NO: 702426 - protein, 17 aa, Homo sapiens
  CDR3 for beta chain variable domain of TCR clone 351213 (TRBV10-3, TRBJ1-2)
CAISETRDRGLEYGYTF

SEQ ID NO: 702427 - protein, 12 aa, Homo sapiens
  CDR3 for alpha chain variable domain of TCR clone 351214 (TRAV12-3, TRAJ17)
CAMTLTGNKLTF

SEQ ID NO: 702428 - protein, 16 aa, Homo sapiens
  CDR3 for beta chain variable domain of TCR clone 351214 (TRBV20-1, TRBJ2-7)
QCDACGGVAGVEEQYF

SEQ ID NO: 702429 - protein, 14 aa, Homo sapiens
  CDR3 for alpha chain variable domain of TCR clone 351215 (TRAV21, TRAJ15)
CAVSLNQAGTALIF

SEQ ID NO: 702430 - protein, 15 aa, Homo sapiens
  CDR3 for beta chain variable domain of TCR clone 351215 (TRBV5-1, TRBJ2-1)
CASSPPRAPYNEQFF

SEQ ID NO: 702431 - protein, 16 aa, Homo sapiens
  CDR3 for alpha chain variable domain of TCR clone 351216 (TRAV3, TRAJ37)
CAVRVRGSGTTGKLIF

SEQ ID NO: 702432 - protein, 15 aa, Homo sapiens
  CDR3 for beta chain variable domain of TCR clone 351216 (TRBV3-1, TRBJ2-1)
CASSPRDSGFNEQFF

SEQ ID NO: 702433 - protein, 14 aa, Homo sapiens
  CDR3 for alpha chain variable domain of TCR clone 351217 (TRAV8-4, TRAJ23)
CAVSAPGSGGKLIF

SEQ ID NO: 702434 - protein, 17 aa, Homo sapiens
  CDR3 for beta chain variable domain of TCR clone 351217 (TRBV4-3, TRBJ2-3)
CASSQDPLAGAVDTQDF

SEQ ID NO: 702435 - protein, 14 aa, Homo sapiens
  CDR3 for alpha chain variable domain of TCR clone 351218 (TRAV2, TRAJ9)
CAVGDRSGGFKTIF

SEQ ID NO: 702436 - protein, 13 aa, Homo sapiens
  CDR3 for beta chain variable domain of TCR clone 351218 (TRBV7-9, TRBJ1-2)
CASSLKQNYGYTF

SEQ ID NO: 702437 - protein, 15 aa, Homo sapiens
  CDR3 for alpha chain variable domain of TCR clone 351219 (TRAV21, TRAJ53)
CATLNSVGSNYKLTF

SEQ ID NO: 702438 - protein, 13 aa, Homo sapiens
  CDR3 for beta chain variable domain of TCR clone 351219 (TRBV4-1, TRBJ2-2)
CASSQENTGELFF

SEQ ID NO: 702439 - protein, 11 aa, Homo sapiens
  CDR3 for alpha chain variable domain of TCR clone 351220 (TRAV2, TRAJ33)
CAVESNYQLIW

SEQ ID NO: 702440 - protein, 16 aa, Homo sapiens
  CDR3 for beta chain variable domain of TCR clone 351220 (TRBV5-4, TRBJ2-3)
CASQQPGAGGADTQYF

SEQ ID NO: 702441 - protein, 12 aa, Homo sapiens
  CDR3 for alpha chain variable domain of TCR clone 351221 (TRAV13-2, TRAJ31)
CAESYNNARLMF

SEQ ID NO: 702442 - protein, 13 aa, Homo sapiens
  CDR3 for beta chain variable domain of TCR clone 351221 (TRBV24-1, TRBJ1-3)
CATMADSGITIYF

SEQ ID NO: 702443 - protein, 17 aa, Homo sapiens
  CDR3 for alpha chain variable domain of TCR clone 351222 (TRAV4, TRAJ18)
CLVGERSVGSTLGRLYF

SEQ ID NO: 702444 - protein, 18 aa, Homo sapiens
  CDR3 for beta chain variable domain of TCR clone 351222 (TRBV10-3, TRBJ2-3)
CAISESRVGPMGGDTQYF

SEQ ID NO: 702445 - protein, 17 aa, Homo sapiens
  CDR3 for alpha chain variable domain of TCR clone 351223 (TRAV13-1, TRAJ53)
CAASWKSSGGSNYKLTF

SEQ ID NO: 702446 - protein, 19 aa, Homo sapiens
  CDR3 for beta chain variable domain of TCR clone 351223 (TRBV7-9, TRBJ2-1)
CASSHHRGALLRSYNEQFF

SEQ ID NO: 702447 - protein, 16 aa, Homo sapiens
  CDR3 for alpha chain variable domain of TCR clone 351224 (TRAV30, TRAJ24)
CGTEIVDADSWGKFQF

SEQ ID NO: 702448 - protein, 17 aa, Homo sapiens
  CDR3 for beta chain variable domain of TCR clone 351224 (TRBV13, TRBJ2-3)
CASSRSRVAGGRNTQYF

SEQ ID NO: 702449 - protein, 14 aa, Homo sapiens
  CDR3 for alpha chain variable domain of TCR clone 351225 (TRAV23/DV6, TRAJ4)
CAAPSSGGHNKLIF

SEQ ID NO: 702450 - protein, 14 aa, Homo sapiens
  CDR3 for beta chain variable domain of TCR clone 351225 (TRBV20-1, TRBJ2-7)
CSAKTGTGGYEQYF

SEQ ID NO: 702451 - protein, 11 aa, Homo sapiens
  CDR3 for alpha chain variable domain of TCR clone 351226 (TRAV16, TRAJ31)
CALFNNARLML

SEQ ID NO: 702452 - protein, 15 aa, Homo sapiens
  CDR3 for beta chain variable domain of TCR clone 351226 (TRBV5-1, TRBJ2-7)
CASSLGDFTTYEQYF

SEQ ID NO: 702453 - protein, 13 aa, Homo sapiens
  CDR3 for alpha chain variable domain of TCR clone 351227 (TRAV4, TRAJ42)
CLVGGGSQGNLIF

SEQ ID NO: 702454 - protein, 16 aa, Homo sapiens
  CDR3 for beta chain variable domain of TCR clone 351227 (TRBV5-1, TRBJ2-3)
CASSLQGRVGAYTQYF

SEQ ID NO: 702455 - protein, 15 aa, Homo sapiens
  CDR3 for alpha chain variable domain of TCR clone 351228 (TRAV3, TRAJ32)
CAVSSCGGATNKPIF

SEQ ID NO: 702456 - protein, 13 aa, Homo sapiens
  CDR3 for beta chain variable domain of TCR clone 351228 (TRBV20-1, TRBJ2-7)
CSARPSTNYEQYF

SEQ ID NO: 702457 - protein, 12 aa, Homo sapiens
  CDR3 for alpha chain variable domain of TCR clone 351229 (TRAV12-2, TRAJ8)
CAVNTGFQKLVF

SEQ ID NO: 702458 - protein, 15 aa, Homo sapiens
  CDR3 for beta chain variable domain of TCR clone 351229 (TRBV7-8, TRBJ1-5)
CASSLERRGVEPQHF

SEQ ID NO: 702459 - protein, 13 aa, Homo sapiens
  CDR3 for alpha chain variable domain of TCR clone 351230 (TRAV12-2, TRAJ37)
CAGGSGHTGKLIF

SEQ ID NO: 702460 - protein, 14 aa, Homo sapiens
  CDR3 for beta chain variable domain of TCR clone 351230 (TRBV6-1, TRBJ2-6)
CASQQGAGANVLTF

SEQ ID NO: 702461 - protein, 17 aa, Homo sapiens
  CDR3 for alpha chain variable domain of TCR clone 351231 (TRAV8-6, TRAJ58)
CAVSSWVGETSGPRLTF

SEQ ID NO: 702462 - protein, 15 aa, Homo sapiens
  CDR3 for beta chain variable domain of TCR clone 351231 (TRBV18, TRBJ2-1)
CASSPGTGGSGEQFF

SEQ ID NO: 702463 - protein, 14 aa, Homo sapiens
  CDR3 for alpha chain variable domain of TCR clone 351232 (TRAV14/DV4, TRAJ22)
CAMSPYGSARQLTF

SEQ ID NO: 702464 - protein, 15 aa, Homo sapiens
  CDR3 for beta chain variable domain of TCR clone 351232 (TRBV2, TRBJ2-3)
CASSERSGHTDTQYF

SEQ ID NO: 702465 - protein, 19 aa, Homo sapiens
  CDR3 for alpha chain variable domain of TCR clone 351233 (TRAV26-1, TRAJ52)
CIVRAHRNAGGTSYGKLTF

SEQ ID NO: 702466 - protein, 15 aa, Homo sapiens
  CDR3 for beta chain variable domain of TCR clone 351233 (TRBV7-9, TRBJ1-5)
CASSQGHQPNQPQHF

SEQ ID NO: 702467 - protein, 13 aa, Homo sapiens
  CDR3 for alpha chain variable domain of TCR clone 351234 (TRAV8-6, TRAJ49)
CAVITNTGNQFYF

SEQ ID NO: 702468 - protein, 13 aa, Homo sapiens
  CDR3 for beta chain variable domain of TCR clone 351234 (TRBV19, TRBJ2-7)
CASSIDRTYEQYF

SEQ ID NO: 702469 - protein, 15 aa, Homo sapiens
  CDR3 for alpha chain variable domain of TCR clone 351235 (TRAV13-1, TRAJ44)
CAASLGAGTASKLTF

SEQ ID NO: 702470 - protein, 12 aa, Homo sapiens
  CDR3 for beta chain variable domain of TCR clone 351235 (TRBV11-2, TRBJ2-2)
CASGLGGGELFF

SEQ ID NO: 702471 - protein, 12 aa, Homo sapiens
  CDR3 for alpha chain variable domain of TCR clone 351236 (TRAV21, TRAJ11)
CAATSGYSTLTF

SEQ ID NO: 702472 - protein, 11 aa, Homo sapiens
  CDR3 for beta chain variable domain of TCR clone 351236 (TRBV28, TRBJ2-2)
CASSLEGVRTP

SEQ ID NO: 702473 - protein, 14 aa, Homo sapiens
  CDR3 for alpha chain variable domain of TCR clone 351237 (TRAV21, TRAJ52)
CGRAGGTSYGKLTF

SEQ ID NO: 702474 - protein, 14 aa, Homo sapiens
  CDR3 for beta chain variable domain of TCR clone 351237 (TRBV19, TRBJ1-2)
CASSVLGYNYGYTV

SEQ ID NO: 702475 - protein, 14 aa, Homo sapiens
  CDR3 for alpha chain variable domain of TCR clone 351238 (TRAV17, TRAJ57)
CATDPQGGSEKLVF

SEQ ID NO: 702476 - protein, 15 aa, Homo sapiens
  CDR3 for beta chain variable domain of TCR clone 351238 (TRBV20-1, TRBJ2-7)
CSASDRVSGMDEQYF

SEQ ID NO: 702477 - protein, 14 aa, Homo sapiens
  CDR3 for alpha chain variable domain of TCR clone 351239 (TRAV12-2, TRAJ13)
CAVKKTGGYQKVTF

SEQ ID NO: 702478 - protein, 16 aa, Homo sapiens
  CDR3 for beta chain variable domain of TCR clone 351239 (TRBV11-2, TRBJ2-3)
CASSFQGRGALDTQYF

SEQ ID NO: 702479 - protein, 14 aa, Homo sapiens
  CDR3 for alpha chain variable domain of TCR clone 351240 (TRAV1-1, TRAJ27)
CAVIYKTNACKSTF

SEQ ID NO: 702480 - protein, 14 aa, Homo sapiens
  CDR3 for beta chain variable domain of TCR clone 351240 (TRBV25-1, TRBJ1-1)
CASTHLGGNTEAFF

SEQ ID NO: 702481 - protein, 14 aa, Homo sapiens
  CDR3 for alpha chain variable domain of TCR clone 351241 (TRAV17, TRAJ56)
CATVPAGANSKLTF

SEQ ID NO: 702482 - protein, 13 aa, Homo sapiens
  CDR3 for beta chain variable domain of TCR clone 351241 (TRBV19, TRBJ2-5)
CASSIRGRETQYF

SEQ ID NO: 702483 - protein, 16 aa, Homo sapiens
  CDR3 for alpha chain variable domain of TCR clone 351242 (TRAV16, TRAJ4)
CALSRMFSGGYNKLIF

SEQ ID NO: 702484 - protein, 13 aa, Homo sapiens
  CDR3 for beta chain variable domain of TCR clone 351242 (TRBV7-9, TRBJ2-3)
CASSPGSTDTQYF

SEQ ID NO: 702485 - protein, 15 aa, Homo sapiens
  CDR3 for alpha chain variable domain of TCR clone 351243 (TRAV2, TRAJ22)
CAVPSRRGSARQLTF

SEQ ID NO: 702486 - protein, 11 aa, Homo sapiens
  CDR3 for beta chain variable domain of TCR clone 351243 (TRBV27, TRBJ2-3)
CASSLGDTQYF

SEQ ID NO: 702487 - protein, 18 aa, Homo sapiens
  CDR3 for alpha chain variable domain of TCR clone 351244 (TRAV21, TRAJ52)
CAVRPSPAGSTSYGKLTF

SEQ ID NO: 702488 - protein, 17 aa, Homo sapiens
  CDR3 for beta chain variable domain of TCR clone 351244 (TRBV13, TRBJ2-3)
YASSLSRVAGGRNTQYF

SEQ ID NO: 702489 - protein, 16 aa, Homo sapiens
  CDR3 for alpha chain variable domain of TCR clone 351245 (TRAV3, TRAJ10)
CAVIDMRAGGGNKLTF

SEQ ID NO: 702490 - protein, 17 aa, Homo sapiens
  CDR3 for beta chain variable domain of TCR clone 351245 (TRBV28, TRBJ2-5)
CASSTPEGDALQETQYF

SEQ ID NO: 702491 - protein, 14 aa, Homo sapiens
  CDR3 for alpha chain variable domain of TCR clone 351246 (TRAV29/DV5, TRAJ32)
CAAAYGGAPNKLIF

SEQ ID NO: 702492 - protein, 16 aa, Homo sapiens
  CDR3 for beta chain variable domain of TCR clone 351246 (TRBV7-9, TRBJ1-3)
CASSQTSGLRMGTIYF

SEQ ID NO: 702493 - protein, 17 aa, Homo sapiens
  CDR3 for alpha chain variable domain of TCR clone 351247 (TRAV23/DV6, TRAJ3)
CINHFCFGWISASKIIF

SEQ ID NO: 702494 - protein, 15 aa, Homo sapiens
  CDR3 for beta chain variable domain of TCR clone 351247 (TRBV19, TRBJ1-6)
CASSTQGAVGSPLHF

SEQ ID NO: 702495 - protein, 16 aa, Homo sapiens
  CDR3 for alpha chain variable domain of TCR clone 351248 (TRAV30, TRAJ24)
CGTEIVDADSWGKFQF

SEQ ID NO: 702496 - protein, 18 aa, Homo sapiens
  CDR3 for beta chain variable domain of TCR clone 351248 (TRBV11-2, TRBJ2-6)
CASSLNPSLGTGANGLTF

SEQ ID NO: 702497 - protein, 15 aa, Homo sapiens
  CDR3 for alpha chain variable domain of TCR clone 351249 (TRAV1-2, TRAJ13)
CAVRGSSGGYQKGTF

SEQ ID NO: 702498 - protein, 15 aa, Homo sapiens
  CDR3 for beta chain variable domain of TCR clone 351249 (TRBV11-3, TRBJ1-3)
CASSLSGTSGNTIYF

SEQ ID NO: 702499 - protein, 14 aa, Homo sapiens
  CDR3 for alpha chain variable domain of TCR clone 351250 (TRAV1-1, TRAJ23)
CAVSIYNQGGKLVF

SEQ ID NO: 702500 - protein, 15 aa, Homo sapiens
  CDR3 for beta chain variable domain of TCR clone 351250 (TRBV5-8, TRBJ2-2)
CASSLDRGAAGELFF

SEQ ID NO: 702501 - protein, 13 aa, Homo sapiens
  CDR3 for alpha chain variable domain of TCR clone 351251 (TRAV21, TRAJ20)
CAVGLRVDYKLSF

SEQ ID NO: 702502 - protein, 13 aa, Homo sapiens
  CDR3 for beta chain variable domain of TCR clone 351251 (TRBV6-1, TRBJ1-1)
CSSSRQGNTEAFF

SEQ ID NO: 702503 - protein, 13 aa, Homo sapiens
  CDR3 for alpha chain variable domain of TCR clone 351252 (TRAV13-1, TRAJ36)
CAASNSGANNLFF

SEQ ID NO: 702504 - protein, 16 aa, Homo sapiens
  CDR3 for beta chain variable domain of TCR clone 351252 (TRBV19, TRBJ2-1)
CASSKAGPSSYNEQFF

SEQ ID NO: 702505 - protein, 12 aa, Homo sapiens
  CDR3 for alpha chain variable domain of TCR clone 351253 (TRAV12-3, TRAJ17)
CAMTLTGDKLTF

SEQ ID NO: 702506 - protein, 15 aa, Homo sapiens
  CDR3 for beta chain variable domain of TCR clone 351253 (TRBV20-1, TRBJ2-7)
CSARDRVSGMDEHYF

SEQ ID NO: 702507 - protein, 16 aa, Homo sapiens
  CDR3 for alpha chain variable domain of TCR clone 351254 (TRAV12-2, TRAJ32)
CALNLGQGGAINKLIF

SEQ ID NO: 702508 - protein, 14 aa, Homo sapiens
  CDR3 for beta chain variable domain of TCR clone 351254 (TRBV19, TRBJ2-1)
CASPTFVLSGEQFF

SEQ ID NO: 702509 - protein, 18 aa, Homo sapiens
  CDR3 for alpha chain variable domain of TCR clone 351255 (TRAV23/DV6, )
CAEPDIQNPDPAVYQLRH

SEQ ID NO: 702510 - protein, 15 aa, Homo sapiens
  CDR3 for beta chain variable domain of TCR clone 351255 (TRBV12-4, TRBJ2-5)
CASTLNSGRGETQYF

SEQ ID NO: 702511 - protein, 14 aa, Homo sapiens
  CDR3 for alpha chain variable domain of TCR clone 351256 (TRAV12-2, TRAJ40)
CAVKIPSGTYKYIF

SEQ ID NO: 702512 - protein, 17 aa, Homo sapiens
  CDR3 for beta chain variable domain of TCR clone 351256 (TRBV7-8, TRBJ2-6)
CASSAGTGCAGANVLTF

SEQ ID NO: 702513 - protein, 13 aa, Homo sapiens
  CDR3 for alpha chain variable domain of TCR clone 351257 (TRAV3, TRAJ15)
CAVRDQAGTALIF

SEQ ID NO: 702514 - protein, 13 aa, Homo sapiens
  CDR3 for beta chain variable domain of TCR clone 351257 (TRBV2, TRBJ2-7)
CASSVGWSGEQYF

SEQ ID NO: 702515 - protein, 16 aa, Homo sapiens
  CDR3 for alpha chain variable domain of TCR clone 351258 (TRAV3, TRAJ10)
CAVRDMRAGGGSKLTF

SEQ ID NO: 702516 - protein, 16 aa, Homo sapiens
  CDR3 for beta chain variable domain of TCR clone 351258 (TRBV2, TRBJ2-7)
CASSEPWTGPSYEQYF

SEQ ID NO: 702517 - protein, 13 aa, Homo sapiens
  CDR3 for alpha chain variable domain of TCR clone 351259 (TRAV2, TRAJ40)
CAVVTSGTYKYIF

SEQ ID NO: 702518 - protein, 14 aa, Homo sapiens
  CDR3 for beta chain variable domain of TCR clone 351259 (TRBV19, TRBJ2-1)
CASPTVVLSGEQLF

SEQ ID NO: 702519 - protein, 15 aa, Homo sapiens
  CDR3 for alpha chain variable domain of TCR clone 351260 (TRAV8-3, TRAJ11)
CAVGLLNSGYSTLTL

SEQ ID NO: 702520 - protein, 16 aa, Homo sapiens
  CDR3 for beta chain variable domain of TCR clone 351260 (TRBV7-9, TRBJ1-2)
CASSLGSSSGEDGYTF

SEQ ID NO: 702521 - protein, 17 aa, Homo sapiens
  CDR3 for alpha chain variable domain of TCR clone 351261 (TRAV1-2, TRAJ37)
CAVRDFMALATQANKSL

SEQ ID NO: 702522 - protein, 14 aa, Homo sapiens
  CDR3 for beta chain variable domain of TCR clone 351261 (TRBV2, TRBJ2-5)
CASSEVLAQETQYF

SEQ ID NO: 702523 - protein, 15 aa, Homo sapiens
  CDR3 for alpha chain variable domain of TCR clone 351262 (TRAV23/DV6, TRAJ18)
CAARYSGSTLGRLYF

SEQ ID NO: 702524 - protein, 13 aa, Homo sapiens
  CDR3 for beta chain variable domain of TCR clone 351262 (TRBV7-9, TRBJ1-2)
CASSLKQNYGYTF

SEQ ID NO: 702525 - protein, 10 aa, Homo sapiens
  CDR3 for alpha chain variable domain of TCR clone 351263 (TRAV12-2, TRAJ48)
CAVTSEKLTF

SEQ ID NO: 702526 - protein, 17 aa, Homo sapiens
  CDR3 for beta chain variable domain of TCR clone 351263 (TRBV11-1, TRBJ2-7)
CASSFTGSFGLDYEQYF

SEQ ID NO: 702527 - protein, 12 aa, Homo sapiens
  CDR3 for alpha chain variable domain of TCR clone 351264 (TRAV17, TRAJ45)
CDAGGGADGLTF

SEQ ID NO: 702528 - protein, 13 aa, Homo sapiens
  CDR3 for beta chain variable domain of TCR clone 351264 (TRBV20-1, TRBJ2-7)
CSARGTVSYEQYF

SEQ ID NO: 702529 - protein, 16 aa, Homo sapiens
  CDR3 for alpha chain variable domain of TCR clone 351265 (TRAV22, TRAJ45)
CAVERGKRGGADGLTF

SEQ ID NO: 702530 - protein, 16 aa, Homo sapiens
  CDR3 for beta chain variable domain of TCR clone 351265 (TRBV5-1, TRBJ2-5)
CASSLMRTSGQETQYF

SEQ ID NO: 702531 - protein, 13 aa, Homo sapiens
  CDR3 for alpha chain variable domain of TCR clone 351266 (TRAV12-3, TRAJ54)
CAMTLQGAQKLAF

SEQ ID NO: 702532 - protein, 14 aa, Homo sapiens
  CDR3 for beta chain variable domain of TCR clone 351266 (TRBV4-1, TRBJ2-2)
CASSQAVNTGELFF

SEQ ID NO: 702533 - protein, 14 aa, Homo sapiens
  CDR3 for alpha chain variable domain of TCR clone 351267 (TRAV12-2, TRAJ8)
CAVKKTGGYQKLVF

SEQ ID NO: 702534 - protein, 15 aa, Homo sapiens
  CDR3 for beta chain variable domain of TCR clone 351267 (TRBV6-3, TRBJ2-7)
CASSSPGTVFYEQYF

SEQ ID NO: 702535 - protein, 13 aa, Homo sapiens
  CDR3 for alpha chain variable domain of TCR clone 351268 (TRAV17, TRAJ54)
CATVIHGAQKLVF

SEQ ID NO: 702536 - protein, 15 aa, Homo sapiens
  CDR3 for beta chain variable domain of TCR clone 351268 (TRBV13, TRBJ2-1)
CASSLLSGLNNEQFF

SEQ ID NO: 702537 - protein, 14 aa, Homo sapiens
  CDR3 for alpha chain variable domain of TCR clone 351269 (TRAV8-4, TRAJ13)
CAVTLSGGYQKVPF

SEQ ID NO: 702538 - protein, 13 aa, Homo sapiens
  CDR3 for beta chain variable domain of TCR clone 351269 (TRBV4-2, TRBJ1-1)
CASSQAGNTEAFF

SEQ ID NO: 702539 - protein, 13 aa, Homo sapiens
  CDR3 for alpha chain variable domain of TCR clone 351270 (TRAV16, TRAJ37)
CALRGSNTGKLIF

SEQ ID NO: 702540 - protein, 15 aa, Homo sapiens
  CDR3 for beta chain variable domain of TCR clone 351270 (TRBV20-1, TRBJ2-1)
CSARGGGLSYNEQFF

SEQ ID NO: 702541 - protein, 14 aa, Homo sapiens
  CDR3 for alpha chain variable domain of TCR clone 351271 (TRAV12-2, TRAJ15)
CAPHTGQAGTALTF

SEQ ID NO: 702542 - protein, 14 aa, Homo sapiens
  CDR3 for beta chain variable domain of TCR clone 351271 (TRBV6-1, TRBJ1-3)
CASVQGGGGNTIYF

SEQ ID NO: 702543 - protein, 13 aa, Homo sapiens
  CDR3 for alpha chain variable domain of TCR clone 351272 (TRAV12-2, TRAJ39)
CAVTDNAGNMLTF

SEQ ID NO: 702544 - protein, 13 aa, Homo sapiens
  CDR3 for beta chain variable domain of TCR clone 351272 (TRBV10-3, TRBJ2-7)
CASKLAVNYEQYF

SEQ ID NO: 702545 - protein, 15 aa, Homo sapiens
  CDR3 for alpha chain variable domain of TCR clone 351273 (TRAV27, TRAJ28)
CAGASQGAGSYQLTF

SEQ ID NO: 702546 - protein, 13 aa, Homo sapiens
  CDR3 for beta chain variable domain of TCR clone 351273 (TRBV11-2, TRBJ2-7)
CASSGTRPYEQYF

SEQ ID NO: 702547 - protein, 19 aa, Homo sapiens
  CDR3 for alpha chain variable domain of TCR clone 351274 (TRAV38-1, TRAJ53)
CAFMKHGLERGGSNYKLTF

SEQ ID NO: 702548 - protein, 13 aa, Homo sapiens
  CDR3 for beta chain variable domain of TCR clone 351274 (TRBV19, TRBJ2-7)
CASSTRQSYEQYF

SEQ ID NO: 702549 - protein, 10 aa, Homo sapiens
  CDR3 for alpha chain variable domain of TCR clone 351275 (TRAV30, TRAJ48)
CGIGNEKLTF

SEQ ID NO: 702550 - protein, 16 aa, Homo sapiens
  CDR3 for beta chain variable domain of TCR clone 351275 (TRBV27, TRBJ2-2)
CASSSDRGTGTGELFF

SEQ ID NO: 702551 - protein, 12 aa, Homo sapiens
  CDR3 for alpha chain variable domain of TCR clone 351276 (TRAV13-1, TRAJ15)
CAASQAGTALIF

SEQ ID NO: 702552 - protein, 15 aa, Homo sapiens
  CDR3 for beta chain variable domain of TCR clone 351276 (TRBV7-6, TRBJ1-2)
CASSSGGRGGYGYTF

SEQ ID NO: 702553 - protein, 13 aa, Homo sapiens
  CDR3 for alpha chain variable domain of TCR clone 351277 (TRAV12-3, TRAJ46)
CAMKKSSGDKLTV

SEQ ID NO: 702554 - protein, 17 aa, Homo sapiens
  CDR3 for beta chain variable domain of TCR clone 351277 (TRBV3-1, TRBJ2-5)
CASSQGLAGMYQETQYF

SEQ ID NO: 702555 - protein, 16 aa, Homo sapiens
  CDR3 for alpha chain variable domain of TCR clone 351278 (TRAV35, TRAJ28)
CAGVAYSGAGSYQLTF

SEQ ID NO: 702556 - protein, 14 aa, Homo sapiens
  CDR3 for beta chain variable domain of TCR clone 351278 (TRBV27, TRBJ2-2)
CASRPGVNTGELFF

SEQ ID NO: 702557 - protein, 13 aa, Homo sapiens
  CDR3 for alpha chain variable domain of TCR clone 351279 (TRAV21, TRAJ37)
CVVSSGNTGKLIF

SEQ ID NO: 702558 - protein, 13 aa, Homo sapiens
  CDR3 for beta chain variable domain of TCR clone 351279 (TRBV7-6, TRBJ2-3)
CASSLRSDNTQYF

SEQ ID NO: 702559 - protein, 18 aa, Homo sapiens
  CDR3 for alpha chain variable domain of TCR clone 351280 (TRAV17, TRAJ28)
CATDPPRGSGAGSYQLTF

SEQ ID NO: 702560 - protein, 14 aa, Homo sapiens
  CDR3 for beta chain variable domain of TCR clone 351280 (TRBV13, TRBJ2-5)
YASSLDCPQETQYF

SEQ ID NO: 702561 - protein, 12 aa, Homo sapiens
  CDR3 for alpha chain variable domain of TCR clone 351281 (TRAV2, TRAJ31)
CAVEDNNARLMF

SEQ ID NO: 702562 - protein, 17 aa, Homo sapiens
  CDR3 for beta chain variable domain of TCR clone 351281 (TRBV11-2, TRBJ2-1)
CASSLYPPGVEYNEQFF

SEQ ID NO: 702563 - protein, 13 aa, Homo sapiens
  CDR3 for alpha chain variable domain of TCR clone 351282 (TRAV27, TRAJ6)
CAGGTRGSYIPTF

SEQ ID NO: 702564 - protein, 14 aa, Homo sapiens
  CDR3 for beta chain variable domain of TCR clone 351282 (TRBV6-1, TRBJ1-3)
CASVQWGGGNTIYF

SEQ ID NO: 702565 - protein, 15 aa, Homo sapiens
  CDR3 for alpha chain variable domain of TCR clone 351283 (TRAV38-2/DV8, TRAJ48)
CAYRSGGFGNEKLIF

SEQ ID NO: 702566 - protein, 16 aa, Homo sapiens
  CDR3 for beta chain variable domain of TCR clone 351283 (TRBV28, TRBJ2-7)
CASSPWVATGDLSQYF

SEQ ID NO: 702567 - protein, 14 aa, Homo sapiens
  CDR3 for alpha chain variable domain of TCR clone 351284 (TRAV1-2, TRAJ16)
SAVNRFSDGQKLLV

SEQ ID NO: 702568 - protein, 14 aa, Homo sapiens
  CDR3 for beta chain variable domain of TCR clone 351284 (TRBV19, TRBJ2-1)
CASPTFVLSGEQFF

SEQ ID NO: 702569 - protein, 13 aa, Homo sapiens
  CDR3 for alpha chain variable domain of TCR clone 351285 (TRAV12-3, TRAJ46)
CAVKKISGDNLTF

SEQ ID NO: 702570 - protein, 13 aa, Homo sapiens
  CDR3 for beta chain variable domain of TCR clone 351285 (TRBV6-1, TRBJ2-1)
CASSHDRNNEQFF

SEQ ID NO: 702571 - protein, 13 aa, Homo sapiens
  CDR3 for alpha chain variable domain of TCR clone 351286 (TRAV8-6, TRAJ49)
CAVITNTGNQFYF

SEQ ID NO: 702572 - protein, 14 aa, Homo sapiens
  CDR3 for beta chain variable domain of TCR clone 351286 (TRBV5-1, TRBJ2-7)
CASSRGVSLYEQYF

SEQ ID NO: 702573 - protein, 15 aa, Homo sapiens
  CDR3 for alpha chain variable domain of TCR clone 351287 (TRAV17, TRAJ22)
CYAPISSGSARQLTF

SEQ ID NO: 702574 - protein, 13 aa, Homo sapiens
  CDR3 for beta chain variable domain of TCR clone 351287 (TRBV11-2, TRBJ2-1)
CASSLGLAGGRFF

SEQ ID NO: 702575 - protein, 13 aa, Homo sapiens
  CDR3 for alpha chain variable domain of TCR clone 351288 (TRAV17, TRAJ5)
CALRGTGRSALTF

SEQ ID NO: 702576 - protein, 14 aa, Homo sapiens
  CDR3 for beta chain variable domain of TCR clone 351288 (TRBV12-5, TRBJ2-5)
CASGSRTHQETQYF

SEQ ID NO: 702577 - protein, 16 aa, Homo sapiens
  CDR3 for alpha chain variable domain of TCR clone 351289 (TRAV23/DV6, TRAJ9)
CAASIGGNTGGFKTIF

SEQ ID NO: 702578 - protein, 14 aa, Homo sapiens
  CDR3 for beta chain variable domain of TCR clone 351289 (TRBV9, TRBJ2-7)
CASSVGVGSYEQNF

SEQ ID NO: 702579 - protein, 11 aa, Homo sapiens
  CDR3 for alpha chain variable domain of TCR clone 351290 (TRAV2, TRAJ4)
CAVGWYDKLIF

SEQ ID NO: 702580 - protein, 15 aa, Homo sapiens
  CDR3 for beta chain variable domain of TCR clone 351290 (TRBV7-2, TRBJ2-2)
CASSFQRGETGELFF

SEQ ID NO: 702581 - protein, 15 aa, Homo sapiens
  CDR3 for alpha chain variable domain of TCR clone 351291 (TRAV12-3, TRAJ6)
CAMSATTGGSYMPTF

SEQ ID NO: 702582 - protein, 16 aa, Homo sapiens
  CDR3 for beta chain variable domain of TCR clone 351291 (TRBV9, TRBJ2-1)
CASSPTTGASYNEQFF

SEQ ID NO: 702583 - protein, 13 aa, Homo sapiens
  CDR3 for alpha chain variable domain of TCR clone 351292 (TRAV36/DV7, TRAJ49)
CAGDLNTGNQFYF

SEQ ID NO: 702584 - protein, 17 aa, Homo sapiens
  CDR3 for beta chain variable domain of TCR clone 351292 (TRBV7-3, TRBJ2-3)
CASSLMKRMRGADTQYF

SEQ ID NO: 702585 - protein, 15 aa, Homo sapiens
  CDR3 for alpha chain variable domain of TCR clone 351293 (TRAV26-1, TRAJ17)
CISQSCRQQADFWRR

SEQ ID NO: 702586 - protein, 16 aa, Homo sapiens
  CDR3 for beta chain variable domain of TCR clone 351293 (TRBV28, TRBJ1-4)
CASSSRTGAANEKLFF

SEQ ID NO: 702587 - protein, 12 aa, Homo sapiens
  CDR3 for alpha chain variable domain of TCR clone 351294 (TRAV1-1, TRAJ39)
CAVPVVGNMLAF

SEQ ID NO: 702588 - protein, 14 aa, Homo sapiens
  CDR3 for beta chain variable domain of TCR clone 351294 (TRBV7-3, TRBJ1-1)
CASSLGTGYTEAFF

SEQ ID NO: 702589 - protein, 12 aa, Homo sapiens
  CDR3 for alpha chain variable domain of TCR clone 351295 (TRAV1-1, TRAJ43)
CAPRVSSNDMRF

SEQ ID NO: 702590 - protein, 15 aa, Homo sapiens
  CDR3 for beta chain variable domain of TCR clone 351295 (TRBV5-1, TRBJ2-7)
CASSLGDFTTYEQYV

SEQ ID NO: 702591 - protein, 12 aa, Homo sapiens
  CDR3 for alpha chain variable domain of TCR clone 351296 (TRAV29/DV5, TRAJ49)
CAATDTGNSSIL

SEQ ID NO: 702592 - protein, 19 aa, Homo sapiens
  CDR3 for beta chain variable domain of TCR clone 351296 (TRBV25-1, TRBJ2-2)
CAILVYRVDRGRKTGELFF

SEQ ID NO: 702593 - protein, 13 aa, Homo sapiens
  CDR3 for alpha chain variable domain of TCR clone 351297 (TRAV13-1, TRAJ21)
CAASIYTFNKFYL

SEQ ID NO: 702594 - protein, 13 aa, Homo sapiens
  CDR3 for beta chain variable domain of TCR clone 351297 (TRBV27, TRBJ1-4)
CASSLMGDEKLFF

SEQ ID NO: 702595 - protein, 14 aa, Homo sapiens
  CDR3 for alpha chain variable domain of TCR clone 351298 (TRAV12-1, TRAJ15)
CLPPANQAGTALIF

SEQ ID NO: 702596 - protein, 13 aa, Homo sapiens
  CDR3 for beta chain variable domain of TCR clone 351298 (TRBV7-2, TRBJ2-4)
CASSRDHANIQYF

SEQ ID NO: 702597 - protein, 12 aa, Homo sapiens
  CDR3 for alpha chain variable domain of TCR clone 351299 (TRAV13-1, TRAJ9)
CASHTGGFKTIF

SEQ ID NO: 702598 - protein, 13 aa, Homo sapiens
  CDR3 for beta chain variable domain of TCR clone 351299 (TRBV11-2, TRBJ2-5)
CASSFSSQETQYF

SEQ ID NO: 702599 - protein, 14 aa, Homo sapiens
  CDR3 for alpha chain variable domain of TCR clone 351300 (TRAV1-2, TRAJ16)
CAVNRFSDGQKLLF

SEQ ID NO: 702600 - protein, 13 aa, Homo sapiens
  CDR3 for beta chain variable domain of TCR clone 351300 (TRBV28, TRBJ2-7)
CASSPSGTYEQYF

SEQ ID NO: 702601 - protein, 15 aa, Homo sapiens
  CDR3 for alpha chain variable domain of TCR clone 351301 (TRAV3, TRAJ22)
CAARDRGGSARQLTF

SEQ ID NO: 702602 - protein, 13 aa, Homo sapiens
  CDR3 for beta chain variable domain of TCR clone 351301 (TRBV20-1, TRBJ1-1)
CSARVGGNTEAFF

SEQ ID NO: 702603 - protein, 12 aa, Homo sapiens
  CDR3 for alpha chain variable domain of TCR clone 351302 (TRAV21, TRAJ31)
CVLAGNNARLMF

SEQ ID NO: 702604 - protein, 16 aa, Homo sapiens
  CDR3 for beta chain variable domain of TCR clone 351302 (TRBV27, TRBJ2-5)
CANSFGPGGTKETQYF

SEQ ID NO: 702605 - protein, 15 aa, Homo sapiens
  CDR3 for alpha chain variable domain of TCR clone 351303 (TRAV12-2, TRAJ53)
CAVNGGGGSNYKLTF

SEQ ID NO: 702606 - protein, 17 aa, Homo sapiens
  CDR3 for beta chain variable domain of TCR clone 351303 (TRBV7-3, TRBJ2-3)
CASSLKKRMRGADTQYF

SEQ ID NO: 702607 - protein, 12 aa, Homo sapiens
  CDR3 for alpha chain variable domain of TCR clone 351304 (TRAV2, TRAJ29)
CFPNSGNTPLVF

SEQ ID NO: 702608 - protein, 13 aa, Homo sapiens
  CDR3 for beta chain variable domain of TCR clone 351304 (TRBV7-7, TRBJ2-3)
CASSLSRAETQYF

SEQ ID NO: 702609 - protein, 12 aa, Homo sapiens
  CDR3 for alpha chain variable domain of TCR clone 351305 (TRAV2, TRAJ9)
CAVGAGGFKTIF

SEQ ID NO: 702610 - protein, 16 aa, Homo sapiens
  CDR3 for beta chain variable domain of TCR clone 351305 (TRBV13, TRBJ2-2)
CARSTRTGEHTGELFF

SEQ ID NO: 702611 - protein, 12 aa, Homo sapiens
  CDR3 for alpha chain variable domain of TCR clone 351306 (TRAV12-1, )
CVVNSWISRTLT

SEQ ID NO: 702612 - protein, 16 aa, Homo sapiens
  CDR3 for beta chain variable domain of TCR clone 351306 (TRBV27, TRBJ2-2)
CASSFRGLVRTGELFF

SEQ ID NO: 702613 - protein, 15 aa, Homo sapiens
  CDR3 for alpha chain variable domain of TCR clone 351307 (TRAV26-1, TRAJ15)
CIVRAANQAGTALIF

SEQ ID NO: 702614 - protein, 15 aa, Homo sapiens
  CDR3 for beta chain variable domain of TCR clone 351307 (TRBV28, TRBJ2-5)
CASSPPWSYQETQYF

SEQ ID NO: 702615 - protein, 13 aa, Homo sapiens
  CDR3 for alpha chain variable domain of TCR clone 351308 (TRAV3, TRAJ20)
CCEAFCNDYRLSF

SEQ ID NO: 702616 - protein, 15 aa, Homo sapiens
  CDR3 for beta chain variable domain of TCR clone 351308 (TRBV7-8, TRBJ1-1)
CASSLGDSRNTEAFF

SEQ ID NO: 702617 - protein, 15 aa, Homo sapiens
  CDR3 for alpha chain variable domain of TCR clone 351309 (TRAV2, TRAJ9)
CAVEDRGTVGCKTIF

SEQ ID NO: 702618 - protein, 16 aa, Homo sapiens
  CDR3 for beta chain variable domain of TCR clone 351309 (TRBV24-1, TRBJ2-3)
CATSDPGTGATDTQYF

SEQ ID NO: 702619 - protein, 10 aa, Homo sapiens
  CDR3 for alpha chain variable domain of TCR clone 351310 (TRAV26-1, TRAJ22)
CIAGSRQLTF

SEQ ID NO: 702620 - protein, 18 aa, Homo sapiens
  CDR3 for beta chain variable domain of TCR clone 351310 (TRBV11-2, TRBJ2-3)
CASSLGGASRGAPNTQYF

SEQ ID NO: 702621 - protein, 14 aa, Homo sapiens
  CDR3 for alpha chain variable domain of TCR clone 351311 (TRAV17, TRAJ42)
CATDAPGSQGNPIF

SEQ ID NO: 702622 - protein, 13 aa, Homo sapiens
  CDR3 for beta chain variable domain of TCR clone 351311 (TRBV7-7, TRBJ1-5)
CASSPGKNQPQHF

SEQ ID NO: 702623 - protein, 14 aa, Homo sapiens
  CDR3 for alpha chain variable domain of TCR clone 351312 (TRAV8-6, TRAJ29)
CAVSRASGNTPLVF

SEQ ID NO: 702624 - protein, 13 aa, Homo sapiens
  CDR3 for beta chain variable domain of TCR clone 351312 (TRBV19, TRBJ1-5)
CASSEVSNQPQHF

SEQ ID NO: 702625 - protein, 16 aa, Homo sapiens
  CDR3 for alpha chain variable domain of TCR clone 351313 (TRAV14/DV4, TRAJ15)
CAMREGPAQAGTALIF

SEQ ID NO: 702626 - protein, 13 aa, Homo sapiens
  CDR3 for beta chain variable domain of TCR clone 351313 (TRBV28, TRBJ2-5)
CASSFAGGGTQYF

SEQ ID NO: 702627 - protein, 14 aa, Homo sapiens
  CDR3 for alpha chain variable domain of TCR clone 351314 (TRAV12-3, TRAJ20)
CAMSARRGDYQLSF

SEQ ID NO: 702628 - protein, 14 aa, Homo sapiens
  CDR3 for beta chain variable domain of TCR clone 351314 (TRBV7-3, TRBJ2-3)
CASSPSARTDTQYF

SEQ ID NO: 702629 - protein, 12 aa, Homo sapiens
  CDR3 for alpha chain variable domain of TCR clone 351315 (TRAV12-1, TRAJ13)
CNSQGGYQKVTF

SEQ ID NO: 702630 - protein, 12 aa, Homo sapiens
  CDR3 for beta chain variable domain of TCR clone 351315 (TRBV11-2, TRBJ2-1)
CASSPGNNEQFF

SEQ ID NO: 702631 - protein, 16 aa, Homo sapiens
  CDR3 for alpha chain variable domain of TCR clone 351316 (TRAV26-1, TRAJ23)
CIVRVHHYNQGGKLIF

SEQ ID NO: 702632 - protein, 15 aa, Homo sapiens
  CDR3 for beta chain variable domain of TCR clone 351316 (TRBV5-7, TRBJ2-7)
CASSPYFEGSYEQYF

SEQ ID NO: 702633 - protein, 14 aa, Homo sapiens
  CDR3 for alpha chain variable domain of TCR clone 351317 (TRAV12-1, TRAJ3)
CGAARYSSASKIIF

SEQ ID NO: 702634 - protein, 16 aa, Homo sapiens
  CDR3 for beta chain variable domain of TCR clone 351317 (TRBV4-3, TRBJ2-2)
CASSRLQGSGTGELFF

SEQ ID NO: 702635 - protein, 13 aa, Homo sapiens
  CDR3 for alpha chain variable domain of TCR clone 351318 (TRAV12-3, TRAJ39)
CAMRSNAGNMLTF

SEQ ID NO: 702636 - protein, 17 aa, Homo sapiens
  CDR3 for beta chain variable domain of TCR clone 351318 (TRBV13, TRBJ2-3)
CASSLSRVAGGRNTQYF

SEQ ID NO: 702637 - protein, 10 aa, Homo sapiens
  CDR3 for alpha chain variable domain of TCR clone 351319 (TRAV2, TRAJ34)
CAVVNDKLIF

SEQ ID NO: 702638 - protein, 14 aa, Homo sapiens
  CDR3 for beta chain variable domain of TCR clone 351319 (TRBV19, TRBJ1-6)
CASSSGTGYSPLHF

SEQ ID NO: 702639 - protein, 15 aa, Homo sapiens
  CDR3 for alpha chain variable domain of TCR clone 351320 (TRAV3, TRAJ22)
CAVRVRGGSARQLTF

SEQ ID NO: 702640 - protein, 13 aa, Homo sapiens
  CDR3 for beta chain variable domain of TCR clone 351320 (TRBV4-1, TRBJ2-5)
CASSLTRGETQYF

SEQ ID NO: 702641 - protein, 13 aa, Homo sapiens
  CDR3 for alpha chain variable domain of TCR clone 351321 (TRAV12-3, TRAJ52)
CAMSVGGAGGTSY

SEQ ID NO: 702642 - protein, 15 aa, Homo sapiens
  CDR3 for beta chain variable domain of TCR clone 351321 (TRBV27, TRBJ1-6)
CASSVDRGLGSPLHF

SEQ ID NO: 702643 - protein, 15 aa, Homo sapiens
  CDR3 for alpha chain variable domain of TCR clone 351322 (TRAV20, TRAJ43)
CAVQAGKSSNNDMRF

SEQ ID NO: 702644 - protein, 13 aa, Homo sapiens
  CDR3 for beta chain variable domain of TCR clone 351322 (TRBV10-3, TRBJ2-5)
CAMTSGAGETQYF

SEQ ID NO: 702645 - protein, 11 aa, Homo sapiens
  CDR3 for alpha chain variable domain of TCR clone 351323 (TRAV12-3, TRAJ43)
CAMSVSNDMRF

SEQ ID NO: 702646 - protein, 16 aa, Homo sapiens
  CDR3 for beta chain variable domain of TCR clone 351323 (TRBV19, TRBJ1-1)
CASRFGGPVTGTEAFF

SEQ ID NO: 702647 - protein, 16 aa, Homo sapiens
  CDR3 for alpha chain variable domain of TCR clone 351324 (TRAV30, TRAJ24)
CGTEIVDADSWVNSSL

SEQ ID NO: 702648 - protein, 12 aa, Homo sapiens
  CDR3 for beta chain variable domain of TCR clone 351324 (TRBV11-2, TRBJ2-2)
CASSLGGGELFF

SEQ ID NO: 702649 - protein, 16 aa, Homo sapiens
  CDR3 for alpha chain variable domain of TCR clone 351325 (TRAV14/DV4, TRAJ52)
CAMRYAGCTSYGKLTF

SEQ ID NO: 702650 - protein, 14 aa, Homo sapiens
  CDR3 for beta chain variable domain of TCR clone 351325 (TRBV23-1, TRBJ2-5)
CASSFLRSQETQYF

SEQ ID NO: 702651 - protein, 14 aa, Homo sapiens
  CDR3 for alpha chain variable domain of TCR clone 351326 (TRAV17, TRAJ53)
CGVGSGGSNYKLTF

SEQ ID NO: 702652 - protein, 14 aa, Homo sapiens
  CDR3 for beta chain variable domain of TCR clone 351326 (TRBV20-1, TRBJ2-1)
CSAQIGGSANEQFF

SEQ ID NO: 702653 - protein, 14 aa, Homo sapiens
  CDR3 for alpha chain variable domain of TCR clone 351327 (TRAV29/DV5, TRAJ32)
CAASQGGATNKLIF

SEQ ID NO: 702654 - protein, 13 aa, Homo sapiens
  CDR3 for beta chain variable domain of TCR clone 351327 (TRBV24-1, TRBJ2-2)
CATSDWSTGELFF

SEQ ID NO: 702655 - protein, 14 aa, Homo sapiens
  CDR3 for alpha chain variable domain of TCR clone 351328 (TRAV8-4, TRAJ17)
CAVSDQAAGNKLTF

SEQ ID NO: 702656 - protein, 15 aa, Homo sapiens
  CDR3 for beta chain variable domain of TCR clone 351328 (TRBV7-2, TRBJ1-2)
CASSLAPDRGLGYTC

SEQ ID NO: 702657 - protein, 18 aa, Homo sapiens
  CDR3 for alpha chain variable domain of TCR clone 351329 (TRAV13-1, TRAJ52)
CAAKNPNAGGTSYGKLTF

SEQ ID NO: 702658 - protein, 18 aa, Homo sapiens
  CDR3 for beta chain variable domain of TCR clone 351329 (TRBV7-6, TRBJ2-1)
CASSPRTSGMSSYNEQFF

SEQ ID NO: 702659 - protein, 13 aa, Homo sapiens
  CDR3 for alpha chain variable domain of TCR clone 351330 (TRAV3, TRAJ21)
CAVGEPDVNKFYF

SEQ ID NO: 702660 - protein, 13 aa, Homo sapiens
  CDR3 for beta chain variable domain of TCR clone 351330 (TRBV9, TRBJ2-1)
CASSPSGGNEQFF

SEQ ID NO: 702661 - protein, 13 aa, Homo sapiens
  CDR3 for alpha chain variable domain of TCR clone 351331 (TRAV13-1, TRAJ10)
CAALEGGGNKLTF

SEQ ID NO: 702662 - protein, 17 aa, Homo sapiens
  CDR3 for beta chain variable domain of TCR clone 351331 (TRBV7-3, TRBJ2-2)
CASSLSGTSGGAGELFF

SEQ ID NO: 702663 - protein, 23 aa, Homo sapiens
  CDR3 for alpha chain variable domain of TCR clone 351332 (TRAV26-1, TRAJ38)
CIADNAGNNHIQNPDPAVYQLRD

SEQ ID NO: 702664 - protein, 13 aa, Homo sapiens
  CDR3 for beta chain variable domain of TCR clone 351332 (TRBV5-4, TRBJ1-1)
CASSADLGTEAVF

SEQ ID NO: 702665 - protein, 16 aa, Homo sapiens
  CDR3 for alpha chain variable domain of TCR clone 351333 (TRAV13-1, TRAJ10)
CAASSHYTGGGNKLTF

SEQ ID NO: 702666 - protein, 15 aa, Homo sapiens
  CDR3 for beta chain variable domain of TCR clone 351333 (TRBV7-9, TRBJ1-6)
CASSSPGRGNSPLHF

SEQ ID NO: 702667 - protein, 15 aa, Homo sapiens
  CDR3 for alpha chain variable domain of TCR clone 351334 (TRAV8-6, TRAJ11)
CAVDFMNSGYSTLTF

SEQ ID NO: 702668 - protein, 15 aa, Homo sapiens
  CDR3 for beta chain variable domain of TCR clone 351334 (TRBV2, TRBJ2-2)
CASSRQGPNTGELFF

SEQ ID NO: 702669 - protein, 14 aa, Homo sapiens
  CDR3 for alpha chain variable domain of TCR clone 351335 (TRAV26-1, TRAJ22)
CIVRVYGSARQLTF

SEQ ID NO: 702670 - protein, 12 aa, Homo sapiens
  CDR3 for beta chain variable domain of TCR clone 351335 (TRBV11-2, TRBJ2-1)
CASSPGNNEQFF

SEQ ID NO: 702671 - protein, 14 aa, Homo sapiens
  CDR3 for alpha chain variable domain of TCR clone 351336 (TRAV1-2, TRAJ16)
CAVNRFSGGQKLLF

SEQ ID NO: 702672 - protein, 13 aa, Homo sapiens
  CDR3 for beta chain variable domain of TCR clone 351336 (TRBV7-9, TRBJ2-3)
CASSPGSTDTQYF

SEQ ID NO: 702673 - protein, 14 aa, Homo sapiens
  CDR3 for alpha chain variable domain of TCR clone 351337 (TRAV35, TRAJ42)
CCVPYGGSQGNLIF

SEQ ID NO: 702674 - protein, 13 aa, Homo sapiens
  CDR3 for beta chain variable domain of TCR clone 351337 (TRBV27, TRBJ1-1)
CASSLSIGAEAFF

SEQ ID NO: 702675 - protein, 13 aa, Homo sapiens
  CDR3 for alpha chain variable domain of TCR clone 351338 (TRAV12-2, TRAJ4)
CAGFSGGYNKLIF

SEQ ID NO: 702676 - protein, 14 aa, Homo sapiens
  CDR3 for beta chain variable domain of TCR clone 351338 (TRBV24-1, TRBJ1-1)
CANSIPRGDTEAFF

SEQ ID NO: 702677 - protein, 17 aa, Homo sapiens
  CDR3 for alpha chain variable domain of TCR clone 351339 (TRAV13-2, TRAJ31)
CAENARLMFGDGTKLVV

SEQ ID NO: 702678 - protein, 14 aa, Homo sapiens
  CDR3 for beta chain variable domain of TCR clone 351339 (TRBV7-9, TRBJ2-1)
CASSLGVADNEQFF

SEQ ID NO: 702679 - protein, 14 aa, Homo sapiens
  CDR3 for alpha chain variable domain of TCR clone 351340 (TRAV12-3, TRAJ33)
CAMSAGDSNYQLIW

SEQ ID NO: 702680 - protein, 17 aa, Homo sapiens
  CDR3 for beta chain variable domain of TCR clone 351340 (TRBV27, TRBJ2-6)
CASSLTGFASGANVLTF

SEQ ID NO: 702681 - protein, 17 aa, Homo sapiens
  CDR3 for alpha chain variable domain of TCR clone 351341 (TRAV20, TRAJ42)
CAVQAWGYGGSQGNLIF

SEQ ID NO: 702682 - protein, 16 aa, Homo sapiens
  CDR3 for beta chain variable domain of TCR clone 351341 (TRBV29-1, TRBJ2-5)
CSVEGLAGDYKETQYF

SEQ ID NO: 702683 - protein, 18 aa, Homo sapiens
  CDR3 for alpha chain variable domain of TCR clone 351342 (TRAV21, TRAJ52)
CAVRPSPAGGTCYGKLTF

SEQ ID NO: 702684 - protein, 13 aa, Homo sapiens
  CDR3 for beta chain variable domain of TCR clone 351342 (TRBV19, TRBJ1-2)
CASSVPGQDGYTF

SEQ ID NO: 702685 - protein, 15 aa, Homo sapiens
  CDR3 for alpha chain variable domain of TCR clone 351343 (TRAV3, TRAJ22)
CAVRDRGGSARQLTF

SEQ ID NO: 702686 - protein, 12 aa, Homo sapiens
  CDR3 for beta chain variable domain of TCR clone 351343 (TRBV5-1, TRBJ2-7)
CASSFRGYEQYL

SEQ ID NO: 702687 - protein, 16 aa, Homo sapiens
  CDR3 for alpha chain variable domain of TCR clone 351344 (TRAV12-3, TRAJ53)
CAMSVGSGGSKHKLTF

SEQ ID NO: 702688 - protein, 11 aa, Homo sapiens
  CDR3 for beta chain variable domain of TCR clone 351344 (TRBV29-1, TRBJ2-5)
CSVASGETQYF

SEQ ID NO: 702689 - protein, 12 aa, Homo sapiens
  CDR3 for alpha chain variable domain of TCR clone 351345 (TRAV13-1, TRAJ21)
CAAKEGFNKFYF

SEQ ID NO: 702690 - protein, 14 aa, Homo sapiens
  CDR3 for beta chain variable domain of TCR clone 351345 (TRBV3-1, TRBJ2-1)
CASATSGSYNEQFF

SEQ ID NO: 702691 - protein, 12 aa, Homo sapiens
  CDR3 for alpha chain variable domain of TCR clone 351346 (TRAV12-1, TRAJ6)
CVVSERSYIPTF

SEQ ID NO: 702692 - protein, 21 aa, Homo sapiens
  CDR3 for beta chain variable domain of TCR clone 351346 (TRBV7-3, TRBJ2-1)
GGTQPCISVTAAYGLAGAQFF

SEQ ID NO: 702693 - protein, 14 aa, Homo sapiens
  CDR3 for alpha chain variable domain of TCR clone 351347 (TRAV20, TRAJ47)
CAVTFGEYGNKLVF

SEQ ID NO: 702694 - protein, 16 aa, Homo sapiens
  CDR3 for beta chain variable domain of TCR clone 351347 (TRBV20-1, TRBJ1-1)
CSARALTQGMNTEAFF

SEQ ID NO: 702695 - protein, 14 aa, Homo sapiens
  CDR3 for alpha chain variable domain of TCR clone 351348 (TRAV26-1, TRAJ34)
CIVRVAYNTDKLIF

SEQ ID NO: 702696 - protein, 13 aa, Homo sapiens
  CDR3 for beta chain variable domain of TCR clone 351348 (TRBV14, TRBJ1-1)
CASSREFGTEAFF

SEQ ID NO: 702697 - protein, 14 aa, Homo sapiens
  CDR3 for alpha chain variable domain of TCR clone 351349 (TRAV8-3, TRAJ39)
CAVGGMVCRQHAHF

SEQ ID NO: 702698 - protein, 16 aa, Homo sapiens
  CDR3 for beta chain variable domain of TCR clone 351349 (TRBV7-2, TRBJ1-3)
CASSSGRVLSGNTIYF

SEQ ID NO: 702699 - protein, 12 aa, Homo sapiens
  CDR3 for alpha chain variable domain of TCR clone 351350 (TRAV12-3, TRAJ17)
CAMPLTGNKLTF

SEQ ID NO: 702700 - protein, 15 aa, Homo sapiens
  CDR3 for beta chain variable domain of TCR clone 351350 (TRBV20-1, TRBJ2-7)
CSARDWVSGMDEQYF

SEQ ID NO: 702701 - protein, 12 aa, Homo sapiens
  CDR3 for alpha chain variable domain of TCR clone 351351 (TRAV17, TRAJ20)
CATDSNDYKLIF

SEQ ID NO: 702702 - protein, 16 aa, Homo sapiens
  CDR3 for beta chain variable domain of TCR clone 351351 (TRBV7-2, TRBJ1-2)
CASSSNQDRRGHGYTF

SEQ ID NO: 702703 - protein, 14 aa, Homo sapiens
  CDR3 for alpha chain variable domain of TCR clone 351352 (TRAV6, TRAJ6)
CALDRAGGSYISTF

SEQ ID NO: 702704 - protein, 13 aa, Homo sapiens
  CDR3 for beta chain variable domain of TCR clone 351352 (TRBV10-2, TRBJ2-5)
CASSEGGKETQYF

SEQ ID NO: 702705 - protein, 10 aa, Homo sapiens
  CDR3 for alpha chain variable domain of TCR clone 351353 (TRAV30, TRAJ24)
WMLTAGKFQF

SEQ ID NO: 702706 - protein, 14 aa, Homo sapiens
  CDR3 for beta chain variable domain of TCR clone 351353 (TRBV12-5, TRBJ2-5)
CASGSRTHQEAQYF

SEQ ID NO: 702707 - protein, 16 aa, Homo sapiens
  CDR3 for alpha chain variable domain of TCR clone 351354 (TRAV17, TRAJ9)
CATGEWGGTGSFKTIF

SEQ ID NO: 702708 - protein, 15 aa, Homo sapiens
  CDR3 for beta chain variable domain of TCR clone 351354 (TRBV20-1, TRBJ1-2)
CSARDSRGRNYGYTF

SEQ ID NO: 702709 - protein, 17 aa, Homo sapiens
  CDR3 for alpha chain variable domain of TCR clone 351355 (TRAV3, TRAJ6)
CAVRDGPRAGGSYIPTF

SEQ ID NO: 702710 - protein, 18 aa, Homo sapiens
  CDR3 for beta chain variable domain of TCR clone 351355 (TRBV7-3, TRBJ2-5)
CASSFRGGGDPVLRARHA

SEQ ID NO: 702711 - protein, 16 aa, Homo sapiens
  CDR3 for alpha chain variable domain of TCR clone 351356 (TRAV4, TRAJ42)
CLVGPIYGGSQGNLIF

SEQ ID NO: 702712 - protein, 13 aa, Homo sapiens
  CDR3 for beta chain variable domain of TCR clone 351356 (TRBV11-2, TRBJ2-7)
CASSPPGSYEQYF

SEQ ID NO: 702713 - protein, 14 aa, Homo sapiens
  CDR3 for alpha chain variable domain of TCR clone 351357 (TRAV13-1, TRAJ37)
CAASRLATQANQSL

SEQ ID NO: 702714 - protein, 16 aa, Homo sapiens
  CDR3 for beta chain variable domain of TCR clone 351357 (TRBV29-1, TRBJ2-7)
CRVEVVGTSGSYEQYF

SEQ ID NO: 702715 - protein, 13 aa, Homo sapiens
  CDR3 for alpha chain variable domain of TCR clone 351358 (TRAV3, TRAJ27)
CAVRPLGAGKSTF

SEQ ID NO: 702716 - protein, 14 aa, Homo sapiens
  CDR3 for beta chain variable domain of TCR clone 351358 (TRBV11-2, TRBJ2-3)
CASSRLARTDTQYF

SEQ ID NO: 702717 - protein, 14 aa, Homo sapiens
  CDR3 for alpha chain variable domain of TCR clone 351359 (TRAV12-2, TRAJ13)
CAGKKTGGYQKGTF

SEQ ID NO: 702718 - protein, 12 aa, Homo sapiens
  CDR3 for beta chain variable domain of TCR clone 351359 (TRBV11-2, TRBJ2-2)
CASSLGGGELFF

SEQ ID NO: 702719 - protein, 11 aa, Homo sapiens
  CDR3 for alpha chain variable domain of TCR clone 351360 (TRAV35, TRAJ30)
CAPGVDDKIIF

SEQ ID NO: 702720 - protein, 17 aa, Homo sapiens
  CDR3 for beta chain variable domain of TCR clone 351360 (TRBV7-6, TRBJ2-1)
CIAVPAAWGGGADEQFF

SEQ ID NO: 702721 - protein, 13 aa, Homo sapiens
  CDR3 for alpha chain variable domain of TCR clone 351361 (TRAV1-1, TRAJ9)
CAAKNTGGFKTIF

SEQ ID NO: 702722 - protein, 18 aa, Homo sapiens
  CDR3 for beta chain variable domain of TCR clone 351361 (TRBV12-4, TRBJ2-5)
CASTPRTRLAGGGETQYF

SEQ ID NO: 702723 - protein, 14 aa, Homo sapiens
  CDR3 for alpha chain variable domain of TCR clone 351362 (TRAV12-3, TRAJ6)
CAMSATGGSYIPTF

SEQ ID NO: 702724 - protein, 16 aa, Homo sapiens
  CDR3 for beta chain variable domain of TCR clone 351362 (TRBV4-2, TRBJ2-1)
CASSPRAGQGANEKFF

SEQ ID NO: 702725 - protein, 17 aa, Homo sapiens
  CDR3 for alpha chain variable domain of TCR clone 351363 (TRAV13-2, TRAJ5)
CAESVVIVGHGQESTYF

SEQ ID NO: 702726 - protein, 14 aa, Homo sapiens
  CDR3 for beta chain variable domain of TCR clone 351363 (TRBV2, TRBJ1-5)
CASSGTGFNQPQHF

SEQ ID NO: 702727 - protein, 14 aa, Homo sapiens
  CDR3 for alpha chain variable domain of TCR clone 351364 (TRAV8-6, TRAJ16)
CAVTSFSDGQKLLF

SEQ ID NO: 702728 - protein, 16 aa, Homo sapiens
  CDR3 for beta chain variable domain of TCR clone 351364 (TRBV7-3, TRBJ2-1)
CASSLEGYRSYNEQFF

SEQ ID NO: 702729 - protein, 11 aa, Homo sapiens
  CDR3 for alpha chain variable domain of TCR clone 351365 (TRAV12-1, TRAJ43)
CVVIRNNDMRF

SEQ ID NO: 702730 - protein, 16 aa, Homo sapiens
  CDR3 for beta chain variable domain of TCR clone 351365 (TRBV14, TRBJ2-1)
CASSTRLAGEGNEQFF

SEQ ID NO: 702731 - protein, 15 aa, Homo sapiens
  CDR3 for alpha chain variable domain of TCR clone 351366 (TRAV8-3, TRAJ27)
CAVGPSNTNAGTSTF

SEQ ID NO: 702732 - protein, 15 aa, Homo sapiens
  CDR3 for beta chain variable domain of TCR clone 351366 (TRBV7-2, TRBJ2-1)
CASSSGLAGGNEQFF

SEQ ID NO: 702733 - protein, 14 aa, Homo sapiens
  CDR3 for alpha chain variable domain of TCR clone 351367 (TRAV26-1, TRAJ21)
CIVRPPYNFNKFYF

SEQ ID NO: 702734 - protein, 14 aa, Homo sapiens
  CDR3 for beta chain variable domain of TCR clone 351367 (TRBV11-3, TRBJ2-1)
CASSTTTSGSIQFF

SEQ ID NO: 702735 - protein, 15 aa, Homo sapiens
  CDR3 for alpha chain variable domain of TCR clone 351368 (TRAV3, TRAJ3)
CAVRDRDSSASKIIF

SEQ ID NO: 702736 - protein, 18 aa, Homo sapiens
  CDR3 for beta chain variable domain of TCR clone 351368 (TRBV25-1, TRBJ1-2)
CASSGLQNGQGLIFVYTF

SEQ ID NO: 702737 - protein, 12 aa, Homo sapiens
  CDR3 for alpha chain variable domain of TCR clone 351369 (TRAV1-1, TRAJ39)
CAVPVVGNMLTF

SEQ ID NO: 702738 - protein, 13 aa, Homo sapiens
  CDR3 for beta chain variable domain of TCR clone 351369 (TRBV19, TRBJ2-1)
CASSMYRVNEQFF

SEQ ID NO: 702739 - protein, 18 aa, Homo sapiens
  CDR3 for alpha chain variable domain of TCR clone 351370 (TRAV26-1, TRAJ23)
CIVRVGREVWNQGGKHIF

SEQ ID NO: 702740 - protein, 16 aa, Homo sapiens
  CDR3 for beta chain variable domain of TCR clone 351370 (TRBV12-4, TRBJ2-5)
CASSFFVRGRQETQYF

SEQ ID NO: 702741 - protein, 15 aa, Homo sapiens
  CDR3 for alpha chain variable domain of TCR clone 351371 (TRAV12-1, TRAJ44)
CVVVVNTGTASKLTF

SEQ ID NO: 702742 - protein, 17 aa, Homo sapiens
  CDR3 for beta chain variable domain of TCR clone 351371 (TRBV7-8, TRBJ2-6)
CGSSAGTGGAGANVLTF

SEQ ID NO: 702743 - protein, 16 aa, Homo sapiens
  CDR3 for alpha chain variable domain of TCR clone 351372 (TRAV3, TRAJ28)
CAVLPGSGAGSYQLTF

SEQ ID NO: 702744 - protein, 14 aa, Homo sapiens
  CDR3 for beta chain variable domain of TCR clone 351372 (TRBV11-2, TRBJ1-2)
CASSLGTANYGYTF

SEQ ID NO: 702745 - protein, 12 aa, Homo sapiens
  CDR3 for alpha chain variable domain of TCR clone 351373 (TRAV23/DV6, TRAJ33)
FAAEDSNYQLIW

SEQ ID NO: 702746 - protein, 12 aa, Homo sapiens
  CDR3 for beta chain variable domain of TCR clone 351373 (TRBV28, TRBJ2-3)
CASSLYRDTQYF

SEQ ID NO: 702747 - protein, 14 aa, Homo sapiens
  CDR3 for alpha chain variable domain of TCR clone 351374 (TRAV12-3, TRAJ10)
SHLPLTGGGNKLTF

SEQ ID NO: 702748 - protein, 14 aa, Homo sapiens
  CDR3 for beta chain variable domain of TCR clone 351374 (TRBV7-9, TRBJ2-2)
CASSSGQTTGELFF

SEQ ID NO: 702749 - protein, 14 aa, Homo sapiens
  CDR3 for alpha chain variable domain of TCR clone 351375 (TRAV1-2, TRAJ8)
CSVREDTGFQKLVF

SEQ ID NO: 702750 - protein, 11 aa, Homo sapiens
  CDR3 for beta chain variable domain of TCR clone 351375 (TRBV29-1, TRBJ2-5)
CSEDRTGTQYF

SEQ ID NO: 702751 - protein, 14 aa, Homo sapiens
  CDR3 for alpha chain variable domain of TCR clone 351376 (TRAV17, TRAJ31)
CASVLRNNNARLMF

SEQ ID NO: 702752 - protein, 14 aa, Homo sapiens
  CDR3 for beta chain variable domain of TCR clone 351376 (TRBV12-4, TRBJ2-5)
CASSLWQKQETQYF

SEQ ID NO: 702753 - protein, 13 aa, Homo sapiens
  CDR3 for alpha chain variable domain of TCR clone 351377 (TRAV27, TRAJ8)
CVGGPTGFQKLVF

SEQ ID NO: 702754 - protein, 15 aa, Homo sapiens
  CDR3 for beta chain variable domain of TCR clone 351377 (TRBV6-1, TRBJ2-7)
CASSESMGDFYEQYF

SEQ ID NO: 702755 - protein, 14 aa, Homo sapiens
  CDR3 for alpha chain variable domain of TCR clone 351378 (TRAV38-1, TRAJ40)
CALRPTSGTYKYIF

SEQ ID NO: 702756 - protein, 15 aa, Homo sapiens
  CDR3 for beta chain variable domain of TCR clone 351378 (TRBV20-1, TRBJ2-7)
CSGRDRVSGMDEQYF

SEQ ID NO: 702757 - protein, 14 aa, Homo sapiens
  CDR3 for alpha chain variable domain of TCR clone 351379 (TRAV38-1, TRAJ45)
CASHSGGGADGLTF

SEQ ID NO: 702758 - protein, 13 aa, Homo sapiens
  CDR3 for beta chain variable domain of TCR clone 351379 (TRBV10-3, TRBJ1-2)
CAISERDNYGYTF

SEQ ID NO: 702759 - protein, 14 aa, Homo sapiens
  CDR3 for alpha chain variable domain of TCR clone 351380 (TRAV3, TRAJ7)
CAAREEEREQQTRF

SEQ ID NO: 702760 - protein, 14 aa, Homo sapiens
  CDR3 for beta chain variable domain of TCR clone 351380 (TRBV7-7, TRBJ2-2)
CASSTRASGGELFF

SEQ ID NO: 702761 - protein, 16 aa, Homo sapiens
  CDR3 for alpha chain variable domain of TCR clone 351381 (TRAV30, TRAJ24)
CGTEIVDADSWGRFQF

SEQ ID NO: 702762 - protein, 15 aa, Homo sapiens
  CDR3 for beta chain variable domain of TCR clone 351381 (TRBV20-1, TRBJ1-1)
CSSSRGVTGNTEAFF

SEQ ID NO: 702763 - protein, 14 aa, Homo sapiens
  CDR3 for alpha chain variable domain of TCR clone 351382 (TRAV12-3, TRAJ58)
CAMSTETSGSRLTF

SEQ ID NO: 702764 - protein, 15 aa, Homo sapiens
  CDR3 for beta chain variable domain of TCR clone 351382 (TRBV4-1, TRBJ1-4)
CASSDTGGTNEKLFL

SEQ ID NO: 702765 - protein, 13 aa, Homo sapiens
  CDR3 for alpha chain variable domain of TCR clone 351383 (TRAV12-2, TRAJ49)
CAVKPNTGNQFYF

SEQ ID NO: 702766 - protein, 12 aa, Homo sapiens
  CDR3 for beta chain variable domain of TCR clone 351383 (TRBV5-1, TRBJ2-7)
CASSLDSYEQYF

SEQ ID NO: 702767 - protein, 18 aa, Homo sapiens
  CDR3 for alpha chain variable domain of TCR clone 351384 (TRAV13-1, TRAJ52)
CAAKNTNAGGTSYGKLTF

SEQ ID NO: 702768 - protein, 16 aa, Homo sapiens
  CDR3 for beta chain variable domain of TCR clone 351384 (TRBV4-1, TRBJ1-3)
CASGQDELLAGNTIYF

SEQ ID NO: 702769 - protein, 16 aa, Homo sapiens
  CDR3 for alpha chain variable domain of TCR clone 351385 (TRAV8-6, TRAJ37)
CAVSGLGSSNTGKLLF

SEQ ID NO: 702770 - protein, 15 aa, Homo sapiens
  CDR3 for beta chain variable domain of TCR clone 351385 (TRBV20-1, TRBJ1-5)
CSARSGPSMNQPQHF

SEQ ID NO: 702771 - protein, 15 aa, Homo sapiens
  CDR3 for alpha chain variable domain of TCR clone 351386 (TRAV8-3, TRAJ45)
CASSYSGGGADGLTF

SEQ ID NO: 702772 - protein, 13 aa, Homo sapiens
  CDR3 for beta chain variable domain of TCR clone 351386 (TRBV13, TRBJ2-7)
CASSLERGWKKYF

SEQ ID NO: 702773 - protein, 16 aa, Homo sapiens
  CDR3 for alpha chain variable domain of TCR clone 351387 (TRAV30, TRAJ24)
CGTEIVDADSWGKFQF

SEQ ID NO: 702774 - protein, 13 aa, Homo sapiens
  CDR3 for beta chain variable domain of TCR clone 351387 (TRBV7-2, TRBJ2-5)
CASSLYRQETQYF

SEQ ID NO: 702775 - protein, 14 aa, Homo sapiens
  CDR3 for alpha chain variable domain of TCR clone 351388 (TRAV8-3, TRAJ13)
CAVGGTFGYQKVTF

SEQ ID NO: 702776 - protein, 17 aa, Homo sapiens
  CDR3 for beta chain variable domain of TCR clone 351388 (TRBV7-9, TRBJ2-1)
CASSAGTLGRSYNEQFC

SEQ ID NO: 702777 - protein, 12 aa, Homo sapiens
  CDR3 for alpha chain variable domain of TCR clone 351389 (TRAV3, TRAJ43)
CAVRDPNNDMRF

SEQ ID NO: 702778 - protein, 13 aa, Homo sapiens
  CDR3 for beta chain variable domain of TCR clone 351389 (TRBV20-1, TRBJ1-1)
CSARGGGNTEAFF

SEQ ID NO: 702779 - protein, 15 aa, Homo sapiens
  CDR3 for alpha chain variable domain of TCR clone 351390 (TRAV29/DV5, TRAJ10)
CAAFGITGGGNKLTL

SEQ ID NO: 702780 - protein, 13 aa, Homo sapiens
  CDR3 for beta chain variable domain of TCR clone 351390 (TRBV10-2, TRBJ2-5)
CASGRLARETQYF

SEQ ID NO: 702781 - protein, 12 aa, Homo sapiens
  CDR3 for alpha chain variable domain of TCR clone 351391 (TRAV3, TRAJ7)
CADLLWDQQTRF

SEQ ID NO: 702782 - protein, 12 aa, Homo sapiens
  CDR3 for beta chain variable domain of TCR clone 351391 (TRBV7-3, TRBJ2-5)
CQQLPGGETQYF

SEQ ID NO: 702783 - protein, 15 aa, Homo sapiens
  CDR3 for alpha chain variable domain of TCR clone 351392 (TRAV8-6, TRAJ10)
CAVSSNGGGGNKLTF

SEQ ID NO: 702784 - protein, 15 aa, Homo sapiens
  CDR3 for beta chain variable domain of TCR clone 351392 (TRBV28, TRBJ1-2)
CASSSHSIANYGYTF

SEQ ID NO: 702785 - protein, 14 aa, Homo sapiens
  CDR3 for alpha chain variable domain of TCR clone 351393 (TRAV13-2, TRAJ15)
CEENPNQAGTALIF

SEQ ID NO: 702786 - protein, 16 aa, Homo sapiens
  CDR3 for beta chain variable domain of TCR clone 351393 (TRBV12-4, TRBJ1-2)
CASSPTATGKTRGYTF

SEQ ID NO: 702787 - protein, 14 aa, Homo sapiens
  CDR3 for alpha chain variable domain of TCR clone 351394 (TRAV1-2, TRAJ8)
CAVREDTGFQKLVF

SEQ ID NO: 702788 - protein, 14 aa, Homo sapiens
  CDR3 for beta chain variable domain of TCR clone 351394 (TRBV11-3, TRBJ2-3)
CASLKDGRRGYAVF

SEQ ID NO: 702789 - protein, 14 aa, Homo sapiens
  CDR3 for alpha chain variable domain of TCR clone 351395 (TRAV1-2, TRAJ8)
CAVREDTGFQKIVF

SEQ ID NO: 702790 - protein, 15 aa, Homo sapiens
  CDR3 for beta chain variable domain of TCR clone 351395 (TRBV6-1, TRBJ2-3)
CASSERGGITDTQYF

SEQ ID NO: 702791 - protein, 13 aa, Homo sapiens
  CDR3 for alpha chain variable domain of TCR clone 351396 (TRAV12-2, TRAJ50)
CAVIVTSYDKVIF

SEQ ID NO: 702792 - protein, 14 aa, Homo sapiens
  CDR3 for beta chain variable domain of TCR clone 351396 (TRBV7-3, TRBJ2-1)
CASSLAGGTNEQFF

SEQ ID NO: 702793 - protein, 14 aa, Homo sapiens
  CDR3 for alpha chain variable domain of TCR clone 351397 (TRAV1-2, TRAJ8)
CAVREDTGSQKLVF

SEQ ID NO: 702794 - protein, 15 aa, Homo sapiens
  CDR3 for beta chain variable domain of TCR clone 351397 (TRBV6-3, TRBJ2-7)
CASSAPGTVFYEQYF

SEQ ID NO: 702795 - protein, 12 aa, Homo sapiens
  CDR3 for alpha chain variable domain of TCR clone 351398 (TRAV9-2, TRAJ26)
CALRGYGQNFVF

SEQ ID NO: 702796 - protein, 14 aa, Homo sapiens
  CDR3 for beta chain variable domain of TCR clone 351398 (TRBV2, TRBJ2-1)
CASSEARQGGSEFF

SEQ ID NO: 702797 - protein, 20 aa, Homo sapiens
  CDR3 for alpha chain variable domain of TCR clone 351399 (TRAV26-1, TRAJ42)
CCVLLHRQTYYGGSQGDLIF

SEQ ID NO: 702798 - protein, 15 aa, Homo sapiens
  CDR3 for beta chain variable domain of TCR clone 351399 (TRBV9, TRBJ1-6)
CASSVAGTGDSPLHF

SEQ ID NO: 702799 - protein, 11 aa, Homo sapiens
  CDR3 for alpha chain variable domain of TCR clone 351400 (TRAV29/DV5, TRAJ36)
CAARRKLGQTT

SEQ ID NO: 702800 - protein, 14 aa, Homo sapiens
  CDR3 for beta chain variable domain of TCR clone 351400 (TRBV12-5, TRBJ2-5)
CASGSRTHQETQYF

SEQ ID NO: 702801 - protein, 17 aa, Homo sapiens
  CDR3 for alpha chain variable domain of TCR clone 351401 (TRAV1-1, TRAJ15)
CLLLLRWPNQAGTALIF

SEQ ID NO: 702802 - protein, 15 aa, Homo sapiens
  CDR3 for beta chain variable domain of TCR clone 351401 (TRBV27, TRBJ2-3)
CASSLGLAGPDTQYF

SEQ ID NO: 702803 - protein, 12 aa, Homo sapiens
  CDR3 for alpha chain variable domain of TCR clone 351402 (TRAV13-1, TRAJ21)
CAAKEGFNKFYF

SEQ ID NO: 702804 - protein, 18 aa, Homo sapiens
  CDR3 for beta chain variable domain of TCR clone 351402 (TRBV20-1, TRBJ2-6)
WSAETTPTHGSGANVLTF

SEQ ID NO: 702805 - protein, 17 aa, Homo sapiens
  CDR3 for alpha chain variable domain of TCR clone 351403 (TRAV3, TRAJ6)
CAVRDGPRAGGSNKPTF

SEQ ID NO: 702806 - protein, 14 aa, Homo sapiens
  CDR3 for beta chain variable domain of TCR clone 351403 (TRBV7-2, TRBJ2-7)
CASSPKTSFYEQYF

SEQ ID NO: 702807 - protein, 18 aa, Homo sapiens
  CDR3 for alpha chain variable domain of TCR clone 351404 (TRAV13-1, TRAJ52)
CAAKNPNASGTSYGKLTF

SEQ ID NO: 702808 - protein, 15 aa, Homo sapiens
  CDR3 for beta chain variable domain of TCR clone 351404 (TRBV28, TRBJ2-4)
CAAGSGTLLMGIQYF

SEQ ID NO: 702809 - protein, 16 aa, Homo sapiens
  CDR3 for alpha chain variable domain of TCR clone 351405 (TRAV17, TRAJ53)
CATDALSGGSNYKLTF

SEQ ID NO: 702810 - protein, 13 aa, Homo sapiens
  CDR3 for beta chain variable domain of TCR clone 351405 (TRBV5-1, TRBJ1-2)
CASSLKQNYGYTF

SEQ ID NO: 702811 - protein, 16 aa, Homo sapiens
  CDR3 for alpha chain variable domain of TCR clone 351406 (TRAV17, TRAJ28)
CATALDSGAGGYQLTF

SEQ ID NO: 702812 - protein, 15 aa, Homo sapiens
  CDR3 for beta chain variable domain of TCR clone 351406 (TRBV12-4, TRBJ1-2)
CASSFEAGLGYGYTF

SEQ ID NO: 702813 - protein, 14 aa, Homo sapiens
  CDR3 for alpha chain variable domain of TCR clone 351407 (TRAV8-3, TRAJ9)
CAVVYNTGGFKTIF

SEQ ID NO: 702814 - protein, 14 aa, Homo sapiens
  CDR3 for beta chain variable domain of TCR clone 351407 (TRBV7-8, TRBJ1-2)
CASSPDSLSYGYTF

SEQ ID NO: 702815 - protein, 15 aa, Homo sapiens
  CDR3 for alpha chain variable domain of TCR clone 351408 (TRAV26-1, TRAJ33)
CIVRAFMDSNYQLIW

SEQ ID NO: 702816 - protein, 15 aa, Homo sapiens
  CDR3 for beta chain variable domain of TCR clone 351408 (TRBV10-2, TRBJ2-2)
CASSGPGALTGELFF

SEQ ID NO: 702817 - protein, 16 aa, Homo sapiens
  CDR3 for alpha chain variable domain of TCR clone 351409 (TRAV8-3, TRAJ13)
CAVGAYPSGGYQKVTF

SEQ ID NO: 702818 - protein, 15 aa, Homo sapiens
  CDR3 for beta chain variable domain of TCR clone 351409 (TRBV19, TRBJ1-5)
CTSSIVWADNQPQHF

SEQ ID NO: 702819 - protein, 11 aa, Homo sapiens
  CDR3 for alpha chain variable domain of TCR clone 351410 (TRAV23/DV6, TRAJ49)
CAVAPVTSSIL

SEQ ID NO: 702820 - protein, 13 aa, Homo sapiens
  CDR3 for beta chain variable domain of TCR clone 351410 (TRBV6-1, TRBJ1-1)
CASIRQGNTEAFF

SEQ ID NO: 702821 - protein, 14 aa, Homo sapiens
  CDR3 for alpha chain variable domain of TCR clone 351411 (TRAV8-4, TRAJ5)
CAVSTDTGRRALTF

SEQ ID NO: 702822 - protein, 14 aa, Homo sapiens
  CDR3 for beta chain variable domain of TCR clone 351411 (TRBV5-1, TRBJ2-2)
CASSLGGGSGELFL

SEQ ID NO: 702823 - protein, 13 aa, Homo sapiens
  CDR3 for alpha chain variable domain of TCR clone 351412 (TRAV12-2, TRAJ44)
CREPAGTASKLTF

SEQ ID NO: 702824 - protein, 14 aa, Homo sapiens
  CDR3 for beta chain variable domain of TCR clone 351412 (TRBV6-1, TRBJ1-3)
CASVQGGGGNTIYF

SEQ ID NO: 702825 - protein, 14 aa, Homo sapiens
  CDR3 for alpha chain variable domain of TCR clone 351413 (TRAV27, TRAJ15)
CAGFDNQAGPALIF

SEQ ID NO: 702826 - protein, 11 aa, Homo sapiens
  CDR3 for beta chain variable domain of TCR clone 351413 (TRBV29-1, TRBJ1-1)
CSVEVGTRTFF

SEQ ID NO: 702827 - protein, 14 aa, Homo sapiens
  CDR3 for alpha chain variable domain of TCR clone 351414 (TRAV29/DV5, TRAJ36)
CAARRKTGANNLFF

SEQ ID NO: 702828 - protein, 14 aa, Homo sapiens
  CDR3 for beta chain variable domain of TCR clone 351414 (TRBV2, TRBJ2-1)
CASRTGSSYNEQFF

SEQ ID NO: 702829 - protein, 12 aa, Homo sapiens
  CDR3 for alpha chain variable domain of TCR clone 351415 (TRAV13-1, TRAJ49)
CAAPNTGNKFYF

SEQ ID NO: 702830 - protein, 14 aa, Homo sapiens
  CDR3 for beta chain variable domain of TCR clone 351415 (TRBV11-2, TRBJ2-3)
CASSRLARTDTQYF

SEQ ID NO: 702831 - protein, 15 aa, Homo sapiens
  CDR3 for alpha chain variable domain of TCR clone 351416 (TRAV3, TRAJ22)
CAVRDRGGSARQLTF

SEQ ID NO: 702832 - protein, 16 aa, Homo sapiens
  CDR3 for beta chain variable domain of TCR clone 351416 (TRBV27, TRBJ2-2)
CASSSSGVSNTGELFF

SEQ ID NO: 702833 - protein, 13 aa, Homo sapiens
  CDR3 for alpha chain variable domain of TCR clone 351417 (TRAV21, TRAJ11)
CAVPNSGYSTLTF

SEQ ID NO: 702834 - protein, 13 aa, Homo sapiens
  CDR3 for beta chain variable domain of TCR clone 351417 (TRBV3-1, TRBJ2-7)
CANSLRDGYEQYF

SEQ ID NO: 702835 - protein, 17 aa, Homo sapiens
  CDR3 for alpha chain variable domain of TCR clone 351418 (TRAV3, TRAJ6)
CAVSDGPRAGGSYIPTF

SEQ ID NO: 702836 - protein, 14 aa, Homo sapiens
  CDR3 for beta chain variable domain of TCR clone 351418 (TRBV7-2, TRBJ2-7)
CASSPKTSLYEQYF

SEQ ID NO: 702837 - protein, 14 aa, Homo sapiens
  CDR3 for alpha chain variable domain of TCR clone 351419 (TRAV12-2, TRAJ13)
CAVKKTGGYQKVTF

SEQ ID NO: 702838 - protein, 14 aa, Homo sapiens
  CDR3 for beta chain variable domain of TCR clone 351419 (TRBV5-1, TRBJ2-1)
CASSFSGGRNEQFF

SEQ ID NO: 702839 - protein, 13 aa, Homo sapiens
  CDR3 for alpha chain variable domain of TCR clone 351420 (TRAV2, TRAJ24)
CAVSTYSWRKLQF

SEQ ID NO: 702840 - protein, 14 aa, Homo sapiens
  CDR3 for beta chain variable domain of TCR clone 351420 (TRBV13, TRBJ2-5)
CASSLGTAQETQYF

SEQ ID NO: 702841 - protein, 16 aa, Homo sapiens
  CDR3 for alpha chain variable domain of TCR clone 351421 (TRAV13-2, TRAJ53)
CAENANSGGSNYKLTF

SEQ ID NO: 702842 - protein, 15 aa, Homo sapiens
  CDR3 for beta chain variable domain of TCR clone 351421 (TRBV28, TRBJ2-1)
CASSIIAGGRSEQFF

SEQ ID NO: 702843 - protein, 13 aa, Homo sapiens
  CDR3 for alpha chain variable domain of TCR clone 351422 (TRAV27, TRAJ8)
CAGGPTGFQKLVF

SEQ ID NO: 702844 - protein, 14 aa, Homo sapiens
  CDR3 for beta chain variable domain of TCR clone 351422 (TRBV12-5, TRBJ2-5)
CASGSRTHQETQYF

SEQ ID NO: 702845 - protein, 16 aa, Homo sapiens
  CDR3 for alpha chain variable domain of TCR clone 351423 (TRAV20, TRAJ28)
CAVRGPSGAGSYQLTF

SEQ ID NO: 702846 - protein, 16 aa, Homo sapiens
  CDR3 for beta chain variable domain of TCR clone 351423 (TRBV7-3, TRBJ2-2)
CASSLKRGTLSGELFF

SEQ ID NO: 702847 - protein, 12 aa, Homo sapiens
  CDR3 for alpha chain variable domain of TCR clone 351424 (TRAV8-3, TRAJ34)
CAVLTNADKLIF

SEQ ID NO: 702848 - protein, 15 aa, Homo sapiens
  CDR3 for beta chain variable domain of TCR clone 351424 (TRBV7-2, TRBJ2-7)
CASSLGIGNDYEQYF

SEQ ID NO: 702849 - protein, 12 aa, Homo sapiens
  CDR3 for alpha chain variable domain of TCR clone 351425 (TRAV12-3, TRAJ29)
CAMTLGNTPLVF

SEQ ID NO: 702850 - protein, 14 aa, Homo sapiens
  CDR3 for beta chain variable domain of TCR clone 351425 (TRBV7-8, TRBJ2-1)
CATERERSYNEQFF

SEQ ID NO: 702851 - protein, 15 aa, Homo sapiens
  CDR3 for alpha chain variable domain of TCR clone 351426 (TRAV3, TRAJ22)
CAVRDRGGSARQLTF

SEQ ID NO: 702852 - protein, 12 aa, Homo sapiens
  CDR3 for beta chain variable domain of TCR clone 351426 (TRBV12-4, TRBJ2-3)
CASSTLPDTQYF

SEQ ID NO: 702853 - protein, 14 aa, Homo sapiens
  CDR3 for alpha chain variable domain of TCR clone 351427 (TRAV23/DV6, TRAJ37)
CAASTSSNTSKLIF

SEQ ID NO: 702854 - protein, 15 aa, Homo sapiens
  CDR3 for beta chain variable domain of TCR clone 351427 (TRBV7-9, TRBJ2-7)
CASSPGGGLTYEQYF

SEQ ID NO: 702855 - protein, 21 aa, Homo sapiens
  CDR3 for alpha chain variable domain of TCR clone 351428 (TRAV1-2, TRAJ37)
CLLPLCCERFHGSGNTGKLIF

SEQ ID NO: 702856 - protein, 14 aa, Homo sapiens
  CDR3 for beta chain variable domain of TCR clone 351428 (TRBV2, TRBJ2-5)
CASSEVRAQETQYF

SEQ ID NO: 702857 - protein, 16 aa, Homo sapiens
  CDR3 for alpha chain variable domain of TCR clone 351429 (TRAV20, TRAJ22)
CAVQASSSGSARQLTF

SEQ ID NO: 702858 - protein, 13 aa, Homo sapiens
  CDR3 for beta chain variable domain of TCR clone 351429 (TRBV7-2, TRBJ2-5)
CASSQTSVETQYI

SEQ ID NO: 702859 - protein, 16 aa, Homo sapiens
  CDR3 for alpha chain variable domain of TCR clone 351430 (TRAV3, TRAJ37)
CAVRPHGSGNTGNLIF

SEQ ID NO: 702860 - protein, 15 aa, Homo sapiens
  CDR3 for beta chain variable domain of TCR clone 351430 (TRBV28, TRBJ2-7)
CASSPGGRGFYEQYF

SEQ ID NO: 702861 - protein, 17 aa, Homo sapiens
  CDR3 for alpha chain variable domain of TCR clone 351431 (TRAV36/DV7, TRAJ52)
CAVAQRAGGTSYGKLTF

SEQ ID NO: 702862 - protein, 13 aa, Homo sapiens
  CDR3 for beta chain variable domain of TCR clone 351431 (TRBV27, TRBJ1-4)
CASSLMGDEKLFF

SEQ ID NO: 702863 - protein, 14 aa, Homo sapiens
  CDR3 for alpha chain variable domain of TCR clone 351432 (TRAV8-3, TRAJ35)
CAVVPQGFGNVLHC

SEQ ID NO: 702864 - protein, 15 aa, Homo sapiens
  CDR3 for beta chain variable domain of TCR clone 351432 (TRBV6-1, TRBJ2-2)
CASSAGQGYTGELFF

SEQ ID NO: 702865 - protein, 15 aa, Homo sapiens
  CDR3 for alpha chain variable domain of TCR clone 351433 (TRAV8-4, TRAJ7)
CAVSGGNYGNNRRAF

SEQ ID NO: 702866 - protein, 18 aa, Homo sapiens
  CDR3 for beta chain variable domain of TCR clone 351433 (TRBV12-4, TRBJ2-2)
CASSLVAGTRGRTGELFF

SEQ ID NO: 702867 - protein, 18 aa, Homo sapiens
  CDR3 for alpha chain variable domain of TCR clone 351434 (TRAV21, TRAJ52)
CAVRPSPAGGTSYGKLTF

SEQ ID NO: 702868 - protein, 17 aa, Homo sapiens
  CDR3 for beta chain variable domain of TCR clone 351434 (TRBV4-1, TRBJ1-4)
CAGSQEGPRGVEEKLFF

SEQ ID NO: 702869 - protein, 17 aa, Homo sapiens
  CDR3 for alpha chain variable domain of TCR clone 351435 (TRAV2, TRAJ36)
CAVQDRGNWGKQPLLWD

SEQ ID NO: 702870 - protein, 14 aa, Homo sapiens
  CDR3 for beta chain variable domain of TCR clone 351435 (TRBV7-9, TRBJ2-5)
CASSLDTAQETQYF

SEQ ID NO: 702871 - protein, 14 aa, Homo sapiens
  CDR3 for alpha chain variable domain of TCR clone 351436 (TRAV3, TRAJ22)
CAVRDYGSARQLTF

SEQ ID NO: 702872 - protein, 19 aa, Homo sapiens
  CDR3 for beta chain variable domain of TCR clone 351436 (TRBV7-2, TRBJ2-3)
CASSSQGGPRLAGADTQYF

SEQ ID NO: 702873 - protein, 16 aa, Homo sapiens
  CDR3 for alpha chain variable domain of TCR clone 351437 (TRAV4, TRAJ8)
CLVGDSGNTGFPKLVF

SEQ ID NO: 702874 - protein, 15 aa, Homo sapiens
  CDR3 for beta chain variable domain of TCR clone 351437 (TRBV15, TRBJ1-2)
CATSRVRASGSGYTF

SEQ ID NO: 702875 - protein, 16 aa, Homo sapiens
  CDR3 for alpha chain variable domain of TCR clone 351438 (TRAV8-3, TRAJ10)
CAVGPILTGGGNKLTF

SEQ ID NO: 702876 - protein, 16 aa, Homo sapiens
  CDR3 for beta chain variable domain of TCR clone 351438 (TRBV7-2, TRBJ2-5)
CASSSKWLSGQETQFF

SEQ ID NO: 702877 - protein, 17 aa, Homo sapiens
  CDR3 for alpha chain variable domain of TCR clone 351439 (TRAV4, TRAJ18)
CLVGERSVGSTLGRRYF

SEQ ID NO: 702878 - protein, 11 aa, Homo sapiens
  CDR3 for beta chain variable domain of TCR clone 351439 (TRBV7-2, TRBJ2-7)
CASSSGLWQYF

SEQ ID NO: 702879 - protein, 14 aa, Homo sapiens
  CDR3 for alpha chain variable domain of TCR clone 351440 (TRAV17, TRAJ35)
CATDRPGFGNGLHC

SEQ ID NO: 702880 - protein, 14 aa, Homo sapiens
  CDR3 for beta chain variable domain of TCR clone 351440 (TRBV7-8, TRBJ2-3)
CASSLEAGTDTQYF

SEQ ID NO: 702881 - protein, 20 aa, Homo sapiens
  CDR3 for alpha chain variable domain of TCR clone 351441 (TRAV12-1, TRAJ42)
SSVIQPPTSVKGGSQGNLIF

SEQ ID NO: 702882 - protein, 12 aa, Homo sapiens
  CDR3 for beta chain variable domain of TCR clone 351441 (TRBV11-2, TRBJ2-2)
CASSLGGGELFF

SEQ ID NO: 702883 - protein, 16 aa, Homo sapiens
  CDR3 for alpha chain variable domain of TCR clone 351442 (TRAV12-2, TRAJ40)
CAVIRGGTSGTYKYIF

SEQ ID NO: 702884 - protein, 20 aa, Homo sapiens
  CDR3 for beta chain variable domain of TCR clone 351442 (TRBV7-8, TRBJ2-2)
CASSHLFPGPTIHITGELFF

SEQ ID NO: 702885 - protein, 12 aa, Homo sapiens
  CDR3 for alpha chain variable domain of TCR clone 351443 (TRAV13-2, TRAJ23)
CAERHGGGKLIF

SEQ ID NO: 702886 - protein, 15 aa, Homo sapiens
  CDR3 for beta chain variable domain of TCR clone 351443 (TRBV7-8, TRBJ2-1)
CASSRARGTGNEQFF

SEQ ID NO: 702887 - protein, 14 aa, Homo sapiens
  CDR3 for alpha chain variable domain of TCR clone 351444 (TRAV12-3, TRAJ10)
SHLPLTGGGNKLTF

SEQ ID NO: 702888 - protein, 16 aa, Homo sapiens
  CDR3 for beta chain variable domain of TCR clone 351444 (TRBV4-2, TRBJ1-2)
CASSQEIGGASYGYTF

SEQ ID NO: 702889 - protein, 18 aa, Homo sapiens
  CDR3 for alpha chain variable domain of TCR clone 351445 (TRAV8-4, TRAJ52)
CAVTRANAGGTSYGKLTF

SEQ ID NO: 702890 - protein, 20 aa, Homo sapiens
  CDR3 for beta chain variable domain of TCR clone 351445 (TRBV19, TRBJ2-1)
CASSISRTVTSTRLNNEHFF

SEQ ID NO: 702891 - protein, 15 aa, Homo sapiens
  CDR3 for alpha chain variable domain of TCR clone 351446 (TRAV12-3, TRAJ6)
CAMSATSGGSYIPTF

SEQ ID NO: 702892 - protein, 11 aa, Homo sapiens
  CDR3 for beta chain variable domain of TCR clone 351446 (TRBV20-1, TRBJ1-5)
CSAQGDQPQQF

SEQ ID NO: 702893 - protein, 16 aa, Homo sapiens
  CDR3 for alpha chain variable domain of TCR clone 351447 (TRAV1-1, TRAJ29)
CAVRSTRNSGNTPLIF

SEQ ID NO: 702894 - protein, 15 aa, Homo sapiens
  CDR3 for beta chain variable domain of TCR clone 351447 (TRBV29-1, TRBJ2-1)
CSVGRHALFYNEQFF

SEQ ID NO: 702895 - protein, 16 aa, Homo sapiens
  CDR3 for alpha chain variable domain of TCR clone 351448 (TRAV3, TRAJ37)
CSVRGKGSGNTGKLIF

SEQ ID NO: 702896 - protein, 16 aa, Homo sapiens
  CDR3 for beta chain variable domain of TCR clone 351448 (TRBV4-2, TRBJ2-4)
CASSQELRRAKNIQYF

SEQ ID NO: 702897 - protein, 14 aa, Homo sapiens
  CDR3 for alpha chain variable domain of TCR clone 351449 (TRAV3, TRAJ21)
CAVRDNYNFNKFYF

SEQ ID NO: 702898 - protein, 14 aa, Homo sapiens
  CDR3 for beta chain variable domain of TCR clone 351449 (TRBV27, TRBJ2-3)
CASRDSPITDTQYF

SEQ ID NO: 702899 - protein, 14 aa, Homo sapiens
  CDR3 for alpha chain variable domain of TCR clone 351450 (TRAV12-2, TRAJ29)
CAVNWETGNTPLVF

SEQ ID NO: 702900 - protein, 11 aa, Homo sapiens
  CDR3 for beta chain variable domain of TCR clone 351450 (TRBV4-1, TRBJ2-7)
CASSGPYEQYF

SEQ ID NO: 702901 - protein, 14 aa, Homo sapiens
  CDR3 for alpha chain variable domain of TCR clone 351451 (TRAV16, TRAJ33)
CALSAMDSNYQLIW

SEQ ID NO: 702902 - protein, 14 aa, Homo sapiens
  CDR3 for beta chain variable domain of TCR clone 351451 (TRBV4-2, TRBJ2-1)
CASGLDSAYNEQFF

SEQ ID NO: 702903 - protein, 14 aa, Homo sapiens
  CDR3 for alpha chain variable domain of TCR clone 351452 (TRAV8-2, TRAJ37)
CVVSISGNTGKLIF

SEQ ID NO: 702904 - protein, 14 aa, Homo sapiens
  CDR3 for beta chain variable domain of TCR clone 351452 (TRBV12-5, TRBJ2-5)
CASGSRTHQETQYF

SEQ ID NO: 702905 - protein, 14 aa, Homo sapiens
  CDR3 for alpha chain variable domain of TCR clone 351453 (TRAV12-2, TRAJ40)
CAVKNPSGTYKYTF

SEQ ID NO: 702906 - protein, 14 aa, Homo sapiens
  CDR3 for beta chain variable domain of TCR clone 351453 (TRBV20-1, TRBJ1-1)
CSAQTRIGGTEAFF

SEQ ID NO: 702907 - protein, 12 aa, Homo sapiens
  CDR3 for alpha chain variable domain of TCR clone 351454 (TRAV13-1, TRAJ53)
AASGGSNSKLTF

SEQ ID NO: 702908 - protein, 15 aa, Homo sapiens
  CDR3 for beta chain variable domain of TCR clone 351454 (TRBV5-1, TRBJ2-1)
CASSPPRAPYNEQFF

SEQ ID NO: 702909 - protein, 14 aa, Homo sapiens
  CDR3 for alpha chain variable domain of TCR clone 351455 (TRAV8-4, TRAJ8)
CAVSEDAGFQKLVF

SEQ ID NO: 702910 - protein, 16 aa, Homo sapiens
  CDR3 for beta chain variable domain of TCR clone 351455 (TRBV7-3, TRBJ2-1)
CASSKPLAGGYNEQFF

SEQ ID NO: 702911 - protein, 16 aa, Homo sapiens
  CDR3 for alpha chain variable domain of TCR clone 351456 (TRAV22, TRAJ45)
CAVERGKRGGADGLTF

SEQ ID NO: 702912 - protein, 15 aa, Homo sapiens
  CDR3 for beta chain variable domain of TCR clone 351456 (TRBV5-1, TRBJ2-7)
CASSLYPDGGYEQYF

SEQ ID NO: 702913 - protein, 15 aa, Homo sapiens
  CDR3 for alpha chain variable domain of TCR clone 351457 (TRAV26-1, TRAJ15)
CIVRAANPAGTALIF

SEQ ID NO: 702914 - protein, 15 aa, Homo sapiens
  CDR3 for beta chain variable domain of TCR clone 351457 (TRBV20-1, TRBJ1-1)
CSARSAATSNTGAFF

SEQ ID NO: 702915 - protein, 21 aa, Homo sapiens
  CDR3 for alpha chain variable domain of TCR clone 351458 (TRAV1-1, TRAJ6)
CLLLLRCERLERTGGSYIPTF

SEQ ID NO: 702916 - protein, 13 aa, Homo sapiens
  CDR3 for beta chain variable domain of TCR clone 351458 (TRBV4-2, TRBJ1-1)
CASSQAGNTEAFF

SEQ ID NO: 702917 - protein, 14 aa, Homo sapiens
  CDR3 for alpha chain variable domain of TCR clone 351459 (TRAV8-3, TRAJ4)
CAVGAAGCYNKLIF

SEQ ID NO: 702918 - protein, 14 aa, Homo sapiens
  CDR3 for beta chain variable domain of TCR clone 351459 (TRBV12-4, TRBJ2-1)
CASSLGQGASEQFF

SEQ ID NO: 702919 - protein, 15 aa, Homo sapiens
  CDR3 for alpha chain variable domain of TCR clone 351460 (TRAV17, TRAJ57)
CSTGPSQGGSEKLVF

SEQ ID NO: 702920 - protein, 11 aa, Homo sapiens
  CDR3 for beta chain variable domain of TCR clone 351460 (TRBV11-2, TRBJ2-2)
CASSLPGELFF

SEQ ID NO: 702921 - protein, 13 aa, Homo sapiens
  CDR3 for alpha chain variable domain of TCR clone 351461 (TRAV17, TRAJ26)
CATVDNYGQNFVF

SEQ ID NO: 702922 - protein, 16 aa, Homo sapiens
  CDR3 for beta chain variable domain of TCR clone 351461 (TRBV2, TRBJ2-1)
CASSVGGSLSSNEQFF

SEQ ID NO: 702923 - protein, 16 aa, Homo sapiens
  CDR3 for alpha chain variable domain of TCR clone 351462 (TRAV3, TRAJ6)
CAVRDGMGRRKLHTDI

SEQ ID NO: 702924 - protein, 15 aa, Homo sapiens
  CDR3 for beta chain variable domain of TCR clone 351462 (TRBV5-1, TRBJ2-7)
CASSLGDFTTYEQYF

SEQ ID NO: 702925 - protein, 14 aa, Homo sapiens
  CDR3 for alpha chain variable domain of TCR clone 351463 (TRAV12-2, TRAJ17)
CAVLFKDAGNKLTS

SEQ ID NO: 702926 - protein, 14 aa, Homo sapiens
  CDR3 for beta chain variable domain of TCR clone 351463 (TRBV12-5, TRBJ2-5)
CASGSRTHQETQYF

SEQ ID NO: 702927 - protein, 12 aa, Homo sapiens
  CDR3 for alpha chain variable domain of TCR clone 351464 (TRAV21, TRAJ27)
CVANTNAGKSTF

SEQ ID NO: 702928 - protein, 15 aa, Homo sapiens
  CDR3 for beta chain variable domain of TCR clone 351464 (TRBV5-1, TRBJ2-1)
CASSPPRAPYNEQFF

SEQ ID NO: 702929 - protein, 14 aa, Homo sapiens
  CDR3 for alpha chain variable domain of TCR clone 351465 (TRAV8-2, TRAJ37)
CVVSISGKTGKLIF

SEQ ID NO: 702930 - protein, 13 aa, Homo sapiens
  CDR3 for beta chain variable domain of TCR clone 351465 (TRBV7-8, TRBJ2-7)
RRVRLTEMGEQYF

SEQ ID NO: 702931 - protein, 12 aa, Homo sapiens
  CDR3 for alpha chain variable domain of TCR clone 351466 (TRAV12-3, TRAJ17)
CAMTLTGNKLTF

SEQ ID NO: 702932 - protein, 15 aa, Homo sapiens
  CDR3 for beta chain variable domain of TCR clone 351466 (TRBV7-2, TRBJ2-3)
CASSPLGVGTDTQYF

SEQ ID NO: 702933 - protein, 14 aa, Homo sapiens
  CDR3 for alpha chain variable domain of TCR clone 351467 (TRAV38-2/DV8, TRAJ29)
CAYRSRSGNTPLVF

SEQ ID NO: 702934 - protein, 12 aa, Homo sapiens
  CDR3 for beta chain variable domain of TCR clone 351467 (TRBV6-3, TRBJ2-7)
CASSLTPYEQYF

SEQ ID NO: 702935 - protein, 13 aa, Homo sapiens
  CDR3 for alpha chain variable domain of TCR clone 351468 (TRAV36/DV7, TRAJ7)
CAVERYGNNRLAF

SEQ ID NO: 702936 - protein, 13 aa, Homo sapiens
  CDR3 for beta chain variable domain of TCR clone 351468 (TRBV12-4, TRBJ1-1)
CASSPGTGFEAFF

SEQ ID NO: 702937 - protein, 12 aa, Homo sapiens
  CDR3 for alpha chain variable domain of TCR clone 351469 (TRAV13-2, TRAJ23)
CAERHGGGKLIF

SEQ ID NO: 702938 - protein, 15 aa, Homo sapiens
  CDR3 for beta chain variable domain of TCR clone 351469 (TRBV7-9, TRBJ1-6)
CASSSPGRGNSPLHF

SEQ ID NO: 702939 - protein, 14 aa, Homo sapiens
  CDR3 for alpha chain variable domain of TCR clone 351470 (TRAV39, TRAJ33)
CAVDIKNSNYQFIW

SEQ ID NO: 702940 - protein, 13 aa, Homo sapiens
  CDR3 for beta chain variable domain of TCR clone 351470 (TRBV4-2, TRBJ2-1)
CASSPGTYNEQFF

SEQ ID NO: 702941 - protein, 14 aa, Homo sapiens
  CDR3 for alpha chain variable domain of TCR clone 351471 (TRAV35, TRAJ39)
CAGQLGNAGNMLTF

SEQ ID NO: 702942 - protein, 15 aa, Homo sapiens
  CDR3 for beta chain variable domain of TCR clone 351471 (TRBV5-1, TRBJ2-3)
CASSVTSGSTDTQYF

SEQ ID NO: 702943 - protein, 14 aa, Homo sapiens
  CDR3 for alpha chain variable domain of TCR clone 351472 (TRAV27, TRAJ18)
CAGYRGSTLGRLYF

SEQ ID NO: 702944 - protein, 15 aa, Homo sapiens
  CDR3 for beta chain variable domain of TCR clone 351472 (TRBV12-4, TRBJ2-5)
CASSPPTGLQETQYF

SEQ ID NO: 702945 - protein, 13 aa, Homo sapiens
  CDR3 for alpha chain variable domain of TCR clone 351473 (TRAV2, TRAJ21)
CAVEDNNFNKFYF

SEQ ID NO: 702946 - protein, 16 aa, Homo sapiens
  CDR3 for beta chain variable domain of TCR clone 351473 (TRBV7-8, TRBJ2-4)
CASSAERTLAKNMQYF

SEQ ID NO: 702947 - protein, 17 aa, Homo sapiens
  CDR3 for alpha chain variable domain of TCR clone 351474 (TRAV3, TRAJ12)
CAVRDGGRMDSSYKLIF

SEQ ID NO: 702948 - protein, 11 aa, Homo sapiens
  CDR3 for beta chain variable domain of TCR clone 351474 (TRBV7-9, TRBJ2-7)
CASSLNYEQYF

SEQ ID NO: 702949 - protein, 11 aa, Homo sapiens
  CDR3 for alpha chain variable domain of TCR clone 351475 (TRAV8-4, TRAJ34)
CAVSWTDKLIV

SEQ ID NO: 702950 - protein, 14 aa, Homo sapiens
  CDR3 for beta chain variable domain of TCR clone 351475 (TRBV7-9, TRBJ2-3)
CASSLEDGTDTQYF

SEQ ID NO: 702951 - protein, 14 aa, Homo sapiens
  CDR3 for alpha chain variable domain of TCR clone 351476 (TRAV17, TRAJ16)
CATADFSDGQKLLF

SEQ ID NO: 702952 - protein, 13 aa, Homo sapiens
  CDR3 for beta chain variable domain of TCR clone 351476 (TRBV12-5, TRBJ2-3)
CASGDRQSDTQYF

SEQ ID NO: 702953 - protein, 14 aa, Homo sapiens
  CDR3 for alpha chain variable domain of TCR clone 351477 (TRAV21, TRAJ35)
CAVMPIGFGNVLHC

SEQ ID NO: 702954 - protein, 12 aa, Homo sapiens
  CDR3 for beta chain variable domain of TCR clone 351477 (TRBV7-9, TRBJ2-7)
CASSIRREEQYF

SEQ ID NO: 702955 - protein, 14 aa, Homo sapiens
  CDR3 for alpha chain variable domain of TCR clone 351478 (TRAV20, TRAJ4)
CAVQGFWWLQYADF

SEQ ID NO: 702956 - protein, 18 aa, Homo sapiens
  CDR3 for beta chain variable domain of TCR clone 351478 (TRBV19, TRBJ1-5)
CASSKGQVSIHSNQPQHF

SEQ ID NO: 702957 - protein, 12 aa, Homo sapiens
  CDR3 for alpha chain variable domain of TCR clone 351479 (TRAV13-1, TRAJ21)
CSAKEGFNKFYF

SEQ ID NO: 702958 - protein, 17 aa, Homo sapiens
  CDR3 for beta chain variable domain of TCR clone 351479 (TRBV25-1, TRBJ1-4)
CASSPGDSTNEKLFLAV

SEQ ID NO: 702959 - protein, 14 aa, Homo sapiens
  CDR3 for alpha chain variable domain of TCR clone 351480 (TRAV1-2, TRAJ8)
CAVREDTGFQKLVF

SEQ ID NO: 702960 - protein, 15 aa, Homo sapiens
  CDR3 for beta chain variable domain of TCR clone 351480 (TRBV28, TRBJ2-1)
CASTIIAGGRSEQFF

SEQ ID NO: 702961 - protein, 10 aa, Homo sapiens
  CDR3 for alpha chain variable domain of TCR clone 351481 (TRAV21, TRAJ27)
CTTNAGKSTF

SEQ ID NO: 702962 - protein, 17 aa, Homo sapiens
  CDR3 for beta chain variable domain of TCR clone 351481 (TRBV20-1, TRBJ2-1)
CSASSSGLAGSYNEQFF

SEQ ID NO: 702963 - protein, 14 aa, Homo sapiens
  CDR3 for alpha chain variable domain of TCR clone 351482 (TRAV12-2, TRAJ40)
CAVKIPSGTYRYIF

SEQ ID NO: 702964 - protein, 13 aa, Homo sapiens
  CDR3 for beta chain variable domain of TCR clone 351482 (TRBV7-3, TRBJ1-1)
CASSQDWGAEAFF

SEQ ID NO: 702965 - protein, 15 aa, Homo sapiens
  CDR3 for alpha chain variable domain of TCR clone 351483 (TRAV17, TRAJ37)
CATDGGSSNTGKLIF

SEQ ID NO: 702966 - protein, 15 aa, Homo sapiens
  CDR3 for beta chain variable domain of TCR clone 351483 (TRBV28, TRBJ2-5)
CARSSGRTIQETQYF

SEQ ID NO: 702967 - protein, 15 aa, Homo sapiens
  CDR3 for alpha chain variable domain of TCR clone 351484 (TRAV2, TRAJ29)
CAVDLARSGNTPLVF

SEQ ID NO: 702968 - protein, 15 aa, Homo sapiens
  CDR3 for beta chain variable domain of TCR clone 351484 (TRBV19, TRBJ1-6)
CASSTQGAVGSPLHF

SEQ ID NO: 702969 - protein, 12 aa, Homo sapiens
  CDR3 for alpha chain variable domain of TCR clone 351485 (TRAV21, TRAJ33)
CAKMDSNYQVIL

SEQ ID NO: 702970 - protein, 14 aa, Homo sapiens
  CDR3 for beta chain variable domain of TCR clone 351485 (TRBV2, TRBJ2-7)
CASSLTSGGYEQYF

SEQ ID NO: 702971 - protein, 14 aa, Homo sapiens
  CDR3 for alpha chain variable domain of TCR clone 351486 (TRAV26-2, TRAJ54)
CILSRIQGAQKLVL

SEQ ID NO: 702972 - protein, 14 aa, Homo sapiens
  CDR3 for beta chain variable domain of TCR clone 351486 (TRBV5-4, TRBJ1-1)
CASSLDSRRDEAFF

SEQ ID NO: 702973 - protein, 13 aa, Homo sapiens
  CDR3 for alpha chain variable domain of TCR clone 351487 (TRAV8-3, TRAJ44)
CAVVPGTASKLTF

SEQ ID NO: 702974 - protein, 16 aa, Homo sapiens
  CDR3 for beta chain variable domain of TCR clone 351487 (TRBV19, TRBJ1-5)
CASSIDRGGPRQPQHF

SEQ ID NO: 702975 - protein, 15 aa, Homo sapiens
  CDR3 for alpha chain variable domain of TCR clone 351488 (TRAV25, TRAJ53)
CAATGGGGSNYKLTF

SEQ ID NO: 702976 - protein, 13 aa, Homo sapiens
  CDR3 for beta chain variable domain of TCR clone 351488 (TRBV4-1, TRBJ2-1)
CASSQEVQYEQFF

SEQ ID NO: 702977 - protein, 12 aa, Homo sapiens
  CDR3 for alpha chain variable domain of TCR clone 351489 (TRAV12-3, TRAJ17)
GAMTLTGNKLTF

SEQ ID NO: 702978 - protein, 15 aa, Homo sapiens
  CDR3 for beta chain variable domain of TCR clone 351489 (TRBV5-7, TRBJ2-7)
CASSPYFEGSYEQYF

SEQ ID NO: 702979 - protein, 13 aa, Homo sapiens
  CDR3 for alpha chain variable domain of TCR clone 351490 (TRAV21, TRAJ20)
CAVGLRVDYKLSF

SEQ ID NO: 702980 - protein, 15 aa, Homo sapiens
  CDR3 for beta chain variable domain of TCR clone 351490 (TRBV4-1, TRBJ2-1)
CASSQDAGGLYEQFF

SEQ ID NO: 702981 - protein, 13 aa, Homo sapiens
  CDR3 for alpha chain variable domain of TCR clone 351491 (TRAV20, TRAJ31)
CAVQAWNNARLMF

SEQ ID NO: 702982 - protein, 12 aa, Homo sapiens
  CDR3 for beta chain variable domain of TCR clone 351491 (TRBV11-2, TRBJ2-2)
CASSLGVGELFF

SEQ ID NO: 702983 - protein, 17 aa, Homo sapiens
  CDR3 for alpha chain variable domain of TCR clone 351492 (TRAV29/DV5, TRAJ40)
CAASVIYTTSGTYKYIF

SEQ ID NO: 702984 - protein, 13 aa, Homo sapiens
  CDR3 for beta chain variable domain of TCR clone 351492 (TRBV6-1, TRBJ2-1)
CASGHDRNNEQFF

SEQ ID NO: 702985 - protein, 14 aa, Homo sapiens
  CDR3 for alpha chain variable domain of TCR clone 351493 (TRAV1-2, TRAJ8)
CAVREDTGFQKLVF

SEQ ID NO: 702986 - protein, 15 aa, Homo sapiens
  CDR3 for beta chain variable domain of TCR clone 351493 (TRBV7-6, TRBJ1-5)
CASSQSSGINQPQHF

SEQ ID NO: 702987 - protein, 14 aa, Homo sapiens
  CDR3 for alpha chain variable domain of TCR clone 351494 (TRAV35, TRAJ33)
CAGSSQDSNYQLIW

SEQ ID NO: 702988 - protein, 18 aa, Homo sapiens
  CDR3 for beta chain variable domain of TCR clone 351494 (TRBV11-2, TRBJ2-6)
CASSLNPFLGTGANVLTF

SEQ ID NO: 702989 - protein, 12 aa, Homo sapiens
  CDR3 for alpha chain variable domain of TCR clone 351495 (TRAV1-1, TRAJ30)
CAVRGRDDKIIF

SEQ ID NO: 702990 - protein, 13 aa, Homo sapiens
  CDR3 for beta chain variable domain of TCR clone 351495 (TRBV4-1, TRBJ2-1)
CASSQAGGDEQFF

SEQ ID NO: 702991 - protein, 15 aa, Homo sapiens
  CDR3 for alpha chain variable domain of TCR clone 351496 (TRAV23/DV6, TRAJ38)
CAARSNAGNNRKLIC

SEQ ID NO: 702992 - protein, 16 aa, Homo sapiens
  CDR3 for beta chain variable domain of TCR clone 351496 (TRBV10-2, TRBJ1-5)
CASSRDRDYSNQPQHF

SEQ ID NO: 702993 - protein, 15 aa, Homo sapiens
  CDR3 for alpha chain variable domain of TCR clone 351497 (TRAV8-2, TRAJ16)
CVVSDGFSDGQKLLF

SEQ ID NO: 702994 - protein, 15 aa, Homo sapiens
  CDR3 for beta chain variable domain of TCR clone 351497 (TRBV6-1, TRBJ2-6)
CASTGSRSGANVLTF

SEQ ID NO: 702995 - protein, 15 aa, Homo sapiens
  CDR3 for alpha chain variable domain of TCR clone 351498 (TRAV8-4, TRAJ10)
CAVSDGPVGGNKLTF

SEQ ID NO: 702996 - protein, 13 aa, Homo sapiens
  CDR3 for beta chain variable domain of TCR clone 351498 (TRBV28, TRBJ1-3)
CASSFLGSGTIYF

SEQ ID NO: 702997 - protein, 15 aa, Homo sapiens
  CDR3 for alpha chain variable domain of TCR clone 351499 (TRAV21, TRAJ53)
CATLNSGGSNYKLTF

SEQ ID NO: 702998 - protein, 14 aa, Homo sapiens
  CDR3 for beta chain variable domain of TCR clone 351499 (TRBV11-2, TRBJ2-7)
CASRLGAGAYEQYF

SEQ ID NO: 702999 - protein, 16 aa, Homo sapiens
  CDR3 for alpha chain variable domain of TCR clone 351500 (TRAV3, TRAJ10)
CAVRDMNAGGGNKPTF

SEQ ID NO: 703000 - protein, 13 aa, Homo sapiens
  CDR3 for beta chain variable domain of TCR clone 351500 (TRBV19, TRBJ1-2)
CASSISEDYGYTF

SEQ ID NO: 703001 - protein, 12 aa, Homo sapiens
  CDR3 for alpha chain variable domain of TCR clone 351501 (TRAV8-4, TRAJ43)
CAVSVNNNDMRF

SEQ ID NO: 703002 - protein, 16 aa, Homo sapiens
  CDR3 for beta chain variable domain of TCR clone 351501 (TRBV12-5, TRBJ2-5)
CASGPRTSGNQETQYF

SEQ ID NO: 703003 - protein, 17 aa, Homo sapiens
  CDR3 for alpha chain variable domain of TCR clone 351502 (TRAV3, TRAJ38)
CAVRDCLNAGNNRKLIS

SEQ ID NO: 703004 - protein, 13 aa, Homo sapiens
  CDR3 for beta chain variable domain of TCR clone 351502 (TRBV23-1, TRBJ1-4)
CASRGKFNEKLFF

SEQ ID NO: 703005 - protein, 17 aa, Homo sapiens
  CDR3 for alpha chain variable domain of TCR clone 351503 (TRAV3, TRAJ42)
CAVRDRAYGGSQGNLLF

SEQ ID NO: 703006 - protein, 15 aa, Homo sapiens
  CDR3 for beta chain variable domain of TCR clone 351503 (TRBV2, TRBJ2-7)
CASSEGRARSYEQYF

SEQ ID NO: 703007 - protein, 12 aa, Homo sapiens
  CDR3 for alpha chain variable domain of TCR clone 351504 (TRAV24, TRAJ26)
CALDNYGQNFVF

SEQ ID NO: 703008 - protein, 13 aa, Homo sapiens
  CDR3 for beta chain variable domain of TCR clone 351504 (TRBV4-1, TRBJ1-1)
CASSRKMNTEAFF

SEQ ID NO: 703009 - protein, 15 aa, Homo sapiens
  CDR3 for alpha chain variable domain of TCR clone 351505 (TRAV4, TRAJ39)
CLVGPNNNAGNMLPF

SEQ ID NO: 703010 - protein, 13 aa, Homo sapiens
  CDR3 for beta chain variable domain of TCR clone 351505 (TRBV11-3, TRBJ2-5)
CASSSTGEETQYF

SEQ ID NO: 703011 - protein, 13 aa, Homo sapiens
  CDR3 for alpha chain variable domain of TCR clone 351506 (TRAV26-2, TRAJ43)
CILRAVNNNDMRL

SEQ ID NO: 703012 - protein, 16 aa, Homo sapiens
  CDR3 for beta chain variable domain of TCR clone 351506 (TRBV28, TRBJ1-5)
CASSLTGQGWNQPQHF

SEQ ID NO: 703013 - protein, 14 aa, Homo sapiens
  CDR3 for alpha chain variable domain of TCR clone 351507 (TRAV25, TRAJ45)
CSRESGGGADGLTF

SEQ ID NO: 703014 - protein, 12 aa, Homo sapiens
  CDR3 for beta chain variable domain of TCR clone 351507 (TRBV7-9, TRBJ2-7)
CASSFDSYEQYF

SEQ ID NO: 703015 - protein, 16 aa, Homo sapiens
  CDR3 for alpha chain variable domain of TCR clone 351508 (TRAV23/DV6, TRAJ52)
CAARPTGGTSYGKLTF

SEQ ID NO: 703016 - protein, 13 aa, Homo sapiens
  CDR3 for beta chain variable domain of TCR clone 351508 (TRBV7-9, TRBJ1-1)
CASSLSGETEAFF

SEQ ID NO: 703017 - protein, 12 aa, Homo sapiens
  CDR3 for alpha chain variable domain of TCR clone 351509 (TRAV8-3, TRAJ20)
CAVGGGDYKLSF

SEQ ID NO: 703018 - protein, 14 aa, Homo sapiens
  CDR3 for beta chain variable domain of TCR clone 351509 (TRBV5-1, TRBJ2-7)
CASSRGVSLYEQYF

SEQ ID NO: 703019 - protein, 13 aa, Homo sapiens
  CDR3 for alpha chain variable domain of TCR clone 351510 (TRAV27, TRAJ57)
CRSAQGGSEKRVF

SEQ ID NO: 703020 - protein, 16 aa, Homo sapiens
  CDR3 for beta chain variable domain of TCR clone 351510 (TRBV11-2, TRBJ2-7)
CASSPTTGGVSYEQYF

SEQ ID NO: 703021 - protein, 12 aa, Homo sapiens
  CDR3 for alpha chain variable domain of TCR clone 351511 (TRAV17, TRAJ20)
CATDSNDYKLSF

SEQ ID NO: 703022 - protein, 13 aa, Homo sapiens
  CDR3 for beta chain variable domain of TCR clone 351511 (TRBV6-1, TRBJ1-1)
CASSRQGNTEAFF

SEQ ID NO: 703023 - protein, 13 aa, Homo sapiens
  CDR3 for alpha chain variable domain of TCR clone 351512 (TRAV8-3, TRAJ40)
CAVVVSGTYKYIF

SEQ ID NO: 703024 - protein, 12 aa, Homo sapiens
  CDR3 for beta chain variable domain of TCR clone 351512 (TRBV11-2, TRBJ2-7)
CASSPPADEQYF

SEQ ID NO: 703025 - protein, 14 aa, Homo sapiens
  CDR3 for alpha chain variable domain of TCR clone 351513 (TRAV13-1, TRAJ32)
CAARGSGATNKLNF

SEQ ID NO: 703026 - protein, 15 aa, Homo sapiens
  CDR3 for beta chain variable domain of TCR clone 351513 (TRBV5-5, TRBJ1-1)
CASSLVGKDNTEAFF

SEQ ID NO: 703027 - protein, 10 aa, Homo sapiens
  CDR3 for alpha chain variable domain of TCR clone 351514 (TRAV13-1, TRAJ42)
LRGSQGNLIF

SEQ ID NO: 703028 - protein, 13 aa, Homo sapiens
  CDR3 for beta chain variable domain of TCR clone 351514 (TRBV2, TRBJ1-4)
CASSELGVEKLFF

SEQ ID NO: 703029 - protein, 14 aa, Homo sapiens
  CDR3 for alpha chain variable domain of TCR clone 351515 (TRAV2, TRAJ37)
CAVEDLGKTGKLIF

SEQ ID NO: 703030 - protein, 11 aa, Homo sapiens
  CDR3 for beta chain variable domain of TCR clone 351515 (TRBV25-1, TRBJ2-2)
CASSAQGDEHR

SEQ ID NO: 703031 - protein, 17 aa, Homo sapiens
  CDR3 for alpha chain variable domain of TCR clone 351516 (TRAV13-1, TRAJ52)
CAASSGAGGNSYGKLTF

SEQ ID NO: 703032 - protein, 12 aa, Homo sapiens
  CDR3 for beta chain variable domain of TCR clone 351516 (TRBV11-2, TRBJ2-2)
CASSLGGGELFF

SEQ ID NO: 703033 - protein, 15 aa, Homo sapiens
  CDR3 for alpha chain variable domain of TCR clone 351517 (TRAV2, TRAJ37)
RAVEDGSSNTGKLIF

SEQ ID NO: 703034 - protein, 13 aa, Homo sapiens
  CDR3 for beta chain variable domain of TCR clone 351517 (TRBV20-1, TRBJ1-6)
CSTFREGNSPLHF

SEQ ID NO: 703035 - protein, 14 aa, Homo sapiens
  CDR3 for alpha chain variable domain of TCR clone 351518 (TRAV4, TRAJ26)
CLVGPITMVRILSL

SEQ ID NO: 703036 - protein, 17 aa, Homo sapiens
  CDR3 for beta chain variable domain of TCR clone 351518 (TRBV24-1, TRBJ2-1)
CATSDVSTSGTYNEQFF

SEQ ID NO: 703037 - protein, 12 aa, Homo sapiens
  CDR3 for alpha chain variable domain of TCR clone 351519 (TRAV10, TRAJ43)
CVVVRVGNDTRF

SEQ ID NO: 703038 - protein, 15 aa, Homo sapiens
  CDR3 for beta chain variable domain of TCR clone 351519 (TRBV2, TRBJ2-7)
CASSEGLARSYEQYF

SEQ ID NO: 703039 - protein, 14 aa, Homo sapiens
  CDR3 for alpha chain variable domain of TCR clone 351520 (TRAV23/DV6, TRAJ22)
CAASVSGSARQLTF

SEQ ID NO: 703040 - protein, 16 aa, Homo sapiens
  CDR3 for beta chain variable domain of TCR clone 351520 (TRBV19, TRBJ2-2)
CASSFQGQGLAGELFF

SEQ ID NO: 703041 - protein, 14 aa, Homo sapiens
  CDR3 for alpha chain variable domain of TCR clone 351521 (TRAV26-1, TRAJ39)
CIVFINNAGNMLTF

SEQ ID NO: 703042 - protein, 15 aa, Homo sapiens
  CDR3 for beta chain variable domain of TCR clone 351521 (TRBV19, TRBJ2-4)
CASSLTGLTKNIQYF

SEQ ID NO: 703043 - protein, 12 aa, Homo sapiens
  CDR3 for alpha chain variable domain of TCR clone 351522 (TRAV8-3, TRAJ20)
CAVGANDYKLSF

SEQ ID NO: 703044 - protein, 16 aa, Homo sapiens
  CDR3 for beta chain variable domain of TCR clone 351522 (TRBV28, TRBJ1-4)
CASSSRTGAANEKLFF

SEQ ID NO: 703045 - protein, 14 aa, Homo sapiens
  CDR3 for alpha chain variable domain of TCR clone 351523 (TRAV13-1, TRAJ48)
CAASRSFGNEKLTF

SEQ ID NO: 703046 - protein, 14 aa, Homo sapiens
  CDR3 for beta chain variable domain of TCR clone 351523 (TRBV20-1, TRBJ1-1)
CSAQTRIGGTEAFF

SEQ ID NO: 703047 - protein, 15 aa, Homo sapiens
  CDR3 for alpha chain variable domain of TCR clone 351524 (TRAV8-3, TRAJ27)
CAVGPSKTNPGKSTF

SEQ ID NO: 703048 - protein, 12 aa, Homo sapiens
  CDR3 for beta chain variable domain of TCR clone 351524 (TRBV11-2, TRBJ2-2)
CASSLGGGELFF

SEQ ID NO: 703049 - protein, 14 aa, Homo sapiens
  CDR3 for alpha chain variable domain of TCR clone 351525 (TRAV8-2, TRAJ4)
CVVSPSGGYNKLIF

SEQ ID NO: 703050 - protein, 17 aa, Homo sapiens
  CDR3 for beta chain variable domain of TCR clone 351525 (TRBV25-1, TRBJ2-3)
CASSGYGGGGNTDTQYF

SEQ ID NO: 703051 - protein, 13 aa, Homo sapiens
  CDR3 for alpha chain variable domain of TCR clone 351526 (TRAV25, TRAJ30)
CAGRVDRDDKIIF

SEQ ID NO: 703052 - protein, 12 aa, Homo sapiens
  CDR3 for beta chain variable domain of TCR clone 351526 (TRBV11-2, TRBJ2-2)
CASSLGGGELFF

SEQ ID NO: 703053 - protein, 18 aa, Homo sapiens
  CDR3 for alpha chain variable domain of TCR clone 351527 (TRAV26-1, TRAJ23)
CIVRVGLEVWDEGGKLIF

SEQ ID NO: 703054 - protein, 16 aa, Homo sapiens
  CDR3 for beta chain variable domain of TCR clone 351527 (TRBV12-4, TRBJ2-5)
CASSFFVRGRQETQYF

SEQ ID NO: 703055 - protein, 13 aa, Homo sapiens
  CDR3 for alpha chain variable domain of TCR clone 351528 (TRAV8-6, TRAJ17)
CAVSGGCRQQANF

SEQ ID NO: 703056 - protein, 15 aa, Homo sapiens
  CDR3 for beta chain variable domain of TCR clone 351528 (TRBV7-2, TRBJ1-5)
CASGSTGVDNQPQHF

SEQ ID NO: 703057 - protein, 17 aa, Homo sapiens
  CDR3 for alpha chain variable domain of TCR clone 351529 (TRAV13-1, TRAJ52)
CAASSGAGGTSYVKLKF

SEQ ID NO: 703058 - protein, 15 aa, Homo sapiens
  CDR3 for beta chain variable domain of TCR clone 351529 (TRBV2, TRBJ2-1)
CASSELAGSYNGQFF

SEQ ID NO: 703059 - protein, 15 aa, Homo sapiens
  CDR3 for alpha chain variable domain of TCR clone 351530 (TRAV26-1, TRAJ29)
CIVRVEGSGNTPLVF

SEQ ID NO: 703060 - protein, 15 aa, Homo sapiens
  CDR3 for beta chain variable domain of TCR clone 351530 (TRBV7-9, TRBJ1-5)
CASSQGHQPNQPQPF

SEQ ID NO: 703061 - protein, 14 aa, Homo sapiens
  CDR3 for alpha chain variable domain of TCR clone 351531 (TRAV2, TRAJ37)
CAVDFTSNTGKLIF

SEQ ID NO: 703062 - protein, 13 aa, Homo sapiens
  CDR3 for beta chain variable domain of TCR clone 351531 (TRBV20-1, TRBJ2-5)
CSARRGTGATQYF

SEQ ID NO: 703063 - protein, 15 aa, Homo sapiens
  CDR3 for alpha chain variable domain of TCR clone 351532 (TRAV21, TRAJ24)
CAARSSTDSWGKLQV

SEQ ID NO: 703064 - protein, 14 aa, Homo sapiens
  CDR3 for beta chain variable domain of TCR clone 351532 (TRBV11-2, TRBJ2-5)
CASSRTGGIETQYF

SEQ ID NO: 703065 - protein, 15 aa, Homo sapiens
  CDR3 for alpha chain variable domain of TCR clone 351533 (TRAV26-1, TRAJ48)
CIARWAWVGNEKLTF

SEQ ID NO: 703066 - protein, 12 aa, Homo sapiens
  CDR3 for beta chain variable domain of TCR clone 351533 (TRBV19, TRBJ2-5)
CASSISEETQYF

SEQ ID NO: 703067 - protein, 12 aa, Homo sapiens
  CDR3 for alpha chain variable domain of TCR clone 351534 (TRAV13-1, TRAJ53)
AASGGSNYKLTF

SEQ ID NO: 703068 - protein, 15 aa, Homo sapiens
  CDR3 for beta chain variable domain of TCR clone 351534 (TRBV11-3, TRBJ2-3)
CASLKDGREGDTQYF

SEQ ID NO: 703069 - protein, 11 aa, Homo sapiens
  CDR3 for alpha chain variable domain of TCR clone 351535 (TRAV1-1, TRAJ23)
CAVRQGGELIF

SEQ ID NO: 703070 - protein, 15 aa, Homo sapiens
  CDR3 for beta chain variable domain of TCR clone 351535 (TRBV7-9, TRBJ1-1)
CASSLLEQGGTEAFF

SEQ ID NO: 703071 - protein, 13 aa, Homo sapiens
  CDR3 for alpha chain variable domain of TCR clone 351536 (TRAV26-2, TRAJ43)
CILRAVNNKDMRF

SEQ ID NO: 703072 - protein, 16 aa, Homo sapiens
  CDR3 for beta chain variable domain of TCR clone 351536 (TRBV20-1, TRBJ1-4)
CSAPGQGLLTNEKLFF

SEQ ID NO: 703073 - protein, 15 aa, Homo sapiens
  CDR3 for alpha chain variable domain of TCR clone 351537 (TRAV8-3, TRAJ45)
CASSYSGGGADGLAF

SEQ ID NO: 703074 - protein, 15 aa, Homo sapiens
  CDR3 for beta chain variable domain of TCR clone 351537 (TRBV27, TRBJ1-4)
CASSPRHATNEKLFF

SEQ ID NO: 703075 - protein, 17 aa, Homo sapiens
  CDR3 for alpha chain variable domain of TCR clone 351538 (TRAV29/DV5, TRAJ21)
CAASNKFYFGSGTKLNV

SEQ ID NO: 703076 - protein, 15 aa, Homo sapiens
  CDR3 for beta chain variable domain of TCR clone 351538 (TRBV6-3, TRBJ2-7)
CASSSPGTVFYEQYL

SEQ ID NO: 703077 - protein, 15 aa, Homo sapiens
  CDR3 for alpha chain variable domain of TCR clone 351539 (TRAV3, TRAJ11)
CAVRARGSGYSTLTF

SEQ ID NO: 703078 - protein, 17 aa, Homo sapiens
  CDR3 for beta chain variable domain of TCR clone 351539 (TRBV7-8, TRBJ2-6)
CASSAGTGGAGANVLTF

SEQ ID NO: 703079 - protein, 14 aa, Homo sapiens
  CDR3 for alpha chain variable domain of TCR clone 351540 (TRAV30, TRAJ33)
CGTVAPRSNYQLIW

SEQ ID NO: 703080 - protein, 14 aa, Homo sapiens
  CDR3 for beta chain variable domain of TCR clone 351540 (TRBV19, TRBJ2-5)
CASSSSGIQETQYF

SEQ ID NO: 703081 - protein, 14 aa, Homo sapiens
  CDR3 for alpha chain variable domain of TCR clone 351541 (TRAV2, TRAJ9)
CAVEDRGGGFKTIF

SEQ ID NO: 703082 - protein, 16 aa, Homo sapiens
  CDR3 for beta chain variable domain of TCR clone 351541 (TRBV20-1, TRBJ2-3)
CSAVRDRGPIADTQYF

SEQ ID NO: 703083 - protein, 13 aa, Homo sapiens
  CDR3 for alpha chain variable domain of TCR clone 351542 (TRAV26-1, TRAJ48)
CIVRVVGDEKLTF

SEQ ID NO: 703084 - protein, 14 aa, Homo sapiens
  CDR3 for beta chain variable domain of TCR clone 351542 (TRBV19, TRBJ2-1)
CASSMGSGRRSSSS

SEQ ID NO: 703085 - protein, 11 aa, Homo sapiens
  CDR3 for alpha chain variable domain of TCR clone 351543 (TRAV12-3, TRAJ27)
CAMANAGKSTF

SEQ ID NO: 703086 - protein, 12 aa, Homo sapiens
  CDR3 for beta chain variable domain of TCR clone 351543 (TRBV24-1, TRBJ1-1)
CATLYPDTEAFF

SEQ ID NO: 703087 - protein, 13 aa, Homo sapiens
  CDR3 for alpha chain variable domain of TCR clone 351544 (TRAV21, TRAJ20)
CAVGVFADYKLSF

SEQ ID NO: 703088 - protein, 14 aa, Homo sapiens
  CDR3 for beta chain variable domain of TCR clone 351544 (TRBV20-1, TRBJ2-5)
CSAHRQGLWETQYF

SEQ ID NO: 703089 - protein, 14 aa, Homo sapiens
  CDR3 for alpha chain variable domain of TCR clone 351545 (TRAV2, TRAJ9)
CAVEDRSGGFKTIV

SEQ ID NO: 703090 - protein, 15 aa, Homo sapiens
  CDR3 for beta chain variable domain of TCR clone 351545 (TRBV7-2, TRBJ2-1)
CASSLASGRVNEQFF

SEQ ID NO: 703091 - protein, 18 aa, Homo sapiens
  CDR3 for alpha chain variable domain of TCR clone 351546 (TRAV21, TRAJ52)
CAVRPSPAGGTSYGKLTF

SEQ ID NO: 703092 - protein, 12 aa, Homo sapiens
  CDR3 for beta chain variable domain of TCR clone 351546 (TRBV2, TRBJ1-5)
CHRGTGQSAQHF

SEQ ID NO: 703093 - protein, 14 aa, Homo sapiens
  CDR3 for alpha chain variable domain of TCR clone 351547 (TRAV17, TRAJ57)
CATDPQGGSEKLVF

SEQ ID NO: 703094 - protein, 18 aa, Homo sapiens
  CDR3 for beta chain variable domain of TCR clone 351547 (TRBV6-6, TRBJ1-3)
CASSYSKWDSVSGNTIYF

SEQ ID NO: 703095 - protein, 13 aa, Homo sapiens
  CDR3 for alpha chain variable domain of TCR clone 351548 (TRAV30, TRAJ20)
CGTGDRSDYKLSF

SEQ ID NO: 703096 - protein, 15 aa, Homo sapiens
  CDR3 for beta chain variable domain of TCR clone 351548 (TRBV2, TRBJ1-2)
CASTQVQDSNYGYTF

SEQ ID NO: 703097 - protein, 15 aa, Homo sapiens
  CDR3 for alpha chain variable domain of TCR clone 351549 (TRAV12-1, TRAJ44)
CVADLPTGTACRLTF

SEQ ID NO: 703098 - protein, 13 aa, Homo sapiens
  CDR3 for beta chain variable domain of TCR clone 351549 (TRBV20-1, TRBJ2-5)
CSARGDYQETQYF

SEQ ID NO: 703099 - protein, 16 aa, Homo sapiens
  CDR3 for alpha chain variable domain of TCR clone 351550 (TRAV3, TRAJ21)
CAVRDIERANFNKFYF

SEQ ID NO: 703100 - protein, 13 aa, Homo sapiens
  CDR3 for beta chain variable domain of TCR clone 351550 (TRBV27, TRBJ2-7)
CASSLTTGYEQYF

SEQ ID NO: 703101 - protein, 17 aa, Homo sapiens
  CDR3 for alpha chain variable domain of TCR clone 351551 (TRAV26-1, TRAJ37)
CIVRVITVSSNTGKLIF

SEQ ID NO: 703102 - protein, 15 aa, Homo sapiens
  CDR3 for beta chain variable domain of TCR clone 351551 (TRBV5-1, TRBJ1-1)
CASSSTTGTNTEAFF

SEQ ID NO: 703103 - protein, 10 aa, Homo sapiens
  CDR3 for alpha chain variable domain of TCR clone 351552 (TRAV13-1, TRAJ17)
MAAAGNKLTF

SEQ ID NO: 703104 - protein, 14 aa, Homo sapiens
  CDR3 for beta chain variable domain of TCR clone 351552 (TRBV20-1, TRBJ2-4)
CSARDRGQWGIQYF

SEQ ID NO: 703105 - protein, 13 aa, Homo sapiens
  CDR3 for alpha chain variable domain of TCR clone 351553 (TRAV8-1, TRAJ39)
CAVANNAGNMLTF

SEQ ID NO: 703106 - protein, 15 aa, Homo sapiens
  CDR3 for beta chain variable domain of TCR clone 351553 (TRBV7-2, TRBJ2-1)
CASSWNRGAYNEQFF

SEQ ID NO: 703107 - protein, 15 aa, Homo sapiens
  CDR3 for alpha chain variable domain of TCR clone 351554 (TRAV36/DV7, TRAJ53)
WEGENSGGSNYKLKF

SEQ ID NO: 703108 - protein, 15 aa, Homo sapiens
  CDR3 for beta chain variable domain of TCR clone 351554 (TRBV6-1, TRBJ2-5)
CASSEGWGIQETQYF

SEQ ID NO: 703109 - protein, 11 aa, Homo sapiens
  CDR3 for alpha chain variable domain of TCR clone 351555 (TRAV17, TRAJ43)
CATPRSNDMRF

SEQ ID NO: 703110 - protein, 16 aa, Homo sapiens
  CDR3 for beta chain variable domain of TCR clone 351555 (TRBV19, TRBJ2-1)
CASSKAGPSSYNEQFF

SEQ ID NO: 703111 - protein, 13 aa, Homo sapiens
  CDR3 for alpha chain variable domain of TCR clone 351556 (TRAV12-3, TRAJ7)
CAMSASGNNRLAF

SEQ ID NO: 703112 - protein, 14 aa, Homo sapiens
  CDR3 for beta chain variable domain of TCR clone 351556 (TRBV13, TRBJ2-5)
CASSLGPRCETQYF

SEQ ID NO: 703113 - protein, 15 aa, Homo sapiens
  CDR3 for alpha chain variable domain of TCR clone 351557 (TRAV12-2, TRAJ53)
CAVNGGGGSNYKLTF

SEQ ID NO: 703114 - protein, 13 aa, Homo sapiens
  CDR3 for beta chain variable domain of TCR clone 351557 (TRBV27, TRBJ2-5)
CASSLYRQETQYF

SEQ ID NO: 703115 - protein, 15 aa, Homo sapiens
  CDR3 for alpha chain variable domain of TCR clone 351558 (TRAV35, TRAJ23)
CAGQRGYHQGGKLIF

SEQ ID NO: 703116 - protein, 16 aa, Homo sapiens
  CDR3 for beta chain variable domain of TCR clone 351558 (TRBV27, TRBJ2-1)
CASSSRLAGNYNEQFF

SEQ ID NO: 703117 - protein, 11 aa, Homo sapiens
  CDR3 for alpha chain variable domain of TCR clone 351559 (TRAV12-1, TRAJ34)
CVVNKGRELIF

SEQ ID NO: 703118 - protein, 14 aa, Homo sapiens
  CDR3 for beta chain variable domain of TCR clone 351559 (TRBV15, TRBJ2-3)
CATSREENTDTQYF

SEQ ID NO: 703119 - protein, 13 aa, Homo sapiens
  CDR3 for alpha chain variable domain of TCR clone 351560 (TRAV8-3, TRAJ28)
CAVGAVGSYQLTF

SEQ ID NO: 703120 - protein, 18 aa, Homo sapiens
  CDR3 for beta chain variable domain of TCR clone 351560 (TRBV7-9, TRBJ2-1)
CASSTGLAEGSSYNEQFF

SEQ ID NO: 703121 - protein, 14 aa, Homo sapiens
  CDR3 for alpha chain variable domain of TCR clone 351561 (TRAV17, TRAJ54)
CATDANQGAQKLVF

SEQ ID NO: 703122 - protein, 12 aa, Homo sapiens
  CDR3 for beta chain variable domain of TCR clone 351561 (TRBV14, TRBJ2-5)
CASSHLKETQYF

SEQ ID NO: 703123 - protein, 10 aa, Homo sapiens
  CDR3 for alpha chain variable domain of TCR clone 351562 (TRAV1-2, TRAJ23)
CAGQGGKLIF

SEQ ID NO: 703124 - protein, 11 aa, Homo sapiens
  CDR3 for beta chain variable domain of TCR clone 351562 (TRBV11-2, TRBJ2-2)
CASSLPGELFF

SEQ ID NO: 703125 - protein, 14 aa, Homo sapiens
  CDR3 for alpha chain variable domain of TCR clone 351563 (TRAV8-4, TRAJ13)
CALTLSVGYQKVTF

SEQ ID NO: 703126 - protein, 14 aa, Homo sapiens
  CDR3 for beta chain variable domain of TCR clone 351563 (TRBV7-2, TRBJ1-2)
CASSQTGSTYGYTF

SEQ ID NO: 703127 - protein, 13 aa, Homo sapiens
  CDR3 for alpha chain variable domain of TCR clone 351564 (TRAV12-2, TRAJ20)
CAVYPSNDYKLSF

SEQ ID NO: 703128 - protein, 13 aa, Homo sapiens
  CDR3 for beta chain variable domain of TCR clone 351564 (TRBV20-1, TRBJ1-1)
CSARVGGNTEAFF

SEQ ID NO: 703129 - protein, 12 aa, Homo sapiens
  CDR3 for alpha chain variable domain of TCR clone 351565 (TRAV23/DV6, TRAJ18)
CAASMNHRGSTL

SEQ ID NO: 703130 - protein, 16 aa, Homo sapiens
  CDR3 for beta chain variable domain of TCR clone 351565 (TRBV11-2, TRBJ2-7)
CASSPLAGGPRYEQYF

SEQ ID NO: 703131 - protein, 13 aa, Homo sapiens
  CDR3 for alpha chain variable domain of TCR clone 351566 (TRAV13-2, TRAJ13)
CAERPGGYQKVTF

SEQ ID NO: 703132 - protein, 14 aa, Homo sapiens
  CDR3 for beta chain variable domain of TCR clone 351566 (TRBV7-2, TRBJ1-1)
CASSFLTGTTEAFF

SEQ ID NO: 703133 - protein, 15 aa, Homo sapiens
  CDR3 for alpha chain variable domain of TCR clone 351567 (TRAV4, TRAJ39)
CLVGPNNNAGNMLAF

SEQ ID NO: 703134 - protein, 16 aa, Homo sapiens
  CDR3 for beta chain variable domain of TCR clone 351567 (TRBV13, TRBJ2-2)
CASSPRTGEHTGELFF

SEQ ID NO: 703135 - protein, 15 aa, Homo sapiens
  CDR3 for alpha chain variable domain of TCR clone 351568 (TRAV3, TRAJ20)
CAVRDIKLSDYKLSF

SEQ ID NO: 703136 - protein, 18 aa, Homo sapiens
  CDR3 for beta chain variable domain of TCR clone 351568 (TRBV20-1, TRBJ2-5)
CSQTWDSGRLGGKETQYF

SEQ ID NO: 703137 - protein, 14 aa, Homo sapiens
  CDR3 for alpha chain variable domain of TCR clone 351569 (TRAV8-3, TRAJ44)
CAVGTTGTASKLTF

SEQ ID NO: 703138 - protein, 15 aa, Homo sapiens
  CDR3 for beta chain variable domain of TCR clone 351569 (TRBV28, TRBJ2-7)
CASSFRGQGRYEQYF

SEQ ID NO: 703139 - protein, 14 aa, Homo sapiens
  CDR3 for alpha chain variable domain of TCR clone 351570 (TRAV38-2/DV8, TRAJ23)
CAYRSQNQGGKLIF

SEQ ID NO: 703140 - protein, 17 aa, Homo sapiens
  CDR3 for beta chain variable domain of TCR clone 351570 (TRBV11-2, TRBJ2-1)
CASSLHPPGVEYNERFF

SEQ ID NO: 703141 - protein, 13 aa, Homo sapiens
  CDR3 for alpha chain variable domain of TCR clone 351571 (TRAV16, TRAJ22)
SAMLAGSARQLTF

SEQ ID NO: 703142 - protein, 14 aa, Homo sapiens
  CDR3 for beta chain variable domain of TCR clone 351571 (TRBV20-1, TRBJ1-1)
CSAMGGTANTEAFF

SEQ ID NO: 703143 - protein, 16 aa, Homo sapiens
  CDR3 for alpha chain variable domain of TCR clone 351572 (TRAV30, TRAJ24)
CGTEMVDADSWGKFQF

SEQ ID NO: 703144 - protein, 14 aa, Homo sapiens
  CDR3 for beta chain variable domain of TCR clone 351572 (TRBV18, TRBJ2-3)
CASSPRTSTGTQYF

SEQ ID NO: 703145 - protein, 16 aa, Homo sapiens
  CDR3 for alpha chain variable domain of TCR clone 351573 (TRAV30, TRAJ24)
CGAEIVDADSWGKFQF

SEQ ID NO: 703146 - protein, 17 aa, Homo sapiens
  CDR3 for beta chain variable domain of TCR clone 351573 (TRBV28, TRBJ2-5)
CASSTPEGDALQETQYF

SEQ ID NO: 703147 - protein, 17 aa, Homo sapiens
  CDR3 for alpha chain variable domain of TCR clone 351574 (TRAV8-6, TRAJ58)
CAVSSCVGETSGSRLTF

SEQ ID NO: 703148 - protein, 14 aa, Homo sapiens
  CDR3 for beta chain variable domain of TCR clone 351574 (TRBV4-2, TRBJ2-1)
CASSLDRAYNEQFF

SEQ ID NO: 703149 - protein, 14 aa, Homo sapiens
  CDR3 for alpha chain variable domain of TCR clone 351575 (TRAV2, TRAJ37)
CAVDFTDNTGKLIF

SEQ ID NO: 703150 - protein, 14 aa, Homo sapiens
  CDR3 for beta chain variable domain of TCR clone 351575 (TRBV20-1, TRBJ1-1)
SASRGVTGYTEAFF

SEQ ID NO: 703151 - protein, 15 aa, Homo sapiens
  CDR3 for alpha chain variable domain of TCR clone 351576 (TRAV8-3, TRAJ15)
CAVGAANQAGTGLIF

SEQ ID NO: 703152 - protein, 14 aa, Homo sapiens
  CDR3 for beta chain variable domain of TCR clone 351576 (TRBV20-1, TRBJ2-1)
CSPNDEASYNEQFF

SEQ ID NO: 703153 - protein, 14 aa, Homo sapiens
  CDR3 for alpha chain variable domain of TCR clone 351577 (TRAV12-2, TRAJ40)
CAVKIPLGTYKYIF

SEQ ID NO: 703154 - protein, 17 aa, Homo sapiens
  CDR3 for beta chain variable domain of TCR clone 351577 (TRBV13, TRBJ2-3)
CASSLSRVAGGRNTQYF

SEQ ID NO: 703155 - protein, 14 aa, Homo sapiens
  CDR3 for alpha chain variable domain of TCR clone 351578 (TRAV17, TRAJ22)
CATAISGSARQLTF

SEQ ID NO: 703156 - protein, 13 aa, Homo sapiens
  CDR3 for beta chain variable domain of TCR clone 351578 (TRBV6-3, TRBJ1-2)
CASSLDRSSGYAF

SEQ ID NO: 703157 - protein, 12 aa, Homo sapiens
  CDR3 for alpha chain variable domain of TCR clone 351579 (TRAV12-2, TRAJ21)
FAVRYNFNKFYF

SEQ ID NO: 703158 - protein, 14 aa, Homo sapiens
  CDR3 for beta chain variable domain of TCR clone 351579 (TRBV28, TRBJ2-1)
CASSYYTAYNEQFF

SEQ ID NO: 703159 - protein, 14 aa, Homo sapiens
  CDR3 for alpha chain variable domain of TCR clone 351580 (TRAV12-3, TRAJ10)
SHLPLTGGGNKLTF

SEQ ID NO: 703160 - protein, 14 aa, Homo sapiens
  CDR3 for beta chain variable domain of TCR clone 351580 (TRBV6-1, TRBJ2-6)
CASQQGAGANVLTF

SEQ ID NO: 703161 - protein, 14 aa, Homo sapiens
  CDR3 for alpha chain variable domain of TCR clone 351581 (TRAV12-1, TRAJ4)
CGEQRSGGYNKLIF

SEQ ID NO: 703162 - protein, 15 aa, Homo sapiens
  CDR3 for beta chain variable domain of TCR clone 351581 (TRBV6-3, TRBJ2-7)
CACSSPGTVFYEQYF

SEQ ID NO: 703163 - protein, 15 aa, Homo sapiens
  CDR3 for alpha chain variable domain of TCR clone 351582 (TRAV13-1, TRAJ17)
CAASIERAAGNKLTF

SEQ ID NO: 703164 - protein, 14 aa, Homo sapiens
  CDR3 for beta chain variable domain of TCR clone 351582 (TRBV7-9, TRBJ2-1)
RASSPRDSLYEQFF

SEQ ID NO: 703165 - protein, 14 aa, Homo sapiens
  CDR3 for alpha chain variable domain of TCR clone 351583 (TRAV1-2, TRAJ8)
CAVREDTGFQKLVF

SEQ ID NO: 703166 - protein, 15 aa, Homo sapiens
  CDR3 for beta chain variable domain of TCR clone 351583 (TRBV20-1, TRBJ2-3)
CSASPPQVSTDTQYF

SEQ ID NO: 703167 - protein, 14 aa, Homo sapiens
  CDR3 for alpha chain variable domain of TCR clone 351584 (TRAV1-2, TRAJ8)
CAVREDTGFKKLVF

SEQ ID NO: 703168 - protein, 15 aa, Homo sapiens
  CDR3 for beta chain variable domain of TCR clone 351584 (TRBV7-9, TRBJ1-1)
CASSHRGTVNTEAFF

SEQ ID NO: 703169 - protein, 12 aa, Homo sapiens
  CDR3 for alpha chain variable domain of TCR clone 351585 (TRAV8-3, TRAJ26)
CVGDNYGQNFVF

SEQ ID NO: 703170 - protein, 17 aa, Homo sapiens
  CDR3 for beta chain variable domain of TCR clone 351585 (TRBV7-8, TRBJ2-6)
CASSAGTGGAGANVLTF

SEQ ID NO: 703171 - protein, 15 aa, Homo sapiens
  CDR3 for alpha chain variable domain of TCR clone 351586 (TRAV21, TRAJ32)
CAVNSYGGATNKLIF

SEQ ID NO: 703172 - protein, 18 aa, Homo sapiens
  CDR3 for beta chain variable domain of TCR clone 351586 (TRBV7-9, TRBJ2-1)
CASSTGLAEGASYNEQFF

SEQ ID NO: 703173 - protein, 11 aa, Homo sapiens
  CDR3 for alpha chain variable domain of TCR clone 351587 (TRAV2, TRAJ33)
CAVESNYQLIW

SEQ ID NO: 703174 - protein, 15 aa, Homo sapiens
  CDR3 for beta chain variable domain of TCR clone 351587 (TRBV5-1, TRBJ2-3)
CASSVTSGSTDTQYF

SEQ ID NO: 703175 - protein, 16 aa, Homo sapiens
  CDR3 for alpha chain variable domain of TCR clone 351588 (TRAV3, TRAJ37)
CAVRGKGSGNTGKLIF

SEQ ID NO: 703176 - protein, 13 aa, Homo sapiens
  CDR3 for beta chain variable domain of TCR clone 351588 (TRBV12-4, TRBJ2-7)
CASSPTEAYEQYF

SEQ ID NO: 703177 - protein, 11 aa, Homo sapiens
  CDR3 for alpha chain variable domain of TCR clone 351589 (TRAV12-1, TRAJ43)
CVEYDNNDMRF

SEQ ID NO: 703178 - protein, 17 aa, Homo sapiens
  CDR3 for beta chain variable domain of TCR clone 351589 (TRBV20-1, TRBJ2-1)
CSARDPLAGVCDNEQFF

SEQ ID NO: 703179 - protein, 15 aa, Homo sapiens
  CDR3 for alpha chain variable domain of TCR clone 351590 (TRAV3, TRAJ22)
WAVRDRGGSARQLTF

SEQ ID NO: 703180 - protein, 14 aa, Homo sapiens
  CDR3 for beta chain variable domain of TCR clone 351590 (TRBV19, TRBJ1-5)
CASSLGLIGQPQHF

SEQ ID NO: 703181 - protein, 16 aa, Homo sapiens
  CDR3 for alpha chain variable domain of TCR clone 351591 (TRAV4, TRAJ22)
CLVGALYSGFARQLTF

SEQ ID NO: 703182 - protein, 16 aa, Homo sapiens
  CDR3 for beta chain variable domain of TCR clone 351591 (TRBV7-9, TRBJ2-1)
CASSDVAGGSYNEQFF

SEQ ID NO: 703183 - protein, 15 aa, Homo sapiens
  CDR3 for alpha chain variable domain of TCR clone 351592 (TRAV3, TRAJ4)
CAVRDGTGGYNKLIF

SEQ ID NO: 703184 - protein, 16 aa, Homo sapiens
  CDR3 for beta chain variable domain of TCR clone 351592 (TRBV19, TRBJ1-1)
CASRVDVTGAAWGAFF

SEQ ID NO: 703185 - protein, 12 aa, Homo sapiens
  CDR3 for alpha chain variable domain of TCR clone 351593 (TRAV25, TRAJ11)
CAGASGYSTLTF

SEQ ID NO: 703186 - protein, 16 aa, Homo sapiens
  CDR3 for beta chain variable domain of TCR clone 351593 (TRBV12-5, TRBJ2-5)
CASGPRTSGNQETQYF

SEQ ID NO: 703187 - protein, 14 aa, Homo sapiens
  CDR3 for alpha chain variable domain of TCR clone 351594 (TRAV17, TRAJ22)
CATTPSGSARHLTF

SEQ ID NO: 703188 - protein, 15 aa, Homo sapiens
  CDR3 for beta chain variable domain of TCR clone 351594 (TRBV4-1, TRBJ2-5)
CASSQWDLYQETQYF

SEQ ID NO: 703189 - protein, 16 aa, Homo sapiens
  CDR3 for alpha chain variable domain of TCR clone 351595 (TRAV8-3, TRAJ44)
CAVGASNTGTASKLTC

SEQ ID NO: 703190 - protein, 15 aa, Homo sapiens
  CDR3 for beta chain variable domain of TCR clone 351595 (TRBV27, TRBJ1-5)
CASTFNRGSNQPQHF

SEQ ID NO: 703191 - protein, 14 aa, Homo sapiens
  CDR3 for alpha chain variable domain of TCR clone 351596 (TRAV2, TRAJ37)
CAVDFTSNTGILIF

SEQ ID NO: 703192 - protein, 17 aa, Homo sapiens
  CDR3 for beta chain variable domain of TCR clone 351596 (TRBV7-8, TRBJ2-6)
CASSAGTGGAGANVLTF

SEQ ID NO: 703193 - protein, 15 aa, Homo sapiens
  CDR3 for alpha chain variable domain of TCR clone 351597 (TRAV8-3, TRAJ45)
CASSYSGGGADGLNF

SEQ ID NO: 703194 - protein, 13 aa, Homo sapiens
  CDR3 for beta chain variable domain of TCR clone 351597 (TRBV19, TRBJ1-2)
CASSVPGQDGYTF

SEQ ID NO: 703195 - protein, 12 aa, Homo sapiens
  CDR3 for alpha chain variable domain of TCR clone 351598 (TRAV13-2, TRAJ23)
CAERHRGGKLIF

SEQ ID NO: 703196 - protein, 14 aa, Homo sapiens
  CDR3 for beta chain variable domain of TCR clone 351598 (TRBV11-2, TRBJ2-7)
CASSLGAGAYEQYF

SEQ ID NO: 703197 - protein, 11 aa, Homo sapiens
  CDR3 for alpha chain variable domain of TCR clone 351599 (TRAV12-1, TRAJ43)
CVEYDNNDMRF

SEQ ID NO: 703198 - protein, 14 aa, Homo sapiens
  CDR3 for beta chain variable domain of TCR clone 351599 (TRBV19, TRBJ2-7)
CASSMGQGAIEQYF

SEQ ID NO: 703199 - protein, 11 aa, Homo sapiens
  CDR3 for alpha chain variable domain of TCR clone 351600 (TRAV13-1, TRAJ15)
CAATPGTALIF

SEQ ID NO: 703200 - protein, 17 aa, Homo sapiens
  CDR3 for beta chain variable domain of TCR clone 351600 (TRBV13, TRBJ2-3)
CASSLSRVAGGRKTQYF

SEQ ID NO: 703201 - protein, 14 aa, Homo sapiens
  CDR3 for alpha chain variable domain of TCR clone 351601 (TRAV1-2, TRAJ8)
CAVREDTGFQKLVF

SEQ ID NO: 703202 - protein, 14 aa, Homo sapiens
  CDR3 for beta chain variable domain of TCR clone 351601 (TRBV7-2, TRBJ2-1)
CASSLVAGRNEQFF

SEQ ID NO: 703203 - protein, 14 aa, Homo sapiens
  CDR3 for alpha chain variable domain of TCR clone 351602 (TRAV14/DV4, TRAJ12)
CNEPPVDSSYKLIF

SEQ ID NO: 703204 - protein, 14 aa, Homo sapiens
  CDR3 for beta chain variable domain of TCR clone 351602 (TRBV19, TRBJ2-1)
CASSDNQGANEQFF

SEQ ID NO: 703205 - protein, 14 aa, Homo sapiens
  CDR3 for alpha chain variable domain of TCR clone 351603 (TRAV1-2, TRAJ16)
CAVNRFSDGQKLLF

SEQ ID NO: 703206 - protein, 16 aa, Homo sapiens
  CDR3 for beta chain variable domain of TCR clone 351603 (TRBV4-2, TRBJ2-5)
CASSQELVGSQETQYF

SEQ ID NO: 703207 - protein, 18 aa, Homo sapiens
  CDR3 for alpha chain variable domain of TCR clone 351604 (TRAV21, TRAJ52)
CAVRPSPAGGTSYGKLTF

SEQ ID NO: 703208 - protein, 14 aa, Homo sapiens
  CDR3 for beta chain variable domain of TCR clone 351604 (TRBV7-2, TRBJ1-1)
CASSFLAGTTEAFF

SEQ ID NO: 703209 - protein, 12 aa, Homo sapiens
  CDR3 for alpha chain variable domain of TCR clone 351605 (TRAV21, TRAJ34)
CAAPYNTDKLIF

SEQ ID NO: 703210 - protein, 14 aa, Homo sapiens
  CDR3 for beta chain variable domain of TCR clone 351605 (TRBV18, TRBJ2-5)
CASSPGVSQETQYF

SEQ ID NO: 703211 - protein, 17 aa, Homo sapiens
  CDR3 for alpha chain variable domain of TCR clone 351606 (TRAV3, TRAJ6)
CAVRDGPRAGGSYIPTF

SEQ ID NO: 703212 - protein, 15 aa, Homo sapiens
  CDR3 for beta chain variable domain of TCR clone 351606 (TRBV29-1, TRBJ2-5)
CSAEGLAVNQETQYF

SEQ ID NO: 703213 - protein, 13 aa, Homo sapiens
  CDR3 for alpha chain variable domain of TCR clone 351607 (TRAV13-2, TRAJ40)
CAEFTSGTYKYVF

SEQ ID NO: 703214 - protein, 14 aa, Homo sapiens
  CDR3 for beta chain variable domain of TCR clone 351607 (TRBV10-2, TRBJ1-5)
CAGSSTGRNQPQHF

SEQ ID NO: 703215 - protein, 15 aa, Homo sapiens
  CDR3 for alpha chain variable domain of TCR clone 351608 (TRAV8-3, TRAJ27)
CAGGPSKTNAGKSTF

SEQ ID NO: 703216 - protein, 14 aa, Homo sapiens
  CDR3 for beta chain variable domain of TCR clone 351608 (TRBV11-2, TRBJ2-3)
CASSRLARTDTQYF

SEQ ID NO: 703217 - protein, 12 aa, Homo sapiens
  CDR3 for alpha chain variable domain of TCR clone 351609 (TRAV12-1, TRAJ31)
CVSWNNNARLMF

SEQ ID NO: 703218 - protein, 15 aa, Homo sapiens
  CDR3 for beta chain variable domain of TCR clone 351609 (TRBV19, TRBJ2-1)
CASSSPGVPLDEQFF

SEQ ID NO: 703219 - protein, 11 aa, Homo sapiens
  CDR3 for alpha chain variable domain of TCR clone 351610 (TRAV8-3, TRAJ49)
CAVGGGNQFYS

SEQ ID NO: 703220 - protein, 15 aa, Homo sapiens
  CDR3 for beta chain variable domain of TCR clone 351610 (TRBV9, TRBJ1-6)
CASSVAGTGDSPLHF

SEQ ID NO: 703221 - protein, 19 aa, Homo sapiens
  CDR3 for alpha chain variable domain of TCR clone 351611 (TRAV3, TRAJ6)
CAVREMNPSRSGGSYIPTF

SEQ ID NO: 703222 - protein, 15 aa, Homo sapiens
  CDR3 for beta chain variable domain of TCR clone 351611 (TRBV18, TRBJ2-7)
CASSPTFMDSYEQYF

SEQ ID NO: 703223 - protein, 15 aa, Homo sapiens
  CDR3 for alpha chain variable domain of TCR clone 351612 (TRAV40, TRAJ45)
CLLVDLGGGADGLPF

SEQ ID NO: 703224 - protein, 17 aa, Homo sapiens
  CDR3 for beta chain variable domain of TCR clone 351612 (TRBV18, TRBJ1-5)
CASSPTMGQGTNQPQHF

SEQ ID NO: 703225 - protein, 15 aa, Homo sapiens
  CDR3 for alpha chain variable domain of TCR clone 351613 (TRAV8-6, TRAJ9)
CAVSDRDTGGFKTIF

SEQ ID NO: 703226 - protein, 16 aa, Homo sapiens
  CDR3 for beta chain variable domain of TCR clone 351613 (TRBV19, TRBJ2-3)
CASSSEWDRGTDTQYF

SEQ ID NO: 703227 - protein, 14 aa, Homo sapiens
  CDR3 for alpha chain variable domain of TCR clone 351614 (TRAV20, TRAJ10)
CAVRFEGGGNKLTF

SEQ ID NO: 703228 - protein, 18 aa, Homo sapiens
  CDR3 for beta chain variable domain of TCR clone 351614 (TRBV24-1, TRBJ2-1)
CATSDLMFLGRGVHEQFC

SEQ ID NO: 703229 - protein, 13 aa, Homo sapiens
  CDR3 for alpha chain variable domain of TCR clone 351615 (TRAV13-1, TRAJ33)
CAASRAGNYQLIW

SEQ ID NO: 703230 - protein, 12 aa, Homo sapiens
  CDR3 for beta chain variable domain of TCR clone 351615 (TRBV11-2, TRBJ1-2)
CASSREGDGYTV

SEQ ID NO: 703231 - protein, 14 aa, Homo sapiens
  CDR3 for alpha chain variable domain of TCR clone 351616 (TRAV12-3, TRAJ10)
SHLPLTGGGNKLTF

SEQ ID NO: 703232 - protein, 13 aa, Homo sapiens
  CDR3 for beta chain variable domain of TCR clone 351616 (TRBV9, TRBJ2-1)
CASSPSGGNEKFF

SEQ ID NO: 703233 - protein, 14 aa, Homo sapiens
  CDR3 for alpha chain variable domain of TCR clone 351617 (TRAV17, TRAJ40)
CATALTSGTYKYIF

SEQ ID NO: 703234 - protein, 15 aa, Homo sapiens
  CDR3 for beta chain variable domain of TCR clone 351617 (TRBV28, TRBJ2-5)
CASSPPWSYQETQYF

SEQ ID NO: 703235 - protein, 12 aa, Homo sapiens
  CDR3 for alpha chain variable domain of TCR clone 351618 (TRAV16, TRAJ9)
CALRAGGFNTIF

SEQ ID NO: 703236 - protein, 13 aa, Homo sapiens
  CDR3 for beta chain variable domain of TCR clone 351618 (TRBV4-3, TRBJ1-1)
CASSQVEGSMAFF

SEQ ID NO: 703237 - protein, 12 aa, Homo sapiens
  CDR3 for alpha chain variable domain of TCR clone 351619 (TRAV13-1, TRAJ48)
CAANFGNEKLTF

SEQ ID NO: 703238 - protein, 17 aa, Homo sapiens
  CDR3 for beta chain variable domain of TCR clone 351619 (TRBV28, TRBJ2-5)
CASSTPEGDALQETQYS

SEQ ID NO: 703239 - protein, 15 aa, Homo sapiens
  CDR3 for alpha chain variable domain of TCR clone 351620 (TRAV26-1, TRAJ29)
FIVRVEGSGNTPLVF

SEQ ID NO: 703240 - protein, 15 aa, Homo sapiens
  CDR3 for beta chain variable domain of TCR clone 351620 (TRBV7-9, TRBJ1-5)
CASSQGHLPNQPQHF

SEQ ID NO: 703241 - protein, 12 aa, Homo sapiens
  CDR3 for alpha chain variable domain of TCR clone 351621 (TRAV16, TRAJ21)
CALLGNFNKFYF

SEQ ID NO: 703242 - protein, 15 aa, Homo sapiens
  CDR3 for beta chain variable domain of TCR clone 351621 (TRBV3-1, TRBJ2-2)
CASSQAARETGELFF

SEQ ID NO: 703243 - protein, 14 aa, Homo sapiens
  CDR3 for alpha chain variable domain of TCR clone 351622 (TRAV3, TRAJ9)
CAVRLNTGGFKTIF

SEQ ID NO: 703244 - protein, 15 aa, Homo sapiens
  CDR3 for beta chain variable domain of TCR clone 351622 (TRBV7-2, TRBJ2-1)
CTSSLASGRVNEQSF

SEQ ID NO: 703245 - protein, 14 aa, Homo sapiens
  CDR3 for alpha chain variable domain of TCR clone 351623 (TRAV8-3, TRAJ35)
CAVVPQGFGNVLHC

SEQ ID NO: 703246 - protein, 15 aa, Homo sapiens
  CDR3 for beta chain variable domain of TCR clone 351623 (TRBV6-1, TRBJ2-2)
CASSAGQGYTRELFF

SEQ ID NO: 703247 - protein, 15 aa, Homo sapiens
  CDR3 for alpha chain variable domain of TCR clone 351624 (TRAV17, TRAJ4)
CATGTWSGGYNKLIF

SEQ ID NO: 703248 - protein, 15 aa, Homo sapiens
  CDR3 for beta chain variable domain of TCR clone 351624 (TRBV7-9, TRBJ1-2)
CASSLDREPNYGYTF

SEQ ID NO: 703249 - protein, 14 aa, Homo sapiens
  CDR3 for alpha chain variable domain of TCR clone 351625 (TRAV12-2, TRAJ17)
CAVLFNAAGNKLTF

SEQ ID NO: 703250 - protein, 12 aa, Homo sapiens
  CDR3 for beta chain variable domain of TCR clone 351625 (TRBV11-2, TRBJ2-2)
CASSLGGGELFF

SEQ ID NO: 703251 - protein, 13 aa, Homo sapiens
  CDR3 for alpha chain variable domain of TCR clone 351626 (TRAV20, TRAJ37)
CAGCSSNTGKLIF

SEQ ID NO: 703252 - protein, 19 aa, Homo sapiens
  CDR3 for beta chain variable domain of TCR clone 351626 (TRBV4-1, TRBJ2-7)
CASSRDPLGVRGGSSTSGR

SEQ ID NO: 703253 - protein, 17 aa, Homo sapiens
  CDR3 for alpha chain variable domain of TCR clone 351627 (TRAV13-2, TRAJ5)
CAESVVIVGHWQESTYF

SEQ ID NO: 703254 - protein, 18 aa, Homo sapiens
  CDR3 for beta chain variable domain of TCR clone 351627 (TRBV4-1, TRBJ2-3)
CASSHQLAGGRSTDTQYF

SEQ ID NO: 703255 - protein, 15 aa, Homo sapiens
  CDR3 for alpha chain variable domain of TCR clone 351628 (TRAV3, TRAJ29)
CAVRDINSGTTPLVF

SEQ ID NO: 703256 - protein, 16 aa, Homo sapiens
  CDR3 for beta chain variable domain of TCR clone 351628 (TRBV4-1, TRBJ2-5)
CASSQTFYGDQETQYF

SEQ ID NO: 703257 - protein, 12 aa, Homo sapiens
  CDR3 for alpha chain variable domain of TCR clone 351629 (TRAV3, TRAJ29)
CCERHIDTPLVF

SEQ ID NO: 703258 - protein, 14 aa, Homo sapiens
  CDR3 for beta chain variable domain of TCR clone 351629 (TRBV27, TRBJ2-1)
CASSATGGYNEQFF

SEQ ID NO: 703259 - protein, 16 aa, Homo sapiens
  CDR3 for alpha chain variable domain of TCR clone 351630 (TRAV12-1, TRAJ8)
CVVNGRGNTGFQKLVF

SEQ ID NO: 703260 - protein, 15 aa, Homo sapiens
  CDR3 for beta chain variable domain of TCR clone 351630 (TRBV6-1, TRBJ1-2)
CASNPGRGGPYGYSF

SEQ ID NO: 703261 - protein, 17 aa, Homo sapiens
  CDR3 for alpha chain variable domain of TCR clone 351631 (TRAV26-1, TRAJ53)
CIFRVDDSGGSNYKLTF

SEQ ID NO: 703262 - protein, 15 aa, Homo sapiens
  CDR3 for beta chain variable domain of TCR clone 351631 (TRBV20-1, TRBJ2-7)
CSARVPAAYFYEQYF

SEQ ID NO: 703263 - protein, 13 aa, Homo sapiens
  CDR3 for alpha chain variable domain of TCR clone 351632 (TRAV13-1, TRAJ13)
CAASKGGYQKVTF

SEQ ID NO: 703264 - protein, 16 aa, Homo sapiens
  CDR3 for beta chain variable domain of TCR clone 351632 (TRBV18, TRBJ1-2)
CASSPPERVTIYGYTS

SEQ ID NO: 703265 - protein, 12 aa, Homo sapiens
  CDR3 for alpha chain variable domain of TCR clone 351633 (TRAV21, TRAJ39)
LPYNNAGNMLTF

SEQ ID NO: 703266 - protein, 12 aa, Homo sapiens
  CDR3 for beta chain variable domain of TCR clone 351633 (TRBV19, TRBJ2-7)
CASTDRGYEQYF

SEQ ID NO: 703267 - protein, 16 aa, Homo sapiens
  CDR3 for alpha chain variable domain of TCR clone 351634 (TRAV26-1, TRAJ23)
CIVRVERYNQGEKLIF

SEQ ID NO: 703268 - protein, 15 aa, Homo sapiens
  CDR3 for beta chain variable domain of TCR clone 351634 (TRBV18, TRBJ2-7)
CASSPRGGKGYEQYF

SEQ ID NO: 703269 - protein, 11 aa, Homo sapiens
  CDR3 for alpha chain variable domain of TCR clone 351635 (TRAV17, TRAJ21)
CATGNFNKFYF

SEQ ID NO: 703270 - protein, 15 aa, Homo sapiens
  CDR3 for beta chain variable domain of TCR clone 351635 (TRBV7-9, TRBJ1-5)
CASSQGHQPNQPQHF

SEQ ID NO: 703271 - protein, 10 aa, Homo sapiens
  CDR3 for alpha chain variable domain of TCR clone 351636 (TRAV2, TRAJ15)
RGQAGTALVF

SEQ ID NO: 703272 - protein, 13 aa, Homo sapiens
  CDR3 for beta chain variable domain of TCR clone 351636 (TRBV27, TRBJ2-1)
CASRTLGVGEQFF

SEQ ID NO: 703273 - protein, 16 aa, Homo sapiens
  CDR3 for alpha chain variable domain of TCR clone 351637 (TRAV4, TRAJ22)
CLVGDLYSGSARQLTF

SEQ ID NO: 703274 - protein, 16 aa, Homo sapiens
  CDR3 for beta chain variable domain of TCR clone 351637 (TRBV28, TRBJ2-6)
CASSNRRGSGANVLTF

SEQ ID NO: 703275 - protein, 13 aa, Homo sapiens
  CDR3 for alpha chain variable domain of TCR clone 351638 (TRAV12-2, TRAJ6)
CAVNVPRKLHTYI

SEQ ID NO: 703276 - protein, 12 aa, Homo sapiens
  CDR3 for beta chain variable domain of TCR clone 351638 (TRBV29-1, TRBJ2-3)
CSVTGGADSQYF

SEQ ID NO: 703277 - protein, 22 aa, Homo sapiens
  CDR3 for alpha chain variable domain of TCR clone 351639 (TRAV8-6, TRAJ6)
CAVTLGEEATYLHLEEEPALFF

SEQ ID NO: 703278 - protein, 15 aa, Homo sapiens
  CDR3 for beta chain variable domain of TCR clone 351639 (TRBV7-2, TRBJ1-1)
CASSPQGGANTEAFF

SEQ ID NO: 703279 - protein, 12 aa, Homo sapiens
  CDR3 for alpha chain variable domain of TCR clone 351640 (TRAV16, TRAJ10)
CSRTGGGNKLTF

SEQ ID NO: 703280 - protein, 15 aa, Homo sapiens
  CDR3 for beta chain variable domain of TCR clone 351640 (TRBV7-2, TRBJ2-7)
CASSLSGALTYEQYF

SEQ ID NO: 703281 - protein, 17 aa, Homo sapiens
  CDR3 for alpha chain variable domain of TCR clone 351641 (TRAV35, TRAJ38)
CAGQLQRNAGNNRKLIW

SEQ ID NO: 703282 - protein, 12 aa, Homo sapiens
  CDR3 for beta chain variable domain of TCR clone 351641 (TRBV28, TRBJ2-3)
CASSLYRDTQYF

SEQ ID NO: 703283 - protein, 11 aa, Homo sapiens
  CDR3 for alpha chain variable domain of TCR clone 351642 (TRAV1-1, TRAJ23)
CAVRQGGKLIF

SEQ ID NO: 703284 - protein, 20 aa, Homo sapiens
  CDR3 for beta chain variable domain of TCR clone 351642 (TRBV7-8, TRBJ2-2)
CASSHLFPGATSHITGELFF

SEQ ID NO: 703285 - protein, 16 aa, Homo sapiens
  CDR3 for alpha chain variable domain of TCR clone 351643 (TRAV12-3, TRAJ53)
CAMSPGSGGSDYKLTF

SEQ ID NO: 703286 - protein, 11 aa, Homo sapiens
  CDR3 for beta chain variable domain of TCR clone 351643 (TRBV29-1, TRBJ2-5)
CSEGRTGTQYF

SEQ ID NO: 703287 - protein, 16 aa, Homo sapiens
  CDR3 for alpha chain variable domain of TCR clone 351644 (TRAV12-3, TRAJ53)
CAMSPGSGSSNYKLTF

SEQ ID NO: 703288 - protein, 17 aa, Homo sapiens
  CDR3 for beta chain variable domain of TCR clone 351644 (TRBV28, TRBJ2-5)
CAGSTPEGDALQETQYF

SEQ ID NO: 703289 - protein, 13 aa, Homo sapiens
  CDR3 for alpha chain variable domain of TCR clone 351645 (TRAV21, TRAJ57)
CAVTQGGSEKLVF

SEQ ID NO: 703290 - protein, 16 aa, Homo sapiens
  CDR3 for beta chain variable domain of TCR clone 351645 (TRBV29-1, TRBJ2-7)
CSVEDAVDGTAYEQYF

SEQ ID NO: 703291 - protein, 12 aa, Homo sapiens
  CDR3 for alpha chain variable domain of TCR clone 351646 (TRAV9-2, TRAJ26)
CALRGYGQNFVL

SEQ ID NO: 703292 - protein, 16 aa, Homo sapiens
  CDR3 for beta chain variable domain of TCR clone 351646 (TRBV7-8, TRBJ2-6)
CASRVGDSSGANVLTF

SEQ ID NO: 703293 - protein, 14 aa, Homo sapiens
  CDR3 for alpha chain variable domain of TCR clone 351647 (TRAV17, TRAJ42)
CATSPPGSQGNLIF

SEQ ID NO: 703294 - protein, 15 aa, Homo sapiens
  CDR3 for beta chain variable domain of TCR clone 351647 (TRBV18, TRBJ2-6)
CASSPSYAGANVLTF

SEQ ID NO: 703295 - protein, 14 aa, Homo sapiens
  CDR3 for alpha chain variable domain of TCR clone 351648 (TRAV26-1, TRAJ38)
CIADNAGNNRKLIW

SEQ ID NO: 703296 - protein, 15 aa, Homo sapiens
  CDR3 for beta chain variable domain of TCR clone 351648 (TRBV4-1, TRBJ1-1)
CASSQEWVHYTEAFF

SEQ ID NO: 703297 - protein, 13 aa, Homo sapiens
  CDR3 for alpha chain variable domain of TCR clone 351649 (TRAV2, TRAJ40)
CAVVTSGTYKYIF

SEQ ID NO: 703298 - protein, 14 aa, Homo sapiens
  CDR3 for beta chain variable domain of TCR clone 351649 (TRBV19, TRBJ2-1)
CASPTFVLSCEQSF

SEQ ID NO: 703299 - protein, 11 aa, Homo sapiens
  CDR3 for alpha chain variable domain of TCR clone 351650 (TRAV3, TRAJ21)
CAVGNFNKLYF

SEQ ID NO: 703300 - protein, 17 aa, Homo sapiens
  CDR3 for beta chain variable domain of TCR clone 351650 (TRBV24-1, TRBJ2-1)
CAASGVPTSGTYNEQFF

SEQ ID NO: 703301 - protein, 14 aa, Homo sapiens
  CDR3 for alpha chain variable domain of TCR clone 351651 (TRAV12-3, TRAJ58)
CAMSTETSGSRLTF

SEQ ID NO: 703302 - protein, 12 aa, Homo sapiens
  CDR3 for beta chain variable domain of TCR clone 351651 (TRBV7-8, TRBJ2-7)
RASSLGDREQYF

SEQ ID NO: 703303 - protein, 14 aa, Homo sapiens
  CDR3 for alpha chain variable domain of TCR clone 351652 (TRAV12-1, TRAJ12)
CVVTSGDSSYKLIF

SEQ ID NO: 703304 - protein, 13 aa, Homo sapiens
  CDR3 for beta chain variable domain of TCR clone 351652 (TRBV7-3, TRBJ1-1)
CASSQDWGAEAFF

SEQ ID NO: 703305 - protein, 15 aa, Homo sapiens
  CDR3 for alpha chain variable domain of TCR clone 351653 (TRAV8-4, TRAJ11)
CAVSRALSGYSTLTF

SEQ ID NO: 703306 - protein, 13 aa, Homo sapiens
  CDR3 for beta chain variable domain of TCR clone 351653 (TRBV10-3, TRBJ2-7)
CASKLAVNYEQYV

SEQ ID NO: 703307 - protein, 11 aa, Homo sapiens
  CDR3 for alpha chain variable domain of TCR clone 351654 (TRAV12-1, TRAJ43)
CVVIRNNEMRF

SEQ ID NO: 703308 - protein, 16 aa, Homo sapiens
  CDR3 for beta chain variable domain of TCR clone 351654 (TRBV14, TRBJ2-1)
CASSPRLAGEGNEQFF

SEQ ID NO: 703309 - protein, 14 aa, Homo sapiens
  CDR3 for alpha chain variable domain of TCR clone 351655 (TRAV12-2, TRAJ13)
GAVQKTGGYQKVTF

SEQ ID NO: 703310 - protein, 15 aa, Homo sapiens
  CDR3 for beta chain variable domain of TCR clone 351655 (TRBV27, TRBJ2-1)
CASSNGGGSSNEQFF

SEQ ID NO: 703311 - protein, 14 aa, Homo sapiens
  CDR3 for alpha chain variable domain of TCR clone 351656 (TRAV1-2, TRAJ16)
CAVNRFSDGQKLLF

SEQ ID NO: 703312 - protein, 14 aa, Homo sapiens
  CDR3 for beta chain variable domain of TCR clone 351656 (TRBV13, TRBJ2-5)
CASSLGRGQETQYC

SEQ ID NO: 703313 - protein, 11 aa, Homo sapiens
  CDR3 for alpha chain variable domain of TCR clone 351657 (TRAV2, TRAJ33)
CAVESNYQLIW

SEQ ID NO: 703314 - protein, 15 aa, Homo sapiens
  CDR3 for beta chain variable domain of TCR clone 351657 (TRBV24-1, TRBJ2-4)
CATSDWTGGDLRQYF

SEQ ID NO: 703315 - protein, 17 aa, Homo sapiens
  CDR3 for alpha chain variable domain of TCR clone 351658 (TRAV13-1, TRAJ28)
CAASPTYSGAGSYQLTF

SEQ ID NO: 703316 - protein, 12 aa, Homo sapiens
  CDR3 for beta chain variable domain of TCR clone 351658 (TRBV11-2, TRBJ2-2)
CASSLPTGELFF

SEQ ID NO: 703317 - protein, 14 aa, Homo sapiens
  CDR3 for alpha chain variable domain of TCR clone 351659 (TRAV6, TRAJ37)
CALGSQGNTGKLIF

SEQ ID NO: 703318 - protein, 15 aa, Homo sapiens
  CDR3 for beta chain variable domain of TCR clone 351659 (TRBV2, TRBJ2-1)
CASSEERDGDNEQFF

SEQ ID NO: 703319 - protein, 11 aa, Homo sapiens
  CDR3 for alpha chain variable domain of TCR clone 351660 (TRAV16, TRAJ49)
CALRSGNQFYF

SEQ ID NO: 703320 - protein, 18 aa, Homo sapiens
  CDR3 for beta chain variable domain of TCR clone 351660 (TRBV28, TRBJ2-7)
CTSVPAVGTSGGRYEQYF

SEQ ID NO: 703321 - protein, 11 aa, Homo sapiens
  CDR3 for alpha chain variable domain of TCR clone 351661 (TRAV14/DV4, )
CAMREISRTLT

SEQ ID NO: 703322 - protein, 14 aa, Homo sapiens
  CDR3 for beta chain variable domain of TCR clone 351661 (TRBV2, TRBJ2-1)
CGSSDRAYYNEQFF

SEQ ID NO: 703323 - protein, 11 aa, Homo sapiens
  CDR3 for alpha chain variable domain of TCR clone 351662 (TRAV27, TRAJ20)
CAGADDYKLSF

SEQ ID NO: 703324 - protein, 14 aa, Homo sapiens
  CDR3 for beta chain variable domain of TCR clone 351662 (TRBV5-7, TRBJ1-5)
CASSRTGGGQPQHF

SEQ ID NO: 703325 - protein, 15 aa, Homo sapiens
  CDR3 for alpha chain variable domain of TCR clone 351663 (TRAV26-1, TRAJ23)
CIVRVAGYQGGKLIF

SEQ ID NO: 703326 - protein, 18 aa, Homo sapiens
  CDR3 for beta chain variable domain of TCR clone 351663 (TRBV28, TRBJ2-1)
CASSSTSGRANSYNEQFY

SEQ ID NO: 703327 - protein, 12 aa, Homo sapiens
  CDR3 for alpha chain variable domain of TCR clone 351664 (TRAV2, TRAJ8)
CAVGQGFQKLVF

SEQ ID NO: 703328 - protein, 12 aa, Homo sapiens
  CDR3 for beta chain variable domain of TCR clone 351664 (TRBV2, TRBJ2-1)
CAYGPPGNEQFF

SEQ ID NO: 703329 - protein, 13 aa, Homo sapiens
  CDR3 for alpha chain variable domain of TCR clone 351665 (TRAV17, TRAJ15)
CATDARGGTALIF

SEQ ID NO: 703330 - protein, 15 aa, Homo sapiens
  CDR3 for beta chain variable domain of TCR clone 351665 (TRBV20-1, TRBJ2-7)
CSARDRVSGMDEQYF

SEQ ID NO: 703331 - protein, 15 aa, Homo sapiens
  CDR3 for alpha chain variable domain of TCR clone 351666 (TRAV12-2, TRAJ53)
CAVNGGGGSNYKLTF

SEQ ID NO: 703332 - protein, 13 aa, Homo sapiens
  CDR3 for beta chain variable domain of TCR clone 351666 (TRBV18, TRBJ2-3)
CASSKTGTDTQYF

SEQ ID NO: 703333 - protein, 12 aa, Homo sapiens
  CDR3 for alpha chain variable domain of TCR clone 351667 (TRAV35, TRAJ30)
CAGLHRDDKIIF

SEQ ID NO: 703334 - protein, 15 aa, Homo sapiens
  CDR3 for beta chain variable domain of TCR clone 351667 (TRBV18, TRBJ2-3)
CASSPLAGETDTQYF

SEQ ID NO: 703335 - protein, 14 aa, Homo sapiens
  CDR3 for alpha chain variable domain of TCR clone 351668 (TRAV13-2, TRAJ17)
CAENFKAAGNKLTF

SEQ ID NO: 703336 - protein, 16 aa, Homo sapiens
  CDR3 for beta chain variable domain of TCR clone 351668 (TRBV5-1, TRBJ2-2)
CASSSRTGGRTGELFL

SEQ ID NO: 703337 - protein, 13 aa, Homo sapiens
  CDR3 for alpha chain variable domain of TCR clone 351669 (TRAV13-1, TRAJ11)
CAASIRGYSTLTF

SEQ ID NO: 703338 - protein, 13 aa, Homo sapiens
  CDR3 for beta chain variable domain of TCR clone 351669 (TRBV7-2, TRBJ2-7)
CASSSPSGSEQYF

SEQ ID NO: 703339 - protein, 18 aa, Homo sapiens
  CDR3 for alpha chain variable domain of TCR clone 351670 (TRAV13-1, TRAJ28)
CAASPVPILWGWELPTHF

SEQ ID NO: 703340 - protein, 13 aa, Homo sapiens
  CDR3 for beta chain variable domain of TCR clone 351670 (TRBV15, TRBJ2-7)
CATRTTGHYEQYF

SEQ ID NO: 703341 - protein, 11 aa, Homo sapiens
  CDR3 for alpha chain variable domain of TCR clone 351671 (TRAV13-2, TRAJ23)
CAESPRGKLIF

SEQ ID NO: 703342 - protein, 15 aa, Homo sapiens
  CDR3 for beta chain variable domain of TCR clone 351671 (TRBV10-3, TRBJ2-3)
CAISLTSGGTDTQYF

SEQ ID NO: 703343 - protein, 14 aa, Homo sapiens
  CDR3 for alpha chain variable domain of TCR clone 351672 (TRAV12-3, TRAJ10)
SHLHLTGGGNKLTF

SEQ ID NO: 703344 - protein, 19 aa, Homo sapiens
  CDR3 for beta chain variable domain of TCR clone 351672 (TRBV19, TRBJ2-5)
CASSIGQVTDFFLGETQYF

SEQ ID NO: 703345 - protein, 14 aa, Homo sapiens
  CDR3 for alpha chain variable domain of TCR clone 351673 (TRAV17, TRAJ42)
YATAGGGSQGNLIF

SEQ ID NO: 703346 - protein, 14 aa, Homo sapiens
  CDR3 for beta chain variable domain of TCR clone 351673 (TRBV7-2, TRBJ2-3)
CASRFSRPSDTQYF

SEQ ID NO: 703347 - protein, 14 aa, Homo sapiens
  CDR3 for alpha chain variable domain of TCR clone 351674 (TRAV1-2, TRAJ8)
CAVREDTVFQKLVF

SEQ ID NO: 703348 - protein, 16 aa, Homo sapiens
  CDR3 for beta chain variable domain of TCR clone 351674 (TRBV19, TRBJ2-1)
CASSKAGPSSYNEQFF

SEQ ID NO: 703349 - protein, 14 aa, Homo sapiens
  CDR3 for alpha chain variable domain of TCR clone 351675 (TRAV8-3, TRAJ4)
CAVGAAGCYNKLIF

SEQ ID NO: 703350 - protein, 15 aa, Homo sapiens
  CDR3 for beta chain variable domain of TCR clone 351675 (TRBV5-1, TRBJ2-1)
CASSPPRAPYNEQFF

SEQ ID NO: 703351 - protein, 14 aa, Homo sapiens
  CDR3 for alpha chain variable domain of TCR clone 351676 (TRAV16, TRAJ17)
CALSEGAAGNKLTF

SEQ ID NO: 703352 - protein, 18 aa, Homo sapiens
  CDR3 for beta chain variable domain of TCR clone 351676 (TRBV5-1, TRBJ1-6)
CASSPGQTRIPYNSPLHF

SEQ ID NO: 703353 - protein, 17 aa, Homo sapiens
  CDR3 for alpha chain variable domain of TCR clone 351677 (TRAV3, TRAJ42)
CAVRDRDYGGSQGNLIF

SEQ ID NO: 703354 - protein, 17 aa, Homo sapiens
  CDR3 for beta chain variable domain of TCR clone 351677 (TRBV6-6, TRBJ2-7)
CASSYSYGGPTSSTSGR

SEQ ID NO: 703355 - protein, 14 aa, Homo sapiens
  CDR3 for alpha chain variable domain of TCR clone 351678 (TRAV21, TRAJ8)
CAPRAGTGFQKLVF

SEQ ID NO: 703356 - protein, 16 aa, Homo sapiens
  CDR3 for beta chain variable domain of TCR clone 351678 (TRBV12-5, TRBJ2-5)
CASGPRTSGNQETQYF

SEQ ID NO: 703357 - protein, 13 aa, Homo sapiens
  CDR3 for alpha chain variable domain of TCR clone 351679 (TRAV8-3, TRAJ43)
CAVGPDNNNDMRF

SEQ ID NO: 703358 - protein, 14 aa, Homo sapiens
  CDR3 for beta chain variable domain of TCR clone 351679 (TRBV7-9, TRBJ1-2)
CASSPNSRGYGYTF

SEQ ID NO: 703359 - protein, 13 aa, Homo sapiens
  CDR3 for alpha chain variable domain of TCR clone 351680 (TRAV8-3, TRAJ44)
CAVVPGTASKLTF

SEQ ID NO: 703360 - protein, 12 aa, Homo sapiens
  CDR3 for beta chain variable domain of TCR clone 351680 (TRBV18, TRBJ1-4)
CASSPSREKLFF

SEQ ID NO: 703361 - protein, 12 aa, Homo sapiens
  CDR3 for alpha chain variable domain of TCR clone 351681 (TRAV8-4, TRAJ48)
CAVSFGNEKLTF

SEQ ID NO: 703362 - protein, 16 aa, Homo sapiens
  CDR3 for beta chain variable domain of TCR clone 351681 (TRBV7-9, TRBJ2-4)
CASSSLVQGSKNIQYF

SEQ ID NO: 703363 - protein, 15 aa, Homo sapiens
  CDR3 for alpha chain variable domain of TCR clone 351682 (TRAV8-3, TRAJ11)
CAVGLLTSGYSTLTF

SEQ ID NO: 703364 - protein, 14 aa, Homo sapiens
  CDR3 for beta chain variable domain of TCR clone 351682 (TRBV4-1, TRBJ2-5)
CASSRSRSGETHYF

SEQ ID NO: 703365 - protein, 14 aa, Homo sapiens
  CDR3 for alpha chain variable domain of TCR clone 351683 (TRAV35, TRAJ42)
CAGPHGGSQGNLIF

SEQ ID NO: 703366 - protein, 14 aa, Homo sapiens
  CDR3 for beta chain variable domain of TCR clone 351683 (TRBV7-2, TRBJ2-7)
CASRSQGAAYEQYF

SEQ ID NO: 703367 - protein, 16 aa, Homo sapiens
  CDR3 for alpha chain variable domain of TCR clone 351684 (TRAV4, TRAJ22)
CLVGDLYSGSARQLTF

SEQ ID NO: 703368 - protein, 16 aa, Homo sapiens
  CDR3 for beta chain variable domain of TCR clone 351684 (TRBV7-9, TRBJ2-1)
CASSDVAGGSYNEQFI

SEQ ID NO: 703369 - protein, 13 aa, Homo sapiens
  CDR3 for alpha chain variable domain of TCR clone 351685 (TRAV1-2, TRAJ11)
CAVRSSGYSTLTF

SEQ ID NO: 703370 - protein, 14 aa, Homo sapiens
  CDR3 for beta chain variable domain of TCR clone 351685 (TRBV4-2, TRBJ2-3)
CASSQGGFTDTQYF

SEQ ID NO: 703371 - protein, 13 aa, Homo sapiens
  CDR3 for alpha chain variable domain of TCR clone 351686 (TRAV13-1, TRAJ40)
CAARTSGTYKYIF

SEQ ID NO: 703372 - protein, 17 aa, Homo sapiens
  CDR3 for beta chain variable domain of TCR clone 351686 (TRBV4-1, TRBJ2-3)
CASSPGYVSGGTDTQYF

SEQ ID NO: 703373 - protein, 14 aa, Homo sapiens
  CDR3 for alpha chain variable domain of TCR clone 351687 (TRAV1-2, TRAJ16)
CAVNRFSDGQKLLF

SEQ ID NO: 703374 - protein, 14 aa, Homo sapiens
  CDR3 for beta chain variable domain of TCR clone 351687 (TRBV4-1, TRBJ2-7)
CASSPVAGGNEQYF

SEQ ID NO: 703375 - protein, 15 aa, Homo sapiens
  CDR3 for alpha chain variable domain of TCR clone 351688 (TRAV20, TRAJ50)
CAVRQMKTSYDKVIF

SEQ ID NO: 703376 - protein, 13 aa, Homo sapiens
  CDR3 for beta chain variable domain of TCR clone 351688 (TRBV7-3, TRBJ1-1)
CASSQDWGAEAFF

SEQ ID NO: 703377 - protein, 16 aa, Homo sapiens
  CDR3 for alpha chain variable domain of TCR clone 351689 (TRAV21, TRAJ37)
CAVRPRGSSNTGRLIF

SEQ ID NO: 703378 - protein, 13 aa, Homo sapiens
  CDR3 for beta chain variable domain of TCR clone 351689 (TRBV7-9, TRBJ2-5)
CASLSPGQETQYF

SEQ ID NO: 703379 - protein, 13 aa, Homo sapiens
  CDR3 for alpha chain variable domain of TCR clone 351690 (TRAV8-2, TRAJ36)
CVVSHLPTNNLFF

SEQ ID NO: 703380 - protein, 18 aa, Homo sapiens
  CDR3 for beta chain variable domain of TCR clone 351690 (TRBV7-9, TRBJ2-6)
CGSSFPGAGISGANVLTF

SEQ ID NO: 703381 - protein, 14 aa, Homo sapiens
  CDR3 for alpha chain variable domain of TCR clone 351691 (TRAV26-2, TRAJ27)
CILRDISDAGKSTF

SEQ ID NO: 703382 - protein, 15 aa, Homo sapiens
  CDR3 for beta chain variable domain of TCR clone 351691 (TRBV10-3, TRBJ2-7)
CATKEQGLRSYEQYF

SEQ ID NO: 703383 - protein, 14 aa, Homo sapiens
  CDR3 for alpha chain variable domain of TCR clone 351692 (TRAV21, TRAJ28)
CAVGSGAVSYQLTF

SEQ ID NO: 703384 - protein, 14 aa, Homo sapiens
  CDR3 for beta chain variable domain of TCR clone 351692 (TRBV18, TRBJ1-4)
CASSPGPNGEKLFF

SEQ ID NO: 703385 - protein, 14 aa, Homo sapiens
  CDR3 for alpha chain variable domain of TCR clone 351693 (TRAV12-2, TRAJ44)
CAVNPAGTASKLTF

SEQ ID NO: 703386 - protein, 14 aa, Homo sapiens
  CDR3 for beta chain variable domain of TCR clone 351693 (TRBV7-8, TRBJ2-5)
CARSATGGQETQYF

SEQ ID NO: 703387 - protein, 15 aa, Homo sapiens
  CDR3 for alpha chain variable domain of TCR clone 351694 (TRAV21, TRAJ45)
CAVSYPGGGAEGLTF

SEQ ID NO: 703388 - protein, 13 aa, Homo sapiens
  CDR3 for beta chain variable domain of TCR clone 351694 (TRBV20-1, TRBJ2-5)
CSAATELQETQYF

SEQ ID NO: 703389 - protein, 14 aa, Homo sapiens
  CDR3 for alpha chain variable domain of TCR clone 351695 (TRAV12-2, TRAJ13)
CAVKKTGGYQKVPF

SEQ ID NO: 703390 - protein, 13 aa, Homo sapiens
  CDR3 for beta chain variable domain of TCR clone 351695 (TRBV10-3, TRBJ2-7)
CASKLAVNYEQYF

SEQ ID NO: 703391 - protein, 10 aa, Homo sapiens
  CDR3 for alpha chain variable domain of TCR clone 351696 (TRAV12-1, TRAJ22)
HSGSARQLTF

SEQ ID NO: 703392 - protein, 14 aa, Homo sapiens
  CDR3 for beta chain variable domain of TCR clone 351696 (TRBV7-3, TRBJ1-1)
CASSLKGGNTEAFF

SEQ ID NO: 703393 - protein, 17 aa, Homo sapiens
  CDR3 for alpha chain variable domain of TCR clone 351697 (TRAV12-3, TRAJ6)
CAMSARGGAGGSYIPTF

SEQ ID NO: 703394 - protein, 14 aa, Homo sapiens
  CDR3 for beta chain variable domain of TCR clone 351697 (TRBV11-2, TRBJ2-7)
CASSLGAGAYEQYF

SEQ ID NO: 703395 - protein, 17 aa, Homo sapiens
  CDR3 for alpha chain variable domain of TCR clone 351698 (TRAV3, TRAJ38)
CAVRDCLNAGNNRKLIW

SEQ ID NO: 703396 - protein, 14 aa, Homo sapiens
  CDR3 for beta chain variable domain of TCR clone 351698 (TRBV19, TRBJ2-1)
CASGKSTQYNEQFF

SEQ ID NO: 703397 - protein, 16 aa, Homo sapiens
  CDR3 for alpha chain variable domain of TCR clone 351699 (TRAV30, TRAJ24)
CGTEIVDADSWWKFQF

SEQ ID NO: 703398 - protein, 15 aa, Homo sapiens
  CDR3 for beta chain variable domain of TCR clone 351699 (TRBV27, TRBJ2-1)
CASSNGGGSSNEQFF

SEQ ID NO: 703399 - protein, 14 aa, Homo sapiens
  CDR3 for alpha chain variable domain of TCR clone 351700 (TRAV1-2, TRAJ8)
CAVREDTGFQKLGF

SEQ ID NO: 703400 - protein, 16 aa, Homo sapiens
  CDR3 for beta chain variable domain of TCR clone 351700 (TRBV5-1, TRBJ2-2)
CASSLWDTTNTGELFF

SEQ ID NO: 703401 - protein, 21 aa, Homo sapiens
  CDR3 for alpha chain variable domain of TCR clone 351701 (TRAV1-1, TRAJ6)
CLLLLRCERLERTGGSYIPTF

SEQ ID NO: 703402 - protein, 16 aa, Homo sapiens
  CDR3 for beta chain variable domain of TCR clone 351701 (TRBV28, TRBJ2-1)
CASSSPEYPRDNEQFF

SEQ ID NO: 703403 - protein, 12 aa, Homo sapiens
  CDR3 for alpha chain variable domain of TCR clone 351702 (TRAV3, TRAJ27)
CAVRDKAGKSTF

SEQ ID NO: 703404 - protein, 11 aa, Homo sapiens
  CDR3 for beta chain variable domain of TCR clone 351702 (TRBV5-1, TRBJ1-2)
CASSVTAPTMA

SEQ ID NO: 703405 - protein, 12 aa, Homo sapiens
  CDR3 for alpha chain variable domain of TCR clone 351703 (TRAV21, TRAJ42)
CAVGGGQGNHIF

SEQ ID NO: 703406 - protein, 19 aa, Homo sapiens
  CDR3 for beta chain variable domain of TCR clone 351703 (TRBV5-1, TRBJ2-3)
CASSLTRIAADWSTDTQYF

SEQ ID NO: 703407 - protein, 17 aa, Homo sapiens
  CDR3 for alpha chain variable domain of TCR clone 351704 (TRAV26-1, TRAJ37)
CIVRVITVSSNTGKLIF

SEQ ID NO: 703408 - protein, 11 aa, Homo sapiens
  CDR3 for beta chain variable domain of TCR clone 351704 (TRBV12-4, TRBJ2-2)
CASSSAGELFF

SEQ ID NO: 703409 - protein, 16 aa, Homo sapiens
  CDR3 for alpha chain variable domain of TCR clone 351705 (TRAV26-1, TRAJ36)
CIVRVPDQTGANNLFF

SEQ ID NO: 703410 - protein, 12 aa, Homo sapiens
  CDR3 for beta chain variable domain of TCR clone 351705 (TRBV29-1, TRBJ2-3)
CSVTGVADTQYF

SEQ ID NO: 703411 - protein, 11 aa, Homo sapiens
  CDR3 for alpha chain variable domain of TCR clone 351706 (TRAV1-1, TRAJ23)
CTVRQGGKLIF

SEQ ID NO: 703412 - protein, 20 aa, Homo sapiens
  CDR3 for beta chain variable domain of TCR clone 351706 (TRBV7-8, TRBJ2-2)
CASSHLFPGPTIHITGELFL

SEQ ID NO: 703413 - protein, 17 aa, Homo sapiens
  CDR3 for alpha chain variable domain of TCR clone 351707 (TRAV29/DV5, TRAJ10)
CSVLLGRATGGGNKLTF

SEQ ID NO: 703414 - protein, 17 aa, Homo sapiens
  CDR3 for beta chain variable domain of TCR clone 351707 (TRBV11-2, TRBJ2-1)
CASSLYPPGVEYNEQFF

SEQ ID NO: 703415 - protein, 17 aa, Homo sapiens
  CDR3 for alpha chain variable domain of TCR clone 351708 (TRAV8-3, TRAJ52)
CAVGAEAGGTSYGKLTF

SEQ ID NO: 703416 - protein, 19 aa, Homo sapiens
  CDR3 for beta chain variable domain of TCR clone 351708 (TRBV5-1, TRBJ2-5)
CASSPGTRPRDPVLRARHA

SEQ ID NO: 703417 - protein, 11 aa, Homo sapiens
  CDR3 for alpha chain variable domain of TCR clone 351709 (TRAV39, TRAJ49)
CAVDISTQFYF

SEQ ID NO: 703418 - protein, 11 aa, Homo sapiens
  CDR3 for beta chain variable domain of TCR clone 351709 (TRBV7-8, TRBJ2-7)
CASSLYLEQYF

SEQ ID NO: 703419 - protein, 15 aa, Homo sapiens
  CDR3 for alpha chain variable domain of TCR clone 351710 (TRAV26-1, TRAJ44)
CIVRANTGTASKLTF

SEQ ID NO: 703420 - protein, 15 aa, Homo sapiens
  CDR3 for beta chain variable domain of TCR clone 351710 (TRBV24-1, TRBJ1-1)
CATSDSKTVNTEAFF

SEQ ID NO: 703421 - protein, 11 aa, Homo sapiens
  CDR3 for alpha chain variable domain of TCR clone 351711 (TRAV23/DV6, TRAJ43)
CAASPGKDMRF

SEQ ID NO: 703422 - protein, 14 aa, Homo sapiens
  CDR3 for beta chain variable domain of TCR clone 351711 (TRBV4-1, TRBJ1-2)
CASSQDPLPYGYTF

SEQ ID NO: 703423 - protein, 14 aa, Homo sapiens
  CDR3 for alpha chain variable domain of TCR clone 351712 (TRAV13-2, TRAJ57)
CAESAQGGSEKLVF

SEQ ID NO: 703424 - protein, 14 aa, Homo sapiens
  CDR3 for beta chain variable domain of TCR clone 351712 (TRBV5-1, TRBJ2-2)
CASSLIEGAGELFF

SEQ ID NO: 703425 - protein, 12 aa, Homo sapiens
  CDR3 for alpha chain variable domain of TCR clone 351713 (TRAV13-2, TRAJ23)
CVERHRGGKLIF

SEQ ID NO: 703426 - protein, 16 aa, Homo sapiens
  CDR3 for beta chain variable domain of TCR clone 351713 (TRBV20-1, TRBJ1-4)
CSAPGQGLLTNVKLFF

SEQ ID NO: 703427 - protein, 21 aa, Homo sapiens
  CDR3 for alpha chain variable domain of TCR clone 351714 (TRAV12-1, TRAJ32)
SSVIQPPTSMNYGGATNKLIF

SEQ ID NO: 703428 - protein, 15 aa, Homo sapiens
  CDR3 for beta chain variable domain of TCR clone 351714 (TRBV7-9, TRBJ2-2)
CASGPLDTFPEELFF

SEQ ID NO: 703429 - protein, 13 aa, Homo sapiens
  CDR3 for alpha chain variable domain of TCR clone 351715 (TRAV12-1, TRAJ37)
CVVNAGNTGKLTF

SEQ ID NO: 703430 - protein, 14 aa, Homo sapiens
  CDR3 for beta chain variable domain of TCR clone 351715 (TRBV7-2, TRBJ2-3)
CASRRGLAADTQYF

SEQ ID NO: 703431 - protein, 12 aa, Homo sapiens
  CDR3 for alpha chain variable domain of TCR clone 351716 (TRAV16, TRAJ12)
CAHGDSSYKLIF

SEQ ID NO: 703432 - protein, 15 aa, Homo sapiens
  CDR3 for beta chain variable domain of TCR clone 351716 (TRBV27, TRBJ2-1)
CASSGGGPSYNEQFF

SEQ ID NO: 703433 - protein, 14 aa, Homo sapiens
  CDR3 for alpha chain variable domain of TCR clone 351717 (TRAV1-2, TRAJ8)
CAVREDTGFQKLVF

SEQ ID NO: 703434 - protein, 15 aa, Homo sapiens
  CDR3 for beta chain variable domain of TCR clone 351717 (TRBV7-2, TRBJ2-1)
CASSFQADEYNEQFF

SEQ ID NO: 703435 - protein, 12 aa, Homo sapiens
  CDR3 for alpha chain variable domain of TCR clone 351718 (TRAV13-1, TRAJ21)
CAAKEGFNNFYF

SEQ ID NO: 703436 - protein, 15 aa, Homo sapiens
  CDR3 for beta chain variable domain of TCR clone 351718 (TRBV2, TRBJ2-1)
CASSELAGSYNEQFF

SEQ ID NO: 703437 - protein, 13 aa, Homo sapiens
  CDR3 for alpha chain variable domain of TCR clone 351719 (TRAV13-1, TRAJ5)
CAASDTGRRALTF

SEQ ID NO: 703438 - protein, 13 aa, Homo sapiens
  CDR3 for beta chain variable domain of TCR clone 351719 (TRBV6-5, TRBJ2-7)
CASSSPDFIEQYF

SEQ ID NO: 703439 - protein, 15 aa, Homo sapiens
  CDR3 for alpha chain variable domain of TCR clone 351720 (TRAV17, TRAJ28)
CAPLAGGAGSYQLTF

SEQ ID NO: 703440 - protein, 15 aa, Homo sapiens
  CDR3 for beta chain variable domain of TCR clone 351720 (TRBV7-2, TRBJ2-2)
CASRRPGQNTGELFF

SEQ ID NO: 703441 - protein, 13 aa, Homo sapiens
  CDR3 for alpha chain variable domain of TCR clone 351721 (TRAV30, TRAJ27)
CGTGNTNAGKSTF

SEQ ID NO: 703442 - protein, 13 aa, Homo sapiens
  CDR3 for beta chain variable domain of TCR clone 351721 (TRBV19, TRBJ1-2)
CASSQGQVYGYTF

SEQ ID NO: 703443 - protein, 15 aa, Homo sapiens
  CDR3 for alpha chain variable domain of TCR clone 351722 (TRAV13-1, TRAJ11)
CAASNRNSVYSTLTF

SEQ ID NO: 703444 - protein, 11 aa, Homo sapiens
  CDR3 for beta chain variable domain of TCR clone 351722 (TRBV20-1, TRBJ2-7)
CSARLSYEQYF

SEQ ID NO: 703445 - protein, 12 aa, Homo sapiens
  CDR3 for alpha chain variable domain of TCR clone 351723 (TRAV2, TRAJ9)
CAVGAGGFKTIF

SEQ ID NO: 703446 - protein, 14 aa, Homo sapiens
  CDR3 for beta chain variable domain of TCR clone 351723 (TRBV4-1, TRBJ2-7)
CASSPVAGGDEQYF

SEQ ID NO: 703447 - protein, 11 aa, Homo sapiens
  CDR3 for alpha chain variable domain of TCR clone 351724 (TRAV2, TRAJ40)
CAVEDPGNLQI

SEQ ID NO: 703448 - protein, 14 aa, Homo sapiens
  CDR3 for beta chain variable domain of TCR clone 351724 (TRBV19, TRBJ2-2)
CASSTLHRPGELFF

SEQ ID NO: 703449 - protein, 14 aa, Homo sapiens
  CDR3 for alpha chain variable domain of TCR clone 351725 (TRAV23/DV6, TRAJ53)
CAARSGGSNYKLTF

SEQ ID NO: 703450 - protein, 14 aa, Homo sapiens
  CDR3 for beta chain variable domain of TCR clone 351725 (TRBV27, TRBJ1-1)
CASSPQGKRAEAVF

SEQ ID NO: 703451 - protein, 14 aa, Homo sapiens
  CDR3 for alpha chain variable domain of TCR clone 351726 (TRAV20, TRAJ22)
CAVQVSGSARQLTF

SEQ ID NO: 703452 - protein, 14 aa, Homo sapiens
  CDR3 for beta chain variable domain of TCR clone 351726 (TRBV7-7, TRBJ2-2)
CATRQDSDTGELLF

SEQ ID NO: 703453 - protein, 16 aa, Homo sapiens
  CDR3 for alpha chain variable domain of TCR clone 351727 (TRAV1-2, TRAJ10)
CAVRGVLTGGGNKLTF

SEQ ID NO: 703454 - protein, 16 aa, Homo sapiens
  CDR3 for beta chain variable domain of TCR clone 351727 (TRBV29-1, TRBJ2-7)
CSVEVVGTTGSYEQYF

SEQ ID NO: 703455 - protein, 16 aa, Homo sapiens
  CDR3 for alpha chain variable domain of TCR clone 351728 (TRAV16, TRAJ4)
CALSRMFSGGYNKLIF

SEQ ID NO: 703456 - protein, 17 aa, Homo sapiens
  CDR3 for beta chain variable domain of TCR clone 351728 (TRBV7-3, TRBJ2-3)
CASSLMKRMRGADTQYF

SEQ ID NO: 703457 - protein, 14 aa, Homo sapiens
  CDR3 for alpha chain variable domain of TCR clone 351729 (TRAV2, TRAJ20)
CTVEDGTNDYKLSF

SEQ ID NO: 703458 - protein, 13 aa, Homo sapiens
  CDR3 for beta chain variable domain of TCR clone 351729 (TRBV7-2, TRBJ1-1)
CASSRNTNTEAFF

SEQ ID NO: 703459 - protein, 16 aa, Homo sapiens
  CDR3 for alpha chain variable domain of TCR clone 351730 (TRAV38-2/DV8, TRAJ45)
CAYTTTSGGGADGLTF

SEQ ID NO: 703460 - protein, 15 aa, Homo sapiens
  CDR3 for beta chain variable domain of TCR clone 351730 (TRBV19, TRBJ2-5)
CASSTRRLSQETQYF

SEQ ID NO: 703461 - protein, 12 aa, Homo sapiens
  CDR3 for alpha chain variable domain of TCR clone 351731 (TRAV16, TRAJ26)
CALRSYGQNFVF

SEQ ID NO: 703462 - protein, 14 aa, Homo sapiens
  CDR3 for beta chain variable domain of TCR clone 351731 (TRBV10-3, TRBJ2-1)
CAISSELAYNEQFF

SEQ ID NO: 703463 - protein, 12 aa, Homo sapiens
  CDR3 for alpha chain variable domain of TCR clone 351732 (TRAV20, TRAJ37)
CALPSNTGKLIF

SEQ ID NO: 703464 - protein, 14 aa, Homo sapiens
  CDR3 for beta chain variable domain of TCR clone 351732 (TRBV7-2, TRBJ2-7)
CASSLPPGQGPQYF

SEQ ID NO: 703465 - protein, 18 aa, Homo sapiens
  CDR3 for alpha chain variable domain of TCR clone 351733 (TRAV12-3, TRAJ52)
RAMSVGGAGGTSYGKLTF

SEQ ID NO: 703466 - protein, 15 aa, Homo sapiens
  CDR3 for beta chain variable domain of TCR clone 351733 (TRBV19, TRBJ1-2)
CASSVGQVLNYGYTF

SEQ ID NO: 703467 - protein, 13 aa, Homo sapiens
  CDR3 for alpha chain variable domain of TCR clone 351734 (TRAV1-2, TRAJ11)
CAVRREGYSTLTF

SEQ ID NO: 703468 - protein, 15 aa, Homo sapiens
  CDR3 for beta chain variable domain of TCR clone 351734 (TRBV27, TRBJ2-1)
CASSNGGGSSNEQFF

SEQ ID NO: 703469 - protein, 14 aa, Homo sapiens
  CDR3 for alpha chain variable domain of TCR clone 351735 (TRAV17, TRAJ49)
FATDARDTGNQFYF

SEQ ID NO: 703470 - protein, 14 aa, Homo sapiens
  CDR3 for beta chain variable domain of TCR clone 351735 (TRBV5-5, TRBJ1-2)
CASSFGQINYGYTF

SEQ ID NO: 703471 - protein, 11 aa, Homo sapiens
  CDR3 for alpha chain variable domain of TCR clone 351736 (TRAV1-1, TRAJ23)
CAVRQGGKLVF

SEQ ID NO: 703472 - protein, 15 aa, Homo sapiens
  CDR3 for beta chain variable domain of TCR clone 351736 (TRBV20-1, TRBJ2-7)
CSARDRVSGMDEQYF

SEQ ID NO: 703473 - protein, 18 aa, Homo sapiens
  CDR3 for alpha chain variable domain of TCR clone 351737 (TRAV21, TRAJ52)
CAVRPSPAGGTSYGKLTF

SEQ ID NO: 703474 - protein, 16 aa, Homo sapiens
  CDR3 for beta chain variable domain of TCR clone 351737 (TRBV19, TRBJ2-1)
CASSKAGPRSYNEQFF

SEQ ID NO: 703475 - protein, 14 aa, Homo sapiens
  CDR3 for alpha chain variable domain of TCR clone 351738 (TRAV3, TRAJ9)
CAVRGNTGGFKSIF

SEQ ID NO: 703476 - protein, 14 aa, Homo sapiens
  CDR3 for beta chain variable domain of TCR clone 351738 (TRBV15, TRBJ2-1)
CATSGVEDYNEQFF

SEQ ID NO: 703477 - protein, 11 aa, Homo sapiens
  CDR3 for alpha chain variable domain of TCR clone 351739 (TRAV2, TRAJ13)
CASGGYQKVTF

SEQ ID NO: 703478 - protein, 14 aa, Homo sapiens
  CDR3 for beta chain variable domain of TCR clone 351739 (TRBV7-2, TRBJ2-7)
CASRLYPGRYEQYF

SEQ ID NO: 703479 - protein, 12 aa, Homo sapiens
  CDR3 for alpha chain variable domain of TCR clone 351740 (TRAV3, TRAJ20)
CALRDHDYKLSF

SEQ ID NO: 703480 - protein, 13 aa, Homo sapiens
  CDR3 for beta chain variable domain of TCR clone 351740 (TRBV9, TRBJ2-7)
CASSVGQGGEQYF

SEQ ID NO: 703481 - protein, 14 aa, Homo sapiens
  CDR3 for alpha chain variable domain of TCR clone 351741 (TRAV35, TRAJ46)
CAGPQKSSGDKLTF

SEQ ID NO: 703482 - protein, 14 aa, Homo sapiens
  CDR3 for beta chain variable domain of TCR clone 351741 (TRBV7-2, TRBJ2-7)
CASSPKTSFYEQYF

SEQ ID NO: 703483 - protein, 16 aa, Homo sapiens
  CDR3 for alpha chain variable domain of TCR clone 351742 (TRAV30, TRAJ44)
CGTEDKRTGTASKLTI

SEQ ID NO: 703484 - protein, 16 aa, Homo sapiens
  CDR3 for beta chain variable domain of TCR clone 351742 (TRBV10-2, TRBJ2-7)
CASSESPGSSGFEQYF

SEQ ID NO: 703485 - protein, 13 aa, Homo sapiens
  CDR3 for alpha chain variable domain of TCR clone 351743 (TRAV1-2, TRAJ9)
CAALNTGGFKTIF

SEQ ID NO: 703486 - protein, 14 aa, Homo sapiens
  CDR3 for beta chain variable domain of TCR clone 351743 (TRBV3-1, TRBJ2-7)
CASSPSSGTYEQYF

SEQ ID NO: 703487 - protein, 17 aa, Homo sapiens
  CDR3 for alpha chain variable domain of TCR clone 351744 (TRAV3, TRAJ12)
CAVRDGGRMDSSYKLIF

SEQ ID NO: 703488 - protein, 15 aa, Homo sapiens
  CDR3 for beta chain variable domain of TCR clone 351744 (TRBV15, TRBJ1-6)
CATSGALIRPSTLGT

SEQ ID NO: 703489 - protein, 13 aa, Homo sapiens
  CDR3 for alpha chain variable domain of TCR clone 351745 (TRAV8-3, TRAJ43)
CAVGPDNNNDMRF

SEQ ID NO: 703490 - protein, 14 aa, Homo sapiens
  CDR3 for beta chain variable domain of TCR clone 351745 (TRBV19, TRBJ2-1)
CASPTFGLSGEQFI

SEQ ID NO: 703491 - protein, 17 aa, Homo sapiens
  CDR3 for alpha chain variable domain of TCR clone 351746 (TRAV3, TRAJ42)
CAVRDRDYGGSQGNLIF

SEQ ID NO: 703492 - protein, 13 aa, Homo sapiens
  CDR3 for beta chain variable domain of TCR clone 351746 (TRBV10-3, TRBJ2-7)
CTSKLAVNYEQYF

SEQ ID NO: 703493 - protein, 15 aa, Homo sapiens
  CDR3 for alpha chain variable domain of TCR clone 351747 (TRAV8-3, TRAJ27)
CAVGPSKTNAGKSTC

SEQ ID NO: 703494 - protein, 13 aa, Homo sapiens
  CDR3 for beta chain variable domain of TCR clone 351747 (TRBV12-5, TRBJ1-2)
CASGVRTGNGYTF

SEQ ID NO: 703495 - protein, 12 aa, Homo sapiens
  CDR3 for alpha chain variable domain of TCR clone 351748 (TRAV27, TRAJ47)
CAGEVRGNKLVF

SEQ ID NO: 703496 - protein, 14 aa, Homo sapiens
  CDR3 for beta chain variable domain of TCR clone 351748 (TRBV7-6, TRBJ2-3)
CASSVAGGTDTQYF

SEQ ID NO: 703497 - protein, 14 aa, Homo sapiens
  CDR3 for alpha chain variable domain of TCR clone 351749 (TRAV26-2, TRAJ32)
CCVGYGGATNKLIF

SEQ ID NO: 703498 - protein, 16 aa, Homo sapiens
  CDR3 for beta chain variable domain of TCR clone 351749 (TRBV7-3, TRBJ2-1)
CASSLEGYRSYNEQFF

SEQ ID NO: 703499 - protein, 11 aa, Homo sapiens
  CDR3 for alpha chain variable domain of TCR clone 351750 (TRAV2, TRAJ13)
CASGGYQKVTF

SEQ ID NO: 703500 - protein, 16 aa, Homo sapiens
  CDR3 for beta chain variable domain of TCR clone 351750 (TRBV19, TRBJ2-1)
CASSKAGPSSFNEQFF

SEQ ID NO: 703501 - protein, 13 aa, Homo sapiens
  CDR3 for alpha chain variable domain of TCR clone 351751 (TRAV1-1, TRAJ31)
CASYLNNNVRLMF

SEQ ID NO: 703502 - protein, 14 aa, Homo sapiens
  CDR3 for beta chain variable domain of TCR clone 351751 (TRBV4-1, TRBJ2-5)
CASSRSGSGETQYF

SEQ ID NO: 703503 - protein, 12 aa, Homo sapiens
  CDR3 for alpha chain variable domain of TCR clone 351752 (TRAV12-2, TRAJ17)
CAVTTAGNKLTF

SEQ ID NO: 703504 - protein, 15 aa, Homo sapiens
  CDR3 for beta chain variable domain of TCR clone 351752 (TRBV29-1, TRBJ2-1)
CSVGRHALFYNEQFF

SEQ ID NO: 703505 - protein, 23 aa, Homo sapiens
  CDR3 for alpha chain variable domain of TCR clone 351753 (TRAV8-3, TRAJ6)
CAVGGEEATYLHFEEEPALLFIL

SEQ ID NO: 703506 - protein, 14 aa, Homo sapiens
  CDR3 for beta chain variable domain of TCR clone 351753 (TRBV5-1, TRBJ2-7)
CASSRGESLYEQYF

SEQ ID NO: 703507 - protein, 15 aa, Homo sapiens
  CDR3 for alpha chain variable domain of TCR clone 351754 (TRAV27, TRAJ38)
CAARRNAGNNRKLIW

SEQ ID NO: 703508 - protein, 15 aa, Homo sapiens
  CDR3 for beta chain variable domain of TCR clone 351754 (TRBV12-5, TRBJ2-2)
CASGFQGSGTGELFF

SEQ ID NO: 703509 - protein, 12 aa, Homo sapiens
  CDR3 for alpha chain variable domain of TCR clone 351755 (TRAV21, TRAJ31)
CAVWGNNARLMF

SEQ ID NO: 703510 - protein, 16 aa, Homo sapiens
  CDR3 for beta chain variable domain of TCR clone 351755 (TRBV27, TRBJ2-5)
CASRYGPGGQKETQYF

SEQ ID NO: 703511 - protein, 12 aa, Homo sapiens
  CDR3 for alpha chain variable domain of TCR clone 351756 (TRAV3, TRAJ31)
CAVRDGNARLMF

SEQ ID NO: 703512 - protein, 18 aa, Homo sapiens
  CDR3 for beta chain variable domain of TCR clone 351756 (TRBV7-2, TRBJ2-3)
CASSLKREGSGITVTQYF

SEQ ID NO: 703513 - protein, 14 aa, Homo sapiens
  CDR3 for alpha chain variable domain of TCR clone 351757 (TRAV38-1, TRAJ27)
CAFIHNTNAGKSTF

SEQ ID NO: 703514 - protein, 15 aa, Homo sapiens
  CDR3 for beta chain variable domain of TCR clone 351757 (TRBV7-3, TRBJ2-2)
CASSETGQGTGELFF

SEQ ID NO: 703515 - protein, 15 aa, Homo sapiens
  CDR3 for alpha chain variable domain of TCR clone 351758 (TRAV8-3, TRAJ40)
CAVGPYTSGTYKYIF

SEQ ID NO: 703516 - protein, 18 aa, Homo sapiens
  CDR3 for beta chain variable domain of TCR clone 351758 (TRBV7-2, TRBJ2-7)
CASSLGPGVDRAISTSGR

SEQ ID NO: 703517 - protein, 15 aa, Homo sapiens
  CDR3 for alpha chain variable domain of TCR clone 351759 (TRAV23/DV6, TRAJ15)
CAALPAGRNCPDLWE

SEQ ID NO: 703518 - protein, 14 aa, Homo sapiens
  CDR3 for beta chain variable domain of TCR clone 351759 (TRBV7-9, TRBJ1-2)
CASSRQGANYGYTF

SEQ ID NO: 703519 - protein, 15 aa, Homo sapiens
  CDR3 for alpha chain variable domain of TCR clone 351760 (TRAV23/DV6, TRAJ44)
CAASWGTGTASKLTF

SEQ ID NO: 703520 - protein, 15 aa, Homo sapiens
  CDR3 for beta chain variable domain of TCR clone 351760 (TRBV6-3, TRBJ2-7)
CASSSPGTVFYEQYF

SEQ ID NO: 703521 - protein, 16 aa, Homo sapiens
  CDR3 for alpha chain variable domain of TCR clone 351761 (TRAV30, TRAJ24)
CGTEIVDADSWGKFQF

SEQ ID NO: 703522 - protein, 14 aa, Homo sapiens
  CDR3 for beta chain variable domain of TCR clone 351761 (TRBV27, TRBJ2-3)
CATWTSGRPWGQYF

SEQ ID NO: 703523 - protein, 13 aa, Homo sapiens
  CDR3 for alpha chain variable domain of TCR clone 351762 (TRAV17, TRAJ26)
CATVDNYGQNFVF

SEQ ID NO: 703524 - protein, 15 aa, Homo sapiens
  CDR3 for beta chain variable domain of TCR clone 351762 (TRBV6-1, TRBJ2-3)
CASSERGGITDTQYF

SEQ ID NO: 703525 - protein, 13 aa, Homo sapiens
  CDR3 for alpha chain variable domain of TCR clone 351763 (TRAV27, TRAJ45)
CRSSGGGADGLTF

SEQ ID NO: 703526 - protein, 17 aa, Homo sapiens
  CDR3 for beta chain variable domain of TCR clone 351763 (TRBV11-2, TRBJ2-1)
CASSLYPPGVQYNEQFF

SEQ ID NO: 703527 - protein, 14 aa, Homo sapiens
  CDR3 for alpha chain variable domain of TCR clone 351764 (TRAV12-3, TRAJ56)
CAMGVTGANSKLTF

SEQ ID NO: 703528 - protein, 17 aa, Homo sapiens
  CDR3 for beta chain variable domain of TCR clone 351764 (TRBV20-1, TRBJ2-3)
CIASLLGRGGSADTQYF

SEQ ID NO: 703529 - protein, 16 aa, Homo sapiens
  CDR3 for alpha chain variable domain of TCR clone 351765 (TRAV30, TRAJ24)
CGTEIVDADSWGKFQF

SEQ ID NO: 703530 - protein, 16 aa, Homo sapiens
  CDR3 for beta chain variable domain of TCR clone 351765 (TRBV12-4, TRBJ2-1)
CASSAVGQGNGDEQFF

SEQ ID NO: 703531 - protein, 13 aa, Homo sapiens
  CDR3 for alpha chain variable domain of TCR clone 351766 (TRAV20, TRAJ20)
CAVQAGSGYKLSF

SEQ ID NO: 703532 - protein, 14 aa, Homo sapiens
  CDR3 for beta chain variable domain of TCR clone 351766 (TRBV12-5, TRBJ2-5)
CASGSRTHQETQYF

SEQ ID NO: 703533 - protein, 12 aa, Homo sapiens
  CDR3 for alpha chain variable domain of TCR clone 351767 (TRAV17, TRAJ20)
CATQPNDYKLSF

SEQ ID NO: 703534 - protein, 13 aa, Homo sapiens
  CDR3 for beta chain variable domain of TCR clone 351767 (TRBV10-3, TRBJ1-1)
CAIIPEGGTEAFF

SEQ ID NO: 703535 - protein, 15 aa, Homo sapiens
  CDR3 for alpha chain variable domain of TCR clone 351768 (TRAV21, TRAJ53)
CATLNSGGSNYILTF

SEQ ID NO: 703536 - protein, 16 aa, Homo sapiens
  CDR3 for beta chain variable domain of TCR clone 351768 (TRBV12-4, TRBJ2-3)
CASSLRLAETTDTQYF

SEQ ID NO: 703537 - protein, 15 aa, Homo sapiens
  CDR3 for alpha chain variable domain of TCR clone 351769 (TRAV4, TRAJ42)
CLVGGYGGSQGNLIF

SEQ ID NO: 703538 - protein, 15 aa, Homo sapiens
  CDR3 for beta chain variable domain of TCR clone 351769 (TRBV7-9, TRBJ2-2)
CASGPLDTFPGELFF

SEQ ID NO: 703539 - protein, 16 aa, Homo sapiens
  CDR3 for alpha chain variable domain of TCR clone 351770 (TRAV16, TRAJ4)
CALSRMFSGGYNKLIF

SEQ ID NO: 703540 - protein, 16 aa, Homo sapiens
  CDR3 for beta chain variable domain of TCR clone 351770 (TRBV27, TRBJ2-2)
CASSSTGGGDTGELFF

SEQ ID NO: 703541 - protein, 13 aa, Homo sapiens
  CDR3 for alpha chain variable domain of TCR clone 351771 (TRAV8-4, TRAJ30)
CAVSVKRDDKIIF

SEQ ID NO: 703542 - protein, 13 aa, Homo sapiens
  CDR3 for beta chain variable domain of TCR clone 351771 (TRBV3-1, TRBJ2-2)
CASLARGSGELFF

SEQ ID NO: 703543 - protein, 13 aa, Homo sapiens
  CDR3 for alpha chain variable domain of TCR clone 351772 (TRAV12-1, TRAJ11)
CVVNRAGYSTLTF

SEQ ID NO: 703544 - protein, 14 aa, Homo sapiens
  CDR3 for beta chain variable domain of TCR clone 351772 (TRBV10-3, TRBJ2-1)
CAISSDLAYNEQFF

SEQ ID NO: 703545 - protein, 14 aa, Homo sapiens
  CDR3 for alpha chain variable domain of TCR clone 351773 (TRAV17, TRAJ11)
CATDTSRGYSTLTS

SEQ ID NO: 703546 - protein, 13 aa, Homo sapiens
  CDR3 for beta chain variable domain of TCR clone 351773 (TRBV19, TRBJ2-5)
CASRDSRRETQYF

SEQ ID NO: 703547 - protein, 14 aa, Homo sapiens
  CDR3 for alpha chain variable domain of TCR clone 351774 (TRAV12-1, TRAJ12)
CVVTRMDSSYKLIF

SEQ ID NO: 703548 - protein, 15 aa, Homo sapiens
  CDR3 for beta chain variable domain of TCR clone 351774 (TRBV5-1, TRBJ2-1)
CASSPPRAAYNEQFF

SEQ ID NO: 703549 - protein, 11 aa, Homo sapiens
  CDR3 for alpha chain variable domain of TCR clone 351775 (TRAV21, TRAJ34)
CAVTNTDKLIF

SEQ ID NO: 703550 - protein, 15 aa, Homo sapiens
  CDR3 for beta chain variable domain of TCR clone 351775 (TRBV4-1, TRBJ1-4)
CASSDTGGTNEKLFF

SEQ ID NO: 703551 - protein, 14 aa, Homo sapiens
  CDR3 for alpha chain variable domain of TCR clone 351776 (TRAV2, TRAJ9)
CAVEDRSGGFKTIF

SEQ ID NO: 703552 - protein, 19 aa, Homo sapiens
  CDR3 for beta chain variable domain of TCR clone 351776 (TRBV4-3, TRBJ2-1)
CASSQEVVSSGMAAGEQFF

SEQ ID NO: 703553 - protein, 14 aa, Homo sapiens
  CDR3 for alpha chain variable domain of TCR clone 351777 (TRAV3, TRAJ6)
CAVRDGQGRRKLHT

SEQ ID NO: 703554 - protein, 13 aa, Homo sapiens
  CDR3 for beta chain variable domain of TCR clone 351777 (TRBV20-1, TRBJ1-6)
CSAPLGVGSPLHF

SEQ ID NO: 703555 - protein, 17 aa, Homo sapiens
  CDR3 for alpha chain variable domain of TCR clone 351778 (TRAV3, TRAJ6)
CAVRDGPRAGGSDIPTF

SEQ ID NO: 703556 - protein, 17 aa, Homo sapiens
  CDR3 for beta chain variable domain of TCR clone 351778 (TRBV28, TRBJ2-7)
CASSPLPAGGKSYEQYF

SEQ ID NO: 703557 - protein, 10 aa, Homo sapiens
  CDR3 for alpha chain variable domain of TCR clone 351779 (TRAV2, TRAJ15)
RGQAGTTLIF

SEQ ID NO: 703558 - protein, 12 aa, Homo sapiens
  CDR3 for beta chain variable domain of TCR clone 351779 (TRBV11-2, TRBJ2-2)
CASSLGGGELFF

SEQ ID NO: 703559 - protein, 14 aa, Homo sapiens
  CDR3 for alpha chain variable domain of TCR clone 351780 (TRAV27, TRAJ22)
CAGVSVLGKRQLTF

SEQ ID NO: 703560 - protein, 12 aa, Homo sapiens
  CDR3 for beta chain variable domain of TCR clone 351780 (TRBV2, TRBJ2-1)
CAKREGYNEQFF

SEQ ID NO: 703561 - protein, 17 aa, Homo sapiens
  CDR3 for alpha chain variable domain of TCR clone 351781 (TRAV26-1, TRAJ58)
CIVRVGAEETSGSRLTF

SEQ ID NO: 703562 - protein, 18 aa, Homo sapiens
  CDR3 for beta chain variable domain of TCR clone 351781 (TRBV7-9, TRBJ2-7)
CVSSLTTSGSRTWYEQYF

SEQ ID NO: 703563 - protein, 18 aa, Homo sapiens
  CDR3 for alpha chain variable domain of TCR clone 351782 (TRAV26-1, TRAJ52)
CIVRVEGAGGTSDGKLTF

SEQ ID NO: 703564 - protein, 13 aa, Homo sapiens
  CDR3 for beta chain variable domain of TCR clone 351782 (TRBV7-3, TRBJ1-2)
CASSLKRGYGYTF

SEQ ID NO: 703565 - protein, 12 aa, Homo sapiens
  CDR3 for alpha chain variable domain of TCR clone 351783 (TRAV2, TRAJ9)
CAVVAGGFKTIF

SEQ ID NO: 703566 - protein, 16 aa, Homo sapiens
  CDR3 for beta chain variable domain of TCR clone 351783 (TRBV6-1, TRBJ1-3)
CASVQGGVETPYILER

SEQ ID NO: 703567 - protein, 11 aa, Homo sapiens
  CDR3 for alpha chain variable domain of TCR clone 351784 (TRAV21, TRAJ11)
CAVNGYSTLTF

SEQ ID NO: 703568 - protein, 15 aa, Homo sapiens
  CDR3 for beta chain variable domain of TCR clone 351784 (TRBV28, TRBJ2-1)
CASSIIAGGRSEQFF

SEQ ID NO: 703569 - protein, 11 aa, Homo sapiens
  CDR3 for alpha chain variable domain of TCR clone 351785 (TRAV21, TRAJ34)
CAVTNTDKLIF

SEQ ID NO: 703570 - protein, 16 aa, Homo sapiens
  CDR3 for beta chain variable domain of TCR clone 351785 (TRBV6-5, TRBJ2-7)
CASSSDPTSGFYEQYF

SEQ ID NO: 703571 - protein, 15 aa, Homo sapiens
  CDR3 for alpha chain variable domain of TCR clone 351786 (TRAV27, TRAJ38)
CAARRNAGNNRKLIW

SEQ ID NO: 703572 - protein, 16 aa, Homo sapiens
  CDR3 for beta chain variable domain of TCR clone 351786 (TRBV10-3, TRBJ2-7)
CAISADFADRPYEQYL

SEQ ID NO: 703573 - protein, 19 aa, Homo sapiens
  CDR3 for alpha chain variable domain of TCR clone 351787 (TRAV2, TRAJ20)
ILQVREADAAVYRDCKLSF

SEQ ID NO: 703574 - protein, 12 aa, Homo sapiens
  CDR3 for beta chain variable domain of TCR clone 351787 (TRBV12-4, TRBJ2-1)
CASSLVRVEQFF

SEQ ID NO: 703575 - protein, 14 aa, Homo sapiens
  CDR3 for alpha chain variable domain of TCR clone 351788 (TRAV1-2, TRAJ27)
CAPAEYINAGKSTF

SEQ ID NO: 703576 - protein, 18 aa, Homo sapiens
  CDR3 for beta chain variable domain of TCR clone 351788 (TRBV28, TRBJ1-2)
CASRQQQGKRGSNYGYTF

SEQ ID NO: 703577 - protein, 17 aa, Homo sapiens
  CDR3 for alpha chain variable domain of TCR clone 351789 (TRAV3, TRAJ42)
CAVRDRDYGGSHGNLIF

SEQ ID NO: 703578 - protein, 15 aa, Homo sapiens
  CDR3 for beta chain variable domain of TCR clone 351789 (TRBV3-1, TRBJ2-1)
CASSQVVDDGEEQFF

SEQ ID NO: 703579 - protein, 12 aa, Homo sapiens
  CDR3 for alpha chain variable domain of TCR clone 351790 (TRAV29/DV5, TRAJ49)
CAATDTGNQFYF

SEQ ID NO: 703580 - protein, 14 aa, Homo sapiens
  CDR3 for beta chain variable domain of TCR clone 351790 (TRBV12-4, TRBJ2-7)
CTSVPAVGGYEQYF

SEQ ID NO: 703581 - protein, 14 aa, Homo sapiens
  CDR3 for alpha chain variable domain of TCR clone 351791 (TRAV8-1, TRAJ5)
CAVRTDTGRRALTF

SEQ ID NO: 703582 - protein, 12 aa, Homo sapiens
  CDR3 for beta chain variable domain of TCR clone 351791 (TRBV11-2, TRBJ2-1)
CASSPRNNERFF

SEQ ID NO: 703583 - protein, 15 aa, Homo sapiens
  CDR3 for alpha chain variable domain of TCR clone 351792 (TRAV38-1, TRAJ37)
CAFIFGAGNTGKLIF

SEQ ID NO: 703584 - protein, 17 aa, Homo sapiens
  CDR3 for beta chain variable domain of TCR clone 351792 (TRBV13, TRBJ2-3)
CASSLSRVAGGRNTQYF

SEQ ID NO: 703585 - protein, 11 aa, Homo sapiens
  CDR3 for alpha chain variable domain of TCR clone 351793 (TRAV12-2, TRAJ33)
CAVTSNYQLIW

SEQ ID NO: 703586 - protein, 14 aa, Homo sapiens
  CDR3 for beta chain variable domain of TCR clone 351793 (TRBV12-4, TRBJ2-2)
CASNQWANTGELFF

SEQ ID NO: 703587 - protein, 12 aa, Homo sapiens
  CDR3 for alpha chain variable domain of TCR clone 351794 (TRAV12-3, TRAJ3)
CAIDSSASKIIF

SEQ ID NO: 703588 - protein, 14 aa, Homo sapiens
  CDR3 for beta chain variable domain of TCR clone 351794 (TRBV11-2, TRBJ2-7)
CASSLGAGAYEQYF

SEQ ID NO: 703589 - protein, 11 aa, Homo sapiens
  CDR3 for alpha chain variable domain of TCR clone 351795 (TRAV21, TRAJ9)
CAVPGGFKTIF

SEQ ID NO: 703590 - protein, 20 aa, Homo sapiens
  CDR3 for beta chain variable domain of TCR clone 351795 (TRBV7-9, TRBJ2-5)
RGTRPCISVSLQGAQETQYF

SEQ ID NO: 703591 - protein, 13 aa, Homo sapiens
  CDR3 for alpha chain variable domain of TCR clone 351796 (TRAV13-2, TRAJ13)
CAERPGGYQKVTF

SEQ ID NO: 703592 - protein, 18 aa, Homo sapiens
  CDR3 for beta chain variable domain of TCR clone 351796 (TRBV7-6, TRBJ2-1)
CASSPRTSGMSSYNEQFS

SEQ ID NO: 703593 - protein, 14 aa, Homo sapiens
  CDR3 for alpha chain variable domain of TCR clone 351797 (TRAV35, TRAJ33)
CAGSSQDSNYQLIW

SEQ ID NO: 703594 - protein, 14 aa, Homo sapiens
  CDR3 for beta chain variable domain of TCR clone 351797 (TRBV5-1, TRBJ1-4)
AAAAWKDGNEKLFF

SEQ ID NO: 703595 - protein, 14 aa, Homo sapiens
  CDR3 for alpha chain variable domain of TCR clone 351798 (TRAV12-3, TRAJ13)
CAMRNSGGYQKVTF

SEQ ID NO: 703596 - protein, 14 aa, Homo sapiens
  CDR3 for beta chain variable domain of TCR clone 351798 (TRBV4-1, TRBJ1-6)
CASSPGSDSSPLHF

SEQ ID NO: 703597 - protein, 16 aa, Homo sapiens
  CDR3 for alpha chain variable domain of TCR clone 351799 (TRAV3, TRAJ21)
CAVRDIERGNFNKFYF

SEQ ID NO: 703598 - protein, 14 aa, Homo sapiens
  CDR3 for beta chain variable domain of TCR clone 351799 (TRBV7-9, TRBJ2-5)
CASSLDTAQETQYF

SEQ ID NO: 703599 - protein, 15 aa, Homo sapiens
  CDR3 for alpha chain variable domain of TCR clone 351800 (TRAV26-1, TRAJ22)
CIVRVSFWFCKATDL

SEQ ID NO: 703600 - protein, 17 aa, Homo sapiens
  CDR3 for beta chain variable domain of TCR clone 351800 (TRBV10-1, TRBJ2-1)
CASSPQRAGGPFNEQFF

SEQ ID NO: 703601 - protein, 18 aa, Homo sapiens
  CDR3 for alpha chain variable domain of TCR clone 351801 (TRAV13-1, TRAJ52)
CAASKRSAGGTSYGKLTF

SEQ ID NO: 703602 - protein, 16 aa, Homo sapiens
  CDR3 for beta chain variable domain of TCR clone 351801 (TRBV4-2, TRBJ2-5)
CASSQELVGSQETQYF

SEQ ID NO: 703603 - protein, 12 aa, Homo sapiens
  CDR3 for alpha chain variable domain of TCR clone 351802 (TRAV27, TRAJ13)
CAGVRGYQKVTF

SEQ ID NO: 703604 - protein, 13 aa, Homo sapiens
  CDR3 for beta chain variable domain of TCR clone 351802 (TRBV7-7, TRBJ2-2)
CASSLTSAGELFF

SEQ ID NO: 703605 - protein, 13 aa, Homo sapiens
  CDR3 for alpha chain variable domain of TCR clone 351803 (TRAV13-1, TRAJ11)
CAASIRGYSTLTF

SEQ ID NO: 703606 - protein, 17 aa, Homo sapiens
  CDR3 for beta chain variable domain of TCR clone 351803 (TRBV4-3, TRBJ1-2)
CASSSRLQAGGSVGYTC

SEQ ID NO: 703607 - protein, 20 aa, Homo sapiens
  CDR3 for alpha chain variable domain of TCR clone 351804 (TRAV2, TRAJ24)
GRQMLLFTTVPLVSWGKLQF

SEQ ID NO: 703608 - protein, 17 aa, Homo sapiens
  CDR3 for beta chain variable domain of TCR clone 351804 (TRBV5-1, TRBJ2-1)
CASSTGTSGYSYNEQFF

SEQ ID NO: 703609 - protein, 15 aa, Homo sapiens
  CDR3 for alpha chain variable domain of TCR clone 351805 (TRAV2, TRAJ15)
CAVEDRGQAGTALIF

SEQ ID NO: 703610 - protein, 13 aa, Homo sapiens
  CDR3 for beta chain variable domain of TCR clone 351805 (TRBV12-4, TRBJ2-5)
CASSLGGSRTQFF

SEQ ID NO: 703611 - protein, 12 aa, Homo sapiens
  CDR3 for alpha chain variable domain of TCR clone 351806 (TRAV1-1, TRAJ24)
CAVRGSWGKLQF

SEQ ID NO: 703612 - protein, 12 aa, Homo sapiens
  CDR3 for beta chain variable domain of TCR clone 351806 (TRBV24-1, TRBJ1-1)
CATLYPDTEAFF

SEQ ID NO: 703613 - protein, 14 aa, Homo sapiens
  CDR3 for alpha chain variable domain of TCR clone 351807 (TRAV12-1, TRAJ37)
CVVTGSSNTGKLIF

SEQ ID NO: 703614 - protein, 13 aa, Homo sapiens
  CDR3 for beta chain variable domain of TCR clone 351807 (TRBV19, TRBJ1-5)
CASSIGGEQPQHF

SEQ ID NO: 703615 - protein, 15 aa, Homo sapiens
  CDR3 for alpha chain variable domain of TCR clone 351808 (TRAV23/DV6, TRAJ57)
CAASSTLPQGGSEKL

SEQ ID NO: 703616 - protein, 14 aa, Homo sapiens
  CDR3 for beta chain variable domain of TCR clone 351808 (TRBV25-1, TRBJ1-1)
CASTHLGGNTEAFF

SEQ ID NO: 703617 - protein, 13 aa, Homo sapiens
  CDR3 for alpha chain variable domain of TCR clone 351809 (TRAV35, TRAJ48)
CAGHEFGNEKLTF

SEQ ID NO: 703618 - protein, 14 aa, Homo sapiens
  CDR3 for beta chain variable domain of TCR clone 351809 (TRBV19, TRBJ2-1)
CASPTFVLSGEQFS

SEQ ID NO: 703619 - protein, 13 aa, Homo sapiens
  CDR3 for alpha chain variable domain of TCR clone 351810 (TRAV30, TRAJ24)
CGTVTDSWGNCSL

SEQ ID NO: 703620 - protein, 15 aa, Homo sapiens
  CDR3 for beta chain variable domain of TCR clone 351810 (TRBV25-1, TRBJ1-4)
CASSPGDSTNEKLFF

SEQ ID NO: 703621 - protein, 13 aa, Homo sapiens
  CDR3 for alpha chain variable domain of TCR clone 351811 (TRAV12-2, TRAJ26)
CAVTSNYGQNFVF

SEQ ID NO: 703622 - protein, 12 aa, Homo sapiens
  CDR3 for beta chain variable domain of TCR clone 351811 (TRBV5-5, TRBJ2-5)
CASSYFGETQYF

SEQ ID NO: 703623 - protein, 14 aa, Homo sapiens
  CDR3 for alpha chain variable domain of TCR clone 351812 (TRAV12-2, TRAJ40)
CAVKIPSGTYKYIF

SEQ ID NO: 703624 - protein, 17 aa, Homo sapiens
  CDR3 for beta chain variable domain of TCR clone 351812 (TRBV11-1, TRBJ2-7)
CASSLTGSFGLDYEQYF

SEQ ID NO: 703625 - protein, 12 aa, Homo sapiens
  CDR3 for alpha chain variable domain of TCR clone 351813 (TRAV12-2, TRAJ30)
CAVRNRDDKIIF

SEQ ID NO: 703626 - protein, 15 aa, Homo sapiens
  CDR3 for beta chain variable domain of TCR clone 351813 (TRBV20-1, TRBJ2-1)
CSARVGMAGFNEQFF

SEQ ID NO: 703627 - protein, 13 aa, Homo sapiens
  CDR3 for alpha chain variable domain of TCR clone 351814 (TRAV2, TRAJ40)
CAVVTSGTYKYIF

SEQ ID NO: 703628 - protein, 16 aa, Homo sapiens
  CDR3 for beta chain variable domain of TCR clone 351814 (TRBV7-9, TRBJ1-3)
CASSLGGGGCGGWLFF

SEQ ID NO: 703629 - protein, 12 aa, Homo sapiens
  CDR3 for alpha chain variable domain of TCR clone 351815 (TRAV3, TRAJ43)
CAVRDPNNDMCF

SEQ ID NO: 703630 - protein, 15 aa, Homo sapiens
  CDR3 for beta chain variable domain of TCR clone 351815 (TRBV25-1, TRBJ1-5)
CASSLGTGFDQPQHF

SEQ ID NO: 703631 - protein, 14 aa, Homo sapiens
  CDR3 for alpha chain variable domain of TCR clone 351816 (TRAV25, TRAJ44)
CAVFPTGTASKLTF

SEQ ID NO: 703632 - protein, 14 aa, Homo sapiens
  CDR3 for beta chain variable domain of TCR clone 351816 (TRBV19, TRBJ1-1)
CASTGHRLSTEAFF

SEQ ID NO: 703633 - protein, 18 aa, Homo sapiens
  CDR3 for alpha chain variable domain of TCR clone 351817 (TRAV26-2, TRAJ45)
CILRVDTYSGGGADGLTF

SEQ ID NO: 703634 - protein, 17 aa, Homo sapiens
  CDR3 for beta chain variable domain of TCR clone 351817 (TRBV25-1, TRBJ2-1)
CASSAYGQGRGVYEQFF

SEQ ID NO: 703635 - protein, 17 aa, Homo sapiens
  CDR3 for alpha chain variable domain of TCR clone 351818 (TRAV8-6, TRAJ58)
CAVSAWVGETSGSRLTF

SEQ ID NO: 703636 - protein, 15 aa, Homo sapiens
  CDR3 for beta chain variable domain of TCR clone 351818 (TRBV6-5, TRBJ2-1)
CASSYDAGAGNEQFF

SEQ ID NO: 703637 - protein, 14 aa, Homo sapiens
  CDR3 for alpha chain variable domain of TCR clone 351819 (TRAV13-1, TRAJ29)
CAASSNSGNTPLVF

SEQ ID NO: 703638 - protein, 14 aa, Homo sapiens
  CDR3 for beta chain variable domain of TCR clone 351819 (TRBV18, TRBJ2-5)
CASSPGVSQETQYF

SEQ ID NO: 703639 - protein, 14 aa, Homo sapiens
  CDR3 for alpha chain variable domain of TCR clone 351820 (TRAV38-1, TRAJ40)
CALRPTSGTYKYIL

SEQ ID NO: 703640 - protein, 18 aa, Homo sapiens
  CDR3 for beta chain variable domain of TCR clone 351820 (TRBV4-2, TRBJ2-7)
CASSPGLAGRSLSYEQYF

SEQ ID NO: 703641 - protein, 11 aa, Homo sapiens
  CDR3 for alpha chain variable domain of TCR clone 351821 (TRAV13-1, TRAJ39)
CASHAGNMLTF

SEQ ID NO: 703642 - protein, 14 aa, Homo sapiens
  CDR3 for beta chain variable domain of TCR clone 351821 (TRBV7-2, TRBJ2-7)
CASRSQGAAYEQYF

SEQ ID NO: 703643 - protein, 17 aa, Homo sapiens
  CDR3 for alpha chain variable domain of TCR clone 351822 (TRAV3, TRAJ6)
RAVRDGPRAGGSYIPTF

SEQ ID NO: 703644 - protein, 16 aa, Homo sapiens
  CDR3 for beta chain variable domain of TCR clone 351822 (TRBV4-1, TRBJ1-2)
CASSQDAGQVLYGYTF

SEQ ID NO: 703645 - protein, 13 aa, Homo sapiens
  CDR3 for alpha chain variable domain of TCR clone 351823 (TRAV8-3, TRAJ36)
CAVGATGANNLFF

SEQ ID NO: 703646 - protein, 14 aa, Homo sapiens
  CDR3 for beta chain variable domain of TCR clone 351823 (TRBV13, TRBJ2-5)
CASSLGTAQETQYF

SEQ ID NO: 703647 - protein, 16 aa, Homo sapiens
  CDR3 for alpha chain variable domain of TCR clone 351824 (TRAV3, TRAJ37)
CAVRPHGSGNTGKLIF

SEQ ID NO: 703648 - protein, 20 aa, Homo sapiens
  CDR3 for beta chain variable domain of TCR clone 351824 (TRBV28, TRBJ2-1)
WASTPIGRSPGLAGGNEQFF

SEQ ID NO: 703649 - protein, 17 aa, Homo sapiens
  CDR3 for alpha chain variable domain of TCR clone 351825 (TRAV4, TRAJ13)
CLVGVQGSSGGYQKVNF

SEQ ID NO: 703650 - protein, 13 aa, Homo sapiens
  CDR3 for beta chain variable domain of TCR clone 351825 (TRBV10-3, TRBJ2-7)
CASKLAVNYEQYF

SEQ ID NO: 703651 - protein, 15 aa, Homo sapiens
  CDR3 for alpha chain variable domain of TCR clone 351826 (TRAV12-2, TRAJ53)
CAVNWGGGSNYKLTF

SEQ ID NO: 703652 - protein, 14 aa, Homo sapiens
  CDR3 for beta chain variable domain of TCR clone 351826 (TRBV18, TRBJ2-7)
CASSPRGGAYEQYF

SEQ ID NO: 703653 - protein, 12 aa, Homo sapiens
  CDR3 for alpha chain variable domain of TCR clone 351827 (TRAV12-2, TRAJ31)
CAVNTPDARHMF

SEQ ID NO: 703654 - protein, 15 aa, Homo sapiens
  CDR3 for beta chain variable domain of TCR clone 351827 (TRBV4-2, TRBJ1-1)
CASSQDQGLNTEAFF

SEQ ID NO: 703655 - protein, 14 aa, Homo sapiens
  CDR3 for alpha chain variable domain of TCR clone 351828 (TRAV20, TRAJ10)
CAVRVEGGGNKLTF

SEQ ID NO: 703656 - protein, 18 aa, Homo sapiens
  CDR3 for beta chain variable domain of TCR clone 351828 (TRBV24-1, TRBJ2-1)
CATSDLMFLGRGVREQFF

SEQ ID NO: 703657 - protein, 15 aa, Homo sapiens
  CDR3 for alpha chain variable domain of TCR clone 351829 (TRAV17, TRAJ16)
CATALRFSDGQKLLF

SEQ ID NO: 703658 - protein, 12 aa, Homo sapiens
  CDR3 for beta chain variable domain of TCR clone 351829 (TRBV2, TRBJ2-7)
CASSYPDYEQYF

SEQ ID NO: 703659 - protein, 16 aa, Homo sapiens
  CDR3 for alpha chain variable domain of TCR clone 351830 (TRAV38-1, TRAJ32)
CAFMKGGGGATNKLNF

SEQ ID NO: 703660 - protein, 13 aa, Homo sapiens
  CDR3 for beta chain variable domain of TCR clone 351830 (TRBV20-1, TRBJ2-5)
CSAREAFQETQYF

SEQ ID NO: 703661 - protein, 12 aa, Homo sapiens
  CDR3 for alpha chain variable domain of TCR clone 351831 (TRAV26-1, TRAJ26)
CIVFIYGQNFVF

SEQ ID NO: 703662 - protein, 13 aa, Homo sapiens
  CDR3 for beta chain variable domain of TCR clone 351831 (TRBV28, TRBJ2-5)
CASSFAGGETQYF

SEQ ID NO: 703663 - protein, 14 aa, Homo sapiens
  CDR3 for alpha chain variable domain of TCR clone 351832 (TRAV12-2, TRAJ44)
CAVNPAGTASKLTF

SEQ ID NO: 703664 - protein, 15 aa, Homo sapiens
  CDR3 for beta chain variable domain of TCR clone 351832 (TRBV7-8, TRBJ2-1)
CASSLADSLYNEQFF

SEQ ID NO: 703665 - protein, 14 aa, Homo sapiens
  CDR3 for alpha chain variable domain of TCR clone 351833 (TRAV20, TRAJ22)
CAVALGGSARQLTF

SEQ ID NO: 703666 - protein, 14 aa, Homo sapiens
  CDR3 for beta chain variable domain of TCR clone 351833 (TRBV7-3, TRBJ2-1)
CASSLAGGTNEQFF

SEQ ID NO: 703667 - protein, 13 aa, Homo sapiens
  CDR3 for alpha chain variable domain of TCR clone 351834 (TRAV3, TRAJ21)
CAVREPDFNKFYF

SEQ ID NO: 703668 - protein, 13 aa, Homo sapiens
  CDR3 for beta chain variable domain of TCR clone 351834 (TRBV9, TRBJ2-1)
CASRPAGGNEQFC

SEQ ID NO: 703669 - protein, 16 aa, Homo sapiens
  CDR3 for alpha chain variable domain of TCR clone 351835 (TRAV16, TRAJ57)
CAPYLITQGGSEKLVF

SEQ ID NO: 703670 - protein, 17 aa, Homo sapiens
  CDR3 for beta chain variable domain of TCR clone 351835 (TRBV5-1, TRBJ2-5)
CASSPVALGQNQETQYF

SEQ ID NO: 703671 - protein, 15 aa, Homo sapiens
  CDR3 for alpha chain variable domain of TCR clone 351836 (TRAV17, TRAJ35)
CATAFVIGFVNVLHC

SEQ ID NO: 703672 - protein, 15 aa, Homo sapiens
  CDR3 for beta chain variable domain of TCR clone 351836 (TRBV7-9, TRBJ2-7)
CASSLALAEAYEQYF

SEQ ID NO: 703673 - protein, 15 aa, Homo sapiens
  CDR3 for alpha chain variable domain of TCR clone 351837 (TRAV4, TRAJ36)
CLVGDRQTGANNPFF

SEQ ID NO: 703674 - protein, 17 aa, Homo sapiens
  CDR3 for beta chain variable domain of TCR clone 351837 (TRBV28, TRBJ2-5)
CASSRQGGLAGAETQYF

SEQ ID NO: 703675 - protein, 12 aa, Homo sapiens
  CDR3 for alpha chain variable domain of TCR clone 351838 (TRAV12-3, TRAJ17)
CAMTLKGNKLTF

SEQ ID NO: 703676 - protein, 15 aa, Homo sapiens
  CDR3 for beta chain variable domain of TCR clone 351838 (TRBV20-1, TRBJ2-7)
CSARDRVAGMDEQYF

SEQ ID NO: 703677 - protein, 13 aa, Homo sapiens
  CDR3 for alpha chain variable domain of TCR clone 351839 (TRAV17, TRAJ5)
CATMDTGRRALTF

SEQ ID NO: 703678 - protein, 18 aa, Homo sapiens
  CDR3 for beta chain variable domain of TCR clone 351839 (TRBV7-3, TRBJ2-3)
CASSSTGTYPGSTDTQYF

SEQ ID NO: 703679 - protein, 12 aa, Homo sapiens
  CDR3 for alpha chain variable domain of TCR clone 351840 (TRAV8-3, TRAJ20)
CAVGATDYKLSL

SEQ ID NO: 703680 - protein, 16 aa, Homo sapiens
  CDR3 for beta chain variable domain of TCR clone 351840 (TRBV19, TRBJ2-2)
CASRSPGTGATGELFF

SEQ ID NO: 703681 - protein, 14 aa, Homo sapiens
  CDR3 for alpha chain variable domain of TCR clone 351841 (TRAV17, TRAJ48)
CATEGNFGNEKLTF

SEQ ID NO: 703682 - protein, 12 aa, Homo sapiens
  CDR3 for beta chain variable domain of TCR clone 351841 (TRBV7-8, TRBJ2-7)
CASSLGDREQYF

SEQ ID NO: 703683 - protein, 13 aa, Homo sapiens
  CDR3 for alpha chain variable domain of TCR clone 351842 (TRAV8-6, TRAJ33)
CAVSDGSNYQLIW

SEQ ID NO: 703684 - protein, 13 aa, Homo sapiens
  CDR3 for beta chain variable domain of TCR clone 351842 (TRBV5-7, TRBJ2-3)
CASSLGRTDTQYF

SEQ ID NO: 703685 - protein, 17 aa, Homo sapiens
  CDR3 for alpha chain variable domain of TCR clone 351843 (TRAV8-3, TRAJ34)
CAIPVKLIFGTGTRLQV

SEQ ID NO: 703686 - protein, 15 aa, Homo sapiens
  CDR3 for beta chain variable domain of TCR clone 351843 (TRBV5-7, TRBJ2-1)
CASSRRLAGDNEQFF

SEQ ID NO: 703687 - protein, 14 aa, Homo sapiens
  CDR3 for alpha chain variable domain of TCR clone 351844 (TRAV12-2, TRAJ13)
CAVKKTGGYQKVTF

SEQ ID NO: 703688 - protein, 15 aa, Homo sapiens
  CDR3 for beta chain variable domain of TCR clone 351844 (TRBV27, TRBJ2-3)
CASSNGGWSSNEQFF

SEQ ID NO: 703689 - protein, 15 aa, Homo sapiens
  CDR3 for alpha chain variable domain of TCR clone 351845 (TRAV3, TRAJ22)
CAVRDRGGSARQLTF

SEQ ID NO: 703690 - protein, 14 aa, Homo sapiens
  CDR3 for beta chain variable domain of TCR clone 351845 (TRBV28, TRBJ1-1)
CASSSEQGYTEAFF

SEQ ID NO: 703691 - protein, 13 aa, Homo sapiens
  CDR3 for alpha chain variable domain of TCR clone 351846 (TRAV17, TRAJ9)
CATDYTGGFKIIF

SEQ ID NO: 703692 - protein, 14 aa, Homo sapiens
  CDR3 for beta chain variable domain of TCR clone 351846 (TRBV19, TRBJ2-5)
CASSMTGQQETQYF

SEQ ID NO: 703693 - protein, 14 aa, Homo sapiens
  CDR3 for alpha chain variable domain of TCR clone 351847 (TRAV13-1, TRAJ13)
CAASRVGRYQKVTF

SEQ ID NO: 703694 - protein, 14 aa, Homo sapiens
  CDR3 for beta chain variable domain of TCR clone 351847 (TRBV5-1, TRBJ2-7)
CASSATGGYDEQYF

SEQ ID NO: 703695 - protein, 13 aa, Homo sapiens
  CDR3 for alpha chain variable domain of TCR clone 351848 (TRAV3, TRAJ21)
CAVREPDFNKFYF

SEQ ID NO: 703696 - protein, 12 aa, Homo sapiens
  CDR3 for beta chain variable domain of TCR clone 351848 (TRBV9, TRBJ2-2)
CASSARTGELFF

SEQ ID NO: 703697 - protein, 14 aa, Homo sapiens
  CDR3 for alpha chain variable domain of TCR clone 351849 (TRAV1-2, TRAJ8)
CAVREDTGFQKLVF

SEQ ID NO: 703698 - protein, 14 aa, Homo sapiens
  CDR3 for beta chain variable domain of TCR clone 351849 (TRBV12-5, TRBJ2-7)
CASGQTGSSYEQYF

SEQ ID NO: 703699 - protein, 11 aa, Homo sapiens
  CDR3 for alpha chain variable domain of TCR clone 351850 (TRAV3, TRAJ13)
CAVTSYQKVTF

SEQ ID NO: 703700 - protein, 17 aa, Homo sapiens
  CDR3 for beta chain variable domain of TCR clone 351850 (TRBV4-2, TRBJ1-1)
CASTQFGGGSGNTEAFF

SEQ ID NO: 703701 - protein, 15 aa, Homo sapiens
  CDR3 for alpha chain variable domain of TCR clone 351851 (TRAV26-1, TRAJ44)
CIARVPFGTASKLTF

SEQ ID NO: 703702 - protein, 17 aa, Homo sapiens
  CDR3 for beta chain variable domain of TCR clone 351851 (TRBV24-1, TRBJ2-4)
CATSDAEARGVRNKQYF

SEQ ID NO: 703703 - protein, 12 aa, Homo sapiens
  CDR3 for alpha chain variable domain of TCR clone 351852 (TRAV8-3, TRAJ26)
CAGDNYGQNFVF

SEQ ID NO: 703704 - protein, 14 aa, Homo sapiens
  CDR3 for beta chain variable domain of TCR clone 351852 (TRBV6-1, TRBJ1-3)
CASVQGGGGNTIDF

SEQ ID NO: 703705 - protein, 13 aa, Homo sapiens
  CDR3 for alpha chain variable domain of TCR clone 351853 (TRAV27, TRAJ3)
ASLRGSSASKIIF

SEQ ID NO: 703706 - protein, 15 aa, Homo sapiens
  CDR3 for beta chain variable domain of TCR clone 351853 (TRBV28, TRBJ1-3)
YASSMGWASGNTIYF

SEQ ID NO: 703707 - protein, 14 aa, Homo sapiens
  CDR3 for alpha chain variable domain of TCR clone 351854 (TRAV12-3, TRAJ13)
CAIRRSGGYQKVTF

SEQ ID NO: 703708 - protein, 12 aa, Homo sapiens
  CDR3 for beta chain variable domain of TCR clone 351854 (TRBV28, TRBJ1-4)
CASSRWEGQLFF

SEQ ID NO: 703709 - protein, 18 aa, Homo sapiens
  CDR3 for alpha chain variable domain of TCR clone 351855 (TRAV21, TRAJ52)
CAVRPSPAGGTSYGKLTL

SEQ ID NO: 703710 - protein, 19 aa, Homo sapiens
  CDR3 for beta chain variable domain of TCR clone 351855 (TRBV20-1, TRBJ2-1)
CSARGETSGNSPQIDEQFF

SEQ ID NO: 703711 - protein, 17 aa, Homo sapiens
  CDR3 for alpha chain variable domain of TCR clone 351856 (TRAV3, TRAJ42)
CAVRDRDYGGSQGNLIF

SEQ ID NO: 703712 - protein, 15 aa, Homo sapiens
  CDR3 for beta chain variable domain of TCR clone 351856 (TRBV27, TRBJ2-5)
CASSLYPRGGETQYF

SEQ ID NO: 703713 - protein, 13 aa, Homo sapiens
  CDR3 for alpha chain variable domain of TCR clone 351857 (TRAV13-1, TRAJ39)
CAASIWAGDMLTI

SEQ ID NO: 703714 - protein, 15 aa, Homo sapiens
  CDR3 for beta chain variable domain of TCR clone 351857 (TRBV7-9, TRBJ1-1)
CASSLLEQGGTEAFF

SEQ ID NO: 703715 - protein, 13 aa, Homo sapiens
  CDR3 for alpha chain variable domain of TCR clone 351858 (TRAV21, TRAJ27)
CAARPGNAGKSTF

SEQ ID NO: 703716 - protein, 18 aa, Homo sapiens
  CDR3 for beta chain variable domain of TCR clone 351858 (TRBV12-4, TRBJ2-2)
CASSLVAGTRGRTGELLF

SEQ ID NO: 703717 - protein, 11 aa, Homo sapiens
  CDR3 for alpha chain variable domain of TCR clone 351859 (TRAV13-1, TRAJ23)
CAASSRGKLIF

SEQ ID NO: 703718 - protein, 18 aa, Homo sapiens
  CDR3 for beta chain variable domain of TCR clone 351859 (TRBV25-1, TRBJ1-2)
CASSGLQNGQGLIFGYTF

SEQ ID NO: 703719 - protein, 12 aa, Homo sapiens
  CDR3 for alpha chain variable domain of TCR clone 351860 (TRAV12-3, TRAJ31)
CAMGVPNARLMF

SEQ ID NO: 703720 - protein, 12 aa, Homo sapiens
  CDR3 for beta chain variable domain of TCR clone 351860 (TRBV11-2, TRBJ2-1)
CASSVQREGQFF

SEQ ID NO: 703721 - protein, 15 aa, Homo sapiens
  CDR3 for alpha chain variable domain of TCR clone 351861 (TRAV12-1, TRAJ41)
CVVNGASNSGYALNF

SEQ ID NO: 703722 - protein, 15 aa, Homo sapiens
  CDR3 for beta chain variable domain of TCR clone 351861 (TRBV7-2, TRBJ1-5)
CASSSTGVDNHPQHF

SEQ ID NO: 703723 - protein, 14 aa, Homo sapiens
  CDR3 for alpha chain variable domain of TCR clone 351862 (TRAV1-2, TRAJ16)
CAVNRFSDGQKLLF

SEQ ID NO: 703724 - protein, 11 aa, Homo sapiens
  CDR3 for beta chain variable domain of TCR clone 351862 (TRBV28, TRBJ2-3)
CASSSDPPQYF

SEQ ID NO: 703725 - protein, 21 aa, Homo sapiens
  CDR3 for alpha chain variable domain of TCR clone 351863 (TRAV1-1, TRAJ6)
CLLLLRCERLERTGGSFIPTF

SEQ ID NO: 703726 - protein, 13 aa, Homo sapiens
  CDR3 for beta chain variable domain of TCR clone 351863 (TRBV10-2, TRBJ2-7)
CASGASGGYEQYF

SEQ ID NO: 703727 - protein, 15 aa, Homo sapiens
  CDR3 for alpha chain variable domain of TCR clone 351864 (TRAV2, TRAJ22)
CAVPSRGGSARQLTF

SEQ ID NO: 703728 - protein, 15 aa, Homo sapiens
  CDR3 for beta chain variable domain of TCR clone 351864 (TRBV2, TRBJ2-1)
CASSELAGSYNEQFF

SEQ ID NO: 703729 - protein, 15 aa, Homo sapiens
  CDR3 for alpha chain variable domain of TCR clone 351865 (TRAV26-1, TRAJ44)
CIVRANTGTASKLTF

SEQ ID NO: 703730 - protein, 16 aa, Homo sapiens
  CDR3 for beta chain variable domain of TCR clone 351865 (TRBV7-7, TRBJ2-1)
CASSLASGTSYNAQFF

SEQ ID NO: 703731 - protein, 15 aa, Homo sapiens
  CDR3 for alpha chain variable domain of TCR clone 351866 (TRAV3, TRAJ3)
CALRDMSSSASKIIF

SEQ ID NO: 703732 - protein, 14 aa, Homo sapiens
  CDR3 for beta chain variable domain of TCR clone 351866 (TRBV19, TRBJ2-1)
CASPTFVLSGEQFF

SEQ ID NO: 703733 - protein, 16 aa, Homo sapiens
  CDR3 for alpha chain variable domain of TCR clone 351867 (TRAV30, TRAJ24)
CGTEIVDADSWGEFQF

SEQ ID NO: 703734 - protein, 12 aa, Homo sapiens
  CDR3 for beta chain variable domain of TCR clone 351867 (TRBV27, TRBJ2-5)
CASSPTGETQYF

SEQ ID NO: 703735 - protein, 11 aa, Homo sapiens
  CDR3 for alpha chain variable domain of TCR clone 351868 (TRAV12-3, TRAJ27)
CAMANAGKSPF

SEQ ID NO: 703736 - protein, 14 aa, Homo sapiens
  CDR3 for beta chain variable domain of TCR clone 351868 (TRBV12-5, TRBJ2-5)
CASGSRTHQETQYF

SEQ ID NO: 703737 - protein, 12 aa, Homo sapiens
  CDR3 for alpha chain variable domain of TCR clone 351869 (TRAV16, TRAJ9)
CALSSGGFKNIF

SEQ ID NO: 703738 - protein, 14 aa, Homo sapiens
  CDR3 for beta chain variable domain of TCR clone 351869 (TRBV7-9, TRBJ2-1)
CASSLAGPYNEQFF

SEQ ID NO: 703739 - protein, 17 aa, Homo sapiens
  CDR3 for alpha chain variable domain of TCR clone 351870 (TRAV36/DV7, TRAJ52)
CSVAQRAGGTSYGKLTC

SEQ ID NO: 703740 - protein, 15 aa, Homo sapiens
  CDR3 for beta chain variable domain of TCR clone 351870 (TRBV6-5, TRBJ1-2)
CASSYSQAFNYGYTF

SEQ ID NO: 703741 - protein, 11 aa, Homo sapiens
  CDR3 for alpha chain variable domain of TCR clone 351871 (TRAV16, TRAJ33)
CALHINYQLIW

SEQ ID NO: 703742 - protein, 15 aa, Homo sapiens
  CDR3 for beta chain variable domain of TCR clone 351871 (TRBV4-1, TRBJ2-7)
CASSQQGQGFDEQYF

SEQ ID NO: 703743 - protein, 13 aa, Homo sapiens
  CDR3 for alpha chain variable domain of TCR clone 351872 (TRAV27, TRAJ6)
CAGGTRGSYIPTF

SEQ ID NO: 703744 - protein, 15 aa, Homo sapiens
  CDR3 for beta chain variable domain of TCR clone 351872 (TRBV27, TRBJ1-4)
CASSPRHATNEKLFF

SEQ ID NO: 703745 - protein, 12 aa, Homo sapiens
  CDR3 for alpha chain variable domain of TCR clone 351873 (TRAV17, TRAJ39)
CATGAAGNMLTF

SEQ ID NO: 703746 - protein, 14 aa, Homo sapiens
  CDR3 for beta chain variable domain of TCR clone 351873 (TRBV7-9, TRBJ1-2)
CASSRQGANYGSTF

SEQ ID NO: 703747 - protein, 10 aa, Homo sapiens
  CDR3 for alpha chain variable domain of TCR clone 351874 (TRAV30, TRAJ48)
CGIGNEKLTF

SEQ ID NO: 703748 - protein, 15 aa, Homo sapiens
  CDR3 for beta chain variable domain of TCR clone 351874 (TRBV28, TRBJ2-5)
CASSPPWSDQETQYF

SEQ ID NO: 703749 - protein, 12 aa, Homo sapiens
  CDR3 for alpha chain variable domain of TCR clone 351875 (TRAV3, TRAJ31)
CAVRDGNARLMF

SEQ ID NO: 703750 - protein, 18 aa, Homo sapiens
  CDR3 for beta chain variable domain of TCR clone 351875 (TRBV7-2, TRBJ2-3)
RASSLKSEGSGITDTQYF

SEQ ID NO: 703751 - protein, 15 aa, Homo sapiens
  CDR3 for alpha chain variable domain of TCR clone 351876 (TRAV8-6, TRAJ6)
CAGSGESGGSYIPTF

SEQ ID NO: 703752 - protein, 14 aa, Homo sapiens
  CDR3 for beta chain variable domain of TCR clone 351876 (TRBV9, TRBJ2-4)
CASSPSGTSGFQYF

SEQ ID NO: 703753 - protein, 12 aa, Homo sapiens
  CDR3 for alpha chain variable domain of TCR clone 351877 (TRAV13-2, TRAJ23)
CAERHRGGKLIL

SEQ ID NO: 703754 - protein, 12 aa, Homo sapiens
  CDR3 for beta chain variable domain of TCR clone 351877 (TRBV14, TRBJ2-5)
CASSQLKETQYF

SEQ ID NO: 703755 - protein, 17 aa, Homo sapiens
  CDR3 for alpha chain variable domain of TCR clone 351878 (TRAV3, TRAJ42)
CAVRDRDYGGSKGNLIF

SEQ ID NO: 703756 - protein, 15 aa, Homo sapiens
  CDR3 for beta chain variable domain of TCR clone 351878 (TRBV4-1, TRBJ1-4)
CASSDTGGTNENLFF

SEQ ID NO: 703757 - protein, 18 aa, Homo sapiens
  CDR3 for alpha chain variable domain of TCR clone 351879 (TRAV3, TRAJ17)
CAVRARRGGRSCRQQANF

SEQ ID NO: 703758 - protein, 16 aa, Homo sapiens
  CDR3 for beta chain variable domain of TCR clone 351879 (TRBV12-4, TRBJ1-5)
CASSRPVGGSNQPQHF

SEQ ID NO: 703759 - protein, 16 aa, Homo sapiens
  CDR3 for alpha chain variable domain of TCR clone 351880 (TRAV13-1, TRAJ10)
CAAGYILTGGGNKLTF

SEQ ID NO: 703760 - protein, 15 aa, Homo sapiens
  CDR3 for beta chain variable domain of TCR clone 351880 (TRBV12-4, TRBJ2-7)
CASSQTGAMSYEQYF

SEQ ID NO: 703761 - protein, 15 aa, Homo sapiens
  CDR3 for alpha chain variable domain of TCR clone 351881 (TRAV8-6, TRAJ45)
CAVSEQGGGADGLAV

SEQ ID NO: 703762 - protein, 14 aa, Homo sapiens
  CDR3 for beta chain variable domain of TCR clone 351881 (TRBV28, TRBJ2-5)
CASRGSSFWETQYF

SEQ ID NO: 703763 - protein, 13 aa, Homo sapiens
  CDR3 for alpha chain variable domain of TCR clone 351882 (TRAV13-1, TRAJ39)
CSKYSNAGNMLTF

SEQ ID NO: 703764 - protein, 13 aa, Homo sapiens
  CDR3 for beta chain variable domain of TCR clone 351882 (TRBV6-1, TRBJ1-1)
CASSRQGNTEAFF

SEQ ID NO: 703765 - protein, 14 aa, Homo sapiens
  CDR3 for alpha chain variable domain of TCR clone 351883 (TRAV12-3, TRAJ10)
SHLPLTGGGNKLTF

SEQ ID NO: 703766 - protein, 15 aa, Homo sapiens
  CDR3 for beta chain variable domain of TCR clone 351883 (TRBV11-2, TRBJ1-3)
CASSLEGTVGNTIYF

SEQ ID NO: 703767 - protein, 17 aa, Homo sapiens
  CDR3 for alpha chain variable domain of TCR clone 351884 (TRAV1-1, TRAJ32)
CAVRVEELWWCYKQAHL

SEQ ID NO: 703768 - protein, 16 aa, Homo sapiens
  CDR3 for beta chain variable domain of TCR clone 351884 (TRBV5-4, TRBJ2-3)
CASQQPGAGGADTQYF

SEQ ID NO: 703769 - protein, 21 aa, Homo sapiens
  CDR3 for alpha chain variable domain of TCR clone 351885 (TRAV9-2, )
CALIQIGDIQNPDPAVYQLRN

SEQ ID NO: 703770 - protein, 16 aa, Homo sapiens
  CDR3 for beta chain variable domain of TCR clone 351885 (TRBV19, TRBJ2-1)
CASSKAGPSSYNEQFF

SEQ ID NO: 703771 - protein, 15 aa, Homo sapiens
  CDR3 for alpha chain variable domain of TCR clone 351886 (TRAV1-2, TRAJ30)
CAVRPHGNRDDKIIF

SEQ ID NO: 703772 - protein, 16 aa, Homo sapiens
  CDR3 for beta chain variable domain of TCR clone 351886 (TRBV24-1, TRBJ2-3)
CATSDSRQDLTDTQYF

SEQ ID NO: 703773 - protein, 17 aa, Homo sapiens
  CDR3 for alpha chain variable domain of TCR clone 351887 (TRAV26-1, TRAJ37)
CIVRVITVSSNTGKLIF

SEQ ID NO: 703774 - protein, 15 aa, Homo sapiens
  CDR3 for beta chain variable domain of TCR clone 351887 (TRBV10-1, TRBJ2-3)
CASSATSGGVDTQYF

SEQ ID NO: 703775 - protein, 22 aa, Homo sapiens
  CDR3 for alpha chain variable domain of TCR clone 351888 (TRAV3, TRAJ38)
CAVRDCLNAGNNHIQNPDPAVY

SEQ ID NO: 703776 - protein, 15 aa, Homo sapiens
  CDR3 for beta chain variable domain of TCR clone 351888 (TRBV7-9, TRBJ1-5)
CASSLAGGGRQPQHF

SEQ ID NO: 703777 - protein, 14 aa, Homo sapiens
  CDR3 for alpha chain variable domain of TCR clone 351889 (TRAV29/DV5, TRAJ45)
CAASFRGGADGLTF

SEQ ID NO: 703778 - protein, 10 aa, Homo sapiens
  CDR3 for beta chain variable domain of TCR clone 351889 (TRBV11-2, TRBJ2-2)
CKQLTRELFF

SEQ ID NO: 703779 - protein, 14 aa, Homo sapiens
  CDR3 for alpha chain variable domain of TCR clone 351890 (TRAV4, TRAJ17)
CLVGDMAAGNKLTF

SEQ ID NO: 703780 - protein, 15 aa, Homo sapiens
  CDR3 for beta chain variable domain of TCR clone 351890 (TRBV6-3, TRBJ2-7)
CASSSPGTVFYEQYF

SEQ ID NO: 703781 - protein, 13 aa, Homo sapiens
  CDR3 for alpha chain variable domain of TCR clone 351891 (TRAV21, TRAJ20)
CAVGLRVDYKLSF

SEQ ID NO: 703782 - protein, 21 aa, Homo sapiens
  CDR3 for beta chain variable domain of TCR clone 351891 (TRBV7-3, TRBJ2-1)
GGTQPCISVPAAYGLAGAQFF

SEQ ID NO: 703783 - protein, 13 aa, Homo sapiens
  CDR3 for alpha chain variable domain of TCR clone 351892 (TRAV3, TRAJ20)
FAVRPLNDYKLSF

SEQ ID NO: 703784 - protein, 12 aa, Homo sapiens
  CDR3 for beta chain variable domain of TCR clone 351892 (TRBV6-1, TRBJ2-1)
CATYGLNNEQFF

SEQ ID NO: 703785 - protein, 14 aa, Homo sapiens
  CDR3 for alpha chain variable domain of TCR clone 351893 (TRAV26-1, TRAJ11)
CIVPLYSGYSTLTF

SEQ ID NO: 703786 - protein, 11 aa, Homo sapiens
  CDR3 for beta chain variable domain of TCR clone 351893 (TRBV12-4, TRBJ2-3)
CASTATDTQYF

SEQ ID NO: 703787 - protein, 14 aa, Homo sapiens
  CDR3 for alpha chain variable domain of TCR clone 351894 (TRAV17, TRAJ15)
CATTTNQAGTALIF

SEQ ID NO: 703788 - protein, 16 aa, Homo sapiens
  CDR3 for beta chain variable domain of TCR clone 351894 (TRBV4-1, TRBJ2-7)
CARSRGDILNSYEQYF

SEQ ID NO: 703789 - protein, 16 aa, Homo sapiens
  CDR3 for alpha chain variable domain of TCR clone 351895 (TRAV12-2, TRAJ10)
CAVNRVLTGGGNKLTF

SEQ ID NO: 703790 - protein, 16 aa, Homo sapiens
  CDR3 for beta chain variable domain of TCR clone 351895 (TRBV27, TRBJ2-2)
CASSFRGLVRTGELFF

SEQ ID NO: 703791 - protein, 12 aa, Homo sapiens
  CDR3 for alpha chain variable domain of TCR clone 351896 (TRAV21, TRAJ11)
CAATSGYSTLTF

SEQ ID NO: 703792 - protein, 11 aa, Homo sapiens
  CDR3 for beta chain variable domain of TCR clone 351896 (TRBV7-8, TRBJ2-7)
CASSLSIEQYF

SEQ ID NO: 703793 - protein, 14 aa, Homo sapiens
  CDR3 for alpha chain variable domain of TCR clone 351897 (TRAV3, TRAJ33)
CAVRDMDSNYQLIW

SEQ ID NO: 703794 - protein, 19 aa, Homo sapiens
  CDR3 for beta chain variable domain of TCR clone 351897 (TRBV7-3, TRBJ1-2)
CASSLPQGNDGELWPHLRF

SEQ ID NO: 703795 - protein, 11 aa, Homo sapiens
  CDR3 for alpha chain variable domain of TCR clone 351898 (TRAV1-2, TRAJ20)
CAVANDYKLSF

SEQ ID NO: 703796 - protein, 15 aa, Homo sapiens
  CDR3 for beta chain variable domain of TCR clone 351898 (TRBV6-3, TRBJ2-2)
CASSFLATLTGELFF

SEQ ID NO: 703797 - protein, 12 aa, Homo sapiens
  CDR3 for alpha chain variable domain of TCR clone 351899 (TRAV23/DV6, TRAJ33)
CAAEDSNYQLIW

SEQ ID NO: 703798 - protein, 17 aa, Homo sapiens
  CDR3 for beta chain variable domain of TCR clone 351899 (TRBV20-1, TRBJ2-1)
CSARDPLAGVWDNEQFF

SEQ ID NO: 703799 - protein, 18 aa, Homo sapiens
  CDR3 for alpha chain variable domain of TCR clone 351900 (TRAV21, TRAJ52)
CAVRPSPAGGTSYGKLTS

SEQ ID NO: 703800 - protein, 14 aa, Homo sapiens
  CDR3 for beta chain variable domain of TCR clone 351900 (TRBV4-2, TRBJ2-1)
CASGLDRAYNEQFF

SEQ ID NO: 703801 - protein, 13 aa, Homo sapiens
  CDR3 for alpha chain variable domain of TCR clone 351901 (TRAV2, TRAJ40)
RAVVTSGTYKYIF

SEQ ID NO: 703802 - protein, 19 aa, Homo sapiens
  CDR3 for beta chain variable domain of TCR clone 351901 (TRBV19, TRBJ2-6)
CASTPTWGRAASGANVLAF

SEQ ID NO: 703803 - protein, 14 aa, Homo sapiens
  CDR3 for alpha chain variable domain of TCR clone 351902 (TRAV38-1, TRAJ45)
CAYYSGGGADRLTF

SEQ ID NO: 703804 - protein, 20 aa, Homo sapiens
  CDR3 for beta chain variable domain of TCR clone 351902 (TRBV28, TRBJ2-1)
CASTPIGRSPGLAGGNEHFF

SEQ ID NO: 703805 - protein, 12 aa, Homo sapiens
  CDR3 for alpha chain variable domain of TCR clone 351903 (TRAV12-3, TRAJ17)
CAMTLTGNQLTF

SEQ ID NO: 703806 - protein, 15 aa, Homo sapiens
  CDR3 for beta chain variable domain of TCR clone 351903 (TRBV20-1, TRBJ2-7)
CSARDRVSGMDERYF

SEQ ID NO: 703807 - protein, 12 aa, Homo sapiens
  CDR3 for alpha chain variable domain of TCR clone 351904 (TRAV35, TRAJ12)
CAEMDSSYKLIF

SEQ ID NO: 703808 - protein, 14 aa, Homo sapiens
  CDR3 for beta chain variable domain of TCR clone 351904 (TRBV28, TRBJ2-5)
CASSLYRGTETQYF

SEQ ID NO: 703809 - protein, 10 aa, Homo sapiens
  CDR3 for alpha chain variable domain of TCR clone 351905 (TRAV23/DV6, TRAJ57)
CAASSTLSQG

SEQ ID NO: 703810 - protein, 18 aa, Homo sapiens
  CDR3 for beta chain variable domain of TCR clone 351905 (TRBV7-9, TRBJ2-7)
CASSLTTSGSRTWYEQYF

SEQ ID NO: 703811 - protein, 15 aa, Homo sapiens
  CDR3 for alpha chain variable domain of TCR clone 351906 (TRAV8-3, TRAJ6)
CAVGPLGGGSYIPTF

SEQ ID NO: 703812 - protein, 14 aa, Homo sapiens
  CDR3 for beta chain variable domain of TCR clone 351906 (TRBV19, TRBJ2-2)
CASSTGHGAGELFF

SEQ ID NO: 703813 - protein, 22 aa, Homo sapiens
  CDR3 for alpha chain variable domain of TCR clone 351907 (TRAV8-6, TRAJ6)
CAVTLGEEATYLHLEEGPALWF

SEQ ID NO: 703814 - protein, 15 aa, Homo sapiens
  CDR3 for beta chain variable domain of TCR clone 351907 (TRBV7-2, TRBJ1-1)
CASSPQGGANTEAFF

SEQ ID NO: 703815 - protein, 11 aa, Homo sapiens
  CDR3 for alpha chain variable domain of TCR clone 351908 (TRAV4, TRAJ31)
CLVGLNARLMF

SEQ ID NO: 703816 - protein, 16 aa, Homo sapiens
  CDR3 for beta chain variable domain of TCR clone 351908 (TRBV15, TRBJ2-6)
CATSVNGGFLASVLTF

SEQ ID NO: 703817 - protein, 12 aa, Homo sapiens
  CDR3 for alpha chain variable domain of TCR clone 351909 (TRAV1-2, TRAJ9)
CAGYTGGFKTIF

SEQ ID NO: 703818 - protein, 22 aa, Homo sapiens
  CDR3 for beta chain variable domain of TCR clone 351909 (TRBV11-2, TRBJ2-1)
LRTRPCISVPAALRQSLNEQFF

SEQ ID NO: 703819 - protein, 16 aa, Homo sapiens
  CDR3 for alpha chain variable domain of TCR clone 351910 (TRAV3, TRAJ23)
CALKIGIYNQGGKLIF

SEQ ID NO: 703820 - protein, 17 aa, Homo sapiens
  CDR3 for beta chain variable domain of TCR clone 351910 (TRBV10-3, TRBJ2-6)
CAISESTAPSGANVLTF

SEQ ID NO: 703821 - protein, 14 aa, Homo sapiens
  CDR3 for alpha chain variable domain of TCR clone 351911 (TRAV12-2, TRAJ40)
CAVKIPSGTSKYIF

SEQ ID NO: 703822 - protein, 15 aa, Homo sapiens
  CDR3 for beta chain variable domain of TCR clone 351911 (TRBV9, TRBJ1-6)
CASSVAGTGDSPLHF

SEQ ID NO: 703823 - protein, 16 aa, Homo sapiens
  CDR3 for alpha chain variable domain of TCR clone 351912 (TRAV30, TRAJ24)
CGTEIADADSWGKFQF

SEQ ID NO: 703824 - protein, 15 aa, Homo sapiens
  CDR3 for beta chain variable domain of TCR clone 351912 (TRBV15, TRBJ1-5)
CATSRDPVSNQPQHF

SEQ ID NO: 703825 - protein, 15 aa, Homo sapiens
  CDR3 for alpha chain variable domain of TCR clone 351913 (TRAV4, TRAJ39)
CLVGPNNNAGNMLTF

SEQ ID NO: 703826 - protein, 13 aa, Homo sapiens
  CDR3 for beta chain variable domain of TCR clone 351913 (TRBV11-3, TRBJ2-5)
CASSSTGEETQYS

SEQ ID NO: 703827 - protein, 17 aa, Homo sapiens
  CDR3 for alpha chain variable domain of TCR clone 351914 (TRAV4, TRAJ13)
CLVGVQGSSGGYQKVTF

SEQ ID NO: 703828 - protein, 16 aa, Homo sapiens
  CDR3 for beta chain variable domain of TCR clone 351914 (TRBV10-3, TRBJ2-1)
CAISGVGDGGGGEQFF

SEQ ID NO: 703829 - protein, 17 aa, Homo sapiens
  CDR3 for alpha chain variable domain of TCR clone 351915 (TRAV12-1, TRAJ13)
CVVNKRGEFWGLPESYL

SEQ ID NO: 703830 - protein, 17 aa, Homo sapiens
  CDR3 for beta chain variable domain of TCR clone 351915 (TRBV28, TRBJ2-5)
CASSTPEGAALQETQYF

SEQ ID NO: 703831 - protein, 14 aa, Homo sapiens
  CDR3 for alpha chain variable domain of TCR clone 351916 (TRAV23/DV6, TRAJ49)
CAASKSYVGNQFYF

SEQ ID NO: 703832 - protein, 15 aa, Homo sapiens
  CDR3 for beta chain variable domain of TCR clone 351916 (TRBV20-1, TRBJ2-7)
CSARDRVSGMDEQYF

SEQ ID NO: 703833 - protein, 13 aa, Homo sapiens
  CDR3 for alpha chain variable domain of TCR clone 351917 (TRAV17, TRAJ35)
CATDRPGFGNVLH

SEQ ID NO: 703834 - protein, 14 aa, Homo sapiens
  CDR3 for beta chain variable domain of TCR clone 351917 (TRBV7-6, TRBJ2-7)
CASSFRQGADEQYF

SEQ ID NO: 703835 - protein, 14 aa, Homo sapiens
  CDR3 for alpha chain variable domain of TCR clone 351918 (TRAV12-2, TRAJ40)
CAVKIPSGTYKYMF

SEQ ID NO: 703836 - protein, 14 aa, Homo sapiens
  CDR3 for beta chain variable domain of TCR clone 351918 (TRBV7-8, TRBJ2-7)
CASSPRDRVYEQYF

SEQ ID NO: 703837 - protein, 17 aa, Homo sapiens
  CDR3 for alpha chain variable domain of TCR clone 351919 (TRAV8-6, TRAJ8)
CAVKEGIENTGFHNIVF

SEQ ID NO: 703838 - protein, 12 aa, Homo sapiens
  CDR3 for beta chain variable domain of TCR clone 351919 (TRBV19, TRBJ1-4)
CASKDWPGGLFF

SEQ ID NO: 703839 - protein, 14 aa, Homo sapiens
  CDR3 for alpha chain variable domain of TCR clone 351920 (TRAV1-2, TRAJ8)
CAVREDTGFQKLVF

SEQ ID NO: 703840 - protein, 12 aa, Homo sapiens
  CDR3 for beta chain variable domain of TCR clone 351920 (TRBV11-2, TRBJ2-5)
CASSLGLETQYF

SEQ ID NO: 703841 - protein, 15 aa, Homo sapiens
  CDR3 for alpha chain variable domain of TCR clone 351921 (TRAV3, TRAJ5)
CAVRDRKTGRRALTF

SEQ ID NO: 703842 - protein, 12 aa, Homo sapiens
  CDR3 for beta chain variable domain of TCR clone 351921 (TRBV19, TRBJ2-3)
CASSLGGDTQYF

SEQ ID NO: 703843 - protein, 17 aa, Homo sapiens
  CDR3 for alpha chain variable domain of TCR clone 351922 (TRAV3, TRAJ6)
CAVRDGPRAGGSYIPTF

SEQ ID NO: 703844 - protein, 13 aa, Homo sapiens
  CDR3 for beta chain variable domain of TCR clone 351922 (TRBV3-1, TRBJ1-5)
CASSQFGDQPQHF

SEQ ID NO: 703845 - protein, 14 aa, Homo sapiens
  CDR3 for alpha chain variable domain of TCR clone 351923 (TRAV2, TRAJ9)
CAVEDRSGGFQTIF

SEQ ID NO: 703846 - protein, 14 aa, Homo sapiens
  CDR3 for beta chain variable domain of TCR clone 351923 (TRBV27, TRBJ2-2)
CASRPGVNTGELFF

SEQ ID NO: 703847 - protein, 10 aa, Homo sapiens
  CDR3 for alpha chain variable domain of TCR clone 351924 (TRAV23/DV6, TRAJ57)
CAASSTLSQG

SEQ ID NO: 703848 - protein, 14 aa, Homo sapiens
  CDR3 for beta chain variable domain of TCR clone 351924 (TRBV7-9, TRBJ2-1)
CASRPTGLRNEQFF

SEQ ID NO: 703849 - protein, 11 aa, Homo sapiens
  CDR3 for alpha chain variable domain of TCR clone 351925 (TRAV8-4, TRAJ34)
CAVSWTDKLIF

SEQ ID NO: 703850 - protein, 18 aa, Homo sapiens
  CDR3 for beta chain variable domain of TCR clone 351925 (TRBV12-4, TRBJ2-1)
CASSSRRGRQGTYNEQFF

SEQ ID NO: 703851 - protein, 14 aa, Homo sapiens
  CDR3 for alpha chain variable domain of TCR clone 351926 (TRAV17, TRAJ54)
CATDAHQGAQKLVF

SEQ ID NO: 703852 - protein, 14 aa, Homo sapiens
  CDR3 for beta chain variable domain of TCR clone 351926 (TRBV25-1, TRBJ1-1)
CASTHLGGNTEAFF

SEQ ID NO: 703853 - protein, 15 aa, Homo sapiens
  CDR3 for alpha chain variable domain of TCR clone 351927 (TRAV17, TRAJ42)
CATDHYGGSQGNLIF

SEQ ID NO: 703854 - protein, 15 aa, Homo sapiens
  CDR3 for beta chain variable domain of TCR clone 351927 (TRBV5-1, TRBJ2-2)
CASSSQGGNTGELFS

SEQ ID NO: 703855 - protein, 15 aa, Homo sapiens
  CDR3 for alpha chain variable domain of TCR clone 351928 (TRAV12-3, TRAJ6)
CATSATTGGSYIPTF

SEQ ID NO: 703856 - protein, 16 aa, Homo sapiens
  CDR3 for beta chain variable domain of TCR clone 351928 (TRBV20-1, TRBJ1-2)
CSASMGQGVADYGYTF

SEQ ID NO: 703857 - protein, 12 aa, Homo sapiens
  CDR3 for alpha chain variable domain of TCR clone 351929 (TRAV30, TRAJ43)
CGTEERGNDMRF

SEQ ID NO: 703858 - protein, 16 aa, Homo sapiens
  CDR3 for beta chain variable domain of TCR clone 351929 (TRBV4-2, TRBJ2-3)
CASSQELAGDTDTQYF

SEQ ID NO: 703859 - protein, 12 aa, Homo sapiens
  CDR3 for alpha chain variable domain of TCR clone 351930 (TRAV20, TRAJ56)
CAVTGANSKLPL

SEQ ID NO: 703860 - protein, 14 aa, Homo sapiens
  CDR3 for beta chain variable domain of TCR clone 351930 (TRBV20-1, TRBJ2-5)
CSALVPGYQETQYF

SEQ ID NO: 703861 - protein, 13 aa, Homo sapiens
  CDR3 for alpha chain variable domain of TCR clone 351931 (TRAV2, TRAJ40)
CAVVTSGTYKYSF

SEQ ID NO: 703862 - protein, 16 aa, Homo sapiens
  CDR3 for beta chain variable domain of TCR clone 351931 (TRBV12-5, TRBJ2-5)
CASGPRTSGNQETQYF

SEQ ID NO: 703863 - protein, 16 aa, Homo sapiens
  CDR3 for alpha chain variable domain of TCR clone 351932 (TRAV21, TRAJ37)
CAVRTAGSSTTGKLIF

SEQ ID NO: 703864 - protein, 14 aa, Homo sapiens
  CDR3 for beta chain variable domain of TCR clone 351932 (TRBV6-1, TRBJ1-3)
CASVQGGGGNTIYF

SEQ ID NO: 703865 - protein, 14 aa, Homo sapiens
  CDR3 for alpha chain variable domain of TCR clone 351933 (TRAV8-4, TRAJ13)
CAVTLSGGYQKVTF

SEQ ID NO: 703866 - protein, 15 aa, Homo sapiens
  CDR3 for beta chain variable domain of TCR clone 351933 (TRBV11-2, TRBJ2-1)
CASSKNRGLIYEQFF

SEQ ID NO: 703867 - protein, 14 aa, Homo sapiens
  CDR3 for alpha chain variable domain of TCR clone 351934 (TRAV26-1, TRAJ45)
CIEVTGGGADGLPF

SEQ ID NO: 703868 - protein, 19 aa, Homo sapiens
  CDR3 for beta chain variable domain of TCR clone 351934 (TRBV19, TRBJ2-2)
WASTRPGLAGGRVTGELFF

SEQ ID NO: 703869 - protein, 11 aa, Homo sapiens
  CDR3 for alpha chain variable domain of TCR clone 351935 (TRAV1-2, TRAJ20)
CAVANDYKLSF

SEQ ID NO: 703870 - protein, 14 aa, Homo sapiens
  CDR3 for beta chain variable domain of TCR clone 351935 (TRBV4-1, TRBJ2-5)
CASSQERGRETQYF

SEQ ID NO: 703871 - protein, 15 aa, Homo sapiens
  CDR3 for alpha chain variable domain of TCR clone 351936 (TRAV12-2, TRAJ53)
CAVNGGGGSNYKLTF

SEQ ID NO: 703872 - protein, 14 aa, Homo sapiens
  CDR3 for beta chain variable domain of TCR clone 351936 (TRBV7-2, TRBJ2-5)
CASSPRGSSETQYF

SEQ ID NO: 703873 - protein, 19 aa, Homo sapiens
  CDR3 for alpha chain variable domain of TCR clone 351937 (TRAV1-2, TRAJ26)
CLLPLCCERPDNYGQNFVF

SEQ ID NO: 703874 - protein, 13 aa, Homo sapiens
  CDR3 for beta chain variable domain of TCR clone 351937 (TRBV7-2, TRBJ2-4)
WASSREHANIQYF

SEQ ID NO: 703875 - protein, 17 aa, Homo sapiens
  CDR3 for alpha chain variable domain of TCR clone 351938 (TRAV3, TRAJ6)
CAVRDGPRAGGSYIPTF

SEQ ID NO: 703876 - protein, 16 aa, Homo sapiens
  CDR3 for beta chain variable domain of TCR clone 351938 (TRBV7-2, TRBJ2-7)
CASSLAGLAGTYEQYF

SEQ ID NO: 703877 - protein, 17 aa, Homo sapiens
  CDR3 for alpha chain variable domain of TCR clone 351939 (TRAV23/DV6, TRAJ57)
CAASSTLPQGGSEKLCF

SEQ ID NO: 703878 - protein, 14 aa, Homo sapiens
  CDR3 for beta chain variable domain of TCR clone 351939 (TRBV25-1, TRBJ1-1)
CASTHLGGNTEAFF

SEQ ID NO: 703879 - protein, 13 aa, Homo sapiens
  CDR3 for alpha chain variable domain of TCR clone 351940 (TRAV2, TRAJ15)
CAVASQAGTALIF

SEQ ID NO: 703880 - protein, 13 aa, Homo sapiens
  CDR3 for beta chain variable domain of TCR clone 351940 (TRBV5-1, TRBJ2-1)
CASSLGSYNEQFF

SEQ ID NO: 703881 - protein, 11 aa, Homo sapiens
  CDR3 for alpha chain variable domain of TCR clone 351941 (TRAV13-1, TRAJ15)
CAAHPGTALIF

SEQ ID NO: 703882 - protein, 17 aa, Homo sapiens
  CDR3 for beta chain variable domain of TCR clone 351941 (TRBV13, TRBJ2-3)
CASSLSRVAGGRNTQYF

SEQ ID NO: 703883 - protein, 15 aa, Homo sapiens
  CDR3 for alpha chain variable domain of TCR clone 351942 (TRAV1-2, TRAJ35)
CAVRDPGALGMCCIA

SEQ ID NO: 703884 - protein, 14 aa, Homo sapiens
  CDR3 for beta chain variable domain of TCR clone 351942 (TRBV5-1, TRBJ2-1)
CASSLDDRFDEQFF

SEQ ID NO: 703885 - protein, 11 aa, Homo sapiens
  CDR3 for alpha chain variable domain of TCR clone 351943 (TRAV1-1, TRAJ23)
CAVRQGGELIF

SEQ ID NO: 703886 - protein, 17 aa, Homo sapiens
  CDR3 for beta chain variable domain of TCR clone 351943 (TRBV13, TRBJ2-3)
CASSLSRVAGGRNTQYF

SEQ ID NO: 703887 - protein, 12 aa, Homo sapiens
  CDR3 for alpha chain variable domain of TCR clone 351944 (TRAV13-2, TRAJ23)
CAERHRGGKLIF

SEQ ID NO: 703888 - protein, 16 aa, Homo sapiens
  CDR3 for beta chain variable domain of TCR clone 351944 (TRBV20-1, TRBJ1-4)
FSAPGQGLLTNENLFF

SEQ ID NO: 703889 - protein, 14 aa, Homo sapiens
  CDR3 for alpha chain variable domain of TCR clone 351945 (TRAV8-2, TRAJ4)
CVVSPSGGYNRLIF

SEQ ID NO: 703890 - protein, 15 aa, Homo sapiens
  CDR3 for beta chain variable domain of TCR clone 351945 (TRBV2, TRBJ2-1)
CASSELAGSYNEQFF

SEQ ID NO: 703891 - protein, 13 aa, Homo sapiens
  CDR3 for alpha chain variable domain of TCR clone 351946 (TRAV20, TRAJ48)
CAVQGVGNEKLTF

SEQ ID NO: 703892 - protein, 17 aa, Homo sapiens
  CDR3 for beta chain variable domain of TCR clone 351946 (TRBV4-2, TRBJ2-1)
CASSQVSGLEMNNEQFF

SEQ ID NO: 703893 - protein, 13 aa, Homo sapiens
  CDR3 for alpha chain variable domain of TCR clone 351947 (TRAV1-1, TRAJ11)
CAVRTSGYSTLTF

SEQ ID NO: 703894 - protein, 15 aa, Homo sapiens
  CDR3 for beta chain variable domain of TCR clone 351947 (TRBV2, TRBJ1-5)
CASAPPGGSNQPQHF

SEQ ID NO: 703895 - protein, 10 aa, Homo sapiens
  CDR3 for alpha chain variable domain of TCR clone 351948 (TRAV13-2, TRAJ49)
CEGTGNQFYF

SEQ ID NO: 703896 - protein, 16 aa, Homo sapiens
  CDR3 for beta chain variable domain of TCR clone 351948 (TRBV9, TRBJ2-7)
CISVPAAYCRRGEQYF

SEQ ID NO: 703897 - protein, 13 aa, Homo sapiens
  CDR3 for alpha chain variable domain of TCR clone 351949 (TRAV17, TRAJ21)
CATDGGNFNKFYF

SEQ ID NO: 703898 - protein, 14 aa, Homo sapiens
  CDR3 for beta chain variable domain of TCR clone 351949 (TRBV7-9, TRBJ2-3)
CASSLEDGTDTQYF

SEQ ID NO: 703899 - protein, 15 aa, Homo sapiens
  CDR3 for alpha chain variable domain of TCR clone 351950 (TRAV8-4, TRAJ45)
CAVIWPGGGADGLTF

SEQ ID NO: 703900 - protein, 12 aa, Homo sapiens
  CDR3 for beta chain variable domain of TCR clone 351950 (TRBV29-1, TRBJ2-7)
CSVGPSGDEQYF

SEQ ID NO: 703901 - protein, 11 aa, Homo sapiens
  CDR3 for alpha chain variable domain of TCR clone 351951 (TRAV23/DV6, TRAJ58)
CAARLLRGETS

SEQ ID NO: 703902 - protein, 14 aa, Homo sapiens
  CDR3 for beta chain variable domain of TCR clone 351951 (TRBV11-1, TRBJ2-7)
CASSFRQGSYEQYF

SEQ ID NO: 703903 - protein, 15 aa, Homo sapiens
  CDR3 for alpha chain variable domain of TCR clone 351952 (TRAV12-2, TRAJ43)
CAFDMRFGAGTRLTV

SEQ ID NO: 703904 - protein, 13 aa, Homo sapiens
  CDR3 for beta chain variable domain of TCR clone 351952 (TRBV4-2, TRBJ1-1)
CTSSQAGNTEAFF

SEQ ID NO: 703905 - protein, 17 aa, Homo sapiens
  CDR3 for alpha chain variable domain of TCR clone 351953 (TRAV3, TRAJ6)
CAVRDGPRAGGSYIPTF

SEQ ID NO: 703906 - protein, 15 aa, Homo sapiens
  CDR3 for beta chain variable domain of TCR clone 351953 (TRBV7-6, TRBJ2-3)
CASSPIIDSTDTQYF

SEQ ID NO: 703907 - protein, 13 aa, Homo sapiens
  CDR3 for alpha chain variable domain of TCR clone 351954 (TRAV1-2, TRAJ17)
CAVGKAAGNKLTF

SEQ ID NO: 703908 - protein, 17 aa, Homo sapiens
  CDR3 for beta chain variable domain of TCR clone 351954 (TRBV28, TRBJ2-7)
CASSPLHRASGVYEQYF

SEQ ID NO: 703909 - protein, 12 aa, Homo sapiens
  CDR3 for alpha chain variable domain of TCR clone 351955 (TRAV35, TRAJ30)
CAGQLADGKIIF

SEQ ID NO: 703910 - protein, 17 aa, Homo sapiens
  CDR3 for beta chain variable domain of TCR clone 351955 (TRBV4-2, TRBJ2-5)
CASSPGRWRNFQETQYF

SEQ ID NO: 703911 - protein, 23 aa, Homo sapiens
  CDR3 for alpha chain variable domain of TCR clone 351956 (TRAV26-1, TRAJ38)
CIADNAGNNHIQNPDPAVYQLRD

SEQ ID NO: 703912 - protein, 13 aa, Homo sapiens
  CDR3 for beta chain variable domain of TCR clone 351956 (TRBV20-1, TRBJ1-1)
CSAKGGGNTEAVF

SEQ ID NO: 703913 - protein, 14 aa, Homo sapiens
  CDR3 for alpha chain variable domain of TCR clone 351957 (TRAV9-2, TRAJ39)
CALYIYNAGNMLTS

SEQ ID NO: 703914 - protein, 14 aa, Homo sapiens
  CDR3 for beta chain variable domain of TCR clone 351957 (TRBV6-1, TRBJ1-3)
CASVKGGGGNTIYF

SEQ ID NO: 703915 - protein, 14 aa, Homo sapiens
  CDR3 for alpha chain variable domain of TCR clone 351958 (TRAV17, TRAJ6)
CATNPAGGSYIPTF

SEQ ID NO: 703916 - protein, 13 aa, Homo sapiens
  CDR3 for beta chain variable domain of TCR clone 351958 (TRBV7-3, TRBJ2-5)
CASSFRGGETQYF

SEQ ID NO: 703917 - protein, 15 aa, Homo sapiens
  CDR3 for alpha chain variable domain of TCR clone 351959 (TRAV2, TRAJ37)
CAVEDGSNNTGKLIF

SEQ ID NO: 703918 - protein, 13 aa, Homo sapiens
  CDR3 for beta chain variable domain of TCR clone 351959 (TRBV20-1, TRBJ1-6)
CSTFREGNSPLHF

SEQ ID NO: 703919 - protein, 13 aa, Homo sapiens
  CDR3 for alpha chain variable domain of TCR clone 351960 (TRAV2, TRAJ15)
CAVASQAGTALIF

SEQ ID NO: 703920 - protein, 12 aa, Homo sapiens
  CDR3 for beta chain variable domain of TCR clone 351960 (TRBV24-1, TRBJ2-7)
CATSDPGYEQYF

SEQ ID NO: 703921 - protein, 14 aa, Homo sapiens
  CDR3 for alpha chain variable domain of TCR clone 351961 (TRAV8-6, TRAJ20)
CAVSDRRVRDKLSF

SEQ ID NO: 703922 - protein, 18 aa, Homo sapiens
  CDR3 for beta chain variable domain of TCR clone 351961 (TRBV20-1, TRBJ2-3)
CSASGLAGGPGTTDTQYF

SEQ ID NO: 703923 - protein, 12 aa, Homo sapiens
  CDR3 for alpha chain variable domain of TCR clone 351962 (TRAV1-1, TRAJ30)
CAVRGRDDKIIF

SEQ ID NO: 703924 - protein, 13 aa, Homo sapiens
  CDR3 for beta chain variable domain of TCR clone 351962 (TRBV11-3, TRBJ2-7)
CARSLDKLYEQYF

SEQ ID NO: 703925 - protein, 16 aa, Homo sapiens
  CDR3 for alpha chain variable domain of TCR clone 351963 (TRAV30, TRAJ24)
CGTEIVDADSWGKFHF

SEQ ID NO: 703926 - protein, 17 aa, Homo sapiens
  CDR3 for beta chain variable domain of TCR clone 351963 (TRBV20-1, TRBJ2-1)
CSASSSGLAGSYNEQFF

SEQ ID NO: 703927 - protein, 12 aa, Homo sapiens
  CDR3 for alpha chain variable domain of TCR clone 351964 (TRAV13-1, TRAJ21)
CAAKEGFNKFYF

SEQ ID NO: 703928 - protein, 15 aa, Homo sapiens
  CDR3 for beta chain variable domain of TCR clone 351964 (TRBV20-1, TRBJ2-7)
CSARGRVSGMDEQYF

SEQ ID NO: 703929 - protein, 14 aa, Homo sapiens
  CDR3 for alpha chain variable domain of TCR clone 351965 (TRAV16, TRAJ33)
CALSAMDSNYQLVW

SEQ ID NO: 703930 - protein, 12 aa, Homo sapiens
  CDR3 for beta chain variable domain of TCR clone 351965 (TRBV5-1, TRBJ1-2)
CASSQDTYGYAC

SEQ ID NO: 703931 - protein, 15 aa, Homo sapiens
  CDR3 for alpha chain variable domain of TCR clone 351966 (TRAV12-1, TRAJ9)
CVVSFGDTGGFKTIF

SEQ ID NO: 703932 - protein, 16 aa, Homo sapiens
  CDR3 for beta chain variable domain of TCR clone 351966 (TRBV4-1, TRBJ1-2)
CASSQDAGQVLYGYTF

SEQ ID NO: 703933 - protein, 10 aa, Homo sapiens
  CDR3 for alpha chain variable domain of TCR clone 351967 (TRAV23/DV6, TRAJ57)
CAASSTLSQG

SEQ ID NO: 703934 - protein, 13 aa, Homo sapiens
  CDR3 for beta chain variable domain of TCR clone 351967 (TRBV25-1, TRBJ1-1)
CQHPPGGNTEASF

SEQ ID NO: 703935 - protein, 13 aa, Homo sapiens
  CDR3 for alpha chain variable domain of TCR clone 351968 (TRAV23/DV6, TRAJ22)
CAPDSGSARQLTF

SEQ ID NO: 703936 - protein, 15 aa, Homo sapiens
  CDR3 for beta chain variable domain of TCR clone 351968 (TRBV11-2, TRBJ1-6)
CASSLDPWAVSPLHF

SEQ ID NO: 703937 - protein, 14 aa, Homo sapiens
  CDR3 for alpha chain variable domain of TCR clone 351969 (TRAV27, TRAJ13)
CRSSNSGGYQKVTF

SEQ ID NO: 703938 - protein, 14 aa, Homo sapiens
  CDR3 for beta chain variable domain of TCR clone 351969 (TRBV6-3, TRBJ2-2)
CASTYTPDTGELFF

SEQ ID NO: 703939 - protein, 15 aa, Homo sapiens
  CDR3 for alpha chain variable domain of TCR clone 351970 (TRAV8-2, TRAJ16)
CVVSDGFSDGQRLLF

SEQ ID NO: 703940 - protein, 14 aa, Homo sapiens
  CDR3 for beta chain variable domain of TCR clone 351970 (TRBV7-3, TRBJ1-1)
CASSLGTGYTEAFF

SEQ ID NO: 703941 - protein, 15 aa, Homo sapiens
  CDR3 for alpha chain variable domain of TCR clone 351971 (TRAV20, TRAJ50)
CAVRQMKTSYDKVIF

SEQ ID NO: 703942 - protein, 17 aa, Homo sapiens
  CDR3 for beta chain variable domain of TCR clone 351971 (TRBV28, TRBJ2-7)
CASSPLHRASGVYKQYF

SEQ ID NO: 703943 - protein, 19 aa, Homo sapiens
  CDR3 for alpha chain variable domain of TCR clone 351972 (TRAV2, )
CAVEEDIQNPDPAVYQLRD

SEQ ID NO: 703944 - protein, 12 aa, Homo sapiens
  CDR3 for beta chain variable domain of TCR clone 351972 (TRBV11-2, TRBJ2-2)
CASSLGGGELFF

SEQ ID NO: 703945 - protein, 13 aa, Homo sapiens
  CDR3 for alpha chain variable domain of TCR clone 351973 (TRAV3, TRAJ21)
CAVREPDFNKFYF

SEQ ID NO: 703946 - protein, 14 aa, Homo sapiens
  CDR3 for beta chain variable domain of TCR clone 351973 (TRBV6-1, TRBJ1-3)
CASVQRGGGNTIYF

SEQ ID NO: 703947 - protein, 14 aa, Homo sapiens
  CDR3 for alpha chain variable domain of TCR clone 351974 (TRAV17, TRAJ57)
CATDPQGGSEKLFF

SEQ ID NO: 703948 - protein, 14 aa, Homo sapiens
  CDR3 for beta chain variable domain of TCR clone 351974 (TRBV13, TRBJ2-7)
CASSVKGASYEQYF

SEQ ID NO: 703949 - protein, 18 aa, Homo sapiens
  CDR3 for alpha chain variable domain of TCR clone 351975 (TRAV12-2, )
CAVEDIQNPDPAVYQLRD

SEQ ID NO: 703950 - protein, 15 aa, Homo sapiens
  CDR3 for beta chain variable domain of TCR clone 351975 (TRBV7-2, TRBJ1-2)
CASSPRAGWNYGYTF

SEQ ID NO: 703951 - protein, 15 aa, Homo sapiens
  CDR3 for alpha chain variable domain of TCR clone 351976 (TRAV4, TRAJ39)
CLVGPNNNAGNMLTF

SEQ ID NO: 703952 - protein, 14 aa, Homo sapiens
  CDR3 for beta chain variable domain of TCR clone 351976 (TRBV11-2, TRBJ2-5)
CASSRTGGIETRYF

SEQ ID NO: 703953 - protein, 11 aa, Homo sapiens
  CDR3 for alpha chain variable domain of TCR clone 351977 (TRAV1-2, TRAJ20)
CAVANDYKLSF

SEQ ID NO: 703954 - protein, 15 aa, Homo sapiens
  CDR3 for beta chain variable domain of TCR clone 351977 (TRBV2, TRBJ2-1)
CASSELAGSYKEQFF

SEQ ID NO: 703955 - protein, 16 aa, Homo sapiens
  CDR3 for alpha chain variable domain of TCR clone 351978 (TRAV30, TRAJ24)
CGTEIVDADSWGKFQF

SEQ ID NO: 703956 - protein, 16 aa, Homo sapiens
  CDR3 for beta chain variable domain of TCR clone 351978 (TRBV6-3, TRBJ1-1)
CASTDLGTVPITEAFF

SEQ ID NO: 703957 - protein, 12 aa, Homo sapiens
  CDR3 for alpha chain variable domain of TCR clone 351979 (TRAV12-2, TRAJ47)
CAVAEYGNKLVF

SEQ ID NO: 703958 - protein, 14 aa, Homo sapiens
  CDR3 for beta chain variable domain of TCR clone 351979 (TRBV28, TRBJ2-1)
CQQYIAGGRSEQFF

SEQ ID NO: 703959 - protein, 13 aa, Homo sapiens
  CDR3 for alpha chain variable domain of TCR clone 351980 (TRAV12-2, TRAJ40)
CAMKRTGTYKYIF

SEQ ID NO: 703960 - protein, 15 aa, Homo sapiens
  CDR3 for beta chain variable domain of TCR clone 351980 (TRBV12-4, TRBJ1-2)
CASSPITGGGYGYTF

SEQ ID NO: 703961 - protein, 19 aa, Homo sapiens
  CDR3 for alpha chain variable domain of TCR clone 351981 (TRAV26-1, TRAJ52)
CIVRAHRNAGGTSYGKLTF

SEQ ID NO: 703962 - protein, 15 aa, Homo sapiens
  CDR3 for beta chain variable domain of TCR clone 351981 (TRBV29-1, TRBJ2-1)
CSGRDRKSSYNEQYF

SEQ ID NO: 703963 - protein, 15 aa, Homo sapiens
  CDR3 for alpha chain variable domain of TCR clone 351982 (TRAV13-2, TRAJ40)
CAENRSRQGTYKYIF

SEQ ID NO: 703964 - protein, 15 aa, Homo sapiens
  CDR3 for beta chain variable domain of TCR clone 351982 (TRBV19, TRBJ2-1)
CASSRGWNSNNEQFF

SEQ ID NO: 703965 - protein, 12 aa, Homo sapiens
  CDR3 for alpha chain variable domain of TCR clone 351983 (TRAV13-2, TRAJ8)
CAPWLGFQKLGF

SEQ ID NO: 703966 - protein, 15 aa, Homo sapiens
  CDR3 for beta chain variable domain of TCR clone 351983 (TRBV9, TRBJ1-6)
CASSVAGTGDSPLHF

SEQ ID NO: 703967 - protein, 13 aa, Homo sapiens
  CDR3 for alpha chain variable domain of TCR clone 351984 (TRAV21, TRAJ27)
CAARPGNAGKSTL

SEQ ID NO: 703968 - protein, 11 aa, Homo sapiens
  CDR3 for beta chain variable domain of TCR clone 351984 (TRBV7-9, TRBJ2-3)
CASSYTDTQYF

SEQ ID NO: 703969 - protein, 14 aa, Homo sapiens
  CDR3 for alpha chain variable domain of TCR clone 351985 (TRAV12-2, TRAJ13)
CAVKKTGGYLKVTF

SEQ ID NO: 703970 - protein, 15 aa, Homo sapiens
  CDR3 for beta chain variable domain of TCR clone 351985 (TRBV20-1, TRBJ2-7)
CSARDRVSGMDEQYF

SEQ ID NO: 703971 - protein, 13 aa, Homo sapiens
  CDR3 for alpha chain variable domain of TCR clone 351986 (TRAV12-3, TRAJ9)
CAMRNTGGFKPIF

SEQ ID NO: 703972 - protein, 14 aa, Homo sapiens
  CDR3 for beta chain variable domain of TCR clone 351986 (TRBV11-2, TRBJ2-7)
CASSSTGEGYEQYF

SEQ ID NO: 703973 - protein, 14 aa, Homo sapiens
  CDR3 for alpha chain variable domain of TCR clone 351987 (TRAV13-1, TRAJ24)
CVASRTDSWGKLQF

SEQ ID NO: 703974 - protein, 15 aa, Homo sapiens
  CDR3 for beta chain variable domain of TCR clone 351987 (TRBV7-9, TRBJ1-5)
CASSQGHQPNQPQHF

SEQ ID NO: 703975 - protein, 14 aa, Homo sapiens
  CDR3 for alpha chain variable domain of TCR clone 351988 (TRAV29/DV5, TRAJ45)
CAASFRGGADGLTF

SEQ ID NO: 703976 - protein, 13 aa, Homo sapiens
  CDR3 for beta chain variable domain of TCR clone 351988 (TRBV5-8, TRBJ1-2)
CASSLGGNYGYTF

SEQ ID NO: 703977 - protein, 13 aa, Homo sapiens
  CDR3 for alpha chain variable domain of TCR clone 351989 (TRAV8-3, TRAJ28)
CAVGAVGSYQLTF

SEQ ID NO: 703978 - protein, 15 aa, Homo sapiens
  CDR3 for beta chain variable domain of TCR clone 351989 (TRBV7-9, TRBJ1-5)
CVSSQGHQPNQPQHF

SEQ ID NO: 703979 - protein, 14 aa, Homo sapiens
  CDR3 for alpha chain variable domain of TCR clone 351990 (TRAV16, TRAJ3)
CALSQYSSASKIIF

SEQ ID NO: 703980 - protein, 15 aa, Homo sapiens
  CDR3 for beta chain variable domain of TCR clone 351990 (TRBV10-2, TRBJ2-6)
CASSEQGTGANVLTF

SEQ ID NO: 703981 - protein, 10 aa, Homo sapiens
  CDR3 for alpha chain variable domain of TCR clone 351991 (TRAV9-2, TRAJ49)
CALTGNQFYF

SEQ ID NO: 703982 - protein, 15 aa, Homo sapiens
  CDR3 for beta chain variable domain of TCR clone 351991 (TRBV3-1, TRBJ2-1)
CASSPRDSGFNEQFF

SEQ ID NO: 703983 - protein, 17 aa, Homo sapiens
  CDR3 for alpha chain variable domain of TCR clone 351992 (TRAV13-1, TRAJ52)
CAASSGAGGTSYGKLTF

SEQ ID NO: 703984 - protein, 15 aa, Homo sapiens
  CDR3 for beta chain variable domain of TCR clone 351992 (TRBV2, TRBJ2-1)
CASSELAGSYNELFF

SEQ ID NO: 703985 - protein, 13 aa, Homo sapiens
  CDR3 for alpha chain variable domain of TCR clone 351993 (TRAV13-1, TRAJ5)
CAARVTGRRALTF

SEQ ID NO: 703986 - protein, 14 aa, Homo sapiens
  CDR3 for beta chain variable domain of TCR clone 351993 (TRBV7-9, TRBJ2-7)
CQQPGGGLTYEQYF

SEQ ID NO: 703987 - protein, 11 aa, Homo sapiens
  CDR3 for alpha chain variable domain of TCR clone 351994 (TRAV9-2, TRAJ49)
CALSAGNQCYF

SEQ ID NO: 703988 - protein, 16 aa, Homo sapiens
  CDR3 for beta chain variable domain of TCR clone 351994 (TRBV28, TRBJ2-6)
CASSNRRGSGANVLTF

SEQ ID NO: 703989 - protein, 12 aa, Homo sapiens
  CDR3 for alpha chain variable domain of TCR clone 351995 (TRAV13-1, TRAJ21)
CAAKEGFNKFYF

SEQ ID NO: 703990 - protein, 15 aa, Homo sapiens
  CDR3 for beta chain variable domain of TCR clone 351995 (TRBV20-1, TRBJ1-5)
CSAFKNGQRNQPQHF

SEQ ID NO: 703991 - protein, 16 aa, Homo sapiens
  CDR3 for alpha chain variable domain of TCR clone 351996 (TRAV3, TRAJ37)
CAVRGKGSGNPGKLIF

SEQ ID NO: 703992 - protein, 16 aa, Homo sapiens
  CDR3 for beta chain variable domain of TCR clone 351996 (TRBV12-4, TRBJ1-5)
CASSRPVGGSNQPQHF

SEQ ID NO: 703993 - protein, 15 aa, Homo sapiens
  CDR3 for alpha chain variable domain of TCR clone 351997 (TRAV1-2, TRAJ8)
CAVRDRNTGFQKLVF

SEQ ID NO: 703994 - protein, 13 aa, Homo sapiens
  CDR3 for beta chain variable domain of TCR clone 351997 (TRBV7-9, TRBJ1-2)
CASSLKQNYGYTF

SEQ ID NO: 703995 - protein, 13 aa, Homo sapiens
  CDR3 for alpha chain variable domain of TCR clone 351998 (TRAV27, TRAJ41)
CAGEGNSGYALNF

SEQ ID NO: 703996 - protein, 14 aa, Homo sapiens
  CDR3 for beta chain variable domain of TCR clone 351998 (TRBV11-2, TRBJ2-3)
CASSRLARTDTQYF

SEQ ID NO: 703997 - protein, 23 aa, Homo sapiens
  CDR3 for alpha chain variable domain of TCR clone 351999 (TRAV3, TRAJ38)
CAVRSSLNAGNNHNQNPDPAVYQ

SEQ ID NO: 703998 - protein, 13 aa, Homo sapiens
  CDR3 for beta chain variable domain of TCR clone 351999 (TRBV7-9, TRBJ2-1)
CASSWESYNEQFF

SEQ ID NO: 703999 - protein, 12 aa, Homo sapiens
  CDR3 for alpha chain variable domain of TCR clone 352000 (TRAV29/DV5, TRAJ15)
CASNQAGTARIF

SEQ ID NO: 704000 - protein, 18 aa, Homo sapiens
  CDR3 for beta chain variable domain of TCR clone 352000 (TRBV12-4, TRBJ2-2)
CASSLVAGTRGRTGELFF

SEQ ID NO: 704001 - protein, 10 aa, Homo sapiens
  CDR3 for alpha chain variable domain of TCR clone 352001 (TRAV36/DV7, TRAJ49)
CALTDNQFYF

SEQ ID NO: 704002 - protein, 13 aa, Homo sapiens
  CDR3 for beta chain variable domain of TCR clone 352001 (TRBV4-1, TRBJ2-7)
CASSQGQAYEQYF

SEQ ID NO: 704003 - protein, 13 aa, Homo sapiens
  CDR3 for alpha chain variable domain of TCR clone 352002 (TRAV23/DV6, TRAJ47)
FAASSQYGNKLVF

SEQ ID NO: 704004 - protein, 15 aa, Homo sapiens
  CDR3 for beta chain variable domain of TCR clone 352002 (TRBV7-3, TRBJ2-1)
CASSLDGNSYNEQFF

SEQ ID NO: 704005 - protein, 16 aa, Homo sapiens
  CDR3 for alpha chain variable domain of TCR clone 352003 (TRAV3, TRAJ21)
CAVRDIARGNFNKFYF

SEQ ID NO: 704006 - protein, 16 aa, Homo sapiens
  CDR3 for beta chain variable domain of TCR clone 352003 (TRBV12-4, TRBJ1-5)
CASSRPVGGSNQPQHF

SEQ ID NO: 704007 - protein, 15 aa, Homo sapiens
  CDR3 for alpha chain variable domain of TCR clone 352004 (TRAV12-3, TRAJ6)
CAMSATSGGSYIPTF

SEQ ID NO: 704008 - protein, 14 aa, Homo sapiens
  CDR3 for beta chain variable domain of TCR clone 352004 (TRBV28, TRBJ1-1)
CASSLWWSLAEAFF

SEQ ID NO: 704009 - protein, 14 aa, Homo sapiens
  CDR3 for alpha chain variable domain of TCR clone 352005 (TRAV8-4, TRAJ13)
CAVTLSGGYQKVHF

SEQ ID NO: 704010 - protein, 14 aa, Homo sapiens
  CDR3 for beta chain variable domain of TCR clone 352005 (TRBV7-2, TRBJ1-2)
CASSQTGSTYGYTF

SEQ ID NO: 704011 - protein, 14 aa, Homo sapiens
  CDR3 for alpha chain variable domain of TCR clone 352006 (TRAV12-3, TRAJ10)
SHLTLTGGGNKLTF

SEQ ID NO: 704012 - protein, 17 aa, Homo sapiens
  CDR3 for beta chain variable domain of TCR clone 352006 (TRBV20-1, TRBJ2-2)
CSASGSGQGRLTGELFF

SEQ ID NO: 704013 - protein, 16 aa, Homo sapiens
  CDR3 for alpha chain variable domain of TCR clone 352007 (TRAV30, TRAJ24)
CGTEIVDADSGGKFQF

SEQ ID NO: 704014 - protein, 14 aa, Homo sapiens
  CDR3 for beta chain variable domain of TCR clone 352007 (TRBV7-9, TRBJ2-4)
CASSLAMGGNSQYF

SEQ ID NO: 704015 - protein, 17 aa, Homo sapiens
  CDR3 for alpha chain variable domain of TCR clone 352008 (TRAV27, TRAJ26)
CAGARAPLDNYGQDFVF

SEQ ID NO: 704016 - protein, 15 aa, Homo sapiens
  CDR3 for beta chain variable domain of TCR clone 352008 (TRBV11-2, TRBJ2-5)
CASSPRSGGLETQYF

SEQ ID NO: 704017 - protein, 16 aa, Homo sapiens
  CDR3 for alpha chain variable domain of TCR clone 352009 (TRAV19, TRAJ17)
CAPWGQIKAAGNKLTF

SEQ ID NO: 704018 - protein, 15 aa, Homo sapiens
  CDR3 for beta chain variable domain of TCR clone 352009 (TRBV7-3, TRBJ2-1)
CQQLKFGRGAKEQFF

SEQ ID NO: 704019 - protein, 15 aa, Homo sapiens
  CDR3 for alpha chain variable domain of TCR clone 352010 (TRAV12-1, TRAJ6)
CVVNCPLRRKLHTYI

SEQ ID NO: 704020 - protein, 16 aa, Homo sapiens
  CDR3 for beta chain variable domain of TCR clone 352010 (TRBV7-3, TRBJ2-1)
CASSLEGYRSYNEQFF

SEQ ID NO: 704021 - protein, 13 aa, Homo sapiens
  CDR3 for alpha chain variable domain of TCR clone 352011 (TRAV2, TRAJ40)
CAVVTSGTYKYIF

SEQ ID NO: 704022 - protein, 14 aa, Homo sapiens
  CDR3 for beta chain variable domain of TCR clone 352011 (TRBV19, TRBJ2-1)
CASPTFVLSGKQSF

SEQ ID NO: 704023 - protein, 14 aa, Homo sapiens
  CDR3 for alpha chain variable domain of TCR clone 352012 (TRAV2, TRAJ9)
CAVEDRSGGFKTIF

SEQ ID NO: 704024 - protein, 14 aa, Homo sapiens
  CDR3 for beta chain variable domain of TCR clone 352012 (TRBV5-7, TRBJ2-7)
CASSGGLSSYERYF

SEQ ID NO: 704025 - protein, 14 aa, Homo sapiens
  CDR3 for alpha chain variable domain of TCR clone 352013 (TRAV23/DV6, TRAJ37)
CAASTSSNTGKLIF

SEQ ID NO: 704026 - protein, 15 aa, Homo sapiens
  CDR3 for beta chain variable domain of TCR clone 352013 (TRBV11-2, TRBJ2-2)
CASSSDRVNAGELFF

SEQ ID NO: 704027 - protein, 14 aa, Homo sapiens
  CDR3 for alpha chain variable domain of TCR clone 352014 (TRAV12-3, TRAJ54)
CAMKGIQGAQKLVF

SEQ ID NO: 704028 - protein, 13 aa, Homo sapiens
  CDR3 for beta chain variable domain of TCR clone 352014 (TRBV19, TRBJ1-1)
CASSPSNGGEAFF

SEQ ID NO: 704029 - protein, 13 aa, Homo sapiens
  CDR3 for alpha chain variable domain of TCR clone 352015 (TRAV8-3, TRAJ43)
CPVVPYNNNDMRF

SEQ ID NO: 704030 - protein, 16 aa, Homo sapiens
  CDR3 for beta chain variable domain of TCR clone 352015 (TRBV7-2, TRBJ2-5)
CASSPFPTGGEETQYF

SEQ ID NO: 704031 - protein, 14 aa, Homo sapiens
  CDR3 for alpha chain variable domain of TCR clone 352016 (TRAV1-2, TRAJ16)
CAVDRFSYGQKLRF

SEQ ID NO: 704032 - protein, 15 aa, Homo sapiens
  CDR3 for beta chain variable domain of TCR clone 352016 (TRBV20-1, TRBJ2-7)
CSARDRVSGMDEQYF

SEQ ID NO: 704033 - protein, 13 aa, Homo sapiens
  CDR3 for alpha chain variable domain of TCR clone 352017 (TRAV12-3, TRAJ41)
CAIAPNSGYALNF

SEQ ID NO: 704034 - protein, 13 aa, Homo sapiens
  CDR3 for beta chain variable domain of TCR clone 352017 (TRBV4-2, TRBJ1-1)
CASSQAGNTEAFF

SEQ ID NO: 704035 - protein, 15 aa, Homo sapiens
  CDR3 for alpha chain variable domain of TCR clone 352018 (TRAV3, TRAJ5)
CAVRDLDTGRRAPTF

SEQ ID NO: 704036 - protein, 14 aa, Homo sapiens
  CDR3 for beta chain variable domain of TCR clone 352018 (TRBV25-1, TRBJ1-1)
CASTHLGGNTEAFF

SEQ ID NO: 704037 - protein, 18 aa, Homo sapiens
  CDR3 for alpha chain variable domain of TCR clone 352019 (TRAV21, TRAJ52)
CAVRPSPAGGTSYGKLTF

SEQ ID NO: 704038 - protein, 15 aa, Homo sapiens
  CDR3 for beta chain variable domain of TCR clone 352019 (TRBV20-1, TRBJ1-5)
CSAFKNGQRDQPQHF

SEQ ID NO: 704039 - protein, 12 aa, Homo sapiens
  CDR3 for alpha chain variable domain of TCR clone 352020 (TRAV12-1, TRAJ40)
CVFYTGTYKYIF

SEQ ID NO: 704040 - protein, 18 aa, Homo sapiens
  CDR3 for beta chain variable domain of TCR clone 352020 (TRBV12-4, TRBJ2-2)
CASSLVAGTRGRTGELFF

SEQ ID NO: 704041 - protein, 16 aa, Homo sapiens
  CDR3 for alpha chain variable domain of TCR clone 352021 (TRAV3, TRAJ32)
CCEPQGNGGATNKLIF

SEQ ID NO: 704042 - protein, 15 aa, Homo sapiens
  CDR3 for beta chain variable domain of TCR clone 352021 (TRBV7-2, TRBJ2-3)
CASSLNLRDTDTQYF

SEQ ID NO: 704043 - protein, 18 aa, Homo sapiens
  CDR3 for alpha chain variable domain of TCR clone 352022 (TRAV26-1, TRAJ27)
CIVRPSFNYNTNAGNSTF

SEQ ID NO: 704044 - protein, 14 aa, Homo sapiens
  CDR3 for beta chain variable domain of TCR clone 352022 (TRBV10-3, TRBJ1-6)
CAISVDGDESPLHF

SEQ ID NO: 704045 - protein, 17 aa, Homo sapiens
  CDR3 for alpha chain variable domain of TCR clone 352023 (TRAV3, TRAJ38)
CAVRDCLNVGNNRKLIW

SEQ ID NO: 704046 - protein, 13 aa, Homo sapiens
  CDR3 for beta chain variable domain of TCR clone 352023 (TRBV23-1, TRBJ1-4)
CASRGKFNEKLFF

SEQ ID NO: 704047 - protein, 12 aa, Homo sapiens
  CDR3 for alpha chain variable domain of TCR clone 352024 (TRAV30, TRAJ43)
CGTEERGNDMRF

SEQ ID NO: 704048 - protein, 13 aa, Homo sapiens
  CDR3 for beta chain variable domain of TCR clone 352024 (TRBV27, TRBJ2-7)
CSSSFSQGYEQYF

SEQ ID NO: 704049 - protein, 15 aa, Homo sapiens
  CDR3 for alpha chain variable domain of TCR clone 352025 (TRAV26-1, TRAJ12)
IASSELMYSSYKLIF

SEQ ID NO: 704050 - protein, 11 aa, Homo sapiens
  CDR3 for beta chain variable domain of TCR clone 352025 (TRBV7-9, TRBJ2-3)
CASSPPDTQYF

SEQ ID NO: 704051 - protein, 13 aa, Homo sapiens
  CDR3 for alpha chain variable domain of TCR clone 352026 (TRAV21, TRAJ27)
CAARPGKAGKSTF

SEQ ID NO: 704052 - protein, 14 aa, Homo sapiens
  CDR3 for beta chain variable domain of TCR clone 352026 (TRBV7-9, TRBJ2-5)
CASSLDTAQETQYF

SEQ ID NO: 704053 - protein, 12 aa, Homo sapiens
  CDR3 for alpha chain variable domain of TCR clone 352027 (TRAV21, TRAJ39)
CAADNAGNMLTF

SEQ ID NO: 704054 - protein, 13 aa, Homo sapiens
  CDR3 for beta chain variable domain of TCR clone 352027 (TRBV6-1, TRBJ1-1)
CASSREGNTEAVF

SEQ ID NO: 704055 - protein, 13 aa, Homo sapiens
  CDR3 for alpha chain variable domain of TCR clone 352028 (TRAV30, TRAJ18)
CGTEASTLGRLYF

SEQ ID NO: 704056 - protein, 15 aa, Homo sapiens
  CDR3 for beta chain variable domain of TCR clone 352028 (TRBV7-3, TRBJ2-1)
CASSRIGTGSSEQFV

SEQ ID NO: 704057 - protein, 16 aa, Homo sapiens
  CDR3 for alpha chain variable domain of TCR clone 352029 (TRAV1-2, TRAJ10)
CAVRGVLTGGGNKLTF

SEQ ID NO: 704058 - protein, 18 aa, Homo sapiens
  CDR3 for beta chain variable domain of TCR clone 352029 (TRBV20-1, TRBJ2-5)
CSAKTGTTTNLYQETQYF

SEQ ID NO: 704059 - protein, 13 aa, Homo sapiens
  CDR3 for alpha chain variable domain of TCR clone 352030 (TRAV3, TRAJ21)
CAVREPDFNKFYF

SEQ ID NO: 704060 - protein, 17 aa, Homo sapiens
  CDR3 for beta chain variable domain of TCR clone 352030 (TRBV19, TRBJ2-6)
CASSIVRTASGANVLTF

SEQ ID NO: 704061 - protein, 11 aa, Homo sapiens
  CDR3 for alpha chain variable domain of TCR clone 352031 (TRAV9-2, TRAJ26)
CALRRPQNFVF

SEQ ID NO: 704062 - protein, 16 aa, Homo sapiens
  CDR3 for beta chain variable domain of TCR clone 352031 (TRBV7-3, TRBJ2-1)
CASSLEGYRSYNEQFF

SEQ ID NO: 704063 - protein, 15 aa, Homo sapiens
  CDR3 for alpha chain variable domain of TCR clone 352032 (TRAV2, TRAJ9)
CAVEDRGTGGFKTIF

SEQ ID NO: 704064 - protein, 15 aa, Homo sapiens
  CDR3 for beta chain variable domain of TCR clone 352032 (TRBV7-9, TRBJ2-7)
CASSLALAEAYEQYF

SEQ ID NO: 704065 - protein, 12 aa, Homo sapiens
  CDR3 for alpha chain variable domain of TCR clone 352033 (TRAV17, TRAJ20)
CATLANDYKLSF

SEQ ID NO: 704066 - protein, 15 aa, Homo sapiens
  CDR3 for beta chain variable domain of TCR clone 352033 (TRBV7-2, TRBJ1-2)
CASSLVSGGDYGYPF

SEQ ID NO: 704067 - protein, 14 aa, Homo sapiens
  CDR3 for alpha chain variable domain of TCR clone 352034 (TRAV2, TRAJ9)
CAVEDRSGGFKTIF

SEQ ID NO: 704068 - protein, 13 aa, Homo sapiens
  CDR3 for beta chain variable domain of TCR clone 352034 (TRBV20-1, TRBJ1-6)
CSAPLGVGSPLHF

SEQ ID NO: 704069 - protein, 12 aa, Homo sapiens
  CDR3 for alpha chain variable domain of TCR clone 352035 (TRAV12-3, TRAJ32)
CAMGGATNKLIF

SEQ ID NO: 704070 - protein, 18 aa, Homo sapiens
  CDR3 for beta chain variable domain of TCR clone 352035 (TRBV7-9, TRBJ2-7)
CASSLTTSGSRTWYEQYF

SEQ ID NO: 704071 - protein, 16 aa, Homo sapiens
  CDR3 for alpha chain variable domain of TCR clone 352036 (TRAV17, TRAJ36)
CATGSLNWGKQPLLCD

SEQ ID NO: 704072 - protein, 13 aa, Homo sapiens
  CDR3 for beta chain variable domain of TCR clone 352036 (TRBV4-1, TRBJ1-1)
CASSQLGTGEAFF

SEQ ID NO: 704073 - protein, 13 aa, Homo sapiens
  CDR3 for alpha chain variable domain of TCR clone 352037 (TRAV36/DV7, TRAJ49)
CAGDSNTGNQFYF

SEQ ID NO: 704074 - protein, 15 aa, Homo sapiens
  CDR3 for beta chain variable domain of TCR clone 352037 (TRBV6-5, TRBJ1-6)
CASSLGQGFRSTLHF

SEQ ID NO: 704075 - protein, 13 aa, Homo sapiens
  CDR3 for alpha chain variable domain of TCR clone 352038 (TRAV27, TRAJ41)
CAGEGNSGYALNF

SEQ ID NO: 704076 - protein, 17 aa, Homo sapiens
  CDR3 for beta chain variable domain of TCR clone 352038 (TRBV7-3, TRBJ2-3)
RASSLMKRMRGADTQYF

SEQ ID NO: 704077 - protein, 14 aa, Homo sapiens
  CDR3 for alpha chain variable domain of TCR clone 352039 (TRAV8-4, TRAJ34)
CAVSDPGDTDKLIF

SEQ ID NO: 704078 - protein, 13 aa, Homo sapiens
  CDR3 for beta chain variable domain of TCR clone 352039 (TRBV12-4, TRBJ1-2)
CASSLRQGKGYTF

SEQ ID NO: 704079 - protein, 16 aa, Homo sapiens
  CDR3 for alpha chain variable domain of TCR clone 352040 (TRAV12-2, TRAJ40)
CAVIIGGTSGTYKYIF

SEQ ID NO: 704080 - protein, 16 aa, Homo sapiens
  CDR3 for beta chain variable domain of TCR clone 352040 (TRBV7-9, TRBJ2-1)
CASSDVAGGSYNEQFF

SEQ ID NO: 704081 - protein, 12 aa, Homo sapiens
  CDR3 for alpha chain variable domain of TCR clone 352041 (TRAV13-2, TRAJ23)
CAERHRGGKLIF

SEQ ID NO: 704082 - protein, 12 aa, Homo sapiens
  CDR3 for beta chain variable domain of TCR clone 352041 (TRBV18, TRBJ2-1)
CASSSDEDEQFF

SEQ ID NO: 704083 - protein, 16 aa, Homo sapiens
  CDR3 for alpha chain variable domain of TCR clone 352042 (TRAV8-3, TRAJ10)
CAVGPILTGGGNKLTF

SEQ ID NO: 704084 - protein, 16 aa, Homo sapiens
  CDR3 for beta chain variable domain of TCR clone 352042 (TRBV7-2, TRBJ2-5)
CSSSSKWLSGQETQYF

SEQ ID NO: 704085 - protein, 15 aa, Homo sapiens
  CDR3 for alpha chain variable domain of TCR clone 352043 (TRAV3, TRAJ22)
CAVRDRGGSARQLTL

SEQ ID NO: 704086 - protein, 15 aa, Homo sapiens
  CDR3 for beta chain variable domain of TCR clone 352043 (TRBV20-1, TRBJ1-5)
CSAREGGYSNQPQHF

SEQ ID NO: 704087 - protein, 12 aa, Homo sapiens
  CDR3 for alpha chain variable domain of TCR clone 352044 (TRAV8-4, TRAJ43)
CAVSVNNNDMPF

SEQ ID NO: 704088 - protein, 18 aa, Homo sapiens
  CDR3 for beta chain variable domain of TCR clone 352044 (TRBV5-7, TRBJ2-2)
CASSLGASGGLNTGELFF

SEQ ID NO: 704089 - protein, 13 aa, Homo sapiens
  CDR3 for alpha chain variable domain of TCR clone 352045 (TRAV8-3, TRAJ36)
CAVGATGANTLFF

SEQ ID NO: 704090 - protein, 15 aa, Homo sapiens
  CDR3 for beta chain variable domain of TCR clone 352045 (TRBV7-2, TRBJ1-2)
CASSPRAGWNYGYTF

SEQ ID NO: 704091 - protein, 14 aa, Homo sapiens
  CDR3 for alpha chain variable domain of TCR clone 352046 (TRAV23/DV6, TRAJ37)
CAASTSSNTGKLIF

SEQ ID NO: 704092 - protein, 13 aa, Homo sapiens
  CDR3 for beta chain variable domain of TCR clone 352046 (TRBV19, TRBJ1-2)
CASSVPGQDGYTF

SEQ ID NO: 704093 - protein, 14 aa, Homo sapiens
  CDR3 for alpha chain variable domain of TCR clone 352047 (TRAV8-3, TRAJ39)
CAVGANYAGNMLTF

SEQ ID NO: 704094 - protein, 15 aa, Homo sapiens
  CDR3 for beta chain variable domain of TCR clone 352047 (TRBV4-3, TRBJ1-1)
CASSQELGRGTEAFF

SEQ ID NO: 704095 - protein, 17 aa, Homo sapiens
  CDR3 for alpha chain variable domain of TCR clone 352048 (TRAV35, TRAJ47)
GLLDCRTHTEYGNELVF

SEQ ID NO: 704096 - protein, 11 aa, Homo sapiens
  CDR3 for beta chain variable domain of TCR clone 352048 (TRBV29-1, TRBJ1-1)
CSVEVGTRTFF

SEQ ID NO: 704097 - protein, 10 aa, Homo sapiens
  CDR3 for alpha chain variable domain of TCR clone 352049 (TRAV30, TRAJ34)
CGTNPDKLIF

SEQ ID NO: 704098 - protein, 15 aa, Homo sapiens
  CDR3 for beta chain variable domain of TCR clone 352049 (TRBV12-4, TRBJ2-5)
CASTLNSGRGETQYF

SEQ ID NO: 704099 - protein, 16 aa, Homo sapiens
  CDR3 for alpha chain variable domain of TCR clone 352050 (TRAV3, TRAJ37)
CAVRGKGSGNTGKLIF

SEQ ID NO: 704100 - protein, 15 aa, Homo sapiens
  CDR3 for beta chain variable domain of TCR clone 352050 (TRBV7-3, TRBJ2-2)
CASSETEQGTGELFF

SEQ ID NO: 704101 - protein, 12 aa, Homo sapiens
  CDR3 for alpha chain variable domain of TCR clone 352051 (TRAV12-1, TRAJ23)
CVVNWGGGKLIF

SEQ ID NO: 704102 - protein, 14 aa, Homo sapiens
  CDR3 for beta chain variable domain of TCR clone 352051 (TRBV27, TRBJ2-7)
CASSPQRGTYEQFF

SEQ ID NO: 704103 - protein, 16 aa, Homo sapiens
  CDR3 for alpha chain variable domain of TCR clone 352052 (TRAV16, TRAJ4)
CALRRMFSGGYNKLIF

SEQ ID NO: 704104 - protein, 16 aa, Homo sapiens
  CDR3 for beta chain variable domain of TCR clone 352052 (TRBV12-4, TRBJ1-5)
CASSRPVGGSNQPQHF

SEQ ID NO: 704105 - protein, 13 aa, Homo sapiens
  CDR3 for alpha chain variable domain of TCR clone 352053 (TRAV17, TRAJ41)
CATGRNSGYALNF

SEQ ID NO: 704106 - protein, 13 aa, Homo sapiens
  CDR3 for beta chain variable domain of TCR clone 352053 (TRBV28, TRBJ1-1)
CASSKQGWTEAFF

SEQ ID NO: 704107 - protein, 14 aa, Homo sapiens
  CDR3 for alpha chain variable domain of TCR clone 352054 (TRAV17, TRAJ35)
CATDRPGFGNVLHC

SEQ ID NO: 704108 - protein, 12 aa, Homo sapiens
  CDR3 for beta chain variable domain of TCR clone 352054 (TRBV11-3, TRBJ2-2)
CASSTRPGAKTT

SEQ ID NO: 704109 - protein, 14 aa, Homo sapiens
  CDR3 for alpha chain variable domain of TCR clone 352055 (TRAV1-2, TRAJ16)
CAVNRFSGGQKLLF

SEQ ID NO: 704110 - protein, 12 aa, Homo sapiens
  CDR3 for beta chain variable domain of TCR clone 352055 (TRBV24-1, TRBJ1-1)
CATLYPDTEAFF

SEQ ID NO: 704111 - protein, 12 aa, Homo sapiens
  CDR3 for alpha chain variable domain of TCR clone 352056 (TRAV10, TRAJ6)
CVVSEGSYIPTF

SEQ ID NO: 704112 - protein, 16 aa, Homo sapiens
  CDR3 for beta chain variable domain of TCR clone 352056 (TRBV7-6, TRBJ2-7)
CARSGGTGALSYEQYF

SEQ ID NO: 704113 - protein, 18 aa, Homo sapiens
  CDR3 for alpha chain variable domain of TCR clone 352057 (TRAV13-1, TRAJ52)
CAAKNPNAGGTSYGKLTF

SEQ ID NO: 704114 - protein, 11 aa, Homo sapiens
  CDR3 for beta chain variable domain of TCR clone 352057 (TRBV20-1, TRBJ2-1)
CSLSSGSEQFF

SEQ ID NO: 704115 - protein, 17 aa, Homo sapiens
  CDR3 for alpha chain variable domain of TCR clone 352058 (TRAV3, TRAJ6)
CAVRDGPRAGGSYIPTF

SEQ ID NO: 704116 - protein, 12 aa, Homo sapiens
  CDR3 for beta chain variable domain of TCR clone 352058 (TRBV7-2, TRBJ1-2)
CASRDSIYGYTF

SEQ ID NO: 704117 - protein, 15 aa, Homo sapiens
  CDR3 for alpha chain variable domain of TCR clone 352059 (TRAV8-6, TRAJ10)
CAVSDQAGGGNKLTF

SEQ ID NO: 704118 - protein, 15 aa, Homo sapiens
  CDR3 for beta chain variable domain of TCR clone 352059 (TRBV3-1, TRBJ2-5)
CASSAKLGGPETQYF

SEQ ID NO: 704119 - protein, 14 aa, Homo sapiens
  CDR3 for alpha chain variable domain of TCR clone 352060 (TRAV13-1, TRAJ44)
CAAKATGTASKLTF

SEQ ID NO: 704120 - protein, 22 aa, Homo sapiens
  CDR3 for beta chain variable domain of TCR clone 352060 (TRBV19, TRBJ2-1)
CASSVRDRVTGTSGRIYDEQFF

SEQ ID NO: 704121 - protein, 15 aa, Homo sapiens
  CDR3 for alpha chain variable domain of TCR clone 352061 (TRAV2, TRAJ28)
CAVPYSGAGSYNSLS

SEQ ID NO: 704122 - protein, 17 aa, Homo sapiens
  CDR3 for beta chain variable domain of TCR clone 352061 (TRBV20-1, TRBJ2-4)
CSARDWASGGRENIQYF

SEQ ID NO: 704123 - protein, 10 aa, Homo sapiens
  CDR3 for alpha chain variable domain of TCR clone 352062 (TRAV1-2, TRAJ20)
CALNDYKLSF

SEQ ID NO: 704124 - protein, 15 aa, Homo sapiens
  CDR3 for beta chain variable domain of TCR clone 352062 (TRBV9, TRBJ1-6)
CASSVAGTGDSPLHF

SEQ ID NO: 704125 - protein, 14 aa, Homo sapiens
  CDR3 for alpha chain variable domain of TCR clone 352063 (TRAV12-2, TRAJ13)
CAVKRTGGYQKVTF

SEQ ID NO: 704126 - protein, 15 aa, Homo sapiens
  CDR3 for beta chain variable domain of TCR clone 352063 (TRBV27, TRBJ2-1)
CASSNGGGSSNEQIF

SEQ ID NO: 704127 - protein, 13 aa, Homo sapiens
  CDR3 for alpha chain variable domain of TCR clone 352064 (TRAV23/DV6, TRAJ22)
CAPYSGSARQLTF

SEQ ID NO: 704128 - protein, 13 aa, Homo sapiens
  CDR3 for beta chain variable domain of TCR clone 352064 (TRBV19, TRBJ2-2)
CASSIWSTGELFF

SEQ ID NO: 704129 - protein, 11 aa, Homo sapiens
  CDR3 for alpha chain variable domain of TCR clone 352065 (TRAV1-2, TRAJ40)
CAVPGTYKYIF

SEQ ID NO: 704130 - protein, 15 aa, Homo sapiens
  CDR3 for beta chain variable domain of TCR clone 352065 (TRBV6-5, TRBJ2-1)
CASSYDAGAGNEQFF

SEQ ID NO: 704131 - protein, 14 aa, Homo sapiens
  CDR3 for alpha chain variable domain of TCR clone 352066 (TRAV13-1, TRAJ44)
CAAKATGTASKLTF

SEQ ID NO: 704132 - protein, 14 aa, Homo sapiens
  CDR3 for beta chain variable domain of TCR clone 352066 (TRBV2, TRBJ1-2)
CASSELQVNYGYTF

SEQ ID NO: 704133 - protein, 13 aa, Homo sapiens
  CDR3 for alpha chain variable domain of TCR clone 352067 (TRAV3, TRAJ15)
CAVRDQAGTALIF

SEQ ID NO: 704134 - protein, 12 aa, Homo sapiens
  CDR3 for beta chain variable domain of TCR clone 352067 (TRBV19, TRBJ2-7)
CASTDRGYEQYF

SEQ ID NO: 704135 - protein, 13 aa, Homo sapiens
  CDR3 for alpha chain variable domain of TCR clone 352068 (TRAV2, TRAJ15)
CAVASQAGTALIF

SEQ ID NO: 704136 - protein, 15 aa, Homo sapiens
  CDR3 for beta chain variable domain of TCR clone 352068 (TRBV20-1, TRBJ2-7)
CSARDRVSGMEEQYF

SEQ ID NO: 704137 - protein, 17 aa, Homo sapiens
  CDR3 for alpha chain variable domain of TCR clone 352069 (TRAV3, TRAJ42)
CAVRDRDYGGSQGNLIF

SEQ ID NO: 704138 - protein, 13 aa, Homo sapiens
  CDR3 for beta chain variable domain of TCR clone 352069 (TRBV19, TRBJ2-7)
CASSAGHGYEQYF

SEQ ID NO: 704139 - protein, 23 aa, Homo sapiens
  CDR3 for alpha chain variable domain of TCR clone 352070 (TRAV8-3, TRAJ38)
CAVCASNAGNNHIQNPDPAVYQL

SEQ ID NO: 704140 - protein, 15 aa, Homo sapiens
  CDR3 for beta chain variable domain of TCR clone 352070 (TRBV11-3, TRBJ1-3)
CASSLFGPSGNTIYF

SEQ ID NO: 704141 - protein, 17 aa, Homo sapiens
  CDR3 for alpha chain variable domain of TCR clone 352071 (TRAV13-1, TRAJ52)
CSASSGAGCTSYGKLTF

SEQ ID NO: 704142 - protein, 15 aa, Homo sapiens
  CDR3 for beta chain variable domain of TCR clone 352071 (TRBV2, TRBJ2-1)
CASSELAGSYNEQFF

SEQ ID NO: 704143 - protein, 16 aa, Homo sapiens
  CDR3 for alpha chain variable domain of TCR clone 352072 (TRAV30, TRAJ24)
CGTETVDADSWGKFQL

SEQ ID NO: 704144 - protein, 14 aa, Homo sapiens
  CDR3 for beta chain variable domain of TCR clone 352072 (TRBV12-5, TRBJ2-5)
CASGSRTHQETQYF

SEQ ID NO: 704145 - protein, 12 aa, Homo sapiens
  CDR3 for alpha chain variable domain of TCR clone 352073 (TRAV8-4, TRAJ37)
CAGRSNTGKLSF

SEQ ID NO: 704146 - protein, 16 aa, Homo sapiens
  CDR3 for beta chain variable domain of TCR clone 352073 (TRBV7-2, TRBJ2-3)
CASSLVGDASTDTQYF

SEQ ID NO: 704147 - protein, 12 aa, Homo sapiens
  CDR3 for alpha chain variable domain of TCR clone 352074 (TRAV8-3, TRAJ20)
CAVCGGDYKPSL

SEQ ID NO: 704148 - protein, 12 aa, Homo sapiens
  CDR3 for beta chain variable domain of TCR clone 352074 (TRBV3-1, TRBJ2-7)
CASSQVRYEQYF

SEQ ID NO: 704149 - protein, 15 aa, Homo sapiens
  CDR3 for alpha chain variable domain of TCR clone 352075 (TRAV21, TRAJ38)
CAVRQDAGNNRKLIW

SEQ ID NO: 704150 - protein, 16 aa, Homo sapiens
  CDR3 for beta chain variable domain of TCR clone 352075 (TRBV4-2, TRBJ1-1)
CASSPLDGGGDTEAFF

SEQ ID NO: 704151 - protein, 14 aa, Homo sapiens
  CDR3 for alpha chain variable domain of TCR clone 352076 (TRAV26-1, TRAJ38)
CIADNAGKNSKLIW

SEQ ID NO: 704152 - protein, 17 aa, Homo sapiens
  CDR3 for beta chain variable domain of TCR clone 352076 (TRBV7-9, TRBJ2-3)
CASSPTVAGDLTDTQYF

SEQ ID NO: 704153 - protein, 14 aa, Homo sapiens
  CDR3 for alpha chain variable domain of TCR clone 352077 (TRAV1-2, TRAJ16)
CAVNRFSDGQKLLF

SEQ ID NO: 704154 - protein, 15 aa, Homo sapiens
  CDR3 for beta chain variable domain of TCR clone 352077 (TRBV7-9, TRBJ1-3)
CASSLRSGSGNTIYF

SEQ ID NO: 704155 - protein, 13 aa, Homo sapiens
  CDR3 for alpha chain variable domain of TCR clone 352078 (TRAV21, TRAJ27)
CAARPGNAGKPNF

SEQ ID NO: 704156 - protein, 14 aa, Homo sapiens
  CDR3 for beta chain variable domain of TCR clone 352078 (TRBV7-6, TRBJ2-3)
CASSLGTVTDTQYF

SEQ ID NO: 704157 - protein, 16 aa, Homo sapiens
  CDR3 for alpha chain variable domain of TCR clone 352079 (TRAV16, TRAJ52)
CALSGVGATSYGKLTF

SEQ ID NO: 704158 - protein, 14 aa, Homo sapiens
  CDR3 for beta chain variable domain of TCR clone 352079 (TRBV19, TRBJ1-2)
CASSLQGQAYGYTF

SEQ ID NO: 704159 - protein, 16 aa, Homo sapiens
  CDR3 for alpha chain variable domain of TCR clone 352080 (TRAV12-3, TRAJ53)
CAMSPGSGGSNYKLTF

SEQ ID NO: 704160 - protein, 14 aa, Homo sapiens
  CDR3 for beta chain variable domain of TCR clone 352080 (TRBV19, TRBJ2-1)
CASPTFVLSGERFF

SEQ ID NO: 704161 - protein, 13 aa, Homo sapiens
  CDR3 for alpha chain variable domain of TCR clone 352081 (TRAV36/DV7, TRAJ53)
CAHSGGSNYKLTF

SEQ ID NO: 704162 - protein, 14 aa, Homo sapiens
  CDR3 for beta chain variable domain of TCR clone 352081 (TRBV7-3, TRBJ1-1)
CASSLKGGNTEAFF

SEQ ID NO: 704163 - protein, 19 aa, Homo sapiens
  CDR3 for alpha chain variable domain of TCR clone 352082 (TRAV36/DV7, )
CAANNHIQNPDPAVYQLRD

SEQ ID NO: 704164 - protein, 13 aa, Homo sapiens
  CDR3 for beta chain variable domain of TCR clone 352082 (TRBV28, TRBJ2-7)
CASKAGGVYEQYF

SEQ ID NO: 704165 - protein, 12 aa, Homo sapiens
  CDR3 for alpha chain variable domain of TCR clone 352083 (TRAV38-2/DV8, TRAJ47)
CVLMEYGNKLVF

SEQ ID NO: 704166 - protein, 14 aa, Homo sapiens
  CDR3 for beta chain variable domain of TCR clone 352083 (TRBV20-1, TRBJ1-5)
CSATDRGSNQPEHF

SEQ ID NO: 704167 - protein, 15 aa, Homo sapiens
  CDR3 for alpha chain variable domain of TCR clone 352084 (TRAV12-1, TRAJ9)
CVVSFGDTGGFKTIF

SEQ ID NO: 704168 - protein, 15 aa, Homo sapiens
  CDR3 for beta chain variable domain of TCR clone 352084 (TRBV4-1, TRBJ1-4)
CASSDTGGTNEKLFF

SEQ ID NO: 704169 - protein, 14 aa, Homo sapiens
  CDR3 for alpha chain variable domain of TCR clone 352085 (TRAV23/DV6, TRAJ6)
CAAIPSGGSYIPTL

SEQ ID NO: 704170 - protein, 17 aa, Homo sapiens
  CDR3 for beta chain variable domain of TCR clone 352085 (TRBV7-2, TRBJ2-3)
CASSLGGRAAWRDTQYF

SEQ ID NO: 704171 - protein, 15 aa, Homo sapiens
  CDR3 for alpha chain variable domain of TCR clone 352086 (TRAV8-6, TRAJ6)
CAVSFTSGGSYIPTF

SEQ ID NO: 704172 - protein, 16 aa, Homo sapiens
  CDR3 for beta chain variable domain of TCR clone 352086 (TRBV12-5, TRBJ2-5)
CASGPRTSGNQETQYF

SEQ ID NO: 704173 - protein, 14 aa, Homo sapiens
  CDR3 for alpha chain variable domain of TCR clone 352087 (TRAV13-1, TRAJ44)
CAARATGTASKLTF

SEQ ID NO: 704174 - protein, 15 aa, Homo sapiens
  CDR3 for beta chain variable domain of TCR clone 352087 (TRBV20-1, TRBJ2-7)
CSARDRVSGMDEQYF

SEQ ID NO: 704175 - protein, 13 aa, Homo sapiens
  CDR3 for alpha chain variable domain of TCR clone 352088 (TRAV21, TRAJ27)
CAARPGNAGKSTC

SEQ ID NO: 704176 - protein, 15 aa, Homo sapiens
  CDR3 for beta chain variable domain of TCR clone 352088 (TRBV20-1, TRBJ2-7)
CSAGDRVSGMDEQYF

SEQ ID NO: 704177 - protein, 16 aa, Homo sapiens
  CDR3 for alpha chain variable domain of TCR clone 352089 (TRAV10, TRAJ41)
CLVSLANSNSGYALNF

SEQ ID NO: 704178 - protein, 13 aa, Homo sapiens
  CDR3 for beta chain variable domain of TCR clone 352089 (TRBV15, TRBJ1-2)
CATSRGQLYGYTF

SEQ ID NO: 704179 - protein, 10 aa, Homo sapiens
  CDR3 for alpha chain variable domain of TCR clone 352090 (TRAV12-3, TRAJ18)
CAMSAEAQPW

SEQ ID NO: 704180 - protein, 12 aa, Homo sapiens
  CDR3 for beta chain variable domain of TCR clone 352090 (TRBV3-1, TRBJ2-2)
CASSLFPGELFF

SEQ ID NO: 704181 - protein, 14 aa, Homo sapiens
  CDR3 for alpha chain variable domain of TCR clone 352091 (TRAV12-1, TRAJ12)
CVVNGRDSSYKWIF

SEQ ID NO: 704182 - protein, 13 aa, Homo sapiens
  CDR3 for beta chain variable domain of TCR clone 352091 (TRBV28, TRBJ2-2)
CASIRESTGELFF

SEQ ID NO: 704183 - protein, 15 aa, Homo sapiens
  CDR3 for alpha chain variable domain of TCR clone 352092 (TRAV12-2, TRAJ40)
CRIRGGTSGTYKYIF

SEQ ID NO: 704184 - protein, 13 aa, Homo sapiens
  CDR3 for beta chain variable domain of TCR clone 352092 (TRBV7-9, TRBJ1-2)
CASSLKQNYGYTF

SEQ ID NO: 704185 - protein, 14 aa, Homo sapiens
  CDR3 for alpha chain variable domain of TCR clone 352093 (TRAV1-2, TRAJ16)
CAVNRFSDGQKLLF

SEQ ID NO: 704186 - protein, 18 aa, Homo sapiens
  CDR3 for beta chain variable domain of TCR clone 352093 (TRBV11-3, TRBJ2-2)
CASTLRRGEAGNTGELFF

SEQ ID NO: 704187 - protein, 10 aa, Homo sapiens
  CDR3 for alpha chain variable domain of TCR clone 352094 (TRAV21, TRAJ31)
CAVDHARLMF

SEQ ID NO: 704188 - protein, 13 aa, Homo sapiens
  CDR3 for beta chain variable domain of TCR clone 352094 (TRBV4-1, TRBJ1-1)
CASSRKMNTEAFF

SEQ ID NO: 704189 - protein, 18 aa, Homo sapiens
  CDR3 for alpha chain variable domain of TCR clone 352095 (TRAV12-3, TRAJ52)
CAMSVGGAGGTSYGKLTF

SEQ ID NO: 704190 - protein, 15 aa, Homo sapiens
  CDR3 for beta chain variable domain of TCR clone 352095 (TRBV5-7, TRBJ2-1)
CASSRRLAGDNEQFF

SEQ ID NO: 704191 - protein, 16 aa, Homo sapiens
  CDR3 for alpha chain variable domain of TCR clone 352096 (TRAV16, TRAJ52)
CALSAAGGTSYGKLTF

SEQ ID NO: 704192 - protein, 14 aa, Homo sapiens
  CDR3 for beta chain variable domain of TCR clone 352096 (TRBV11-1, TRBJ1-1)
CASSLPRGGTEAFF

SEQ ID NO: 704193 - protein, 14 aa, Homo sapiens
  CDR3 for alpha chain variable domain of TCR clone 352097 (TRAV1-1, TRAJ27)
CAVIYNTNAGKSTF

SEQ ID NO: 704194 - protein, 14 aa, Homo sapiens
  CDR3 for beta chain variable domain of TCR clone 352097 (TRBV7-2, TRBJ2-1)
SSSSGLAGGNEQFF

SEQ ID NO: 704195 - protein, 15 aa, Homo sapiens
  CDR3 for alpha chain variable domain of TCR clone 352098 (TRAV3, TRAJ20)
CAVRDIRLSDYKLSF

SEQ ID NO: 704196 - protein, 15 aa, Homo sapiens
  CDR3 for beta chain variable domain of TCR clone 352098 (TRBV7-9, TRBJ1-6)
CASSSPGRGNSPLLF

SEQ ID NO: 704197 - protein, 14 aa, Homo sapiens
  CDR3 for alpha chain variable domain of TCR clone 352099 (TRAV17, TRAJ49)
CATDARDTGNQFYF

SEQ ID NO: 704198 - protein, 13 aa, Homo sapiens
  CDR3 for beta chain variable domain of TCR clone 352099 (TRBV28, TRBJ2-5)
CASSFAGGETQYF

SEQ ID NO: 704199 - protein, 14 aa, Homo sapiens
  CDR3 for alpha chain variable domain of TCR clone 352100 (TRAV1-1, TRAJ27)
CAVIYNTNAGKSTF

SEQ ID NO: 704200 - protein, 13 aa, Homo sapiens
  CDR3 for beta chain variable domain of TCR clone 352100 (TRBV12-5, TRBJ1-2)
GASGVRTGNGYTF

SEQ ID NO: 704201 - protein, 11 aa, Homo sapiens
  CDR3 for alpha chain variable domain of TCR clone 352101 (TRAV12-2, TRAJ49)
CAVPTGNQFYF

SEQ ID NO: 704202 - protein, 15 aa, Homo sapiens
  CDR3 for beta chain variable domain of TCR clone 352101 (TRBV9, TRBJ1-6)
CASSVAGTGDSPLHF

SEQ ID NO: 704203 - protein, 14 aa, Homo sapiens
  CDR3 for alpha chain variable domain of TCR clone 352102 (TRAV38-1, TRAJ45)
CASHSGGGADGLTF

SEQ ID NO: 704204 - protein, 17 aa, Homo sapiens
  CDR3 for beta chain variable domain of TCR clone 352102 (TRBV27, TRBJ2-6)
CASSAGTGFSGANVLTF

SEQ ID NO: 704205 - protein, 16 aa, Homo sapiens
  CDR3 for alpha chain variable domain of TCR clone 352103 (TRAV8-4, TRAJ18)
CAVTANGGSTLGRLYF

SEQ ID NO: 704206 - protein, 14 aa, Homo sapiens
  CDR3 for beta chain variable domain of TCR clone 352103 (TRBV12-4, TRBJ1-2)
CASSSAGHVYGYTF

SEQ ID NO: 704207 - protein, 16 aa, Homo sapiens
  CDR3 for alpha chain variable domain of TCR clone 352104 (TRAV13-1, TRAJ45)
CAASWESGGGADGLTF

SEQ ID NO: 704208 - protein, 14 aa, Homo sapiens
  CDR3 for beta chain variable domain of TCR clone 352104 (TRBV12-5, TRBJ2-5)
CASGSRTHQETQYF

SEQ ID NO: 704209 - protein, 16 aa, Homo sapiens
  CDR3 for alpha chain variable domain of TCR clone 352105 (TRAV17, TRAJ52)
CATSNAGGTSYGKLTF

SEQ ID NO: 704210 - protein, 12 aa, Homo sapiens
  CDR3 for beta chain variable domain of TCR clone 352105 (TRBV6-3, TRBJ2-7)
CASSLTPYEQYF

SEQ ID NO: 704211 - protein, 13 aa, Homo sapiens
  CDR3 for alpha chain variable domain of TCR clone 352106 (TRAV13-1, TRAJ17)
CAASRAAGNKLTF

SEQ ID NO: 704212 - protein, 14 aa, Homo sapiens
  CDR3 for beta chain variable domain of TCR clone 352106 (TRBV6-1, TRBJ1-3)
CASVQGGGGNTIYF

SEQ ID NO: 704213 - protein, 11 aa, Homo sapiens
  CDR3 for alpha chain variable domain of TCR clone 352107 (TRAV3, TRAJ17)
PRGAAGNKLTF

SEQ ID NO: 704214 - protein, 16 aa, Homo sapiens
  CDR3 for beta chain variable domain of TCR clone 352107 (TRBV12-4, TRBJ2-5)
CASSLSTSGGKETQYF

SEQ ID NO: 704215 - protein, 14 aa, Homo sapiens
  CDR3 for alpha chain variable domain of TCR clone 352108 (TRAV12-2, TRAJ17)
RAVLFKAAGNKLTF

SEQ ID NO: 704216 - protein, 17 aa, Homo sapiens
  CDR3 for beta chain variable domain of TCR clone 352108 (TRBV20-1, TRBJ2-2)
CSASGSGQGGLTWELFF

SEQ ID NO: 704217 - protein, 15 aa, Homo sapiens
  CDR3 for alpha chain variable domain of TCR clone 352109 (TRAV12-1, TRAJ44)
CVVDTPQGTTSKLTF

SEQ ID NO: 704218 - protein, 14 aa, Homo sapiens
  CDR3 for beta chain variable domain of TCR clone 352109 (TRBV7-9, TRBJ2-1)
CASSPRDSLYEQFF

SEQ ID NO: 704219 - protein, 15 aa, Homo sapiens
  CDR3 for alpha chain variable domain of TCR clone 352110 (TRAV26-1, TRAJ28)
CIVRVAGAWSYQLTF

SEQ ID NO: 704220 - protein, 19 aa, Homo sapiens
  CDR3 for beta chain variable domain of TCR clone 352110 (TRBV7-3, TRBJ2-7)
CASSLTGVAGGWPSYEQYF

SEQ ID NO: 704221 - protein, 14 aa, Homo sapiens
  CDR3 for alpha chain variable domain of TCR clone 352111 (TRAV12-3, TRAJ10)
SHLPLTGGGDKLTF

SEQ ID NO: 704222 - protein, 13 aa, Homo sapiens
  CDR3 for beta chain variable domain of TCR clone 352111 (TRBV7-9, TRBJ2-3)
CASSPGSTDTQYF

SEQ ID NO: 704223 - protein, 15 aa, Homo sapiens
  CDR3 for alpha chain variable domain of TCR clone 352112 (TRAV27, TRAJ38)
CAARRNAGHNRKLIW

SEQ ID NO: 704224 - protein, 13 aa, Homo sapiens
  CDR3 for beta chain variable domain of TCR clone 352112 (TRBV12-5, TRBJ2-3)
CASGDRQSETQYF

SEQ ID NO: 704225 - protein, 14 aa, Homo sapiens
  CDR3 for alpha chain variable domain of TCR clone 352113 (TRAV12-2, TRAJ40)
CAVKIPSGTYKYIF

SEQ ID NO: 704226 - protein, 17 aa, Homo sapiens
  CDR3 for beta chain variable domain of TCR clone 352113 (TRBV13, TRBJ2-3)
CDSSLSRVAGGRNTQYF

SEQ ID NO: 704227 - protein, 13 aa, Homo sapiens
  CDR3 for alpha chain variable domain of TCR clone 352114 (TRAV20, TRAJ37)
CAGCSSNTGKLIF

SEQ ID NO: 704228 - protein, 11 aa, Homo sapiens
  CDR3 for beta chain variable domain of TCR clone 352114 (TRBV6-3, TRBJ2-3)
CATGQADTQYF

SEQ ID NO: 704229 - protein, 20 aa, Homo sapiens
  CDR3 for alpha chain variable domain of TCR clone 352115 (TRAV2, )
CAVEEQIPDIQNPDPAVYQL

SEQ ID NO: 704230 - protein, 15 aa, Homo sapiens
  CDR3 for beta chain variable domain of TCR clone 352115 (TRBV7-2, TRBJ2-3)
CASSSTGLETDTQYF

SEQ ID NO: 704231 - protein, 15 aa, Homo sapiens
  CDR3 for alpha chain variable domain of TCR clone 352116 (TRAV21, TRAJ53)
CATLNSGGSNYKLTF

SEQ ID NO: 704232 - protein, 14 aa, Homo sapiens
  CDR3 for beta chain variable domain of TCR clone 352116 (TRBV15, TRBJ2-5)
CATSIGGLGETQYF

SEQ ID NO: 704233 - protein, 14 aa, Homo sapiens
  CDR3 for alpha chain variable domain of TCR clone 352117 (TRAV3, TRAJ21)
CAVRDAYNFNKFYF

SEQ ID NO: 704234 - protein, 15 aa, Homo sapiens
  CDR3 for beta chain variable domain of TCR clone 352117 (TRBV6-5, TRBJ1-5)
CANSYSWDSNQPQHF

SEQ ID NO: 704235 - protein, 14 aa, Homo sapiens
  CDR3 for alpha chain variable domain of TCR clone 352118 (TRAV4, TRAJ26)
CLVGPHNYGQNFVF

SEQ ID NO: 704236 - protein, 13 aa, Homo sapiens
  CDR3 for beta chain variable domain of TCR clone 352118 (TRBV4-1, TRBJ2-5)
CASSQEVQETQYF

SEQ ID NO: 704237 - protein, 14 aa, Homo sapiens
  CDR3 for alpha chain variable domain of TCR clone 352119 (TRAV23/DV6, TRAJ17)
CAASIGATGTKLTF

SEQ ID NO: 704238 - protein, 12 aa, Homo sapiens
  CDR3 for beta chain variable domain of TCR clone 352119 (TRBV20-1, TRBJ2-5)
CSAGGAGETQYF

SEQ ID NO: 704239 - protein, 14 aa, Homo sapiens
  CDR3 for alpha chain variable domain of TCR clone 352120 (TRAV1-2, TRAJ8)
CAVREDTGFQKLVF

SEQ ID NO: 704240 - protein, 17 aa, Homo sapiens
  CDR3 for beta chain variable domain of TCR clone 352120 (TRBV13, TRBJ2-3)
CASSLSRAAGGRNTQYF

SEQ ID NO: 704241 - protein, 13 aa, Homo sapiens
  CDR3 for alpha chain variable domain of TCR clone 352121 (TRAV2, TRAJ13)
CAVESGGYQKVIF

SEQ ID NO: 704242 - protein, 13 aa, Homo sapiens
  CDR3 for beta chain variable domain of TCR clone 352121 (TRBV7-2, TRBJ1-1)
CASNLKGAKVAFF

SEQ ID NO: 704243 - protein, 18 aa, Homo sapiens
  CDR3 for alpha chain variable domain of TCR clone 352122 (TRAV12-3, TRAJ52)
CAMSVGGAGGTSYGKLTF

SEQ ID NO: 704244 - protein, 14 aa, Homo sapiens
  CDR3 for beta chain variable domain of TCR clone 352122 (TRBV11-2, TRBJ2-5)
CASRPLAGRETQYF

SEQ ID NO: 704245 - protein, 12 aa, Homo sapiens
  CDR3 for alpha chain variable domain of TCR clone 352123 (TRAV29/DV5, TRAJ41)
CAAISSGYALNF

SEQ ID NO: 704246 - protein, 17 aa, Homo sapiens
  CDR3 for beta chain variable domain of TCR clone 352123 (TRBV18, TRBJ2-1)
CASSKGLSGVADNEQFF

SEQ ID NO: 704247 - protein, 14 aa, Homo sapiens
  CDR3 for alpha chain variable domain of TCR clone 352124 (TRAV1-2, TRAJ16)
CAVNRFSDGQKLLF

SEQ ID NO: 704248 - protein, 14 aa, Homo sapiens
  CDR3 for beta chain variable domain of TCR clone 352124 (TRBV19, TRBJ2-1)
CASGRAGPGNEQFF

SEQ ID NO: 704249 - protein, 14 aa, Homo sapiens
  CDR3 for alpha chain variable domain of TCR clone 352125 (TRAV23/DV6, TRAJ24)
CAASLSDSWGKLQF

SEQ ID NO: 704250 - protein, 16 aa, Homo sapiens
  CDR3 for beta chain variable domain of TCR clone 352125 (TRBV7-9, TRBJ2-6)
CASSLKGPLRANVRTF

SEQ ID NO: 704251 - protein, 20 aa, Homo sapiens
  CDR3 for alpha chain variable domain of TCR clone 352126 (TRAV26-1, TRAJ42)
CCVLLHRQTYYGGSQGNLIF

SEQ ID NO: 704252 - protein, 16 aa, Homo sapiens
  CDR3 for beta chain variable domain of TCR clone 352126 (TRBV7-2, TRBJ2-7)
CASSLVTGVGSYEQYF

SEQ ID NO: 704253 - protein, 16 aa, Homo sapiens
  CDR3 for alpha chain variable domain of TCR clone 352127 (TRAV1-2, TRAJ10)
CAVRGVLTGGGNKLTF

SEQ ID NO: 704254 - protein, 16 aa, Homo sapiens
  CDR3 for beta chain variable domain of TCR clone 352127 (TRBV7-2, TRBJ1-4)
CASSLAPGRRDEKLFF

SEQ ID NO: 704255 - protein, 15 aa, Homo sapiens
  CDR3 for alpha chain variable domain of TCR clone 352128 (TRAV8-4, TRAJ40)
CALSSITSGTYTYIF

SEQ ID NO: 704256 - protein, 13 aa, Homo sapiens
  CDR3 for beta chain variable domain of TCR clone 352128 (TRBV2, TRBJ2-1)
CATSRGTDNEQFF

SEQ ID NO: 704257 - protein, 16 aa, Homo sapiens
  CDR3 for alpha chain variable domain of TCR clone 352129 (TRAV30, TRAJ26)
CGTESVGDNYGQNFVF

SEQ ID NO: 704258 - protein, 15 aa, Homo sapiens
  CDR3 for beta chain variable domain of TCR clone 352129 (TRBV7-9, TRBJ1-5)
CASSQGHQPNQPQHF

SEQ ID NO: 704259 - protein, 14 aa, Homo sapiens
  CDR3 for alpha chain variable domain of TCR clone 352130 (TRAV8-3, TRAJ4)
CAVGAAGGYNKLMF

SEQ ID NO: 704260 - protein, 13 aa, Homo sapiens
  CDR3 for beta chain variable domain of TCR clone 352130 (TRBV3-1, TRBJ1-1)
CAGSPGVITEAFF

SEQ ID NO: 704261 - protein, 13 aa, Homo sapiens
  CDR3 for alpha chain variable domain of TCR clone 352131 (TRAV35, TRAJ42)
CAVFPGSQGNPIF

SEQ ID NO: 704262 - protein, 14 aa, Homo sapiens
  CDR3 for beta chain variable domain of TCR clone 352131 (TRBV19, TRBJ2-1)
CASPTFVLSGEQFF

SEQ ID NO: 704263 - protein, 12 aa, Homo sapiens
  CDR3 for alpha chain variable domain of TCR clone 352132 (TRAV23/DV6, TRAJ33)
CAPLDSNYQLIW

SEQ ID NO: 704264 - protein, 14 aa, Homo sapiens
  CDR3 for beta chain variable domain of TCR clone 352132 (TRBV12-5, TRBJ2-5)
CASGSRTHQETQYF

SEQ ID NO: 704265 - protein, 22 aa, Homo sapiens
  CDR3 for alpha chain variable domain of TCR clone 352133 (TRAV2, )
CAVEDRIGNNHIQNPDPAVYQL

SEQ ID NO: 704266 - protein, 14 aa, Homo sapiens
  CDR3 for beta chain variable domain of TCR clone 352133 (TRBV20-1, TRBJ1-3)
CSASPTGAGNTIYF

SEQ ID NO: 704267 - protein, 14 aa, Homo sapiens
  CDR3 for alpha chain variable domain of TCR clone 352134 (TRAV1-2, TRAJ8)
WAVREDTGFQKLVF

SEQ ID NO: 704268 - protein, 16 aa, Homo sapiens
  CDR3 for beta chain variable domain of TCR clone 352134 (TRBV28, TRBJ1-4)
CASSPPCRGRSEKLFF

SEQ ID NO: 704269 - protein, 15 aa, Homo sapiens
  CDR3 for alpha chain variable domain of TCR clone 352135 (TRAV27, TRAJ38)
CAGRFNAGNNSKLIW

SEQ ID NO: 704270 - protein, 13 aa, Homo sapiens
  CDR3 for beta chain variable domain of TCR clone 352135 (TRBV20-1, TRBJ1-1)
CSARVGGNTEAFF

SEQ ID NO: 704271 - protein, 13 aa, Homo sapiens
  CDR3 for alpha chain variable domain of TCR clone 352136 (TRAV23/DV6, TRAJ34)
CAAIENNTDKLIF

SEQ ID NO: 704272 - protein, 12 aa, Homo sapiens
  CDR3 for beta chain variable domain of TCR clone 352136 (TRBV7-8, TRBJ2-7)
CASSLGDREQYF

SEQ ID NO: 704273 - protein, 13 aa, Homo sapiens
  CDR3 for alpha chain variable domain of TCR clone 352137 (TRAV23/DV6, TRAJ35)
CAAQLGFGNVLHC

SEQ ID NO: 704274 - protein, 14 aa, Homo sapiens
  CDR3 for beta chain variable domain of TCR clone 352137 (TRBV19, TRBJ2-1)
CASPTFVLSGEQFF

SEQ ID NO: 704275 - protein, 16 aa, Homo sapiens
  CDR3 for alpha chain variable domain of TCR clone 352138 (TRAV3, TRAJ42)
CAVRRNYGGSQGNLIF

SEQ ID NO: 704276 - protein, 15 aa, Homo sapiens
  CDR3 for beta chain variable domain of TCR clone 352138 (TRBV28, TRBJ1-3)
CASSMGWASGNTIYF

SEQ ID NO: 704277 - protein, 15 aa, Homo sapiens
  CDR3 for alpha chain variable domain of TCR clone 352139 (TRAV3, TRAJ13)
CAVRVYSGGYQKVTF

SEQ ID NO: 704278 - protein, 15 aa, Homo sapiens
  CDR3 for beta chain variable domain of TCR clone 352139 (TRBV5-7, TRBJ1-2)
CDSSLGVAANYGYTF

SEQ ID NO: 704279 - protein, 15 aa, Homo sapiens
  CDR3 for alpha chain variable domain of TCR clone 352140 (TRAV12-1, TRAJ44)
CVVFVNTGTASKLTF

SEQ ID NO: 704280 - protein, 14 aa, Homo sapiens
  CDR3 for beta chain variable domain of TCR clone 352140 (TRBV20-1, TRBJ2-3)
CSATPVGPTDTQYF

SEQ ID NO: 704281 - protein, 13 aa, Homo sapiens
  CDR3 for alpha chain variable domain of TCR clone 352141 (TRAV8-3, TRAJ28)
CAVGAVGSYQPTF

SEQ ID NO: 704282 - protein, 15 aa, Homo sapiens
  CDR3 for beta chain variable domain of TCR clone 352141 (TRBV28, TRBJ2-5)
CASSPGQGSIETQYF

SEQ ID NO: 704283 - protein, 18 aa, Homo sapiens
  CDR3 for alpha chain variable domain of TCR clone 352142 (TRAV29/DV5, TRAJ26)
CSVLLCSKRKPEVQNFVF

SEQ ID NO: 704284 - protein, 17 aa, Homo sapiens
  CDR3 for beta chain variable domain of TCR clone 352142 (TRBV20-1, TRBJ2-2)
CSASGSGQGGLTGELFF

SEQ ID NO: 704285 - protein, 13 aa, Homo sapiens
  CDR3 for alpha chain variable domain of TCR clone 352143 (TRAV8-3, TRAJ40)
CAVGAQYLRNLQI

SEQ ID NO: 704286 - protein, 15 aa, Homo sapiens
  CDR3 for beta chain variable domain of TCR clone 352143 (TRBV27, TRBJ2-1)
CASSNGGESSNEQFL

SEQ ID NO: 704287 - protein, 14 aa, Homo sapiens
  CDR3 for alpha chain variable domain of TCR clone 352144 (TRAV13-1, TRAJ35)
CAASKGGFGNVLHR

SEQ ID NO: 704288 - protein, 11 aa, Homo sapiens
  CDR3 for beta chain variable domain of TCR clone 352144 (TRBV6-9, TRBJ2-7)
CAGRVASEQYF

SEQ ID NO: 704289 - protein, 15 aa, Homo sapiens
  CDR3 for alpha chain variable domain of TCR clone 352145 (TRAV26-1, TRAJ48)
CIARWSWFGIEKLTF

SEQ ID NO: 704290 - protein, 12 aa, Homo sapiens
  CDR3 for beta chain variable domain of TCR clone 352145 (TRBV19, TRBJ2-5)
CASSISEETQYF

SEQ ID NO: 704291 - protein, 22 aa, Homo sapiens
  CDR3 for alpha chain variable domain of TCR clone 352146 (TRAV2, TRAJ9)
CAVDPILEASKLSLEQEQDYLL

SEQ ID NO: 704292 - protein, 14 aa, Homo sapiens
  CDR3 for beta chain variable domain of TCR clone 352146 (TRBV7-2, TRBJ2-7)
CASSPKTSFYEQYF

SEQ ID NO: 704293 - protein, 14 aa, Homo sapiens
  CDR3 for alpha chain variable domain of TCR clone 352147 (TRAV21, TRAJ38)
CAVTGAGNNRKLIW

SEQ ID NO: 704294 - protein, 13 aa, Homo sapiens
  CDR3 for beta chain variable domain of TCR clone 352147 (TRBV7-3, TRBJ2-5)
CASSIGFFETQYF

SEQ ID NO: 704295 - protein, 12 aa, Homo sapiens
  CDR3 for alpha chain variable domain of TCR clone 352148 (TRAV26-2, TRAJ21)
CILKGNFNKFYF

SEQ ID NO: 704296 - protein, 13 aa, Homo sapiens
  CDR3 for beta chain variable domain of TCR clone 352148 (TRBV19, TRBJ1-2)
CASSVPGQDGYTF

SEQ ID NO: 704297 - protein, 15 aa, Homo sapiens
  CDR3 for alpha chain variable domain of TCR clone 352149 (TRAV35, TRAJ58)
CAGRRQETSSSRLTF

SEQ ID NO: 704298 - protein, 16 aa, Homo sapiens
  CDR3 for beta chain variable domain of TCR clone 352149 (TRBV2, TRBJ2-1)
CASSVGGSLSYNEQFF

SEQ ID NO: 704299 - protein, 16 aa, Homo sapiens
  CDR3 for alpha chain variable domain of TCR clone 352150 (TRAV13-1, TRAJ13)
CTAFFLGVTRQLPLEL

SEQ ID NO: 704300 - protein, 15 aa, Homo sapiens
  CDR3 for beta chain variable domain of TCR clone 352150 (TRBV6-5, TRBJ2-1)
CASSYDAGAGNEQFF

SEQ ID NO: 704301 - protein, 15 aa, Homo sapiens
  CDR3 for alpha chain variable domain of TCR clone 352151 (TRAV3, TRAJ22)
CAVRDRGGSARQLTI

SEQ ID NO: 704302 - protein, 20 aa, Homo sapiens
  CDR3 for beta chain variable domain of TCR clone 352151 (TRBV11-2, TRBJ1-6)
CASSLVFATGGSVHPSTLGT

SEQ ID NO: 704303 - protein, 16 aa, Homo sapiens
  CDR3 for alpha chain variable domain of TCR clone 352152 (TRAV30, TRAJ24)
CGTEIVDADSWGKFQF

SEQ ID NO: 704304 - protein, 17 aa, Homo sapiens
  CDR3 for beta chain variable domain of TCR clone 352152 (TRBV2, TRBJ2-7)
CASSQALTGWDSYEQYF

SEQ ID NO: 704305 - protein, 12 aa, Homo sapiens
  CDR3 for alpha chain variable domain of TCR clone 352153 (TRAV12-3, TRAJ5)
CAMDSGRRALTF

SEQ ID NO: 704306 - protein, 13 aa, Homo sapiens
  CDR3 for beta chain variable domain of TCR clone 352153 (TRBV7-7, TRBJ2-2)
CASSLTSAGELFF

SEQ ID NO: 704307 - protein, 17 aa, Homo sapiens
  CDR3 for alpha chain variable domain of TCR clone 352154 (TRAV3, TRAJ7)
CAVRDMSPLEGTTDSLL

SEQ ID NO: 704308 - protein, 17 aa, Homo sapiens
  CDR3 for beta chain variable domain of TCR clone 352154 (TRBV15, TRBJ1-2)
CDTSGREIDVVNYGYTF

SEQ ID NO: 704309 - protein, 14 aa, Homo sapiens
  CDR3 for alpha chain variable domain of TCR clone 352155 (TRAV21, TRAJ45)
CAVSPGGGAAGLTF

SEQ ID NO: 704310 - protein, 14 aa, Homo sapiens
  CDR3 for beta chain variable domain of TCR clone 352155 (TRBV20-1, TRBJ1-3)
CSASPTGAGNTIYF

SEQ ID NO: 704311 - protein, 12 aa, Homo sapiens
  CDR3 for alpha chain variable domain of TCR clone 352156 (TRAV12-3, TRAJ39)
CAMTQAGNMLTF

SEQ ID NO: 704312 - protein, 12 aa, Homo sapiens
  CDR3 for beta chain variable domain of TCR clone 352156 (TRBV29-1, TRBJ2-3)
CSVTGGADTQYF

SEQ ID NO: 704313 - protein, 17 aa, Homo sapiens
  CDR3 for alpha chain variable domain of TCR clone 352157 (TRAV26-1, TRAJ46)
IASSESEKKSSGDKLTF

SEQ ID NO: 704314 - protein, 15 aa, Homo sapiens
  CDR3 for beta chain variable domain of TCR clone 352157 (TRBV9, TRBJ1-6)
CASSVAGTGDSPLHF

SEQ ID NO: 704315 - protein, 14 aa, Homo sapiens
  CDR3 for alpha chain variable domain of TCR clone 352158 (TRAV17, TRAJ22)
CATVLSGSTRQLPF

SEQ ID NO: 704316 - protein, 13 aa, Homo sapiens
  CDR3 for beta chain variable domain of TCR clone 352158 (TRBV15, TRBJ1-6)
CATSGGLNSPLHF

SEQ ID NO: 704317 - protein, 12 aa, Homo sapiens
  CDR3 for alpha chain variable domain of TCR clone 352159 (TRAV3, TRAJ39)
CAVIEWSTMLTF

SEQ ID NO: 704318 - protein, 14 aa, Homo sapiens
  CDR3 for beta chain variable domain of TCR clone 352159 (TRBV7-8, TRBJ2-3)
CASSFPDGQDTQYS

SEQ ID NO: 704319 - protein, 14 aa, Homo sapiens
  CDR3 for alpha chain variable domain of TCR clone 352160 (TRAV12-2, TRAJ40)
CAVKIPSGTYKYIF

SEQ ID NO: 704320 - protein, 17 aa, Homo sapiens
  CDR3 for beta chain variable domain of TCR clone 352160 (TRBV7-8, TRBJ2-6)
CASSGGTGGAGANVLTF

SEQ ID NO: 704321 - protein, 13 aa, Homo sapiens
  CDR3 for alpha chain variable domain of TCR clone 352161 (TRAV9-2, TRAJ49)
CALIQIGGKQFYF

SEQ ID NO: 704322 - protein, 13 aa, Homo sapiens
  CDR3 for beta chain variable domain of TCR clone 352161 (TRBV5-5, TRBJ1-2)
CASSFWRGEDYTF

SEQ ID NO: 704323 - protein, 14 aa, Homo sapiens
  CDR3 for alpha chain variable domain of TCR clone 352162 (TRAV12-3, TRAJ6)
CVMSATGGSYIPTF

SEQ ID NO: 704324 - protein, 16 aa, Homo sapiens
  CDR3 for beta chain variable domain of TCR clone 352162 (TRBV4-2, TRBJ2-1)
CASSRRAGQGANEQFF

SEQ ID NO: 704325 - protein, 14 aa, Homo sapiens
  CDR3 for alpha chain variable domain of TCR clone 352163 (TRAV16, TRAJ33)
CALSAMDSNYQLIW

SEQ ID NO: 704326 - protein, 17 aa, Homo sapiens
  CDR3 for beta chain variable domain of TCR clone 352163 (TRBV28, TRBJ2-1)
CASTGPGLAVSEDEQFF

SEQ ID NO: 704327 - protein, 14 aa, Homo sapiens
  CDR3 for alpha chain variable domain of TCR clone 352164 (TRAV1-2, TRAJ27)
CAPAEYTNAGKSTF

SEQ ID NO: 704328 - protein, 18 aa, Homo sapiens
  CDR3 for beta chain variable domain of TCR clone 352164 (TRBV28, TRBJ1-2)
CASTQQQGKRGSNYGYTF

SEQ ID NO: 704329 - protein, 14 aa, Homo sapiens
  CDR3 for alpha chain variable domain of TCR clone 352165 (TRAV1-2, TRAJ8)
CAEREDTGFQKLVF

SEQ ID NO: 704330 - protein, 13 aa, Homo sapiens
  CDR3 for beta chain variable domain of TCR clone 352165 (TRBV12-4, TRBJ1-2)
CASSLRQGKGYTF

SEQ ID NO: 704331 - protein, 10 aa, Homo sapiens
  CDR3 for alpha chain variable domain of TCR clone 352166 (TRAV1-2, TRAJ18)
CAVRGEAQPW

SEQ ID NO: 704332 - protein, 16 aa, Homo sapiens
  CDR3 for beta chain variable domain of TCR clone 352166 (TRBV19, TRBJ2-1)
CASSSKGTRSYNEQFF

SEQ ID NO: 704333 - protein, 13 aa, Homo sapiens
  CDR3 for alpha chain variable domain of TCR clone 352167 (TRAV21, TRAJ27)
CAVRPGNAGKSTF

SEQ ID NO: 704334 - protein, 13 aa, Homo sapiens
  CDR3 for beta chain variable domain of TCR clone 352167 (TRBV13, TRBJ2-1)
CASILGGRGEQFF

SEQ ID NO: 704335 - protein, 13 aa, Homo sapiens
  CDR3 for alpha chain variable domain of TCR clone 352168 (TRAV3, TRAJ8)
CAVRFTGFQKLVF

SEQ ID NO: 704336 - protein, 16 aa, Homo sapiens
  CDR3 for beta chain variable domain of TCR clone 352168 (TRBV19, TRBJ2-2)
CASRSPGTGATGELFF

SEQ ID NO: 704337 - protein, 13 aa, Homo sapiens
  CDR3 for alpha chain variable domain of TCR clone 352169 (TRAV13-1, TRAJ48)
CAAASFGNEQLTF

SEQ ID NO: 704338 - protein, 14 aa, Homo sapiens
  CDR3 for beta chain variable domain of TCR clone 352169 (TRBV18, TRBJ2-1)
CASSPGTSETEQFF

SEQ ID NO: 704339 - protein, 16 aa, Homo sapiens
  CDR3 for alpha chain variable domain of TCR clone 352170 (TRAV20, TRAJ22)
CAVQASSSGSARQLTF

SEQ ID NO: 704340 - protein, 13 aa, Homo sapiens
  CDR3 for beta chain variable domain of TCR clone 352170 (TRBV2, TRBJ2-7)
CASSVGGSGEQYF

SEQ ID NO: 704341 - protein, 13 aa, Homo sapiens
  CDR3 for alpha chain variable domain of TCR clone 352171 (TRAV20, TRAJ37)
CAGCSSNTGKLIF

SEQ ID NO: 704342 - protein, 14 aa, Homo sapiens
  CDR3 for beta chain variable domain of TCR clone 352171 (TRBV7-2, TRBJ2-7)
CASSLYPGRYEQYF

SEQ ID NO: 704343 - protein, 15 aa, Homo sapiens
  CDR3 for alpha chain variable domain of TCR clone 352172 (TRAV26-1, TRAJ44)
CIVRIGTGPASKLTF

SEQ ID NO: 704344 - protein, 15 aa, Homo sapiens
  CDR3 for beta chain variable domain of TCR clone 352172 (TRBV7-6, TRBJ2-1)
CASSSLAVEGNEQFF

SEQ ID NO: 704345 - protein, 16 aa, Homo sapiens
  CDR3 for alpha chain variable domain of TCR clone 352173 (TRAV4, TRAJ22)
CLVGDLYSGSARQLTF

SEQ ID NO: 704346 - protein, 20 aa, Homo sapiens
  CDR3 for beta chain variable domain of TCR clone 352173 (TRBV7-8, TRBJ2-2)
CASSHLFPGPTIHITGELFF

SEQ ID NO: 704347 - protein, 10 aa, Homo sapiens
  CDR3 for alpha chain variable domain of TCR clone 352174 (TRAV18, TRAJ31)
CARGGARLMF

SEQ ID NO: 704348 - protein, 14 aa, Homo sapiens
  CDR3 for beta chain variable domain of TCR clone 352174 (TRBV7-8, TRBJ1-2)
CASSPDSLSYGYTF

SEQ ID NO: 704349 - protein, 13 aa, Homo sapiens
  CDR3 for alpha chain variable domain of TCR clone 352175 (TRAV12-2, TRAJ24)
CAVSTDSWGQLQF

SEQ ID NO: 704350 - protein, 12 aa, Homo sapiens
  CDR3 for beta chain variable domain of TCR clone 352175 (TRBV7-6, TRBJ2-7)
CASSLADSEQYF

SEQ ID NO: 704351 - protein, 13 aa, Homo sapiens
  CDR3 for alpha chain variable domain of TCR clone 352176 (TRAV12-1, TRAJ34)
CVVTGYNTAKLIF

SEQ ID NO: 704352 - protein, 13 aa, Homo sapiens
  CDR3 for beta chain variable domain of TCR clone 352176 (TRBV28, TRBJ2-7)
CASKAGGVYEQYL

SEQ ID NO: 704353 - protein, 12 aa, Homo sapiens
  CDR3 for alpha chain variable domain of TCR clone 352177 (TRAV12-2, TRAJ31)
CAANTPDARLMF

SEQ ID NO: 704354 - protein, 13 aa, Homo sapiens
  CDR3 for beta chain variable domain of TCR clone 352177 (TRBV28, TRBJ2-1)
CASRSGGLNEQFF

SEQ ID NO: 704355 - protein, 15 aa, Homo sapiens
  CDR3 for alpha chain variable domain of TCR clone 352178 (TRAV26-1, TRAJ29)
CIVRVEGSGNTPLVF

SEQ ID NO: 704356 - protein, 16 aa, Homo sapiens
  CDR3 for beta chain variable domain of TCR clone 352178 (TRBV7-2, TRBJ2-3)
CASSPRTGVSTDTQYF

SEQ ID NO: 704357 - protein, 11 aa, Homo sapiens
  CDR3 for alpha chain variable domain of TCR clone 352179 (TRAV2, TRAJ33)
CAVESNYQLIW

SEQ ID NO: 704358 - protein, 17 aa, Homo sapiens
  CDR3 for beta chain variable domain of TCR clone 352179 (TRBV7-3, TRBJ2-2)
CASSLSGTSGGTGELFF

SEQ ID NO: 704359 - protein, 13 aa, Homo sapiens
  CDR3 for alpha chain variable domain of TCR clone 352180 (TRAV27, TRAJ45)
CRSSGGGADGLTF

SEQ ID NO: 704360 - protein, 13 aa, Homo sapiens
  CDR3 for beta chain variable domain of TCR clone 352180 (TRBV19, TRBJ1-1)
CASSIGPQAEAFF

SEQ ID NO: 704361 - protein, 12 aa, Homo sapiens
  CDR3 for alpha chain variable domain of TCR clone 352181 (TRAV12-1, TRAJ6)
FVVSERSYIPTF

SEQ ID NO: 704362 - protein, 21 aa, Homo sapiens
  CDR3 for beta chain variable domain of TCR clone 352181 (TRBV7-3, TRBJ2-1)
GGTQPCISVPAAYGLAGAQFF

SEQ ID NO: 704363 - protein, 16 aa, Homo sapiens
  CDR3 for alpha chain variable domain of TCR clone 352182 (TRAV23/DV6, TRAJ9)
CAARIGGNTGGFKTIL

SEQ ID NO: 704364 - protein, 14 aa, Homo sapiens
  CDR3 for beta chain variable domain of TCR clone 352182 (TRBV9, TRBJ2-7)
CASSVGVGSYEQYF

SEQ ID NO: 704365 - protein, 13 aa, Homo sapiens
  CDR3 for alpha chain variable domain of TCR clone 352183 (TRAV8-3, TRAJ50)
CAVDQTSYDKVIF

SEQ ID NO: 704366 - protein, 12 aa, Homo sapiens
  CDR3 for beta chain variable domain of TCR clone 352183 (TRBV29-1, TRBJ2-3)
CSVTGGADTQYF

SEQ ID NO: 704367 - protein, 16 aa, Homo sapiens
  CDR3 for alpha chain variable domain of TCR clone 352184 (TRAV30, TRAJ24)
CGTEIVDADSCGQFQF

SEQ ID NO: 704368 - protein, 14 aa, Homo sapiens
  CDR3 for beta chain variable domain of TCR clone 352184 (TRBV12-5, TRBJ2-5)
CASGSRTHQGTQYF

SEQ ID NO: 704369 - protein, 12 aa, Homo sapiens
  CDR3 for alpha chain variable domain of TCR clone 352185 (TRAV27, TRAJ11)
CAGASGYSTLTF

SEQ ID NO: 704370 - protein, 18 aa, Homo sapiens
  CDR3 for beta chain variable domain of TCR clone 352185 (TRBV11-2, TRBJ2-3)
CASSLGGASRGAPNTQYF

SEQ ID NO: 704371 - protein, 11 aa, Homo sapiens
  CDR3 for alpha chain variable domain of TCR clone 352186 (TRAV1-1, TRAJ3)
CAVRSASKIIF

SEQ ID NO: 704372 - protein, 15 aa, Homo sapiens
  CDR3 for beta chain variable domain of TCR clone 352186 (TRBV7-2, TRBJ2-7)
CASSLTGQGTYEQYF

SEQ ID NO: 704373 - protein, 13 aa, Homo sapiens
  CDR3 for alpha chain variable domain of TCR clone 352187 (TRAV35, TRAJ57)
FAGSQGGSEKLVF

SEQ ID NO: 704374 - protein, 15 aa, Homo sapiens
  CDR3 for beta chain variable domain of TCR clone 352187 (TRBV20-1, TRBJ2-7)
CSARDRVSGMDEQYF

SEQ ID NO: 704375 - protein, 18 aa, Homo sapiens
  CDR3 for alpha chain variable domain of TCR clone 352188 (TRAV13-1, TRAJ52)
CAASKRSAGGTSYGKLTF

SEQ ID NO: 704376 - protein, 13 aa, Homo sapiens
  CDR3 for beta chain variable domain of TCR clone 352188 (TRBV12-4, TRBJ1-2)
CASSLRQGKGYAI

SEQ ID NO: 704377 - protein, 14 aa, Homo sapiens
  CDR3 for alpha chain variable domain of TCR clone 352189 (TRAV16, TRAJ31)
CALSGRNNNARLMF

SEQ ID NO: 704378 - protein, 15 aa, Homo sapiens
  CDR3 for beta chain variable domain of TCR clone 352189 (TRBV11-2, TRBJ1-3)
CASSAHSSSGNTIYF

SEQ ID NO: 704379 - protein, 14 aa, Homo sapiens
  CDR3 for alpha chain variable domain of TCR clone 352190 (TRAV8-3, TRAJ13)
CAVGAQEGYQKVTF

SEQ ID NO: 704380 - protein, 14 aa, Homo sapiens
  CDR3 for beta chain variable domain of TCR clone 352190 (TRBV15, TRBJ2-2)
CHQRNRRESGELFF

SEQ ID NO: 704381 - protein, 14 aa, Homo sapiens
  CDR3 for alpha chain variable domain of TCR clone 352191 (TRAV8-3, TRAJ42)
CAVGAWGSQGNLIF

SEQ ID NO: 704382 - protein, 15 aa, Homo sapiens
  CDR3 for beta chain variable domain of TCR clone 352191 (TRBV10-3, TRBJ2-1)
CAISGGREGSDEQFF

SEQ ID NO: 704383 - protein, 16 aa, Homo sapiens
  CDR3 for alpha chain variable domain of TCR clone 352192 (TRAV30, TRAJ24)
CGTEIVDADSWGKFQF

SEQ ID NO: 704384 - protein, 17 aa, Homo sapiens
  CDR3 for beta chain variable domain of TCR clone 352192 (TRBV13, TRBJ2-3)
CASSLSRVAGGRNAQYF

SEQ ID NO: 704385 - protein, 11 aa, Homo sapiens
  CDR3 for alpha chain variable domain of TCR clone 352193 (TRAV1-2, TRAJ20)
CSVANDYNLSF

SEQ ID NO: 704386 - protein, 18 aa, Homo sapiens
  CDR3 for beta chain variable domain of TCR clone 352193 (TRBV20-1, TRBJ2-6)
CSAETTPTHGSGANVLTF

SEQ ID NO: 704387 - protein, 12 aa, Homo sapiens
  CDR3 for alpha chain variable domain of TCR clone 352194 (TRAV3, TRAJ31)
CSVRDGNARLMF

SEQ ID NO: 704388 - protein, 18 aa, Homo sapiens
  CDR3 for beta chain variable domain of TCR clone 352194 (TRBV7-2, TRBJ2-3)
CASSLKREGSGITDTQYF

SEQ ID NO: 704389 - protein, 16 aa, Homo sapiens
  CDR3 for alpha chain variable domain of TCR clone 352195 (TRAV30, TRAJ24)
CGTEIVDADSWGKFQF

SEQ ID NO: 704390 - protein, 13 aa, Homo sapiens
  CDR3 for beta chain variable domain of TCR clone 352195 (TRBV20-1, TRBJ1-1)
CSAPPGGLTEAFF

SEQ ID NO: 704391 - protein, 17 aa, Homo sapiens
  CDR3 for alpha chain variable domain of TCR clone 352196 (TRAV1-2, TRAJ26)
LPLCCERPDNYGQTFVF

SEQ ID NO: 704392 - protein, 15 aa, Homo sapiens
  CDR3 for beta chain variable domain of TCR clone 352196 (TRBV9, TRBJ1-6)
CASSVAGTGDSPLHF

SEQ ID NO: 704393 - protein, 14 aa, Homo sapiens
  CDR3 for alpha chain variable domain of TCR clone 352197 (TRAV8-2, TRAJ11)
CVVNEKSGYSTLTF

SEQ ID NO: 704394 - protein, 16 aa, Homo sapiens
  CDR3 for beta chain variable domain of TCR clone 352197 (TRBV28, TRBJ2-1)
CASSSPEYPRDNEQFF

SEQ ID NO: 704395 - protein, 14 aa, Homo sapiens
  CDR3 for alpha chain variable domain of TCR clone 352198 (TRAV3, TRAJ34)
CAVRAPGNTDKLIF

SEQ ID NO: 704396 - protein, 14 aa, Homo sapiens
  CDR3 for beta chain variable domain of TCR clone 352198 (TRBV5-4, TRBJ1-1)
CASSLDSRRDEAFY

SEQ ID NO: 704397 - protein, 12 aa, Homo sapiens
  CDR3 for alpha chain variable domain of TCR clone 352199 (TRAV8-3, TRAJ27)
CAVGAEAGKSTF

SEQ ID NO: 704398 - protein, 14 aa, Homo sapiens
  CDR3 for beta chain variable domain of TCR clone 352199 (TRBV2, TRBJ2-1)
CASSLIVGHDEQFF

SEQ ID NO: 704399 - protein, 19 aa, Homo sapiens
  CDR3 for alpha chain variable domain of TCR clone 352200 (TRAV3, TRAJ37)
CAVRDIVGGYPSNTGKLIF

SEQ ID NO: 704400 - protein, 13 aa, Homo sapiens
  CDR3 for beta chain variable domain of TCR clone 352200 (TRBV7-8, TRBJ2-3)
CASSLEAGTYAVF

SEQ ID NO: 704401 - protein, 15 aa, Homo sapiens
  CDR3 for alpha chain variable domain of TCR clone 352201 (TRAV4, TRAJ39)
CLVGPNNNAGNMLTF

SEQ ID NO: 704402 - protein, 13 aa, Homo sapiens
  CDR3 for beta chain variable domain of TCR clone 352201 (TRBV11-2, TRBJ2-5)
CASSSTAEETQYF

SEQ ID NO: 704403 - protein, 11 aa, Homo sapiens
  CDR3 for alpha chain variable domain of TCR clone 352202 (TRAV1-1, TRAJ23)
CAVRQGGKLIF

SEQ ID NO: 704404 - protein, 18 aa, Homo sapiens
  CDR3 for beta chain variable domain of TCR clone 352202 (TRBV3-1, TRBJ2-7)
CASSRISAGGRSSYEQYF

SEQ ID NO: 704405 - protein, 14 aa, Homo sapiens
  CDR3 for alpha chain variable domain of TCR clone 352203 (TRAV1-2, TRAJ27)
CAPAEYTNAGKSTF

SEQ ID NO: 704406 - protein, 18 aa, Homo sapiens
  CDR3 for beta chain variable domain of TCR clone 352203 (TRBV28, TRBJ1-2)
CASRQQQGKRGSSYGYTF

SEQ ID NO: 704407 - protein, 12 aa, Homo sapiens
  CDR3 for alpha chain variable domain of TCR clone 352204 (TRAV13-2, TRAJ8)
CAPWPGFQKLVF

SEQ ID NO: 704408 - protein, 14 aa, Homo sapiens
  CDR3 for beta chain variable domain of TCR clone 352204 (TRBV7-6, TRBJ2-1)
CASSLGGGADEQFF

SEQ ID NO: 704409 - protein, 11 aa, Homo sapiens
  CDR3 for alpha chain variable domain of TCR clone 352205 (TRAV2, TRAJ13)
CASGGYLKVTF

SEQ ID NO: 704410 - protein, 14 aa, Homo sapiens
  CDR3 for beta chain variable domain of TCR clone 352205 (TRBV19, TRBJ2-1)
CASPTFVLSGEQFF

SEQ ID NO: 704411 - protein, 15 aa, Homo sapiens
  CDR3 for alpha chain variable domain of TCR clone 352206 (TRAV23/DV6, TRAJ18)
CAARYRGSTLVRLYF

SEQ ID NO: 704412 - protein, 15 aa, Homo sapiens
  CDR3 for beta chain variable domain of TCR clone 352206 (TRBV20-1, TRBJ2-7)
CSARDRVSGMDEQYF

SEQ ID NO: 704413 - protein, 15 aa, Homo sapiens
  CDR3 for alpha chain variable domain of TCR clone 352207 (TRAV3, TRAJ5)
CAVRDFDTCRRALTF

SEQ ID NO: 704414 - protein, 13 aa, Homo sapiens
  CDR3 for beta chain variable domain of TCR clone 352207 (TRBV12-4, TRBJ2-7)
CASSPTETYEQYF

SEQ ID NO: 704415 - protein, 18 aa, Homo sapiens
  CDR3 for alpha chain variable domain of TCR clone 352208 (TRAV1-2, TRAJ18)
CAVRDMGDRGSTLGRLYF

SEQ ID NO: 704416 - protein, 16 aa, Homo sapiens
  CDR3 for beta chain variable domain of TCR clone 352208 (TRBV29-1, TRBJ1-2)
SSVEANRDIANYGYTF

SEQ ID NO: 704417 - protein, 15 aa, Homo sapiens
  CDR3 for alpha chain variable domain of TCR clone 352209 (TRAV8-4, TRAJ47)
CAVSDPEEYGNKLVF

SEQ ID NO: 704418 - protein, 13 aa, Homo sapiens
  CDR3 for beta chain variable domain of TCR clone 352209 (TRBV28, TRBJ1-2)
CASSLGQFYGYTF

SEQ ID NO: 704419 - protein, 14 aa, Homo sapiens
  CDR3 for alpha chain variable domain of TCR clone 352210 (TRAV25, TRAJ22)
CAVRSSGSARQLTF

SEQ ID NO: 704420 - protein, 16 aa, Homo sapiens
  CDR3 for beta chain variable domain of TCR clone 352210 (TRBV4-2, TRBJ1-1)
CASRPSPGRAAPEAFF

SEQ ID NO: 704421 - protein, 13 aa, Homo sapiens
  CDR3 for alpha chain variable domain of TCR clone 352211 (TRAV25, TRAJ26)
CAGMDNYGQNFVF

SEQ ID NO: 704422 - protein, 16 aa, Homo sapiens
  CDR3 for beta chain variable domain of TCR clone 352211 (TRBV7-3, TRBJ2-2)
CASSLKRGTLSGELFF

SEQ ID NO: 704423 - protein, 15 aa, Homo sapiens
  CDR3 for alpha chain variable domain of TCR clone 352212 (TRAV12-3, TRAJ6)
CAMSATTGGSYIPTF

SEQ ID NO: 704424 - protein, 15 aa, Homo sapiens
  CDR3 for beta chain variable domain of TCR clone 352212 (TRBV28, TRBJ2-4)
CAAGSGTLLMGIQYF

SEQ ID NO: 704425 - protein, 12 aa, Homo sapiens
  CDR3 for alpha chain variable domain of TCR clone 352213 (TRAV12-3, TRAJ17)
CAMTLTGNKLTF

SEQ ID NO: 704426 - protein, 16 aa, Homo sapiens
  CDR3 for beta chain variable domain of TCR clone 352213 (TRBV12-4, TRBJ2-7)
CASSWSGGTGTYEQYF

SEQ ID NO: 704427 - protein, 15 aa, Homo sapiens
  CDR3 for alpha chain variable domain of TCR clone 352214 (TRAV3, TRAJ15)
CAVRPANQAGTALIF

SEQ ID NO: 704428 - protein, 15 aa, Homo sapiens
  CDR3 for beta chain variable domain of TCR clone 352214 (TRBV7-7, TRBJ1-3)
CASSQGEHSGNTMYF

SEQ ID NO: 704429 - protein, 16 aa, Homo sapiens
  CDR3 for alpha chain variable domain of TCR clone 352215 (TRAV17, TRAJ52)
CATDPMGGTSYGKLTF

SEQ ID NO: 704430 - protein, 15 aa, Homo sapiens
  CDR3 for beta chain variable domain of TCR clone 352215 (TRBV2, TRBJ2-1)
CASSELAGSYNEQFF

SEQ ID NO: 704431 - protein, 18 aa, Homo sapiens
  CDR3 for alpha chain variable domain of TCR clone 352216 (TRAV8-3, TRAJ6)
CAVGAEHQEEATYLHLEE

SEQ ID NO: 704432 - protein, 14 aa, Homo sapiens
  CDR3 for beta chain variable domain of TCR clone 352216 (TRBV6-6, TRBJ2-7)
CASIDSGAGYEQYF

SEQ ID NO: 704433 - protein, 12 aa, Homo sapiens
  CDR3 for alpha chain variable domain of TCR clone 352217 (TRAV8-3, TRAJ20)
CAVGANDYKLSF

SEQ ID NO: 704434 - protein, 16 aa, Homo sapiens
  CDR3 for beta chain variable domain of TCR clone 352217 (TRBV7-3, TRBJ2-2)
CASSLKRGTLSGELFF

SEQ ID NO: 704435 - protein, 15 aa, Homo sapiens
  CDR3 for alpha chain variable domain of TCR clone 352218 (TRAV17, TRAJ13)
CATDTGAGGYQKVTF

SEQ ID NO: 704436 - protein, 17 aa, Homo sapiens
  CDR3 for beta chain variable domain of TCR clone 352218 (TRBV11-2, TRBJ2-1)
CASSLYPPGVEYNEQFF

SEQ ID NO: 704437 - protein, 11 aa, Homo sapiens
  CDR3 for alpha chain variable domain of TCR clone 352219 (TRAV23/DV6, TRAJ48)
CAPRWGEKLTF

SEQ ID NO: 704438 - protein, 12 aa, Homo sapiens
  CDR3 for beta chain variable domain of TCR clone 352219 (TRBV11-1, TRBJ2-7)
CATRTDAYEQYF

SEQ ID NO: 704439 - protein, 14 aa, Homo sapiens
  CDR3 for alpha chain variable domain of TCR clone 352220 (TRAV17, TRAJ53)
CGVGSGGSNYKLTF

SEQ ID NO: 704440 - protein, 14 aa, Homo sapiens
  CDR3 for beta chain variable domain of TCR clone 352220 (TRBV10-3, TRBJ2-1)
CAISDRGGVTEQFF

SEQ ID NO: 704441 - protein, 14 aa, Homo sapiens
  CDR3 for alpha chain variable domain of TCR clone 352221 (TRAV1-2, TRAJ29)
CAVRELTSATPLVF

SEQ ID NO: 704442 - protein, 14 aa, Homo sapiens
  CDR3 for beta chain variable domain of TCR clone 352221 (TRBV3-1, TRBJ2-5)
CASGQGPDQETQNF

SEQ ID NO: 704443 - protein, 13 aa, Homo sapiens
  CDR3 for alpha chain variable domain of TCR clone 352222 (TRAV13-2, TRAJ13)
CAERPGGYQKITF

SEQ ID NO: 704444 - protein, 12 aa, Homo sapiens
  CDR3 for beta chain variable domain of TCR clone 352222 (TRBV5-4, TRBJ1-1)
CASSFGQTEAFF

SEQ ID NO: 704445 - protein, 14 aa, Homo sapiens
  CDR3 for alpha chain variable domain of TCR clone 352223 (TRAV26-1, TRAJ38)
CIADNAGNNRKLLW

SEQ ID NO: 704446 - protein, 13 aa, Homo sapiens
  CDR3 for beta chain variable domain of TCR clone 352223 (TRBV20-1, TRBJ1-1)
GSARGGGNTEAFF

SEQ ID NO: 704447 - protein, 12 aa, Homo sapiens
  CDR3 for alpha chain variable domain of TCR clone 352224 (TRAV30, TRAJ20)
CGTESNDYKLSF

SEQ ID NO: 704448 - protein, 15 aa, Homo sapiens
  CDR3 for beta chain variable domain of TCR clone 352224 (TRBV20-1, TRBJ2-7)
CSARDRVAGMDEQYF

SEQ ID NO: 704449 - protein, 17 aa, Homo sapiens
  CDR3 for alpha chain variable domain of TCR clone 352225 (TRAV19, TRAJ28)
CALSEASSGAGSYQLTF

SEQ ID NO: 704450 - protein, 14 aa, Homo sapiens
  CDR3 for beta chain variable domain of TCR clone 352225 (TRBV7-6, TRBJ2-3)
CASSLGTVTDTQYF

SEQ ID NO: 704451 - protein, 12 aa, Homo sapiens
  CDR3 for alpha chain variable domain of TCR clone 352226 (TRAV13-2, TRAJ23)
CAESHRGGKLIF

SEQ ID NO: 704452 - protein, 12 aa, Homo sapiens
  CDR3 for beta chain variable domain of TCR clone 352226 (TRBV5-5, TRBJ2-5)
CASSYVGETQYF

SEQ ID NO: 704453 - protein, 10 aa, Homo sapiens
  CDR3 for alpha chain variable domain of TCR clone 352227 (TRAV26-1, TRAJ40)
CIAGTYKYIF

SEQ ID NO: 704454 - protein, 17 aa, Homo sapiens
  CDR3 for beta chain variable domain of TCR clone 352227 (TRBV5-5, TRBJ1-2)
CASSLGSLDGQSEGYTF

SEQ ID NO: 704455 - protein, 14 aa, Homo sapiens
  CDR3 for alpha chain variable domain of TCR clone 352228 (TRAV3, TRAJ17)
CAVRDAAAGNKLTF

SEQ ID NO: 704456 - protein, 15 aa, Homo sapiens
  CDR3 for beta chain variable domain of TCR clone 352228 (TRBV6-3, TRBJ2-5)
CASSLLRGDQEPRYF

SEQ ID NO: 704457 - protein, 14 aa, Homo sapiens
  CDR3 for alpha chain variable domain of TCR clone 352229 (TRAV12-2, TRAJ32)
CAHPESGATNKLIL

SEQ ID NO: 704458 - protein, 14 aa, Homo sapiens
  CDR3 for beta chain variable domain of TCR clone 352229 (TRBV4-2, TRBJ2-3)
CASRETRAPGMQYL

SEQ ID NO: 704459 - protein, 16 aa, Homo sapiens
  CDR3 for alpha chain variable domain of TCR clone 352230 (TRAV21, TRAJ37)
CAVRPRGSSSTGNLIF

SEQ ID NO: 704460 - protein, 13 aa, Homo sapiens
  CDR3 for beta chain variable domain of TCR clone 352230 (TRBV7-9, TRBJ2-5)
CASLSPGQETQYF

SEQ ID NO: 704461 - protein, 16 aa, Homo sapiens
  CDR3 for alpha chain variable domain of TCR clone 352231 (TRAV12-2, TRAJ28)
CAVITDSGAGSSQLTF

SEQ ID NO: 704462 - protein, 14 aa, Homo sapiens
  CDR3 for beta chain variable domain of TCR clone 352231 (TRBV25-1, TRBJ1-1)
CASTHLGGNTEAFF

SEQ ID NO: 704463 - protein, 15 aa, Homo sapiens
  CDR3 for alpha chain variable domain of TCR clone 352232 (TRAV25, TRAJ41)
CAGPWNSNSGYAINF

SEQ ID NO: 704464 - protein, 13 aa, Homo sapiens
  CDR3 for beta chain variable domain of TCR clone 352232 (TRBV15, TRBJ1-1)
CATSRGIQARAFF

SEQ ID NO: 704465 - protein, 13 aa, Homo sapiens
  CDR3 for alpha chain variable domain of TCR clone 352233 (TRAV8-6, TRAJ49)
CAVITNTGNQFYF

SEQ ID NO: 704466 - protein, 13 aa, Homo sapiens
  CDR3 for beta chain variable domain of TCR clone 352233 (TRBV27, TRBJ2-7)
CASSLRHRYEQYF

SEQ ID NO: 704467 - protein, 14 aa, Homo sapiens
  CDR3 for alpha chain variable domain of TCR clone 352234 (TRAV38-1, TRAJ40)
CALRPTSGTSTYIF

SEQ ID NO: 704468 - protein, 14 aa, Homo sapiens
  CDR3 for beta chain variable domain of TCR clone 352234 (TRBV25-1, TRBJ1-1)
CASTHLGGNTEAFF

SEQ ID NO: 704469 - protein, 14 aa, Homo sapiens
  CDR3 for alpha chain variable domain of TCR clone 352235 (TRAV2, TRAJ37)
CAVDFTSNTGKLIF

SEQ ID NO: 704470 - protein, 16 aa, Homo sapiens
  CDR3 for beta chain variable domain of TCR clone 352235 (TRBV12-4, TRBJ2-1)
CASKRTSGDTYNEQFF

SEQ ID NO: 704471 - protein, 12 aa, Homo sapiens
  CDR3 for alpha chain variable domain of TCR clone 352236 (TRAV26-2, TRAJ21)
CILKGNFNKFYF

SEQ ID NO: 704472 - protein, 15 aa, Homo sapiens
  CDR3 for beta chain variable domain of TCR clone 352236 (TRBV4-1, TRBJ2-5)
CASSQWDLYQETQYF

SEQ ID NO: 704473 - protein, 12 aa, Homo sapiens
  CDR3 for alpha chain variable domain of TCR clone 352237 (TRAV35, TRAJ49)
CARWNTGNQFYF

SEQ ID NO: 704474 - protein, 16 aa, Homo sapiens
  CDR3 for beta chain variable domain of TCR clone 352237 (TRBV5-1, TRBJ2-2)
CSSSLWDTTNTGELFF

SEQ ID NO: 704475 - protein, 13 aa, Homo sapiens
  CDR3 for alpha chain variable domain of TCR clone 352238 (TRAV8-6, TRAJ50)
CAVIKTSYDKVIF

SEQ ID NO: 704476 - protein, 15 aa, Homo sapiens
  CDR3 for beta chain variable domain of TCR clone 352238 (TRBV7-2, TRBJ2-1)
CASTHGTGIYNEQFF

SEQ ID NO: 704477 - protein, 14 aa, Homo sapiens
  CDR3 for alpha chain variable domain of TCR clone 352239 (TRAV26-1, TRAJ38)
CIADNAGNNRKLIW

SEQ ID NO: 704478 - protein, 12 aa, Homo sapiens
  CDR3 for beta chain variable domain of TCR clone 352239 (TRBV7-2, TRBJ2-5)
CASSLYQETQYF

SEQ ID NO: 704479 - protein, 14 aa, Homo sapiens
  CDR3 for alpha chain variable domain of TCR clone 352240 (TRAV17, TRAJ57)
CATDPQGGSEKLVL

SEQ ID NO: 704480 - protein, 15 aa, Homo sapiens
  CDR3 for beta chain variable domain of TCR clone 352240 (TRBV7-3, TRBJ2-1)
CASSPTGGGEVEQFF

SEQ ID NO: 704481 - protein, 11 aa, Homo sapiens
  CDR3 for alpha chain variable domain of TCR clone 352241 (TRAV12-2, TRAJ39)
CAVNNMLTFGG

SEQ ID NO: 704482 - protein, 16 aa, Homo sapiens
  CDR3 for beta chain variable domain of TCR clone 352241 (TRBV9, TRBJ2-7)
CASSAGIDRSPYEQYF

SEQ ID NO: 704483 - protein, 15 aa, Homo sapiens
  CDR3 for alpha chain variable domain of TCR clone 352242 (TRAV27, TRAJ38)
CAARRNAGNNRKLIW

SEQ ID NO: 704484 - protein, 13 aa, Homo sapiens
  CDR3 for beta chain variable domain of TCR clone 352242 (TRBV12-5, TRBJ2-3)
CASGDRQSHTQYF

SEQ ID NO: 704485 - protein, 14 aa, Homo sapiens
  CDR3 for alpha chain variable domain of TCR clone 352243 (TRAV12-1, TRAJ49)
CVVNTPNTGNQFYF

SEQ ID NO: 704486 - protein, 12 aa, Homo sapiens
  CDR3 for beta chain variable domain of TCR clone 352243 (TRBV6-3, TRBJ2-7)
CASSRTGYEQYF

SEQ ID NO: 704487 - protein, 14 aa, Homo sapiens
  CDR3 for alpha chain variable domain of TCR clone 352244 (TRAV12-1, TRAJ23)
CVVIVYNQGGKLIF

SEQ ID NO: 704488 - protein, 13 aa, Homo sapiens
  CDR3 for beta chain variable domain of TCR clone 352244 (TRBV11-2, TRBJ2-5)
CASSFSSQATQYF

SEQ ID NO: 704489 - protein, 10 aa, Homo sapiens
  CDR3 for alpha chain variable domain of TCR clone 352245 (TRAV36/DV7, TRAJ49)
CALTGNQFYF

SEQ ID NO: 704490 - protein, 15 aa, Homo sapiens
  CDR3 for beta chain variable domain of TCR clone 352245 (TRBV27, TRBJ2-1)
CASSLARGAYNEQFF

SEQ ID NO: 704491 - protein, 15 aa, Homo sapiens
  CDR3 for alpha chain variable domain of TCR clone 352246 (TRAV29/DV5, TRAJ29)
CAASERSSGNTPLVF

SEQ ID NO: 704492 - protein, 17 aa, Homo sapiens
  CDR3 for beta chain variable domain of TCR clone 352246 (TRBV28, TRBJ2-5)
CASSTPEGDALQETQYF

SEQ ID NO: 704493 - protein, 21 aa, Homo sapiens
  CDR3 for alpha chain variable domain of TCR clone 352247 (TRAV3, TRAJ27)
CAVRPLGAGKSTSGDGPTLTV

SEQ ID NO: 704494 - protein, 13 aa, Homo sapiens
  CDR3 for beta chain variable domain of TCR clone 352247 (TRBV7-9, TRBJ2-3)
CASSPGSTDTQYF

SEQ ID NO: 704495 - protein, 14 aa, Homo sapiens
  CDR3 for alpha chain variable domain of TCR clone 352248 (TRAV20, TRAJ42)
FAVQAGGSQGNLIF

SEQ ID NO: 704496 - protein, 14 aa, Homo sapiens
  CDR3 for beta chain variable domain of TCR clone 352248 (TRBV28, TRBJ1-2)
CASRIQGANYGYAF

SEQ ID NO: 704497 - protein, 13 aa, Homo sapiens
  CDR3 for alpha chain variable domain of TCR clone 352249 (TRAV8-3, TRAJ37)
CAVPSSNTGKLIF

SEQ ID NO: 704498 - protein, 12 aa, Homo sapiens
  CDR3 for beta chain variable domain of TCR clone 352249 (TRBV11-2, TRBJ2-1)
CASSPGNNEQCF

SEQ ID NO: 704499 - protein, 15 aa, Homo sapiens
  CDR3 for alpha chain variable domain of TCR clone 352250 (TRAV34, TRAJ38)
CGADFAPGNNRKLIW

SEQ ID NO: 704500 - protein, 18 aa, Homo sapiens
  CDR3 for beta chain variable domain of TCR clone 352250 (TRBV4-2, TRBJ2-1)
CASSQQGLAASSYNEQFF

SEQ ID NO: 704501 - protein, 14 aa, Homo sapiens
  CDR3 for alpha chain variable domain of TCR clone 352251 (TRAV12-3, TRAJ33)
CAMSVPGSNYQLTW

SEQ ID NO: 704502 - protein, 12 aa, Homo sapiens
  CDR3 for beta chain variable domain of TCR clone 352251 (TRBV7-8, TRBJ2-7)
CASSLGDREQYF

SEQ ID NO: 704503 - protein, 18 aa, Homo sapiens
  CDR3 for alpha chain variable domain of TCR clone 352252 (TRAV21, TRAJ52)
CAVRPSPEGGTSYGKLTF

SEQ ID NO: 704504 - protein, 15 aa, Homo sapiens
  CDR3 for beta chain variable domain of TCR clone 352252 (TRBV28, TRBJ2-1)
CASSIIAGGRSEQFF

SEQ ID NO: 704505 - protein, 13 aa, Homo sapiens
  CDR3 for alpha chain variable domain of TCR clone 352253 (TRAV21, TRAJ57)
CAVTQGGSEKLVF

SEQ ID NO: 704506 - protein, 16 aa, Homo sapiens
  CDR3 for beta chain variable domain of TCR clone 352253 (TRBV29-1, TRBJ2-7)
CSVEAAEDGTAYEQYF

SEQ ID NO: 704507 - protein, 14 aa, Homo sapiens
  CDR3 for alpha chain variable domain of TCR clone 352254 (TRAV1-2, TRAJ8)
CAVREDTGFQKLVF

SEQ ID NO: 704508 - protein, 17 aa, Homo sapiens
  CDR3 for beta chain variable domain of TCR clone 352254 (TRBV24-1, TRBJ2-7)
CATRKGLAGGHSYEQYF

SEQ ID NO: 704509 - protein, 13 aa, Homo sapiens
  CDR3 for alpha chain variable domain of TCR clone 352255 (TRAV13-1, TRAJ39)
CAASIWAGYMLTF

SEQ ID NO: 704510 - protein, 15 aa, Homo sapiens
  CDR3 for beta chain variable domain of TCR clone 352255 (TRBV7-9, TRBJ1-1)
CASSLLEQGGTEAFF

SEQ ID NO: 704511 - protein, 14 aa, Homo sapiens
  CDR3 for alpha chain variable domain of TCR clone 352256 (TRAV13-2, TRAJ17)
CAENFKAAGNKLTF

SEQ ID NO: 704512 - protein, 11 aa, Homo sapiens
  CDR3 for beta chain variable domain of TCR clone 352256 (TRBV6-3, TRBJ2-3)
CATGQADTQYF

SEQ ID NO: 704513 - protein, 12 aa, Homo sapiens
  CDR3 for alpha chain variable domain of TCR clone 352257 (TRAV13-1, TRAJ21)
CAAKEGFHKFYF

SEQ ID NO: 704514 - protein, 17 aa, Homo sapiens
  CDR3 for beta chain variable domain of TCR clone 352257 (TRBV13, TRBJ2-3)
CASSLSRVAGGRNTQYF

SEQ ID NO: 704515 - protein, 12 aa, Homo sapiens
  CDR3 for alpha chain variable domain of TCR clone 352258 (TRAV10, TRAJ43)
CVVVRVGNDMRF

SEQ ID NO: 704516 - protein, 15 aa, Homo sapiens
  CDR3 for beta chain variable domain of TCR clone 352258 (TRBV2, TRBJ2-7)
CARSEGLARSYEQYF

SEQ ID NO: 704517 - protein, 10 aa, Homo sapiens
  CDR3 for alpha chain variable domain of TCR clone 352259 (TRAV12-3, TRAJ34)
CAMSADKLIF

SEQ ID NO: 704518 - protein, 15 aa, Homo sapiens
  CDR3 for beta chain variable domain of TCR clone 352259 (TRBV2, TRBJ2-1)
CASSELAGSYNEQFF

SEQ ID NO: 704519 - protein, 14 aa, Homo sapiens
  CDR3 for alpha chain variable domain of TCR clone 352260 (TRAV8-3, TRAJ30)
CAVGDMNRDDKIVF

SEQ ID NO: 704520 - protein, 17 aa, Homo sapiens
  CDR3 for beta chain variable domain of TCR clone 352260 (TRBV19, TRBJ2-2)
CASSRNPGGFGTGELFF

SEQ ID NO: 704521 - protein, 18 aa, Homo sapiens
  CDR3 for alpha chain variable domain of TCR clone 352261 (TRAV12-2, )
CAVEDIQNPDPAVYQLRD

SEQ ID NO: 704522 - protein, 13 aa, Homo sapiens
  CDR3 for beta chain variable domain of TCR clone 352261 (TRBV11-2, TRBJ2-5)
CASSRGPSETQYF

SEQ ID NO: 704523 - protein, 19 aa, Homo sapiens
  CDR3 for alpha chain variable domain of TCR clone 352262 (TRAV1-2, TRAJ26)
CLLPLCCERPDNYGQNVVF

SEQ ID NO: 704524 - protein, 15 aa, Homo sapiens
  CDR3 for beta chain variable domain of TCR clone 352262 (TRBV9, TRBJ1-6)
CASSVAGTGDSPLHF

SEQ ID NO: 704525 - protein, 13 aa, Homo sapiens
  CDR3 for alpha chain variable domain of TCR clone 352263 (TRAV12-1, TRAJ40)
CVVNYSGTYKYIF

SEQ ID NO: 704526 - protein, 14 aa, Homo sapiens
  CDR3 for beta chain variable domain of TCR clone 352263 (TRBV2, TRBJ1-6)
CASEVSSYNSPLHF

SEQ ID NO: 704527 - protein, 11 aa, Homo sapiens
  CDR3 for alpha chain variable domain of TCR clone 352264 (TRAV27, TRAJ45)
CAGAQEKVLTD

SEQ ID NO: 704528 - protein, 17 aa, Homo sapiens
  CDR3 for beta chain variable domain of TCR clone 352264 (TRBV11-2, TRBJ2-1)
CASSLYPPGVEYNEQFF

SEQ ID NO: 704529 - protein, 14 aa, Homo sapiens
  CDR3 for alpha chain variable domain of TCR clone 352265 (TRAV1-2, TRAJ8)
CAVREDTGFQKLVF

SEQ ID NO: 704530 - protein, 11 aa, Homo sapiens
  CDR3 for beta chain variable domain of TCR clone 352265 (TRBV12-4, TRBJ2-3)
CAGTATDTQYF

SEQ ID NO: 704531 - protein, 18 aa, Homo sapiens
  CDR3 for alpha chain variable domain of TCR clone 352266 (TRAV13-1, TRAJ52)
CAAKNPNAGGTSYGKLTF

SEQ ID NO: 704532 - protein, 14 aa, Homo sapiens
  CDR3 for beta chain variable domain of TCR clone 352266 (TRBV7-3, TRBJ2-1)
CASSLAGGTNEQVF

SEQ ID NO: 704533 - protein, 12 aa, Homo sapiens
  CDR3 for alpha chain variable domain of TCR clone 352267 (TRAV13-1, TRAJ49)
CVASPMGNQFYF

SEQ ID NO: 704534 - protein, 13 aa, Homo sapiens
  CDR3 for beta chain variable domain of TCR clone 352267 (TRBV20-1, TRBJ2-2)
CSASAAGTGELFF

SEQ ID NO: 704535 - protein, 13 aa, Homo sapiens
  CDR3 for alpha chain variable domain of TCR clone 352268 (TRAV20, TRAJ37)
CAGCSSNTGKLIF

SEQ ID NO: 704536 - protein, 15 aa, Homo sapiens
  CDR3 for beta chain variable domain of TCR clone 352268 (TRBV11-2, TRBJ2-1)
CASSKNRGLIYEQFF

SEQ ID NO: 704537 - protein, 16 aa, Homo sapiens
  CDR3 for alpha chain variable domain of TCR clone 352269 (TRAV30, TRAJ24)
CGTEIVDADSWGKFKF

SEQ ID NO: 704538 - protein, 14 aa, Homo sapiens
  CDR3 for beta chain variable domain of TCR clone 352269 (TRBV12-5, TRBJ2-5)
CASGSRTHKETQYF

SEQ ID NO: 704539 - protein, 15 aa, Homo sapiens
  CDR3 for alpha chain variable domain of TCR clone 352270 (TRAV3, TRAJ5)
CAVRDLGTGRRALTF

SEQ ID NO: 704540 - protein, 13 aa, Homo sapiens
  CDR3 for beta chain variable domain of TCR clone 352270 (TRBV12-4, TRBJ2-7)
CASSPTETYEPYF

SEQ ID NO: 704541 - protein, 14 aa, Homo sapiens
  CDR3 for alpha chain variable domain of TCR clone 352271 (TRAV1-1, TRAJ27)
CAVIYNTNARKSTF

SEQ ID NO: 704542 - protein, 15 aa, Homo sapiens
  CDR3 for beta chain variable domain of TCR clone 352271 (TRBV6-3, TRBJ2-7)
CASSSPGTVFYEQYF

SEQ ID NO: 704543 - protein, 12 aa, Homo sapiens
  CDR3 for alpha chain variable domain of TCR clone 352272 (TRAV12-2, TRAJ30)
CAVRNRDDKIIF

SEQ ID NO: 704544 - protein, 14 aa, Homo sapiens
  CDR3 for beta chain variable domain of TCR clone 352272 (TRBV20-1, TRBJ2-5)
CSARDGRAGETQYF

SEQ ID NO: 704545 - protein, 14 aa, Homo sapiens
  CDR3 for alpha chain variable domain of TCR clone 352273 (TRAV8-1, TRAJ10)
CAVIFTGGGNNLTF

SEQ ID NO: 704546 - protein, 13 aa, Homo sapiens
  CDR3 for beta chain variable domain of TCR clone 352273 (TRBV20-1, TRBJ1-1)
CSARGGGNTEAFF

SEQ ID NO: 704547 - protein, 14 aa, Homo sapiens
  CDR3 for alpha chain variable domain of TCR clone 352274 (TRAV2, TRAJ9)
CAVEDRSGGFKTIF

SEQ ID NO: 704548 - protein, 14 aa, Homo sapiens
  CDR3 for beta chain variable domain of TCR clone 352274 (TRBV14, TRBJ2-1)
CASSQVQGRGEQFF

SEQ ID NO: 704549 - protein, 11 aa, Homo sapiens
  CDR3 for alpha chain variable domain of TCR clone 352275 (TRAV12-3, TRAJ27)
CAMANAGKSTF

SEQ ID NO: 704550 - protein, 14 aa, Homo sapiens
  CDR3 for beta chain variable domain of TCR clone 352275 (TRBV28, TRBJ2-5)
CASTGAGGVETQYF

SEQ ID NO: 704551 - protein, 14 aa, Homo sapiens
  CDR3 for alpha chain variable domain of TCR clone 352276 (TRAV13-2, TRAJ43)
CAEIPTYNNNDMRF

SEQ ID NO: 704552 - protein, 16 aa, Homo sapiens
  CDR3 for beta chain variable domain of TCR clone 352276 (TRBV7-3, TRBJ2-2)
CASSLKRGTLSGELFF

SEQ ID NO: 704553 - protein, 14 aa, Homo sapiens
  CDR3 for alpha chain variable domain of TCR clone 352277 (TRAV14/DV4, TRAJ15)
CAMRRDPAGTALIF

SEQ ID NO: 704554 - protein, 17 aa, Homo sapiens
  CDR3 for beta chain variable domain of TCR clone 352277 (TRBV20-1, TRBJ2-1)
CSASSSGLAGSYNEQFF

SEQ ID NO: 704555 - protein, 18 aa, Homo sapiens
  CDR3 for alpha chain variable domain of TCR clone 352278 (TRAV13-1, TRAJ52)
CAAKNPNAAGTSYGKLTF

SEQ ID NO: 704556 - protein, 15 aa, Homo sapiens
  CDR3 for beta chain variable domain of TCR clone 352278 (TRBV6-1, TRBJ2-3)
CASSERGGITDTQYF

SEQ ID NO: 704557 - protein, 14 aa, Homo sapiens
  CDR3 for alpha chain variable domain of TCR clone 352279 (TRAV12-2, TRAJ36)
CAVNPPTGANNLFF

SEQ ID NO: 704558 - protein, 13 aa, Homo sapiens
  CDR3 for beta chain variable domain of TCR clone 352279 (TRBV20-1, TRBJ1-6)
CSAPTGLGTPLHF

SEQ ID NO: 704559 - protein, 13 aa, Homo sapiens
  CDR3 for alpha chain variable domain of TCR clone 352280 (TRAV23/DV6, TRAJ22)
CAPYSGSSRQLPF

SEQ ID NO: 704560 - protein, 15 aa, Homo sapiens
  CDR3 for beta chain variable domain of TCR clone 352280 (TRBV11-2, TRBJ1-6)
CASSLDPWAVSPLHF

SEQ ID NO: 704561 - protein, 13 aa, Homo sapiens
  CDR3 for alpha chain variable domain of TCR clone 352281 (TRAV20, TRAJ40)
CAVRTSGTYKYIF

SEQ ID NO: 704562 - protein, 14 aa, Homo sapiens
  CDR3 for beta chain variable domain of TCR clone 352281 (TRBV4-1, TRBJ2-2)
CASSQAVNTGELFF

SEQ ID NO: 704563 - protein, 12 aa, Homo sapiens
  CDR3 for alpha chain variable domain of TCR clone 352282 (TRAV26-1, TRAJ26)
CIVFIYGQNFVF

SEQ ID NO: 704564 - protein, 15 aa, Homo sapiens
  CDR3 for beta chain variable domain of TCR clone 352282 (TRBV14, TRBJ2-5)
CASSEGEAVQETQYF

SEQ ID NO: 704565 - protein, 13 aa, Homo sapiens
  CDR3 for alpha chain variable domain of TCR clone 352283 (TRAV27, TRAJ29)
CAGAHSGNTPLVF

SEQ ID NO: 704566 - protein, 11 aa, Homo sapiens
  CDR3 for beta chain variable domain of TCR clone 352283 (TRBV11-3, TRBJ2-1)
CASSLGNEQFF

SEQ ID NO: 704567 - protein, 12 aa, Homo sapiens
  CDR3 for alpha chain variable domain of TCR clone 352284 (TRAV12-3, TRAJ17)
CAMTLTGNKLTF

SEQ ID NO: 704568 - protein, 15 aa, Homo sapiens
  CDR3 for beta chain variable domain of TCR clone 352284 (TRBV20-1, TRBJ2-7)
CSARDRVAGMDEQFF

SEQ ID NO: 704569 - protein, 12 aa, Homo sapiens
  CDR3 for alpha chain variable domain of TCR clone 352285 (TRAV8-3, TRAJ20)
CAVGANDYKLSF

SEQ ID NO: 704570 - protein, 14 aa, Homo sapiens
  CDR3 for beta chain variable domain of TCR clone 352285 (TRBV11-2, TRBJ2-1)
CASSLGGSFNEQFF

SEQ ID NO: 704571 - protein, 17 aa, Homo sapiens
  CDR3 for alpha chain variable domain of TCR clone 352286 (TRAV12-2, TRAJ52)
CAVNKGAGGTSYGKLTF

SEQ ID NO: 704572 - protein, 15 aa, Homo sapiens
  CDR3 for beta chain variable domain of TCR clone 352286 (TRBV7-3, TRBJ2-1)
CASSPTGGGEVEQFF

SEQ ID NO: 704573 - protein, 14 aa, Homo sapiens
  CDR3 for alpha chain variable domain of TCR clone 352287 (TRAV2, TRAJ9)
CAVEDRSGGFKTIF

SEQ ID NO: 704574 - protein, 12 aa, Homo sapiens
  CDR3 for beta chain variable domain of TCR clone 352287 (TRBV14, TRBJ1-1)
CASSQLKGLAFF

SEQ ID NO: 704575 - protein, 18 aa, Homo sapiens
  CDR3 for alpha chain variable domain of TCR clone 352288 (TRAV21, TRAJ52)
CAVRPSPAVGTSYGKLTF

SEQ ID NO: 704576 - protein, 13 aa, Homo sapiens
  CDR3 for beta chain variable domain of TCR clone 352288 (TRBV19, TRBJ2-2)
CASSIWSTGELFF

SEQ ID NO: 704577 - protein, 17 aa, Homo sapiens
  CDR3 for alpha chain variable domain of TCR clone 352289 (TRAV27, TRAJ26)
CAGARAPLDIYGQNFVF

SEQ ID NO: 704578 - protein, 15 aa, Homo sapiens
  CDR3 for beta chain variable domain of TCR clone 352289 (TRBV11-2, TRBJ2-5)
CASSPRSGGLETQYF

SEQ ID NO: 704579 - protein, 12 aa, Homo sapiens
  CDR3 for alpha chain variable domain of TCR clone 352290 (TRAV8-3, TRAJ40)
CAVTSGTYKYIF

SEQ ID NO: 704580 - protein, 16 aa, Homo sapiens
  CDR3 for beta chain variable domain of TCR clone 352290 (TRBV12-4, TRBJ2-3)
CASSDRAAQIRSILAQ

SEQ ID NO: 704581 - protein, 16 aa, Homo sapiens
  CDR3 for alpha chain variable domain of TCR clone 352291 (TRAV30, TRAJ24)
CGTEIVDADSWGKFKF

SEQ ID NO: 704582 - protein, 14 aa, Homo sapiens
  CDR3 for beta chain variable domain of TCR clone 352291 (TRBV12-5, TRBJ2-5)
CASGSRTHQETQYL

SEQ ID NO: 704583 - protein, 10 aa, Homo sapiens
  CDR3 for alpha chain variable domain of TCR clone 352292 (TRAV8-6, TRAJ26)
CGGDGQNFFF

SEQ ID NO: 704584 - protein, 14 aa, Homo sapiens
  CDR3 for beta chain variable domain of TCR clone 352292 (TRBV20-1, TRBJ2-4)
CSAVAGGPGNIQYF

SEQ ID NO: 704585 - protein, 18 aa, Homo sapiens
  CDR3 for alpha chain variable domain of TCR clone 352293 (TRAV26-1, TRAJ23)
CIVRVGLEVWNQGGKLIF

SEQ ID NO: 704586 - protein, 16 aa, Homo sapiens
  CDR3 for beta chain variable domain of TCR clone 352293 (TRBV7-7, TRBJ2-1)
CASSLASGTSYNEQFF

SEQ ID NO: 704587 - protein, 16 aa, Homo sapiens
  CDR3 for alpha chain variable domain of TCR clone 352294 (TRAV12-2, TRAJ45)
CAVNMYSGGGADGLTF

SEQ ID NO: 704588 - protein, 15 aa, Homo sapiens
  CDR3 for beta chain variable domain of TCR clone 352294 (TRBV12-4, TRBJ2-1)
CASSLLATGNNEQFF

SEQ ID NO: 704589 - protein, 20 aa, Homo sapiens
  CDR3 for alpha chain variable domain of TCR clone 352295 (TRAV12-1, TRAJ42)
SSVIQPPTSVKGGSQGNLIF

SEQ ID NO: 704590 - protein, 12 aa, Homo sapiens
  CDR3 for beta chain variable domain of TCR clone 352295 (TRBV10-2, TRBJ2-3)
CASSPESDTQYF

SEQ ID NO: 704591 - protein, 14 aa, Homo sapiens
  CDR3 for alpha chain variable domain of TCR clone 352296 (TRAV1-1, TRAJ27)
CAVIYNTNAGKSTF

SEQ ID NO: 704592 - protein, 13 aa, Homo sapiens
  CDR3 for beta chain variable domain of TCR clone 352296 (TRBV12-5, TRBJ1-2)
CASGVRTGNSYTF

SEQ ID NO: 704593 - protein, 14 aa, Homo sapiens
  CDR3 for alpha chain variable domain of TCR clone 352297 (TRAV9-2, TRAJ39)
CALYIYNAGNMLTC

SEQ ID NO: 704594 - protein, 13 aa, Homo sapiens
  CDR3 for beta chain variable domain of TCR clone 352297 (TRBV11-3, TRBJ1-1)
CASSRQPNTEAFF

SEQ ID NO: 704595 - protein, 13 aa, Homo sapiens
  CDR3 for alpha chain variable domain of TCR clone 352298 (TRAV21, TRAJ37)
CAVSSGHTGKLIF

SEQ ID NO: 704596 - protein, 15 aa, Homo sapiens
  CDR3 for beta chain variable domain of TCR clone 352298 (TRBV12-4, TRBJ1-2)
CASSFVDRGNYGYTF

SEQ ID NO: 704597 - protein, 12 aa, Homo sapiens
  CDR3 for alpha chain variable domain of TCR clone 352299 (TRAV9-2, TRAJ36)
CALKKGANNLFF

SEQ ID NO: 704598 - protein, 14 aa, Homo sapiens
  CDR3 for beta chain variable domain of TCR clone 352299 (TRBV19, TRBJ1-5)
CASRAPDSFLSQHF

SEQ ID NO: 704599 - protein, 15 aa, Homo sapiens
  CDR3 for alpha chain variable domain of TCR clone 352300 (TRAV25, TRAJ52)
CAGRPGGTSYGKLTF

SEQ ID NO: 704600 - protein, 13 aa, Homo sapiens
  CDR3 for beta chain variable domain of TCR clone 352300 (TRBV5-5, TRBJ1-2)
CASSFWRGEDYTF

SEQ ID NO: 704601 - protein, 14 aa, Homo sapiens
  CDR3 for alpha chain variable domain of TCR clone 352301 (TRAV26-1, TRAJ38)
CIADNAGNNRKLIW

SEQ ID NO: 704602 - protein, 13 aa, Homo sapiens
  CDR3 for beta chain variable domain of TCR clone 352301 (TRBV20-1, TRBJ1-1)
CNARGGGNTEAFF

SEQ ID NO: 704603 - protein, 15 aa, Homo sapiens
  CDR3 for alpha chain variable domain of TCR clone 352302 (TRAV26-1, TRAJ15)
WIVRAANQAGTALIF

SEQ ID NO: 704604 - protein, 15 aa, Homo sapiens
  CDR3 for beta chain variable domain of TCR clone 352302 (TRBV20-1, TRBJ1-1)
CSARSAATSNTEAFF

SEQ ID NO: 704605 - protein, 13 aa, Homo sapiens
  CDR3 for alpha chain variable domain of TCR clone 352303 (TRAV12-3, TRAJ46)
CAVKKSSGAKLTF

SEQ ID NO: 704606 - protein, 13 aa, Homo sapiens
  CDR3 for beta chain variable domain of TCR clone 352303 (TRBV6-1, TRBJ2-1)
CASSHDRNNEQFF

SEQ ID NO: 704607 - protein, 14 aa, Homo sapiens
  CDR3 for alpha chain variable domain of TCR clone 352304 (TRAV23/DV6, TRAJ8)
CAASKATGFQQLVF

SEQ ID NO: 704608 - protein, 13 aa, Homo sapiens
  CDR3 for beta chain variable domain of TCR clone 352304 (TRBV11-3, TRBJ2-5)
CASSSGLQETQYF

SEQ ID NO: 704609 - protein, 16 aa, Homo sapiens
  CDR3 for alpha chain variable domain of TCR clone 352305 (TRAV29/DV5, TRAJ40)
CAAPRFRTEGTYKYIF

SEQ ID NO: 704610 - protein, 12 aa, Homo sapiens
  CDR3 for beta chain variable domain of TCR clone 352305 (TRBV11-2, TRBJ2-2)
CASSLGGGELFF

SEQ ID NO: 704611 - protein, 15 aa, Homo sapiens
  CDR3 for alpha chain variable domain of TCR clone 352306 (TRAV20, TRAJ40)
CAVQRGTSGTSKYIF

SEQ ID NO: 704612 - protein, 15 aa, Homo sapiens
  CDR3 for beta chain variable domain of TCR clone 352306 (TRBV25-1, TRBJ1-4)
CASSPGDSTNEKLFF

SEQ ID NO: 704613 - protein, 13 aa, Homo sapiens
  CDR3 for alpha chain variable domain of TCR clone 352307 (TRAV27, TRAJ49)
CAPRPYTGNQFYF

SEQ ID NO: 704614 - protein, 16 aa, Homo sapiens
  CDR3 for beta chain variable domain of TCR clone 352307 (TRBV27, TRBJ1-1)
CASSTRTGGVGTEAFF

SEQ ID NO: 704615 - protein, 15 aa, Homo sapiens
  CDR3 for alpha chain variable domain of TCR clone 352308 (TRAV13-2, TRAJ45)
CAENNSGGGADGLTF

SEQ ID NO: 704616 - protein, 13 aa, Homo sapiens
  CDR3 for beta chain variable domain of TCR clone 352308 (TRBV25-1, TRBJ2-6)
CASRGHGANVLTF

SEQ ID NO: 704617 - protein, 15 aa, Homo sapiens
  CDR3 for alpha chain variable domain of TCR clone 352309 (TRAV21, TRAJ37)
CAVRPTLSNTGKLIF

SEQ ID NO: 704618 - protein, 16 aa, Homo sapiens
  CDR3 for beta chain variable domain of TCR clone 352309 (TRBV24-1, TRBJ2-3)
CATSDRRQDLTHTQYF

SEQ ID NO: 704619 - protein, 15 aa, Homo sapiens
  CDR3 for alpha chain variable domain of TCR clone 352310 (TRAV3, TRAJ3)
CAVRDRDSSASKIIF

SEQ ID NO: 704620 - protein, 12 aa, Homo sapiens
  CDR3 for beta chain variable domain of TCR clone 352310 (TRBV7-9, TRBJ1-1)
CASSLVRGEAFF

SEQ ID NO: 704621 - protein, 15 aa, Homo sapiens
  CDR3 for alpha chain variable domain of TCR clone 352311 (TRAV25, TRAJ53)
CAATGVGGSNYKLTF

SEQ ID NO: 704622 - protein, 16 aa, Homo sapiens
  CDR3 for beta chain variable domain of TCR clone 352311 (TRBV12-4, TRBJ1-4)
CASSLKGIGHGEKLFF

SEQ ID NO: 704623 - protein, 16 aa, Homo sapiens
  CDR3 for alpha chain variable domain of TCR clone 352312 (TRAV12-3, TRAJ53)
CAMSVGSGGSNYKLTF

SEQ ID NO: 704624 - protein, 12 aa, Homo sapiens
  CDR3 for beta chain variable domain of TCR clone 352312 (TRBV12-4, TRBJ2-7)
CASSLGGYEQYF

SEQ ID NO: 704625 - protein, 11 aa, Homo sapiens
  CDR3 for alpha chain variable domain of TCR clone 352313 (TRAV1-1, TRAJ23)
CAVRQGGKLIF

SEQ ID NO: 704626 - protein, 15 aa, Homo sapiens
  CDR3 for beta chain variable domain of TCR clone 352313 (TRBV7-9, TRBJ1-4)
CASSARTGGNEKLFF

SEQ ID NO: 704627 - protein, 16 aa, Homo sapiens
  CDR3 for alpha chain variable domain of TCR clone 352314 (TRAV14/DV4, TRAJ12)
CAMREDLMDSSYKLIF

SEQ ID NO: 704628 - protein, 13 aa, Homo sapiens
  CDR3 for beta chain variable domain of TCR clone 352314 (TRBV18, TRBJ1-1)
CASSGGRNTEAFF

SEQ ID NO: 704629 - protein, 11 aa, Homo sapiens
  CDR3 for alpha chain variable domain of TCR clone 352315 (TRAV2, TRAJ13)
CASGCYQKVTF

SEQ ID NO: 704630 - protein, 15 aa, Homo sapiens
  CDR3 for beta chain variable domain of TCR clone 352315 (TRBV29-1, TRBJ2-1)
CSGRDRKSSYNEQFF

SEQ ID NO: 704631 - protein, 13 aa, Homo sapiens
  CDR3 for alpha chain variable domain of TCR clone 352316 (TRAV30, TRAJ24)
CGTVTESWGKLQF

SEQ ID NO: 704632 - protein, 14 aa, Homo sapiens
  CDR3 for beta chain variable domain of TCR clone 352316 (TRBV6-3, TRBJ2-2)
CASTYTPDTGELFF

SEQ ID NO: 704633 - protein, 17 aa, Homo sapiens
  CDR3 for alpha chain variable domain of TCR clone 352317 (TRAV8-6, TRAJ58)
CAVSSWVGETSGSRLTF

SEQ ID NO: 704634 - protein, 13 aa, Homo sapiens
  CDR3 for beta chain variable domain of TCR clone 352317 (TRBV7-3, TRBJ2-1)
CASSLDSYNEQFF

SEQ ID NO: 704635 - protein, 13 aa, Homo sapiens
  CDR3 for alpha chain variable domain of TCR clone 352318 (TRAV3, TRAJ15)
CAVRDQAGTDLIF

SEQ ID NO: 704636 - protein, 15 aa, Homo sapiens
  CDR3 for beta chain variable domain of TCR clone 352318 (TRBV11-1, TRBJ2-7)
CASSLNYGASYEQYF

SEQ ID NO: 704637 - protein, 12 aa, Homo sapiens
  CDR3 for alpha chain variable domain of TCR clone 352319 (TRAV17, TRAJ57)
CATDGGSEKLVF

SEQ ID NO: 704638 - protein, 15 aa, Homo sapiens
  CDR3 for beta chain variable domain of TCR clone 352319 (TRBV11-3, TRBJ2-3)
CASLKDGREGGTQYL

SEQ ID NO: 704639 - protein, 14 aa, Homo sapiens
  CDR3 for alpha chain variable domain of TCR clone 352320 (TRAV35, TRAJ35)
CAGRAEALGMCCIA

SEQ ID NO: 704640 - protein, 15 aa, Homo sapiens
  CDR3 for beta chain variable domain of TCR clone 352320 (TRBV6-1, TRBJ1-5)
CASSELRECNQPQHF

SEQ ID NO: 704641 - protein, 15 aa, Homo sapiens
  CDR3 for alpha chain variable domain of TCR clone 352321 (TRAV2, TRAJ15)
CAVEDRGQAGTALIF

SEQ ID NO: 704642 - protein, 15 aa, Homo sapiens
  CDR3 for beta chain variable domain of TCR clone 352321 (TRBV5-1, TRBJ2-5)
CASSFKGGDQETQYF

SEQ ID NO: 704643 - protein, 16 aa, Homo sapiens
  CDR3 for alpha chain variable domain of TCR clone 352322 (TRAV8-3, TRAJ22)
CAVDLLGPGSARQLSF

SEQ ID NO: 704644 - protein, 14 aa, Homo sapiens
  CDR3 for beta chain variable domain of TCR clone 352322 (TRBV11-2, TRBJ2-7)
CASSLELEGYEQYF

SEQ ID NO: 704645 - protein, 13 aa, Homo sapiens
  CDR3 for alpha chain variable domain of TCR clone 352323 (TRAV1-1, TRAJ9)
FAAKNTGGFKTIF

SEQ ID NO: 704646 - protein, 14 aa, Homo sapiens
  CDR3 for beta chain variable domain of TCR clone 352323 (TRBV20-1, TRBJ2-1)
CSAQIGGYANEQFF

SEQ ID NO: 704647 - protein, 11 aa, Homo sapiens
  CDR3 for alpha chain variable domain of TCR clone 352324 (TRAV1-2, TRAJ10)
CFTGGGNKLAF

SEQ ID NO: 704648 - protein, 16 aa, Homo sapiens
  CDR3 for beta chain variable domain of TCR clone 352324 (TRBV12-5, TRBJ2-5)
CASGPRTSGNQETQYF

SEQ ID NO: 704649 - protein, 14 aa, Homo sapiens
  CDR3 for alpha chain variable domain of TCR clone 352325 (TRAV1-2, TRAJ16)
SAVNRFSDGQKLLF

SEQ ID NO: 704650 - protein, 12 aa, Homo sapiens
  CDR3 for beta chain variable domain of TCR clone 352325 (TRBV7-9, TRBJ2-7)
CASSLEGYEQYF

SEQ ID NO: 704651 - protein, 15 aa, Homo sapiens
  CDR3 for alpha chain variable domain of TCR clone 352326 (TRAV12-2, TRAJ53)
CAANRGGGSNYKLTF

SEQ ID NO: 704652 - protein, 15 aa, Homo sapiens
  CDR3 for beta chain variable domain of TCR clone 352326 (TRBV28, TRBJ2-1)
CASSGLAEVDNEQFF

SEQ ID NO: 704653 - protein, 13 aa, Homo sapiens
  CDR3 for alpha chain variable domain of TCR clone 352327 (TRAV2, TRAJ40)
CAVVTSGTYKYIF

SEQ ID NO: 704654 - protein, 14 aa, Homo sapiens
  CDR3 for beta chain variable domain of TCR clone 352327 (TRBV19, TRBJ2-1)
CASPTFVVSGEPFF

SEQ ID NO: 704655 - protein, 11 aa, Homo sapiens
  CDR3 for alpha chain variable domain of TCR clone 352328 (TRAV1-1, TRAJ23)
CAVRQGGKLIS

SEQ ID NO: 704656 - protein, 20 aa, Homo sapiens
  CDR3 for beta chain variable domain of TCR clone 352328 (TRBV7-8, TRBJ2-2)
CASSHLFPGPAIHITGELFF

SEQ ID NO: 704657 - protein, 12 aa, Homo sapiens
  CDR3 for alpha chain variable domain of TCR clone 352329 (TRAV21, TRAJ31)
CAVSQARGRLMF

SEQ ID NO: 704658 - protein, 14 aa, Homo sapiens
  CDR3 for beta chain variable domain of TCR clone 352329 (TRBV28, TRBJ2-7)
CASSLLRISYEQYF

SEQ ID NO: 704659 - protein, 17 aa, Homo sapiens
  CDR3 for alpha chain variable domain of TCR clone 352330 (TRAV3, TRAJ6)
CAVRDGPRAGGSYIPPF

SEQ ID NO: 704660 - protein, 14 aa, Homo sapiens
  CDR3 for beta chain variable domain of TCR clone 352330 (TRBV7-2, TRBJ2-7)
CASSPKTSFYEQYL

SEQ ID NO: 704661 - protein, 15 aa, Homo sapiens
  CDR3 for alpha chain variable domain of TCR clone 352331 (TRAV12-1, TRAJ44)
CVVFVNTGTASKLTF

SEQ ID NO: 704662 - protein, 17 aa, Homo sapiens
  CDR3 for beta chain variable domain of TCR clone 352331 (TRBV7-8, TRBJ2-6)
CASSAETGGAGANVLTF

SEQ ID NO: 704663 - protein, 13 aa, Homo sapiens
  CDR3 for alpha chain variable domain of TCR clone 352332 (TRAV5, TRAJ30)
CAEIANRDDKIIF

SEQ ID NO: 704664 - protein, 14 aa, Homo sapiens
  CDR3 for beta chain variable domain of TCR clone 352332 (TRBV4-1, TRBJ2-2)
FASSQAVNTGELFF

SEQ ID NO: 704665 - protein, 14 aa, Homo sapiens
  CDR3 for alpha chain variable domain of TCR clone 352333 (TRAV12-1, TRAJ12)
CVVNGRDSSYKLIF

SEQ ID NO: 704666 - protein, 14 aa, Homo sapiens
  CDR3 for beta chain variable domain of TCR clone 352333 (TRBV19, TRBJ2-7)
CASTVQGRPYEQYF

SEQ ID NO: 704667 - protein, 11 aa, Homo sapiens
  CDR3 for alpha chain variable domain of TCR clone 352334 (TRAV14/DV4, )
CAMREISRTLP

SEQ ID NO: 704668 - protein, 14 aa, Homo sapiens
  CDR3 for beta chain variable domain of TCR clone 352334 (TRBV2, TRBJ2-1)
CASSDRACYNEQFF

SEQ ID NO: 704669 - protein, 15 aa, Homo sapiens
  CDR3 for alpha chain variable domain of TCR clone 352335 (TRAV26-2, TRAJ42)
CILEGYGGSQGNLIF

SEQ ID NO: 704670 - protein, 17 aa, Homo sapiens
  CDR3 for beta chain variable domain of TCR clone 352335 (TRBV28, TRBJ2-5)
CASSRQGGLAGAETQYF

SEQ ID NO: 704671 - protein, 13 aa, Homo sapiens
  CDR3 for alpha chain variable domain of TCR clone 352336 (TRAV21, TRAJ32)
CAVSGGATNKLIF

SEQ ID NO: 704672 - protein, 15 aa, Homo sapiens
  CDR3 for beta chain variable domain of TCR clone 352336 (TRBV23-1, TRBJ2-1)
CASSQWPQLTMCSSS

SEQ ID NO: 704673 - protein, 14 aa, Homo sapiens
  CDR3 for alpha chain variable domain of TCR clone 352337 (TRAV1-2, TRAJ16)
CAVNRFSDGQKLLF

SEQ ID NO: 704674 - protein, 15 aa, Homo sapiens
  CDR3 for beta chain variable domain of TCR clone 352337 (TRBV11-3, TRBJ2-3)
CASLKDGREGDTQYC

SEQ ID NO: 704675 - protein, 13 aa, Homo sapiens
  CDR3 for alpha chain variable domain of TCR clone 352338 (TRAV29/DV5, TRAJ44)
CAASTGTASKLTF

SEQ ID NO: 704676 - protein, 14 aa, Homo sapiens
  CDR3 for beta chain variable domain of TCR clone 352338 (TRBV7-2, TRBJ1-1)
CASSFLTGTTEAFF

SEQ ID NO: 704677 - protein, 15 aa, Homo sapiens
  CDR3 for alpha chain variable domain of TCR clone 352339 (TRAV26-1, TRAJ29)
CIVRVEGSGNTPLVF

SEQ ID NO: 704678 - protein, 15 aa, Homo sapiens
  CDR3 for beta chain variable domain of TCR clone 352339 (TRBV7-9, TRBJ1-5)
CASSPGHQPNQTQHF

SEQ ID NO: 704679 - protein, 14 aa, Homo sapiens
  CDR3 for alpha chain variable domain of TCR clone 352340 (TRAV8-3, TRAJ7)
CAAIELYGNNRLAF

SEQ ID NO: 704680 - protein, 11 aa, Homo sapiens
  CDR3 for beta chain variable domain of TCR clone 352340 (TRBV29-1, TRBJ2-5)
CSEDRTGTQYF

SEQ ID NO: 704681 - protein, 13 aa, Homo sapiens
  CDR3 for alpha chain variable domain of TCR clone 352341 (TRAV23/DV6, TRAJ58)
CAARLIRGSRLTF

SEQ ID NO: 704682 - protein, 15 aa, Homo sapiens
  CDR3 for beta chain variable domain of TCR clone 352341 (TRBV2, TRBJ1-6)
CADSGSYNSPLHLGT

SEQ ID NO: 704683 - protein, 13 aa, Homo sapiens
  CDR3 for alpha chain variable domain of TCR clone 352342 (TRAV8-3, TRAJ36)
CSVGATGANNLFF

SEQ ID NO: 704684 - protein, 13 aa, Homo sapiens
  CDR3 for beta chain variable domain of TCR clone 352342 (TRBV12-4, TRBJ1-2)
CASSLRQGKGYTF

SEQ ID NO: 704685 - protein, 14 aa, Homo sapiens
  CDR3 for alpha chain variable domain of TCR clone 352343 (TRAV16, TRAJ17)
CALSGRAAGTKLTF

SEQ ID NO: 704686 - protein, 16 aa, Homo sapiens
  CDR3 for beta chain variable domain of TCR clone 352343 (TRBV15, TRBJ1-4)
CATSRDSPPGREKLFF

SEQ ID NO: 704687 - protein, 12 aa, Homo sapiens
  CDR3 for alpha chain variable domain of TCR clone 352344 (TRAV12-1, TRAJ40)
CVVYSGTYKYIF

SEQ ID NO: 704688 - protein, 17 aa, Homo sapiens
  CDR3 for beta chain variable domain of TCR clone 352344 (TRBV11-2, TRBJ2-3)
CQQLTGASRGAPNTQYF

SEQ ID NO: 704689 - protein, 12 aa, Homo sapiens
  CDR3 for alpha chain variable domain of TCR clone 352345 (TRAV12-2, TRAJ21)
CAVNRNFNKFYF

SEQ ID NO: 704690 - protein, 14 aa, Homo sapiens
  CDR3 for beta chain variable domain of TCR clone 352345 (TRBV12-4, TRBJ2-3)
CASSLSGATETQYF

SEQ ID NO: 704691 - protein, 14 aa, Homo sapiens
  CDR3 for alpha chain variable domain of TCR clone 352346 (TRAV13-1, TRAJ20)
CAARPGSNDYKLSF

SEQ ID NO: 704692 - protein, 14 aa, Homo sapiens
  CDR3 for beta chain variable domain of TCR clone 352346 (TRBV12-5, TRBJ2-5)
CASGSRTHQETQYF

SEQ ID NO: 704693 - protein, 13 aa, Homo sapiens
  CDR3 for alpha chain variable domain of TCR clone 352347 (TRAV3, TRAJ41)
CAGSSNSGYALNF

SEQ ID NO: 704694 - protein, 13 aa, Homo sapiens
  CDR3 for beta chain variable domain of TCR clone 352347 (TRBV20-1, TRBJ2-2)
CSALSGGAGELFF

SEQ ID NO: 704695 - protein, 17 aa, Homo sapiens
  CDR3 for alpha chain variable domain of TCR clone 352348 (TRAV3, TRAJ6)
CAVRDGPRAGGSYIPTF

SEQ ID NO: 704696 - protein, 15 aa, Homo sapiens
  CDR3 for beta chain variable domain of TCR clone 352348 (TRBV28, TRBJ2-1)
CASSFGLAVSMKQFF

SEQ ID NO: 704697 - protein, 17 aa, Homo sapiens
  CDR3 for alpha chain variable domain of TCR clone 352349 (TRAV3, TRAJ6)
CAVRDGPRAGGSYIHTF

SEQ ID NO: 704698 - protein, 14 aa, Homo sapiens
  CDR3 for beta chain variable domain of TCR clone 352349 (TRBV6-1, TRBJ1-3)
CASVQGGGGNTIYF

SEQ ID NO: 704699 - protein, 12 aa, Homo sapiens
  CDR3 for alpha chain variable domain of TCR clone 352350 (TRAV8-3, TRAJ26)
CAGDNYGQNFVF

SEQ ID NO: 704700 - protein, 17 aa, Homo sapiens
  CDR3 for beta chain variable domain of TCR clone 352350 (TRBV7-8, TRBJ2-6)
CDSSAGTGGAGANVLTF

SEQ ID NO: 704701 - protein, 19 aa, Homo sapiens
  CDR3 for alpha chain variable domain of TCR clone 352351 (TRAV26-1, TRAJ52)
CIVRVANNAGGTSYGKLTF

SEQ ID NO: 704702 - protein, 13 aa, Homo sapiens
  CDR3 for beta chain variable domain of TCR clone 352351 (TRBV7-3, TRBJ2-5)
CASSFRGGETQYF

SEQ ID NO: 704703 - protein, 14 aa, Homo sapiens
  CDR3 for alpha chain variable domain of TCR clone 352352 (TRAV8-2, TRAJ37)
CVVSISGNTGKLIF

SEQ ID NO: 704704 - protein, 13 aa, Homo sapiens
  CDR3 for beta chain variable domain of TCR clone 352352 (TRBV11-3, TRBJ2-5)
CASSRQGGETQYF

SEQ ID NO: 704705 - protein, 10 aa, Homo sapiens
  CDR3 for alpha chain variable domain of TCR clone 352353 (TRAV1-2, TRAJ31)
CAFFDARLMF

SEQ ID NO: 704706 - protein, 13 aa, Homo sapiens
  CDR3 for beta chain variable domain of TCR clone 352353 (TRBV7-9, TRBJ1-2)
CANSLKQNYGYTF

SEQ ID NO: 704707 - protein, 20 aa, Homo sapiens
  CDR3 for alpha chain variable domain of TCR clone 352354 (TRAV25, TRAJ33)
TATQTTDVGTSRGSNYQLIW

SEQ ID NO: 704708 - protein, 17 aa, Homo sapiens
  CDR3 for beta chain variable domain of TCR clone 352354 (TRBV11-2, TRBJ2-1)
CASSLYPPGVEYNEQFF

SEQ ID NO: 704709 - protein, 14 aa, Homo sapiens
  CDR3 for alpha chain variable domain of TCR clone 352355 (TRAV21, TRAJ28)
CAVGSGAGRYQLTF

SEQ ID NO: 704710 - protein, 14 aa, Homo sapiens
  CDR3 for beta chain variable domain of TCR clone 352355 (TRBV18, TRBJ1-4)
CASSPGPNGVKLFF

SEQ ID NO: 704711 - protein, 13 aa, Homo sapiens
  CDR3 for alpha chain variable domain of TCR clone 352356 (TRAV12-3, TRAJ31)
CAMSANNNARLMF

SEQ ID NO: 704712 - protein, 13 aa, Homo sapiens
  CDR3 for beta chain variable domain of TCR clone 352356 (TRBV7-9, TRBJ1-2)
CASSLKQNYGYTF

SEQ ID NO: 704713 - protein, 14 aa, Homo sapiens
  CDR3 for alpha chain variable domain of TCR clone 352357 (TRAV12-3, TRAJ5)
CAMTWDTGSRAPTF

SEQ ID NO: 704714 - protein, 14 aa, Homo sapiens
  CDR3 for beta chain variable domain of TCR clone 352357 (TRBV10-2, TRBJ1-5)
CARSSTGRNQPQHF

SEQ ID NO: 704715 - protein, 15 aa, Homo sapiens
  CDR3 for alpha chain variable domain of TCR clone 352358 (TRAV17, TRAJ52)
CATEAGGTSWGKLTF

SEQ ID NO: 704716 - protein, 14 aa, Homo sapiens
  CDR3 for beta chain variable domain of TCR clone 352358 (TRBV28, TRBJ1-5)
CASSLGVLVKPQHF

SEQ ID NO: 704717 - protein, 16 aa, Homo sapiens
  CDR3 for alpha chain variable domain of TCR clone 352359 (TRAV30, TRAJ24)
CGAEIVDADSWGKFQF

SEQ ID NO: 704718 - protein, 16 aa, Homo sapiens
  CDR3 for beta chain variable domain of TCR clone 352359 (TRBV2, TRBJ1-3)
CASSGGAGRPGNTIYF

SEQ ID NO: 704719 - protein, 10 aa, Homo sapiens
  CDR3 for alpha chain variable domain of TCR clone 352360 (TRAV1-2, TRAJ31)
CAFFDAILMF

SEQ ID NO: 704720 - protein, 13 aa, Homo sapiens
  CDR3 for beta chain variable domain of TCR clone 352360 (TRBV20-1, TRBJ2-2)
CSASAAGTGELFF

SEQ ID NO: 704721 - protein, 16 aa, Homo sapiens
  CDR3 for alpha chain variable domain of TCR clone 352361 (TRAV3, TRAJ10)
CAVRDMRAGGGNKLTF

SEQ ID NO: 704722 - protein, 13 aa, Homo sapiens
  CDR3 for beta chain variable domain of TCR clone 352361 (TRBV25-1, TRBJ1-1)
CQHHLGGNTEAFF

SEQ ID NO: 704723 - protein, 17 aa, Homo sapiens
  CDR3 for alpha chain variable domain of TCR clone 352362 (TRAV3, TRAJ6)
CAVRDGPRAGGSYIPTF

SEQ ID NO: 704724 - protein, 14 aa, Homo sapiens
  CDR3 for beta chain variable domain of TCR clone 352362 (TRBV11-2, TRBJ2-7)
CASSPGQGLYEQYF

SEQ ID NO: 704725 - protein, 14 aa, Homo sapiens
  CDR3 for alpha chain variable domain of TCR clone 352363 (TRAV14/DV4, TRAJ15)
CAMRRDQAGTALLF

SEQ ID NO: 704726 - protein, 16 aa, Homo sapiens
  CDR3 for beta chain variable domain of TCR clone 352363 (TRBV15, TRBJ2-3)
CATSRDLGIVADTQYF

SEQ ID NO: 704727 - protein, 16 aa, Homo sapiens
  CDR3 for alpha chain variable domain of TCR clone 352364 (TRAV12-1, TRAJ48)
CVVTTFREFGNEKLTF

SEQ ID NO: 704728 - protein, 17 aa, Homo sapiens
  CDR3 for beta chain variable domain of TCR clone 352364 (TRBV13, TRBJ2-3)
CASSLSRVAGGRNTQYF

SEQ ID NO: 704729 - protein, 15 aa, Homo sapiens
  CDR3 for alpha chain variable domain of TCR clone 352365 (TRAV14/DV4, TRAJ26)
CAMREGQNYGQNFVF

SEQ ID NO: 704730 - protein, 14 aa, Homo sapiens
  CDR3 for beta chain variable domain of TCR clone 352365 (TRBV25-1, TRBJ1-1)
CASTHLGGNTEAFF

SEQ ID NO: 704731 - protein, 13 aa, Homo sapiens
  CDR3 for alpha chain variable domain of TCR clone 352366 (TRAV17, TRAJ29)
CATGPSANTPLVF

SEQ ID NO: 704732 - protein, 14 aa, Homo sapiens
  CDR3 for beta chain variable domain of TCR clone 352366 (TRBV2, TRBJ1-6)
CASEVSSYNSPLHF

SEQ ID NO: 704733 - protein, 12 aa, Homo sapiens
  CDR3 for alpha chain variable domain of TCR clone 352367 (TRAV12-2, TRAJ45)
CASGGCADGLTF

SEQ ID NO: 704734 - protein, 16 aa, Homo sapiens
  CDR3 for beta chain variable domain of TCR clone 352367 (TRBV19, TRBJ2-3)
CASSPGLLASTDTQYF

SEQ ID NO: 704735 - protein, 14 aa, Homo sapiens
  CDR3 for alpha chain variable domain of TCR clone 352368 (TRAV2, TRAJ39)
CAVEGDDAGNMLTF

SEQ ID NO: 704736 - protein, 14 aa, Homo sapiens
  CDR3 for beta chain variable domain of TCR clone 352368 (TRBV28, TRBJ2-7)
CASSLRARGNEQYF

SEQ ID NO: 704737 - protein, 13 aa, Homo sapiens
  CDR3 for alpha chain variable domain of TCR clone 352369 (TRAV13-1, TRAJ28)
CAANEAGSYKLTF

SEQ ID NO: 704738 - protein, 15 aa, Homo sapiens
  CDR3 for beta chain variable domain of TCR clone 352369 (TRBV7-9, TRBJ1-6)
CASSSPGRGNSPLHF

SEQ ID NO: 704739 - protein, 13 aa, Homo sapiens
  CDR3 for alpha chain variable domain of TCR clone 352370 (TRAV36/DV7, TRAJ54)
CAVDIQGSQKLVF

SEQ ID NO: 704740 - protein, 14 aa, Homo sapiens
  CDR3 for beta chain variable domain of TCR clone 352370 (TRBV19, TRBJ2-7)
CASNFRDTFTGMYF

SEQ ID NO: 704741 - protein, 16 aa, Homo sapiens
  CDR3 for alpha chain variable domain of TCR clone 352371 (TRAV21, TRAJ52)
CAVTNAGGTSYGKLTF

SEQ ID NO: 704742 - protein, 12 aa, Homo sapiens
  CDR3 for beta chain variable domain of TCR clone 352371 (TRBV29-1, TRBJ1-1)
CSVETGRTEAFF

SEQ ID NO: 704743 - protein, 12 aa, Homo sapiens
  CDR3 for alpha chain variable domain of TCR clone 352372 (TRAV23/DV6, TRAJ30)
CAASKGVDKIIF

SEQ ID NO: 704744 - protein, 15 aa, Homo sapiens
  CDR3 for beta chain variable domain of TCR clone 352372 (TRBV20-1, TRBJ2-7)
CSARDRVSGMDEQYF

SEQ ID NO: 704745 - protein, 14 aa, Homo sapiens
  CDR3 for alpha chain variable domain of TCR clone 352373 (TRAV13-1, TRAJ40)
CAASMTSGTYKYIF

SEQ ID NO: 704746 - protein, 12 aa, Homo sapiens
  CDR3 for beta chain variable domain of TCR clone 352373 (TRBV6-3, TRBJ2-7)
CASSLTPYEQYF

SEQ ID NO: 704747 - protein, 13 aa, Homo sapiens
  CDR3 for alpha chain variable domain of TCR clone 352374 (TRAV8-6, TRAJ49)
CAVITNTGNQFYF

SEQ ID NO: 704748 - protein, 13 aa, Homo sapiens
  CDR3 for beta chain variable domain of TCR clone 352374 (TRBV10-3, TRBJ2-7)
CASKLAVNYEKYF

SEQ ID NO: 704749 - protein, 16 aa, Homo sapiens
  CDR3 for alpha chain variable domain of TCR clone 352375 (TRAV12-3, TRAJ53)
CAMSPGSGGSNYKLTF

SEQ ID NO: 704750 - protein, 15 aa, Homo sapiens
  CDR3 for beta chain variable domain of TCR clone 352375 (TRBV20-1, TRBJ2-6)
CSAPGAHSGANVLTF

SEQ ID NO: 704751 - protein, 11 aa, Homo sapiens
  CDR3 for alpha chain variable domain of TCR clone 352376 (TRAV12-3, TRAJ49)
CAANTGNQFYF

SEQ ID NO: 704752 - protein, 15 aa, Homo sapiens
  CDR3 for beta chain variable domain of TCR clone 352376 (TRBV6-5, TRBJ1-1)
CASSYLRGSVPEAFF

SEQ ID NO: 704753 - protein, 18 aa, Homo sapiens
  CDR3 for alpha chain variable domain of TCR clone 352377 (TRAV26-1, TRAJ52)
CIVRVEGAGGTSYGKLTF

SEQ ID NO: 704754 - protein, 13 aa, Homo sapiens
  CDR3 for beta chain variable domain of TCR clone 352377 (TRBV7-3, TRBJ1-2)
CASSLKQGYGYTF

SEQ ID NO: 704755 - protein, 10 aa, Homo sapiens
  CDR3 for alpha chain variable domain of TCR clone 352378 (TRAV8-2, TRAJ29)
CTGGNTPLVF

SEQ ID NO: 704756 - protein, 17 aa, Homo sapiens
  CDR3 for beta chain variable domain of TCR clone 352378 (TRBV2, TRBJ2-7)
CASSQAPTGWDSYEQYL

SEQ ID NO: 704757 - protein, 14 aa, Homo sapiens
  CDR3 for alpha chain variable domain of TCR clone 352379 (TRAV1-2, TRAJ8)
CAVREDTGFQKLVF

SEQ ID NO: 704758 - protein, 16 aa, Homo sapiens
  CDR3 for beta chain variable domain of TCR clone 352379 (TRBV6-3, TRBJ2-1)
CASRSPAGGKYNEQFF

SEQ ID NO: 704759 - protein, 14 aa, Homo sapiens
  CDR3 for alpha chain variable domain of TCR clone 352380 (TRAV2, TRAJ3)
CAVPPYSSASKIIF

SEQ ID NO: 704760 - protein, 15 aa, Homo sapiens
  CDR3 for beta chain variable domain of TCR clone 352380 (TRBV20-1, TRBJ2-5)
CSAPPRTGFGETQYF

SEQ ID NO: 704761 - protein, 15 aa, Homo sapiens
  CDR3 for alpha chain variable domain of TCR clone 352381 (TRAV30, TRAJ57)
CGTAIPQGGSEKLVF

SEQ ID NO: 704762 - protein, 14 aa, Homo sapiens
  CDR3 for beta chain variable domain of TCR clone 352381 (TRBV4-1, TRBJ2-2)
CASSQAVNTGELFF

SEQ ID NO: 704763 - protein, 13 aa, Homo sapiens
  CDR3 for alpha chain variable domain of TCR clone 352382 (TRAV29/DV5, TRAJ47)
CAASAAYGNKLVF

SEQ ID NO: 704764 - protein, 15 aa, Homo sapiens
  CDR3 for beta chain variable domain of TCR clone 352382 (TRBV7-9, TRBJ1-4)
CASSARTGGNEKLFF

SEQ ID NO: 704765 - protein, 14 aa, Homo sapiens
  CDR3 for alpha chain variable domain of TCR clone 352383 (TRAV1-2, TRAJ16)
CAVNGFSDGQKLLF

SEQ ID NO: 704766 - protein, 15 aa, Homo sapiens
  CDR3 for beta chain variable domain of TCR clone 352383 (TRBV9, TRBJ1-6)
CASSVAGTGDSPLHF

SEQ ID NO: 704767 - protein, 14 aa, Homo sapiens
  CDR3 for alpha chain variable domain of TCR clone 352384 (TRAV1-2, TRAJ8)
CAVREDTGFPKLVF

SEQ ID NO: 704768 - protein, 16 aa, Homo sapiens
  CDR3 for beta chain variable domain of TCR clone 352384 (TRBV4-1, TRBJ1-4)
CASSQDLRRGGEKLFF

SEQ ID NO: 704769 - protein, 15 aa, Homo sapiens
  CDR3 for alpha chain variable domain of TCR clone 352385 (TRAV13-1, TRAJ52)
CAASSPSTSYGKLTF

SEQ ID NO: 704770 - protein, 13 aa, Homo sapiens
  CDR3 for beta chain variable domain of TCR clone 352385 (TRBV27, TRBJ2-5)
RASSLSSLETQYF

SEQ ID NO: 704771 - protein, 15 aa, Homo sapiens
  CDR3 for alpha chain variable domain of TCR clone 352386 (TRAV12-2, TRAJ23)
CAVNTLYNQGGKLIF

SEQ ID NO: 704772 - protein, 13 aa, Homo sapiens
  CDR3 for beta chain variable domain of TCR clone 352386 (TRBV24-1, TRBJ2-2)
CATSETNTGELFF

SEQ ID NO: 704773 - protein, 23 aa, Homo sapiens
  CDR3 for alpha chain variable domain of TCR clone 352387 (TRAV8-3, )
CAVVTTRMPDIQNPDPAVYQLRD

SEQ ID NO: 704774 - protein, 14 aa, Homo sapiens
  CDR3 for beta chain variable domain of TCR clone 352387 (TRBV11-2, TRBJ2-7)
CASSPSTTSYEQYF

SEQ ID NO: 704775 - protein, 13 aa, Homo sapiens
  CDR3 for alpha chain variable domain of TCR clone 352388 (TRAV2, TRAJ40)
CAVVTPGTYKYIF

SEQ ID NO: 704776 - protein, 14 aa, Homo sapiens
  CDR3 for beta chain variable domain of TCR clone 352388 (TRBV19, TRBJ2-1)
CTSPTFVLSGEQFF

SEQ ID NO: 704777 - protein, 18 aa, Homo sapiens
  CDR3 for alpha chain variable domain of TCR clone 352389 (TRAV12-3, TRAJ52)
CAMSVGGAGGTSYGKLTF

SEQ ID NO: 704778 - protein, 13 aa, Homo sapiens
  CDR3 for beta chain variable domain of TCR clone 352389 (TRBV12-4, TRBJ2-1)
CASSLVPGNEQFF

SEQ ID NO: 704779 - protein, 12 aa, Homo sapiens
  CDR3 for alpha chain variable domain of TCR clone 352390 (TRAV8-3, TRAJ26)
CAGDNYGQNFVF

SEQ ID NO: 704780 - protein, 15 aa, Homo sapiens
  CDR3 for beta chain variable domain of TCR clone 352390 (TRBV9, TRBJ2-1)
CASILAGSSYNEQFF

SEQ ID NO: 704781 - protein, 15 aa, Homo sapiens
  CDR3 for alpha chain variable domain of TCR clone 352391 (TRAV3, TRAJ22)
CAVRDRGGSARQLTF

SEQ ID NO: 704782 - protein, 15 aa, Homo sapiens
  CDR3 for beta chain variable domain of TCR clone 352391 (TRBV5-4, TRBJ2-3)
CSQQPGAGGADTQYF

SEQ ID NO: 704783 - protein, 14 aa, Homo sapiens
  CDR3 for alpha chain variable domain of TCR clone 352392 (TRAV12-2, TRAJ53)
CAVKGGGSNYQLTF

SEQ ID NO: 704784 - protein, 14 aa, Homo sapiens
  CDR3 for beta chain variable domain of TCR clone 352392 (TRBV7-7, TRBJ2-2)
CATRQDSDTGELFF

SEQ ID NO: 704785 - protein, 14 aa, Homo sapiens
  CDR3 for alpha chain variable domain of TCR clone 352393 (TRAV26-1, TRAJ38)
CIADNAGNNRKLIW

SEQ ID NO: 704786 - protein, 17 aa, Homo sapiens
  CDR3 for beta chain variable domain of TCR clone 352393 (TRBV13, TRBJ2-3)
CASSLSRVAGGRNTQYL

SEQ ID NO: 704787 - protein, 14 aa, Homo sapiens
  CDR3 for alpha chain variable domain of TCR clone 352394 (TRAV23/DV6, TRAJ39)
FAASIGNAGNMLTF

SEQ ID NO: 704788 - protein, 14 aa, Homo sapiens
  CDR3 for beta chain variable domain of TCR clone 352394 (TRBV7-3, TRBJ1-1)
CASSLKGGNTEAFF

SEQ ID NO: 704789 - protein, 15 aa, Homo sapiens
  CDR3 for alpha chain variable domain of TCR clone 352395 (TRAV12-2, TRAJ53)
CAVNGGGGSNYKLTF

SEQ ID NO: 704790 - protein, 14 aa, Homo sapiens
  CDR3 for beta chain variable domain of TCR clone 352395 (TRBV10-3, TRBJ2-7)
CHQCGTSETYEQYF

SEQ ID NO: 704791 - protein, 14 aa, Homo sapiens
  CDR3 for alpha chain variable domain of TCR clone 352396 (TRAV41, TRAJ57)
CAVLLQGGSEKLVF

SEQ ID NO: 704792 - protein, 12 aa, Homo sapiens
  CDR3 for beta chain variable domain of TCR clone 352396 (TRBV10-3, TRBJ1-1)
CAAMDRPPEAFF

SEQ ID NO: 704793 - protein, 14 aa, Homo sapiens
  CDR3 for alpha chain variable domain of TCR clone 352397 (TRAV13-1, TRAJ35)
CAASKGCFGNVLHF

SEQ ID NO: 704794 - protein, 13 aa, Homo sapiens
  CDR3 for beta chain variable domain of TCR clone 352397 (TRBV7-3, TRBJ1-1)
CASSQDWGAEAFF

SEQ ID NO: 704795 - protein, 14 aa, Homo sapiens
  CDR3 for alpha chain variable domain of TCR clone 352398 (TRAV23/DV6, TRAJ8)
CAASKATGFQKLVF

SEQ ID NO: 704796 - protein, 15 aa, Homo sapiens
  CDR3 for beta chain variable domain of TCR clone 352398 (TRBV28, TRBJ2-3)
CASSPDRQGVNTQYF

SEQ ID NO: 704797 - protein, 13 aa, Homo sapiens
  CDR3 for alpha chain variable domain of TCR clone 352399 (TRAV13-1, TRAJ39)
CSKYSNAGNMLTF

SEQ ID NO: 704798 - protein, 14 aa, Homo sapiens
  CDR3 for beta chain variable domain of TCR clone 352399 (TRBV4-1, TRBJ2-2)
CASGQAVNTGELFF

SEQ ID NO: 704799 - protein, 15 aa, Homo sapiens
  CDR3 for alpha chain variable domain of TCR clone 352400 (TRAV29/DV5, TRAJ8)
CAASGRNTGFQKLVF

SEQ ID NO: 704800 - protein, 17 aa, Homo sapiens
  CDR3 for beta chain variable domain of TCR clone 352400 (TRBV18, TRBJ1-2)
CASSTRPSGWSNYGYTF

SEQ ID NO: 704801 - protein, 13 aa, Homo sapiens
  CDR3 for alpha chain variable domain of TCR clone 352401 (TRAV2, TRAJ29)
CAAGNSGNTPLVF

SEQ ID NO: 704802 - protein, 13 aa, Homo sapiens
  CDR3 for beta chain variable domain of TCR clone 352401 (TRBV4-2, TRBJ1-1)
CASSQAGNTEAFF

SEQ ID NO: 704803 - protein, 16 aa, Homo sapiens
  CDR3 for alpha chain variable domain of TCR clone 352402 (TRAV12-3, TRAJ53)
CAISPGSGGSNYKLTS

SEQ ID NO: 704804 - protein, 11 aa, Homo sapiens
  CDR3 for beta chain variable domain of TCR clone 352402 (TRBV29-1, TRBJ2-5)
CSEDRTGTQYF

SEQ ID NO: 704805 - protein, 13 aa, Homo sapiens
  CDR3 for alpha chain variable domain of TCR clone 352403 (TRAV13-2, TRAJ13)
CAERPGGYQKVTF

SEQ ID NO: 704806 - protein, 15 aa, Homo sapiens
  CDR3 for beta chain variable domain of TCR clone 352403 (TRBV11-3, TRBJ2-7)
CASSHGPASSYEQYF

SEQ ID NO: 704807 - protein, 17 aa, Homo sapiens
  CDR3 for alpha chain variable domain of TCR clone 352404 (TRAV17, TRAJ28)
CATDPRRGGAGSYTLTF

SEQ ID NO: 704808 - protein, 16 aa, Homo sapiens
  CDR3 for beta chain variable domain of TCR clone 352404 (TRBV25-1, TRBJ1-1)
CASSGDRDRGRIEAFF

SEQ ID NO: 704809 - protein, 12 aa, Homo sapiens
  CDR3 for alpha chain variable domain of TCR clone 352405 (TRAV13-1, TRAJ21)
WAAKEGFNKFYF

SEQ ID NO: 704810 - protein, 14 aa, Homo sapiens
  CDR3 for beta chain variable domain of TCR clone 352405 (TRBV18, TRBJ2-7)
CASSPRGGAYEQYF

SEQ ID NO: 704811 - protein, 15 aa, Homo sapiens
  CDR3 for alpha chain variable domain of TCR clone 352406 (TRAV8-4, TRAJ37)
CAVTYGSNNTGKLIF

SEQ ID NO: 704812 - protein, 13 aa, Homo sapiens
  CDR3 for beta chain variable domain of TCR clone 352406 (TRBV12-4, TRBJ2-5)
CASSLGGSRTQYF

SEQ ID NO: 704813 - protein, 15 aa, Homo sapiens
  CDR3 for alpha chain variable domain of TCR clone 352407 (TRAV26-1, TRAJ39)
CIVRDGSNAGNMLTF

SEQ ID NO: 704814 - protein, 14 aa, Homo sapiens
  CDR3 for beta chain variable domain of TCR clone 352407 (TRBV10-3, TRBJ1-2)
CAIRAGTGDYGDTF

SEQ ID NO: 704815 - protein, 12 aa, Homo sapiens
  CDR3 for alpha chain variable domain of TCR clone 352408 (TRAV17, TRAJ39)
CATGAAGNMLTF

SEQ ID NO: 704816 - protein, 14 aa, Homo sapiens
  CDR3 for beta chain variable domain of TCR clone 352408 (TRBV7-9, TRBJ1-2)
CAGSRQGANYGDTF

SEQ ID NO: 704817 - protein, 14 aa, Homo sapiens
  CDR3 for alpha chain variable domain of TCR clone 352409 (TRAV2, TRAJ9)
CAVEDRSGGFKTIY

SEQ ID NO: 704818 - protein, 15 aa, Homo sapiens
  CDR3 for beta chain variable domain of TCR clone 352409 (TRBV19, TRBJ2-1)
CASSSPGVPLDEQFF

SEQ ID NO: 704819 - protein, 11 aa, Homo sapiens
  CDR3 for alpha chain variable domain of TCR clone 352410 (TRAV12-3, TRAJ27)
CALANAGKSTF

SEQ ID NO: 704820 - protein, 13 aa, Homo sapiens
  CDR3 for beta chain variable domain of TCR clone 352410 (TRBV3-1, TRBJ1-1)
CASSPGVITEAFF

SEQ ID NO: 704821 - protein, 14 aa, Homo sapiens
  CDR3 for alpha chain variable domain of TCR clone 352411 (TRAV2, TRAJ9)
CAVEDRSGGFNTIF

SEQ ID NO: 704822 - protein, 17 aa, Homo sapiens
  CDR3 for beta chain variable domain of TCR clone 352411 (TRBV4-1, TRBJ2-7)
CASSRDPLGVRGGEQYF

SEQ ID NO: 704823 - protein, 14 aa, Homo sapiens
  CDR3 for alpha chain variable domain of TCR clone 352412 (TRAV9-2, TRAJ39)
CALCIYNAGNMLTF

SEQ ID NO: 704824 - protein, 14 aa, Homo sapiens
  CDR3 for beta chain variable domain of TCR clone 352412 (TRBV19, TRBJ2-1)
CASPTFVLSGEQFF

SEQ ID NO: 704825 - protein, 14 aa, Homo sapiens
  CDR3 for alpha chain variable domain of TCR clone 352413 (TRAV12-2, TRAJ45)
GAMYSGGGADGLTF

SEQ ID NO: 704826 - protein, 12 aa, Homo sapiens
  CDR3 for beta chain variable domain of TCR clone 352413 (TRBV19, TRBJ1-1)
CASSIGSSEAFF

SEQ ID NO: 704827 - protein, 12 aa, Homo sapiens
  CDR3 for alpha chain variable domain of TCR clone 352414 (TRAV1-2, TRAJ24)
CTVGGSWGKFQF

SEQ ID NO: 704828 - protein, 15 aa, Homo sapiens
  CDR3 for beta chain variable domain of TCR clone 352414 (TRBV6-1, TRBJ2-7)
CASSEGVGNPYEQYF

SEQ ID NO: 704829 - protein, 13 aa, Homo sapiens
  CDR3 for alpha chain variable domain of TCR clone 352415 (TRAV35, TRAJ33)
CAGRHDSNYQLIW

SEQ ID NO: 704830 - protein, 19 aa, Homo sapiens
  CDR3 for beta chain variable domain of TCR clone 352415 (TRBV6-3, TRBJ2-1)
CASSYSWASGRATYNEQFF

SEQ ID NO: 704831 - protein, 16 aa, Homo sapiens
  CDR3 for alpha chain variable domain of TCR clone 352416 (TRAV30, TRAJ24)
CGTEIVDADSWGKFQF

SEQ ID NO: 704832 - protein, 14 aa, Homo sapiens
  CDR3 for beta chain variable domain of TCR clone 352416 (TRBV12-5, TRBJ2-5)
WDSGSRTHQETQYF

SEQ ID NO: 704833 - protein, 18 aa, Homo sapiens
  CDR3 for alpha chain variable domain of TCR clone 352417 (TRAV26-2, TRAJ45)
CILRLWGYSGGGGDGLTF

SEQ ID NO: 704834 - protein, 17 aa, Homo sapiens
  CDR3 for beta chain variable domain of TCR clone 352417 (TRBV28, TRBJ2-3)
CASSPTPAGGRVDTQYF

SEQ ID NO: 704835 - protein, 10 aa, Homo sapiens
  CDR3 for alpha chain variable domain of TCR clone 352418 (TRAV1-2, TRAJ31)
CAFFRCQTHV

SEQ ID NO: 704836 - protein, 13 aa, Homo sapiens
  CDR3 for beta chain variable domain of TCR clone 352418 (TRBV7-9, TRBJ1-2)
CDSSLKQNYGYTF

SEQ ID NO: 704837 - protein, 13 aa, Homo sapiens
  CDR3 for alpha chain variable domain of TCR clone 352419 (TRAV26-2, TRAJ43)
CILRAVDNNDMRF

SEQ ID NO: 704838 - protein, 15 aa, Homo sapiens
  CDR3 for beta chain variable domain of TCR clone 352419 (TRBV7-2, TRBJ2-1)
CASTHGTGIYNEQFF

SEQ ID NO: 704839 - protein, 15 aa, Homo sapiens
  CDR3 for alpha chain variable domain of TCR clone 352420 (TRAV26-1, TRAJ56)
CIVRVDNRANSKLTF

SEQ ID NO: 704840 - protein, 15 aa, Homo sapiens
  CDR3 for beta chain variable domain of TCR clone 352420 (TRBV20-1, TRBJ2-7)
CSARDPTEVGHEQYF

SEQ ID NO: 704841 - protein, 14 aa, Homo sapiens
  CDR3 for alpha chain variable domain of TCR clone 352421 (TRAV12-1, TRAJ37)
CVVTGSSNTGKLIF

SEQ ID NO: 704842 - protein, 20 aa, Homo sapiens
  CDR3 for beta chain variable domain of TCR clone 352421 (TRBV23-1, TRBJ2-5)
CISAPAVPERVLLIQETQFF

SEQ ID NO: 704843 - protein, 12 aa, Homo sapiens
  CDR3 for alpha chain variable domain of TCR clone 352422 (TRAV2, TRAJ33)
CAFMDSNSQLIW

SEQ ID NO: 704844 - protein, 16 aa, Homo sapiens
  CDR3 for beta chain variable domain of TCR clone 352422 (TRBV2, TRBJ2-7)
CASSEPWTGPYYEQYF

SEQ ID NO: 704845 - protein, 14 aa, Homo sapiens
  CDR3 for alpha chain variable domain of TCR clone 352423 (TRAV21, TRAJ45)
CAVHSGGDADGLTF

SEQ ID NO: 704846 - protein, 14 aa, Homo sapiens
  CDR3 for beta chain variable domain of TCR clone 352423 (TRBV20-1, TRBJ2-1)
CSARRLAEANEQFF

SEQ ID NO: 704847 - protein, 13 aa, Homo sapiens
  CDR3 for alpha chain variable domain of TCR clone 352424 (TRAV21, TRAJ20)
CAVVLRVDYKLSF

SEQ ID NO: 704848 - protein, 13 aa, Homo sapiens
  CDR3 for beta chain variable domain of TCR clone 352424 (TRBV6-1, TRBJ1-1)
CASRRQGNTEAFF

SEQ ID NO: 704849 - protein, 16 aa, Homo sapiens
  CDR3 for alpha chain variable domain of TCR clone 352425 (TRAV12-2, TRAJ56)
CAVRRVDTGANGKLTL

SEQ ID NO: 704850 - protein, 11 aa, Homo sapiens
  CDR3 for beta chain variable domain of TCR clone 352425 (TRBV3-1, TRBJ2-7)
CASSQVREQYF

SEQ ID NO: 704851 - protein, 14 aa, Homo sapiens
  CDR3 for alpha chain variable domain of TCR clone 352426 (TRAV20, TRAJ29)
CAVQAWVGNTPLVF

SEQ ID NO: 704852 - protein, 15 aa, Homo sapiens
  CDR3 for beta chain variable domain of TCR clone 352426 (TRBV20-1, TRBJ2-7)
CSAESGTSGAYEQYF

SEQ ID NO: 704853 - protein, 10 aa, Homo sapiens
  CDR3 for alpha chain variable domain of TCR clone 352427 (TRAV30, TRAJ16)
CGTGGQKLLF

SEQ ID NO: 704854 - protein, 12 aa, Homo sapiens
  CDR3 for beta chain variable domain of TCR clone 352427 (TRBV7-9, TRBJ2-7)
CATRTDAYEQYF

SEQ ID NO: 704855 - protein, 15 aa, Homo sapiens
  CDR3 for alpha chain variable domain of TCR clone 352428 (TRAV26-2, TRAJ13)
CILRDLFGGYQKVTF

SEQ ID NO: 704856 - protein, 14 aa, Homo sapiens
  CDR3 for beta chain variable domain of TCR clone 352428 (TRBV4-1, TRBJ2-3)
CASSQEGSTDTQYF

SEQ ID NO: 704857 - protein, 12 aa, Homo sapiens
  CDR3 for alpha chain variable domain of TCR clone 352429 (TRAV12-3, TRAJ17)
CAMTLTGNKLTF

SEQ ID NO: 704858 - protein, 15 aa, Homo sapiens
  CDR3 for beta chain variable domain of TCR clone 352429 (TRBV13, TRBJ2-5)
CASSLAGYREETQYF

SEQ ID NO: 704859 - protein, 14 aa, Homo sapiens
  CDR3 for alpha chain variable domain of TCR clone 352430 (TRAV3, TRAJ17)
CAVRERSCRQRANF

SEQ ID NO: 704860 - protein, 17 aa, Homo sapiens
  CDR3 for beta chain variable domain of TCR clone 352430 (TRBV13, TRBJ2-3)
CASSLSRVAGGRNTQYF

SEQ ID NO: 704861 - protein, 10 aa, Homo sapiens
  CDR3 for alpha chain variable domain of TCR clone 352431 (TRAV8-3, TRAJ43)
CAVALADMRF

SEQ ID NO: 704862 - protein, 12 aa, Homo sapiens
  CDR3 for beta chain variable domain of TCR clone 352431 (TRBV12-4, TRBJ2-7)
CASSLGGYEQYF

SEQ ID NO: 704863 - protein, 16 aa, Homo sapiens
  CDR3 for alpha chain variable domain of TCR clone 352432 (TRAV16, TRAJ57)
CAPYLITQGGSEKLVF

SEQ ID NO: 704864 - protein, 17 aa, Homo sapiens
  CDR3 for beta chain variable domain of TCR clone 352432 (TRBV24-1, TRBJ2-4)
RATSDAEARGVRNIQYF

SEQ ID NO: 704865 - protein, 14 aa, Homo sapiens
  CDR3 for alpha chain variable domain of TCR clone 352433 (TRAV17, TRAJ31)
CATVLRNNIARLMF

SEQ ID NO: 704866 - protein, 14 aa, Homo sapiens
  CDR3 for beta chain variable domain of TCR clone 352433 (TRBV12-4, TRBJ2-5)
CASSLWQKQETQYF

SEQ ID NO: 704867 - protein, 11 aa, Homo sapiens
  CDR3 for alpha chain variable domain of TCR clone 352434 (TRAV21, TRAJ34)
CAPDNTDKLIF

SEQ ID NO: 704868 - protein, 14 aa, Homo sapiens
  CDR3 for beta chain variable domain of TCR clone 352434 (TRBV19, TRBJ2-1)
CASSKDRGQDEQFF

SEQ ID NO: 704869 - protein, 13 aa, Homo sapiens
  CDR3 for alpha chain variable domain of TCR clone 352435 (TRAV38-2/DV8, TRAJ34)
CADRTWNTDKRIF

SEQ ID NO: 704870 - protein, 18 aa, Homo sapiens
  CDR3 for beta chain variable domain of TCR clone 352435 (TRBV6-6, TRBJ1-3)
CASSYSKWDSISGNTIYF

SEQ ID NO: 704871 - protein, 12 aa, Homo sapiens
  CDR3 for alpha chain variable domain of TCR clone 352436 (TRAV12-3, TRAJ17)
CAMTLTGNKLTF

SEQ ID NO: 704872 - protein, 15 aa, Homo sapiens
  CDR3 for beta chain variable domain of TCR clone 352436 (TRBV5-1, TRBJ2-3)
CASSSTSGGTDTQYF

SEQ ID NO: 704873 - protein, 14 aa, Homo sapiens
  CDR3 for alpha chain variable domain of TCR clone 352437 (TRAV17, TRAJ22)
CATSPSGSARQLTF

SEQ ID NO: 704874 - protein, 16 aa, Homo sapiens
  CDR3 for beta chain variable domain of TCR clone 352437 (TRBV12-5, TRBJ2-5)
CASGPRTSGNQETQYF

SEQ ID NO: 704875 - protein, 12 aa, Homo sapiens
  CDR3 for alpha chain variable domain of TCR clone 352438 (TRAV20, TRAJ33)
CAVRGSKYQLIW

SEQ ID NO: 704876 - protein, 13 aa, Homo sapiens
  CDR3 for beta chain variable domain of TCR clone 352438 (TRBV4-3, TRBJ1-1)
CASSPTGNTEAFF

SEQ ID NO: 704877 - protein, 12 aa, Homo sapiens
  CDR3 for alpha chain variable domain of TCR clone 352439 (TRAV8-3, TRAJ6)
CAVAGGSYIPTF

SEQ ID NO: 704878 - protein, 12 aa, Homo sapiens
  CDR3 for beta chain variable domain of TCR clone 352439 (TRBV11-2, TRBJ2-2)
CASSLGGGELFF

SEQ ID NO: 704879 - protein, 15 aa, Homo sapiens
  CDR3 for alpha chain variable domain of TCR clone 352440 (TRAV12-3, TRAJ6)
CAMSATTGGSYIPTF

SEQ ID NO: 704880 - protein, 16 aa, Homo sapiens
  CDR3 for beta chain variable domain of TCR clone 352440 (TRBV20-1, TRBJ1-2)
CSASMGQGVGNYGYTF

SEQ ID NO: 704881 - protein, 13 aa, Homo sapiens
  CDR3 for alpha chain variable domain of TCR clone 352441 (TRAV13-1, TRAJ43)
SAASLSNNNDIRF

SEQ ID NO: 704882 - protein, 15 aa, Homo sapiens
  CDR3 for beta chain variable domain of TCR clone 352441 (TRBV5-1, TRBJ2-1)
CASSQAGYWWNEQFF

SEQ ID NO: 704883 - protein, 14 aa, Homo sapiens
  CDR3 for alpha chain variable domain of TCR clone 352442 (TRAV20, TRAJ42)
CAVQAGGSQGNLIF

SEQ ID NO: 704884 - protein, 16 aa, Homo sapiens
  CDR3 for beta chain variable domain of TCR clone 352442 (TRBV28, TRBJ1-2)
CASRIQGANYGYTLVR

SEQ ID NO: 704885 - protein, 18 aa, Homo sapiens
  CDR3 for alpha chain variable domain of TCR clone 352443 (TRAV12-3, TRAJ52)
CAMSVGGAGGTSYGKLTF

SEQ ID NO: 704886 - protein, 16 aa, Homo sapiens
  CDR3 for beta chain variable domain of TCR clone 352443 (TRBV7-9, TRBJ1-2)
CASSISLDRGGYGYSF

SEQ ID NO: 704887 - protein, 12 aa, Homo sapiens
  CDR3 for alpha chain variable domain of TCR clone 352444 (TRAV35, TRAJ30)
CAGLNRDDKIMF

SEQ ID NO: 704888 - protein, 15 aa, Homo sapiens
  CDR3 for beta chain variable domain of TCR clone 352444 (TRBV18, TRBJ2-3)
CASSPLAGETDTQYF

SEQ ID NO: 704889 - protein, 12 aa, Homo sapiens
  CDR3 for alpha chain variable domain of TCR clone 352445 (TRAV2, TRAJ9)
CAVGAGGFKTIF

SEQ ID NO: 704890 - protein, 16 aa, Homo sapiens
  CDR3 for beta chain variable domain of TCR clone 352445 (TRBV27, TRBJ2-7)
CASSSEGRDSAYEQYF

SEQ ID NO: 704891 - protein, 15 aa, Homo sapiens
  CDR3 for alpha chain variable domain of TCR clone 352446 (TRAV3, TRAJ29)
CAVRDLYSGNTPLVF

SEQ ID NO: 704892 - protein, 17 aa, Homo sapiens
  CDR3 for beta chain variable domain of TCR clone 352446 (TRBV20-1, TRBJ2-1)
SAVLDPLAGVWDNEQFF

SEQ ID NO: 704893 - protein, 16 aa, Homo sapiens
  CDR3 for alpha chain variable domain of TCR clone 352447 (TRAV12-2, TRAJ10)
CAVNRVLTGGGHKLTF

SEQ ID NO: 704894 - protein, 16 aa, Homo sapiens
  CDR3 for beta chain variable domain of TCR clone 352447 (TRBV12-5, TRBJ2-5)
CASGPRTSGNQETQYF

SEQ ID NO: 704895 - protein, 17 aa, Homo sapiens
  CDR3 for alpha chain variable domain of TCR clone 352448 (TRAV3, TRAJ40)
CAVRDGPRAGGSYIPTF

SEQ ID NO: 704896 - protein, 13 aa, Homo sapiens
  CDR3 for beta chain variable domain of TCR clone 352448 (TRBV7-6, TRBJ1-2)
CASSLVADYGYTF

SEQ ID NO: 704897 - protein, 20 aa, Homo sapiens
  CDR3 for alpha chain variable domain of TCR clone 352449 (TRAV1-2, TRAJ34)
LLKELQMKDSASPNTDKLIF

SEQ ID NO: 704898 - protein, 15 aa, Homo sapiens
  CDR3 for beta chain variable domain of TCR clone 352449 (TRBV9, TRBJ1-6)
CASSVAGTGDSPLHF

SEQ ID NO: 704899 - protein, 12 aa, Homo sapiens
  CDR3 for alpha chain variable domain of TCR clone 352450 (TRAV21, TRAJ12)
CAVMDRSYKLIF

SEQ ID NO: 704900 - protein, 16 aa, Homo sapiens
  CDR3 for beta chain variable domain of TCR clone 352450 (TRBV7-9, TRBJ2-5)
CASRLEIGTRKETQYF

SEQ ID NO: 704901 - protein, 11 aa, Homo sapiens
  CDR3 for alpha chain variable domain of TCR clone 352451 (TRAV23/DV6, TRAJ49)
CAVAPVTSSIL

SEQ ID NO: 704902 - protein, 15 aa, Homo sapiens
  CDR3 for beta chain variable domain of TCR clone 352451 (TRBV6-1, TRBJ1-1)
CASSRQGNTEAFLDK

SEQ ID NO: 704903 - protein, 13 aa, Homo sapiens
  CDR3 for alpha chain variable domain of TCR clone 352452 (TRAV3, TRAJ20)
CAVRILNDYKLSF

SEQ ID NO: 704904 - protein, 13 aa, Homo sapiens
  CDR3 for beta chain variable domain of TCR clone 352452 (TRBV6-1, TRBJ2-1)
CAGMDPTNNEQFF

SEQ ID NO: 704905 - protein, 13 aa, Homo sapiens
  CDR3 for alpha chain variable domain of TCR clone 352453 (TRAV21, TRAJ27)
CAALNTNAGKSTF

SEQ ID NO: 704906 - protein, 16 aa, Homo sapiens
  CDR3 for beta chain variable domain of TCR clone 352453 (TRBV5-1, TRBJ2-2)
CASSLWDTTNTGELFF

SEQ ID NO: 704907 - protein, 11 aa, Homo sapiens
  CDR3 for alpha chain variable domain of TCR clone 352454 (TRAV1-2, TRAJ40)
CAVPGTYKYIF

SEQ ID NO: 704908 - protein, 14 aa, Homo sapiens
  CDR3 for beta chain variable domain of TCR clone 352454 (TRBV11-3, TRBJ2-1)
CASSATTSGSIQFF

SEQ ID NO: 704909 - protein, 13 aa, Homo sapiens
  CDR3 for alpha chain variable domain of TCR clone 352455 (TRAV17, TRAJ7)
CATDNYGNNRLDF

SEQ ID NO: 704910 - protein, 16 aa, Homo sapiens
  CDR3 for beta chain variable domain of TCR clone 352455 (TRBV4-1, TRBJ2-5)
CASSQAIAASSATQYF

SEQ ID NO: 704911 - protein, 23 aa, Homo sapiens
  CDR3 for alpha chain variable domain of TCR clone 352456 (TRAV26-1, TRAJ38)
CIADNAGNNHIQNPDPAVYQLRD

SEQ ID NO: 704912 - protein, 13 aa, Homo sapiens
  CDR3 for beta chain variable domain of TCR clone 352456 (TRBV20-1, TRBJ1-1)
CSARGGGNTESFF

SEQ ID NO: 704913 - protein, 13 aa, Homo sapiens
  CDR3 for alpha chain variable domain of TCR clone 352457 (TRAV12-2, TRAJ12)
CAVNGDSSYKLIF

SEQ ID NO: 704914 - protein, 16 aa, Homo sapiens
  CDR3 for beta chain variable domain of TCR clone 352457 (TRBV20-1, TRBJ1-4)
CSAPGQGLLTNEKLFF

SEQ ID NO: 704915 - protein, 14 aa, Homo sapiens
  CDR3 for alpha chain variable domain of TCR clone 352458 (TRAV26-1, TRAJ44)
CIVSNTGTASKLTF

SEQ ID NO: 704916 - protein, 10 aa, Homo sapiens
  CDR3 for beta chain variable domain of TCR clone 352458 (TRBV19, TRBJ2-7)
CSSILGEQYF

SEQ ID NO: 704917 - protein, 14 aa, Homo sapiens
  CDR3 for alpha chain variable domain of TCR clone 352459 (TRAV1-1, TRAJ27)
CAVIYNTNAGKSTF

SEQ ID NO: 704918 - protein, 14 aa, Homo sapiens
  CDR3 for beta chain variable domain of TCR clone 352459 (TRBV2, TRBJ2-1)
CASRTGSSYNEQFF

SEQ ID NO: 704919 - protein, 18 aa, Homo sapiens
  CDR3 for alpha chain variable domain of TCR clone 352460 (TRAV12-3, TRAJ52)
CAMSVGGAGGTSYGKLTL

SEQ ID NO: 704920 - protein, 15 aa, Homo sapiens
  CDR3 for beta chain variable domain of TCR clone 352460 (TRBV27, TRBJ1-6)
CASSFDRGLGSPLHL

SEQ ID NO: 704921 - protein, 13 aa, Homo sapiens
  CDR3 for alpha chain variable domain of TCR clone 352461 (TRAV30, TRAJ24)
CGTVTDSWGKLQF

SEQ ID NO: 704922 - protein, 14 aa, Homo sapiens
  CDR3 for beta chain variable domain of TCR clone 352461 (TRBV11-2, TRBJ2-5)
GASSRTGGIETQYF

SEQ ID NO: 704923 - protein, 12 aa, Homo sapiens
  CDR3 for alpha chain variable domain of TCR clone 352462 (TRAV12-3, TRAJ40)
CAMSSGTYTYIF

SEQ ID NO: 704924 - protein, 20 aa, Homo sapiens
  CDR3 for beta chain variable domain of TCR clone 352462 (TRBV7-8, TRBJ2-2)
CASSHLFPGPTIHITGELFF

SEQ ID NO: 704925 - protein, 15 aa, Homo sapiens
  CDR3 for alpha chain variable domain of TCR clone 352463 (TRAV26-1, TRAJ21)
CIVRVPNYNFNKFYF

SEQ ID NO: 704926 - protein, 16 aa, Homo sapiens
  CDR3 for beta chain variable domain of TCR clone 352463 (TRBV7-9, TRBJ2-3)
CASSLQGNPGTDTQYI

SEQ ID NO: 704927 - protein, 13 aa, Homo sapiens
  CDR3 for alpha chain variable domain of TCR clone 352464 (TRAV12-1, TRAJ33)
CGDAPYSNYQLIW

SEQ ID NO: 704928 - protein, 15 aa, Homo sapiens
  CDR3 for beta chain variable domain of TCR clone 352464 (TRBV27, TRBJ2-1)
CASSNGGGSSNEQFF

SEQ ID NO: 704929 - protein, 13 aa, Homo sapiens
  CDR3 for alpha chain variable domain of TCR clone 352465 (TRAV3, TRAJ36)
CAVRDTGANNLFF

SEQ ID NO: 704930 - protein, 14 aa, Homo sapiens
  CDR3 for beta chain variable domain of TCR clone 352465 (TRBV12-4, TRBJ1-2)
CASSFVGTAYGYTF

SEQ ID NO: 704931 - protein, 16 aa, Homo sapiens
  CDR3 for alpha chain variable domain of TCR clone 352466 (TRAV27, TRAJ13)
CAGAKSDSGGYQKVTF

SEQ ID NO: 704932 - protein, 14 aa, Homo sapiens
  CDR3 for beta chain variable domain of TCR clone 352466 (TRBV20-1, TRBJ2-1)
CSAQIGGSANEQFF

SEQ ID NO: 704933 - protein, 13 aa, Homo sapiens
  CDR3 for alpha chain variable domain of TCR clone 352467 (TRAV29/DV5, TRAJ54)
CAAHLQGAQKLLF

SEQ ID NO: 704934 - protein, 16 aa, Homo sapiens
  CDR3 for beta chain variable domain of TCR clone 352467 (TRBV7-2, TRBJ2-7)
CASSFPLAGGPLEQYF

SEQ ID NO: 704935 - protein, 16 aa, Homo sapiens
  CDR3 for alpha chain variable domain of TCR clone 352468 (TRAV12-2, TRAJ28)
CAVITDYGAGSYQLTF

SEQ ID NO: 704936 - protein, 14 aa, Homo sapiens
  CDR3 for beta chain variable domain of TCR clone 352468 (TRBV25-1, TRBJ1-1)
CASTHLGGNTEAFF

SEQ ID NO: 704937 - protein, 14 aa, Homo sapiens
  CDR3 for alpha chain variable domain of TCR clone 352469 (TRAV12-1, TRAJ30)
CVVNIGGRDYKIIF

SEQ ID NO: 704938 - protein, 15 aa, Homo sapiens
  CDR3 for beta chain variable domain of TCR clone 352469 (TRBV18, TRBJ1-2)
CASSPSNTPNYGYTF

SEQ ID NO: 704939 - protein, 16 aa, Homo sapiens
  CDR3 for alpha chain variable domain of TCR clone 352470 (TRAV3, TRAJ37)
CAVRGKGSGNTGKLIF

SEQ ID NO: 704940 - protein, 12 aa, Homo sapiens
  CDR3 for beta chain variable domain of TCR clone 352470 (TRBV11-2, TRBJ2-2)
CASSLGGGDLFF

SEQ ID NO: 704941 - protein, 13 aa, Homo sapiens
  CDR3 for alpha chain variable domain of TCR clone 352471 (TRAV13-2, TRAJ16)
CADARTDGQKLLF

SEQ ID NO: 704942 - protein, 17 aa, Homo sapiens
  CDR3 for beta chain variable domain of TCR clone 352471 (TRBV28, TRBJ2-3)
CASSPTPAGGRVDTQYF

SEQ ID NO: 704943 - protein, 13 aa, Homo sapiens
  CDR3 for alpha chain variable domain of TCR clone 352472 (TRAV21, TRAJ57)
CAVTQGGSEKLVF

SEQ ID NO: 704944 - protein, 17 aa, Homo sapiens
  CDR3 for beta chain variable domain of TCR clone 352472 (TRBV20-1, TRBJ2-3)
CSAVSRTSGVSTDTQYF

SEQ ID NO: 704945 - protein, 14 aa, Homo sapiens
  CDR3 for alpha chain variable domain of TCR clone 352473 (TRAV12-1, TRAJ23)
CVVNIPNQGGKLIF

SEQ ID NO: 704946 - protein, 15 aa, Homo sapiens
  CDR3 for beta chain variable domain of TCR clone 352473 (TRBV2, TRBJ2-3)
CASSDFEKATDTQYF

SEQ ID NO: 704947 - protein, 13 aa, Homo sapiens
  CDR3 for alpha chain variable domain of TCR clone 352474 (TRAV38-1, TRAJ42)
CARWGGSQGNHIF

SEQ ID NO: 704948 - protein, 14 aa, Homo sapiens
  CDR3 for beta chain variable domain of TCR clone 352474 (TRBV12-4, TRBJ2-1)
CASSLGQGASEQFF

SEQ ID NO: 704949 - protein, 12 aa, Homo sapiens
  CDR3 for alpha chain variable domain of TCR clone 352475 (TRAV12-3, TRAJ17)
CATTLTGNKLTF

SEQ ID NO: 704950 - protein, 17 aa, Homo sapiens
  CDR3 for beta chain variable domain of TCR clone 352475 (TRBV11-2, TRBJ2-1)
CASSLYPPGVEYNEQFF

SEQ ID NO: 704951 - protein, 15 aa, Homo sapiens
  CDR3 for alpha chain variable domain of TCR clone 352476 (TRAV13-1, TRAJ3)
CAASKLASSASKIIF

SEQ ID NO: 704952 - protein, 16 aa, Homo sapiens
  CDR3 for beta chain variable domain of TCR clone 352476 (TRBV25-1, TRBJ1-5)
CASGAPTLNSNQPQHF

SEQ ID NO: 704953 - protein, 16 aa, Homo sapiens
  CDR3 for alpha chain variable domain of TCR clone 352477 (TRAV30, TRAJ24)
CGTEIVDVDSWGKFQF

SEQ ID NO: 704954 - protein, 18 aa, Homo sapiens
  CDR3 for beta chain variable domain of TCR clone 352477 (TRBV20-1, TRBJ2-6)
CSAETTPTHGSGANDLTF

SEQ ID NO: 704955 - protein, 14 aa, Homo sapiens
  CDR3 for alpha chain variable domain of TCR clone 352478 (TRAV12-3, TRAJ13)
CAMRNSGGYQKVTF

SEQ ID NO: 704956 - protein, 14 aa, Homo sapiens
  CDR3 for beta chain variable domain of TCR clone 352478 (TRBV4-1, TRBJ1-6)
CASSPGSDSSPIHF

SEQ ID NO: 704957 - protein, 12 aa, Homo sapiens
  CDR3 for alpha chain variable domain of TCR clone 352479 (TRAV23/DV6, TRAJ18)
CAASMNHRSSTL

SEQ ID NO: 704958 - protein, 15 aa, Homo sapiens
  CDR3 for beta chain variable domain of TCR clone 352479 (TRBV27, TRBJ2-7)
CASSPDQGRLYEQYF

SEQ ID NO: 704959 - protein, 15 aa, Homo sapiens
  CDR3 for alpha chain variable domain of TCR clone 352480 (TRAV8-4, TRAJ11)
CAVSRALSGYSTLTF

SEQ ID NO: 704960 - protein, 13 aa, Homo sapiens
  CDR3 for beta chain variable domain of TCR clone 352480 (TRBV10-3, TRBJ2-7)
CASKLTVNYEQYF

SEQ ID NO: 704961 - protein, 15 aa, Homo sapiens
  CDR3 for alpha chain variable domain of TCR clone 352481 (TRAV21, TRAJ52)
CAVRGGGTSYGKLTF

SEQ ID NO: 704962 - protein, 13 aa, Homo sapiens
  CDR3 for beta chain variable domain of TCR clone 352481 (TRBV5-5, TRBJ2-2)
CASTLGGAGELFF

SEQ ID NO: 704963 - protein, 18 aa, Homo sapiens
  CDR3 for alpha chain variable domain of TCR clone 352482 (TRAV13-1, TRAJ52)
CAASKRSAGGTSYGKLAF

SEQ ID NO: 704964 - protein, 13 aa, Homo sapiens
  CDR3 for beta chain variable domain of TCR clone 352482 (TRBV12-4, TRBJ1-2)
CASSLRQGKGDTF

SEQ ID NO: 704965 - protein, 14 aa, Homo sapiens
  CDR3 for alpha chain variable domain of TCR clone 352483 (TRAV12-2, TRAJ13)
CAVKKTGGYQKVTF

SEQ ID NO: 704966 - protein, 15 aa, Homo sapiens
  CDR3 for beta chain variable domain of TCR clone 352483 (TRBV28, TRBJ2-1)
CASSSPGKAARWQFF

SEQ ID NO: 704967 - protein, 14 aa, Homo sapiens
  CDR3 for alpha chain variable domain of TCR clone 352484 (TRAV12-1, TRAJ23)
CVVMIYNQGGKLIF

SEQ ID NO: 704968 - protein, 23 aa, Homo sapiens
  CDR3 for beta chain variable domain of TCR clone 352484 (TRBV7-3, TRBJ1-6)
CASSLTSRDEASDPSSYNSPLHV

SEQ ID NO: 704969 - protein, 12 aa, Homo sapiens
  CDR3 for alpha chain variable domain of TCR clone 352485 (TRAV12-3, TRAJ43)
CAISSNNNDMRF

SEQ ID NO: 704970 - protein, 15 aa, Homo sapiens
  CDR3 for beta chain variable domain of TCR clone 352485 (TRBV27, TRBJ1-4)
CASSPRHATKEKLFF

SEQ ID NO: 704971 - protein, 14 aa, Homo sapiens
  CDR3 for alpha chain variable domain of TCR clone 352486 (TRAV17, TRAJ32)
CATDPGGATNKLIF

SEQ ID NO: 704972 - protein, 13 aa, Homo sapiens
  CDR3 for beta chain variable domain of TCR clone 352486 (TRBV7-6, TRBJ2-3)
CASSLRSDNTQYF

SEQ ID NO: 704973 - protein, 17 aa, Homo sapiens
  CDR3 for alpha chain variable domain of TCR clone 352487 (TRAV27, TRAJ23)
ASTSVRFHYNQGGKLIF

SEQ ID NO: 704974 - protein, 16 aa, Homo sapiens
  CDR3 for beta chain variable domain of TCR clone 352487 (TRBV4-1, TRBJ2-4)
CASSLLRGTAKNIQYF

SEQ ID NO: 704975 - protein, 16 aa, Homo sapiens
  CDR3 for alpha chain variable domain of TCR clone 352488 (TRAV12-3, TRAJ53)
CAMSVGSGGSNYKLTF

SEQ ID NO: 704976 - protein, 13 aa, Homo sapiens
  CDR3 for beta chain variable domain of TCR clone 352488 (TRBV7-6, TRBJ1-2)
CVSSLVADYGYTF

SEQ ID NO: 704977 - protein, 11 aa, Homo sapiens
  CDR3 for alpha chain variable domain of TCR clone 352489 (TRAV17, TRAJ9)
CGFTGGFKTIF

SEQ ID NO: 704978 - protein, 16 aa, Homo sapiens
  CDR3 for beta chain variable domain of TCR clone 352489 (TRBV28, TRBJ2-2)
CASSLEGGSNTGELFF

SEQ ID NO: 704979 - protein, 13 aa, Homo sapiens
  CDR3 for alpha chain variable domain of TCR clone 352490 (TRAV20, TRAJ34)
CVVSSYNTDKLIF

SEQ ID NO: 704980 - protein, 13 aa, Homo sapiens
  CDR3 for beta chain variable domain of TCR clone 352490 (TRBV7-9, TRBJ1-2)
CASSLKQNYGYTF

SEQ ID NO: 704981 - protein, 14 aa, Homo sapiens
  CDR3 for alpha chain variable domain of TCR clone 352491 (TRAV12-3, TRAJ13)
CAMRNSGGYQKVTF

SEQ ID NO: 704982 - protein, 14 aa, Homo sapiens
  CDR3 for beta chain variable domain of TCR clone 352491 (TRBV4-1, TRBJ1-6)
CASSPGSDSSPLRF

SEQ ID NO: 704983 - protein, 13 aa, Homo sapiens
  CDR3 for alpha chain variable domain of TCR clone 352492 (TRAV20, TRAJ21)
CAVEGYNFNKFYF

SEQ ID NO: 704984 - protein, 17 aa, Homo sapiens
  CDR3 for beta chain variable domain of TCR clone 352492 (TRBV7-2, TRBJ2-4)
CASSVQGLVQAKNIQYF

SEQ ID NO: 704985 - protein, 14 aa, Homo sapiens
  CDR3 for alpha chain variable domain of TCR clone 352493 (TRAV26-2, TRAJ32)
CILFRGGATNKLIF

SEQ ID NO: 704986 - protein, 17 aa, Homo sapiens
  CDR3 for beta chain variable domain of TCR clone 352493 (TRBV15, TRBJ1-2)
CATSGREIDVVNYGYTF

SEQ ID NO: 704987 - protein, 18 aa, Homo sapiens
  CDR3 for alpha chain variable domain of TCR clone 352494 (TRAV21, TRAJ52)
CAVRPSPAGGTSYGKLTF

SEQ ID NO: 704988 - protein, 16 aa, Homo sapiens
  CDR3 for beta chain variable domain of TCR clone 352494 (TRBV5-1, TRBJ2-1)
GASSLTLAGGRNEQFF

SEQ ID NO: 704989 - protein, 13 aa, Homo sapiens
  CDR3 for alpha chain variable domain of TCR clone 352495 (TRAV20, TRAJ34)
CAVSSYNTDKLIF

SEQ ID NO: 704990 - protein, 15 aa, Homo sapiens
  CDR3 for beta chain variable domain of TCR clone 352495 (TRBV20-1, TRBJ1-2)
SSAAGEGARIYGYTF

SEQ ID NO: 704991 - protein, 11 aa, Homo sapiens
  CDR3 for alpha chain variable domain of TCR clone 352496 (TRAV2, TRAJ13)
CASGGYQKVTF

SEQ ID NO: 704992 - protein, 18 aa, Homo sapiens
  CDR3 for beta chain variable domain of TCR clone 352496 (TRBV4-3, TRBJ2-3)
CASSQSPPAGSSTDTQYF

SEQ ID NO: 704993 - protein, 15 aa, Homo sapiens
  CDR3 for alpha chain variable domain of TCR clone 352497 (TRAV21, TRAJ24)
CAARSSTDSWGKLQF

SEQ ID NO: 704994 - protein, 15 aa, Homo sapiens
  CDR3 for beta chain variable domain of TCR clone 352497 (TRBV20-1, TRBJ1-1)
CSASRGVTGNTEAFC

SEQ ID NO: 704995 - protein, 16 aa, Homo sapiens
  CDR3 for alpha chain variable domain of TCR clone 352498 (TRAV3, TRAJ37)
CSVRGKGSGNTGKLIF

SEQ ID NO: 704996 - protein, 15 aa, Homo sapiens
  CDR3 for beta chain variable domain of TCR clone 352498 (TRBV7-3, TRBJ2-2)
CASSETGQGTGELFF

SEQ ID NO: 704997 - protein, 16 aa, Homo sapiens
  CDR3 for alpha chain variable domain of TCR clone 352499 (TRAV30, TRAJ24)
RGTEIVDADSWGKFQF

SEQ ID NO: 704998 - protein, 14 aa, Homo sapiens
  CDR3 for beta chain variable domain of TCR clone 352499 (TRBV12-5, TRBJ2-5)
CACGSRTHQETQYF

SEQ ID NO: 704999 - protein, 19 aa, Homo sapiens
  CDR3 for alpha chain variable domain of TCR clone 352500 (TRAV38-1, TRAJ37)
CDVFLCFHLWLCNTGKLIF

SEQ ID NO: 705000 - protein, 12 aa, Homo sapiens
  CDR3 for beta chain variable domain of TCR clone 352500 (TRBV7-9, TRBJ2-7)
CASSLEGYEQYF

SEQ ID NO: 705001 - protein, 14 aa, Homo sapiens
  CDR3 for alpha chain variable domain of TCR clone 352501 (TRAV17, TRAJ22)
CATSPSGSARQLTF

SEQ ID NO: 705002 - protein, 13 aa, Homo sapiens
  CDR3 for beta chain variable domain of TCR clone 352501 (TRBV4-1, TRBJ2-7)
CASSQGQAYEQYF

SEQ ID NO: 705003 - protein, 17 aa, Homo sapiens
  CDR3 for alpha chain variable domain of TCR clone 352502 (TRAV3, TRAJ12)
CAVRDGGRIDSSYKLIF

SEQ ID NO: 705004 - protein, 14 aa, Homo sapiens
  CDR3 for beta chain variable domain of TCR clone 352502 (TRBV7-9, TRBJ1-2)
CASSRQGANYGYTF

SEQ ID NO: 705005 - protein, 20 aa, Homo sapiens
  CDR3 for alpha chain variable domain of TCR clone 352503 (TRAV8-3, TRAJ44)
LSTSVLWVRLYTGTASKLTF

SEQ ID NO: 705006 - protein, 16 aa, Homo sapiens
  CDR3 for beta chain variable domain of TCR clone 352503 (TRBV6-4, TRBJ1-2)
CASSEAVGDPNYGYTC

SEQ ID NO: 705007 - protein, 14 aa, Homo sapiens
  CDR3 for alpha chain variable domain of TCR clone 352504 (TRAV1-2, TRAJ8)
CAVREDTGFQKLVF

SEQ ID NO: 705008 - protein, 18 aa, Homo sapiens
  CDR3 for beta chain variable domain of TCR clone 352504 (TRBV27, TRBJ2-1)
CASGNRAVGVGSKNEQFF

SEQ ID NO: 705009 - protein, 17 aa, Homo sapiens
  CDR3 for alpha chain variable domain of TCR clone 352505 (TRAV3, TRAJ6)
CAVRDGPRAGGSYIPPF

SEQ ID NO: 705010 - protein, 14 aa, Homo sapiens
  CDR3 for beta chain variable domain of TCR clone 352505 (TRBV6-1, TRBJ1-3)
CASVQGGGGNTIYF

SEQ ID NO: 705011 - protein, 15 aa, Homo sapiens
  CDR3 for alpha chain variable domain of TCR clone 352506 (TRAV8-6, TRAJ28)
CAVRPLRAGSYQLTF

SEQ ID NO: 705012 - protein, 16 aa, Homo sapiens
  CDR3 for beta chain variable domain of TCR clone 352506 (TRBV12-4, TRBJ2-5)
CASSFFVRGRQKTQYF

SEQ ID NO: 705013 - protein, 16 aa, Homo sapiens
  CDR3 for alpha chain variable domain of TCR clone 352507 (TRAV12-2, TRAJ18)
CAVTTDRGSTLGSLYF

SEQ ID NO: 705014 - protein, 13 aa, Homo sapiens
  CDR3 for beta chain variable domain of TCR clone 352507 (TRBV19, TRBJ2-3)
CATWDKITDTQYF

SEQ ID NO: 705015 - protein, 12 aa, Homo sapiens
  CDR3 for alpha chain variable domain of TCR clone 352508 (TRAV12-1, TRAJ40)
SVVYSGTYKYIF

SEQ ID NO: 705016 - protein, 18 aa, Homo sapiens
  CDR3 for beta chain variable domain of TCR clone 352508 (TRBV11-2, TRBJ2-3)
WASSLGGASRGAPNTQYF

SEQ ID NO: 705017 - protein, 15 aa, Homo sapiens
  CDR3 for alpha chain variable domain of TCR clone 352509 (TRAV20, TRAJ4)
CAVEGSSGGYNKLFF

SEQ ID NO: 705018 - protein, 14 aa, Homo sapiens
  CDR3 for beta chain variable domain of TCR clone 352509 (TRBV7-8, TRBJ2-7)
CASTLGGALGEQYF

SEQ ID NO: 705019 - protein, 13 aa, Homo sapiens
  CDR3 for alpha chain variable domain of TCR clone 352510 (TRAV2, TRAJ15)
CAVASQAGTALIF

SEQ ID NO: 705020 - protein, 14 aa, Homo sapiens
  CDR3 for beta chain variable domain of TCR clone 352510 (TRBV5-1, TRBJ2-7)
CPSSRGESLYEQYF

SEQ ID NO: 705021 - protein, 15 aa, Homo sapiens
  CDR3 for alpha chain variable domain of TCR clone 352511 (TRAV1-2, TRAJ28)
CAVQYSGAGSYQLTF

SEQ ID NO: 705022 - protein, 13 aa, Homo sapiens
  CDR3 for beta chain variable domain of TCR clone 352511 (TRBV20-1, TRBJ2-7)
CSATHTSGYEQYI

SEQ ID NO: 705023 - protein, 13 aa, Homo sapiens
  CDR3 for alpha chain variable domain of TCR clone 352512 (TRAV8-6, TRAJ16)
CAVSSPDGQKLLF

SEQ ID NO: 705024 - protein, 13 aa, Homo sapiens
  CDR3 for beta chain variable domain of TCR clone 352512 (TRBV20-1, TRBJ1-1)
CSAPLGGGTEAFF

SEQ ID NO: 705025 - protein, 12 aa, Homo sapiens
  CDR3 for alpha chain variable domain of TCR clone 352513 (TRAV1-1, TRAJ30)
CAVRGRDDKIIF

SEQ ID NO: 705026 - protein, 15 aa, Homo sapiens
  CDR3 for beta chain variable domain of TCR clone 352513 (TRBV2, TRBJ2-4)
CASSGTNLAKNIQYF

SEQ ID NO: 705027 - protein, 12 aa, Homo sapiens
  CDR3 for alpha chain variable domain of TCR clone 352514 (TRAV8-2, TRAJ5)
WVVSDIGRALTF

SEQ ID NO: 705028 - protein, 14 aa, Homo sapiens
  CDR3 for beta chain variable domain of TCR clone 352514 (TRBV19, TRBJ2-7)
CASNFRDTFTGMYF

SEQ ID NO: 705029 - protein, 14 aa, Homo sapiens
  CDR3 for alpha chain variable domain of TCR clone 352515 (TRAV8-4, TRAJ49)
CAVKRGLPVTSSIL

SEQ ID NO: 705030 - protein, 14 aa, Homo sapiens
  CDR3 for beta chain variable domain of TCR clone 352515 (TRBV11-2, TRBJ2-3)
CASSRLARTDTQYF

SEQ ID NO: 705031 - protein, 12 aa, Homo sapiens
  CDR3 for alpha chain variable domain of TCR clone 352516 (TRAV13-1, TRAJ49)
CAASNTGNQFYF

SEQ ID NO: 705032 - protein, 14 aa, Homo sapiens
  CDR3 for beta chain variable domain of TCR clone 352516 (TRBV4-1, TRBJ1-1)
CASSRSGQSFEAFF

SEQ ID NO: 705033 - protein, 13 aa, Homo sapiens
  CDR3 for alpha chain variable domain of TCR clone 352517 (TRAV21, TRAJ57)
CAVTQGGSEKLVF

SEQ ID NO: 705034 - protein, 11 aa, Homo sapiens
  CDR3 for beta chain variable domain of TCR clone 352517 (TRBV11-2, TRBJ2-2)
CASSLPGELFL

SEQ ID NO: 705035 - protein, 13 aa, Homo sapiens
  CDR3 for alpha chain variable domain of TCR clone 352518 (TRAV17, TRAJ5)
CATMDTGRRALTF

SEQ ID NO: 705036 - protein, 15 aa, Homo sapiens
  CDR3 for beta chain variable domain of TCR clone 352518 (TRBV6-6, TRBJ2-5)
CASSPGGGLEETQYF

SEQ ID NO: 705037 - protein, 14 aa, Homo sapiens
  CDR3 for alpha chain variable domain of TCR clone 352519 (TRAV1-2, TRAJ16)
CAVNRFSDGQKLLF

SEQ ID NO: 705038 - protein, 12 aa, Homo sapiens
  CDR3 for beta chain variable domain of TCR clone 352519 (TRBV20-1, TRBJ1-5)
CSAAVWDQPQHF

SEQ ID NO: 705039 - protein, 14 aa, Homo sapiens
  CDR3 for alpha chain variable domain of TCR clone 352520 (TRAV27, TRAJ45)
CAGAQEEVLTDSPF

SEQ ID NO: 705040 - protein, 14 aa, Homo sapiens
  CDR3 for beta chain variable domain of TCR clone 352520 (TRBV7-2, TRBJ2-7)
CASSPKTSFYEQYF

SEQ ID NO: 705041 - protein, 19 aa, Homo sapiens
  CDR3 for alpha chain variable domain of TCR clone 352521 (TRAV1-2, TRAJ26)
CLLPLCCERPDNYGQNFVF

SEQ ID NO: 705042 - protein, 17 aa, Homo sapiens
  CDR3 for beta chain variable domain of TCR clone 352521 (TRBV9, TRBJ1-6)
CASSVAGTGDHPSTLGT

SEQ ID NO: 705043 - protein, 14 aa, Homo sapiens
  CDR3 for alpha chain variable domain of TCR clone 352522 (TRAV12-1, TRAJ30)
CVVNIGGRDDKLIF

SEQ ID NO: 705044 - protein, 13 aa, Homo sapiens
  CDR3 for beta chain variable domain of TCR clone 352522 (TRBV12-5, TRBJ2-1)
CASGLGRGNEQFF

SEQ ID NO: 705045 - protein, 11 aa, Homo sapiens
  CDR3 for alpha chain variable domain of TCR clone 352523 (TRAV13-1, TRAJ23)
CAASSRGKLIF

SEQ ID NO: 705046 - protein, 12 aa, Homo sapiens
  CDR3 for beta chain variable domain of TCR clone 352523 (TRBV7-3, TRBJ2-5)
CQQLPGEETQYF

SEQ ID NO: 705047 - protein, 14 aa, Homo sapiens
  CDR3 for alpha chain variable domain of TCR clone 352524 (TRAV1-2, TRAJ16)
CAVNRFSDGQKLLF

SEQ ID NO: 705048 - protein, 12 aa, Homo sapiens
  CDR3 for beta chain variable domain of TCR clone 352524 (TRBV28, TRBJ2-6)
CAIQAGANVMTF

SEQ ID NO: 705049 - protein, 15 aa, Homo sapiens
  CDR3 for alpha chain variable domain of TCR clone 352525 (TRAV17, TRAJ57)
CSTGPSQGGSEKLVF

SEQ ID NO: 705050 - protein, 17 aa, Homo sapiens
  CDR3 for beta chain variable domain of TCR clone 352525 (TRBV20-1, TRBJ2-1)
CSASSSGLAGSYNEQFF

SEQ ID NO: 705051 - protein, 15 aa, Homo sapiens
  CDR3 for alpha chain variable domain of TCR clone 352526 (TRAV27, TRAJ38)
CAGRFNAGNNRKLIW

SEQ ID NO: 705052 - protein, 15 aa, Homo sapiens
  CDR3 for beta chain variable domain of TCR clone 352526 (TRBV19, TRBJ2-3)
CASSMSTTSTDTQYF

SEQ ID NO: 705053 - protein, 12 aa, Homo sapiens
  CDR3 for alpha chain variable domain of TCR clone 352527 (TRAV13-1, TRAJ21)
CAAKEGFNKFYF

SEQ ID NO: 705054 - protein, 17 aa, Homo sapiens
  CDR3 for beta chain variable domain of TCR clone 352527 (TRBV5-1, TRBJ2-1)
CASSMGLAGEGYNERFF

SEQ ID NO: 705055 - protein, 13 aa, Homo sapiens
  CDR3 for alpha chain variable domain of TCR clone 352528 (TRAV21, TRAJ20)
CAVGLRVDYKLSF

SEQ ID NO: 705056 - protein, 13 aa, Homo sapiens
  CDR3 for beta chain variable domain of TCR clone 352528 (TRBV11-2, TRBJ2-5)
CASSFSSQETQYF

SEQ ID NO: 705057 - protein, 11 aa, Homo sapiens
  CDR3 for alpha chain variable domain of TCR clone 352529 (TRAV12-1, TRAJ47)
CVVNDGNKLGF

SEQ ID NO: 705058 - protein, 16 aa, Homo sapiens
  CDR3 for beta chain variable domain of TCR clone 352529 (TRBV4-2, TRBJ2-3)
CASSQELAGDTDTQYF

SEQ ID NO: 705059 - protein, 12 aa, Homo sapiens
  CDR3 for alpha chain variable domain of TCR clone 352530 (TRAV21, TRAJ11)
CAATSGYSTLTF

SEQ ID NO: 705060 - protein, 14 aa, Homo sapiens
  CDR3 for beta chain variable domain of TCR clone 352530 (TRBV20-1, TRBJ2-7)
CSAPELAGVREQYF

SEQ ID NO: 705061 - protein, 15 aa, Homo sapiens
  CDR3 for alpha chain variable domain of TCR clone 352531 (TRAV12-1, TRAJ52)
CVGNAGGTSYGKLTF

SEQ ID NO: 705062 - protein, 16 aa, Homo sapiens
  CDR3 for beta chain variable domain of TCR clone 352531 (TRBV12-4, TRBJ1-5)
CASSRPVGGSNQPQHF

SEQ ID NO: 705063 - protein, 14 aa, Homo sapiens
  CDR3 for alpha chain variable domain of TCR clone 352532 (TRAV12-1, TRAJ12)
CVVMRMDSSYKLIF

SEQ ID NO: 705064 - protein, 14 aa, Homo sapiens
  CDR3 for beta chain variable domain of TCR clone 352532 (TRBV4-1, TRBJ2-7)
CASSPVAGGDEQYF

SEQ ID NO: 705065 - protein, 13 aa, Homo sapiens
  CDR3 for alpha chain variable domain of TCR clone 352533 (TRAV2, TRAJ23)
CAVMGNEGGKLIF

SEQ ID NO: 705066 - protein, 14 aa, Homo sapiens
  CDR3 for beta chain variable domain of TCR clone 352533 (TRBV11-2, TRBJ2-1)
CASSRATSYNEQFF

SEQ ID NO: 705067 - protein, 15 aa, Homo sapiens
  CDR3 for alpha chain variable domain of TCR clone 352534 (TRAV8-3, TRAJ7)
CAVGSISYGNNRLAC

SEQ ID NO: 705068 - protein, 15 aa, Homo sapiens
  CDR3 for beta chain variable domain of TCR clone 352534 (TRBV4-2, TRBJ1-1)
CASSQEDLPRTEAFF

SEQ ID NO: 705069 - protein, 14 aa, Homo sapiens
  CDR3 for alpha chain variable domain of TCR clone 352535 (TRAV26-1, TRAJ15)
CIVSANQAGTALIF

SEQ ID NO: 705070 - protein, 16 aa, Homo sapiens
  CDR3 for beta chain variable domain of TCR clone 352535 (TRBV20-1, TRBJ1-4)
CSAIGGPRGANEKLFF

SEQ ID NO: 705071 - protein, 13 aa, Homo sapiens
  CDR3 for alpha chain variable domain of TCR clone 352536 (TRAV27, TRAJ41)
CAGEGNYGYALNF

SEQ ID NO: 705072 - protein, 13 aa, Homo sapiens
  CDR3 for beta chain variable domain of TCR clone 352536 (TRBV27, TRBJ2-7)
CASSFVSSYEQYF

SEQ ID NO: 705073 - protein, 14 aa, Homo sapiens
  CDR3 for alpha chain variable domain of TCR clone 352537 (TRAV12-1, TRAJ54)
YVVNIYQGAQKLVF

SEQ ID NO: 705074 - protein, 16 aa, Homo sapiens
  CDR3 for beta chain variable domain of TCR clone 352537 (TRBV7-2, TRBJ2-3)
CASSLVALYSTYTQYF

SEQ ID NO: 705075 - protein, 14 aa, Homo sapiens
  CDR3 for alpha chain variable domain of TCR clone 352538 (TRAV12-2, TRAJ13)
CAVKKTGSYQKVTF

SEQ ID NO: 705076 - protein, 13 aa, Homo sapiens
  CDR3 for beta chain variable domain of TCR clone 352538 (TRBV20-1, TRBJ1-1)
CSARLGQGTEAFF

SEQ ID NO: 705077 - protein, 16 aa, Homo sapiens
  CDR3 for alpha chain variable domain of TCR clone 352539 (TRAV3, TRAJ37)
CAVRGKGSGNTGKLVF

SEQ ID NO: 705078 - protein, 16 aa, Homo sapiens
  CDR3 for beta chain variable domain of TCR clone 352539 (TRBV12-4, TRBJ1-4)
CASSLKGIGHGEKLFF

SEQ ID NO: 705079 - protein, 14 aa, Homo sapiens
  CDR3 for alpha chain variable domain of TCR clone 352540 (TRAV12-1, TRAJ17)
CVVNYKAAGNKLTF

SEQ ID NO: 705080 - protein, 13 aa, Homo sapiens
  CDR3 for beta chain variable domain of TCR clone 352540 (TRBV7-9, TRBJ1-2)
CASSLKQNYGYPF

SEQ ID NO: 705081 - protein, 14 aa, Homo sapiens
  CDR3 for alpha chain variable domain of TCR clone 352541 (TRAV27, TRAJ13)
CRSSNCGGYQKVTF

SEQ ID NO: 705082 - protein, 16 aa, Homo sapiens
  CDR3 for beta chain variable domain of TCR clone 352541 (TRBV7-6, TRBJ2-1)
CIAVPAAWGGADEQFF

SEQ ID NO: 705083 - protein, 14 aa, Homo sapiens
  CDR3 for alpha chain variable domain of TCR clone 352542 (TRAV12-3, TRAJ57)
CAMSAWGGSEKLVF

SEQ ID NO: 705084 - protein, 14 aa, Homo sapiens
  CDR3 for beta chain variable domain of TCR clone 352542 (TRBV7-8, TRBJ2-7)
CASSPRDRGYEQYF

SEQ ID NO: 705085 - protein, 17 aa, Homo sapiens
  CDR3 for alpha chain variable domain of TCR clone 352543 (TRAV17, TRAJ28)
CATDAVYSGAGSYQLTF

SEQ ID NO: 705086 - protein, 16 aa, Homo sapiens
  CDR3 for beta chain variable domain of TCR clone 352543 (TRBV6-1, TRBJ2-5)
RASSETLDSGAETQYF

SEQ ID NO: 705087 - protein, 10 aa, Homo sapiens
  CDR3 for alpha chain variable domain of TCR clone 352544 (TRAV13-1, TRAJ52)
CAASKRSLVV

SEQ ID NO: 705088 - protein, 13 aa, Homo sapiens
  CDR3 for beta chain variable domain of TCR clone 352544 (TRBV12-4, TRBJ1-2)
CASSLRQGKGYTF

SEQ ID NO: 705089 - protein, 11 aa, Homo sapiens
  CDR3 for alpha chain variable domain of TCR clone 352545 (TRAV35, TRAJ30)
CAPGGDDKIIF

SEQ ID NO: 705090 - protein, 22 aa, Homo sapiens
  CDR3 for beta chain variable domain of TCR clone 352545 (TRBV7-6, TRBJ2-1)
SGTRPCIAVPAAWGGGADEQFF

SEQ ID NO: 705091 - protein, 15 aa, Homo sapiens
  CDR3 for alpha chain variable domain of TCR clone 352546 (TRAV21, TRAJ24)
CAARSSTDSWGKLRF

SEQ ID NO: 705092 - protein, 15 aa, Homo sapiens
  CDR3 for beta chain variable domain of TCR clone 352546 (TRBV19, TRBJ1-1)
CASTSGQIQNTEAFF

SEQ ID NO: 705093 - protein, 16 aa, Homo sapiens
  CDR3 for alpha chain variable domain of TCR clone 352547 (TRAV13-2, TRAJ53)
CAENANSGGSNYKLTF

SEQ ID NO: 705094 - protein, 19 aa, Homo sapiens
  CDR3 for beta chain variable domain of TCR clone 352547 (TRBV28, TRBJ2-7)
CANSYSGTSRLGWVYEQYF

SEQ ID NO: 705095 - protein, 14 aa, Homo sapiens
  CDR3 for alpha chain variable domain of TCR clone 352548 (TRAV13-2, TRAJ6)
CAERGSGGSYIPTF

SEQ ID NO: 705096 - protein, 13 aa, Homo sapiens
  CDR3 for beta chain variable domain of TCR clone 352548 (TRBV19, TRBJ1-2)
FASSQGQVYGYTF

SEQ ID NO: 705097 - protein, 16 aa, Homo sapiens
  CDR3 for alpha chain variable domain of TCR clone 352549 (TRAV30, TRAJ24)
CGTEIVDADSWGKFEF

SEQ ID NO: 705098 - protein, 14 aa, Homo sapiens
  CDR3 for beta chain variable domain of TCR clone 352549 (TRBV12-5, TRBJ2-5)
WASGSRTHQETQYF

SEQ ID NO: 705099 - protein, 15 aa, Homo sapiens
  CDR3 for alpha chain variable domain of TCR clone 352550 (TRAV13-1, TRAJ44)
CAASRGCGTASKLTF

SEQ ID NO: 705100 - protein, 16 aa, Homo sapiens
  CDR3 for beta chain variable domain of TCR clone 352550 (TRBV28, TRBJ2-7)
CASSLFFETGGPEQYF

SEQ ID NO: 705101 - protein, 14 aa, Homo sapiens
  CDR3 for alpha chain variable domain of TCR clone 352551 (TRAV12-2, TRAJ48)
CAVNAFFGNEKLTF

SEQ ID NO: 705102 - protein, 14 aa, Homo sapiens
  CDR3 for beta chain variable domain of TCR clone 352551 (TRBV7-6, TRBJ2-3)
CASSLGTVTDTQYF

SEQ ID NO: 705103 - protein, 15 aa, Homo sapiens
  CDR3 for alpha chain variable domain of TCR clone 352552 (TRAV12-3, TRAJ6)
CAMSATTGGSYIPTF

SEQ ID NO: 705104 - protein, 14 aa, Homo sapiens
  CDR3 for beta chain variable domain of TCR clone 352552 (TRBV19, TRBJ2-2)
CASSGQGIAGELFF

SEQ ID NO: 705105 - protein, 15 aa, Homo sapiens
  CDR3 for alpha chain variable domain of TCR clone 352553 (TRAV3, TRAJ4)
CAVRDGTGDYNKLIF

SEQ ID NO: 705106 - protein, 13 aa, Homo sapiens
  CDR3 for beta chain variable domain of TCR clone 352553 (TRBV12-5, TRBJ1-2)
CASGVRTGNGYTF

SEQ ID NO: 705107 - protein, 14 aa, Homo sapiens
  CDR3 for alpha chain variable domain of TCR clone 352554 (TRAV23/DV6, TRAJ4)
CAANLPGGYNKLIF

SEQ ID NO: 705108 - protein, 17 aa, Homo sapiens
  CDR3 for beta chain variable domain of TCR clone 352554 (TRBV4-1, TRBJ1-3)
CASSPQRGIRFGNTIYF

SEQ ID NO: 705109 - protein, 13 aa, Homo sapiens
  CDR3 for alpha chain variable domain of TCR clone 352555 (TRAV38-1, TRAJ42)
CARWGGSQGNLIF

SEQ ID NO: 705110 - protein, 15 aa, Homo sapiens
  CDR3 for beta chain variable domain of TCR clone 352555 (TRBV9, TRBJ2-1)
CASSVGTGELNEQFF

SEQ ID NO: 705111 - protein, 14 aa, Homo sapiens
  CDR3 for alpha chain variable domain of TCR clone 352556 (TRAV21, TRAJ32)
CCGDYGGDTNKLIF

SEQ ID NO: 705112 - protein, 13 aa, Homo sapiens
  CDR3 for beta chain variable domain of TCR clone 352556 (TRBV2, TRBJ1-6)
CASGRGGISPLHF

SEQ ID NO: 705113 - protein, 14 aa, Homo sapiens
  CDR3 for alpha chain variable domain of TCR clone 352557 (TRAV2, TRAJ23)
CAVMEDNQGGKLIF

SEQ ID NO: 705114 - protein, 12 aa, Homo sapiens
  CDR3 for beta chain variable domain of TCR clone 352557 (TRBV19, TRBJ1-4)
CASKDWPGGLFF

SEQ ID NO: 705115 - protein, 10 aa, Homo sapiens
  CDR3 for alpha chain variable domain of TCR clone 352558 (TRAV9-2, TRAJ49)
CALTGNQFSF

SEQ ID NO: 705116 - protein, 16 aa, Homo sapiens
  CDR3 for beta chain variable domain of TCR clone 352558 (TRBV19, TRBJ2-3)
CASSPGAASRTDTQYF

SEQ ID NO: 705117 - protein, 13 aa, Homo sapiens
  CDR3 for alpha chain variable domain of TCR clone 352559 (TRAV23/DV6, TRAJ58)
CAASEIGGSSLTF

SEQ ID NO: 705118 - protein, 13 aa, Homo sapiens
  CDR3 for beta chain variable domain of TCR clone 352559 (TRBV3-1, TRBJ1-5)
CTSSQFGDQTQHF

SEQ ID NO: 705119 - protein, 14 aa, Homo sapiens
  CDR3 for alpha chain variable domain of TCR clone 352560 (TRAV17, TRAJ56)
CATEDTGANSKLTF

SEQ ID NO: 705120 - protein, 12 aa, Homo sapiens
  CDR3 for beta chain variable domain of TCR clone 352560 (TRBV7-8, TRBJ2-7)
CASSLGDREQYF

SEQ ID NO: 705121 - protein, 16 aa, Homo sapiens
  CDR3 for alpha chain variable domain of TCR clone 352561 (TRAV12-3, TRAJ45)
CAMGWGSGGGVDGLTF

SEQ ID NO: 705122 - protein, 15 aa, Homo sapiens
  CDR3 for beta chain variable domain of TCR clone 352561 (TRBV3-1, TRBJ1-2)
CASSHPGTPGYGYTF

SEQ ID NO: 705123 - protein, 14 aa, Homo sapiens
  CDR3 for alpha chain variable domain of TCR clone 352562 (TRAV1-2, TRAJ16)
CAVNRFSDGQKPLF

SEQ ID NO: 705124 - protein, 14 aa, Homo sapiens
  CDR3 for beta chain variable domain of TCR clone 352562 (TRBV7-2, TRBJ1-1)
CASSFLTGTTEAFF

SEQ ID NO: 705125 - protein, 17 aa, Homo sapiens
  CDR3 for alpha chain variable domain of TCR clone 352563 (TRAV26-1, TRAJ37)
CIVRGITVSSNTGKLIF

SEQ ID NO: 705126 - protein, 15 aa, Homo sapiens
  CDR3 for beta chain variable domain of TCR clone 352563 (TRBV10-1, TRBJ2-3)
CASSATSGGFDTQYF

SEQ ID NO: 705127 - protein, 17 aa, Homo sapiens
  CDR3 for alpha chain variable domain of TCR clone 352564 (TRAV13-1, TRAJ31)
CAPRDRLMFGAVTQLVV

SEQ ID NO: 705128 - protein, 12 aa, Homo sapiens
  CDR3 for beta chain variable domain of TCR clone 352564 (TRBV7-9, TRBJ2-7)
CASSLEGYEQYF

SEQ ID NO: 705129 - protein, 11 aa, Homo sapiens
  CDR3 for alpha chain variable domain of TCR clone 352565 (TRAV3, TRAJ17)
PRGAAGNKLTF

SEQ ID NO: 705130 - protein, 16 aa, Homo sapiens
  CDR3 for beta chain variable domain of TCR clone 352565 (TRBV7-6, TRBJ2-1)
CASSAPGPSSYNEQVF

SEQ ID NO: 705131 - protein, 14 aa, Homo sapiens
  CDR3 for alpha chain variable domain of TCR clone 352566 (TRAV16, TRAJ33)
CALSAMDSNYQLIW

SEQ ID NO: 705132 - protein, 13 aa, Homo sapiens
  CDR3 for beta chain variable domain of TCR clone 352566 (TRBV11-2, TRBJ2-5)
CASGHGAKETQYF

SEQ ID NO: 705133 - protein, 14 aa, Homo sapiens
  CDR3 for alpha chain variable domain of TCR clone 352567 (TRAV29/DV5, TRAJ36)
CAARRKTGANNLFF

SEQ ID NO: 705134 - protein, 10 aa, Homo sapiens
  CDR3 for beta chain variable domain of TCR clone 352567 (TRBV7-9, TRBJ1-1)
CASSFTEAFF

SEQ ID NO: 705135 - protein, 17 aa, Homo sapiens
  CDR3 for alpha chain variable domain of TCR clone 352568 (TRAV38-2/DV8, TRAJ28)
CAFLTLYSGAGSYQLTF

SEQ ID NO: 705136 - protein, 22 aa, Homo sapiens
  CDR3 for beta chain variable domain of TCR clone 352568 (TRBV7-2, TRBJ2-5)
RRTRPCISVPAACQGGGETQYF

SEQ ID NO: 705137 - protein, 16 aa, Homo sapiens
  CDR3 for alpha chain variable domain of TCR clone 352569 (TRAV3, TRAJ18)
CAVRDGRGSTLGRLYF

SEQ ID NO: 705138 - protein, 11 aa, Homo sapiens
  CDR3 for beta chain variable domain of TCR clone 352569 (TRBV7-9, TRBJ1-6)
CASSSPGTWKF

SEQ ID NO: 705139 - protein, 11 aa, Homo sapiens
  CDR3 for alpha chain variable domain of TCR clone 352570 (TRAV12-2, TRAJ43)
CAANNNNDMRF

SEQ ID NO: 705140 - protein, 14 aa, Homo sapiens
  CDR3 for beta chain variable domain of TCR clone 352570 (TRBV7-8, TRBJ1-2)
CASSAGTAIYGYTF

SEQ ID NO: 705141 - protein, 12 aa, Homo sapiens
  CDR3 for alpha chain variable domain of TCR clone 352571 (TRAV27, TRAJ11)
CAGASGYSNLTF

SEQ ID NO: 705142 - protein, 14 aa, Homo sapiens
  CDR3 for beta chain variable domain of TCR clone 352571 (TRBV12-5, TRBJ1-3)
CASGPAGSGNTIYF

SEQ ID NO: 705143 - protein, 13 aa, Homo sapiens
  CDR3 for alpha chain variable domain of TCR clone 352572 (TRAV9-2, TRAJ53)
CALSGGSNYKLTF

SEQ ID NO: 705144 - protein, 14 aa, Homo sapiens
  CDR3 for beta chain variable domain of TCR clone 352572 (TRBV20-1, TRBJ2-3)
CSARGGTSTDTQYF

SEQ ID NO: 705145 - protein, 15 aa, Homo sapiens
  CDR3 for alpha chain variable domain of TCR clone 352573 (TRAV13-1, TRAJ32)
CAASIYGGATNKLIF

SEQ ID NO: 705146 - protein, 15 aa, Homo sapiens
  CDR3 for beta chain variable domain of TCR clone 352573 (TRBV7-8, TRBJ2-1)
CASSSRLAAYNEQFF

SEQ ID NO: 705147 - protein, 18 aa, Homo sapiens
  CDR3 for alpha chain variable domain of TCR clone 352574 (TRAV26-2, TRAJ54)
CILRDVEVGIQGAQKLVF

SEQ ID NO: 705148 - protein, 13 aa, Homo sapiens
  CDR3 for beta chain variable domain of TCR clone 352574 (TRBV7-2, TRBJ1-5)
CASSLAEGGANEF

SEQ ID NO: 705149 - protein, 14 aa, Homo sapiens
  CDR3 for alpha chain variable domain of TCR clone 352575 (TRAV12-2, TRAJ13)
CAVKKTGGYQKVTF

SEQ ID NO: 705150 - protein, 15 aa, Homo sapiens
  CDR3 for beta chain variable domain of TCR clone 352575 (TRBV20-1, TRBJ2-7)
CSARDPVKGEGEQYF

SEQ ID NO: 705151 - protein, 12 aa, Homo sapiens
  CDR3 for alpha chain variable domain of TCR clone 352576 (TRAV36/DV7, TRAJ54)
CAVVRGAQKLVF

SEQ ID NO: 705152 - protein, 16 aa, Homo sapiens
  CDR3 for beta chain variable domain of TCR clone 352576 (TRBV20-1, TRBJ1-2)
CSASMGQGVANYGYTF

SEQ ID NO: 705153 - protein, 13 aa, Homo sapiens
  CDR3 for alpha chain variable domain of TCR clone 352577 (TRAV20, TRAJ35)
CAVQEGVGNVLHC

SEQ ID NO: 705154 - protein, 14 aa, Homo sapiens
  CDR3 for beta chain variable domain of TCR clone 352577 (TRBV5-1, TRBJ1-1)
CASSSATGGTEAFF

SEQ ID NO: 705155 - protein, 10 aa, Homo sapiens
  CDR3 for alpha chain variable domain of TCR clone 352578 (TRAV26-1, TRAJ22)
CIVSLNFFWF

SEQ ID NO: 705156 - protein, 20 aa, Homo sapiens
  CDR3 for beta chain variable domain of TCR clone 352578 (TRBV28, TRBJ2-1)
CASTPIGRSPGLAGGNEQFF

SEQ ID NO: 705157 - protein, 17 aa, Homo sapiens
  CDR3 for alpha chain variable domain of TCR clone 352579 (TRAV3, TRAJ42)
CAVRDRDYVGSQGNLIF

SEQ ID NO: 705158 - protein, 16 aa, Homo sapiens
  CDR3 for beta chain variable domain of TCR clone 352579 (TRBV7-3, TRBJ2-2)
CASSLKRGTLSGELFF

SEQ ID NO: 705159 - protein, 12 aa, Homo sapiens
  CDR3 for alpha chain variable domain of TCR clone 352580 (TRAV12-3, TRAJ17)
CAMTLTGNKLTF

SEQ ID NO: 705160 - protein, 12 aa, Homo sapiens
  CDR3 for beta chain variable domain of TCR clone 352580 (TRBV11-2, TRBJ2-2)
CASSRGGGELFF

SEQ ID NO: 705161 - protein, 13 aa, Homo sapiens
  CDR3 for alpha chain variable domain of TCR clone 352581 (TRAV21, TRAJ57)
CAVTQGGSEKLVF

SEQ ID NO: 705162 - protein, 16 aa, Homo sapiens
  CDR3 for beta chain variable domain of TCR clone 352581 (TRBV29-1, TRBJ2-7)
CSVEDAEDCTAYEHYF

SEQ ID NO: 705163 - protein, 15 aa, Homo sapiens
  CDR3 for alpha chain variable domain of TCR clone 352582 (TRAV21, TRAJ53)
CATLNSGGSNYKLTL

SEQ ID NO: 705164 - protein, 15 aa, Homo sapiens
  CDR3 for beta chain variable domain of TCR clone 352582 (TRBV5-1, TRBJ2-1)
CASSPPRAPYNEQFF

SEQ ID NO: 705165 - protein, 13 aa, Homo sapiens
  CDR3 for alpha chain variable domain of TCR clone 352583 (TRAV20, TRAJ37)
CAGCSSNTGKLIF

SEQ ID NO: 705166 - protein, 21 aa, Homo sapiens
  CDR3 for beta chain variable domain of TCR clone 352583 (TRBV4-2, TRBJ2-3)
PCSQKTRPCISVPAAPDTKYF

SEQ ID NO: 705167 - protein, 12 aa, Homo sapiens
  CDR3 for alpha chain variable domain of TCR clone 352584 (TRAV13-2, TRAJ8)
CAPWLGFQKLVF

SEQ ID NO: 705168 - protein, 13 aa, Homo sapiens
  CDR3 for beta chain variable domain of TCR clone 352584 (TRBV4-2, TRBJ1-1)
CASIQAGNTEAFF

SEQ ID NO: 705169 - protein, 13 aa, Homo sapiens
  CDR3 for alpha chain variable domain of TCR clone 352585 (TRAV12-2, TRAJ52)
CAAHGTSYGTLTF

SEQ ID NO: 705170 - protein, 15 aa, Homo sapiens
  CDR3 for beta chain variable domain of TCR clone 352585 (TRBV10-3, TRBJ2-7)
CAISTFSGVKGEQYF

SEQ ID NO: 705171 - protein, 12 aa, Homo sapiens
  CDR3 for alpha chain variable domain of TCR clone 352586 (TRAV26-2, TRAJ29)
CILTEGNTPLVF

SEQ ID NO: 705172 - protein, 15 aa, Homo sapiens
  CDR3 for beta chain variable domain of TCR clone 352586 (TRBV5-1, TRBJ1-1)
CASSSTTGTNTEAFF

SEQ ID NO: 705173 - protein, 14 aa, Homo sapiens
  CDR3 for alpha chain variable domain of TCR clone 352587 (TRAV6, TRAJ10)
CALDFTGEGNKLTF

SEQ ID NO: 705174 - protein, 14 aa, Homo sapiens
  CDR3 for beta chain variable domain of TCR clone 352587 (TRBV7-3, TRBJ1-1)
CASSPTGGVSEAFF

SEQ ID NO: 705175 - protein, 13 aa, Homo sapiens
  CDR3 for alpha chain variable domain of TCR clone 352588 (TRAV8-2, TRAJ34)
CVVSDRRTDKPIF

SEQ ID NO: 705176 - protein, 15 aa, Homo sapiens
  CDR3 for beta chain variable domain of TCR clone 352588 (TRBV20-1, TRBJ2-3)
CSARVVGGSTDTQYF

SEQ ID NO: 705177 - protein, 15 aa, Homo sapiens
  CDR3 for alpha chain variable domain of TCR clone 352589 (TRAV12-2, TRAJ53)
CAVNGGGGSNYKLTF

SEQ ID NO: 705178 - protein, 20 aa, Homo sapiens
  CDR3 for beta chain variable domain of TCR clone 352589 (TRBV28, TRBJ2-1)
CASTPIGGSPGLAGGNEQFF

SEQ ID NO: 705179 - protein, 14 aa, Homo sapiens
  CDR3 for alpha chain variable domain of TCR clone 352590 (TRAV8-3, TRAJ6)
CAVGATGGSYIPTF

SEQ ID NO: 705180 - protein, 13 aa, Homo sapiens
  CDR3 for beta chain variable domain of TCR clone 352590 (TRBV19, TRBJ1-2)
CASSVPGQDGYTF

SEQ ID NO: 705181 - protein, 14 aa, Homo sapiens
  CDR3 for alpha chain variable domain of TCR clone 352591 (TRAV38-2/DV8, TRAJ23)
CAYRSQTREESLSS

SEQ ID NO: 705182 - protein, 13 aa, Homo sapiens
  CDR3 for beta chain variable domain of TCR clone 352591 (TRBV24-1, TRBJ2-1)
CATSAGPYNEQFF

SEQ ID NO: 705183 - protein, 16 aa, Homo sapiens
  CDR3 for alpha chain variable domain of TCR clone 352592 (TRAV12-3, TRAJ53)
CAMSPGSGGSNYKRTF

SEQ ID NO: 705184 - protein, 11 aa, Homo sapiens
  CDR3 for beta chain variable domain of TCR clone 352592 (TRBV29-1, TRBJ2-5)
CSEDRRGTQYF

SEQ ID NO: 705185 - protein, 14 aa, Homo sapiens
  CDR3 for alpha chain variable domain of TCR clone 352593 (TRAV12-1, TRAJ9)
CVVTGDTGGFKTIF

SEQ ID NO: 705186 - protein, 16 aa, Homo sapiens
  CDR3 for beta chain variable domain of TCR clone 352593 (TRBV29-1, TRBJ1-2)
CSVEANRDIANYGDTF

SEQ ID NO: 705187 - protein, 13 aa, Homo sapiens
  CDR3 for alpha chain variable domain of TCR clone 352594 (TRAV2, TRAJ24)
CDLQLTAGGNSSL

SEQ ID NO: 705188 - protein, 10 aa, Homo sapiens
  CDR3 for beta chain variable domain of TCR clone 352594 (TRBV7-9, TRBJ1-2)
CASSLSRTMA

SEQ ID NO: 705189 - protein, 14 aa, Homo sapiens
  CDR3 for alpha chain variable domain of TCR clone 352595 (TRAV12-3, TRAJ29)
CAMILLSGNTPLVF

SEQ ID NO: 705190 - protein, 13 aa, Homo sapiens
  CDR3 for beta chain variable domain of TCR clone 352595 (TRBV20-1, TRBJ2-5)
CSASLTGRETQYF

SEQ ID NO: 705191 - protein, 13 aa, Homo sapiens
  CDR3 for alpha chain variable domain of TCR clone 352596 (TRAV12-1, TRAJ29)
CVVNGPGNTPLVF

SEQ ID NO: 705192 - protein, 13 aa, Homo sapiens
  CDR3 for beta chain variable domain of TCR clone 352596 (TRBV12-4, TRBJ2-7)
CASSLSGVYEQYF

SEQ ID NO: 705193 - protein, 11 aa, Homo sapiens
  CDR3 for alpha chain variable domain of TCR clone 352597 (TRAV2, TRAJ33)
CAVESNYQLIW

SEQ ID NO: 705194 - protein, 13 aa, Homo sapiens
  CDR3 for beta chain variable domain of TCR clone 352597 (TRBV28, TRBJ2-7)
CAGAQQGLDEQYF

SEQ ID NO: 705195 - protein, 18 aa, Homo sapiens
  CDR3 for alpha chain variable domain of TCR clone 352598 (TRAV26-1, TRAJ23)
CIVRVGLEVWNQGGKLIF

SEQ ID NO: 705196 - protein, 14 aa, Homo sapiens
  CDR3 for beta chain variable domain of TCR clone 352598 (TRBV23-1, TRBJ2-5)
CASSFLRSQETQYF

SEQ ID NO: 705197 - protein, 11 aa, Homo sapiens
  CDR3 for alpha chain variable domain of TCR clone 352599 (TRAV1-2, TRAJ20)
CAVANDYKLSF

SEQ ID NO: 705198 - protein, 16 aa, Homo sapiens
  CDR3 for beta chain variable domain of TCR clone 352599 (TRBV25-1, TRBJ1-1)
CASTHLGGNTEAFLDK

SEQ ID NO: 705199 - protein, 14 aa, Homo sapiens
  CDR3 for alpha chain variable domain of TCR clone 352600 (TRAV26-1, TRAJ39)
CIVRGSRAGNMLTF

SEQ ID NO: 705200 - protein, 16 aa, Homo sapiens
  CDR3 for beta chain variable domain of TCR clone 352600 (TRBV28, TRBJ2-1)
CASSSPEYPRDNEQFF

SEQ ID NO: 705201 - protein, 15 aa, Homo sapiens
  CDR3 for alpha chain variable domain of TCR clone 352601 (TRAV2, TRAJ9)
CAVEDRGTGGFKTIF

SEQ ID NO: 705202 - protein, 14 aa, Homo sapiens
  CDR3 for beta chain variable domain of TCR clone 352601 (TRBV19, TRBJ2-1)
CASKDPSSYNEQFF

SEQ ID NO: 705203 - protein, 16 aa, Homo sapiens
  CDR3 for alpha chain variable domain of TCR clone 352602 (TRAV3, TRAJ32)
CAVRDMGGGATNKLIF

SEQ ID NO: 705204 - protein, 11 aa, Homo sapiens
  CDR3 for beta chain variable domain of TCR clone 352602 (TRBV12-4, TRBJ2-1)
SASSRLNEQFF

SEQ ID NO: 705205 - protein, 12 aa, Homo sapiens
  CDR3 for alpha chain variable domain of TCR clone 352603 (TRAV16, TRAJ10)
CSRTGGGNKLPF

SEQ ID NO: 705206 - protein, 14 aa, Homo sapiens
  CDR3 for beta chain variable domain of TCR clone 352603 (TRBV7-9, TRBJ2-1)
CASSLGVADNEQFF

SEQ ID NO: 705207 - protein, 12 aa, Homo sapiens
  CDR3 for alpha chain variable domain of TCR clone 352604 (TRAV2, TRAJ9)
CAVGAGGFKTIF

SEQ ID NO: 705208 - protein, 14 aa, Homo sapiens
  CDR3 for beta chain variable domain of TCR clone 352604 (TRBV7-9, TRBJ2-5)
CASSLVGGEETQYF

SEQ ID NO: 705209 - protein, 23 aa, Homo sapiens
  CDR3 for alpha chain variable domain of TCR clone 352605 (TRAV12-2, TRAJ36)
SLLIRDSQPSDSATLERANNLFF

SEQ ID NO: 705210 - protein, 11 aa, Homo sapiens
  CDR3 for beta chain variable domain of TCR clone 352605 (TRBV10-1, TRBJ2-3)
CASSDSDTQYF

SEQ ID NO: 705211 - protein, 11 aa, Homo sapiens
  CDR3 for alpha chain variable domain of TCR clone 352606 (TRAV2, TRAJ13)
CASGGYQKVTF

SEQ ID NO: 705212 - protein, 11 aa, Homo sapiens
  CDR3 for beta chain variable domain of TCR clone 352606 (TRBV6-6, TRBJ2-2)
CASSYYHELFF

SEQ ID NO: 705213 - protein, 16 aa, Homo sapiens
  CDR3 for alpha chain variable domain of TCR clone 352607 (TRAV8-3, TRAJ8)
CAVPRDGNTGFQKLGF

SEQ ID NO: 705214 - protein, 15 aa, Homo sapiens
  CDR3 for beta chain variable domain of TCR clone 352607 (TRBV6-1, TRBJ2-6)
CASSSRPSGANVLTF

SEQ ID NO: 705215 - protein, 20 aa, Homo sapiens
  CDR3 for alpha chain variable domain of TCR clone 352608 (TRAV26-1, TRAJ42)
CCVLLHRQTYYGGSQGNLIF

SEQ ID NO: 705216 - protein, 18 aa, Homo sapiens
  CDR3 for beta chain variable domain of TCR clone 352608 (TRBV12-4, TRBJ2-2)
CASSLVAGTRGRTGELFF

SEQ ID NO: 705217 - protein, 12 aa, Homo sapiens
  CDR3 for alpha chain variable domain of TCR clone 352609 (TRAV22, TRAJ22)
CAPGGSARQLTF

SEQ ID NO: 705218 - protein, 14 aa, Homo sapiens
  CDR3 for beta chain variable domain of TCR clone 352609 (TRBV19, TRBJ2-5)
CANSMTGQQETQYF

SEQ ID NO: 705219 - protein, 14 aa, Homo sapiens
  CDR3 for alpha chain variable domain of TCR clone 352610 (TRAV12-2, TRAJ36)
CAVKISTGATNPFF

SEQ ID NO: 705220 - protein, 14 aa, Homo sapiens
  CDR3 for beta chain variable domain of TCR clone 352610 (TRBV25-1, TRBJ1-2)
CASSDTTGVVGYTF

SEQ ID NO: 705221 - protein, 14 aa, Homo sapiens
  CDR3 for alpha chain variable domain of TCR clone 352611 (TRAV1-2, TRAJ16)
CAVNRISDGQKLLF

SEQ ID NO: 705222 - protein, 13 aa, Homo sapiens
  CDR3 for beta chain variable domain of TCR clone 352611 (TRBV7-3, TRBJ1-1)
CASSQDWGAEAFF

SEQ ID NO: 705223 - protein, 16 aa, Homo sapiens
  CDR3 for alpha chain variable domain of TCR clone 352612 (TRAV23/DV6, TRAJ9)
CAASIGGNTGGFKTIF

SEQ ID NO: 705224 - protein, 22 aa, Homo sapiens
  CDR3 for beta chain variable domain of TCR clone 352612 (TRBV6-1, TRBJ1-3)
CASVQGGGWKHHIFWRGKLAHC

SEQ ID NO: 705225 - protein, 14 aa, Homo sapiens
  CDR3 for alpha chain variable domain of TCR clone 352613 (TRAV2, TRAJ9)
CAAEDRSGGFKTIF

SEQ ID NO: 705226 - protein, 13 aa, Homo sapiens
  CDR3 for beta chain variable domain of TCR clone 352613 (TRBV7-3, TRBJ2-5)
CASSVRGGETQYF

SEQ ID NO: 705227 - protein, 13 aa, Homo sapiens
  CDR3 for alpha chain variable domain of TCR clone 352614 (TRAV12-1, TRAJ22)
CVGYSGSARQLTF

SEQ ID NO: 705228 - protein, 14 aa, Homo sapiens
  CDR3 for beta chain variable domain of TCR clone 352614 (TRBV12-4, TRBJ1-3)
CASTLTGAGNTIYF

SEQ ID NO: 705229 - protein, 14 aa, Homo sapiens
  CDR3 for alpha chain variable domain of TCR clone 352615 (TRAV12-2, TRAJ40)
CAVKIPSGTYKYYF

SEQ ID NO: 705230 - protein, 14 aa, Homo sapiens
  CDR3 for beta chain variable domain of TCR clone 352615 (TRBV20-1, TRBJ1-1)
CSAQTRIGGTEAFF

SEQ ID NO: 705231 - protein, 13 aa, Homo sapiens
  CDR3 for alpha chain variable domain of TCR clone 352616 (TRAV12-3, TRAJ33)
FAMSVNSNYQLIW

SEQ ID NO: 705232 - protein, 13 aa, Homo sapiens
  CDR3 for beta chain variable domain of TCR clone 352616 (TRBV7-9, TRBJ1-2)
CASSLKQNYGYTF

SEQ ID NO: 705233 - protein, 12 aa, Homo sapiens
  CDR3 for alpha chain variable domain of TCR clone 352617 (TRAV8-6, TRAJ50)
CAVETSYDKVIF

SEQ ID NO: 705234 - protein, 16 aa, Homo sapiens
  CDR3 for beta chain variable domain of TCR clone 352617 (TRBV25-1, TRBJ1-1)
CASSGDRDRGRIEAFF

SEQ ID NO: 705235 - protein, 17 aa, Homo sapiens
  CDR3 for alpha chain variable domain of TCR clone 352618 (TRAV4, )
CLVDIQNPDPAVYQLRD

SEQ ID NO: 705236 - protein, 13 aa, Homo sapiens
  CDR3 for beta chain variable domain of TCR clone 352618 (TRBV7-9, TRBJ2-7)
CASSFAGAYEQYF

SEQ ID NO: 705237 - protein, 13 aa, Homo sapiens
  CDR3 for alpha chain variable domain of TCR clone 352619 (TRAV36/DV7, TRAJ37)
CAVFSSNTGKLIF

SEQ ID NO: 705238 - protein, 12 aa, Homo sapiens
  CDR3 for beta chain variable domain of TCR clone 352619 (TRBV11-2, TRBJ2-2)
CARSLGGGELFF

SEQ ID NO: 705239 - protein, 17 aa, Homo sapiens
  CDR3 for alpha chain variable domain of TCR clone 352620 (TRAV4, TRAJ22)
CCVLLPRGGGSARQLTF

SEQ ID NO: 705240 - protein, 18 aa, Homo sapiens
  CDR3 for beta chain variable domain of TCR clone 352620 (TRBV6-6, TRBJ1-3)
CASSYSKWDSISGNTIYF

SEQ ID NO: 705241 - protein, 13 aa, Homo sapiens
  CDR3 for alpha chain variable domain of TCR clone 352621 (TRAV38-1, TRAJ42)
CARWGGSQGNLIF

SEQ ID NO: 705242 - protein, 16 aa, Homo sapiens
  CDR3 for beta chain variable domain of TCR clone 352621 (TRBV2, TRBJ2-4)
CASSEAPGGEQNIQYF

SEQ ID NO: 705243 - protein, 12 aa, Homo sapiens
  CDR3 for alpha chain variable domain of TCR clone 352622 (TRAV12-2, TRAJ52)
IGGGTSYGKLTF

SEQ ID NO: 705244 - protein, 13 aa, Homo sapiens
  CDR3 for beta chain variable domain of TCR clone 352622 (TRBV27, TRBJ1-1)
CASSLSIGAEAFF

SEQ ID NO: 705245 - protein, 12 aa, Homo sapiens
  CDR3 for alpha chain variable domain of TCR clone 352623 (TRAV25, TRAJ5)
CAGGGGRRALTF

SEQ ID NO: 705246 - protein, 16 aa, Homo sapiens
  CDR3 for beta chain variable domain of TCR clone 352623 (TRBV19, TRBJ2-1)
CASSKAGPSSYNEQFF

SEQ ID NO: 705247 - protein, 14 aa, Homo sapiens
  CDR3 for alpha chain variable domain of TCR clone 352624 (TRAV17, TRAJ34)
CATDSLEGTDKLIF

SEQ ID NO: 705248 - protein, 13 aa, Homo sapiens
  CDR3 for beta chain variable domain of TCR clone 352624 (TRBV11-2, TRBJ2-7)
GASSGTRPYEQYF

SEQ ID NO: 705249 - protein, 18 aa, Homo sapiens
  CDR3 for alpha chain variable domain of TCR clone 352625 (TRAV13-1, TRAJ52)
CAASKRSAGGTSYGKLKC

SEQ ID NO: 705250 - protein, 13 aa, Homo sapiens
  CDR3 for beta chain variable domain of TCR clone 352625 (TRBV12-4, TRBJ1-2)
CASSLRQGKGYTF

SEQ ID NO: 705251 - protein, 11 aa, Homo sapiens
  CDR3 for alpha chain variable domain of TCR clone 352626 (TRAV1-1, TRAJ23)
CAVRQGGKLIF

SEQ ID NO: 705252 - protein, 20 aa, Homo sapiens
  CDR3 for beta chain variable domain of TCR clone 352626 (TRBV7-8, TRBJ2-2)
CASSHLFPGPTILITGELFF

SEQ ID NO: 705253 - protein, 13 aa, Homo sapiens
  CDR3 for alpha chain variable domain of TCR clone 352627 (TRAV8-6, TRAJ49)
CAVITNTGNQFYF

SEQ ID NO: 705254 - protein, 13 aa, Homo sapiens
  CDR3 for beta chain variable domain of TCR clone 352627 (TRBV18, TRBJ1-1)
CASSGGRNTEAFF

SEQ ID NO: 705255 - protein, 14 aa, Homo sapiens
  CDR3 for alpha chain variable domain of TCR clone 352628 (TRAV9-2, TRAJ39)
CALYTYNAGNMLTF

SEQ ID NO: 705256 - protein, 15 aa, Homo sapiens
  CDR3 for beta chain variable domain of TCR clone 352628 (TRBV28, TRBJ1-3)
CASSMGWASGNTIYF

SEQ ID NO: 705257 - protein, 14 aa, Homo sapiens
  CDR3 for alpha chain variable domain of TCR clone 352629 (TRAV12-2, TRAJ45)
CALPERGGADGLAF

SEQ ID NO: 705258 - protein, 14 aa, Homo sapiens
  CDR3 for beta chain variable domain of TCR clone 352629 (TRBV18, TRBJ1-5)
CASSPGNSNQHQHF

SEQ ID NO: 705259 - protein, 17 aa, Homo sapiens
  CDR3 for alpha chain variable domain of TCR clone 352630 (TRAV16, TRAJ58)
CITVLSNGETSGSRLTF

SEQ ID NO: 705260 - protein, 15 aa, Homo sapiens
  CDR3 for beta chain variable domain of TCR clone 352630 (TRBV3-1, TRBJ2-7)
CASSQEWTGSYEQYF

SEQ ID NO: 705261 - protein, 13 aa, Homo sapiens
  CDR3 for alpha chain variable domain of TCR clone 352631 (TRAV36/DV7, TRAJ53)
CALSGGSNYKLTF

SEQ ID NO: 705262 - protein, 13 aa, Homo sapiens
  CDR3 for beta chain variable domain of TCR clone 352631 (TRBV28, TRBJ2-7)
CASSLPSRYEHYF

SEQ ID NO: 705263 - protein, 13 aa, Homo sapiens
  CDR3 for alpha chain variable domain of TCR clone 352632 (TRAV8-6, TRAJ8)
CAVSNTGFQKLVI

SEQ ID NO: 705264 - protein, 15 aa, Homo sapiens
  CDR3 for beta chain variable domain of TCR clone 352632 (TRBV28, TRBJ2-5)
CASSSGRTIQETQYF

SEQ ID NO: 705265 - protein, 11 aa, Homo sapiens
  CDR3 for alpha chain variable domain of TCR clone 352633 (TRAV29/DV5, TRAJ43)
CAAKTNNDMRF

SEQ ID NO: 705266 - protein, 13 aa, Homo sapiens
  CDR3 for beta chain variable domain of TCR clone 352633 (TRBV20-1, TRBJ1-6)
CSAPLGVGSPLHF

SEQ ID NO: 705267 - protein, 18 aa, Homo sapiens
  CDR3 for alpha chain variable domain of TCR clone 352634 (TRAV26-1, TRAJ52)
CIVRVEGAGGTSYGKLTF

SEQ ID NO: 705268 - protein, 14 aa, Homo sapiens
  CDR3 for beta chain variable domain of TCR clone 352634 (TRBV6-3, TRBJ2-7)
CASSYSGDHYEQYF

SEQ ID NO: 705269 - protein, 12 aa, Homo sapiens
  CDR3 for alpha chain variable domain of TCR clone 352635 (TRAV13-1, TRAJ53)
CAAGGSNYKLTF

SEQ ID NO: 705270 - protein, 11 aa, Homo sapiens
  CDR3 for beta chain variable domain of TCR clone 352635 (TRBV2, TRBJ1-1)
CARREGTEAFF

SEQ ID NO: 705271 - protein, 22 aa, Homo sapiens
  CDR3 for alpha chain variable domain of TCR clone 352636 (TRAV21, TRAJ30)
CAVRRRMTRSSLEKGHDFIFSP

SEQ ID NO: 705272 - protein, 15 aa, Homo sapiens
  CDR3 for beta chain variable domain of TCR clone 352636 (TRBV6-6, TRBJ2-7)
CASIYSYGGSYEQYF

SEQ ID NO: 705273 - protein, 15 aa, Homo sapiens
  CDR3 for alpha chain variable domain of TCR clone 352637 (TRAV26-1, TRAJ29)
CIVRVEGSGNTPLVF

SEQ ID NO: 705274 - protein, 14 aa, Homo sapiens
  CDR3 for beta chain variable domain of TCR clone 352637 (TRBV11-2, TRBJ2-3)
CASSRLARTDTQYF

SEQ ID NO: 705275 - protein, 14 aa, Homo sapiens
  CDR3 for alpha chain variable domain of TCR clone 352638 (TRAV3, TRAJ6)
CAVRVRGGSYIPTF

SEQ ID NO: 705276 - protein, 15 aa, Homo sapiens
  CDR3 for beta chain variable domain of TCR clone 352638 (TRBV11-2, TRBJ2-1)
CASSRNRGLMYEQFF

SEQ ID NO: 705277 - protein, 14 aa, Homo sapiens
  CDR3 for alpha chain variable domain of TCR clone 352639 (TRAV8-3, TRAJ4)
CAVGAAGGYNKLIF

SEQ ID NO: 705278 - protein, 15 aa, Homo sapiens
  CDR3 for beta chain variable domain of TCR clone 352639 (TRBV6-3, TRBJ2-7)
CASSSPGTVLYAQYF

SEQ ID NO: 705279 - protein, 14 aa, Homo sapiens
  CDR3 for alpha chain variable domain of TCR clone 352640 (TRAV13-1, TRAJ44)
CAAKATGTASKLTF

SEQ ID NO: 705280 - protein, 14 aa, Homo sapiens
  CDR3 for beta chain variable domain of TCR clone 352640 (TRBV4-2, TRBJ1-4)
CASSPSSGNEKLFF

SEQ ID NO: 705281 - protein, 13 aa, Homo sapiens
  CDR3 for alpha chain variable domain of TCR clone 352641 (TRAV3, TRAJ27)
CAVSPLGAGKSTL

SEQ ID NO: 705282 - protein, 13 aa, Homo sapiens
  CDR3 for beta chain variable domain of TCR clone 352641 (TRBV7-9, TRBJ2-3)
CASSPGSTDTQYF

SEQ ID NO: 705283 - protein, 13 aa, Homo sapiens
  CDR3 for alpha chain variable domain of TCR clone 352642 (TRAV27, TRAJ41)
CAGEGNSGYALNF

SEQ ID NO: 705284 - protein, 15 aa, Homo sapiens
  CDR3 for beta chain variable domain of TCR clone 352642 (TRBV7-9, TRBJ1-4)
CASSARTGGNEKLFF

SEQ ID NO: 705285 - protein, 13 aa, Homo sapiens
  CDR3 for alpha chain variable domain of TCR clone 352643 (TRAV1-2, TRAJ9)
CAALNTGGFKPIF

SEQ ID NO: 705286 - protein, 13 aa, Homo sapiens
  CDR3 for beta chain variable domain of TCR clone 352643 (TRBV19, TRBJ1-2)
CASSVPRQDGYTF

SEQ ID NO: 705287 - protein, 16 aa, Homo sapiens
  CDR3 for alpha chain variable domain of TCR clone 352644 (TRAV30, TRAJ24)
CGTEMVDADSWGKFQF

SEQ ID NO: 705288 - protein, 14 aa, Homo sapiens
  CDR3 for beta chain variable domain of TCR clone 352644 (TRBV12-5, TRBJ2-5)
CASGSRTHKETQYF

SEQ ID NO: 705289 - protein, 13 aa, Homo sapiens
  CDR3 for alpha chain variable domain of TCR clone 352645 (TRAV17, TRAJ9)
CATDYTGGFKTIF

SEQ ID NO: 705290 - protein, 12 aa, Homo sapiens
  CDR3 for beta chain variable domain of TCR clone 352645 (TRBV11-2, TRBJ2-1)
CASSPGNNEQFF

SEQ ID NO: 705291 - protein, 16 aa, Homo sapiens
  CDR3 for alpha chain variable domain of TCR clone 352646 (TRAV14/DV4, TRAJ21)
CAMREGPENNFNKFYF

SEQ ID NO: 705292 - protein, 16 aa, Homo sapiens
  CDR3 for beta chain variable domain of TCR clone 352646 (TRBV28, TRBJ2-3)
CASSFFRDPRLGTQYF

SEQ ID NO: 705293 - protein, 23 aa, Homo sapiens
  CDR3 for alpha chain variable domain of TCR clone 352647 (TRAV12-2, TRAJ43)
SLLIRDSQPSDSATYLCAFDMRF

SEQ ID NO: 705294 - protein, 13 aa, Homo sapiens
  CDR3 for beta chain variable domain of TCR clone 352647 (TRBV19, TRBJ1-2)
CASSVPGQDGYTF

SEQ ID NO: 705295 - protein, 14 aa, Homo sapiens
  CDR3 for alpha chain variable domain of TCR clone 352648 (TRAV1-2, TRAJ8)
CAVREDTGFQKLVF

SEQ ID NO: 705296 - protein, 13 aa, Homo sapiens
  CDR3 for beta chain variable domain of TCR clone 352648 (TRBV19, TRBJ1-2)
CASSVPGQDGYTV

SEQ ID NO: 705297 - protein, 14 aa, Homo sapiens
  CDR3 for alpha chain variable domain of TCR clone 352649 (TRAV35, TRAJ33)
CAGSFQDSNYQLIW

SEQ ID NO: 705298 - protein, 15 aa, Homo sapiens
  CDR3 for beta chain variable domain of TCR clone 352649 (TRBV29-1, TRBJ2-7)
CSVEFFDRGSYEQYF

SEQ ID NO: 705299 - protein, 16 aa, Homo sapiens
  CDR3 for alpha chain variable domain of TCR clone 352650 (TRAV26-1, TRAJ31)
CIVRPPVLNNNARLMF

SEQ ID NO: 705300 - protein, 15 aa, Homo sapiens
  CDR3 for beta chain variable domain of TCR clone 352650 (TRBV19, TRBJ1-2)
CASSVGQVLNYGYTF

SEQ ID NO: 705301 - protein, 18 aa, Homo sapiens
  CDR3 for alpha chain variable domain of TCR clone 352651 (TRAV29/DV5, TRAJ52)
CAAGFRVPVGTSYGKLTF

SEQ ID NO: 705302 - protein, 16 aa, Homo sapiens
  CDR3 for beta chain variable domain of TCR clone 352651 (TRBV7-3, TRBJ2-2)
CASSLKRGTLSGELFF

SEQ ID NO: 705303 - protein, 13 aa, Homo sapiens
  CDR3 for alpha chain variable domain of TCR clone 352652 (TRAV12-2, TRAJ20)
CAVNRFDAYKLSF

SEQ ID NO: 705304 - protein, 12 aa, Homo sapiens
  CDR3 for beta chain variable domain of TCR clone 352652 (TRBV19, TRBJ2-1)
CASSQISNEQFF

SEQ ID NO: 705305 - protein, 14 aa, Homo sapiens
  CDR3 for alpha chain variable domain of TCR clone 352653 (TRAV8-3, TRAJ35)
CAVVPQGFGNVLHC

SEQ ID NO: 705306 - protein, 14 aa, Homo sapiens
  CDR3 for beta chain variable domain of TCR clone 352653 (TRBV7-2, TRBJ2-2)
CASRGQGAAGELFF

SEQ ID NO: 705307 - protein, 16 aa, Homo sapiens
  CDR3 for alpha chain variable domain of TCR clone 352654 (TRAV1-2, TRAJ6)
CAVRDQGTGGSYVPTF

SEQ ID NO: 705308 - protein, 13 aa, Homo sapiens
  CDR3 for beta chain variable domain of TCR clone 352654 (TRBV28, TRBJ2-7)
CASTPGLAGEQYF

SEQ ID NO: 705309 - protein, 13 aa, Homo sapiens
  CDR3 for alpha chain variable domain of TCR clone 352655 (TRAV8-3, TRAJ6)
CSVEKGGSYIPTF

SEQ ID NO: 705310 - protein, 15 aa, Homo sapiens
  CDR3 for beta chain variable domain of TCR clone 352655 (TRBV28, TRBJ2-5)
CASSVDRGRGETQYF

SEQ ID NO: 705311 - protein, 13 aa, Homo sapiens
  CDR3 for alpha chain variable domain of TCR clone 352656 (TRAV21, TRAJ20)
CAVGLRVDYKLSF

SEQ ID NO: 705312 - protein, 14 aa, Homo sapiens
  CDR3 for beta chain variable domain of TCR clone 352656 (TRBV19, TRBJ1-2)
CASSIGAGSYGYSF

SEQ ID NO: 705313 - protein, 16 aa, Homo sapiens
  CDR3 for alpha chain variable domain of TCR clone 352657 (TRAV8-3, TRAJ22)
CAVNLLGPGSARQLTF

SEQ ID NO: 705314 - protein, 14 aa, Homo sapiens
  CDR3 for beta chain variable domain of TCR clone 352657 (TRBV11-2, TRBJ2-7)
CASSLELEGYEQYF

SEQ ID NO: 705315 - protein, 15 aa, Homo sapiens
  CDR3 for alpha chain variable domain of TCR clone 352658 (TRAV2, TRAJ9)
CAVEDRGTGGFKTIF

SEQ ID NO: 705316 - protein, 16 aa, Homo sapiens
  CDR3 for beta chain variable domain of TCR clone 352658 (TRBV11-2, TRBJ2-7)
CASSLAPTGVNYEQYF

SEQ ID NO: 705317 - protein, 17 aa, Homo sapiens
  CDR3 for alpha chain variable domain of TCR clone 352659 (TRAV8-1, TRAJ43)
CAVTNDMRFGAGTRLTV

SEQ ID NO: 705318 - protein, 17 aa, Homo sapiens
  CDR3 for beta chain variable domain of TCR clone 352659 (TRBV5-4, TRBJ2-1)
CVSSSAGGRGPYNEQFF

SEQ ID NO: 705319 - protein, 17 aa, Homo sapiens
  CDR3 for alpha chain variable domain of TCR clone 352660 (TRAV13-1, TRAJ53)
CAPSWKSSGGSNYKLTF

SEQ ID NO: 705320 - protein, 19 aa, Homo sapiens
  CDR3 for beta chain variable domain of TCR clone 352660 (TRBV7-9, TRBJ2-1)
CASSHNRGALLRSYNEQFF

SEQ ID NO: 705321 - protein, 12 aa, Homo sapiens
  CDR3 for alpha chain variable domain of TCR clone 352661 (TRAV29/DV5, TRAJ49)
CAASDTGNQFYF

SEQ ID NO: 705322 - protein, 19 aa, Homo sapiens
  CDR3 for beta chain variable domain of TCR clone 352661 (TRBV25-1, TRBJ2-2)
CAILVYRVDRGRKTGELFF

SEQ ID NO: 705323 - protein, 18 aa, Homo sapiens
  CDR3 for alpha chain variable domain of TCR clone 352662 (TRAV21, TRAJ52)
CAVRPSPAGGTSYGKLTF

SEQ ID NO: 705324 - protein, 14 aa, Homo sapiens
  CDR3 for beta chain variable domain of TCR clone 352662 (TRBV20-1, TRBJ2-5)
CSALVPGYQETQYF

SEQ ID NO: 705325 - protein, 11 aa, Homo sapiens
  CDR3 for alpha chain variable domain of TCR clone 352663 (TRAV12-3, TRAJ17)
CKTLTGNKLTF

SEQ ID NO: 705326 - protein, 15 aa, Homo sapiens
  CDR3 for beta chain variable domain of TCR clone 352663 (TRBV20-1, TRBJ2-7)
CSARDRVSGMDEQYF

SEQ ID NO: 705327 - protein, 12 aa, Homo sapiens
  CDR3 for alpha chain variable domain of TCR clone 352664 (TRAV12-3, TRAJ17)
CAMTLTGNKLTF

SEQ ID NO: 705328 - protein, 15 aa, Homo sapiens
  CDR3 for beta chain variable domain of TCR clone 352664 (TRBV20-1, TRBJ2-7)
CIARDRVPGMDEQYF

SEQ ID NO: 705329 - protein, 14 aa, Homo sapiens
  CDR3 for alpha chain variable domain of TCR clone 352665 (TRAV13-1, TRAJ48)
CPASTDFGNEKLTF

SEQ ID NO: 705330 - protein, 15 aa, Homo sapiens
  CDR3 for beta chain variable domain of TCR clone 352665 (TRBV10-2, TRBJ2-5)
CASKPEDRRQETQYF

SEQ ID NO: 705331 - protein, 14 aa, Homo sapiens
  CDR3 for alpha chain variable domain of TCR clone 352666 (TRAV17, TRAJ32)
CATDPGGSTNKLIF

SEQ ID NO: 705332 - protein, 14 aa, Homo sapiens
  CDR3 for beta chain variable domain of TCR clone 352666 (TRBV2, TRBJ1-5)
CASSENRGGQPQHF

SEQ ID NO: 705333 - protein, 15 aa, Homo sapiens
  CDR3 for alpha chain variable domain of TCR clone 352667 (TRAV13-1, TRAJ5)
CAVSPIDTGRKALTF

SEQ ID NO: 705334 - protein, 18 aa, Homo sapiens
  CDR3 for beta chain variable domain of TCR clone 352667 (TRBV4-1, TRBJ2-2)
CASSFRTSGGEGPGELFF

SEQ ID NO: 705335 - protein, 13 aa, Homo sapiens
  CDR3 for alpha chain variable domain of TCR clone 352668 (TRAV13-1, TRAJ43)
CAASKNNNNDMRF

SEQ ID NO: 705336 - protein, 15 aa, Homo sapiens
  CDR3 for beta chain variable domain of TCR clone 352668 (TRBV27, TRBJ1-1)
CASSPYADPYTEAFF

SEQ ID NO: 705337 - protein, 16 aa, Homo sapiens
  CDR3 for alpha chain variable domain of TCR clone 352669 (TRAV26-1, TRAJ23)
CIVRPHGNNQGGKLIF

SEQ ID NO: 705338 - protein, 19 aa, Homo sapiens
  CDR3 for beta chain variable domain of TCR clone 352669 (TRBV5-4, TRBJ2-7)
CASSLGQSPGASTSSTSGR

SEQ ID NO: 705339 - protein, 12 aa, Homo sapiens
  CDR3 for alpha chain variable domain of TCR clone 352670 (TRAV2, TRAJ9)
CAVGAGGFKTIF

SEQ ID NO: 705340 - protein, 15 aa, Homo sapiens
  CDR3 for beta chain variable domain of TCR clone 352670 (TRBV20-1, TRBJ2-6)
CSARDRGPGANVLTF

SEQ ID NO: 705341 - protein, 14 aa, Homo sapiens
  CDR3 for alpha chain variable domain of TCR clone 352671 (TRAV16, TRAJ39)
CALSKNNAGNMLTF

SEQ ID NO: 705342 - protein, 15 aa, Homo sapiens
  CDR3 for beta chain variable domain of TCR clone 352671 (TRBV20-1, TRBJ1-1)
CSARSAATSNTEAFF

SEQ ID NO: 705343 - protein, 12 aa, Homo sapiens
  CDR3 for alpha chain variable domain of TCR clone 352672 (TRAV27, TRAJ35)
CAGADFGNVLHC

SEQ ID NO: 705344 - protein, 15 aa, Homo sapiens
  CDR3 for beta chain variable domain of TCR clone 352672 (TRBV19, TRBJ2-5)
CASHGLAGAQETQYF

SEQ ID NO: 705345 - protein, 14 aa, Homo sapiens
  CDR3 for alpha chain variable domain of TCR clone 352673 (TRAV26-1, TRAJ38)
CIADNAGNNRKLVW

SEQ ID NO: 705346 - protein, 15 aa, Homo sapiens
  CDR3 for beta chain variable domain of TCR clone 352673 (TRBV20-1, TRBJ2-7)
CSARDRVSGMDEQYF

SEQ ID NO: 705347 - protein, 18 aa, Homo sapiens
  CDR3 for alpha chain variable domain of TCR clone 352674 (TRAV26-2, )
CILTDIQNPDPAVYQLRD

SEQ ID NO: 705348 - protein, 14 aa, Homo sapiens
  CDR3 for beta chain variable domain of TCR clone 352674 (TRBV6-1, TRBJ1-3)
CASVQGGGGNTIYF

SEQ ID NO: 705349 - protein, 14 aa, Homo sapiens
  CDR3 for alpha chain variable domain of TCR clone 352675 (TRAV1-2, TRAJ8)
CAVREDTGFQKLVF

SEQ ID NO: 705350 - protein, 17 aa, Homo sapiens
  CDR3 for beta chain variable domain of TCR clone 352675 (TRBV20-1, TRBJ2-1)
CSASSSGLAGSYKEQFF

SEQ ID NO: 705351 - protein, 14 aa, Homo sapiens
  CDR3 for alpha chain variable domain of TCR clone 352676 (TRAV8-3, TRAJ6)
CAVSSSGGSYIPTF

SEQ ID NO: 705352 - protein, 11 aa, Homo sapiens
  CDR3 for beta chain variable domain of TCR clone 352676 (TRBV27, TRBJ2-3)
CASSLGDTQYF

SEQ ID NO: 705353 - protein, 15 aa, Homo sapiens
  CDR3 for alpha chain variable domain of TCR clone 352677 (TRAV26-1, TRAJ29)
CIVRVEGSGNTPLVF

SEQ ID NO: 705354 - protein, 15 aa, Homo sapiens
  CDR3 for beta chain variable domain of TCR clone 352677 (TRBV7-9, TRBJ1-5)
CASSQGHQPNNPQHF

SEQ ID NO: 705355 - protein, 13 aa, Homo sapiens
  CDR3 for alpha chain variable domain of TCR clone 352678 (TRAV12-1, TRAJ43)
CVVSHHNNNDMRF

SEQ ID NO: 705356 - protein, 14 aa, Homo sapiens
  CDR3 for beta chain variable domain of TCR clone 352678 (TRBV5-5, TRBJ2-2)
CASSLLGDTGELLF

SEQ ID NO: 705357 - protein, 15 aa, Homo sapiens
  CDR3 for alpha chain variable domain of TCR clone 352679 (TRAV8-3, TRAJ40)
CAAPSLGSGTYKYIF

SEQ ID NO: 705358 - protein, 16 aa, Homo sapiens
  CDR3 for beta chain variable domain of TCR clone 352679 (TRBV7-3, TRBJ2-3)
CASSLSCYRPEDTQYF

SEQ ID NO: 705359 - protein, 15 aa, Homo sapiens
  CDR3 for alpha chain variable domain of TCR clone 352680 (TRAV4, TRAJ5)
CLVGAMGTGRRALTF

SEQ ID NO: 705360 - protein, 15 aa, Homo sapiens
  CDR3 for beta chain variable domain of TCR clone 352680 (TRBV2, TRBJ2-1)
CASSELAGSYNEQFF

SEQ ID NO: 705361 - protein, 12 aa, Homo sapiens
  CDR3 for alpha chain variable domain of TCR clone 352681 (TRAV12-2, TRAJ30)
CAVRNRDDKIIF

SEQ ID NO: 705362 - protein, 15 aa, Homo sapiens
  CDR3 for beta chain variable domain of TCR clone 352681 (TRBV4-1, TRBJ2-3)
CASSRGQGIPDTQYF

SEQ ID NO: 705363 - protein, 18 aa, Homo sapiens
  CDR3 for alpha chain variable domain of TCR clone 352682 (TRAV12-3, TRAJ52)
CSMSVGGAGGTSYGKLTF

SEQ ID NO: 705364 - protein, 19 aa, Homo sapiens
  CDR3 for beta chain variable domain of TCR clone 352682 (TRBV6-3, TRBJ1-2)
CASSYSKGRTGPPNYGYTF

SEQ ID NO: 705365 - protein, 14 aa, Homo sapiens
  CDR3 for alpha chain variable domain of TCR clone 352683 (TRAV3, TRAJ37)
CAVKESGNTGKLIF

SEQ ID NO: 705366 - protein, 16 aa, Homo sapiens
  CDR3 for beta chain variable domain of TCR clone 352683 (TRBV7-2, TRBJ1-1)
CASSFLTGTTEAFLDK

SEQ ID NO: 705367 - protein, 13 aa, Homo sapiens
  CDR3 for alpha chain variable domain of TCR clone 352684 (TRAV13-2, TRAJ21)
CAENLYNFNKFYF

SEQ ID NO: 705368 - protein, 15 aa, Homo sapiens
  CDR3 for beta chain variable domain of TCR clone 352684 (TRBV11-3, TRBJ2-3)
CASLKDGREGDTQYF

SEQ ID NO: 705369 - protein, 15 aa, Homo sapiens
  CDR3 for alpha chain variable domain of TCR clone 352685 (TRAV8-3, TRAJ11)
CAVGLLNSGYSTLTF

SEQ ID NO: 705370 - protein, 16 aa, Homo sapiens
  CDR3 for beta chain variable domain of TCR clone 352685 (TRBV7-9, TRBJ1-2)
CASSLGFSSGEDGYTS

SEQ ID NO: 705371 - protein, 11 aa, Homo sapiens
  CDR3 for alpha chain variable domain of TCR clone 352686 (TRAV17, TRAJ56)
KILEANSKLTF

SEQ ID NO: 705372 - protein, 16 aa, Homo sapiens
  CDR3 for beta chain variable domain of TCR clone 352686 (TRBV19, TRBJ2-1)
CASSIKLAGSYNEQFF

SEQ ID NO: 705373 - protein, 15 aa, Homo sapiens
  CDR3 for alpha chain variable domain of TCR clone 352687 (TRAV21, TRAJ53)
CATLNSGGSNYKLTF

SEQ ID NO: 705374 - protein, 15 aa, Homo sapiens
  CDR3 for beta chain variable domain of TCR clone 352687 (TRBV6-3, TRBJ2-7)
CASRSPGTVFYEQYF

SEQ ID NO: 705375 - protein, 14 aa, Homo sapiens
  CDR3 for alpha chain variable domain of TCR clone 352688 (TRAV12-2, TRAJ53)
CAVKGGGGNYKLTF

SEQ ID NO: 705376 - protein, 15 aa, Homo sapiens
  CDR3 for beta chain variable domain of TCR clone 352688 (TRBV11-2, TRBJ2-2)
CASSSDRVNAGELFF

SEQ ID NO: 705377 - protein, 19 aa, Homo sapiens
  CDR3 for alpha chain variable domain of TCR clone 352689 (TRAV29/DV5, TRAJ49)
CSVLLCNKLTVDTGNQFYF

SEQ ID NO: 705378 - protein, 15 aa, Homo sapiens
  CDR3 for beta chain variable domain of TCR clone 352689 (TRBV4-3, TRBJ2-2)
CASSQGGTPTGELFF

SEQ ID NO: 705379 - protein, 13 aa, Homo sapiens
  CDR3 for alpha chain variable domain of TCR clone 352690 (TRAV2, TRAJ40)
CAVVTSGTYKYIF

SEQ ID NO: 705380 - protein, 14 aa, Homo sapiens
  CDR3 for beta chain variable domain of TCR clone 352690 (TRBV19, TRBJ2-1)
CASPTFVLSAEQFL

SEQ ID NO: 705381 - protein, 14 aa, Homo sapiens
  CDR3 for alpha chain variable domain of TCR clone 352691 (TRAV26-1, TRAJ38)
CIADNAGNNRKLIL

SEQ ID NO: 705382 - protein, 13 aa, Homo sapiens
  CDR3 for beta chain variable domain of TCR clone 352691 (TRBV4-2, TRBJ1-1)
CASSQAGNTEAFF

SEQ ID NO: 705383 - protein, 13 aa, Homo sapiens
  CDR3 for alpha chain variable domain of TCR clone 352692 (TRAV8-4, TRAJ49)
CAVRTLTGNQFYF

SEQ ID NO: 705384 - protein, 16 aa, Homo sapiens
  CDR3 for beta chain variable domain of TCR clone 352692 (TRBV5-7, TRBJ2-5)
WASTLAPAGGRETQYF

SEQ ID NO: 705385 - protein, 21 aa, Homo sapiens
  CDR3 for alpha chain variable domain of TCR clone 352693 (TRAV26-1, TRAJ56)
CCVLLHRQSRAYTGANSKLTF

SEQ ID NO: 705386 - protein, 13 aa, Homo sapiens
  CDR3 for beta chain variable domain of TCR clone 352693 (TRBV7-3, TRBJ1-1)
CASSQDWGAEAFF

SEQ ID NO: 705387 - protein, 13 aa, Homo sapiens
  CDR3 for alpha chain variable domain of TCR clone 352694 (TRAV27, TRAJ6)
CAGGTRGSYIPTF

SEQ ID NO: 705388 - protein, 13 aa, Homo sapiens
  CDR3 for beta chain variable domain of TCR clone 352694 (TRBV7-9, TRBJ1-2)
CASSLKQNYGYTV

SEQ ID NO: 705389 - protein, 16 aa, Homo sapiens
  CDR3 for alpha chain variable domain of TCR clone 352695 (TRAV26-1, TRAJ38)
CIVRVSGAGNNRKLIW

SEQ ID NO: 705390 - protein, 13 aa, Homo sapiens
  CDR3 for beta chain variable domain of TCR clone 352695 (TRBV14, TRBJ1-2)
CASSQDRRRGDTF

SEQ ID NO: 705391 - protein, 14 aa, Homo sapiens
  CDR3 for alpha chain variable domain of TCR clone 352696 (TRAV13-2, TRAJ15)
CAENPNQAGTALVF

SEQ ID NO: 705392 - protein, 16 aa, Homo sapiens
  CDR3 for beta chain variable domain of TCR clone 352696 (TRBV12-4, TRBJ1-2)
CASSPTATGKTRGYTF

SEQ ID NO: 705393 - protein, 16 aa, Homo sapiens
  CDR3 for alpha chain variable domain of TCR clone 352697 (TRAV1-2, TRAJ10)
CAVRGVLTEGGNKLTF

SEQ ID NO: 705394 - protein, 14 aa, Homo sapiens
  CDR3 for beta chain variable domain of TCR clone 352697 (TRBV25-1, TRBJ1-1)
CASTHLGGNTEAFF

SEQ ID NO: 705395 - protein, 22 aa, Homo sapiens
  CDR3 for alpha chain variable domain of TCR clone 352698 (TRAV8-3, TRAJ8)
CAVPRDGNTGFQTCIWNWHPTS

SEQ ID NO: 705396 - protein, 15 aa, Homo sapiens
  CDR3 for beta chain variable domain of TCR clone 352698 (TRBV6-1, TRBJ2-6)
CASSSRPSGANVLTF

SEQ ID NO: 705397 - protein, 15 aa, Homo sapiens
  CDR3 for alpha chain variable domain of TCR clone 352699 (TRAV3, TRAJ3)
CAVRDGHSSASKIFF

SEQ ID NO: 705398 - protein, 17 aa, Homo sapiens
  CDR3 for beta chain variable domain of TCR clone 352699 (TRBV25-1, TRBJ2-7)
CASSDARVVFSSYEQYF

SEQ ID NO: 705399 - protein, 13 aa, Homo sapiens
  CDR3 for alpha chain variable domain of TCR clone 352700 (TRAV12-2, TRAJ50)
CAVIVTSYDKVIF

SEQ ID NO: 705400 - protein, 14 aa, Homo sapiens
  CDR3 for beta chain variable domain of TCR clone 352700 (TRBV2, TRBJ2-1)
CASSDRAYYNEEFF

SEQ ID NO: 705401 - protein, 13 aa, Homo sapiens
  CDR3 for alpha chain variable domain of TCR clone 352701 (TRAV13-1, TRAJ5)
CAASDTGRRALTF

SEQ ID NO: 705402 - protein, 16 aa, Homo sapiens
  CDR3 for beta chain variable domain of TCR clone 352701 (TRBV28, TRBJ2-3)
CASSLSGQTSTDTQYF

SEQ ID NO: 705403 - protein, 17 aa, Homo sapiens
  CDR3 for alpha chain variable domain of TCR clone 352702 (TRAV12-2, TRAJ48)
CASNEKLTFGTGTRLTI

SEQ ID NO: 705404 - protein, 14 aa, Homo sapiens
  CDR3 for beta chain variable domain of TCR clone 352702 (TRBV14, TRBJ2-3)
CASSQRLSTDTQYF

SEQ ID NO: 705405 - protein, 14 aa, Homo sapiens
  CDR3 for alpha chain variable domain of TCR clone 352703 (TRAV1-2, TRAJ8)
CAVREDAGFQKLVF

SEQ ID NO: 705406 - protein, 15 aa, Homo sapiens
  CDR3 for beta chain variable domain of TCR clone 352703 (TRBV5-4, TRBJ2-7)
CASSRFGTGSYEQYF

SEQ ID NO: 705407 - protein, 14 aa, Homo sapiens
  CDR3 for alpha chain variable domain of TCR clone 352704 (TRAV8-3, TRAJ9)
CAVGHNTGGFKTIF

SEQ ID NO: 705408 - protein, 14 aa, Homo sapiens
  CDR3 for beta chain variable domain of TCR clone 352704 (TRBV7-3, TRBJ2-2)
CASSSGGYTGELFF

SEQ ID NO: 705409 - protein, 13 aa, Homo sapiens
  CDR3 for alpha chain variable domain of TCR clone 352705 (TRAV21, TRAJ20)
CAVGLMVDYKPSF

SEQ ID NO: 705410 - protein, 15 aa, Homo sapiens
  CDR3 for beta chain variable domain of TCR clone 352705 (TRBV29-1, TRBJ2-1)
CSVPTGLALYNEQFF

SEQ ID NO: 705411 - protein, 18 aa, Homo sapiens
  CDR3 for alpha chain variable domain of TCR clone 352706 (TRAV21, TRAJ52)
RAVRPSPAGGTSYGKRTF

SEQ ID NO: 705412 - protein, 15 aa, Homo sapiens
  CDR3 for beta chain variable domain of TCR clone 352706 (TRBV19, TRBJ1-1)
CASTPGQIQNTEAFF

SEQ ID NO: 705413 - protein, 15 aa, Homo sapiens
  CDR3 for alpha chain variable domain of TCR clone 352707 (TRAV26-2, TRAJ28)
CILVESGAGSYQLTF

SEQ ID NO: 705414 - protein, 11 aa, Homo sapiens
  CDR3 for beta chain variable domain of TCR clone 352707 (TRBV25-1, TRBJ2-7)
CASSTAYEQYF

SEQ ID NO: 705415 - protein, 13 aa, Homo sapiens
  CDR3 for alpha chain variable domain of TCR clone 352708 (TRAV1-1, TRAJ11)
CAVLNSGYSTLTF

SEQ ID NO: 705416 - protein, 17 aa, Homo sapiens
  CDR3 for beta chain variable domain of TCR clone 352708 (TRBV6-3, TRBJ2-2)
CASSYAGQGSNTGELFF

SEQ ID NO: 705417 - protein, 13 aa, Homo sapiens
  CDR3 for alpha chain variable domain of TCR clone 352709 (TRAV2, TRAJ24)
CAVTTDSWGNCSL

SEQ ID NO: 705418 - protein, 14 aa, Homo sapiens
  CDR3 for beta chain variable domain of TCR clone 352709 (TRBV13, TRBJ2-5)
CASSLGRGQETQYF

SEQ ID NO: 705419 - protein, 14 aa, Homo sapiens
  CDR3 for alpha chain variable domain of TCR clone 352710 (TRAV16, TRAJ33)
CALSAMDSNYQLIW

SEQ ID NO: 705420 - protein, 15 aa, Homo sapiens
  CDR3 for beta chain variable domain of TCR clone 352710 (TRBV27, TRBJ2-1)
CASSNGGGSSNEQFF

SEQ ID NO: 705421 - protein, 18 aa, Homo sapiens
  CDR3 for alpha chain variable domain of TCR clone 352711 (TRAV26-2, TRAJ54)
CNLRDVEVGIQGAQKLVF

SEQ ID NO: 705422 - protein, 16 aa, Homo sapiens
  CDR3 for beta chain variable domain of TCR clone 352711 (TRBV6-1, TRBJ2-5)
CASSETLDRGAETQYF

SEQ ID NO: 705423 - protein, 15 aa, Homo sapiens
  CDR3 for alpha chain variable domain of TCR clone 352712 (TRAV8-3, TRAJ7)
CAVGSISYGNNRLAF

SEQ ID NO: 705424 - protein, 15 aa, Homo sapiens
  CDR3 for beta chain variable domain of TCR clone 352712 (TRBV4-2, TRBJ1-2)
CASSLEGVQRNGYTF

SEQ ID NO: 705425 - protein, 15 aa, Homo sapiens
  CDR3 for alpha chain variable domain of TCR clone 352713 (TRAV8-4, TRAJ48)
CAVSAAYFGNEKLTF

SEQ ID NO: 705426 - protein, 14 aa, Homo sapiens
  CDR3 for beta chain variable domain of TCR clone 352713 (TRBV7-2, TRBJ2-7)
CASRSQGAAYEQYF

SEQ ID NO: 705427 - protein, 14 aa, Homo sapiens
  CDR3 for alpha chain variable domain of TCR clone 352714 (TRAV12-1, TRAJ17)
CVVNPKAAGNKLTF

SEQ ID NO: 705428 - protein, 12 aa, Homo sapiens
  CDR3 for beta chain variable domain of TCR clone 352714 (TRBV19, TRBJ2-1)
CASSRQGAEQFF

SEQ ID NO: 705429 - protein, 11 aa, Homo sapiens
  CDR3 for alpha chain variable domain of TCR clone 352715 (TRAV3, TRAJ21)
CAVGNFNKFYF

SEQ ID NO: 705430 - protein, 11 aa, Homo sapiens
  CDR3 for beta chain variable domain of TCR clone 352715 (TRBV2, TRBJ2-2)
CASSPYGELFF

SEQ ID NO: 705431 - protein, 14 aa, Homo sapiens
  CDR3 for alpha chain variable domain of TCR clone 352716 (TRAV1-2, TRAJ16)
CAVNRFSDGQKLLF

SEQ ID NO: 705432 - protein, 13 aa, Homo sapiens
  CDR3 for beta chain variable domain of TCR clone 352716 (TRBV12-5, TRBJ2-3)
CASQNRGTDTQYF

SEQ ID NO: 705433 - protein, 19 aa, Homo sapiens
  CDR3 for alpha chain variable domain of TCR clone 352717 (TRAV13-1, TRAJ52)
CAASSSPNAGGTSYGKLTF

SEQ ID NO: 705434 - protein, 15 aa, Homo sapiens
  CDR3 for beta chain variable domain of TCR clone 352717 (TRBV9, TRBJ1-6)
CASSTGGGVDPPLHF

SEQ ID NO: 705435 - protein, 14 aa, Homo sapiens
  CDR3 for alpha chain variable domain of TCR clone 352718 (TRAV12-2, TRAJ13)
RAVKKTGGYQKVTF

SEQ ID NO: 705436 - protein, 15 aa, Homo sapiens
  CDR3 for beta chain variable domain of TCR clone 352718 (TRBV28, TRBJ2-5)
CASSPPWSYQETQYF

SEQ ID NO: 705437 - protein, 14 aa, Homo sapiens
  CDR3 for alpha chain variable domain of TCR clone 352719 (TRAV3, TRAJ21)
CAVESQANLNKFYF

SEQ ID NO: 705438 - protein, 12 aa, Homo sapiens
  CDR3 for beta chain variable domain of TCR clone 352719 (TRBV6-3, TRBJ2-7)
CASSLTPYEQYF

SEQ ID NO: 705439 - protein, 14 aa, Homo sapiens
  CDR3 for alpha chain variable domain of TCR clone 352720 (TRAV13-1, TRAJ40)
CAASRASGTYKPIF

SEQ ID NO: 705440 - protein, 13 aa, Homo sapiens
  CDR3 for beta chain variable domain of TCR clone 352720 (TRBV29-1, TRBJ2-7)
CSVGRTGGYEQYF

SEQ ID NO: 705441 - protein, 16 aa, Homo sapiens
  CDR3 for alpha chain variable domain of TCR clone 352721 (TRAV17, TRAJ52)
CATSNAGGTSYGKLTF

SEQ ID NO: 705442 - protein, 13 aa, Homo sapiens
  CDR3 for beta chain variable domain of TCR clone 352721 (TRBV7-3, TRBJ1-2)
CASSLKRGYGYTF

SEQ ID NO: 705443 - protein, 16 aa, Homo sapiens
  CDR3 for alpha chain variable domain of TCR clone 352722 (TRAV12-3, TRAJ53)
CALSPGSGGSNYKLAF

SEQ ID NO: 705444 - protein, 13 aa, Homo sapiens
  CDR3 for beta chain variable domain of TCR clone 352722 (TRBV9, TRBJ2-7)
CASSVAEYYEQYF

SEQ ID NO: 705445 - protein, 12 aa, Homo sapiens
  CDR3 for alpha chain variable domain of TCR clone 352723 (TRAV8-2, TRAJ45)
CVQGGGADGLTF

SEQ ID NO: 705446 - protein, 16 aa, Homo sapiens
  CDR3 for beta chain variable domain of TCR clone 352723 (TRBV5-7, TRBJ1-2)
CASSRGVTGGSYGYTF

SEQ ID NO: 705447 - protein, 14 aa, Homo sapiens
  CDR3 for alpha chain variable domain of TCR clone 352724 (TRAV6, TRAJ40)
CALDATSGPYKYIF

SEQ ID NO: 705448 - protein, 16 aa, Homo sapiens
  CDR3 for beta chain variable domain of TCR clone 352724 (TRBV7-8, TRBJ2-5)
CASSPAGGRNQETQYF

SEQ ID NO: 705449 - protein, 13 aa, Homo sapiens
  CDR3 for alpha chain variable domain of TCR clone 352725 (TRAV24, TRAJ44)
CALLTGTASKLTI

SEQ ID NO: 705450 - protein, 16 aa, Homo sapiens
  CDR3 for beta chain variable domain of TCR clone 352725 (TRBV11-2, TRBJ1-1)
CASSLRQGGEHSKAFF

SEQ ID NO: 705451 - protein, 15 aa, Homo sapiens
  CDR3 for alpha chain variable domain of TCR clone 352726 (TRAV26-2, TRAJ38)
CILYNAGNNHIQNPD

SEQ ID NO: 705452 - protein, 16 aa, Homo sapiens
  CDR3 for beta chain variable domain of TCR clone 352726 (TRBV12-5, TRBJ2-5)
CASGPRTSGKQETQYF

SEQ ID NO: 705453 - protein, 16 aa, Homo sapiens
  CDR3 for alpha chain variable domain of TCR clone 352727 (TRAV26-1, TRAJ32)
CIVRTNYGGATNKLIF

SEQ ID NO: 705454 - protein, 14 aa, Homo sapiens
  CDR3 for beta chain variable domain of TCR clone 352727 (TRBV9, TRBJ2-7)
CASSVGVGSYEQYF

SEQ ID NO: 705455 - protein, 16 aa, Homo sapiens
  CDR3 for alpha chain variable domain of TCR clone 352728 (TRAV30, TRAJ24)
CGTEIVDADSWGKFQF

SEQ ID NO: 705456 - protein, 17 aa, Homo sapiens
  CDR3 for beta chain variable domain of TCR clone 352728 (TRBV12-4, TRBJ2-5)
CASSLSSTTGGRETQYF

SEQ ID NO: 705457 - protein, 16 aa, Homo sapiens
  CDR3 for alpha chain variable domain of TCR clone 352729 (TRAV21, TRAJ37)
CAVRTAGSSNKGKLIF

SEQ ID NO: 705458 - protein, 13 aa, Homo sapiens
  CDR3 for beta chain variable domain of TCR clone 352729 (TRBV7-9, TRBJ2-5)
CGSLPSGRETQYF

SEQ ID NO: 705459 - protein, 15 aa, Homo sapiens
  CDR3 for alpha chain variable domain of TCR clone 352730 (TRAV9-2, TRAJ8)
CALRGLNTGFQKLVF

SEQ ID NO: 705460 - protein, 13 aa, Homo sapiens
  CDR3 for beta chain variable domain of TCR clone 352730 (TRBV20-1, TRBJ2-2)
CSASAAGTGELFF

SEQ ID NO: 705461 - protein, 13 aa, Homo sapiens
  CDR3 for alpha chain variable domain of TCR clone 352731 (TRAV12-1, TRAJ38)
CVVPAGNNRKLIW

SEQ ID NO: 705462 - protein, 16 aa, Homo sapiens
  CDR3 for beta chain variable domain of TCR clone 352731 (TRBV4-1, TRBJ2-7)
CASSQNDRDNSYEQYF

SEQ ID NO: 705463 - protein, 12 aa, Homo sapiens
  CDR3 for alpha chain variable domain of TCR clone 352732 (TRAV16, TRAJ10)
CSRTGGGNRLTF

SEQ ID NO: 705464 - protein, 15 aa, Homo sapiens
  CDR3 for beta chain variable domain of TCR clone 352732 (TRBV6-3, TRBJ2-7)
CASGSPGTVFYEQYF

SEQ ID NO: 705465 - protein, 12 aa, Homo sapiens
  CDR3 for alpha chain variable domain of TCR clone 352733 (TRAV27, TRAJ41)
CAGRNSGYSLNF

SEQ ID NO: 705466 - protein, 15 aa, Homo sapiens
  CDR3 for beta chain variable domain of TCR clone 352733 (TRBV20-1, TRBJ1-5)
CSAPSDRGLGQPQHF

SEQ ID NO: 705467 - protein, 18 aa, Homo sapiens
  CDR3 for alpha chain variable domain of TCR clone 352734 (TRAV29/DV5, TRAJ52)
CAAGFRGAGGTSYGKLTF

SEQ ID NO: 705468 - protein, 20 aa, Homo sapiens
  CDR3 for beta chain variable domain of TCR clone 352734 (TRBV28, TRBJ2-1)
CASTPIGRSPGLAGGNEQFF

SEQ ID NO: 705469 - protein, 13 aa, Homo sapiens
  CDR3 for alpha chain variable domain of TCR clone 352735 (TRAV1-2, TRAJ9)
CAALNTGGFKTIF

SEQ ID NO: 705470 - protein, 15 aa, Homo sapiens
  CDR3 for beta chain variable domain of TCR clone 352735 (TRBV7-2, TRBJ1-2)
CASSPRAGWNYGYTF

SEQ ID NO: 705471 - protein, 15 aa, Homo sapiens
  CDR3 for alpha chain variable domain of TCR clone 352736 (TRAV12-3, TRAJ6)
CAMSATTGGSYIPTF

SEQ ID NO: 705472 - protein, 13 aa, Homo sapiens
  CDR3 for beta chain variable domain of TCR clone 352736 (TRBV20-1, TRBJ2-7)
CSATPWRRYEQYF

SEQ ID NO: 705473 - protein, 15 aa, Homo sapiens
  CDR3 for alpha chain variable domain of TCR clone 352737 (TRAV20, TRAJ4)
CAVQVFSGGYNKLIF

SEQ ID NO: 705474 - protein, 14 aa, Homo sapiens
  CDR3 for beta chain variable domain of TCR clone 352737 (TRBV19, TRBJ2-1)
CASPTFVLSGEQFF

SEQ ID NO: 705475 - protein, 15 aa, Homo sapiens
  CDR3 for alpha chain variable domain of TCR clone 352738 (TRAV8-2, TRAJ13)
CVVSDLSGGYQKVTF

SEQ ID NO: 705476 - protein, 16 aa, Homo sapiens
  CDR3 for beta chain variable domain of TCR clone 352738 (TRBV27, TRBJ2-2)
CASSFRGLVRTGEMFF

SEQ ID NO: 705477 - protein, 15 aa, Homo sapiens
  CDR3 for alpha chain variable domain of TCR clone 352739 (TRAV21, TRAJ37)
CAVRPTLSNTGKLIF

SEQ ID NO: 705478 - protein, 16 aa, Homo sapiens
  CDR3 for beta chain variable domain of TCR clone 352739 (TRBV24-1, TRBJ2-3)
CATSNRRQDLTDTQYF

SEQ ID NO: 705479 - protein, 12 aa, Homo sapiens
  CDR3 for alpha chain variable domain of TCR clone 352740 (TRAV12-3, TRAJ17)
CAMTLTGNKLTF

SEQ ID NO: 705480 - protein, 20 aa, Homo sapiens
  CDR3 for beta chain variable domain of TCR clone 352740 (TRBV28, TRBJ2-1)
CASSPIGRSPGLAGGNEQFF

SEQ ID NO: 705481 - protein, 18 aa, Homo sapiens
  CDR3 for alpha chain variable domain of TCR clone 352741 (TRAV26-1, TRAJ23)
CIVRVGLEVWHQGGKLIF

SEQ ID NO: 705482 - protein, 14 aa, Homo sapiens
  CDR3 for beta chain variable domain of TCR clone 352741 (TRBV7-6, TRBJ2-3)
CASSLGTVTDTQYF

SEQ ID NO: 705483 - protein, 18 aa, Homo sapiens
  CDR3 for alpha chain variable domain of TCR clone 352742 (TRAV21, TRAJ53)
CAVKGGENSGGSNYKLTF

SEQ ID NO: 705484 - protein, 14 aa, Homo sapiens
  CDR3 for beta chain variable domain of TCR clone 352742 (TRBV7-2, TRBJ2-7)
CASRSQGAAYEQYF

SEQ ID NO: 705485 - protein, 17 aa, Homo sapiens
  CDR3 for alpha chain variable domain of TCR clone 352743 (TRAV13-1, TRAJ52)
CSKQKECCGTSYGKLTF

SEQ ID NO: 705486 - protein, 13 aa, Homo sapiens
  CDR3 for beta chain variable domain of TCR clone 352743 (TRBV12-4, TRBJ1-2)
CASSLRQGKGYTF

SEQ ID NO: 705487 - protein, 17 aa, Homo sapiens
  CDR3 for alpha chain variable domain of TCR clone 352744 (TRAV3, TRAJ42)
CAVRDRDYGGSQGNLIF

SEQ ID NO: 705488 - protein, 15 aa, Homo sapiens
  CDR3 for beta chain variable domain of TCR clone 352744 (TRBV11-3, TRBJ1-6)
CASSFGQGFRSPLHF

SEQ ID NO: 705489 - protein, 15 aa, Homo sapiens
  CDR3 for alpha chain variable domain of TCR clone 352745 (TRAV17, TRAJ57)
CATGPSQGGSEKLVF

SEQ ID NO: 705490 - protein, 11 aa, Homo sapiens
  CDR3 for beta chain variable domain of TCR clone 352745 (TRBV7-2, TRBJ2-3)
CASSSSDTQYF

SEQ ID NO: 705491 - protein, 16 aa, Homo sapiens
  CDR3 for alpha chain variable domain of TCR clone 352746 (TRAV8-1, TRAJ39)
CAVNVPPYNAGNMLTF

SEQ ID NO: 705492 - protein, 15 aa, Homo sapiens
  CDR3 for beta chain variable domain of TCR clone 352746 (TRBV4-1, TRBJ2-3)
CASRSTRAGTDTQYF

SEQ ID NO: 705493 - protein, 12 aa, Homo sapiens
  CDR3 for alpha chain variable domain of TCR clone 352747 (TRAV26-1, TRAJ17)
CISQSCRQPANF

SEQ ID NO: 705494 - protein, 16 aa, Homo sapiens
  CDR3 for beta chain variable domain of TCR clone 352747 (TRBV28, TRBJ1-4)
CASSSRTGAANEKLFF

SEQ ID NO: 705495 - protein, 14 aa, Homo sapiens
  CDR3 for alpha chain variable domain of TCR clone 352748 (TRAV8-2, TRAJ37)
CVVSSSGNTGKLIF

SEQ ID NO: 705496 - protein, 16 aa, Homo sapiens
  CDR3 for beta chain variable domain of TCR clone 352748 (TRBV5-1, TRBJ1-1)
CASSSGGNSLNTEAFF

SEQ ID NO: 705497 - protein, 14 aa, Homo sapiens
  CDR3 for alpha chain variable domain of TCR clone 352749 (TRAV12-2, TRAJ17)
CAVLFKAAGNKLTF

SEQ ID NO: 705498 - protein, 16 aa, Homo sapiens
  CDR3 for beta chain variable domain of TCR clone 352749 (TRBV10-3, TRBJ2-1)
CAISGVGDGGGGEQFF

SEQ ID NO: 705499 - protein, 14 aa, Homo sapiens
  CDR3 for alpha chain variable domain of TCR clone 352750 (TRAV26-1, TRAJ29)
CIVRVEGSGNTPLF

SEQ ID NO: 705500 - protein, 15 aa, Homo sapiens
  CDR3 for beta chain variable domain of TCR clone 352750 (TRBV7-9, TRBJ1-5)
CASSQGHQPNQPQHF

SEQ ID NO: 705501 - protein, 13 aa, Homo sapiens
  CDR3 for alpha chain variable domain of TCR clone 352751 (TRAV13-2, TRAJ5)
CAVMETGRRALTF

SEQ ID NO: 705502 - protein, 12 aa, Homo sapiens
  CDR3 for beta chain variable domain of TCR clone 352751 (TRBV28, TRBJ2-7)
CANSFSSYEQYF

SEQ ID NO: 705503 - protein, 13 aa, Homo sapiens
  CDR3 for alpha chain variable domain of TCR clone 352752 (TRAV27, TRAJ6)
CAGGTRGSYIPTF

SEQ ID NO: 705504 - protein, 15 aa, Homo sapiens
  CDR3 for beta chain variable domain of TCR clone 352752 (TRBV5-7, TRBJ2-7)
CASSLGPCRGHEQYF

SEQ ID NO: 705505 - protein, 16 aa, Homo sapiens
  CDR3 for alpha chain variable domain of TCR clone 352753 (TRAV4, TRAJ18)
CCVLLIGGSTLGRLHF

SEQ ID NO: 705506 - protein, 12 aa, Homo sapiens
  CDR3 for beta chain variable domain of TCR clone 352753 (TRBV6-3, TRBJ2-7)
CASSLTPYEQYF

SEQ ID NO: 705507 - protein, 22 aa, Homo sapiens
  CDR3 for alpha chain variable domain of TCR clone 352754 (TRAV40, )
CLLGDGIPDIQNPDPALYQLRD

SEQ ID NO: 705508 - protein, 16 aa, Homo sapiens
  CDR3 for beta chain variable domain of TCR clone 352754 (TRBV20-1, TRBJ1-5)
CSAELPGQQTNQPQHF

SEQ ID NO: 705509 - protein, 16 aa, Homo sapiens
  CDR3 for alpha chain variable domain of TCR clone 352755 (TRAV30, TRAJ24)
RGTEIVDADSWGKFQF

SEQ ID NO: 705510 - protein, 14 aa, Homo sapiens
  CDR3 for beta chain variable domain of TCR clone 352755 (TRBV12-5, TRBJ2-5)
CVSGSRTHQETQYF

SEQ ID NO: 705511 - protein, 15 aa, Homo sapiens
  CDR3 for alpha chain variable domain of TCR clone 352756 (TRAV17, TRAJ45)
TSVLRTGGGAEGLTF

SEQ ID NO: 705512 - protein, 15 aa, Homo sapiens
  CDR3 for beta chain variable domain of TCR clone 352756 (TRBV5-7, TRBJ1-5)
CASSHGKLWDQPQHF

SEQ ID NO: 705513 - protein, 14 aa, Homo sapiens
  CDR3 for alpha chain variable domain of TCR clone 352757 (TRAV12-1, TRAJ12)
CVVISMDSSYKLIF

SEQ ID NO: 705514 - protein, 14 aa, Homo sapiens
  CDR3 for beta chain variable domain of TCR clone 352757 (TRBV7-6, TRBJ2-3)
CASSLGTVTDTQYF

SEQ ID NO: 705515 - protein, 11 aa, Homo sapiens
  CDR3 for alpha chain variable domain of TCR clone 352758 (TRAV1-1, TRAJ23)
CAVRHGGKLIF

SEQ ID NO: 705516 - protein, 20 aa, Homo sapiens
  CDR3 for beta chain variable domain of TCR clone 352758 (TRBV7-8, TRBJ2-2)
CASSHLFPGPAIHITGELFF

SEQ ID NO: 705517 - protein, 14 aa, Homo sapiens
  CDR3 for alpha chain variable domain of TCR clone 352759 (TRAV3, TRAJ9)
CAVRLHTGGFKNIF

SEQ ID NO: 705518 - protein, 15 aa, Homo sapiens
  CDR3 for beta chain variable domain of TCR clone 352759 (TRBV7-2, TRBJ2-1)
CASSLASGRVNEQFF

SEQ ID NO: 705519 - protein, 12 aa, Homo sapiens
  CDR3 for alpha chain variable domain of TCR clone 352760 (TRAV13-1, TRAJ9)
CASHPGGFKTIF

SEQ ID NO: 705520 - protein, 13 aa, Homo sapiens
  CDR3 for beta chain variable domain of TCR clone 352760 (TRBV12-5, TRBJ2-3)
CASQNRGTDTQYF

SEQ ID NO: 705521 - protein, 14 aa, Homo sapiens
  CDR3 for alpha chain variable domain of TCR clone 352761 (TRAV8-3, TRAJ4)
CAVGASGGYNKLIF

SEQ ID NO: 705522 - protein, 11 aa, Homo sapiens
  CDR3 for beta chain variable domain of TCR clone 352761 (TRBV12-4, TRBJ2-3)
CASTATDTQYF

SEQ ID NO: 705523 - protein, 14 aa, Homo sapiens
  CDR3 for alpha chain variable domain of TCR clone 352762 (TRAV17, TRAJ35)
CATDRPGFGNVLHC

SEQ ID NO: 705524 - protein, 19 aa, Homo sapiens
  CDR3 for beta chain variable domain of TCR clone 352762 (TRBV11-3, TRBJ2-2)
CASSTRPGAKTTNSGELFF

SEQ ID NO: 705525 - protein, 14 aa, Homo sapiens
  CDR3 for alpha chain variable domain of TCR clone 352763 (TRAV23/DV6, TRAJ22)
CAASRPGSTRQLTF

SEQ ID NO: 705526 - protein, 13 aa, Homo sapiens
  CDR3 for beta chain variable domain of TCR clone 352763 (TRBV15, TRBJ1-6)
CATSGGLNSPLHF

SEQ ID NO: 705527 - protein, 11 aa, Homo sapiens
  CDR3 for alpha chain variable domain of TCR clone 352764 (TRAV13-1, TRAJ8)
CAARGFQKLVF

SEQ ID NO: 705528 - protein, 16 aa, Homo sapiens
  CDR3 for beta chain variable domain of TCR clone 352764 (TRBV19, TRBJ1-5)
CASSTRGTRSNQAQHF

SEQ ID NO: 705529 - protein, 14 aa, Homo sapiens
  CDR3 for alpha chain variable domain of TCR clone 352765 (TRAV26-1, TRAJ39)
CIVRGSRAGTMLTF

SEQ ID NO: 705530 - protein, 14 aa, Homo sapiens
  CDR3 for beta chain variable domain of TCR clone 352765 (TRBV25-1, TRBJ1-1)
CASTHLGGNTEAFF

SEQ ID NO: 705531 - protein, 17 aa, Homo sapiens
  CDR3 for alpha chain variable domain of TCR clone 352766 (TRAV3, TRAJ6)
CAVRDGPRAGGGYIPTF

SEQ ID NO: 705532 - protein, 14 aa, Homo sapiens
  CDR3 for beta chain variable domain of TCR clone 352766 (TRBV28, TRBJ2-2)
CASSMQGYTGELFF

SEQ ID NO: 705533 - protein, 20 aa, Homo sapiens
  CDR3 for alpha chain variable domain of TCR clone 352767 (TRAV3, TRAJ7)
CAVREEEREQQTRCWEGEPS

SEQ ID NO: 705534 - protein, 12 aa, Homo sapiens
  CDR3 for beta chain variable domain of TCR clone 352767 (TRBV7-8, TRBJ2-7)
CASSLGDREQYF

SEQ ID NO: 705535 - protein, 13 aa, Homo sapiens
  CDR3 for alpha chain variable domain of TCR clone 352768 (TRAV12-2, TRAJ20)
CAVYPSNDYKLSF

SEQ ID NO: 705536 - protein, 15 aa, Homo sapiens
  CDR3 for beta chain variable domain of TCR clone 352768 (TRBV18, TRBJ1-2)
CASSPGNVPGYGYTF

SEQ ID NO: 705537 - protein, 13 aa, Homo sapiens
  CDR3 for alpha chain variable domain of TCR clone 352769 (TRAV26-1, TRAJ36)
CIVVGTGAHNLFF

SEQ ID NO: 705538 - protein, 13 aa, Homo sapiens
  CDR3 for beta chain variable domain of TCR clone 352769 (TRBV6-5, TRBJ2-6)
CASSTSGPLRPDF

SEQ ID NO: 705539 - protein, 18 aa, Homo sapiens
  CDR3 for alpha chain variable domain of TCR clone 352770 (TRAV21, TRAJ52)
CAVRPSPAGGTSCGKLTF

SEQ ID NO: 705540 - protein, 13 aa, Homo sapiens
  CDR3 for beta chain variable domain of TCR clone 352770 (TRBV20-1, TRBJ2-5)
CSAREAFQETQYF

SEQ ID NO: 705541 - protein, 15 aa, Homo sapiens
  CDR3 for alpha chain variable domain of TCR clone 352771 (TRAV4, TRAJ39)
CLVGPNNNAGNMLTF

SEQ ID NO: 705542 - protein, 14 aa, Homo sapiens
  CDR3 for beta chain variable domain of TCR clone 352771 (TRBV9, TRBJ2-3)
CASSNDWGRDTQYF

SEQ ID NO: 705543 - protein, 11 aa, Homo sapiens
  CDR3 for alpha chain variable domain of TCR clone 352772 (TRAV26-1, TRAJ37)
CIVRVGRKLIF

SEQ ID NO: 705544 - protein, 14 aa, Homo sapiens
  CDR3 for beta chain variable domain of TCR clone 352772 (TRBV5-1, TRBJ2-2)
CASSLVEGSGELFF

SEQ ID NO: 705545 - protein, 14 aa, Homo sapiens
  CDR3 for alpha chain variable domain of TCR clone 352773 (TRAV8-3, TRAJ21)
CAVDARDNFNKFYF

SEQ ID NO: 705546 - protein, 16 aa, Homo sapiens
  CDR3 for beta chain variable domain of TCR clone 352773 (TRBV20-1, TRBJ2-1)
CSARDLAGQSYNEQFV

SEQ ID NO: 705547 - protein, 14 aa, Homo sapiens
  CDR3 for alpha chain variable domain of TCR clone 352774 (TRAV13-1, TRAJ35)
CAASKGGFGNVLHC

SEQ ID NO: 705548 - protein, 16 aa, Homo sapiens
  CDR3 for beta chain variable domain of TCR clone 352774 (TRBV12-4, TRBJ1-5)
CASSRPVGGPNQPQHF

SEQ ID NO: 705549 - protein, 15 aa, Homo sapiens
  CDR3 for alpha chain variable domain of TCR clone 352775 (TRAV26-1, TRAJ40)
CIVRVTTSGTYKYIF

SEQ ID NO: 705550 - protein, 16 aa, Homo sapiens
  CDR3 for beta chain variable domain of TCR clone 352775 (TRBV2, TRBJ2-1)
CASSVGGSLSYNEQFF

SEQ ID NO: 705551 - protein, 11 aa, Homo sapiens
  CDR3 for alpha chain variable domain of TCR clone 352776 (TRAV5, TRAJ31)
CAESNNARLMV

SEQ ID NO: 705552 - protein, 12 aa, Homo sapiens
  CDR3 for beta chain variable domain of TCR clone 352776 (TRBV11-2, TRBJ2-1)
CASSPGNNEQFF

SEQ ID NO: 705553 - protein, 13 aa, Homo sapiens
  CDR3 for alpha chain variable domain of TCR clone 352777 (TRAV27, TRAJ6)
CAVGTRGSYIPTF

SEQ ID NO: 705554 - protein, 15 aa, Homo sapiens
  CDR3 for beta chain variable domain of TCR clone 352777 (TRBV11-2, TRBJ1-3)
CASSLSPLVRDTIYF

SEQ ID NO: 705555 - protein, 14 aa, Homo sapiens
  CDR3 for alpha chain variable domain of TCR clone 352778 (TRAV38-1, TRAJ40)
CALCPTSGTYKYIF

SEQ ID NO: 705556 - protein, 14 aa, Homo sapiens
  CDR3 for beta chain variable domain of TCR clone 352778 (TRBV19, TRBJ2-1)
CASPTFVLSGEQFF

SEQ ID NO: 705557 - protein, 14 aa, Homo sapiens
  CDR3 for alpha chain variable domain of TCR clone 352779 (TRAV21, TRAJ45)
CAVSSGGGADGLTF

SEQ ID NO: 705558 - protein, 14 aa, Homo sapiens
  CDR3 for beta chain variable domain of TCR clone 352779 (TRBV5-1, TRBJ2-7)
CASSRGESLYEQYF

SEQ ID NO: 705559 - protein, 19 aa, Homo sapiens
  CDR3 for alpha chain variable domain of TCR clone 352780 (TRAV29/DV5, TRAJ49)
CSVLLCSKLTVDTGNQFYF

SEQ ID NO: 705560 - protein, 15 aa, Homo sapiens
  CDR3 for beta chain variable domain of TCR clone 352780 (TRBV13, TRBJ2-3)
CASSVTSGSTDTQYF

SEQ ID NO: 705561 - protein, 13 aa, Homo sapiens
  CDR3 for alpha chain variable domain of TCR clone 352781 (TRAV13-1, TRAJ39)
CSKYSNAGNMLTF

SEQ ID NO: 705562 - protein, 14 aa, Homo sapiens
  CDR3 for beta chain variable domain of TCR clone 352781 (TRBV7-7, TRBJ2-2)
CASSTRASGGELFF

SEQ ID NO: 705563 - protein, 15 aa, Homo sapiens
  CDR3 for alpha chain variable domain of TCR clone 352782 (TRAV2, TRAJ37)
CAVGDGSSNTGKLIF

SEQ ID NO: 705564 - protein, 13 aa, Homo sapiens
  CDR3 for beta chain variable domain of TCR clone 352782 (TRBV20-1, TRBJ2-7)
CSAQTGLAYEQYF

SEQ ID NO: 705565 - protein, 12 aa, Homo sapiens
  CDR3 for alpha chain variable domain of TCR clone 352783 (TRAV3, TRAJ31)
CAVRDGNARLLF

SEQ ID NO: 705566 - protein, 18 aa, Homo sapiens
  CDR3 for beta chain variable domain of TCR clone 352783 (TRBV7-2, TRBJ2-3)
CASSLRREGSGITDTQYF

SEQ ID NO: 705567 - protein, 21 aa, Homo sapiens
  CDR3 for alpha chain variable domain of TCR clone 352784 (TRAV8-3, TRAJ6)
CAVGGEAATYLHLEEEPALLF

SEQ ID NO: 705568 - protein, 14 aa, Homo sapiens
  CDR3 for beta chain variable domain of TCR clone 352784 (TRBV5-1, TRBJ2-7)
CASSRGESLYEQYF

SEQ ID NO: 705569 - protein, 13 aa, Homo sapiens
  CDR3 for alpha chain variable domain of TCR clone 352785 (TRAV17, TRAJ9)
CATDYTGGFKTIF

SEQ ID NO: 705570 - protein, 13 aa, Homo sapiens
  CDR3 for beta chain variable domain of TCR clone 352785 (TRBV11-2, TRBJ2-5)
CASSFSSQETQYF

SEQ ID NO: 705571 - protein, 11 aa, Homo sapiens
  CDR3 for alpha chain variable domain of TCR clone 352786 (TRAV1-2, TRAJ20)
CSVANDYKLSF

SEQ ID NO: 705572 - protein, 18 aa, Homo sapiens
  CDR3 for beta chain variable domain of TCR clone 352786 (TRBV20-1, TRBJ2-6)
CSAETTPTHGSGANVLTL

SEQ ID NO: 705573 - protein, 12 aa, Homo sapiens
  CDR3 for alpha chain variable domain of TCR clone 352787 (TRAV13-1, TRAJ21)
CAAKEGFNKFYF

SEQ ID NO: 705574 - protein, 16 aa, Homo sapiens
  CDR3 for beta chain variable domain of TCR clone 352787 (TRBV11-3, TRBJ2-5)
CASSSVVAGSTETQYF

SEQ ID NO: 705575 - protein, 13 aa, Homo sapiens
  CDR3 for alpha chain variable domain of TCR clone 352788 (TRAV12-1, TRAJ33)
CVVNRKSNYQLIW

SEQ ID NO: 705576 - protein, 12 aa, Homo sapiens
  CDR3 for beta chain variable domain of TCR clone 352788 (TRBV11-2, TRBJ2-2)
CASSLGGGELFF

SEQ ID NO: 705577 - protein, 16 aa, Homo sapiens
  CDR3 for alpha chain variable domain of TCR clone 352789 (TRAV3, TRAJ37)
CAVRPHGSGNTGKLIF

SEQ ID NO: 705578 - protein, 12 aa, Homo sapiens
  CDR3 for beta chain variable domain of TCR clone 352789 (TRBV14, TRBJ2-7)
CASSLNQRGQHF

SEQ ID NO: 705579 - protein, 14 aa, Homo sapiens
  CDR3 for alpha chain variable domain of TCR clone 352790 (TRAV16, TRAJ54)
CALSLILGAQKLVS

SEQ ID NO: 705580 - protein, 15 aa, Homo sapiens
  CDR3 for beta chain variable domain of TCR clone 352790 (TRBV20-1, TRBJ2-7)
CSARDRVSGMDEQYF

SEQ ID NO: 705581 - protein, 14 aa, Homo sapiens
  CDR3 for alpha chain variable domain of TCR clone 352791 (TRAV1-2, TRAJ16)
CAVNRFSDGQKMLF

SEQ ID NO: 705582 - protein, 13 aa, Homo sapiens
  CDR3 for beta chain variable domain of TCR clone 352791 (TRBV20-1, TRBJ2-2)
CSALSGGAGELFF

SEQ ID NO: 705583 - protein, 12 aa, Homo sapiens
  CDR3 for alpha chain variable domain of TCR clone 352792 (TRAV23/DV6, TRAJ49)
CAATYPGNQFYF

SEQ ID NO: 705584 - protein, 17 aa, Homo sapiens
  CDR3 for beta chain variable domain of TCR clone 352792 (TRBV4-1, TRBJ2-3)
CASSQVLQGGGTDTQYF

SEQ ID NO: 705585 - protein, 14 aa, Homo sapiens
  CDR3 for alpha chain variable domain of TCR clone 352793 (TRAV8-1, TRAJ13)
CAVKSSGGYQKVTF

SEQ ID NO: 705586 - protein, 15 aa, Homo sapiens
  CDR3 for beta chain variable domain of TCR clone 352793 (TRBV11-2, TRBJ2-1)
CASSSPSTRYNEQFF

SEQ ID NO: 705587 - protein, 15 aa, Homo sapiens
  CDR3 for alpha chain variable domain of TCR clone 352794 (TRAV3, TRAJ3)
FAVRDGHSSASKIIF

SEQ ID NO: 705588 - protein, 14 aa, Homo sapiens
  CDR3 for beta chain variable domain of TCR clone 352794 (TRBV28, TRBJ1-4)
CASSFGTFDEKLFF

SEQ ID NO: 705589 - protein, 17 aa, Homo sapiens
  CDR3 for alpha chain variable domain of TCR clone 352795 (TRAV13-1, TRAJ52)
CAAGRNAGGTSYGKLTF

SEQ ID NO: 705590 - protein, 15 aa, Homo sapiens
  CDR3 for beta chain variable domain of TCR clone 352795 (TRBV6-3, TRBJ2-7)
CASSSPGTVYYEQYF

SEQ ID NO: 705591 - protein, 15 aa, Homo sapiens
  CDR3 for alpha chain variable domain of TCR clone 352796 (TRAV29/DV5, TRAJ42)
CAAKTDGVSQGNLIF

SEQ ID NO: 705592 - protein, 12 aa, Homo sapiens
  CDR3 for beta chain variable domain of TCR clone 352796 (TRBV11-2, TRBJ2-1)
CASSPGNNEQFF

SEQ ID NO: 705593 - protein, 14 aa, Homo sapiens
  CDR3 for alpha chain variable domain of TCR clone 352797 (TRAV23/DV6, TRAJ17)
CAASLGAAGNKLTF

SEQ ID NO: 705594 - protein, 12 aa, Homo sapiens
  CDR3 for beta chain variable domain of TCR clone 352797 (TRBV20-1, TRBJ2-5)
CSAGGAGETQYF

SEQ ID NO: 705595 - protein, 10 aa, Homo sapiens
  CDR3 for alpha chain variable domain of TCR clone 352798 (TRAV5, TRAJ34)
CAEDTDKLIF

SEQ ID NO: 705596 - protein, 14 aa, Homo sapiens
  CDR3 for beta chain variable domain of TCR clone 352798 (TRBV4-1, TRBJ2-2)
CASSQAVNTGELFF

SEQ ID NO: 705597 - protein, 13 aa, Homo sapiens
  CDR3 for alpha chain variable domain of TCR clone 352799 (TRAV17, TRAJ21)
CATDGGNFNKFYF

SEQ ID NO: 705598 - protein, 14 aa, Homo sapiens
  CDR3 for beta chain variable domain of TCR clone 352799 (TRBV7-3, TRBJ2-1)
RASSSRGSYNEQFF

SEQ ID NO: 705599 - protein, 18 aa, Homo sapiens
  CDR3 for alpha chain variable domain of TCR clone 352800 (TRAV13-1, TRAJ52)
CAASKRSAGGTSYGKLTF

SEQ ID NO: 705600 - protein, 18 aa, Homo sapiens
  CDR3 for beta chain variable domain of TCR clone 352800 (TRBV11-2, TRBJ2-3)
CASSLGGASRGAPNTQYF

SEQ ID NO: 705601 - protein, 15 aa, Homo sapiens
  CDR3 for alpha chain variable domain of TCR clone 352801 (TRAV26-1, TRAJ24)
CIVPLTTDSWGKFQF

SEQ ID NO: 705602 - protein, 14 aa, Homo sapiens
  CDR3 for beta chain variable domain of TCR clone 352801 (TRBV7-2, TRBJ2-1)
CASSRGGTYNEQFF

SEQ ID NO: 705603 - protein, 11 aa, Homo sapiens
  CDR3 for alpha chain variable domain of TCR clone 352802 (TRAV1-1, TRAJ23)
CAVRQGGKLIF

SEQ ID NO: 705604 - protein, 16 aa, Homo sapiens
  CDR3 for beta chain variable domain of TCR clone 352802 (TRBV2, TRBJ2-7)
CASSEPWTGPSYEQYF

SEQ ID NO: 705605 - protein, 16 aa, Homo sapiens
  CDR3 for alpha chain variable domain of TCR clone 352803 (TRAV26-1, TRAJ38)
CIVRPLNAGNNRQLIW

SEQ ID NO: 705606 - protein, 13 aa, Homo sapiens
  CDR3 for beta chain variable domain of TCR clone 352803 (TRBV18, TRBJ1-1)
CASSPNGDTEAFL

SEQ ID NO: 705607 - protein, 14 aa, Homo sapiens
  CDR3 for alpha chain variable domain of TCR clone 352804 (TRAV12-1, TRAJ8)
CVVNSNTGFQKLVF

SEQ ID NO: 705608 - protein, 17 aa, Homo sapiens
  CDR3 for beta chain variable domain of TCR clone 352804 (TRBV7-8, TRBJ2-6)
CASSAGTGGAGANVPTF

SEQ ID NO: 705609 - protein, 14 aa, Homo sapiens
  CDR3 for alpha chain variable domain of TCR clone 352805 (TRAV12-3, TRAJ9)
CAMSPNTGGFKTIF

SEQ ID NO: 705610 - protein, 13 aa, Homo sapiens
  CDR3 for beta chain variable domain of TCR clone 352805 (TRBV10-1, TRBJ2-1)
CASSAGPDNEQFF

SEQ ID NO: 705611 - protein, 15 aa, Homo sapiens
  CDR3 for alpha chain variable domain of TCR clone 352806 (TRAV17, TRAJ21)
CATDGSTSTNFTLDL

SEQ ID NO: 705612 - protein, 13 aa, Homo sapiens
  CDR3 for beta chain variable domain of TCR clone 352806 (TRBV11-3, TRBJ1-1)
CASTGSLNTEAFF

SEQ ID NO: 705613 - protein, 14 aa, Homo sapiens
  CDR3 for alpha chain variable domain of TCR clone 352807 (TRAV12-2, TRAJ13)
CAVKKTGGYQKVTF

SEQ ID NO: 705614 - protein, 13 aa, Homo sapiens
  CDR3 for beta chain variable domain of TCR clone 352807 (TRBV7-2, TRBJ2-1)
CASSLGVYNEQFF

SEQ ID NO: 705615 - protein, 14 aa, Homo sapiens
  CDR3 for alpha chain variable domain of TCR clone 352808 (TRAV27, TRAJ22)
CAGVVPDSARQLTF

SEQ ID NO: 705616 - protein, 14 aa, Homo sapiens
  CDR3 for beta chain variable domain of TCR clone 352808 (TRBV7-2, TRBJ2-1)
CASSRGGARNEQFF

SEQ ID NO: 705617 - protein, 13 aa, Homo sapiens
  CDR3 for alpha chain variable domain of TCR clone 352809 (TRAV20, TRAJ40)
CAVPFSGTYKYIF

SEQ ID NO: 705618 - protein, 14 aa, Homo sapiens
  CDR3 for beta chain variable domain of TCR clone 352809 (TRBV12-4, TRBJ2-7)
CASSFSGADYEQYF

SEQ ID NO: 705619 - protein, 14 aa, Homo sapiens
  CDR3 for alpha chain variable domain of TCR clone 352810 (TRAV8-6, TRAJ39)
CAVSERDAGNMLTC

SEQ ID NO: 705620 - protein, 17 aa, Homo sapiens
  CDR3 for beta chain variable domain of TCR clone 352810 (TRBV11-2, TRBJ2-1)
CASSLYPPGVEYNEQFF

SEQ ID NO: 705621 - protein, 13 aa, Homo sapiens
  CDR3 for alpha chain variable domain of TCR clone 352811 (TRAV20, TRAJ37)
CAGCSSNTGKLIF

SEQ ID NO: 705622 - protein, 14 aa, Homo sapiens
  CDR3 for beta chain variable domain of TCR clone 352811 (TRBV19, TRBJ2-7)
CASSIQEWSYEQYF

SEQ ID NO: 705623 - protein, 11 aa, Homo sapiens
  CDR3 for alpha chain variable domain of TCR clone 352812 (TRAV2, TRAJ13)
CASGGHQKVTF

SEQ ID NO: 705624 - protein, 15 aa, Homo sapiens
  CDR3 for beta chain variable domain of TCR clone 352812 (TRBV7-9, TRBJ1-6)
CASSSPGRGNSPLHF

SEQ ID NO: 705625 - protein, 13 aa, Homo sapiens
  CDR3 for alpha chain variable domain of TCR clone 352813 (TRAV30, TRAJ31)
CGTETRNNARLMF

SEQ ID NO: 705626 - protein, 16 aa, Homo sapiens
  CDR3 for beta chain variable domain of TCR clone 352813 (TRBV4-3, TRBJ2-2)
CASSHLQGSGTGELFF

SEQ ID NO: 705627 - protein, 10 aa, Homo sapiens
  CDR3 for alpha chain variable domain of TCR clone 352814 (TRAV13-1, TRAJ27)
CAPLARQFNL

SEQ ID NO: 705628 - protein, 13 aa, Homo sapiens
  CDR3 for beta chain variable domain of TCR clone 352814 (TRBV7-3, TRBJ1-1)
CASSQDWGAEAFF

SEQ ID NO: 705629 - protein, 17 aa, Homo sapiens
  CDR3 for alpha chain variable domain of TCR clone 352815 (TRAV3, TRAJ6)
CAVRDGPGAGGSYIPTF

SEQ ID NO: 705630 - protein, 19 aa, Homo sapiens
  CDR3 for beta chain variable domain of TCR clone 352815 (TRBV25-1, TRBJ2-2)
CAILVYRVDRGRKTGELFF

SEQ ID NO: 705631 - protein, 12 aa, Homo sapiens
  CDR3 for alpha chain variable domain of TCR clone 352816 (TRAV12-3, TRAJ17)
CAMTPTGNKLTF

SEQ ID NO: 705632 - protein, 15 aa, Homo sapiens
  CDR3 for beta chain variable domain of TCR clone 352816 (TRBV20-1, TRBJ2-7)
CSAGDRVSGMDEQYF

SEQ ID NO: 705633 - protein, 14 aa, Homo sapiens
  CDR3 for alpha chain variable domain of TCR clone 352817 (TRAV12-3, TRAJ10)
SHLPLTGGGNKLTF

SEQ ID NO: 705634 - protein, 15 aa, Homo sapiens
  CDR3 for beta chain variable domain of TCR clone 352817 (TRBV4-1, TRBJ2-1)
CASSQDPGNYNEQFF

SEQ ID NO: 705635 - protein, 12 aa, Homo sapiens
  CDR3 for alpha chain variable domain of TCR clone 352818 (TRAV36/DV7, TRAJ37)
CACYGNTGKLIF

SEQ ID NO: 705636 - protein, 13 aa, Homo sapiens
  CDR3 for beta chain variable domain of TCR clone 352818 (TRBV10-3, TRBJ2-7)
CASQLAVNYEQYF

SEQ ID NO: 705637 - protein, 11 aa, Homo sapiens
  CDR3 for alpha chain variable domain of TCR clone 352819 (TRAV2, TRAJ33)
CAVESNYQLIW

SEQ ID NO: 705638 - protein, 16 aa, Homo sapiens
  CDR3 for beta chain variable domain of TCR clone 352819 (TRBV3-1, TRBJ2-7)
CASSQGATGVAYEQYF

SEQ ID NO: 705639 - protein, 17 aa, Homo sapiens
  CDR3 for alpha chain variable domain of TCR clone 352820 (TRAV3, TRAJ12)
CDVRDGGRMDSSYKLIF

SEQ ID NO: 705640 - protein, 14 aa, Homo sapiens
  CDR3 for beta chain variable domain of TCR clone 352820 (TRBV7-9, TRBJ1-2)
CASSRQGANYGYTF

SEQ ID NO: 705641 - protein, 10 aa, Homo sapiens
  CDR3 for alpha chain variable domain of TCR clone 352821 (TRAV13-1, TRAJ27)
CAPLARQVNL

SEQ ID NO: 705642 - protein, 13 aa, Homo sapiens
  CDR3 for beta chain variable domain of TCR clone 352821 (TRBV28, TRBJ1-1)
CASSKQGWTEAFF

SEQ ID NO: 705643 - protein, 15 aa, Homo sapiens
  CDR3 for alpha chain variable domain of TCR clone 352822 (TRAV8-1, TRAJ23)
CAVNSHYNQGGKLIF

SEQ ID NO: 705644 - protein, 17 aa, Homo sapiens
  CDR3 for beta chain variable domain of TCR clone 352822 (TRBV5-7, TRBJ2-4)
CASSPGTGHLAKNIQYF

SEQ ID NO: 705645 - protein, 13 aa, Homo sapiens
  CDR3 for alpha chain variable domain of TCR clone 352823 (TRAV12-2, TRAJ10)
CAVPTGGGNKLTF

SEQ ID NO: 705646 - protein, 14 aa, Homo sapiens
  CDR3 for beta chain variable domain of TCR clone 352823 (TRBV7-6, TRBJ2-3)
CASSVAGGTDTQYF

SEQ ID NO: 705647 - protein, 11 aa, Homo sapiens
  CDR3 for alpha chain variable domain of TCR clone 352824 (TRAV12-1, TRAJ30)
CVVNGQDKIIF

SEQ ID NO: 705648 - protein, 15 aa, Homo sapiens
  CDR3 for beta chain variable domain of TCR clone 352824 (TRBV11-2, TRBJ1-6)
CASSLDPWAVSPLHF

SEQ ID NO: 705649 - protein, 14 aa, Homo sapiens
  CDR3 for alpha chain variable domain of TCR clone 352825 (TRAV29/DV5, TRAJ22)
CAASATGSARQLPF

SEQ ID NO: 705650 - protein, 14 aa, Homo sapiens
  CDR3 for beta chain variable domain of TCR clone 352825 (TRBV19, TRBJ2-1)
CASGPGLAPNEQFF

SEQ ID NO: 705651 - protein, 23 aa, Homo sapiens
  CDR3 for alpha chain variable domain of TCR clone 352826 (TRAV1-1, TRAJ29)
LLQELQMKDSASYFLGGNTPLVF

SEQ ID NO: 705652 - protein, 13 aa, Homo sapiens
  CDR3 for beta chain variable domain of TCR clone 352826 (TRBV25-1, TRBJ2-7)
CASSEDGDYEQYF

SEQ ID NO: 705653 - protein, 18 aa, Homo sapiens
  CDR3 for alpha chain variable domain of TCR clone 352827 (TRAV29/DV5, TRAJ52)
CAAGFRCAGVTSYGKLTF

SEQ ID NO: 705654 - protein, 13 aa, Homo sapiens
  CDR3 for beta chain variable domain of TCR clone 352827 (TRBV12-5, TRBJ2-3)
CASGDRQSDTQYF

SEQ ID NO: 705655 - protein, 14 aa, Homo sapiens
  CDR3 for alpha chain variable domain of TCR clone 352828 (TRAV1-2, TRAJ8)
CAVREDTGFQKLVF

SEQ ID NO: 705656 - protein, 16 aa, Homo sapiens
  CDR3 for beta chain variable domain of TCR clone 352828 (TRBV12-4, TRBJ1-5)
CASSRPVGGSNQPQHL

SEQ ID NO: 705657 - protein, 13 aa, Homo sapiens
  CDR3 for alpha chain variable domain of TCR clone 352829 (TRAV21, TRAJ27)
CAARPGNAGNSTF

SEQ ID NO: 705658 - protein, 14 aa, Homo sapiens
  CDR3 for beta chain variable domain of TCR clone 352829 (TRBV7-6, TRBJ2-3)
CASRLGTVTDTQYF

SEQ ID NO: 705659 - protein, 15 aa, Homo sapiens
  CDR3 for alpha chain variable domain of TCR clone 352830 (TRAV27, TRAJ38)
CAARRNAGNNRKLIW

SEQ ID NO: 705660 - protein, 14 aa, Homo sapiens
  CDR3 for beta chain variable domain of TCR clone 352830 (TRBV13, TRBJ1-1)
CASTVITVNTEAFF

SEQ ID NO: 705661 - protein, 13 aa, Homo sapiens
  CDR3 for alpha chain variable domain of TCR clone 352831 (TRAV29/DV5, TRAJ29)
RAASAAGNPPLVF

SEQ ID NO: 705662 - protein, 14 aa, Homo sapiens
  CDR3 for beta chain variable domain of TCR clone 352831 (TRBV19, TRBJ2-3)
CASSAPRGTDTQYF

SEQ ID NO: 705663 - protein, 12 aa, Homo sapiens
  CDR3 for alpha chain variable domain of TCR clone 352832 (TRAV21, TRAJ31)
CVLAGNNARLMF

SEQ ID NO: 705664 - protein, 16 aa, Homo sapiens
  CDR3 for beta chain variable domain of TCR clone 352832 (TRBV27, TRBJ2-5)
CASSFGSGGTKETQYF

SEQ ID NO: 705665 - protein, 15 aa, Homo sapiens
  CDR3 for alpha chain variable domain of TCR clone 352833 (TRAV21, TRAJ40)
CAVRPLTSGTYKYIF

SEQ ID NO: 705666 - protein, 13 aa, Homo sapiens
  CDR3 for beta chain variable domain of TCR clone 352833 (TRBV7-2, TRBJ2-2)
CASSSVRAGELFF

SEQ ID NO: 705667 - protein, 15 aa, Homo sapiens
  CDR3 for alpha chain variable domain of TCR clone 352834 (TRAV34, TRAJ38)
CGADFTPGNNRKLIW

SEQ ID NO: 705668 - protein, 16 aa, Homo sapiens
  CDR3 for beta chain variable domain of TCR clone 352834 (TRBV12-5, TRBJ2-5)
CASGPRTCGNQETQYF

SEQ ID NO: 705669 - protein, 12 aa, Homo sapiens
  CDR3 for alpha chain variable domain of TCR clone 352835 (TRAV12-3, TRAJ20)
CAMVRGDYKLSF

SEQ ID NO: 705670 - protein, 17 aa, Homo sapiens
  CDR3 for beta chain variable domain of TCR clone 352835 (TRBV7-6, TRBJ2-5)
CASSSPQAGDPSETQYF

SEQ ID NO: 705671 - protein, 16 aa, Homo sapiens
  CDR3 for alpha chain variable domain of TCR clone 352836 (TRAV21, TRAJ37)
CAVRPRGSNNTGKLIF

SEQ ID NO: 705672 - protein, 13 aa, Homo sapiens
  CDR3 for beta chain variable domain of TCR clone 352836 (TRBV7-9, TRBJ2-5)
CASLWPGQENQYF

SEQ ID NO: 705673 - protein, 11 aa, Homo sapiens
  CDR3 for alpha chain variable domain of TCR clone 352837 (TRAV20, TRAJ23)
CACNQGGKLIF

SEQ ID NO: 705674 - protein, 16 aa, Homo sapiens
  CDR3 for beta chain variable domain of TCR clone 352837 (TRBV7-8, TRBJ2-5)
CASSIGGQPAQETQYF

SEQ ID NO: 705675 - protein, 15 aa, Homo sapiens
  CDR3 for alpha chain variable domain of TCR clone 352838 (TRAV3, TRAJ3)
YAVRDMSSSASKIIF

SEQ ID NO: 705676 - protein, 14 aa, Homo sapiens
  CDR3 for beta chain variable domain of TCR clone 352838 (TRBV19, TRBJ2-1)
CASPTFVLSGEQFF

SEQ ID NO: 705677 - protein, 13 aa, Homo sapiens
  CDR3 for alpha chain variable domain of TCR clone 352839 (TRAV29/DV5, TRAJ47)
CAASEEYGNKLVF

SEQ ID NO: 705678 - protein, 17 aa, Homo sapiens
  CDR3 for beta chain variable domain of TCR clone 352839 (TRBV4-1, TRBJ1-4)
CASSQEGPRGVEEKLFF

SEQ ID NO: 705679 - protein, 14 aa, Homo sapiens
  CDR3 for alpha chain variable domain of TCR clone 352840 (TRAV12-2, TRAJ13)
CAVKKTGGYQKVTF

SEQ ID NO: 705680 - protein, 11 aa, Homo sapiens
  CDR3 for beta chain variable domain of TCR clone 352840 (TRBV24-1, TRBJ2-5)
CATSIGETQYF

SEQ ID NO: 705681 - protein, 13 aa, Homo sapiens
  CDR3 for alpha chain variable domain of TCR clone 352841 (TRAV17, TRAJ22)
CAHHSGSARQLTF

SEQ ID NO: 705682 - protein, 13 aa, Homo sapiens
  CDR3 for beta chain variable domain of TCR clone 352841 (TRBV7-3, TRBJ1-1)
CASSQDWGAEAFF

SEQ ID NO: 705683 - protein, 14 aa, Homo sapiens
  CDR3 for alpha chain variable domain of TCR clone 352842 (TRAV2, TRAJ24)
CAPSQLGEIADWSR

SEQ ID NO: 705684 - protein, 17 aa, Homo sapiens
  CDR3 for beta chain variable domain of TCR clone 352842 (TRBV5-1, TRBJ2-1)
CASSTGTSGYSYNEQFF

SEQ ID NO: 705685 - protein, 17 aa, Homo sapiens
  CDR3 for alpha chain variable domain of TCR clone 352843 (TRAV26-2, TRAJ37)
CILRELVGSSNTGKLIF

SEQ ID NO: 705686 - protein, 15 aa, Homo sapiens
  CDR3 for beta chain variable domain of TCR clone 352843 (TRBV7-3, TRBJ2-1)
CASSPTGGGEVEQFF

SEQ ID NO: 705687 - protein, 14 aa, Homo sapiens
  CDR3 for alpha chain variable domain of TCR clone 352844 (TRAV23/DV6, TRAJ24)
CAASLSDSWGKLQF

SEQ ID NO: 705688 - protein, 12 aa, Homo sapiens
  CDR3 for beta chain variable domain of TCR clone 352844 (TRBV12-4, TRBJ2-3)
CASSLGQDTQYF

SEQ ID NO: 705689 - protein, 16 aa, Homo sapiens
  CDR3 for alpha chain variable domain of TCR clone 352845 (TRAV30, TRAJ24)
CGTEIVDADSWGKFQF

SEQ ID NO: 705690 - protein, 14 aa, Homo sapiens
  CDR3 for beta chain variable domain of TCR clone 352845 (TRBV7-9, TRBJ2-4)
CASSLAMGGNNQYF

SEQ ID NO: 705691 - protein, 13 aa, Homo sapiens
  CDR3 for alpha chain variable domain of TCR clone 352846 (TRAV17, TRAJ9)
CATASTGGFKTIF

SEQ ID NO: 705692 - protein, 16 aa, Homo sapiens
  CDR3 for beta chain variable domain of TCR clone 352846 (TRBV7-7, TRBJ2-1)
CASSLASGTSYNEQFF

SEQ ID NO: 705693 - protein, 17 aa, Homo sapiens
  CDR3 for alpha chain variable domain of TCR clone 352847 (TRAV13-1, TRAJ52)
CAASLGASGTSYGKLKF

SEQ ID NO: 705694 - protein, 15 aa, Homo sapiens
  CDR3 for beta chain variable domain of TCR clone 352847 (TRBV2, TRBJ2-1)
CASSELAGSYNEQFF

SEQ ID NO: 705695 - protein, 15 aa, Homo sapiens
  CDR3 for alpha chain variable domain of TCR clone 352848 (TRAV26-1, TRAJ23)
CIVRVLNNQGGKLIF

SEQ ID NO: 705696 - protein, 13 aa, Homo sapiens
  CDR3 for beta chain variable domain of TCR clone 352848 (TRBV6-1, TRBJ1-1)
CASSRQGNTEAFF

SEQ ID NO: 705697 - protein, 15 aa, Homo sapiens
  CDR3 for alpha chain variable domain of TCR clone 352849 (TRAV3, TRAJ22)
CAVRDRGGSSRPLTF

SEQ ID NO: 705698 - protein, 13 aa, Homo sapiens
  CDR3 for beta chain variable domain of TCR clone 352849 (TRBV12-4, TRBJ1-2)
CASSLRQGKGYTF

SEQ ID NO: 705699 - protein, 10 aa, Homo sapiens
  CDR3 for alpha chain variable domain of TCR clone 352850 (TRAV1-2, TRAJ31)
CVSEDARRMF

SEQ ID NO: 705700 - protein, 13 aa, Homo sapiens
  CDR3 for beta chain variable domain of TCR clone 352850 (TRBV4-2, TRBJ1-1)
CASSQAGNTEAFF

SEQ ID NO: 705701 - protein, 14 aa, Homo sapiens
  CDR3 for alpha chain variable domain of TCR clone 352851 (TRAV8-4, TRAJ9)
CAVRLNTGGFKNIF

SEQ ID NO: 705702 - protein, 15 aa, Homo sapiens
  CDR3 for beta chain variable domain of TCR clone 352851 (TRBV10-2, TRBJ2-6)
CASSEQGTGANVLTF

SEQ ID NO: 705703 - protein, 14 aa, Homo sapiens
  CDR3 for alpha chain variable domain of TCR clone 352852 (TRAV3, TRAJ42)
CCETLGGSQGNLIF

SEQ ID NO: 705704 - protein, 14 aa, Homo sapiens
  CDR3 for beta chain variable domain of TCR clone 352852 (TRBV19, TRBJ2-5)
CDSSSSGIQETQYF

SEQ ID NO: 705705 - protein, 16 aa, Homo sapiens
  CDR3 for alpha chain variable domain of TCR clone 352853 (TRAV17, TRAJ52)
CATSNAGGTSYGKLTF

SEQ ID NO: 705706 - protein, 16 aa, Homo sapiens
  CDR3 for beta chain variable domain of TCR clone 352853 (TRBV27, TRBJ1-1)
CASSSRGRTGYTGAFF

SEQ ID NO: 705707 - protein, 14 aa, Homo sapiens
  CDR3 for alpha chain variable domain of TCR clone 352854 (TRAV13-1, TRAJ24)
CAASPADSWGKFQF

SEQ ID NO: 705708 - protein, 15 aa, Homo sapiens
  CDR3 for beta chain variable domain of TCR clone 352854 (TRBV19, TRBJ2-1)
CASSMGWNSNNEQFF

SEQ ID NO: 705709 - protein, 14 aa, Homo sapiens
  CDR3 for alpha chain variable domain of TCR clone 352855 (TRAV13-1, TRAJ26)
CAASSGHYGQNFFF

SEQ ID NO: 705710 - protein, 17 aa, Homo sapiens
  CDR3 for beta chain variable domain of TCR clone 352855 (TRBV25-1, TRBJ2-5)
CASSRRGGRGGQETQYF

SEQ ID NO: 705711 - protein, 13 aa, Homo sapiens
  CDR3 for alpha chain variable domain of TCR clone 352856 (TRAV17, TRAJ4)
CATKSGGYNNLIF

SEQ ID NO: 705712 - protein, 14 aa, Homo sapiens
  CDR3 for beta chain variable domain of TCR clone 352856 (TRBV20-1, TRBJ1-5)
CSARDDRGNQPQHF

SEQ ID NO: 705713 - protein, 15 aa, Homo sapiens
  CDR3 for alpha chain variable domain of TCR clone 352857 (TRAV2, TRAJ40)
CAVVTSGTYKYILEQ

SEQ ID NO: 705714 - protein, 14 aa, Homo sapiens
  CDR3 for beta chain variable domain of TCR clone 352857 (TRBV19, TRBJ2-1)
CASPTLVLSGEQFF

SEQ ID NO: 705715 - protein, 13 aa, Homo sapiens
  CDR3 for alpha chain variable domain of TCR clone 352858 (TRAV13-1, TRAJ20)
CAARVSNDYKLSF

SEQ ID NO: 705716 - protein, 15 aa, Homo sapiens
  CDR3 for beta chain variable domain of TCR clone 352858 (TRBV4-1, TRBJ2-5)
CASSQWDLYQETQYF

SEQ ID NO: 705717 - protein, 15 aa, Homo sapiens
  CDR3 for alpha chain variable domain of TCR clone 352859 (TRAV1-2, TRAJ6)
CAVRATSGGSYIPTF

SEQ ID NO: 705718 - protein, 15 aa, Homo sapiens
  CDR3 for beta chain variable domain of TCR clone 352859 (TRBV6-1, TRBJ2-3)
CASSERGGITDTQYF

SEQ ID NO: 705719 - protein, 15 aa, Homo sapiens
  CDR3 for alpha chain variable domain of TCR clone 352860 (TRAV14/DV4, TRAJ33)
CAMREGRDSNYQLIW

SEQ ID NO: 705720 - protein, 14 aa, Homo sapiens
  CDR3 for beta chain variable domain of TCR clone 352860 (TRBV19, TRBJ2-1)
CASPTFVLSGEQFF

SEQ ID NO: 705721 - protein, 12 aa, Homo sapiens
  CDR3 for alpha chain variable domain of TCR clone 352861 (TRAV36/DV7, TRAJ54)
CAVVRGAQKLVF

SEQ ID NO: 705722 - protein, 14 aa, Homo sapiens
  CDR3 for beta chain variable domain of TCR clone 352861 (TRBV7-3, TRBJ1-1)
CASSRKGGNTEAFF

SEQ ID NO: 705723 - protein, 14 aa, Homo sapiens
  CDR3 for alpha chain variable domain of TCR clone 352862 (TRAV12-2, TRAJ17)
CAVLSKAAGNKLTF

SEQ ID NO: 705724 - protein, 14 aa, Homo sapiens
  CDR3 for beta chain variable domain of TCR clone 352862 (TRBV19, TRBJ2-1)
CASPTFVLSGEQFF

SEQ ID NO: 705725 - protein, 13 aa, Homo sapiens
  CDR3 for alpha chain variable domain of TCR clone 352863 (TRAV35, TRAJ33)
CAGQLYDVYQLIW

SEQ ID NO: 705726 - protein, 14 aa, Homo sapiens
  CDR3 for beta chain variable domain of TCR clone 352863 (TRBV7-2, TRBJ1-1)
CASSLGGAGTGAFF

SEQ ID NO: 705727 - protein, 15 aa, Homo sapiens
  CDR3 for alpha chain variable domain of TCR clone 352864 (TRAV8-3, TRAJ27)
CAVGPSKTNAGKSPF

SEQ ID NO: 705728 - protein, 14 aa, Homo sapiens
  CDR3 for beta chain variable domain of TCR clone 352864 (TRBV11-2, TRBJ2-7)
CASSLGAGAYEQYF

SEQ ID NO: 705729 - protein, 16 aa, Homo sapiens
  CDR3 for alpha chain variable domain of TCR clone 352865 (TRAV26-1, TRAJ33)
CIVPFWGDDSNYQLIW

SEQ ID NO: 705730 - protein, 14 aa, Homo sapiens
  CDR3 for beta chain variable domain of TCR clone 352865 (TRBV6-3, TRBJ1-1)
CASSYHSKNTEAFF

SEQ ID NO: 705731 - protein, 15 aa, Homo sapiens
  CDR3 for alpha chain variable domain of TCR clone 352866 (TRAV23/DV6, TRAJ17)
CAASGYGAAGNKLTF

SEQ ID NO: 705732 - protein, 15 aa, Homo sapiens
  CDR3 for beta chain variable domain of TCR clone 352866 (TRBV13, TRBJ1-5)
CASSFGQGGVQPQHF

SEQ ID NO: 705733 - protein, 15 aa, Homo sapiens
  CDR3 for alpha chain variable domain of TCR clone 352867 (TRAV8-4, TRAJ37)
CAVSRGSGNTGNLIF

SEQ ID NO: 705734 - protein, 15 aa, Homo sapiens
  CDR3 for beta chain variable domain of TCR clone 352867 (TRBV5-1, TRBJ2-7)
CASSLDLTSSYEQYF

SEQ ID NO: 705735 - protein, 18 aa, Homo sapiens
  CDR3 for alpha chain variable domain of TCR clone 352868 (TRAV26-2, TRAJ45)
CILRLWGYSGGGADGLTF

SEQ ID NO: 705736 - protein, 17 aa, Homo sapiens
  CDR3 for beta chain variable domain of TCR clone 352868 (TRBV28, TRBJ2-3)
CDSSPTPAGGRVDTQYF

SEQ ID NO: 705737 - protein, 16 aa, Homo sapiens
  CDR3 for alpha chain variable domain of TCR clone 352869 (TRAV14/DV4, TRAJ44)
CAMRSDDTGTASKLTF

SEQ ID NO: 705738 - protein, 16 aa, Homo sapiens
  CDR3 for beta chain variable domain of TCR clone 352869 (TRBV2, TRBJ2-3)
CASSTSVEGVTDTQYF

SEQ ID NO: 705739 - protein, 13 aa, Homo sapiens
  CDR3 for alpha chain variable domain of TCR clone 352870 (TRAV12-2, TRAJ39)
CAVNNNAGNMLTF

SEQ ID NO: 705740 - protein, 15 aa, Homo sapiens
  CDR3 for beta chain variable domain of TCR clone 352870 (TRBV12-4, TRBJ2-1)
CASSLLATGNNEQFF

SEQ ID NO: 705741 - protein, 12 aa, Homo sapiens
  CDR3 for alpha chain variable domain of TCR clone 352871 (TRAV12-3, TRAJ54)
CGADRGAQKLVI

SEQ ID NO: 705742 - protein, 15 aa, Homo sapiens
  CDR3 for beta chain variable domain of TCR clone 352871 (TRBV27, TRBJ2-1)
CASSLAGGPLNEQFF

SEQ ID NO: 705743 - protein, 13 aa, Homo sapiens
  CDR3 for alpha chain variable domain of TCR clone 352872 (TRAV21, TRAJ57)
CAVTQGGAEKLVF

SEQ ID NO: 705744 - protein, 17 aa, Homo sapiens
  CDR3 for beta chain variable domain of TCR clone 352872 (TRBV20-1, TRBJ2-2)
CSASGSGQGGLTGELFF

SEQ ID NO: 705745 - protein, 10 aa, Homo sapiens
  CDR3 for alpha chain variable domain of TCR clone 352873 (TRAV20, TRAJ22)
CAAPAMQLTF

SEQ ID NO: 705746 - protein, 14 aa, Homo sapiens
  CDR3 for beta chain variable domain of TCR clone 352873 (TRBV19, TRBJ2-1)
CASSMGSGATEQFF

SEQ ID NO: 705747 - protein, 11 aa, Homo sapiens
  CDR3 for alpha chain variable domain of TCR clone 352874 (TRAV22, TRAJ27)
CAVLNAGKSTF

SEQ ID NO: 705748 - protein, 17 aa, Homo sapiens
  CDR3 for beta chain variable domain of TCR clone 352874 (TRBV7-2, TRBJ2-2)
CASSPRGAGEGTGELFF

SEQ ID NO: 705749 - protein, 16 aa, Homo sapiens
  CDR3 for alpha chain variable domain of TCR clone 352875 (TRAV30, TRAJ24)
CGTEIVDADSWGKFQF

SEQ ID NO: 705750 - protein, 12 aa, Homo sapiens
  CDR3 for beta chain variable domain of TCR clone 352875 (TRBV6-5, TRBJ2-7)
CASYIYGYEQYF

SEQ ID NO: 705751 - protein, 12 aa, Homo sapiens
  CDR3 for alpha chain variable domain of TCR clone 352876 (TRAV13-1, TRAJ21)
CAAKEGFNEFYF

SEQ ID NO: 705752 - protein, 14 aa, Homo sapiens
  CDR3 for beta chain variable domain of TCR clone 352876 (TRBV20-1, TRBJ2-7)
CSAPELAGVGEQYF

SEQ ID NO: 705753 - protein, 13 aa, Homo sapiens
  CDR3 for alpha chain variable domain of TCR clone 352877 (TRAV8-6, TRAJ21)
CAVSPSSLNKFYF

SEQ ID NO: 705754 - protein, 14 aa, Homo sapiens
  CDR3 for beta chain variable domain of TCR clone 352877 (TRBV7-9, TRBJ2-5)
CASSLDPAQETQHF

SEQ ID NO: 705755 - protein, 13 aa, Homo sapiens
  CDR3 for alpha chain variable domain of TCR clone 352878 (TRAV2, TRAJ40)
CAVVTSGTYKYIF

SEQ ID NO: 705756 - protein, 15 aa, Homo sapiens
  CDR3 for beta chain variable domain of TCR clone 352878 (TRBV6-6, TRBJ1-1)
CASSPRGDVETEAFF

SEQ ID NO: 705757 - protein, 11 aa, Homo sapiens
  CDR3 for alpha chain variable domain of TCR clone 352879 (TRAV12-2, TRAJ31)
CAILTNARLMF

SEQ ID NO: 705758 - protein, 16 aa, Homo sapiens
  CDR3 for beta chain variable domain of TCR clone 352879 (TRBV13, TRBJ2-2)
CASSPRTGEHTGELFF

SEQ ID NO: 705759 - protein, 12 aa, Homo sapiens
  CDR3 for alpha chain variable domain of TCR clone 352880 (TRAV1-2, TRAJ33)
CAALGSNYQLIW

SEQ ID NO: 705760 - protein, 14 aa, Homo sapiens
  CDR3 for beta chain variable domain of TCR clone 352880 (TRBV19, TRBJ2-3)
CVSSAPRGTDTQYF

SEQ ID NO: 705761 - protein, 13 aa, Homo sapiens
  CDR3 for alpha chain variable domain of TCR clone 352881 (TRAV12-3, TRAJ9)
CAIRNTGGFKTIF

SEQ ID NO: 705762 - protein, 14 aa, Homo sapiens
  CDR3 for beta chain variable domain of TCR clone 352881 (TRBV11-2, TRBJ2-7)
CASSSIGEGYEQYF

SEQ ID NO: 705763 - protein, 15 aa, Homo sapiens
  CDR3 for alpha chain variable domain of TCR clone 352882 (TRAV12-1, TRAJ4)
CVVNGVSGGYNKLIF

SEQ ID NO: 705764 - protein, 18 aa, Homo sapiens
  CDR3 for beta chain variable domain of TCR clone 352882 (TRBV6-5, TRBJ2-1)
CASSYSSRRAGVYNEQFF

SEQ ID NO: 705765 - protein, 14 aa, Homo sapiens
  CDR3 for alpha chain variable domain of TCR clone 352883 (TRAV12-2, TRAJ13)
CAVKKTGGYEKVTF

SEQ ID NO: 705766 - protein, 16 aa, Homo sapiens
  CDR3 for beta chain variable domain of TCR clone 352883 (TRBV12-5, TRBJ2-5)
CASGPRTSGNQETQYF

SEQ ID NO: 705767 - protein, 13 aa, Homo sapiens
  CDR3 for alpha chain variable domain of TCR clone 352884 (TRAV26-1, TRAJ48)
CIVRVVGDEKLTF

SEQ ID NO: 705768 - protein, 17 aa, Homo sapiens
  CDR3 for beta chain variable domain of TCR clone 352884 (TRBV4-1, TRBJ2-7)
CASSRDPLGVRGGEQYF

SEQ ID NO: 705769 - protein, 13 aa, Homo sapiens
  CDR3 for alpha chain variable domain of TCR clone 352885 (TRAV12-3, TRAJ33)
CAMSVNSNYQLIW

SEQ ID NO: 705770 - protein, 14 aa, Homo sapiens
  CDR3 for beta chain variable domain of TCR clone 352885 (TRBV11-2, TRBJ2-1)
CASSLSGPYNEQFF

SEQ ID NO: 705771 - protein, 15 aa, Homo sapiens
  CDR3 for alpha chain variable domain of TCR clone 352886 (TRAV13-1, TRAJ52)
SYYNAGGTSYGKLTF

SEQ ID NO: 705772 - protein, 11 aa, Homo sapiens
  CDR3 for beta chain variable domain of TCR clone 352886 (TRBV12-4, TRBJ2-2)
CASSSAGELFF

SEQ ID NO: 705773 - protein, 23 aa, Homo sapiens
  CDR3 for alpha chain variable domain of TCR clone 352887 (TRAV26-1, TRAJ38)
CIADNAGNNHIQNPDPAVYQLRD

SEQ ID NO: 705774 - protein, 15 aa, Homo sapiens
  CDR3 for beta chain variable domain of TCR clone 352887 (TRBV27, TRBJ2-1)
CASSNGGGSSNEHFF

SEQ ID NO: 705775 - protein, 18 aa, Homo sapiens
  CDR3 for alpha chain variable domain of TCR clone 352888 (TRAV12-3, TRAJ52)
CAMSRTNAGGTSYGKLTF

SEQ ID NO: 705776 - protein, 14 aa, Homo sapiens
  CDR3 for beta chain variable domain of TCR clone 352888 (TRBV18, TRBJ2-5)
CASSPGVSQETQYF

SEQ ID NO: 705777 - protein, 15 aa, Homo sapiens
  CDR3 for alpha chain variable domain of TCR clone 352889 (TRAV13-1, TRAJ27)
CAARELNTNAGKSTF

SEQ ID NO: 705778 - protein, 13 aa, Homo sapiens
  CDR3 for beta chain variable domain of TCR clone 352889 (TRBV12-5, TRBJ2-3)
CASGDRQSDTQYF

SEQ ID NO: 705779 - protein, 12 aa, Homo sapiens
  CDR3 for alpha chain variable domain of TCR clone 352890 (TRAV8-3, TRAJ26)
CAGDNYGQNFVF

SEQ ID NO: 705780 - protein, 15 aa, Homo sapiens
  CDR3 for beta chain variable domain of TCR clone 352890 (TRBV9, TRBJ2-1)
CASSLAGSYYNEQFF

SEQ ID NO: 705781 - protein, 13 aa, Homo sapiens
  CDR3 for alpha chain variable domain of TCR clone 352891 (TRAV13-1, TRAJ5)
CAASDTGRRALTF

SEQ ID NO: 705782 - protein, 17 aa, Homo sapiens
  CDR3 for beta chain variable domain of TCR clone 352891 (TRBV5-1, TRBJ2-2)
CASSEKPNFANTGELFF

SEQ ID NO: 705783 - protein, 17 aa, Homo sapiens
  CDR3 for alpha chain variable domain of TCR clone 352892 (TRAV26-1, TRAJ53)
CIVRVDDCGGSKYKLTF

SEQ ID NO: 705784 - protein, 15 aa, Homo sapiens
  CDR3 for beta chain variable domain of TCR clone 352892 (TRBV20-1, TRBJ2-7)
CSARVPAAYFYEQYF

SEQ ID NO: 705785 - protein, 13 aa, Homo sapiens
  CDR3 for alpha chain variable domain of TCR clone 352893 (TRAV8-3, TRAJ28)
CAVGAVGSYQLTF

SEQ ID NO: 705786 - protein, 15 aa, Homo sapiens
  CDR3 for beta chain variable domain of TCR clone 352893 (TRBV6-6, TRBJ2-5)
CASSPGGGLEETQYF

SEQ ID NO: 705787 - protein, 13 aa, Homo sapiens
  CDR3 for alpha chain variable domain of TCR clone 352894 (TRAV12-1, TRAJ21)
CVVIWDNFNKFYF

SEQ ID NO: 705788 - protein, 14 aa, Homo sapiens
  CDR3 for beta chain variable domain of TCR clone 352894 (TRBV7-3, TRBJ2-2)
CASSLYPLTGELFF

SEQ ID NO: 705789 - protein, 15 aa, Homo sapiens
  CDR3 for alpha chain variable domain of TCR clone 352895 (TRAV26-1, TRAJ23)
CIVRVLNNQGVKLIF

SEQ ID NO: 705790 - protein, 15 aa, Homo sapiens
  CDR3 for beta chain variable domain of TCR clone 352895 (TRBV11-3, TRBJ2-1)
CASSLAGQTYNEQFF

SEQ ID NO: 705791 - protein, 14 aa, Homo sapiens
  CDR3 for alpha chain variable domain of TCR clone 352896 (TRAV16, TRAJ39)
CALCKNNAGNMLTF

SEQ ID NO: 705792 - protein, 16 aa, Homo sapiens
  CDR3 for beta chain variable domain of TCR clone 352896 (TRBV6-6, TRBJ2-1)
CASSYSFSGSYNEQFF

SEQ ID NO: 705793 - protein, 15 aa, Homo sapiens
  CDR3 for alpha chain variable domain of TCR clone 352897 (TRAV8-4, TRAJ29)
CAVSEDFRGNTPLVF

SEQ ID NO: 705794 - protein, 17 aa, Homo sapiens
  CDR3 for beta chain variable domain of TCR clone 352897 (TRBV11-2, TRBJ2-1)
CASSLYPPGVEYNEQFF

SEQ ID NO: 705795 - protein, 16 aa, Homo sapiens
  CDR3 for alpha chain variable domain of TCR clone 352898 (TRAV13-1, TRAJ48)
CAASIFGNLGNEKLTF

SEQ ID NO: 705796 - protein, 14 aa, Homo sapiens
  CDR3 for beta chain variable domain of TCR clone 352898 (TRBV7-3, TRBJ1-1)
CASSLKGGNTEAFF

SEQ ID NO: 705797 - protein, 12 aa, Homo sapiens
  CDR3 for alpha chain variable domain of TCR clone 352899 (TRAV12-2, TRAJ40)
CAVTPGTYKYIF

SEQ ID NO: 705798 - protein, 13 aa, Homo sapiens
  CDR3 for beta chain variable domain of TCR clone 352899 (TRBV29-1, TRBJ2-1)
CSVEGGRVNEQFF

SEQ ID NO: 705799 - protein, 14 aa, Homo sapiens
  CDR3 for alpha chain variable domain of TCR clone 352900 (TRAV8-2, TRAJ37)
CVVSISGNTGKLIF

SEQ ID NO: 705800 - protein, 15 aa, Homo sapiens
  CDR3 for beta chain variable domain of TCR clone 352900 (TRBV18, TRBJ1-5)
CASSPSDRSNQPQHF

SEQ ID NO: 705801 - protein, 15 aa, Homo sapiens
  CDR3 for alpha chain variable domain of TCR clone 352901 (TRAV10, TRAJ44)
CVVSGATDTAIKLTF

SEQ ID NO: 705802 - protein, 15 aa, Homo sapiens
  CDR3 for beta chain variable domain of TCR clone 352901 (TRBV12-4, TRBJ1-5)
CASTRQGSGNQPQHF

SEQ ID NO: 705803 - protein, 16 aa, Homo sapiens
  CDR3 for alpha chain variable domain of TCR clone 352902 (TRAV38-2/DV8, TRAJ45)
GAYRGNSGGGADGLTF

SEQ ID NO: 705804 - protein, 17 aa, Homo sapiens
  CDR3 for beta chain variable domain of TCR clone 352902 (TRBV11-3, TRBJ2-5)
CASSLPGVRGGKETQYF

SEQ ID NO: 705805 - protein, 13 aa, Homo sapiens
  CDR3 for alpha chain variable domain of TCR clone 352903 (TRAV8-3, TRAJ28)
CAVGAVGSYQLTF

SEQ ID NO: 705806 - protein, 14 aa, Homo sapiens
  CDR3 for beta chain variable domain of TCR clone 352903 (TRBV2, TRBJ1-2)
CASNEGTGPYGYTF

SEQ ID NO: 705807 - protein, 13 aa, Homo sapiens
  CDR3 for alpha chain variable domain of TCR clone 352904 (TRAV2, TRAJ13)
CAVDSGGYQKVTF

SEQ ID NO: 705808 - protein, 13 aa, Homo sapiens
  CDR3 for beta chain variable domain of TCR clone 352904 (TRBV29-1, TRBJ2-3)
SAALQGGADTQYF

SEQ ID NO: 705809 - protein, 14 aa, Homo sapiens
  CDR3 for alpha chain variable domain of TCR clone 352905 (TRAV12-1, TRAJ26)
RVVKGSNYGQNFVF

SEQ ID NO: 705810 - protein, 17 aa, Homo sapiens
  CDR3 for beta chain variable domain of TCR clone 352905 (TRBV11-2, TRBJ2-6)
CASSQRDIFSGANVLTF

SEQ ID NO: 705811 - protein, 13 aa, Homo sapiens
  CDR3 for alpha chain variable domain of TCR clone 352906 (TRAV12-3, TRAJ33)
CAMSVNSNYQLIW

SEQ ID NO: 705812 - protein, 11 aa, Homo sapiens
  CDR3 for beta chain variable domain of TCR clone 352906 (TRBV7-3, TRBJ2-5)
CAGSLSETQYF

SEQ ID NO: 705813 - protein, 15 aa, Homo sapiens
  CDR3 for alpha chain variable domain of TCR clone 352907 (TRAV13-1, TRAJ48)
CAPLGSNFGNEKLTF

SEQ ID NO: 705814 - protein, 14 aa, Homo sapiens
  CDR3 for beta chain variable domain of TCR clone 352907 (TRBV7-6, TRBJ2-3)
CASSLGTVTDTQYF

SEQ ID NO: 705815 - protein, 17 aa, Homo sapiens
  CDR3 for alpha chain variable domain of TCR clone 352908 (TRAV12-2, TRAJ48)
CASNEKLTFGTGTRLTT

SEQ ID NO: 705816 - protein, 15 aa, Homo sapiens
  CDR3 for beta chain variable domain of TCR clone 352908 (TRBV5-1, TRBJ2-1)
CASSQAGYWWNEQFF

SEQ ID NO: 705817 - protein, 14 aa, Homo sapiens
  CDR3 for alpha chain variable domain of TCR clone 352909 (TRAV1-2, TRAJ16)
CAVNRFSDGHKLLF

SEQ ID NO: 705818 - protein, 15 aa, Homo sapiens
  CDR3 for beta chain variable domain of TCR clone 352909 (TRBV5-1, TRBJ2-3)
CASSVTSGSTDTQYF

SEQ ID NO: 705819 - protein, 11 aa, Homo sapiens
  CDR3 for alpha chain variable domain of TCR clone 352910 (TRAV3, TRAJ21)
CAVGNFNKFYF

SEQ ID NO: 705820 - protein, 13 aa, Homo sapiens
  CDR3 for beta chain variable domain of TCR clone 352910 (TRBV10-2, TRBJ2-3)
CASSESGDHTQYF

SEQ ID NO: 705821 - protein, 16 aa, Homo sapiens
  CDR3 for alpha chain variable domain of TCR clone 352911 (TRAV30, TRAJ24)
CGTEIVDSDSWGKFQF

SEQ ID NO: 705822 - protein, 18 aa, Homo sapiens
  CDR3 for beta chain variable domain of TCR clone 352911 (TRBV11-2, TRBJ2-3)
CASSLGGASRGAPNTQYF

SEQ ID NO: 705823 - protein, 16 aa, Homo sapiens
  CDR3 for alpha chain variable domain of TCR clone 352912 (TRAV30, TRAJ24)
CGTEIVDADSWGKFQF

SEQ ID NO: 705824 - protein, 15 aa, Homo sapiens
  CDR3 for beta chain variable domain of TCR clone 352912 (TRBV27, TRBJ2-1)
CASSNGGGSSSEQFF

SEQ ID NO: 705825 - protein, 14 aa, Homo sapiens
  CDR3 for alpha chain variable domain of TCR clone 352913 (TRAV13-1, TRAJ29)
CAASSNSGNTPLVF

SEQ ID NO: 705826 - protein, 13 aa, Homo sapiens
  CDR3 for beta chain variable domain of TCR clone 352913 (TRBV10-2, TRBJ1-1)
CASNVQMNTEAFF

SEQ ID NO: 705827 - protein, 15 aa, Homo sapiens
  CDR3 for alpha chain variable domain of TCR clone 352914 (TRAV29/DV5, TRAJ42)
CAAKTDGGSRGNLIF

SEQ ID NO: 705828 - protein, 15 aa, Homo sapiens
  CDR3 for beta chain variable domain of TCR clone 352914 (TRBV5-1, TRBJ2-2)
CASSSPGGNTGELFF

SEQ ID NO: 705829 - protein, 13 aa, Homo sapiens
  CDR3 for alpha chain variable domain of TCR clone 352915 (TRAV27, TRAJ49)
CAPRPYTGNQSYI

SEQ ID NO: 705830 - protein, 16 aa, Homo sapiens
  CDR3 for beta chain variable domain of TCR clone 352915 (TRBV4-1, TRBJ1-2)
CASSQDAGQVLYGYTF

SEQ ID NO: 705831 - protein, 13 aa, Homo sapiens
  CDR3 for alpha chain variable domain of TCR clone 352916 (TRAV12-3, TRAJ7)
CAMTPYGNNRLAF

SEQ ID NO: 705832 - protein, 17 aa, Homo sapiens
  CDR3 for beta chain variable domain of TCR clone 352916 (TRBV7-6, TRBJ2-5)
CAISSPQAGDPSETQYF

SEQ ID NO: 705833 - protein, 14 aa, Homo sapiens
  CDR3 for alpha chain variable domain of TCR clone 352917 (TRAV12-3, TRAJ13)
CAMKNSGGYQKVTF

SEQ ID NO: 705834 - protein, 15 aa, Homo sapiens
  CDR3 for beta chain variable domain of TCR clone 352917 (TRBV9, TRBJ1-6)
CASSVAGTGDSPLHF

SEQ ID NO: 705835 - protein, 14 aa, Homo sapiens
  CDR3 for alpha chain variable domain of TCR clone 352918 (TRAV12-3, TRAJ10)
SHLPLTGGGNKLTF

SEQ ID NO: 705836 - protein, 15 aa, Homo sapiens
  CDR3 for beta chain variable domain of TCR clone 352918 (TRBV2, TRBJ1-6)
CADSAPIIHPSTLGT

SEQ ID NO: 705837 - protein, 16 aa, Homo sapiens
  CDR3 for alpha chain variable domain of TCR clone 352919 (TRAV3, TRAJ23)
CAVKIGIYNQGGKLIF

SEQ ID NO: 705838 - protein, 17 aa, Homo sapiens
  CDR3 for beta chain variable domain of TCR clone 352919 (TRBV3-1, TRBJ2-5)
CASSNWGGTSGQETQYF

SEQ ID NO: 705839 - protein, 14 aa, Homo sapiens
  CDR3 for alpha chain variable domain of TCR clone 352920 (TRAV4, TRAJ15)
CLVGDPQAGTALIF

SEQ ID NO: 705840 - protein, 16 aa, Homo sapiens
  CDR3 for beta chain variable domain of TCR clone 352920 (TRBV28, TRBJ2-2)
CASSLEGGSNTGELFF

SEQ ID NO: 705841 - protein, 18 aa, Homo sapiens
  CDR3 for alpha chain variable domain of TCR clone 352921 (TRAV21, TRAJ52)
CAVRPSPAGGTSYGKLTF

SEQ ID NO: 705842 - protein, 17 aa, Homo sapiens
  CDR3 for beta chain variable domain of TCR clone 352921 (TRBV13, TRBJ2-3)
YASSLSGVAGGRNTQYF

SEQ ID NO: 705843 - protein, 14 aa, Homo sapiens
  CDR3 for alpha chain variable domain of TCR clone 352922 (TRAV3, TRAJ27)
CAVRDDTNAGKSTF

SEQ ID NO: 705844 - protein, 13 aa, Homo sapiens
  CDR3 for beta chain variable domain of TCR clone 352922 (TRBV7-8, TRBJ2-1)
CASSAGTGNEQFF

SEQ ID NO: 705845 - protein, 10 aa, Homo sapiens
  CDR3 for alpha chain variable domain of TCR clone 352923 (TRAV36/DV7, TRAJ48)
CAAGNEKLTF

SEQ ID NO: 705846 - protein, 14 aa, Homo sapiens
  CDR3 for beta chain variable domain of TCR clone 352923 (TRBV25-1, TRBJ1-1)
CASTHLGGNTEAFF

SEQ ID NO: 705847 - protein, 14 aa, Homo sapiens
  CDR3 for alpha chain variable domain of TCR clone 352924 (TRAV23/DV6, TRAJ37)
CAASTSSNTGKLIF

SEQ ID NO: 705848 - protein, 19 aa, Homo sapiens
  CDR3 for beta chain variable domain of TCR clone 352924 (TRBV25-1, TRBJ2-2)
CAILVYRVDRGRKTGELFF

SEQ ID NO: 705849 - protein, 11 aa, Homo sapiens
  CDR3 for alpha chain variable domain of TCR clone 352925 (TRAV2, TRAJ13)
CASGGYQKVTF

SEQ ID NO: 705850 - protein, 16 aa, Homo sapiens
  CDR3 for beta chain variable domain of TCR clone 352925 (TRBV5-1, TRBJ2-2)
CASSLWDTTNTGELFF

SEQ ID NO: 705851 - protein, 12 aa, Homo sapiens
  CDR3 for alpha chain variable domain of TCR clone 352926 (TRAV10, TRAJ43)
CVVVRVGNDMRF

SEQ ID NO: 705852 - protein, 12 aa, Homo sapiens
  CDR3 for beta chain variable domain of TCR clone 352926 (TRBV4-2, TRBJ2-5)
CASGGAQETQYF

SEQ ID NO: 705853 - protein, 15 aa, Homo sapiens
  CDR3 for alpha chain variable domain of TCR clone 352927 (TRAV2, TRAJ15)
CAVEDRGQAGTALIF

SEQ ID NO: 705854 - protein, 11 aa, Homo sapiens
  CDR3 for beta chain variable domain of TCR clone 352927 (TRBV20-1, TRBJ2-7)
CSARLSYEQYF

SEQ ID NO: 705855 - protein, 14 aa, Homo sapiens
  CDR3 for alpha chain variable domain of TCR clone 352928 (TRAV8-3, TRAJ15)
CAVGRHQAGTAPIF

SEQ ID NO: 705856 - protein, 13 aa, Homo sapiens
  CDR3 for beta chain variable domain of TCR clone 352928 (TRBV9, TRBJ2-7)
CASSASDSYEQYF

SEQ ID NO: 705857 - protein, 14 aa, Homo sapiens
  CDR3 for alpha chain variable domain of TCR clone 352929 (TRAV17, TRAJ56)
CATVPAGANSKLTF

SEQ ID NO: 705858 - protein, 13 aa, Homo sapiens
  CDR3 for beta chain variable domain of TCR clone 352929 (TRBV12-4, TRBJ2-2)
CASNITGSGELFF

SEQ ID NO: 705859 - protein, 14 aa, Homo sapiens
  CDR3 for alpha chain variable domain of TCR clone 352930 (TRAV13-2, TRAJ9)
CAENLETGGFKTIF

SEQ ID NO: 705860 - protein, 16 aa, Homo sapiens
  CDR3 for beta chain variable domain of TCR clone 352930 (TRBV4-2, TRBJ2-7)
CASSQEELAGTYEQYF

SEQ ID NO: 705861 - protein, 11 aa, Homo sapiens
  CDR3 for alpha chain variable domain of TCR clone 352931 (TRAV2, TRAJ40)
CAVEGTYKYIF

SEQ ID NO: 705862 - protein, 14 aa, Homo sapiens
  CDR3 for beta chain variable domain of TCR clone 352931 (TRBV24-1, TRBJ1-1)
CATSIPRGDTEAFF

SEQ ID NO: 705863 - protein, 14 aa, Homo sapiens
  CDR3 for alpha chain variable domain of TCR clone 352932 (TRAV8-4, TRAJ17)
CAVSDQAAGNKLTF

SEQ ID NO: 705864 - protein, 15 aa, Homo sapiens
  CDR3 for beta chain variable domain of TCR clone 352932 (TRBV7-2, TRBJ1-2)
CACSLAPDRGLGYTF

SEQ ID NO: 705865 - protein, 16 aa, Homo sapiens
  CDR3 for alpha chain variable domain of TCR clone 352933 (TRAV38-1, TRAJ32)
CAFMKGGGGATNKLIF

SEQ ID NO: 705866 - protein, 13 aa, Homo sapiens
  CDR3 for beta chain variable domain of TCR clone 352933 (TRBV20-1, TRBJ2-5)
CSAREAFQETHYF

SEQ ID NO: 705867 - protein, 15 aa, Homo sapiens
  CDR3 for alpha chain variable domain of TCR clone 352934 (TRAV17, TRAJ56)
CATDANTGANSKLTF

SEQ ID NO: 705868 - protein, 16 aa, Homo sapiens
  CDR3 for beta chain variable domain of TCR clone 352934 (TRBV7-3, TRBJ2-2)
YASSLKRGTLSGELFF

SEQ ID NO: 705869 - protein, 15 aa, Homo sapiens
  CDR3 for alpha chain variable domain of TCR clone 352935 (TRAV29/DV5, TRAJ8)
CAASGRNTVFQKLVF

SEQ ID NO: 705870 - protein, 15 aa, Homo sapiens
  CDR3 for beta chain variable domain of TCR clone 352935 (TRBV5-1, TRBJ2-1)
CASTGSGRTYNEQFF

SEQ ID NO: 705871 - protein, 14 aa, Homo sapiens
  CDR3 for alpha chain variable domain of TCR clone 352936 (TRAV12-2, TRAJ40)
CAVKIPSGTHKYIF

SEQ ID NO: 705872 - protein, 17 aa, Homo sapiens
  CDR3 for beta chain variable domain of TCR clone 352936 (TRBV7-8, TRBJ2-6)
CASSAGTGGAGANVLTF

SEQ ID NO: 705873 - protein, 14 aa, Homo sapiens
  CDR3 for alpha chain variable domain of TCR clone 352937 (TRAV29/DV5, TRAJ30)
CAARLMNRDDKIIF

SEQ ID NO: 705874 - protein, 15 aa, Homo sapiens
  CDR3 for beta chain variable domain of TCR clone 352937 (TRBV6-1, TRBJ2-3)
CASSERGGITDTQYF

SEQ ID NO: 705875 - protein, 15 aa, Homo sapiens
  CDR3 for alpha chain variable domain of TCR clone 352938 (TRAV12-1, TRAJ44)
CVADLPTGTASKLTF

SEQ ID NO: 705876 - protein, 14 aa, Homo sapiens
  CDR3 for beta chain variable domain of TCR clone 352938 (TRBV7-2, TRBJ1-1)
CASSFLTGTTEAFF

SEQ ID NO: 705877 - protein, 12 aa, Homo sapiens
  CDR3 for alpha chain variable domain of TCR clone 352939 (TRAV27, TRAJ9)
CAGESGGFKTIF

SEQ ID NO: 705878 - protein, 14 aa, Homo sapiens
  CDR3 for beta chain variable domain of TCR clone 352939 (TRBV11-3, TRBJ2-7)
CASSPDRNTYEQYF

SEQ ID NO: 705879 - protein, 13 aa, Homo sapiens
  CDR3 for alpha chain variable domain of TCR clone 352940 (TRAV8-3, TRAJ28)
CAVGAVGSYQLTF

SEQ ID NO: 705880 - protein, 15 aa, Homo sapiens
  CDR3 for beta chain variable domain of TCR clone 352940 (TRBV28, TRBJ2-5)
CANSPGQGSIETQYF

SEQ ID NO: 705881 - protein, 14 aa, Homo sapiens
  CDR3 for alpha chain variable domain of TCR clone 352941 (TRAV12-2, TRAJ44)
CAVNPAGTDSKLTF

SEQ ID NO: 705882 - protein, 14 aa, Homo sapiens
  CDR3 for beta chain variable domain of TCR clone 352941 (TRBV6-1, TRBJ1-3)
CASVQGGGGNTIYF

SEQ ID NO: 705883 - protein, 13 aa, Homo sapiens
  CDR3 for alpha chain variable domain of TCR clone 352942 (TRAV13-2, TRAJ15)
CAESNQAGTALIF

SEQ ID NO: 705884 - protein, 12 aa, Homo sapiens
  CDR3 for beta chain variable domain of TCR clone 352942 (TRBV12-4, TRBJ2-3)
CASSTLPDTQYF

SEQ ID NO: 705885 - protein, 10 aa, Homo sapiens
  CDR3 for alpha chain variable domain of TCR clone 352943 (TRAV12-3, TRAJ50)
CAMSAMGNLL

SEQ ID NO: 705886 - protein, 16 aa, Homo sapiens
  CDR3 for beta chain variable domain of TCR clone 352943 (TRBV4-2, TRBJ1-1)
CASSQAGFGMNTEAFF

SEQ ID NO: 705887 - protein, 14 aa, Homo sapiens
  CDR3 for alpha chain variable domain of TCR clone 352944 (TRAV1-2, TRAJ8)
CAVREDTGFQKLVF

SEQ ID NO: 705888 - protein, 14 aa, Homo sapiens
  CDR3 for beta chain variable domain of TCR clone 352944 (TRBV19, TRBJ2-1)
CASPTFVLSGEQFV

SEQ ID NO: 705889 - protein, 10 aa, Homo sapiens
  CDR3 for alpha chain variable domain of TCR clone 352945 (TRAV12-3, TRAJ18)
CAMSAEAQPW

SEQ ID NO: 705890 - protein, 13 aa, Homo sapiens
  CDR3 for beta chain variable domain of TCR clone 352945 (TRBV15, TRBJ1-6)
CATPGGLNSPLHF

SEQ ID NO: 705891 - protein, 16 aa, Homo sapiens
  CDR3 for alpha chain variable domain of TCR clone 352946 (TRAV3, TRAJ32)
CAVRENYGGATNKLIF

SEQ ID NO: 705892 - protein, 14 aa, Homo sapiens
  CDR3 for beta chain variable domain of TCR clone 352946 (TRBV7-3, TRBJ2-3)
CASSSTGVADTQYF

SEQ ID NO: 705893 - protein, 19 aa, Homo sapiens
  CDR3 for alpha chain variable domain of TCR clone 352947 (TRAV26-1, TRAJ52)
FIVRAHRNAGGTSYGKLTF

SEQ ID NO: 705894 - protein, 16 aa, Homo sapiens
  CDR3 for beta chain variable domain of TCR clone 352947 (TRBV12-4, TRBJ2-5)
CASSYGPGCQKETQYF

SEQ ID NO: 705895 - protein, 14 aa, Homo sapiens
  CDR3 for alpha chain variable domain of TCR clone 352948 (TRAV26-1, TRAJ45)
CIEVTGGGADGLTF

SEQ ID NO: 705896 - protein, 13 aa, Homo sapiens
  CDR3 for beta chain variable domain of TCR clone 352948 (TRBV7-7, TRBJ2-5)
CASSRSGQETQYF

SEQ ID NO: 705897 - protein, 14 aa, Homo sapiens
  CDR3 for alpha chain variable domain of TCR clone 352949 (TRAV12-1, TRAJ41)
CVVLNSNSGYALNF

SEQ ID NO: 705898 - protein, 13 aa, Homo sapiens
  CDR3 for beta chain variable domain of TCR clone 352949 (TRBV15, TRBJ2-7)
CATSTTGHYEQYF

SEQ ID NO: 705899 - protein, 12 aa, Homo sapiens
  CDR3 for alpha chain variable domain of TCR clone 352950 (TRAV29/DV5, TRAJ43)
CAAPYNNNAMRF

SEQ ID NO: 705900 - protein, 13 aa, Homo sapiens
  CDR3 for beta chain variable domain of TCR clone 352950 (TRBV7-3, TRBJ1-1)
CASSQDWGAEAFF

SEQ ID NO: 705901 - protein, 11 aa, Homo sapiens
  CDR3 for alpha chain variable domain of TCR clone 352951 (TRAV23/DV6, TRAJ47)
CAAGYGNKLVF

SEQ ID NO: 705902 - protein, 14 aa, Homo sapiens
  CDR3 for beta chain variable domain of TCR clone 352951 (TRBV19, TRBJ2-1)
CASPTFVLSGEQFF

SEQ ID NO: 705903 - protein, 15 aa, Homo sapiens
  CDR3 for alpha chain variable domain of TCR clone 352952 (TRAV25, TRAJ53)
CAATGGGGSNYKLTF

SEQ ID NO: 705904 - protein, 19 aa, Homo sapiens
  CDR3 for beta chain variable domain of TCR clone 352952 (TRBV7-2, TRBJ2-3)
CASRFLSRNWGGGTDTQYF

SEQ ID NO: 705905 - protein, 13 aa, Homo sapiens
  CDR3 for alpha chain variable domain of TCR clone 352953 (TRAV21, TRAJ27)
CAARPGNAGKSTF

SEQ ID NO: 705906 - protein, 15 aa, Homo sapiens
  CDR3 for beta chain variable domain of TCR clone 352953 (TRBV7-6, TRBJ2-1)
CASSPTGGGEVEQFF

SEQ ID NO: 705907 - protein, 17 aa, Homo sapiens
  CDR3 for alpha chain variable domain of TCR clone 352954 (TRAV16, TRAJ58)
CITVLSNGDTSGSRLTF

SEQ ID NO: 705908 - protein, 17 aa, Homo sapiens
  CDR3 for beta chain variable domain of TCR clone 352954 (TRBV18, TRBJ2-1)
CASSKGLSGGADNEQFF

SEQ ID NO: 705909 - protein, 12 aa, Homo sapiens
  CDR3 for alpha chain variable domain of TCR clone 352955 (TRAV1-1, TRAJ8)
CAGGTGFQKLVF

SEQ ID NO: 705910 - protein, 14 aa, Homo sapiens
  CDR3 for beta chain variable domain of TCR clone 352955 (TRBV27, TRBJ2-7)
CASSLARGHYEQYF

SEQ ID NO: 705911 - protein, 16 aa, Homo sapiens
  CDR3 for alpha chain variable domain of TCR clone 352956 (TRAV16, TRAJ52)
CALSAAGGASYGKLTF

SEQ ID NO: 705912 - protein, 15 aa, Homo sapiens
  CDR3 for beta chain variable domain of TCR clone 352956 (TRBV11-2, TRBJ2-1)
CASCTGTSGYNEQFF

SEQ ID NO: 705913 - protein, 15 aa, Homo sapiens
  CDR3 for alpha chain variable domain of TCR clone 352957 (TRAV27, TRAJ38)
CAGRRNAGNHRKRIW

SEQ ID NO: 705914 - protein, 13 aa, Homo sapiens
  CDR3 for beta chain variable domain of TCR clone 352957 (TRBV12-5, TRBJ2-3)
CASGDRQSDTQYF

SEQ ID NO: 705915 - protein, 16 aa, Homo sapiens
  CDR3 for alpha chain variable domain of TCR clone 352958 (TRAV3, TRAJ37)
CAVRGKGSGNTGNLIF

SEQ ID NO: 705916 - protein, 14 aa, Homo sapiens
  CDR3 for beta chain variable domain of TCR clone 352958 (TRBV20-1, TRBJ2-3)
CSARGGTSTDTQYF

SEQ ID NO: 705917 - protein, 14 aa, Homo sapiens
  CDR3 for alpha chain variable domain of TCR clone 352959 (TRAV3, TRAJ20)
CAVRDSFNDYKLSF

SEQ ID NO: 705918 - protein, 14 aa, Homo sapiens
  CDR3 for beta chain variable domain of TCR clone 352959 (TRBV12-4, TRBJ2-5)
CASSYSGYFEAQYF

SEQ ID NO: 705919 - protein, 16 aa, Homo sapiens
  CDR3 for alpha chain variable domain of TCR clone 352960 (TRAV36/DV7, TRAJ45)
CAVELYSGGGADGLTF

SEQ ID NO: 705920 - protein, 19 aa, Homo sapiens
  CDR3 for beta chain variable domain of TCR clone 352960 (TRBV11-1, TRBJ2-1)
CASSSLGTGGFTLDNEQFF

SEQ ID NO: 705921 - protein, 15 aa, Homo sapiens
  CDR3 for alpha chain variable domain of TCR clone 352961 (TRAV26-1, TRAJ29)
CIVRVEGSGNTPLVF

SEQ ID NO: 705922 - protein, 15 aa, Homo sapiens
  CDR3 for beta chain variable domain of TCR clone 352961 (TRBV7-9, TRBJ1-5)
WSSSQGHQPNQAQHF

SEQ ID NO: 705923 - protein, 11 aa, Homo sapiens
  CDR3 for alpha chain variable domain of TCR clone 352962 (TRAV13-1, TRAJ43)
CAASGANDIRF

SEQ ID NO: 705924 - protein, 14 aa, Homo sapiens
  CDR3 for beta chain variable domain of TCR clone 352962 (TRBV4-1, TRBJ1-1)
CASSPPGVNTEAFF

SEQ ID NO: 705925 - protein, 14 aa, Homo sapiens
  CDR3 for alpha chain variable domain of TCR clone 352963 (TRAV23/DV6, TRAJ8)
CAESKNTGFQKLVF

SEQ ID NO: 705926 - protein, 16 aa, Homo sapiens
  CDR3 for beta chain variable domain of TCR clone 352963 (TRBV4-1, TRBJ2-6)
CASSQVGDPGANVLTF

SEQ ID NO: 705927 - protein, 16 aa, Homo sapiens
  CDR3 for alpha chain variable domain of TCR clone 352964 (TRAV16, TRAJ52)
FALSSAGGTSYGKLTF

SEQ ID NO: 705928 - protein, 12 aa, Homo sapiens
  CDR3 for beta chain variable domain of TCR clone 352964 (TRBV12-4, TRBJ1-3)
CASSFSGNTIYF

SEQ ID NO: 705929 - protein, 12 aa, Homo sapiens
  CDR3 for alpha chain variable domain of TCR clone 352965 (TRAV21, TRAJ11)
CAVRGGNSTLTI

SEQ ID NO: 705930 - protein, 15 aa, Homo sapiens
  CDR3 for beta chain variable domain of TCR clone 352965 (TRBV6-1, TRBJ2-7)
CASSEPIAATTEQYF

SEQ ID NO: 705931 - protein, 14 aa, Homo sapiens
  CDR3 for alpha chain variable domain of TCR clone 352966 (TRAV12-2, TRAJ17)
CAVLFKAAGNKLTF

SEQ ID NO: 705932 - protein, 12 aa, Homo sapiens
  CDR3 for beta chain variable domain of TCR clone 352966 (TRBV7-9, TRBJ2-7)
CASSLEGYEQYF

SEQ ID NO: 705933 - protein, 13 aa, Homo sapiens
  CDR3 for alpha chain variable domain of TCR clone 352967 (TRAV13-1, TRAJ6)
CARGSGGSYIPTF

SEQ ID NO: 705934 - protein, 15 aa, Homo sapiens
  CDR3 for beta chain variable domain of TCR clone 352967 (TRBV20-1, TRBJ2-7)
CSARDRVSGMDEQYF

SEQ ID NO: 705935 - protein, 15 aa, Homo sapiens
  CDR3 for alpha chain variable domain of TCR clone 352968 (TRAV3, TRAJ4)
CAVRDGTGGYNKLIF

SEQ ID NO: 705936 - protein, 16 aa, Homo sapiens
  CDR3 for beta chain variable domain of TCR clone 352968 (TRBV7-3, TRBJ2-2)
CASSFLPSGYTGELFF

SEQ ID NO: 705937 - protein, 14 aa, Homo sapiens
  CDR3 for alpha chain variable domain of TCR clone 352969 (TRAV1-2, TRAJ16)
CAVNRFSDGLKLLF

SEQ ID NO: 705938 - protein, 13 aa, Homo sapiens
  CDR3 for beta chain variable domain of TCR clone 352969 (TRBV7-9, TRBJ1-2)
CASSLKQNYGDTF

SEQ ID NO: 705939 - protein, 12 aa, Homo sapiens
  CDR3 for alpha chain variable domain of TCR clone 352970 (TRAV29/DV5, TRAJ49)
CAATDTGNQFYF

SEQ ID NO: 705940 - protein, 17 aa, Homo sapiens
  CDR3 for beta chain variable domain of TCR clone 352970 (TRBV20-1, TRBJ2-3)
CSASLLGRGGSADTQYF

SEQ ID NO: 705941 - protein, 15 aa, Homo sapiens
  CDR3 for alpha chain variable domain of TCR clone 352971 (TRAV13-2, TRAJ58)
CVTAQKETSCSRLTF

SEQ ID NO: 705942 - protein, 14 aa, Homo sapiens
  CDR3 for beta chain variable domain of TCR clone 352971 (TRBV7-2, TRBJ2-3)
CASRRGLAADTQYF

SEQ ID NO: 705943 - protein, 16 aa, Homo sapiens
  CDR3 for alpha chain variable domain of TCR clone 352972 (TRAV1-2, TRAJ10)
CAVRGVLTGGGNKLTF

SEQ ID NO: 705944 - protein, 14 aa, Homo sapiens
  CDR3 for beta chain variable domain of TCR clone 352972 (TRBV4-2, TRBJ1-4)
CASSQGATNEKLFF

SEQ ID NO: 705945 - protein, 10 aa, Homo sapiens
  CDR3 for alpha chain variable domain of TCR clone 352973 (TRAV35, TRAJ41)
DANSGYALNF

SEQ ID NO: 705946 - protein, 14 aa, Homo sapiens
  CDR3 for beta chain variable domain of TCR clone 352973 (TRBV9, TRBJ2-3)
CASSVGLSTETQYF

SEQ ID NO: 705947 - protein, 14 aa, Homo sapiens
  CDR3 for alpha chain variable domain of TCR clone 352974 (TRAV35, TRAJ24)
CAGPRRDIWGKLQF

SEQ ID NO: 705948 - protein, 12 aa, Homo sapiens
  CDR3 for beta chain variable domain of TCR clone 352974 (TRBV12-4, TRBJ2-3)
CASSLGQDTQYF

SEQ ID NO: 705949 - protein, 14 aa, Homo sapiens
  CDR3 for alpha chain variable domain of TCR clone 352975 (TRAV2, TRAJ37)
CAVDFTSNTGKLIF

SEQ ID NO: 705950 - protein, 16 aa, Homo sapiens
  CDR3 for beta chain variable domain of TCR clone 352975 (TRBV7-3, TRBJ2-3)
CASSLGLAGVADTQYF

SEQ ID NO: 705951 - protein, 14 aa, Homo sapiens
  CDR3 for alpha chain variable domain of TCR clone 352976 (TRAV26-1, TRAJ38)
CIAANAGNNRKLIW

SEQ ID NO: 705952 - protein, 15 aa, Homo sapiens
  CDR3 for beta chain variable domain of TCR clone 352976 (TRBV9, TRBJ1-6)
CASSVAGTGDSPLHF

SEQ ID NO: 705953 - protein, 12 aa, Homo sapiens
  CDR3 for alpha chain variable domain of TCR clone 352977 (TRAV22, TRAJ43)
CAVELNNNDIRF

SEQ ID NO: 705954 - protein, 14 aa, Homo sapiens
  CDR3 for beta chain variable domain of TCR clone 352977 (TRBV2, TRBJ2-2)
CASRGISGGGELFF

SEQ ID NO: 705955 - protein, 17 aa, Homo sapiens
  CDR3 for alpha chain variable domain of TCR clone 352978 (TRAV3, TRAJ42)
CAVRDRDYGGSQGNLIF

SEQ ID NO: 705956 - protein, 14 aa, Homo sapiens
  CDR3 for beta chain variable domain of TCR clone 352978 (TRBV11-2, TRBJ1-2)
CASSLYRGNYGYTF

SEQ ID NO: 705957 - protein, 12 aa, Homo sapiens
  CDR3 for alpha chain variable domain of TCR clone 352979 (TRAV13-2, TRAJ23)
CAERHRGGKLIF

SEQ ID NO: 705958 - protein, 15 aa, Homo sapiens
  CDR3 for beta chain variable domain of TCR clone 352979 (TRBV20-1, TRBJ2-7)
CSARKGLAESYEQYF

SEQ ID NO: 705959 - protein, 14 aa, Homo sapiens
  CDR3 for alpha chain variable domain of TCR clone 352980 (TRAV12-1, TRAJ17)
CVVNPKAAGNKLTF

SEQ ID NO: 705960 - protein, 15 aa, Homo sapiens
  CDR3 for beta chain variable domain of TCR clone 352980 (TRBV2, TRBJ2-7)
CASSEGLARSYEQYF

SEQ ID NO: 705961 - protein, 15 aa, Homo sapiens
  CDR3 for alpha chain variable domain of TCR clone 352981 (TRAV9-2, TRAJ9)
CALSLTNTGGFKTIF

SEQ ID NO: 705962 - protein, 15 aa, Homo sapiens
  CDR3 for beta chain variable domain of TCR clone 352981 (TRBV28, TRBJ2-4)
CAAGSGTLLMGIQYF

SEQ ID NO: 705963 - protein, 14 aa, Homo sapiens
  CDR3 for alpha chain variable domain of TCR clone 352982 (TRAV12-3, TRAJ10)
SHLPLPGGGNKLTF

SEQ ID NO: 705964 - protein, 14 aa, Homo sapiens
  CDR3 for beta chain variable domain of TCR clone 352982 (TRBV5-1, TRBJ2-7)
CASSRGESLYEQYF

SEQ ID NO: 705965 - protein, 11 aa, Homo sapiens
  CDR3 for alpha chain variable domain of TCR clone 352983 (TRAV30, TRAJ23)
CGTEIAGKLIF

SEQ ID NO: 705966 - protein, 15 aa, Homo sapiens
  CDR3 for beta chain variable domain of TCR clone 352983 (TRBV27, TRBJ2-1)
CASSNGGGSSNEQFF

SEQ ID NO: 705967 - protein, 13 aa, Homo sapiens
  CDR3 for alpha chain variable domain of TCR clone 352984 (TRAV12-2, TRAJ39)
CAVNNNAGNMLTF

SEQ ID NO: 705968 - protein, 13 aa, Homo sapiens
  CDR3 for beta chain variable domain of TCR clone 352984 (TRBV2, TRBJ1-5)
CATAGPGNPAQHF

SEQ ID NO: 705969 - protein, 17 aa, Homo sapiens
  CDR3 for alpha chain variable domain of TCR clone 352985 (TRAV3, TRAJ42)
CAVRDRDYGGSQGHLIF

SEQ ID NO: 705970 - protein, 17 aa, Homo sapiens
  CDR3 for beta chain variable domain of TCR clone 352985 (TRBV7-9, TRBJ2-3)
CASSPTVAGDLTDTQYF

SEQ ID NO: 705971 - protein, 14 aa, Homo sapiens
  CDR3 for alpha chain variable domain of TCR clone 352986 (TRAV1-2, TRAJ16)
CAVNRFSDGQKLLF

SEQ ID NO: 705972 - protein, 15 aa, Homo sapiens
  CDR3 for beta chain variable domain of TCR clone 352986 (TRBV7-2, TRBJ2-7)
CASSLKGALTYEHYF

SEQ ID NO: 705973 - protein, 18 aa, Homo sapiens
  CDR3 for alpha chain variable domain of TCR clone 352987 (TRAV12-3, TRAJ52)
CDMSVGGAGGTSYGKLTF

SEQ ID NO: 705974 - protein, 15 aa, Homo sapiens
  CDR3 for beta chain variable domain of TCR clone 352987 (TRBV27, TRBJ1-6)
CASSFDRGLGSPLHF

SEQ ID NO: 705975 - protein, 13 aa, Homo sapiens
  CDR3 for alpha chain variable domain of TCR clone 352988 (TRAV9-2, TRAJ53)
CALSGGSNYKLTF

SEQ ID NO: 705976 - protein, 17 aa, Homo sapiens
  CDR3 for beta chain variable domain of TCR clone 352988 (TRBV11-2, TRBJ2-1)
CASSLYPPGVEYNEQFV

SEQ ID NO: 705977 - protein, 13 aa, Homo sapiens
  CDR3 for alpha chain variable domain of TCR clone 352989 (TRAV38-2/DV8, TRAJ53)
CASGGGSNYKLTF

SEQ ID NO: 705978 - protein, 16 aa, Homo sapiens
  CDR3 for beta chain variable domain of TCR clone 352989 (TRBV28, TRBJ1-5)
CASRFRGAVQKQPQHF

SEQ ID NO: 705979 - protein, 16 aa, Homo sapiens
  CDR3 for alpha chain variable domain of TCR clone 352990 (TRAV21, TRAJ37)
CAVRTAGFSNPGKLIF

SEQ ID NO: 705980 - protein, 13 aa, Homo sapiens
  CDR3 for beta chain variable domain of TCR clone 352990 (TRBV7-9, TRBJ2-5)
CASLPSGRETQYF

SEQ ID NO: 705981 - protein, 14 aa, Homo sapiens
  CDR3 for alpha chain variable domain of TCR clone 352991 (TRAV35, TRAJ54)
CAGYLIHGAQKLVF

SEQ ID NO: 705982 - protein, 14 aa, Homo sapiens
  CDR3 for beta chain variable domain of TCR clone 352991 (TRBV7-2, TRBJ2-5)
CASSVGWAEENQYF

SEQ ID NO: 705983 - protein, 15 aa, Homo sapiens
  CDR3 for alpha chain variable domain of TCR clone 352992 (TRAV23/DV6, TRAJ33)
SAASNSGGGNYQLIW

SEQ ID NO: 705984 - protein, 14 aa, Homo sapiens
  CDR3 for beta chain variable domain of TCR clone 352992 (TRBV7-2, TRBJ2-7)
CASSLYPGRYEQYF

SEQ ID NO: 705985 - protein, 15 aa, Homo sapiens
  CDR3 for alpha chain variable domain of TCR clone 352993 (TRAV25, TRAJ52)
CAGTSGGTSYGKLTF

SEQ ID NO: 705986 - protein, 15 aa, Homo sapiens
  CDR3 for beta chain variable domain of TCR clone 352993 (TRBV4-1, TRBJ2-5)
CASSQWDLYQETQYF

SEQ ID NO: 705987 - protein, 14 aa, Homo sapiens
  CDR3 for alpha chain variable domain of TCR clone 352994 (TRAV8-4, TRAJ8)
CAVSEDTGFQTLVF

SEQ ID NO: 705988 - protein, 16 aa, Homo sapiens
  CDR3 for beta chain variable domain of TCR clone 352994 (TRBV7-3, TRBJ2-1)
CASSKPLAGGYNEQFF

SEQ ID NO: 705989 - protein, 14 aa, Homo sapiens
  CDR3 for alpha chain variable domain of TCR clone 352995 (TRAV12-1, TRAJ12)
CVVTRMDGSYKLIF

SEQ ID NO: 705990 - protein, 16 aa, Homo sapiens
  CDR3 for beta chain variable domain of TCR clone 352995 (TRBV4-1, TRBJ2-7)
CASSPVAGGTSSTSGR

SEQ ID NO: 705991 - protein, 14 aa, Homo sapiens
  CDR3 for alpha chain variable domain of TCR clone 352996 (TRAV13-1, TRAJ44)
CAAKATGTASKLTF

SEQ ID NO: 705992 - protein, 21 aa, Homo sapiens
  CDR3 for beta chain variable domain of TCR clone 352996 (TRBV5-1, TRBJ1-6)
CASSPRGGADSTGGVRSPLHF

SEQ ID NO: 705993 - protein, 15 aa, Homo sapiens
  CDR3 for alpha chain variable domain of TCR clone 352997 (TRAV2, TRAJ15)
CAVEDRGQAGTALIF

SEQ ID NO: 705994 - protein, 13 aa, Homo sapiens
  CDR3 for beta chain variable domain of TCR clone 352997 (TRBV9, TRBJ2-1)
CASSPSGGSEQFF

SEQ ID NO: 705995 - protein, 14 aa, Homo sapiens
  CDR3 for alpha chain variable domain of TCR clone 352998 (TRAV1-1, TRAJ27)
CAVIYNTNAGISTF

SEQ ID NO: 705996 - protein, 15 aa, Homo sapiens
  CDR3 for beta chain variable domain of TCR clone 352998 (TRBV7-2, TRBJ2-1)
CASSSGLAGGNEQFF

SEQ ID NO: 705997 - protein, 12 aa, Homo sapiens
  CDR3 for alpha chain variable domain of TCR clone 352999 (TRAV12-2, TRAJ52)
CAVNPYAGGTSY

SEQ ID NO: 705998 - protein, 16 aa, Homo sapiens
  CDR3 for beta chain variable domain of TCR clone 352999 (TRBV5-5, TRBJ2-2)
CASSGRREGATGELFF

SEQ ID NO: 705999 - protein, 12 aa, Homo sapiens
  CDR3 for alpha chain variable domain of TCR clone 353000 (TRAV12-3, TRAJ17)
CAMTHPGNKLTF

SEQ ID NO: 706000 - protein, 15 aa, Homo sapiens
  CDR3 for beta chain variable domain of TCR clone 353000 (TRBV20-1, TRBJ2-7)
CSARDRVSGMDEQYF

SEQ ID NO: 706001 - protein, 15 aa, Homo sapiens
  CDR3 for alpha chain variable domain of TCR clone 353001 (TRAV13-1, TRAJ44)
CAASRNTGPASKLTF

SEQ ID NO: 706002 - protein, 15 aa, Homo sapiens
  CDR3 for beta chain variable domain of TCR clone 353001 (TRBV4-1, TRBJ1-4)
CASSDTGGTNEKLFF

SEQ ID NO: 706003 - protein, 15 aa, Homo sapiens
  CDR3 for alpha chain variable domain of TCR clone 353002 (TRAV21, TRAJ32)
WAVNSYGGATNKLIF

SEQ ID NO: 706004 - protein, 18 aa, Homo sapiens
  CDR3 for beta chain variable domain of TCR clone 353002 (TRBV7-9, TRBJ2-1)
CASSTGLAEGSSYNEQFF

SEQ ID NO: 706005 - protein, 14 aa, Homo sapiens
  CDR3 for alpha chain variable domain of TCR clone 353003 (TRAV12-2, TRAJ40)
CAVRIPSGTYKYIF

SEQ ID NO: 706006 - protein, 17 aa, Homo sapiens
  CDR3 for beta chain variable domain of TCR clone 353003 (TRBV20-1, TRBJ2-1)
CSAFSGTSGSLYNEQFF

SEQ ID NO: 706007 - protein, 14 aa, Homo sapiens
  CDR3 for alpha chain variable domain of TCR clone 353004 (TRAV17, TRAJ54)
CATDANQGAQKLVF

SEQ ID NO: 706008 - protein, 15 aa, Homo sapiens
  CDR3 for beta chain variable domain of TCR clone 353004 (TRBV7-8, TRBJ2-1)
CASSPSGTIYNEQFF

SEQ ID NO: 706009 - protein, 19 aa, Homo sapiens
  CDR3 for alpha chain variable domain of TCR clone 353005 (TRAV26-1, TRAJ52)
CIVRPHRNAGGTSYGKLTF

SEQ ID NO: 706010 - protein, 15 aa, Homo sapiens
  CDR3 for beta chain variable domain of TCR clone 353005 (TRBV12-4, TRBJ2-5)
CASSPPTGLQETQYF

SEQ ID NO: 706011 - protein, 12 aa, Homo sapiens
  CDR3 for alpha chain variable domain of TCR clone 353006 (TRAV13-1, TRAJ21)
CAAKEGFNKFYF

SEQ ID NO: 706012 - protein, 13 aa, Homo sapiens
  CDR3 for beta chain variable domain of TCR clone 353006 (TRBV12-4, TRBJ1-2)
CASSSGLTVISTF

SEQ ID NO: 706013 - protein, 12 aa, Homo sapiens
  CDR3 for alpha chain variable domain of TCR clone 353007 (TRAV13-1, TRAJ20)
CAASMGDFKLSF

SEQ ID NO: 706014 - protein, 15 aa, Homo sapiens
  CDR3 for beta chain variable domain of TCR clone 353007 (TRBV11-3, TRBJ2-3)
CASNGGLDSTDTQYF

SEQ ID NO: 706015 - protein, 12 aa, Homo sapiens
  CDR3 for alpha chain variable domain of TCR clone 353008 (TRAV26-1, TRAJ48)
CIVSGGNEKLNF

SEQ ID NO: 706016 - protein, 13 aa, Homo sapiens
  CDR3 for beta chain variable domain of TCR clone 353008 (TRBV18, TRBJ2-7)
CASFRDSAYEQYF

SEQ ID NO: 706017 - protein, 12 aa, Homo sapiens
  CDR3 for alpha chain variable domain of TCR clone 353009 (TRAV8-3, TRAJ26)
CAGDNYGQNFVF

SEQ ID NO: 706018 - protein, 17 aa, Homo sapiens
  CDR3 for beta chain variable domain of TCR clone 353009 (TRBV5-1, TRBJ2-5)
CASSPVALGQNQETQYF

SEQ ID NO: 706019 - protein, 13 aa, Homo sapiens
  CDR3 for alpha chain variable domain of TCR clone 353010 (TRAV2, TRAJ40)
CAVVTSGTYKYIF

SEQ ID NO: 706020 - protein, 15 aa, Homo sapiens
  CDR3 for beta chain variable domain of TCR clone 353010 (TRBV7-7, TRBJ2-2)
CATSKLAKNTGELFF

SEQ ID NO: 706021 - protein, 14 aa, Homo sapiens
  CDR3 for alpha chain variable domain of TCR clone 353011 (TRAV12-2, TRAJ48)
CAVNAFFGNEKLIF

SEQ ID NO: 706022 - protein, 13 aa, Homo sapiens
  CDR3 for beta chain variable domain of TCR clone 353011 (TRBV28, TRBJ2-7)
CAGAQQGLDEQYF

SEQ ID NO: 706023 - protein, 12 aa, Homo sapiens
  CDR3 for alpha chain variable domain of TCR clone 353012 (TRAV12-3, TRAJ17)
CAMTLTGNKLTF

SEQ ID NO: 706024 - protein, 15 aa, Homo sapiens
  CDR3 for beta chain variable domain of TCR clone 353012 (TRBV20-1, TRBJ2-7)
CSAGDRVSGMHEQYF

SEQ ID NO: 706025 - protein, 12 aa, Homo sapiens
  CDR3 for alpha chain variable domain of TCR clone 353013 (TRAV12-2, TRAJ20)
CAVRPSDSKLSF

SEQ ID NO: 706026 - protein, 14 aa, Homo sapiens
  CDR3 for beta chain variable domain of TCR clone 353013 (TRBV6-1, TRBJ2-7)
CASNRARPDYEQYF

SEQ ID NO: 706027 - protein, 15 aa, Homo sapiens
  CDR3 for alpha chain variable domain of TCR clone 353014 (TRAV26-1, TRAJ22)
CIVRVSFWFCKATDL

SEQ ID NO: 706028 - protein, 14 aa, Homo sapiens
  CDR3 for beta chain variable domain of TCR clone 353014 (TRBV5-5, TRBJ1-5)
CASSGQGVDQPQHF

SEQ ID NO: 706029 - protein, 12 aa, Homo sapiens
  CDR3 for alpha chain variable domain of TCR clone 353015 (TRAV26-1, TRAJ43)
YIVRVYNNDMRF

SEQ ID NO: 706030 - protein, 14 aa, Homo sapiens
  CDR3 for beta chain variable domain of TCR clone 353015 (TRBV25-1, TRBJ1-4)
CASSYSGGQEKLFF

SEQ ID NO: 706031 - protein, 13 aa, Homo sapiens
  CDR3 for alpha chain variable domain of TCR clone 353016 (TRAV13-1, TRAJ27)
CAASTHHCRQINL

SEQ ID NO: 706032 - protein, 16 aa, Homo sapiens
  CDR3 for beta chain variable domain of TCR clone 353016 (TRBV27, TRBJ2-2)
CASSFRGLVRTGELFF

SEQ ID NO: 706033 - protein, 12 aa, Homo sapiens
  CDR3 for alpha chain variable domain of TCR clone 353017 (TRAV1-2, TRAJ26)
CAVRYYGQNFVF

SEQ ID NO: 706034 - protein, 15 aa, Homo sapiens
  CDR3 for beta chain variable domain of TCR clone 353017 (TRBV28, TRBJ2-1)
CASSIIAGVRSEQFF

SEQ ID NO: 706035 - protein, 14 aa, Homo sapiens
  CDR3 for alpha chain variable domain of TCR clone 353018 (TRAV26-1, TRAJ39)
CIVRGSRAGNMLTF

SEQ ID NO: 706036 - protein, 15 aa, Homo sapiens
  CDR3 for beta chain variable domain of TCR clone 353018 (TRBV7-9, TRBJ1-5)
CARSQGHQLNQPQHF

SEQ ID NO: 706037 - protein, 15 aa, Homo sapiens
  CDR3 for alpha chain variable domain of TCR clone 353019 (TRAV8-6, TRAJ40)
CAVSEAPSGTYKYIF

SEQ ID NO: 706038 - protein, 12 aa, Homo sapiens
  CDR3 for beta chain variable domain of TCR clone 353019 (TRBV7-8, TRBJ2-7)
CASSLGDREQYF

SEQ ID NO: 706039 - protein, 16 aa, Homo sapiens
  CDR3 for alpha chain variable domain of TCR clone 353020 (TRAV26-1, TRAJ45)
CIVEKYSGGGADGLTF

SEQ ID NO: 706040 - protein, 14 aa, Homo sapiens
  CDR3 for beta chain variable domain of TCR clone 353020 (TRBV4-1, TRBJ2-2)
CASSQAVNTGELFF

SEQ ID NO: 706041 - protein, 14 aa, Homo sapiens
  CDR3 for alpha chain variable domain of TCR clone 353021 (TRAV20, TRAJ18)
CAVGRGSTLGRLYF

SEQ ID NO: 706042 - protein, 14 aa, Homo sapiens
  CDR3 for beta chain variable domain of TCR clone 353021 (TRBV28, TRBJ2-4)
CASTQVTGVNIQYV

SEQ ID NO: 706043 - protein, 12 aa, Homo sapiens
  CDR3 for alpha chain variable domain of TCR clone 353022 (TRAV3, TRAJ43)
RAVRDPNNDMRF

SEQ ID NO: 706044 - protein, 12 aa, Homo sapiens
  CDR3 for beta chain variable domain of TCR clone 353022 (TRBV24-1, TRBJ1-1)
CATSDSDRGAFF

SEQ ID NO: 706045 - protein, 14 aa, Homo sapiens
  CDR3 for alpha chain variable domain of TCR clone 353023 (TRAV29/DV5, TRAJ45)
CAASFRGGADGLTF

SEQ ID NO: 706046 - protein, 11 aa, Homo sapiens
  CDR3 for beta chain variable domain of TCR clone 353023 (TRBV11-2, TRBJ2-2)
CASSLPEELFF

SEQ ID NO: 706047 - protein, 11 aa, Homo sapiens
  CDR3 for alpha chain variable domain of TCR clone 353024 (TRAV1-2, TRAJ40)
CAVTGTYKYIF

SEQ ID NO: 706048 - protein, 16 aa, Homo sapiens
  CDR3 for beta chain variable domain of TCR clone 353024 (TRBV29-1, TRBJ2-7)
CSVAVVGTSGSYEQYF

SEQ ID NO: 706049 - protein, 19 aa, Homo sapiens
  CDR3 for alpha chain variable domain of TCR clone 353025 (TRAV3, TRAJ6)
CAVRDRNPSRSGGSYIPTF

SEQ ID NO: 706050 - protein, 15 aa, Homo sapiens
  CDR3 for beta chain variable domain of TCR clone 353025 (TRBV18, TRBJ2-7)
CASSPTFMNSYEQYF

SEQ ID NO: 706051 - protein, 13 aa, Homo sapiens
  CDR3 for alpha chain variable domain of TCR clone 353026 (TRAV21, TRAJ57)
CAVTQGGSEKLVF

SEQ ID NO: 706052 - protein, 15 aa, Homo sapiens
  CDR3 for beta chain variable domain of TCR clone 353026 (TRBV11-2, TRBJ2-1)
CASSRNRGLMYEQFF

SEQ ID NO: 706053 - protein, 12 aa, Homo sapiens
  CDR3 for alpha chain variable domain of TCR clone 353027 (TRAV13-2, TRAJ8)
CAPWLGFQKLVF

SEQ ID NO: 706054 - protein, 14 aa, Homo sapiens
  CDR3 for beta chain variable domain of TCR clone 353027 (TRBV18, TRBJ2-7)
CASSPGGGAYEQYF

SEQ ID NO: 706055 - protein, 11 aa, Homo sapiens
  CDR3 for alpha chain variable domain of TCR clone 353028 (TRAV12-2, TRAJ49)
CVLQGGNQFYF

SEQ ID NO: 706056 - protein, 14 aa, Homo sapiens
  CDR3 for beta chain variable domain of TCR clone 353028 (TRBV7-2, TRBJ2-7)
CASSPKTSFYEQYF

SEQ ID NO: 706057 - protein, 17 aa, Homo sapiens
  CDR3 for alpha chain variable domain of TCR clone 353029 (TRAV12-3, TRAJ26)
CAMSGGRWDNYGQNLFF

SEQ ID NO: 706058 - protein, 12 aa, Homo sapiens
  CDR3 for beta chain variable domain of TCR clone 353029 (TRBV19, TRBJ1-1)
CASSTTGIEAFF

SEQ ID NO: 706059 - protein, 12 aa, Homo sapiens
  CDR3 for alpha chain variable domain of TCR clone 353030 (TRAV1-1, TRAJ24)
CAVRGSCGNSSL

SEQ ID NO: 706060 - protein, 14 aa, Homo sapiens
  CDR3 for beta chain variable domain of TCR clone 353030 (TRBV20-1, TRBJ2-3)
CSARGGTSTDTQYF

SEQ ID NO: 706061 - protein, 12 aa, Homo sapiens
  CDR3 for alpha chain variable domain of TCR clone 353031 (TRAV12-2, TRAJ20)
CAVRPSDYKLSF

SEQ ID NO: 706062 - protein, 15 aa, Homo sapiens
  CDR3 for beta chain variable domain of TCR clone 353031 (TRBV6-1, TRBJ1-1)
CASRRGEGQLSEAFF

SEQ ID NO: 706063 - protein, 14 aa, Homo sapiens
  CDR3 for alpha chain variable domain of TCR clone 353032 (TRAV3, TRAJ36)
CAVRDGTGANNLCF

SEQ ID NO: 706064 - protein, 16 aa, Homo sapiens
  CDR3 for beta chain variable domain of TCR clone 353032 (TRBV7-3, TRBJ2-5)
CASIQPGGSVQETQYF

SEQ ID NO: 706065 - protein, 12 aa, Homo sapiens
  CDR3 for alpha chain variable domain of TCR clone 353033 (TRAV17, TRAJ57)
CATDGGSEKLVF

SEQ ID NO: 706066 - protein, 15 aa, Homo sapiens
  CDR3 for beta chain variable domain of TCR clone 353033 (TRBV7-2, TRBJ2-7)
CASSLVSSGSYEQYF

SEQ ID NO: 706067 - protein, 14 aa, Homo sapiens
  CDR3 for alpha chain variable domain of TCR clone 353034 (TRAV38-1, TRAJ45)
CASHSGGGADGLTF

SEQ ID NO: 706068 - protein, 14 aa, Homo sapiens
  CDR3 for beta chain variable domain of TCR clone 353034 (TRBV27, TRBJ2-5)
CASSSLKGWETQYF

SEQ ID NO: 706069 - protein, 15 aa, Homo sapiens
  CDR3 for alpha chain variable domain of TCR clone 353035 (TRAV26-1, TRAJ40)
CIFRAVPSGTYKYIF

SEQ ID NO: 706070 - protein, 14 aa, Homo sapiens
  CDR3 for beta chain variable domain of TCR clone 353035 (TRBV19, TRBJ2-1)
CASKDPGLANEQFF

SEQ ID NO: 706071 - protein, 14 aa, Homo sapiens
  CDR3 for alpha chain variable domain of TCR clone 353036 (TRAV1-2, TRAJ16)
CAVNRFSDVQKLLF

SEQ ID NO: 706072 - protein, 12 aa, Homo sapiens
  CDR3 for beta chain variable domain of TCR clone 353036 (TRBV27, TRBJ2-1)
CASRGFYNEQFF

SEQ ID NO: 706073 - protein, 15 aa, Homo sapiens
  CDR3 for alpha chain variable domain of TCR clone 353037 (TRAV34, TRAJ38)
CGADFTPGNNRKLIW

SEQ ID NO: 706074 - protein, 12 aa, Homo sapiens
  CDR3 for beta chain variable domain of TCR clone 353037 (TRBV5-1, TRBJ1-1)
CASSLTGAEAFF

SEQ ID NO: 706075 - protein, 13 aa, Homo sapiens
  CDR3 for alpha chain variable domain of TCR clone 353038 (TRAV12-1, TRAJ9)
CVVLNTGGFKTIF

SEQ ID NO: 706076 - protein, 13 aa, Homo sapiens
  CDR3 for beta chain variable domain of TCR clone 353038 (TRBV20-1, TRBJ1-1)
CSDRGGGNTEAFF

SEQ ID NO: 706077 - protein, 12 aa, Homo sapiens
  CDR3 for alpha chain variable domain of TCR clone 353039 (TRAV12-1, TRAJ40)
CVFSSGTYKYIF

SEQ ID NO: 706078 - protein, 18 aa, Homo sapiens
  CDR3 for beta chain variable domain of TCR clone 353039 (TRBV12-4, TRBJ2-2)
RASSLVAGTRGRTGELFF

SEQ ID NO: 706079 - protein, 13 aa, Homo sapiens
  CDR3 for alpha chain variable domain of TCR clone 353040 (TRAV13-1, TRAJ39)
CSKYSNAGNMLTF

SEQ ID NO: 706080 - protein, 14 aa, Homo sapiens
  CDR3 for beta chain variable domain of TCR clone 353040 (TRBV18, TRBJ2-5)
CASSPGVSQETQYF

SEQ ID NO: 706081 - protein, 13 aa, Homo sapiens
  CDR3 for alpha chain variable domain of TCR clone 353041 (TRAV13-1, TRAJ21)
CAASIYNFNKFYF

SEQ ID NO: 706082 - protein, 14 aa, Homo sapiens
  CDR3 for beta chain variable domain of TCR clone 353041 (TRBV19, TRBJ2-2)
CASSGQGIAGELFF

SEQ ID NO: 706083 - protein, 13 aa, Homo sapiens
  CDR3 for alpha chain variable domain of TCR clone 353042 (TRAV36/DV7, TRAJ33)
CAVDMDSNYQLIW

SEQ ID NO: 706084 - protein, 16 aa, Homo sapiens
  CDR3 for beta chain variable domain of TCR clone 353042 (TRBV15, TRBJ2-3)
CATRLSGRRAPDTQYF

SEQ ID NO: 706085 - protein, 14 aa, Homo sapiens
  CDR3 for alpha chain variable domain of TCR clone 353043 (TRAV8-2, TRAJ13)
CVVTASGGYQKVTF

SEQ ID NO: 706086 - protein, 15 aa, Homo sapiens
  CDR3 for beta chain variable domain of TCR clone 353043 (TRBV7-9, TRBJ1-6)
CASSSPGRGNSPLHF

SEQ ID NO: 706087 - protein, 13 aa, Homo sapiens
  CDR3 for alpha chain variable domain of TCR clone 353044 (TRAV20, TRAJ21)
CAVEGYNFNKFYF

SEQ ID NO: 706088 - protein, 14 aa, Homo sapiens
  CDR3 for beta chain variable domain of TCR clone 353044 (TRBV3-1, TRBJ2-5)
CASSQGPDQDTQYF

SEQ ID NO: 706089 - protein, 14 aa, Homo sapiens
  CDR3 for alpha chain variable domain of TCR clone 353045 (TRAV17, TRAJ53)
CATDAGGSNYKLTF

SEQ ID NO: 706090 - protein, 14 aa, Homo sapiens
  CDR3 for beta chain variable domain of TCR clone 353045 (TRBV20-1, TRBJ1-3)
CSASPTGAGNTIYF

SEQ ID NO: 706091 - protein, 12 aa, Homo sapiens
  CDR3 for alpha chain variable domain of TCR clone 353046 (TRAV16, TRAJ10)
CSRTGGGNKLTS

SEQ ID NO: 706092 - protein, 15 aa, Homo sapiens
  CDR3 for beta chain variable domain of TCR clone 353046 (TRBV11-3, TRBJ2-3)
CASPKDGREGDTQYF

SEQ ID NO: 706093 - protein, 11 aa, Homo sapiens
  CDR3 for alpha chain variable domain of TCR clone 353047 (TRAV2, TRAJ13)
CASVGYQTVTF

SEQ ID NO: 706094 - protein, 16 aa, Homo sapiens
  CDR3 for beta chain variable domain of TCR clone 353047 (TRBV6-1, TRBJ2-5)
CASSETLDRGAETQYF

SEQ ID NO: 706095 - protein, 14 aa, Homo sapiens
  CDR3 for alpha chain variable domain of TCR clone 353048 (TRAV29/DV5, TRAJ20)
CAASAPIEAYKLSF

SEQ ID NO: 706096 - protein, 15 aa, Homo sapiens
  CDR3 for beta chain variable domain of TCR clone 353048 (TRBV20-1, TRBJ2-5)
CSAPPRTGFGETQYF

SEQ ID NO: 706097 - protein, 15 aa, Homo sapiens
  CDR3 for alpha chain variable domain of TCR clone 353049 (TRAV4, TRAJ39)
CLVGPNNNAGNMLTF

SEQ ID NO: 706098 - protein, 11 aa, Homo sapiens
  CDR3 for beta chain variable domain of TCR clone 353049 (TRBV7-2, TRBJ2-3)
CASSLGDTQYF

SEQ ID NO: 706099 - protein, 14 aa, Homo sapiens
  CDR3 for alpha chain variable domain of TCR clone 353050 (TRAV13-1, TRAJ12)
CAASYMDSSYKLIY

SEQ ID NO: 706100 - protein, 13 aa, Homo sapiens
  CDR3 for beta chain variable domain of TCR clone 353050 (TRBV2, TRBJ2-5)
CASSDGIQETQYF

SEQ ID NO: 706101 - protein, 12 aa, Homo sapiens
  CDR3 for alpha chain variable domain of TCR clone 353051 (TRAV17, TRAJ4)
CATDGGSNKLIF

SEQ ID NO: 706102 - protein, 13 aa, Homo sapiens
  CDR3 for beta chain variable domain of TCR clone 353051 (TRBV29-1, TRBJ2-2)
CNTTGVNTGELFF

SEQ ID NO: 706103 - protein, 18 aa, Homo sapiens
  CDR3 for alpha chain variable domain of TCR clone 353052 (TRAV26-1, TRAJ52)
CIVRGEGAGGTSYGKLTF

SEQ ID NO: 706104 - protein, 13 aa, Homo sapiens
  CDR3 for beta chain variable domain of TCR clone 353052 (TRBV7-3, TRBJ1-2)
CASSLKRGYGYTF

SEQ ID NO: 706105 - protein, 13 aa, Homo sapiens
  CDR3 for alpha chain variable domain of TCR clone 353053 (TRAV13-1, TRAJ5)
CAASDTGRRALTF

SEQ ID NO: 706106 - protein, 15 aa, Homo sapiens
  CDR3 for beta chain variable domain of TCR clone 353053 (TRBV7-9, TRBJ1-6)
CASSSPGRGNSPLHF

SEQ ID NO: 706107 - protein, 15 aa, Homo sapiens
  CDR3 for alpha chain variable domain of TCR clone 353054 (TRAV3, TRAJ13)
CAVRVCSGGYQKVTF

SEQ ID NO: 706108 - protein, 15 aa, Homo sapiens
  CDR3 for beta chain variable domain of TCR clone 353054 (TRBV5-7, TRBJ1-2)
CASSLGVAANYGYTF

SEQ ID NO: 706109 - protein, 16 aa, Homo sapiens
  CDR3 for alpha chain variable domain of TCR clone 353055 (TRAV27, TRAJ13)
CAGAKSDSGGYQKVTF

SEQ ID NO: 706110 - protein, 15 aa, Homo sapiens
  CDR3 for beta chain variable domain of TCR clone 353055 (TRBV29-1, TRBJ2-1)
CSVGSHALFYNEQFF

SEQ ID NO: 706111 - protein, 16 aa, Homo sapiens
  CDR3 for alpha chain variable domain of TCR clone 353056 (TRAV30, TRAJ24)
CGTEIVDADSWGKFQF

SEQ ID NO: 706112 - protein, 18 aa, Homo sapiens
  CDR3 for beta chain variable domain of TCR clone 353056 (TRBV7-2, TRBJ2-3)
CASSLETSRGRKADTQYF

SEQ ID NO: 706113 - protein, 15 aa, Homo sapiens
  CDR3 for alpha chain variable domain of TCR clone 353057 (TRAV26-1, TRAJ29)
GIVRVEGSGNTPLVF

SEQ ID NO: 706114 - protein, 14 aa, Homo sapiens
  CDR3 for beta chain variable domain of TCR clone 353057 (TRBV7-9, TRBJ1-5)
CQQPRSQPNQPQHF

SEQ ID NO: 706115 - protein, 13 aa, Homo sapiens
  CDR3 for alpha chain variable domain of TCR clone 353058 (TRAV8-3, TRAJ37)
RAVPSSNTGKLIF

SEQ ID NO: 706116 - protein, 12 aa, Homo sapiens
  CDR3 for beta chain variable domain of TCR clone 353058 (TRBV11-2, TRBJ2-1)
CASSPGNNEQFF

SEQ ID NO: 706117 - protein, 16 aa, Homo sapiens
  CDR3 for alpha chain variable domain of TCR clone 353059 (TRAV16, TRAJ24)
CALSGGSTDSWGKLQL

SEQ ID NO: 706118 - protein, 15 aa, Homo sapiens
  CDR3 for beta chain variable domain of TCR clone 353059 (TRBV27, TRBJ2-1)
CASSNGGGSSNEQFF

SEQ ID NO: 706119 - protein, 17 aa, Homo sapiens
  CDR3 for alpha chain variable domain of TCR clone 353060 (TRAV3, TRAJ28)
CAVREAYSGAGSYQLTF

SEQ ID NO: 706120 - protein, 15 aa, Homo sapiens
  CDR3 for beta chain variable domain of TCR clone 353060 (TRBV2, TRBJ2-1)
CASSEARSAYNEQFF

SEQ ID NO: 706121 - protein, 14 aa, Homo sapiens
  CDR3 for alpha chain variable domain of TCR clone 353061 (TRAV13-1, TRAJ39)
CAASEGNAGNMLTF

SEQ ID NO: 706122 - protein, 13 aa, Homo sapiens
  CDR3 for beta chain variable domain of TCR clone 353061 (TRBV20-1, TRBJ1-1)
CSARGGGNTEAFF

SEQ ID NO: 706123 - protein, 18 aa, Homo sapiens
  CDR3 for alpha chain variable domain of TCR clone 353062 (TRAV21, TRAJ52)
CALRPSPAGGTSYGKLTF

SEQ ID NO: 706124 - protein, 17 aa, Homo sapiens
  CDR3 for beta chain variable domain of TCR clone 353062 (TRBV13, TRBJ2-3)
CASSLSRVAGGRSTQYF

SEQ ID NO: 706125 - protein, 16 aa, Homo sapiens
  CDR3 for alpha chain variable domain of TCR clone 353063 (TRAV17, TRAJ22)
CATGPISSGSARQLTF

SEQ ID NO: 706126 - protein, 13 aa, Homo sapiens
  CDR3 for beta chain variable domain of TCR clone 353063 (TRBV19, TRBJ1-2)
CASSVPGQDGYTF

SEQ ID NO: 706127 - protein, 14 aa, Homo sapiens
  CDR3 for alpha chain variable domain of TCR clone 353064 (TRAV35, TRAJ42)
CCVPYGGSQGNLIF

SEQ ID NO: 706128 - protein, 20 aa, Homo sapiens
  CDR3 for beta chain variable domain of TCR clone 353064 (TRBV7-8, TRBJ2-2)
CASSHLFPGPTIHITGELFF

SEQ ID NO: 706129 - protein, 12 aa, Homo sapiens
  CDR3 for alpha chain variable domain of TCR clone 353065 (TRAV12-1, TRAJ33)
CVVIPSNYQLIW

SEQ ID NO: 706130 - protein, 17 aa, Homo sapiens
  CDR3 for beta chain variable domain of TCR clone 353065 (TRBV28, TRBJ2-3)
CASSFVGGSKSTDTQYF

SEQ ID NO: 706131 - protein, 13 aa, Homo sapiens
  CDR3 for alpha chain variable domain of TCR clone 353066 (TRAV29/DV5, TRAJ47)
CAASAEDGNQLVF

SEQ ID NO: 706132 - protein, 15 aa, Homo sapiens
  CDR3 for beta chain variable domain of TCR clone 353066 (TRBV7-9, TRBJ1-4)
CASSARTGGNEKLFF

SEQ ID NO: 706133 - protein, 12 aa, Homo sapiens
  CDR3 for alpha chain variable domain of TCR clone 353067 (TRAV12-1, TRAJ31)
RVVNRNNARLMF

SEQ ID NO: 706134 - protein, 15 aa, Homo sapiens
  CDR3 for beta chain variable domain of TCR clone 353067 (TRBV10-3, TRBJ2-3)
CAISEALSSTDTQYF

SEQ ID NO: 706135 - protein, 16 aa, Homo sapiens
  CDR3 for alpha chain variable domain of TCR clone 353068 (TRAV30, TRAJ24)
CGTEIVDADSWGKFQF

SEQ ID NO: 706136 - protein, 17 aa, Homo sapiens
  CDR3 for beta chain variable domain of TCR clone 353068 (TRBV19, TRBJ1-5)
CASSPGAYSGENQHQHF

SEQ ID NO: 706137 - protein, 15 aa, Homo sapiens
  CDR3 for alpha chain variable domain of TCR clone 353069 (TRAV35, TRAJ28)
CAGRRTGAGSYQLTF

SEQ ID NO: 706138 - protein, 13 aa, Homo sapiens
  CDR3 for beta chain variable domain of TCR clone 353069 (TRBV2, TRBJ2-7)
CASTGGSSYEQYF

SEQ ID NO: 706139 - protein, 18 aa, Homo sapiens
  CDR3 for alpha chain variable domain of TCR clone 353070 (TRAV29/DV5, TRAJ53)
CSVLLCRKRGGSNYKLTF

SEQ ID NO: 706140 - protein, 17 aa, Homo sapiens
  CDR3 for beta chain variable domain of TCR clone 353070 (TRBV7-8, TRBJ2-6)
CASSAGTGGAGANVLTF

SEQ ID NO: 706141 - protein, 13 aa, Homo sapiens
  CDR3 for alpha chain variable domain of TCR clone 353071 (TRAV13-1, TRAJ5)
CAASDTGRKALTF

SEQ ID NO: 706142 - protein, 12 aa, Homo sapiens
  CDR3 for beta chain variable domain of TCR clone 353071 (TRBV28, TRBJ2-3)
CASSVYRDTQYF

SEQ ID NO: 706143 - protein, 16 aa, Homo sapiens
  CDR3 for alpha chain variable domain of TCR clone 353072 (TRAV20, TRAJ22)
CAVQASSSGSARQLTF

SEQ ID NO: 706144 - protein, 14 aa, Homo sapiens
  CDR3 for beta chain variable domain of TCR clone 353072 (TRBV4-1, TRBJ2-2)
CASSQAVNTGELFF

SEQ ID NO: 706145 - protein, 12 aa, Homo sapiens
  CDR3 for alpha chain variable domain of TCR clone 353073 (TRAV13-2, TRAJ23)
RAERHRGGKLIF

SEQ ID NO: 706146 - protein, 19 aa, Homo sapiens
  CDR3 for beta chain variable domain of TCR clone 353073 (TRBV19, TRBJ2-5)
CAGSIGQVTDFFLGETQYF

SEQ ID NO: 706147 - protein, 11 aa, Homo sapiens
  CDR3 for alpha chain variable domain of TCR clone 353074 (TRAV3, TRAJ21)
FAVGTFNKFYF

SEQ ID NO: 706148 - protein, 16 aa, Homo sapiens
  CDR3 for beta chain variable domain of TCR clone 353074 (TRBV19, TRBJ2-1)
CASSKAGPSSYNEQFF

SEQ ID NO: 706149 - protein, 14 aa, Homo sapiens
  CDR3 for alpha chain variable domain of TCR clone 353075 (TRAV12-2, TRAJ15)
CAPHTGQAGTALIF

SEQ ID NO: 706150 - protein, 13 aa, Homo sapiens
  CDR3 for beta chain variable domain of TCR clone 353075 (TRBV10-3, TRBJ2-7)
CASKLAVNYEQYF

SEQ ID NO: 706151 - protein, 12 aa, Homo sapiens
  CDR3 for alpha chain variable domain of TCR clone 353076 (TRAV30, TRAJ39)
CGRGNAGNMLTF

SEQ ID NO: 706152 - protein, 12 aa, Homo sapiens
  CDR3 for beta chain variable domain of TCR clone 353076 (TRBV7-8, TRBJ2-5)
CASSPRVETQYF

SEQ ID NO: 706153 - protein, 15 aa, Homo sapiens
  CDR3 for alpha chain variable domain of TCR clone 353077 (TRAV12-2, TRAJ8)
FAVREENTGFQKLVF

SEQ ID NO: 706154 - protein, 15 aa, Homo sapiens
  CDR3 for beta chain variable domain of TCR clone 353077 (TRBV28, TRBJ2-4)
CAAGSGTLLMGIQYF

SEQ ID NO: 706155 - protein, 14 aa, Homo sapiens
  CDR3 for alpha chain variable domain of TCR clone 353078 (TRAV26-1, TRAJ38)
CIADNAGNNRKLIW

SEQ ID NO: 706156 - protein, 16 aa, Homo sapiens
  CDR3 for beta chain variable domain of TCR clone 353078 (TRBV13, TRBJ2-3)
CQQPLQGSGGRNTQYF

SEQ ID NO: 706157 - protein, 13 aa, Homo sapiens
  CDR3 for alpha chain variable domain of TCR clone 353079 (TRAV1-2, TRAJ12)
CAAWMDSSYKLIF

SEQ ID NO: 706158 - protein, 18 aa, Homo sapiens
  CDR3 for beta chain variable domain of TCR clone 353079 (TRBV6-6, TRBJ2-5)
CASSCSWLQGALRETQYF

SEQ ID NO: 706159 - protein, 12 aa, Homo sapiens
  CDR3 for alpha chain variable domain of TCR clone 353080 (TRAV12-2, TRAJ9)
CAVYNGGFKNIF

SEQ ID NO: 706160 - protein, 14 aa, Homo sapiens
  CDR3 for beta chain variable domain of TCR clone 353080 (TRBV6-1, TRBJ1-5)
CASSETGMEQPQHF

SEQ ID NO: 706161 - protein, 13 aa, Homo sapiens
  CDR3 for alpha chain variable domain of TCR clone 353081 (TRAV13-1, TRAJ21)
CAASIYNFSKFYF

SEQ ID NO: 706162 - protein, 13 aa, Homo sapiens
  CDR3 for beta chain variable domain of TCR clone 353081 (TRBV27, TRBJ1-4)
CASCLMGDEKLFF

SEQ ID NO: 706163 - protein, 15 aa, Homo sapiens
  CDR3 for alpha chain variable domain of TCR clone 353082 (TRAV19, TRAJ53)
CALSSSGVSNYKLTF

SEQ ID NO: 706164 - protein, 13 aa, Homo sapiens
  CDR3 for beta chain variable domain of TCR clone 353082 (TRBV7-6, TRBJ2-7)
CASSLDHTHEQYF

SEQ ID NO: 706165 - protein, 14 aa, Homo sapiens
  CDR3 for alpha chain variable domain of TCR clone 353083 (TRAV26-1, TRAJ49)
CIVRLTNTGNKFYF

SEQ ID NO: 706166 - protein, 13 aa, Homo sapiens
  CDR3 for beta chain variable domain of TCR clone 353083 (TRBV4-1, TRBJ2-7)
CASSQGQAYEQYF

SEQ ID NO: 706167 - protein, 16 aa, Homo sapiens
  CDR3 for alpha chain variable domain of TCR clone 353084 (TRAV13-2, TRAJ32)
CAENMNYGGATNKLIF

SEQ ID NO: 706168 - protein, 14 aa, Homo sapiens
  CDR3 for beta chain variable domain of TCR clone 353084 (TRBV15, TRBJ2-5)
CPTSSTGYQETQYF

SEQ ID NO: 706169 - protein, 17 aa, Homo sapiens
  CDR3 for alpha chain variable domain of TCR clone 353085 (TRAV3, TRAJ6)
CAVRDGPRAGGSYLPTF

SEQ ID NO: 706170 - protein, 14 aa, Homo sapiens
  CDR3 for beta chain variable domain of TCR clone 353085 (TRBV7-2, TRBJ2-7)
CASSPRTSFYEQYF

SEQ ID NO: 706171 - protein, 14 aa, Homo sapiens
  CDR3 for alpha chain variable domain of TCR clone 353086 (TRAV16, TRAJ33)
CALSAMDSNYQLIW

SEQ ID NO: 706172 - protein, 15 aa, Homo sapiens
  CDR3 for beta chain variable domain of TCR clone 353086 (TRBV9, TRBJ1-6)
CASSVAGTGDSPLYF

SEQ ID NO: 706173 - protein, 15 aa, Homo sapiens
  CDR3 for alpha chain variable domain of TCR clone 353087 (TRAV2, TRAJ24)
CAVEVLTDSWGTFQF

SEQ ID NO: 706174 - protein, 13 aa, Homo sapiens
  CDR3 for beta chain variable domain of TCR clone 353087 (TRBV10-2, TRBJ2-7)
CASGTSGGYEQYF

SEQ ID NO: 706175 - protein, 14 aa, Homo sapiens
  CDR3 for alpha chain variable domain of TCR clone 353088 (TRAV13-1, TRAJ9)
CAASALTGGFKTIF

SEQ ID NO: 706176 - protein, 15 aa, Homo sapiens
  CDR3 for beta chain variable domain of TCR clone 353088 (TRBV5-1, TRBJ2-3)
CASSYTSGSTDTQYF

SEQ ID NO: 706177 - protein, 19 aa, Homo sapiens
  CDR3 for alpha chain variable domain of TCR clone 353089 (TRAV38-1, TRAJ53)
CAFMKHGLESGGSNYKLTF

SEQ ID NO: 706178 - protein, 13 aa, Homo sapiens
  CDR3 for beta chain variable domain of TCR clone 353089 (TRBV19, TRBJ2-7)
CASGPRQSYEQYF

SEQ ID NO: 706179 - protein, 11 aa, Homo sapiens
  CDR3 for alpha chain variable domain of TCR clone 353090 (TRAV2, TRAJ33)
CAVESYYQLIW

SEQ ID NO: 706180 - protein, 15 aa, Homo sapiens
  CDR3 for beta chain variable domain of TCR clone 353090 (TRBV19, TRBJ1-1)
CASTSGQIQNTEAFF

SEQ ID NO: 706181 - protein, 13 aa, Homo sapiens
  CDR3 for alpha chain variable domain of TCR clone 353091 (TRAV35, TRAJ36)
CAGPRIGANNLFF

SEQ ID NO: 706182 - protein, 15 aa, Homo sapiens
  CDR3 for beta chain variable domain of TCR clone 353091 (TRBV7-3, TRBJ2-2)
CASSETGQGTGELFF

SEQ ID NO: 706183 - protein, 13 aa, Homo sapiens
  CDR3 for alpha chain variable domain of TCR clone 353092 (TRAV2, TRAJ27)
CAVEAPMQANQPL

SEQ ID NO: 706184 - protein, 17 aa, Homo sapiens
  CDR3 for beta chain variable domain of TCR clone 353092 (TRBV3-1, TRBJ2-2)
CASSQFRDKVDTGELFF

SEQ ID NO: 706185 - protein, 14 aa, Homo sapiens
  CDR3 for alpha chain variable domain of TCR clone 353093 (TRAV12-2, TRAJ17)
CAVPFKAAGNKLTF

SEQ ID NO: 706186 - protein, 12 aa, Homo sapiens
  CDR3 for beta chain variable domain of TCR clone 353093 (TRBV5-7, TRBJ1-1)
CASSLGRGKAFF

SEQ ID NO: 706187 - protein, 16 aa, Homo sapiens
  CDR3 for alpha chain variable domain of TCR clone 353094 (TRAV12-3, TRAJ53)
SAMSPGSGGSNYNLTF

SEQ ID NO: 706188 - protein, 11 aa, Homo sapiens
  CDR3 for beta chain variable domain of TCR clone 353094 (TRBV29-1, TRBJ2-5)
CSEDRTGTQYF

SEQ ID NO: 706189 - protein, 14 aa, Homo sapiens
  CDR3 for alpha chain variable domain of TCR clone 353095 (TRAV23/DV6, TRAJ37)
CAASTPSNTGKLIF

SEQ ID NO: 706190 - protein, 13 aa, Homo sapiens
  CDR3 for beta chain variable domain of TCR clone 353095 (TRBV7-7, TRBJ1-1)
CASSLGANTEAFF

SEQ ID NO: 706191 - protein, 13 aa, Homo sapiens
  CDR3 for alpha chain variable domain of TCR clone 353096 (TRAV8-4, TRAJ48)
CAVSLFGNEKLTF

SEQ ID NO: 706192 - protein, 17 aa, Homo sapiens
  CDR3 for beta chain variable domain of TCR clone 353096 (TRBV20-1, TRBJ2-7)
CSARKGLAGPTSSTSGR

SEQ ID NO: 706193 - protein, 11 aa, Homo sapiens
  CDR3 for alpha chain variable domain of TCR clone 353097 (TRAV13-1, TRAJ15)
CAATPGTALIF

SEQ ID NO: 706194 - protein, 15 aa, Homo sapiens
  CDR3 for beta chain variable domain of TCR clone 353097 (TRBV28, TRBJ2-5)
CASSPPWSYKETQYF

SEQ ID NO: 706195 - protein, 13 aa, Homo sapiens
  CDR3 for alpha chain variable domain of TCR clone 353098 (TRAV20, TRAJ48)
CAVQGVGNEKLTF

SEQ ID NO: 706196 - protein, 14 aa, Homo sapiens
  CDR3 for beta chain variable domain of TCR clone 353098 (TRBV27, TRBJ2-7)
CASSFRDGRYEQYF

SEQ ID NO: 706197 - protein, 12 aa, Homo sapiens
  CDR3 for alpha chain variable domain of TCR clone 353099 (TRAV25, TRAJ38)
CAGTGNNRKLIW

SEQ ID NO: 706198 - protein, 17 aa, Homo sapiens
  CDR3 for beta chain variable domain of TCR clone 353099 (TRBV4-2, TRBJ1-1)
CASTQFGGGSGNTEAFF

SEQ ID NO: 706199 - protein, 11 aa, Homo sapiens
  CDR3 for alpha chain variable domain of TCR clone 353100 (TRAV12-2, TRAJ27)
CAMANAGKSTF

SEQ ID NO: 706200 - protein, 15 aa, Homo sapiens
  CDR3 for beta chain variable domain of TCR clone 353100 (TRBV27, TRBJ2-5)
CASSLYPRGGETQYF

SEQ ID NO: 706201 - protein, 13 aa, Homo sapiens
  CDR3 for alpha chain variable domain of TCR clone 353101 (TRAV20, TRAJ20)
FAVRWVRDYKLSF

SEQ ID NO: 706202 - protein, 14 aa, Homo sapiens
  CDR3 for beta chain variable domain of TCR clone 353101 (TRBV19, TRBJ2-2)
CASTVTANTGELFF

SEQ ID NO: 706203 - protein, 15 aa, Homo sapiens
  CDR3 for alpha chain variable domain of TCR clone 353102 (TRAV12-3, TRAJ6)
CAMSASIGGSYIPTF

SEQ ID NO: 706204 - protein, 16 aa, Homo sapiens
  CDR3 for beta chain variable domain of TCR clone 353102 (TRBV20-1, TRBJ1-2)
CSASMGQGVANYGYTF

SEQ ID NO: 706205 - protein, 12 aa, Homo sapiens
  CDR3 for alpha chain variable domain of TCR clone 353103 (TRAV3, TRAJ43)
CAMRDPNNDMRF

SEQ ID NO: 706206 - protein, 14 aa, Homo sapiens
  CDR3 for beta chain variable domain of TCR clone 353103 (TRBV19, TRBJ2-5)
CASSMTGQQETQYF

SEQ ID NO: 706207 - protein, 17 aa, Homo sapiens
  CDR3 for alpha chain variable domain of TCR clone 353104 (TRAV3, TRAJ6)
CAMRDGPRAGGSYVPTF

SEQ ID NO: 706208 - protein, 15 aa, Homo sapiens
  CDR3 for beta chain variable domain of TCR clone 353104 (TRBV11-3, TRBJ2-7)
CASSPGPASSYEQYF

SEQ ID NO: 706209 - protein, 14 aa, Homo sapiens
  CDR3 for alpha chain variable domain of TCR clone 353105 (TRAV26-1, TRAJ45)
CIEVTGGGADGLTF

SEQ ID NO: 706210 - protein, 13 aa, Homo sapiens
  CDR3 for beta chain variable domain of TCR clone 353105 (TRBV10-3, TRBJ2-7)
CASKLAVNYEQYF

SEQ ID NO: 706211 - protein, 14 aa, Homo sapiens
  CDR3 for alpha chain variable domain of TCR clone 353106 (TRAV12-3, TRAJ40)
RAMGGFSGTYKYIF

SEQ ID NO: 706212 - protein, 11 aa, Homo sapiens
  CDR3 for beta chain variable domain of TCR clone 353106 (TRBV6-3, TRBJ2-3)
CATGQADTQYF

SEQ ID NO: 706213 - protein, 11 aa, Homo sapiens
  CDR3 for alpha chain variable domain of TCR clone 353107 (TRAV2, TRAJ13)
CASGGYQKVTF

SEQ ID NO: 706214 - protein, 14 aa, Homo sapiens
  CDR3 for beta chain variable domain of TCR clone 353107 (TRBV7-3, TRBJ2-1)
RAISLAGGTNEQFF

SEQ ID NO: 706215 - protein, 16 aa, Homo sapiens
  CDR3 for alpha chain variable domain of TCR clone 353108 (TRAV30, TRAJ24)
CGTEIVDADSWGKFQF

SEQ ID NO: 706216 - protein, 12 aa, Homo sapiens
  CDR3 for beta chain variable domain of TCR clone 353108 (TRBV4-1, TRBJ2-3)
CVSSQGTDTQYF

SEQ ID NO: 706217 - protein, 16 aa, Homo sapiens
  CDR3 for alpha chain variable domain of TCR clone 353109 (TRAV30, TRAJ24)
CGTEIVDADSWGKFKF

SEQ ID NO: 706218 - protein, 17 aa, Homo sapiens
  CDR3 for beta chain variable domain of TCR clone 353109 (TRBV7-9, TRBJ2-3)
CASSPTVAGDLTDTQYF

SEQ ID NO: 706219 - protein, 12 aa, Homo sapiens
  CDR3 for alpha chain variable domain of TCR clone 353110 (TRAV21, TRAJ3)
CCYYSSASKIIF

SEQ ID NO: 706220 - protein, 16 aa, Homo sapiens
  CDR3 for beta chain variable domain of TCR clone 353110 (TRBV19, TRBJ2-1)
CASSKAGPSSYNEQFF

SEQ ID NO: 706221 - protein, 12 aa, Homo sapiens
  CDR3 for alpha chain variable domain of TCR clone 353111 (TRAV26-1, TRAJ26)
CIVYNYGQNFFF

SEQ ID NO: 706222 - protein, 15 aa, Homo sapiens
  CDR3 for beta chain variable domain of TCR clone 353111 (TRBV7-2, TRBJ2-3)
CASSLRGGSTDTQYF

SEQ ID NO: 706223 - protein, 14 aa, Homo sapiens
  CDR3 for alpha chain variable domain of TCR clone 353112 (TRAV22, TRAJ6)
CAGVGPGGSYIPTS

SEQ ID NO: 706224 - protein, 16 aa, Homo sapiens
  CDR3 for beta chain variable domain of TCR clone 353112 (TRBV12-5, TRBJ2-5)
CASGPRTSGNQETQYF

SEQ ID NO: 706225 - protein, 15 aa, Homo sapiens
  CDR3 for alpha chain variable domain of TCR clone 353113 (TRAV21, TRAJ40)
CAVSPQTSGTYKYIF

SEQ ID NO: 706226 - protein, 13 aa, Homo sapiens
  CDR3 for beta chain variable domain of TCR clone 353113 (TRBV7-2, TRBJ2-2)
CASSSVRARELFF

SEQ ID NO: 706227 - protein, 12 aa, Homo sapiens
  CDR3 for alpha chain variable domain of TCR clone 353114 (TRAV12-3, TRAJ17)
CAMTLTGNKLTF

SEQ ID NO: 706228 - protein, 15 aa, Homo sapiens
  CDR3 for beta chain variable domain of TCR clone 353114 (TRBV6-3, TRBJ2-7)
RASSSPGTVFYEQYF

SEQ ID NO: 706229 - protein, 13 aa, Homo sapiens
  CDR3 for alpha chain variable domain of TCR clone 353115 (TRAV16, TRAJ31)
CALGAHNNARLMF

SEQ ID NO: 706230 - protein, 17 aa, Homo sapiens
  CDR3 for beta chain variable domain of TCR clone 353115 (TRBV12-4, TRBJ2-1)
CASSPGLAGGRINEQFF

SEQ ID NO: 706231 - protein, 14 aa, Homo sapiens
  CDR3 for alpha chain variable domain of TCR clone 353116 (TRAV12-3, TRAJ10)
SHLPLTGGGNKLTF

SEQ ID NO: 706232 - protein, 15 aa, Homo sapiens
  CDR3 for beta chain variable domain of TCR clone 353116 (TRBV20-1, TRBJ1-6)
CSARAASSYNSPLYF

SEQ ID NO: 706233 - protein, 13 aa, Homo sapiens
  CDR3 for alpha chain variable domain of TCR clone 353117 (TRAV23/DV6, TRAJ9)
CAASTTGGFKTIF

SEQ ID NO: 706234 - protein, 14 aa, Homo sapiens
  CDR3 for beta chain variable domain of TCR clone 353117 (TRBV19, TRBJ2-5)
CASSMTGQQETQYF

SEQ ID NO: 706235 - protein, 14 aa, Homo sapiens
  CDR3 for alpha chain variable domain of TCR clone 353118 (TRAV1-2, TRAJ16)
CAVNRFSDVQKLLF

SEQ ID NO: 706236 - protein, 15 aa, Homo sapiens
  CDR3 for beta chain variable domain of TCR clone 353118 (TRBV18, TRBJ1-1)
CASSGRTGEVTEAFF

SEQ ID NO: 706237 - protein, 18 aa, Homo sapiens
  CDR3 for alpha chain variable domain of TCR clone 353119 (TRAV26-1, TRAJ30)
CCVLLHRQSTSRDDKIIF

SEQ ID NO: 706238 - protein, 18 aa, Homo sapiens
  CDR3 for beta chain variable domain of TCR clone 353119 (TRBV4-1, TRBJ1-5)
CASSQDPRGQGLNQSQHF

SEQ ID NO: 706239 - protein, 11 aa, Homo sapiens
  CDR3 for alpha chain variable domain of TCR clone 353120 (TRAV2, TRAJ13)
CASGGYQKVTF

SEQ ID NO: 706240 - protein, 15 aa, Homo sapiens
  CDR3 for beta chain variable domain of TCR clone 353120 (TRBV19, TRBJ2-1)
CAISIGLAGWDEQFF

SEQ ID NO: 706241 - protein, 14 aa, Homo sapiens
  CDR3 for alpha chain variable domain of TCR clone 353121 (TRAV12-2, TRAJ40)
CAVKIPSGTYKYIF

SEQ ID NO: 706242 - protein, 16 aa, Homo sapiens
  CDR3 for beta chain variable domain of TCR clone 353121 (TRBV11-2, TRBJ1-1)
CASSLRQGGEHSKAFF

SEQ ID NO: 706243 - protein, 16 aa, Homo sapiens
  CDR3 for alpha chain variable domain of TCR clone 353122 (TRAV29/DV5, TRAJ30)
QCTSVQQAHRDDKIIF

SEQ ID NO: 706244 - protein, 13 aa, Homo sapiens
  CDR3 for beta chain variable domain of TCR clone 353122 (TRBV12-5, TRBJ2-3)
CASQNRGTDTQYF

SEQ ID NO: 706245 - protein, 12 aa, Homo sapiens
  CDR3 for alpha chain variable domain of TCR clone 353123 (TRAV13-1, TRAJ53)
AASGGSNYKLTF

SEQ ID NO: 706246 - protein, 14 aa, Homo sapiens
  CDR3 for beta chain variable domain of TCR clone 353123 (TRBV19, TRBJ2-1)
CASPTFVLSGEQFF

SEQ ID NO: 706247 - protein, 14 aa, Homo sapiens
  CDR3 for alpha chain variable domain of TCR clone 353124 (TRAV12-2, TRAJ13)
CAVKKTGGYQKVTF

SEQ ID NO: 706248 - protein, 17 aa, Homo sapiens
  CDR3 for beta chain variable domain of TCR clone 353124 (TRBV27, TRBJ2-3)
CASSFFPPNTSTDTQYF

SEQ ID NO: 706249 - protein, 11 aa, Homo sapiens
  CDR3 for alpha chain variable domain of TCR clone 353125 (TRAV3, TRAJ21)
CAVGNFNKFYF

SEQ ID NO: 706250 - protein, 16 aa, Homo sapiens
  CDR3 for beta chain variable domain of TCR clone 353125 (TRBV19, TRBJ2-1)
CARSKAGTSSYNEQFF

SEQ ID NO: 706251 - protein, 15 aa, Homo sapiens
  CDR3 for alpha chain variable domain of TCR clone 353126 (TRAV8-3, TRAJ11)
CAVGMLNSGYSTLTF

SEQ ID NO: 706252 - protein, 16 aa, Homo sapiens
  CDR3 for beta chain variable domain of TCR clone 353126 (TRBV7-9, TRBJ1-2)
CASSLGFSSGGDGYTF

SEQ ID NO: 706253 - protein, 13 aa, Homo sapiens
  CDR3 for alpha chain variable domain of TCR clone 353127 (TRAV8-2, TRAJ49)
CVVTSNTGNQFYF

SEQ ID NO: 706254 - protein, 15 aa, Homo sapiens
  CDR3 for beta chain variable domain of TCR clone 353127 (TRBV11-2, TRBJ2-1)
CASSLTSGGYNEQFF

SEQ ID NO: 706255 - protein, 15 aa, Homo sapiens
  CDR3 for alpha chain variable domain of TCR clone 353128 (TRAV8-3, TRAJ11)
CAVGLLNSGYSTLTF

SEQ ID NO: 706256 - protein, 23 aa, Homo sapiens
  CDR3 for beta chain variable domain of TCR clone 353128 (TRBV7-9, TRBJ1-2)
EAQLEKSRMLSDRFSSGEDGYTF

SEQ ID NO: 706257 - protein, 14 aa, Homo sapiens
  CDR3 for alpha chain variable domain of TCR clone 353129 (TRAV1-2, TRAJ29)
CAVRELTSATPLVF

SEQ ID NO: 706258 - protein, 13 aa, Homo sapiens
  CDR3 for beta chain variable domain of TCR clone 353129 (TRBV12-5, TRBJ2-3)
CASGDRQSDTQYF

SEQ ID NO: 706259 - protein, 13 aa, Homo sapiens
  CDR3 for alpha chain variable domain of TCR clone 353130 (TRAV35, TRAJ44)
CAGLSGTASKLTF

SEQ ID NO: 706260 - protein, 18 aa, Homo sapiens
  CDR3 for beta chain variable domain of TCR clone 353130 (TRBV12-4, TRBJ2-4)
CASSRTGAVDVAKNIQYF

SEQ ID NO: 706261 - protein, 15 aa, Homo sapiens
  CDR3 for alpha chain variable domain of TCR clone 353131 (TRAV12-1, TRAJ42)
CVVKTGGGSQGNLIF

SEQ ID NO: 706262 - protein, 15 aa, Homo sapiens
  CDR3 for beta chain variable domain of TCR clone 353131 (TRBV7-3, TRBJ2-2)
CASSETGQGTGELFF

SEQ ID NO: 706263 - protein, 12 aa, Homo sapiens
  CDR3 for alpha chain variable domain of TCR clone 353132 (TRAV2, TRAJ9)
CAVGAGGFKTIF

SEQ ID NO: 706264 - protein, 11 aa, Homo sapiens
  CDR3 for beta chain variable domain of TCR clone 353132 (TRBV13, TRBJ2-2)
CDSSPRTGEHT

SEQ ID NO: 706265 - protein, 14 aa, Homo sapiens
  CDR3 for alpha chain variable domain of TCR clone 353133 (TRAV2, TRAJ9)
CAVEGRSGGFKTIF

SEQ ID NO: 706266 - protein, 16 aa, Homo sapiens
  CDR3 for beta chain variable domain of TCR clone 353133 (TRBV15, TRBJ2-7)
CATSRDGGIPSYEQYF

SEQ ID NO: 706267 - protein, 13 aa, Homo sapiens
  CDR3 for alpha chain variable domain of TCR clone 353134 (TRAV12-3, TRAJ7)
CAMTPYGNNRLAF

SEQ ID NO: 706268 - protein, 16 aa, Homo sapiens
  CDR3 for beta chain variable domain of TCR clone 353134 (TRBV20-1, TRBJ1-4)
CSARPYGGELNEKQFF

SEQ ID NO: 706269 - protein, 14 aa, Homo sapiens
  CDR3 for alpha chain variable domain of TCR clone 353135 (TRAV12-1, TRAJ9)
CVVTLNTGGFKTTF

SEQ ID NO: 706270 - protein, 11 aa, Homo sapiens
  CDR3 for beta chain variable domain of TCR clone 353135 (TRBV29-1, TRBJ2-5)
CSEDRTGTQYF

SEQ ID NO: 706271 - protein, 15 aa, Homo sapiens
  CDR3 for alpha chain variable domain of TCR clone 353136 (TRAV3, TRAJ13)
CAVRVYSGGYQKVTF

SEQ ID NO: 706272 - protein, 15 aa, Homo sapiens
  CDR3 for beta chain variable domain of TCR clone 353136 (TRBV5-7, TRBJ1-2)
CASSLGVASNYGYTF

SEQ ID NO: 706273 - protein, 15 aa, Homo sapiens
  CDR3 for alpha chain variable domain of TCR clone 353137 (TRAV25, TRAJ52)
CAGRPGGTSYGKLTF

SEQ ID NO: 706274 - protein, 14 aa, Homo sapiens
  CDR3 for beta chain variable domain of TCR clone 353137 (TRBV7-8, TRBJ2-7)
CASSVGQGAYEQYF

SEQ ID NO: 706275 - protein, 12 aa, Homo sapiens
  CDR3 for alpha chain variable domain of TCR clone 353138 (TRAV12-3, TRAJ17)
CAMTLTGNKLTF

SEQ ID NO: 706276 - protein, 16 aa, Homo sapiens
  CDR3 for beta chain variable domain of TCR clone 353138 (TRBV7-3, TRBJ2-1)
CASSLEGYRSYNEQFC

SEQ ID NO: 706277 - protein, 17 aa, Homo sapiens
  CDR3 for alpha chain variable domain of TCR clone 353139 (TRAV3, TRAJ6)
CAVRDSPRAGGSYIPTF

SEQ ID NO: 706278 - protein, 15 aa, Homo sapiens
  CDR3 for beta chain variable domain of TCR clone 353139 (TRBV20-1, TRBJ2-7)
CSARDRVSGMDEQYF

SEQ ID NO: 706279 - protein, 15 aa, Homo sapiens
  CDR3 for alpha chain variable domain of TCR clone 353140 (TRAV12-1, TRAJ44)
CVVFVNTGTASKLTF

SEQ ID NO: 706280 - protein, 12 aa, Homo sapiens
  CDR3 for beta chain variable domain of TCR clone 353140 (TRBV11-2, TRBJ2-5)
CASSLVGETQYF

SEQ ID NO: 706281 - protein, 17 aa, Homo sapiens
  CDR3 for alpha chain variable domain of TCR clone 353141 (TRAV3, TRAJ28)
CAVREAYSGAGSSQLTF

SEQ ID NO: 706282 - protein, 15 aa, Homo sapiens
  CDR3 for beta chain variable domain of TCR clone 353141 (TRBV5-1, TRBJ2-1)
CASSPPRAPYNEQFF

SEQ ID NO: 706283 - protein, 14 aa, Homo sapiens
  CDR3 for alpha chain variable domain of TCR clone 353142 (TRAV2, TRAJ9)
CAVEDRSGGFKTIF

SEQ ID NO: 706284 - protein, 13 aa, Homo sapiens
  CDR3 for beta chain variable domain of TCR clone 353142 (TRBV20-1, TRBJ1-1)
CSAGTVGNTEAFF

SEQ ID NO: 706285 - protein, 11 aa, Homo sapiens
  CDR3 for alpha chain variable domain of TCR clone 353143 (TRAV8-3, TRAJ15)
CAVGPRTALIF

SEQ ID NO: 706286 - protein, 15 aa, Homo sapiens
  CDR3 for beta chain variable domain of TCR clone 353143 (TRBV7-9, TRBJ2-7)
CASSLALAEAYEQYF

SEQ ID NO: 706287 - protein, 15 aa, Homo sapiens
  CDR3 for alpha chain variable domain of TCR clone 353144 (TRAV3, TRAJ24)
CAVRDKMTAEGNCSL

SEQ ID NO: 706288 - protein, 14 aa, Homo sapiens
  CDR3 for beta chain variable domain of TCR clone 353144 (TRBV7-2, TRBJ2-3)
CASSQTGSSYTQYF

SEQ ID NO: 706289 - protein, 14 aa, Homo sapiens
  CDR3 for alpha chain variable domain of TCR clone 353145 (TRAV29/DV5, TRAJ36)
CAARHKTGANNLFF

SEQ ID NO: 706290 - protein, 14 aa, Homo sapiens
  CDR3 for beta chain variable domain of TCR clone 353145 (TRBV12-5, TRBJ2-5)
CASGSRTHQETQYF

SEQ ID NO: 706291 - protein, 12 aa, Homo sapiens
  CDR3 for alpha chain variable domain of TCR clone 353146 (TRAV20, TRAJ56)
CAVTGANSKLTF

SEQ ID NO: 706292 - protein, 14 aa, Homo sapiens
  CDR3 for beta chain variable domain of TCR clone 353146 (TRBV20-1, TRBJ2-5)
CSALVPGYQETQSF

SEQ ID NO: 706293 - protein, 12 aa, Homo sapiens
  CDR3 for alpha chain variable domain of TCR clone 353147 (TRAV8-3, TRAJ26)
CAGDNYGQNFVF

SEQ ID NO: 706294 - protein, 13 aa, Homo sapiens
  CDR3 for beta chain variable domain of TCR clone 353147 (TRBV18, TRBJ2-7)
CASQSGGGYEQYF

SEQ ID NO: 706295 - protein, 15 aa, Homo sapiens
  CDR3 for alpha chain variable domain of TCR clone 353148 (TRAV29/DV5, TRAJ31)
CSVLLCSKRNLRLMF

SEQ ID NO: 706296 - protein, 14 aa, Homo sapiens
  CDR3 for beta chain variable domain of TCR clone 353148 (TRBV7-8, TRBJ2-7)
CASSVGQGAYEQYF

SEQ ID NO: 706297 - protein, 16 aa, Homo sapiens
  CDR3 for alpha chain variable domain of TCR clone 353149 (TRAV3, TRAJ37)
CAVRGKGSGNTGKLIF

SEQ ID NO: 706298 - protein, 13 aa, Homo sapiens
  CDR3 for beta chain variable domain of TCR clone 353149 (TRBV9, TRBJ2-1)
CASSPSGGNEQFF

SEQ ID NO: 706299 - protein, 15 aa, Homo sapiens
  CDR3 for alpha chain variable domain of TCR clone 353150 (TRAV26-1, TRAJ24)
CIVREDTDSWGKLQF

SEQ ID NO: 706300 - protein, 15 aa, Homo sapiens
  CDR3 for beta chain variable domain of TCR clone 353150 (TRBV7-9, TRBJ1-5)
CASSQGHQPNQPQHF

SEQ ID NO: 706301 - protein, 15 aa, Homo sapiens
  CDR3 for alpha chain variable domain of TCR clone 353151 (TRAV12-1, TRAJ42)
CEVTRDGGSQGNLIF

SEQ ID NO: 706302 - protein, 14 aa, Homo sapiens
  CDR3 for beta chain variable domain of TCR clone 353151 (TRBV11-2, TRBJ2-3)
CASSLGGGANTQYF

SEQ ID NO: 706303 - protein, 13 aa, Homo sapiens
  CDR3 for alpha chain variable domain of TCR clone 353152 (TRAV13-1, TRAJ5)
CAASDTGRRALTF

SEQ ID NO: 706304 - protein, 12 aa, Homo sapiens
  CDR3 for beta chain variable domain of TCR clone 353152 (TRBV28, TRBJ2-7)
CASSFSSYEQYF

SEQ ID NO: 706305 - protein, 12 aa, Homo sapiens
  CDR3 for alpha chain variable domain of TCR clone 353153 (TRAV26-1, TRAJ36)
CIVRVRAVNLFF

SEQ ID NO: 706306 - protein, 14 aa, Homo sapiens
  CDR3 for beta chain variable domain of TCR clone 353153 (TRBV14, TRBJ2-3)
CASSRKLAADTQYF

SEQ ID NO: 706307 - protein, 14 aa, Homo sapiens
  CDR3 for alpha chain variable domain of TCR clone 353154 (TRAV17, TRAJ56)
CATVPAGANSKLTF

SEQ ID NO: 706308 - protein, 13 aa, Homo sapiens
  CDR3 for beta chain variable domain of TCR clone 353154 (TRBV7-9, TRBJ1-2)
CASSLKQNYGYTF

SEQ ID NO: 706309 - protein, 17 aa, Homo sapiens
  CDR3 for alpha chain variable domain of TCR clone 353155 (TRAV3, TRAJ38)
CAVRDCLNAGDNRKLIW

SEQ ID NO: 706310 - protein, 14 aa, Homo sapiens
  CDR3 for beta chain variable domain of TCR clone 353155 (TRBV5-5, TRBJ1-5)
CASSGQGVDQPQHF

SEQ ID NO: 706311 - protein, 13 aa, Homo sapiens
  CDR3 for alpha chain variable domain of TCR clone 353156 (TRAV1-1, TRAJ9)
CAAKNTGGFKTIF

SEQ ID NO: 706312 - protein, 16 aa, Homo sapiens
  CDR3 for beta chain variable domain of TCR clone 353156 (TRBV12-5, TRBJ2-5)
CDSGPRTSGNQETQYF

SEQ ID NO: 706313 - protein, 16 aa, Homo sapiens
  CDR3 for alpha chain variable domain of TCR clone 353157 (TRAV38-2/DV8, TRAJ40)
CAYRTLGEPTNTSLEQ

SEQ ID NO: 706314 - protein, 14 aa, Homo sapiens
  CDR3 for beta chain variable domain of TCR clone 353157 (TRBV4-1, TRBJ1-4)
CASSSTRAREELFF

SEQ ID NO: 706315 - protein, 12 aa, Homo sapiens
  CDR3 for alpha chain variable domain of TCR clone 353158 (TRAV12-3, TRAJ17)
CAMTLTGNELTF

SEQ ID NO: 706316 - protein, 15 aa, Homo sapiens
  CDR3 for beta chain variable domain of TCR clone 353158 (TRBV20-1, TRBJ2-7)
SAVLDRVSGMDEQYF

SEQ ID NO: 706317 - protein, 13 aa, Homo sapiens
  CDR3 for alpha chain variable domain of TCR clone 353159 (TRAV2, TRAJ21)
CAVEDLNFNKFYF

SEQ ID NO: 706318 - protein, 15 aa, Homo sapiens
  CDR3 for beta chain variable domain of TCR clone 353159 (TRBV28, TRBJ2-5)
CASSPGKGSIETQYF

SEQ ID NO: 706319 - protein, 17 aa, Homo sapiens
  CDR3 for alpha chain variable domain of TCR clone 353160 (TRAV26-1, TRAJ53)
CIVRVDDSGGSNYKLIF

SEQ ID NO: 706320 - protein, 15 aa, Homo sapiens
  CDR3 for beta chain variable domain of TCR clone 353160 (TRBV20-1, TRBJ2-7)
CIARVPAAYFYEQYF

SEQ ID NO: 706321 - protein, 12 aa, Homo sapiens
  CDR3 for alpha chain variable domain of TCR clone 353161 (TRAV12-3, TRAJ17)
CAMTLTGNKLTF

SEQ ID NO: 706322 - protein, 15 aa, Homo sapiens
  CDR3 for beta chain variable domain of TCR clone 353161 (TRBV20-1, TRBJ2-7)
CSARYLVSGMDEQYF

SEQ ID NO: 706323 - protein, 13 aa, Homo sapiens
  CDR3 for alpha chain variable domain of TCR clone 353162 (TRAV16, TRAJ58)
CALSIPSGSWLTF

SEQ ID NO: 706324 - protein, 14 aa, Homo sapiens
  CDR3 for beta chain variable domain of TCR clone 353162 (TRBV6-5, TRBJ2-7)
CASSPHRGLREQYF

SEQ ID NO: 706325 - protein, 13 aa, Homo sapiens
  CDR3 for alpha chain variable domain of TCR clone 353163 (TRAV12-1, TRAJ42)
CGGVGGSQGNPIF

SEQ ID NO: 706326 - protein, 15 aa, Homo sapiens
  CDR3 for beta chain variable domain of TCR clone 353163 (TRBV5-4, TRBJ1-4)
CASSSFGTGNEKLFF

SEQ ID NO: 706327 - protein, 15 aa, Homo sapiens
  CDR3 for alpha chain variable domain of TCR clone 353164 (TRAV3, TRAJ17)
CAVSPKEAAGNKLTF

SEQ ID NO: 706328 - protein, 12 aa, Homo sapiens
  CDR3 for beta chain variable domain of TCR clone 353164 (TRBV7-9, TRBJ1-6)
CDSSLMTSPLHF

SEQ ID NO: 706329 - protein, 17 aa, Homo sapiens
  CDR3 for alpha chain variable domain of TCR clone 353165 (TRAV3, TRAJ42)
CAVRDRDYGGSQGNLIF

SEQ ID NO: 706330 - protein, 15 aa, Homo sapiens
  CDR3 for beta chain variable domain of TCR clone 353165 (TRBV7-9, TRBJ1-1)
CASSLLEQGGTEAFF

SEQ ID NO: 706331 - protein, 18 aa, Homo sapiens
  CDR3 for alpha chain variable domain of TCR clone 353166 (TRAV13-1, TRAJ52)
RAAKNPNAGGTSYGKLTF

SEQ ID NO: 706332 - protein, 15 aa, Homo sapiens
  CDR3 for beta chain variable domain of TCR clone 353166 (TRBV6-1, TRBJ2-3)
CASSECGGITDTQYF

SEQ ID NO: 706333 - protein, 11 aa, Homo sapiens
  CDR3 for alpha chain variable domain of TCR clone 353167 (TRAV1-2, TRAJ20)
CAVSNDYKLSF

SEQ ID NO: 706334 - protein, 15 aa, Homo sapiens
  CDR3 for beta chain variable domain of TCR clone 353167 (TRBV5-1, TRBJ2-3)
CASSVTSGSTDTQYF

SEQ ID NO: 706335 - protein, 14 aa, Homo sapiens
  CDR3 for alpha chain variable domain of TCR clone 353168 (TRAV12-2, TRAJ13)
CAVKKTGGYQKVTF

SEQ ID NO: 706336 - protein, 13 aa, Homo sapiens
  CDR3 for beta chain variable domain of TCR clone 353168 (TRBV10-3, TRBJ2-7)
CASKLAMNYEQYF

SEQ ID NO: 706337 - protein, 15 aa, Homo sapiens
  CDR3 for alpha chain variable domain of TCR clone 353169 (TRAV17, TRAJ57)
CATGPSQGGSEKLVF

SEQ ID NO: 706338 - protein, 15 aa, Homo sapiens
  CDR3 for beta chain variable domain of TCR clone 353169 (TRBV25-1, TRBJ2-4)
CASSETESAKNIQYF

SEQ ID NO: 706339 - protein, 15 aa, Homo sapiens
  CDR3 for alpha chain variable domain of TCR clone 353170 (TRAV8-3, TRAJ41)
CAVGSNSNSGYALNF

SEQ ID NO: 706340 - protein, 14 aa, Homo sapiens
  CDR3 for beta chain variable domain of TCR clone 353170 (TRBV15, TRBJ1-5)
CATSKAGDNQPQHF

SEQ ID NO: 706341 - protein, 12 aa, Homo sapiens
  CDR3 for alpha chain variable domain of TCR clone 353171 (TRAV27, TRAJ9)
CAGESGGFKTIF

SEQ ID NO: 706342 - protein, 16 aa, Homo sapiens
  CDR3 for beta chain variable domain of TCR clone 353171 (TRBV10-3, TRBJ2-1)
CAISGVGDGGGGEQFF

SEQ ID NO: 706343 - protein, 13 aa, Homo sapiens
  CDR3 for alpha chain variable domain of TCR clone 353172 (TRAV38-2/DV8, TRAJ34)
CAYRNCNTDKLIF

SEQ ID NO: 706344 - protein, 15 aa, Homo sapiens
  CDR3 for beta chain variable domain of TCR clone 353172 (TRBV20-1, TRBJ2-5)
CSAEGTGGLQETQYF

SEQ ID NO: 706345 - protein, 14 aa, Homo sapiens
  CDR3 for alpha chain variable domain of TCR clone 353173 (TRAV25, TRAJ27)
CAGPGNNNAGKSTF

SEQ ID NO: 706346 - protein, 16 aa, Homo sapiens
  CDR3 for beta chain variable domain of TCR clone 353173 (TRBV4-1, TRBJ2-6)
CASSQDGGPGANVLTF

SEQ ID NO: 706347 - protein, 14 aa, Homo sapiens
  CDR3 for alpha chain variable domain of TCR clone 353174 (TRAV12-3, TRAJ56)
CAMSVTGAKSKLTF

SEQ ID NO: 706348 - protein, 17 aa, Homo sapiens
  CDR3 for beta chain variable domain of TCR clone 353174 (TRBV20-1, TRBJ2-3)
CSASLLGRGGSADTQYF

SEQ ID NO: 706349 - protein, 14 aa, Homo sapiens
  CDR3 for alpha chain variable domain of TCR clone 353175 (TRAV3, TRAJ22)
CAVRDYGSAWQLTF

SEQ ID NO: 706350 - protein, 13 aa, Homo sapiens
  CDR3 for beta chain variable domain of TCR clone 353175 (TRBV11-2, TRBJ2-5)
CASGHGARETRYF

SEQ ID NO: 706351 - protein, 17 aa, Homo sapiens
  CDR3 for alpha chain variable domain of TCR clone 353176 (TRAV13-1, TRAJ31)
CAPRDRLMFGDGTQLVV

SEQ ID NO: 706352 - protein, 15 aa, Homo sapiens
  CDR3 for beta chain variable domain of TCR clone 353176 (TRBV7-2, TRBJ2-3)
CASSLAGAFIDTQYF

SEQ ID NO: 706353 - protein, 14 aa, Homo sapiens
  CDR3 for alpha chain variable domain of TCR clone 353177 (TRAV8-6, TRAJ52)
CAVIGGTSYGKLTF

SEQ ID NO: 706354 - protein, 15 aa, Homo sapiens
  CDR3 for beta chain variable domain of TCR clone 353177 (TRBV11-3, TRBJ2-5)
CASSLGAGGVETQYF

SEQ ID NO: 706355 - protein, 11 aa, Homo sapiens
  CDR3 for alpha chain variable domain of TCR clone 353178 (TRAV13-1, TRAJ40)
CAVSGTYKYIF

SEQ ID NO: 706356 - protein, 16 aa, Homo sapiens
  CDR3 for beta chain variable domain of TCR clone 353178 (TRBV10-3, TRBJ2-3)
CAISGSRLALTDTQYF

SEQ ID NO: 706357 - protein, 12 aa, Homo sapiens
  CDR3 for alpha chain variable domain of TCR clone 353179 (TRAV13-1, TRAJ21)
CAAKEGFNRFYF

SEQ ID NO: 706358 - protein, 17 aa, Homo sapiens
  CDR3 for beta chain variable domain of TCR clone 353179 (TRBV25-1, TRBJ1-4)
CASSPGDSTNEKLFLAV

SEQ ID NO: 706359 - protein, 17 aa, Homo sapiens
  CDR3 for alpha chain variable domain of TCR clone 353180 (TRAV3, TRAJ6)
CAVSRRTDTGGSHIPTF

SEQ ID NO: 706360 - protein, 18 aa, Homo sapiens
  CDR3 for beta chain variable domain of TCR clone 353180 (TRBV7-2, TRBJ2-3)
CASSLETSRGRKADTQYF

SEQ ID NO: 706361 - protein, 11 aa, Homo sapiens
  CDR3 for alpha chain variable domain of TCR clone 353181 (TRAV35, TRAJ30)
CAGPGDDKIIF

SEQ ID NO: 706362 - protein, 18 aa, Homo sapiens
  CDR3 for beta chain variable domain of TCR clone 353181 (TRBV7-6, TRBJ2-1)
CASSPRTSGMSSDNEQFF

SEQ ID NO: 706363 - protein, 13 aa, Homo sapiens
  CDR3 for alpha chain variable domain of TCR clone 353182 (TRAV35, TRAJ42)
CAGFPGSQGNLIC

SEQ ID NO: 706364 - protein, 12 aa, Homo sapiens
  CDR3 for beta chain variable domain of TCR clone 353182 (TRBV7-8, TRBJ2-7)
CASSLGDREQYF

SEQ ID NO: 706365 - protein, 17 aa, Homo sapiens
  CDR3 for alpha chain variable domain of TCR clone 353183 (TRAV3, TRAJ6)
CAVRDGPRAGGSYIPTF

SEQ ID NO: 706366 - protein, 13 aa, Homo sapiens
  CDR3 for beta chain variable domain of TCR clone 353183 (TRBV10-3, TRBJ1-2)
CAINADLNYGYTF

SEQ ID NO: 706367 - protein, 13 aa, Homo sapiens
  CDR3 for alpha chain variable domain of TCR clone 353184 (TRAV27, TRAJ49)
CAPHPYPGNQFYF

SEQ ID NO: 706368 - protein, 16 aa, Homo sapiens
  CDR3 for beta chain variable domain of TCR clone 353184 (TRBV4-1, TRBJ1-2)
CASSQDAGQVLYGYTF

SEQ ID NO: 706369 - protein, 12 aa, Homo sapiens
  CDR3 for alpha chain variable domain of TCR clone 353185 (TRAV8-3, TRAJ43)
CAVGAGNNDMRF

SEQ ID NO: 706370 - protein, 13 aa, Homo sapiens
  CDR3 for beta chain variable domain of TCR clone 353185 (TRBV20-1, TRBJ2-5)
CSARGDYQETQYF

SEQ ID NO: 706371 - protein, 15 aa, Homo sapiens
  CDR3 for alpha chain variable domain of TCR clone 353186 (TRAV1-2, TRAJ36)
CAASADQTGANNLFF

SEQ ID NO: 706372 - protein, 15 aa, Homo sapiens
  CDR3 for beta chain variable domain of TCR clone 353186 (TRBV5-1, TRBJ2-7)
CASSFSADSVYEQYF

SEQ ID NO: 706373 - protein, 14 aa, Homo sapiens
  CDR3 for alpha chain variable domain of TCR clone 353187 (TRAV23/DV6, TRAJ27)
CAASRDTNAGKSTF

SEQ ID NO: 706374 - protein, 12 aa, Homo sapiens
  CDR3 for beta chain variable domain of TCR clone 353187 (TRBV5-7, TRBJ1-1)
CASSLGRGKAFF

SEQ ID NO: 706375 - protein, 15 aa, Homo sapiens
  CDR3 for alpha chain variable domain of TCR clone 353188 (TRAV8-3, TRAJ27)
CAVGPSKTNAGKSTF

SEQ ID NO: 706376 - protein, 15 aa, Homo sapiens
  CDR3 for beta chain variable domain of TCR clone 353188 (TRBV7-2, TRBJ2-1)
CASSSELAGGNEQFF

SEQ ID NO: 706377 - protein, 14 aa, Homo sapiens
  CDR3 for alpha chain variable domain of TCR clone 353189 (TRAV12-3, TRAJ10)
SHLPLTGGGNKLTF

SEQ ID NO: 706378 - protein, 11 aa, Homo sapiens
  CDR3 for beta chain variable domain of TCR clone 353189 (TRBV20-1, TRBJ2-1)
CSLSSGSEQFF

SEQ ID NO: 706379 - protein, 16 aa, Homo sapiens
  CDR3 for alpha chain variable domain of TCR clone 353190 (TRAV12-3, TRAJ53)
CAMSPGSGGSNYKLTF

SEQ ID NO: 706380 - protein, 16 aa, Homo sapiens
  CDR3 for beta chain variable domain of TCR clone 353190 (TRBV11-2, TRBJ1-2)
CASSPSGREANYGYTF

SEQ ID NO: 706381 - protein, 14 aa, Homo sapiens
  CDR3 for alpha chain variable domain of TCR clone 353191 (TRAV12-1, TRAJ3)
CVVSGYSSASKIIF

SEQ ID NO: 706382 - protein, 14 aa, Homo sapiens
  CDR3 for beta chain variable domain of TCR clone 353191 (TRBV6-6, TRBJ1-3)
CASRRQGSGNTIYF

SEQ ID NO: 706383 - protein, 12 aa, Homo sapiens
  CDR3 for alpha chain variable domain of TCR clone 353192 (TRAV13-2, TRAJ47)
CAEALYGNKLVF

SEQ ID NO: 706384 - protein, 15 aa, Homo sapiens
  CDR3 for beta chain variable domain of TCR clone 353192 (TRBV4-1, TRBJ2-5)
CASSQWDLYQETQYF

SEQ ID NO: 706385 - protein, 16 aa, Homo sapiens
  CDR3 for alpha chain variable domain of TCR clone 353193 (TRAV3, TRAJ37)
CAVRPHGSGNTGQLIF

SEQ ID NO: 706386 - protein, 17 aa, Homo sapiens
  CDR3 for beta chain variable domain of TCR clone 353193 (TRBV5-1, TRBJ2-5)
CASSPVALGQNQETQYF

SEQ ID NO: 706387 - protein, 16 aa, Homo sapiens
  CDR3 for alpha chain variable domain of TCR clone 353194 (TRAV30, TRAJ24)
CGTEIVDADSWGKCQF

SEQ ID NO: 706388 - protein, 14 aa, Homo sapiens
  CDR3 for beta chain variable domain of TCR clone 353194 (TRBV12-5, TRBJ2-5)
CASGSRTHEETQYF

SEQ ID NO: 706389 - protein, 14 aa, Homo sapiens
  CDR3 for alpha chain variable domain of TCR clone 353195 (TRAV12-2, TRAJ17)
CAVLFKAAGNKLTF

SEQ ID NO: 706390 - protein, 17 aa, Homo sapiens
  CDR3 for beta chain variable domain of TCR clone 353195 (TRBV20-1, TRBJ2-2)
CSASGSGQGGLAGGLFF

SEQ ID NO: 706391 - protein, 13 aa, Homo sapiens
  CDR3 for alpha chain variable domain of TCR clone 353196 (TRAV38-1, TRAJ42)
CARWGGSQGNLIF

SEQ ID NO: 706392 - protein, 14 aa, Homo sapiens
  CDR3 for beta chain variable domain of TCR clone 353196 (TRBV2, TRBJ2-5)
CASSAATQYFARHA

SEQ ID NO: 706393 - protein, 14 aa, Homo sapiens
  CDR3 for alpha chain variable domain of TCR clone 353197 (TRAV13-2, TRAJ16)
CAENNWEDGQKLLF

SEQ ID NO: 706394 - protein, 13 aa, Homo sapiens
  CDR3 for beta chain variable domain of TCR clone 353197 (TRBV7-9, TRBJ1-2)
CASSLKQNYGYTF

SEQ ID NO: 706395 - protein, 11 aa, Homo sapiens
  CDR3 for alpha chain variable domain of TCR clone 353198 (TRAV12-1, TRAJ21)
CVVNNFNKFYL

SEQ ID NO: 706396 - protein, 14 aa, Homo sapiens
  CDR3 for beta chain variable domain of TCR clone 353198 (TRBV15, TRBJ1-5)
CATSREQSNQPQHF

SEQ ID NO: 706397 - protein, 16 aa, Homo sapiens
  CDR3 for alpha chain variable domain of TCR clone 353199 (TRAV23/DV6, TRAJ48)
CAASGVVNFGNEKLTF

SEQ ID NO: 706398 - protein, 14 aa, Homo sapiens
  CDR3 for beta chain variable domain of TCR clone 353199 (TRBV7-9, TRBJ2-1)
CQQLRLGRANEQFF

SEQ ID NO: 706399 - protein, 15 aa, Homo sapiens
  CDR3 for alpha chain variable domain of TCR clone 353200 (TRAV35, TRAJ58)
CAGRRQETSGSRLTF

SEQ ID NO: 706400 - protein, 15 aa, Homo sapiens
  CDR3 for beta chain variable domain of TCR clone 353200 (TRBV19, TRBJ1-6)
CASSTQGAVGSPLHF

SEQ ID NO: 706401 - protein, 17 aa, Homo sapiens
  CDR3 for alpha chain variable domain of TCR clone 353201 (TRAV3, TRAJ6)
CAVRDGPRAGGSYIPTF

SEQ ID NO: 706402 - protein, 11 aa, Homo sapiens
  CDR3 for beta chain variable domain of TCR clone 353201 (TRBV7-2, TRBJ2-1)
CASSLRDNEFF

SEQ ID NO: 706403 - protein, 13 aa, Homo sapiens
  CDR3 for alpha chain variable domain of TCR clone 353202 (TRAV13-2, TRAJ15)
CAERPQAGTALIC

SEQ ID NO: 706404 - protein, 15 aa, Homo sapiens
  CDR3 for beta chain variable domain of TCR clone 353202 (TRBV11-2, TRBJ2-7)
CASRFPGTGGYEQYF

SEQ ID NO: 706405 - protein, 15 aa, Homo sapiens
  CDR3 for alpha chain variable domain of TCR clone 353203 (TRAV12-3, TRAJ17)
CAMSPSLAAGNKLTF

SEQ ID NO: 706406 - protein, 14 aa, Homo sapiens
  CDR3 for beta chain variable domain of TCR clone 353203 (TRBV11-2, TRBJ2-3)
CASSRLARTDTQYF

SEQ ID NO: 706407 - protein, 16 aa, Homo sapiens
  CDR3 for alpha chain variable domain of TCR clone 353204 (TRAV16, TRAJ26)
CALSGSEFCLWSRNQI

SEQ ID NO: 706408 - protein, 12 aa, Homo sapiens
  CDR3 for beta chain variable domain of TCR clone 353204 (TRBV11-2, TRBJ2-1)
CASSPGNNEQFL

SEQ ID NO: 706409 - protein, 14 aa, Homo sapiens
  CDR3 for alpha chain variable domain of TCR clone 353205 (TRAV23/DV6, TRAJ37)
CAASTSSNTGKLIF

SEQ ID NO: 706410 - protein, 13 aa, Homo sapiens
  CDR3 for beta chain variable domain of TCR clone 353205 (TRBV7-7, TRBJ1-1)
FASSLGANTEAFF

SEQ ID NO: 706411 - protein, 16 aa, Homo sapiens
  CDR3 for alpha chain variable domain of TCR clone 353206 (TRAV4, TRAJ22)
CLVGDLYSGSARQLTF

SEQ ID NO: 706412 - protein, 16 aa, Homo sapiens
  CDR3 for beta chain variable domain of TCR clone 353206 (TRBV7-9, TRBJ2-3)
CASSPWREVGTDTQYL

SEQ ID NO: 706413 - protein, 14 aa, Homo sapiens
  CDR3 for alpha chain variable domain of TCR clone 353207 (TRAV17, TRAJ6)
CATDASGGSYIPTF

SEQ ID NO: 706414 - protein, 15 aa, Homo sapiens
  CDR3 for beta chain variable domain of TCR clone 353207 (TRBV7-6, TRBJ2-1)
CASSLASGRANEQFF

SEQ ID NO: 706415 - protein, 16 aa, Homo sapiens
  CDR3 for alpha chain variable domain of TCR clone 353208 (TRAV3, TRAJ37)
CSVRPHGSGNTGKLIF

SEQ ID NO: 706416 - protein, 16 aa, Homo sapiens
  CDR3 for beta chain variable domain of TCR clone 353208 (TRBV9, TRBJ1-2)
CASSVEEKVSPYGDTF

SEQ ID NO: 706417 - protein, 10 aa, Homo sapiens
  CDR3 for alpha chain variable domain of TCR clone 353209 (TRAV12-1, TRAJ43)
CVVHNNDMRF

SEQ ID NO: 706418 - protein, 12 aa, Homo sapiens
  CDR3 for beta chain variable domain of TCR clone 353209 (TRBV12-4, TRBJ1-2)
CQQLRTDSISTF

SEQ ID NO: 706419 - protein, 16 aa, Homo sapiens
  CDR3 for alpha chain variable domain of TCR clone 353210 (TRAV12-3, TRAJ53)
CAMSPGSGGSNYKLTF

SEQ ID NO: 706420 - protein, 16 aa, Homo sapiens
  CDR3 for beta chain variable domain of TCR clone 353210 (TRBV2, TRBJ1-5)
CASSEGGFYSNQPQHF

SEQ ID NO: 706421 - protein, 15 aa, Homo sapiens
  CDR3 for alpha chain variable domain of TCR clone 353211 (TRAV34, TRAJ38)
CGADFTPGNNRKLIW

SEQ ID NO: 706422 - protein, 13 aa, Homo sapiens
  CDR3 for beta chain variable domain of TCR clone 353211 (TRBV25-1, TRBJ2-5)
CASSESGRETQYF

SEQ ID NO: 706423 - protein, 13 aa, Homo sapiens
  CDR3 for alpha chain variable domain of TCR clone 353212 (TRAV13-2, TRAJ41)
CAESINSGYALNF

SEQ ID NO: 706424 - protein, 14 aa, Homo sapiens
  CDR3 for beta chain variable domain of TCR clone 353212 (TRBV2, TRBJ2-1)
FASSEALDGNEQFF

SEQ ID NO: 706425 - protein, 15 aa, Homo sapiens
  CDR3 for alpha chain variable domain of TCR clone 353213 (TRAV3, TRAJ22)
CAVRDRGGSSRQLTF

SEQ ID NO: 706426 - protein, 15 aa, Homo sapiens
  CDR3 for beta chain variable domain of TCR clone 353213 (TRBV20-1, TRBJ1-1)
CSASRGVTGNTEAFF

SEQ ID NO: 706427 - protein, 17 aa, Homo sapiens
  CDR3 for alpha chain variable domain of TCR clone 353214 (TRAV13-1, TRAJ28)
CAASPPCSGAVSYQLTF

SEQ ID NO: 706428 - protein, 15 aa, Homo sapiens
  CDR3 for beta chain variable domain of TCR clone 353214 (TRBV6-3, TRBJ2-2)
CASSFLATLTGELFF

SEQ ID NO: 706429 - protein, 16 aa, Homo sapiens
  CDR3 for alpha chain variable domain of TCR clone 353215 (TRAV12-1, TRAJ53)
CVVTSVAGGSNYKLTF

SEQ ID NO: 706430 - protein, 16 aa, Homo sapiens
  CDR3 for beta chain variable domain of TCR clone 353215 (TRBV19, TRBJ2-2)
CASRSPGTGATGELFF

SEQ ID NO: 706431 - protein, 18 aa, Homo sapiens
  CDR3 for alpha chain variable domain of TCR clone 353216 (TRAV21, TRAJ52)
CAVRPSPAGGTSYGKLTF

SEQ ID NO: 706432 - protein, 13 aa, Homo sapiens
  CDR3 for beta chain variable domain of TCR clone 353216 (TRBV18, TRBJ1-1)
CASSGGRNTEAFF

SEQ ID NO: 706433 - protein, 13 aa, Homo sapiens
  CDR3 for alpha chain variable domain of TCR clone 353217 (TRAV24, TRAJ44)
CALLTGTASKLPF

SEQ ID NO: 706434 - protein, 16 aa, Homo sapiens
  CDR3 for beta chain variable domain of TCR clone 353217 (TRBV2, TRBJ2-3)
CASSTSVEGVTDTQYF

SEQ ID NO: 706435 - protein, 11 aa, Homo sapiens
  CDR3 for alpha chain variable domain of TCR clone 353218 (TRAV3, TRAJ21)
CAVGNFNKFYF

SEQ ID NO: 706436 - protein, 16 aa, Homo sapiens
  CDR3 for beta chain variable domain of TCR clone 353218 (TRBV7-2, TRBJ1-2)
CASSPTSGTSLGGYTF

SEQ ID NO: 706437 - protein, 14 aa, Homo sapiens
  CDR3 for alpha chain variable domain of TCR clone 353219 (TRAV1-2, TRAJ16)
CAVNRFSDGQKLLL

SEQ ID NO: 706438 - protein, 16 aa, Homo sapiens
  CDR3 for beta chain variable domain of TCR clone 353219 (TRBV13, TRBJ2-2)
CASSPRTGEHTGELFF

SEQ ID NO: 706439 - protein, 10 aa, Homo sapiens
  CDR3 for alpha chain variable domain of TCR clone 353220 (TRAV4, TRAJ33)
TLDSNYQLIW

SEQ ID NO: 706440 - protein, 19 aa, Homo sapiens
  CDR3 for beta chain variable domain of TCR clone 353220 (TRBV25-1, TRBJ2-2)
CAILVYLVDRGRKTGELFF

SEQ ID NO: 706441 - protein, 16 aa, Homo sapiens
  CDR3 for alpha chain variable domain of TCR clone 353221 (TRAV26-1, TRAJ37)
CIVRGDGSGNTGNLIF

SEQ ID NO: 706442 - protein, 15 aa, Homo sapiens
  CDR3 for beta chain variable domain of TCR clone 353221 (TRBV7-2, TRBJ2-1)
CASSSRTSREDEQFF

SEQ ID NO: 706443 - protein, 15 aa, Homo sapiens
  CDR3 for alpha chain variable domain of TCR clone 353222 (TRAV2, TRAJ28)
CAVPYSGAGGYQLTF

SEQ ID NO: 706444 - protein, 17 aa, Homo sapiens
  CDR3 for beta chain variable domain of TCR clone 353222 (TRBV20-1, TRBJ2-4)
CSARDWASGGRENIQYF

SEQ ID NO: 706445 - protein, 16 aa, Homo sapiens
  CDR3 for alpha chain variable domain of TCR clone 353223 (TRAV3, TRAJ21)
CAVRDIERGNFNKFCF

SEQ ID NO: 706446 - protein, 13 aa, Homo sapiens
  CDR3 for beta chain variable domain of TCR clone 353223 (TRBV27, TRBJ2-7)
CASSLTTGYEQYF

SEQ ID NO: 706447 - protein, 14 aa, Homo sapiens
  CDR3 for alpha chain variable domain of TCR clone 353224 (TRAV8-1, TRAJ8)
CAVSPLTGFQKLVF

SEQ ID NO: 706448 - protein, 14 aa, Homo sapiens
  CDR3 for beta chain variable domain of TCR clone 353224 (TRBV19, TRBJ2-1)
CASPTFVLSGEQFF

SEQ ID NO: 706449 - protein, 13 aa, Homo sapiens
  CDR3 for alpha chain variable domain of TCR clone 353225 (TRAV12-2, TRAJ20)
CAVNEGNDYKLSF

SEQ ID NO: 706450 - protein, 14 aa, Homo sapiens
  CDR3 for beta chain variable domain of TCR clone 353225 (TRBV12-5, TRBJ2-5)
CASGSRTHQETQYF

SEQ ID NO: 706451 - protein, 13 aa, Homo sapiens
  CDR3 for alpha chain variable domain of TCR clone 353226 (TRAV1-1, TRAJ31)
CASYLNNNARLMF

SEQ ID NO: 706452 - protein, 13 aa, Homo sapiens
  CDR3 for beta chain variable domain of TCR clone 353226 (TRBV15, TRBJ1-6)
FATSGGLNSPLHF

SEQ ID NO: 706453 - protein, 15 aa, Homo sapiens
  CDR3 for alpha chain variable domain of TCR clone 353227 (TRAV3, TRAJ20)
CAVRDIKLSDYKLSF

SEQ ID NO: 706454 - protein, 15 aa, Homo sapiens
  CDR3 for beta chain variable domain of TCR clone 353227 (TRBV7-9, TRBJ1-6)
CASSSPGRGNSPVHF

SEQ ID NO: 706455 - protein, 13 aa, Homo sapiens
  CDR3 for alpha chain variable domain of TCR clone 353228 (TRAV23/DV6, TRAJ34)
CAAIENNTDKLIF

SEQ ID NO: 706456 - protein, 16 aa, Homo sapiens
  CDR3 for beta chain variable domain of TCR clone 353228 (TRBV5-5, TRBJ2-2)
CASSGRREGATGELFF

SEQ ID NO: 706457 - protein, 13 aa, Homo sapiens
  CDR3 for alpha chain variable domain of TCR clone 353229 (TRAV16, TRAJ10)
CAPAREEETNTPL

SEQ ID NO: 706458 - protein, 15 aa, Homo sapiens
  CDR3 for beta chain variable domain of TCR clone 353229 (TRBV6-3, TRBJ2-7)
CASSSPGTVVYEQYF

SEQ ID NO: 706459 - protein, 12 aa, Homo sapiens
  CDR3 for alpha chain variable domain of TCR clone 353230 (TRAV16, TRAJ56)
CAPTGANSKLTF

SEQ ID NO: 706460 - protein, 13 aa, Homo sapiens
  CDR3 for beta chain variable domain of TCR clone 353230 (TRBV4-2, TRBJ1-1)
CASSQAGNTEAFF

SEQ ID NO: 706461 - protein, 13 aa, Homo sapiens
  CDR3 for alpha chain variable domain of TCR clone 353231 (TRAV38-2/DV8, TRAJ34)
CAYRTWNTDKLIF

SEQ ID NO: 706462 - protein, 12 aa, Homo sapiens
  CDR3 for beta chain variable domain of TCR clone 353231 (TRBV19, TRBJ2-5)
CASRDTKETQYF

SEQ ID NO: 706463 - protein, 11 aa, Homo sapiens
  CDR3 for alpha chain variable domain of TCR clone 353232 (TRAV2, TRAJ33)
CAVESNYQLIW

SEQ ID NO: 706464 - protein, 13 aa, Homo sapiens
  CDR3 for beta chain variable domain of TCR clone 353232 (TRBV20-1, TRBJ1-4)
CSAILINGEKLFF

SEQ ID NO: 706465 - protein, 12 aa, Homo sapiens
  CDR3 for alpha chain variable domain of TCR clone 353233 (TRAV1-2, TRAJ33)
CAALDSNYQLNW

SEQ ID NO: 706466 - protein, 14 aa, Homo sapiens
  CDR3 for beta chain variable domain of TCR clone 353233 (TRBV20-1, TRBJ2-7)
CSAKRDRSSYEQYF

SEQ ID NO: 706467 - protein, 15 aa, Homo sapiens
  CDR3 for alpha chain variable domain of TCR clone 353234 (TRAV17, TRAJ57)
CATGPSQGGSEKLVF

SEQ ID NO: 706468 - protein, 13 aa, Homo sapiens
  CDR3 for beta chain variable domain of TCR clone 353234 (TRBV11-2, TRBJ2-1)
CASSSEAYNEQFF

SEQ ID NO: 706469 - protein, 16 aa, Homo sapiens
  CDR3 for alpha chain variable domain of TCR clone 353235 (TRAV8-4, TRAJ52)
CSVSDPGGTSYGKLTF

SEQ ID NO: 706470 - protein, 15 aa, Homo sapiens
  CDR3 for beta chain variable domain of TCR clone 353235 (TRBV12-4, TRBJ2-7)
CASSQRTSGNYEQYF

SEQ ID NO: 706471 - protein, 12 aa, Homo sapiens
  CDR3 for alpha chain variable domain of TCR clone 353236 (TRAV13-1, TRAJ9)
CASHTGGFKTIF

SEQ ID NO: 706472 - protein, 15 aa, Homo sapiens
  CDR3 for beta chain variable domain of TCR clone 353236 (TRBV10-3, TRBJ2-3)
CAISLTSGGTDTQYF

SEQ ID NO: 706473 - protein, 14 aa, Homo sapiens
  CDR3 for alpha chain variable domain of TCR clone 353237 (TRAV1-2, TRAJ16)
CAVNRFSDGQKLLF

SEQ ID NO: 706474 - protein, 14 aa, Homo sapiens
  CDR3 for beta chain variable domain of TCR clone 353237 (TRBV5-1, TRBJ2-1)
CASSLEGPVYEQFF

SEQ ID NO: 706475 - protein, 14 aa, Homo sapiens
  CDR3 for alpha chain variable domain of TCR clone 353238 (TRAV2, TRAJ37)
CAVDFTSNTGKLIF

SEQ ID NO: 706476 - protein, 15 aa, Homo sapiens
  CDR3 for beta chain variable domain of TCR clone 353238 (TRBV20-1, TRBJ1-1)
CSASRGVTGITEAVF

SEQ ID NO: 706477 - protein, 17 aa, Homo sapiens
  CDR3 for alpha chain variable domain of TCR clone 353239 (TRAV3, TRAJ6)
CAVRDGPKAGGSYIPTF

SEQ ID NO: 706478 - protein, 18 aa, Homo sapiens
  CDR3 for beta chain variable domain of TCR clone 353239 (TRBV7-3, TRBJ2-3)
CASSSTGTYPGSTDTQYF

SEQ ID NO: 706479 - protein, 14 aa, Homo sapiens
  CDR3 for alpha chain variable domain of TCR clone 353240 (TRAV12-2, TRAJ45)
CALPERGGADGLTF

SEQ ID NO: 706480 - protein, 13 aa, Homo sapiens
  CDR3 for beta chain variable domain of TCR clone 353240 (TRBV18, TRBJ2-5)
CASSLQGQETQYF

SEQ ID NO: 706481 - protein, 16 aa, Homo sapiens
  CDR3 for alpha chain variable domain of TCR clone 353241 (TRAV12-3, TRAJ28)
CAMRANSGAGSYQLTF

SEQ ID NO: 706482 - protein, 16 aa, Homo sapiens
  CDR3 for beta chain variable domain of TCR clone 353241 (TRBV7-2, TRBJ1-3)
CAGSRLEASSGNTIYF

SEQ ID NO: 706483 - protein, 11 aa, Homo sapiens
  CDR3 for alpha chain variable domain of TCR clone 353242 (TRAV8-4, TRAJ26)
CAGGEGQHFVF

SEQ ID NO: 706484 - protein, 17 aa, Homo sapiens
  CDR3 for beta chain variable domain of TCR clone 353242 (TRBV7-9, TRBJ2-3)
CASSPTVAGDLTDTQYF

SEQ ID NO: 706485 - protein, 23 aa, Homo sapiens
  CDR3 for alpha chain variable domain of TCR clone 353243 (TRAV30, TRAJ29)
PAQLLRNLLLWHRAFSGNTPLVF

SEQ ID NO: 706486 - protein, 15 aa, Homo sapiens
  CDR3 for beta chain variable domain of TCR clone 353243 (TRBV5-1, TRBJ2-2)
CASSRVGSDTGELFF

SEQ ID NO: 706487 - protein, 13 aa, Homo sapiens
  CDR3 for alpha chain variable domain of TCR clone 353244 (TRAV8-3, TRAJ48)
CAVVPFGNEKLTF

SEQ ID NO: 706488 - protein, 16 aa, Homo sapiens
  CDR3 for beta chain variable domain of TCR clone 353244 (TRBV7-3, TRBJ2-2)
CASSLKRGTLSGELFF

SEQ ID NO: 706489 - protein, 14 aa, Homo sapiens
  CDR3 for alpha chain variable domain of TCR clone 353245 (TRAV8-4, TRAJ5)
CAVSTDTGRRAFTF

SEQ ID NO: 706490 - protein, 14 aa, Homo sapiens
  CDR3 for beta chain variable domain of TCR clone 353245 (TRBV5-1, TRBJ2-2)
CASSLGGGSGELFF

SEQ ID NO: 706491 - protein, 14 aa, Homo sapiens
  CDR3 for alpha chain variable domain of TCR clone 353246 (TRAV13-1, TRAJ44)
CAAKATGTASKLTF

SEQ ID NO: 706492 - protein, 13 aa, Homo sapiens
  CDR3 for beta chain variable domain of TCR clone 353246 (TRBV2, TRBJ2-2)
CASSEEVTGELFF

SEQ ID NO: 706493 - protein, 14 aa, Homo sapiens
  CDR3 for alpha chain variable domain of TCR clone 353247 (TRAV35, TRAJ33)
CAGSSQDSNYQLIW

SEQ ID NO: 706494 - protein, 15 aa, Homo sapiens
  CDR3 for beta chain variable domain of TCR clone 353247 (TRBV29-1, TRBJ2-7)
CSVEFFDRGYYEQYF

SEQ ID NO: 706495 - protein, 15 aa, Homo sapiens
  CDR3 for alpha chain variable domain of TCR clone 353248 (TRAV3, TRAJ22)
CAVRDRGGSARQLNF

SEQ ID NO: 706496 - protein, 13 aa, Homo sapiens
  CDR3 for beta chain variable domain of TCR clone 353248 (TRBV10-3, TRBJ2-7)
CASKLAVNYEQYF

SEQ ID NO: 706497 - protein, 16 aa, Homo sapiens
  CDR3 for alpha chain variable domain of TCR clone 353249 (TRAV30, TRAJ24)
CGTEIVDADSGGKFQF

SEQ ID NO: 706498 - protein, 14 aa, Homo sapiens
  CDR3 for beta chain variable domain of TCR clone 353249 (TRBV13, TRBJ2-1)
CASSPRPRYNEQFF

SEQ ID NO: 706499 - protein, 13 aa, Homo sapiens
  CDR3 for alpha chain variable domain of TCR clone 353250 (TRAV35, TRAJ42)
CAGFPGSPGNLIF

SEQ ID NO: 706500 - protein, 13 aa, Homo sapiens
  CDR3 for beta chain variable domain of TCR clone 353250 (TRBV29-1, TRBJ2-1)
CSVEGWRVNEQFF

SEQ ID NO: 706501 - protein, 13 aa, Homo sapiens
  CDR3 for alpha chain variable domain of TCR clone 353251 (TRAV16, TRAJ30)
CALAQNRDDKIIF

SEQ ID NO: 706502 - protein, 20 aa, Homo sapiens
  CDR3 for beta chain variable domain of TCR clone 353251 (TRBV19, TRBJ1-6)
CASSVRPSTGVVIHPSNLGM

SEQ ID NO: 706503 - protein, 12 aa, Homo sapiens
  CDR3 for alpha chain variable domain of TCR clone 353252 (TRAV13-2, TRAJ39)
CAENNAGNMLTF

SEQ ID NO: 706504 - protein, 13 aa, Homo sapiens
  CDR3 for beta chain variable domain of TCR clone 353252 (TRBV7-6, TRBJ1-1)
CASSLKLGAEAFF

SEQ ID NO: 706505 - protein, 15 aa, Homo sapiens
  CDR3 for alpha chain variable domain of TCR clone 353253 (TRAV13-1, TRAJ15)
CAASIERQAGTALIF

SEQ ID NO: 706506 - protein, 14 aa, Homo sapiens
  CDR3 for beta chain variable domain of TCR clone 353253 (TRBV7-8, TRBJ1-2)
CASSPDSLSYGYTF

SEQ ID NO: 706507 - protein, 16 aa, Homo sapiens
  CDR3 for alpha chain variable domain of TCR clone 353254 (TRAV23/DV6, TRAJ34)
CAASGALSYNTDKLIF

SEQ ID NO: 706508 - protein, 11 aa, Homo sapiens
  CDR3 for beta chain variable domain of TCR clone 353254 (TRBV7-9, TRBJ2-3)
CASSGPDTQYF

SEQ ID NO: 706509 - protein, 13 aa, Homo sapiens
  CDR3 for alpha chain variable domain of TCR clone 353255 (TRAV29/DV5, TRAJ47)
CAASAEYGNKLVF

SEQ ID NO: 706510 - protein, 14 aa, Homo sapiens
  CDR3 for beta chain variable domain of TCR clone 353255 (TRBV7-2, TRBJ2-7)
CASSPKTSFYEQYF

SEQ ID NO: 706511 - protein, 14 aa, Homo sapiens
  CDR3 for alpha chain variable domain of TCR clone 353256 (TRAV12-1, TRAJ43)
CVVNGRGNNNDIRF

SEQ ID NO: 706512 - protein, 22 aa, Homo sapiens
  CDR3 for beta chain variable domain of TCR clone 353256 (TRBV29-1, TRBJ2-5)
TVSNMSPEDSSIYLCSAGTQYF

SEQ ID NO: 706513 - protein, 14 aa, Homo sapiens
  CDR3 for alpha chain variable domain of TCR clone 353257 (TRAV13-1, TRAJ35)
CAASKGGFGNGLHC

SEQ ID NO: 706514 - protein, 16 aa, Homo sapiens
  CDR3 for beta chain variable domain of TCR clone 353257 (TRBV2, TRBJ2-3)
CQHRGAPRRWTDTQYF

SEQ ID NO: 706515 - protein, 14 aa, Homo sapiens
  CDR3 for alpha chain variable domain of TCR clone 353258 (TRAV1-2, TRAJ16)
CAVNRFSDGQKLLF

SEQ ID NO: 706516 - protein, 15 aa, Homo sapiens
  CDR3 for beta chain variable domain of TCR clone 353258 (TRBV3-1, TRBJ2-7)
CASSQEWTGSYEQYF

SEQ ID NO: 706517 - protein, 15 aa, Homo sapiens
  CDR3 for alpha chain variable domain of TCR clone 353259 (TRAV4, TRAJ39)
CRVGPNNNAGNMLTF

SEQ ID NO: 706518 - protein, 13 aa, Homo sapiens
  CDR3 for beta chain variable domain of TCR clone 353259 (TRBV11-2, TRBJ2-5)
CASSSTGEETQYF

SEQ ID NO: 706519 - protein, 14 aa, Homo sapiens
  CDR3 for alpha chain variable domain of TCR clone 353260 (TRAV1-2, TRAJ8)
CAVREDTGFQKLVF

SEQ ID NO: 706520 - protein, 12 aa, Homo sapiens
  CDR3 for beta chain variable domain of TCR clone 353260 (TRBV11-3, TRBJ1-4)
CASSSGSPGLFF

SEQ ID NO: 706521 - protein, 11 aa, Homo sapiens
  CDR3 for alpha chain variable domain of TCR clone 353261 (TRAV1-2, TRAJ20)
CAVSNDYKLSF

SEQ ID NO: 706522 - protein, 16 aa, Homo sapiens
  CDR3 for beta chain variable domain of TCR clone 353261 (TRBV29-1, TRBJ2-6)
CSVEDITYCGANVLTF

SEQ ID NO: 706523 - protein, 16 aa, Homo sapiens
  CDR3 for alpha chain variable domain of TCR clone 353262 (TRAV35, TRAJ28)
CAGQKYSGAGGYQLTF

SEQ ID NO: 706524 - protein, 13 aa, Homo sapiens
  CDR3 for beta chain variable domain of TCR clone 353262 (TRBV19, TRBJ1-2)
CASSQGQVYGYTF

SEQ ID NO: 706525 - protein, 18 aa, Homo sapiens
  CDR3 for alpha chain variable domain of TCR clone 353263 (TRAV12-3, TRAJ52)
CAMSRTNADGTSYGKLTF

SEQ ID NO: 706526 - protein, 17 aa, Homo sapiens
  CDR3 for beta chain variable domain of TCR clone 353263 (TRBV7-3, TRBJ2-3)
CASSLMKRMRGADTQYF

SEQ ID NO: 706527 - protein, 15 aa, Homo sapiens
  CDR3 for alpha chain variable domain of TCR clone 353264 (TRAV34, TRAJ38)
CGADFTPGNNRKLIW

SEQ ID NO: 706528 - protein, 15 aa, Homo sapiens
  CDR3 for beta chain variable domain of TCR clone 353264 (TRBV7-2, TRBJ2-7)
CASSWGQGAIYEQYF

SEQ ID NO: 706529 - protein, 13 aa, Homo sapiens
  CDR3 for alpha chain variable domain of TCR clone 353265 (TRAV2, TRAJ40)
CAVVTSGTYKFIF

SEQ ID NO: 706530 - protein, 13 aa, Homo sapiens
  CDR3 for beta chain variable domain of TCR clone 353265 (TRBV4-2, TRBJ2-1)
CASSPGTYNEQFF

SEQ ID NO: 706531 - protein, 14 aa, Homo sapiens
  CDR3 for alpha chain variable domain of TCR clone 353266 (TRAV14/DV4, TRAJ13)
CAMIHSGGYQKVTF

SEQ ID NO: 706532 - protein, 17 aa, Homo sapiens
  CDR3 for beta chain variable domain of TCR clone 353266 (TRBV13, TRBJ2-3)
CASSLSRVAGGRNTQYF

SEQ ID NO: 706533 - protein, 13 aa, Homo sapiens
  CDR3 for alpha chain variable domain of TCR clone 353267 (TRAV1-2, TRAJ4)
CAPGRGGYNKLIF

SEQ ID NO: 706534 - protein, 15 aa, Homo sapiens
  CDR3 for beta chain variable domain of TCR clone 353267 (TRBV9, TRBJ1-6)
CASSVAGTGDSPLHF

SEQ ID NO: 706535 - protein, 13 aa, Homo sapiens
  CDR3 for alpha chain variable domain of TCR clone 353268 (TRAV12-3, TRAJ7)
CAMTHMGTTDSLL

SEQ ID NO: 706536 - protein, 16 aa, Homo sapiens
  CDR3 for beta chain variable domain of TCR clone 353268 (TRBV20-1, TRBJ1-4)
CSAWPYGGELNEKLFL

SEQ ID NO: 706537 - protein, 11 aa, Homo sapiens
  CDR3 for alpha chain variable domain of TCR clone 353269 (TRAV8-4, TRAJ39)
CAVSDMATCSP

SEQ ID NO: 706538 - protein, 12 aa, Homo sapiens
  CDR3 for beta chain variable domain of TCR clone 353269 (TRBV29-1, TRBJ2-3)
CSVTGGADTQYF

SEQ ID NO: 706539 - protein, 13 aa, Homo sapiens
  CDR3 for alpha chain variable domain of TCR clone 353270 (TRAV12-1, TRAJ26)
SVVRRNYGQNFVF

SEQ ID NO: 706540 - protein, 14 aa, Homo sapiens
  CDR3 for beta chain variable domain of TCR clone 353270 (TRBV4-2, TRBJ2-1)
CASGLDRAYNEQFF

SEQ ID NO: 706541 - protein, 14 aa, Homo sapiens
  CDR3 for alpha chain variable domain of TCR clone 353271 (TRAV8-6, TRAJ34)
CAVSDQGNTDKLIF

SEQ ID NO: 706542 - protein, 16 aa, Homo sapiens
  CDR3 for beta chain variable domain of TCR clone 353271 (TRBV5-1, TRBJ2-2)
CASSSRTGGRTGELFF

SEQ ID NO: 706543 - protein, 13 aa, Homo sapiens
  CDR3 for alpha chain variable domain of TCR clone 353272 (TRAV22, TRAJ26)
CAVEHNYGQNFVF

SEQ ID NO: 706544 - protein, 16 aa, Homo sapiens
  CDR3 for beta chain variable domain of TCR clone 353272 (TRBV7-2, TRBJ2-6)
WASSERRASGANVLTF

SEQ ID NO: 706545 - protein, 13 aa, Homo sapiens
  CDR3 for alpha chain variable domain of TCR clone 353273 (TRAV12-1, TRAJ5)
CGFTDTGRRALTF

SEQ ID NO: 706546 - protein, 13 aa, Homo sapiens
  CDR3 for beta chain variable domain of TCR clone 353273 (TRBV19, TRBJ2-1)
CATSRGVYNEQFF

SEQ ID NO: 706547 - protein, 15 aa, Homo sapiens
  CDR3 for alpha chain variable domain of TCR clone 353274 (TRAV12-1, TRAJ45)
CVVLSGGGGADGFTF

SEQ ID NO: 706548 - protein, 16 aa, Homo sapiens
  CDR3 for beta chain variable domain of TCR clone 353274 (TRBV6-5, TRBJ2-1)
CASSETLAGHYNEQFF

SEQ ID NO: 706549 - protein, 14 aa, Homo sapiens
  CDR3 for alpha chain variable domain of TCR clone 353275 (TRAV17, TRAJ57)
CATDPQGGSEKLVF

SEQ ID NO: 706550 - protein, 17 aa, Homo sapiens
  CDR3 for beta chain variable domain of TCR clone 353275 (TRBV28, TRBJ2-1)
CASTGPELAVSEDEQFF

SEQ ID NO: 706551 - protein, 14 aa, Homo sapiens
  CDR3 for alpha chain variable domain of TCR clone 353276 (TRAV8-4, TRAJ4)
CAVSPSGGYNKLIF

SEQ ID NO: 706552 - protein, 14 aa, Homo sapiens
  CDR3 for beta chain variable domain of TCR clone 353276 (TRBV7-2, TRBJ2-7)
CASRSQGAAYEQYF

SEQ ID NO: 706553 - protein, 12 aa, Homo sapiens
  CDR3 for alpha chain variable domain of TCR clone 353277 (TRAV12-3, TRAJ17)
CAMTLTGNKLTF

SEQ ID NO: 706554 - protein, 15 aa, Homo sapiens
  CDR3 for beta chain variable domain of TCR clone 353277 (TRBV12-4, TRBJ2-1)
CASIKSFSGYNEQFF

SEQ ID NO: 706555 - protein, 15 aa, Homo sapiens
  CDR3 for alpha chain variable domain of TCR clone 353278 (TRAV8-6, TRAJ10)
CAVSDQAGGGNKLTF

SEQ ID NO: 706556 - protein, 15 aa, Homo sapiens
  CDR3 for beta chain variable domain of TCR clone 353278 (TRBV6-1, TRBJ2-6)
CASSSRPSGANVLTF

SEQ ID NO: 706557 - protein, 15 aa, Homo sapiens
  CDR3 for alpha chain variable domain of TCR clone 353279 (TRAV2, TRAJ24)
CAVEVLTDSWGKFQV

SEQ ID NO: 706558 - protein, 17 aa, Homo sapiens
  CDR3 for beta chain variable domain of TCR clone 353279 (TRBV7-8, TRBJ2-6)
CASSAGTGGAGANVLTF

SEQ ID NO: 706559 - protein, 13 aa, Homo sapiens
  CDR3 for alpha chain variable domain of TCR clone 353280 (TRAV23/DV6, TRAJ43)
CAASMGGNKDMRF

SEQ ID NO: 706560 - protein, 14 aa, Homo sapiens
  CDR3 for beta chain variable domain of TCR clone 353280 (TRBV3-1, TRBJ2-3)
CASSWSGVGGTQYF

SEQ ID NO: 706561 - protein, 14 aa, Homo sapiens
  CDR3 for alpha chain variable domain of TCR clone 353281 (TRAV12-3, TRAJ10)
SHLPLTGGGNKLTF

SEQ ID NO: 706562 - protein, 13 aa, Homo sapiens
  CDR3 for beta chain variable domain of TCR clone 353281 (TRBV12-4, TRBJ1-1)
CTSSPGTGFEAFF

SEQ ID NO: 706563 - protein, 16 aa, Homo sapiens
  CDR3 for alpha chain variable domain of TCR clone 353282 (TRAV30, TRAJ24)
CGTEIVDADSWGKFQF

SEQ ID NO: 706564 - protein, 16 aa, Homo sapiens
  CDR3 for beta chain variable domain of TCR clone 353282 (TRBV7-3, TRBJ2-2)
CASSLERGTLSGELFF

SEQ ID NO: 706565 - protein, 11 aa, Homo sapiens
  CDR3 for alpha chain variable domain of TCR clone 353283 (TRAV2, TRAJ13)
CASGGYQKVTF

SEQ ID NO: 706566 - protein, 15 aa, Homo sapiens
  CDR3 for beta chain variable domain of TCR clone 353283 (TRBV2, TRBJ2-7)
CASSGDGRGRYEQYF

SEQ ID NO: 706567 - protein, 19 aa, Homo sapiens
  CDR3 for alpha chain variable domain of TCR clone 353284 (TRAV26-1, TRAJ52)
CIVRAHRNAGGISYGKLTF

SEQ ID NO: 706568 - protein, 14 aa, Homo sapiens
  CDR3 for beta chain variable domain of TCR clone 353284 (TRBV7-6, TRBJ2-3)
CASSLGTVTDTQYF

SEQ ID NO: 706569 - protein, 14 aa, Homo sapiens
  CDR3 for alpha chain variable domain of TCR clone 353285 (TRAV8-3, TRAJ23)
CAVIIYNQGGNLFF

SEQ ID NO: 706570 - protein, 15 aa, Homo sapiens
  CDR3 for beta chain variable domain of TCR clone 353285 (TRBV18, TRBJ2-1)
CASSPPSASYNEQFF

SEQ ID NO: 706571 - protein, 12 aa, Homo sapiens
  CDR3 for alpha chain variable domain of TCR clone 353286 (TRAV12-3, TRAJ17)
CAMTLTGNKLTF

SEQ ID NO: 706572 - protein, 14 aa, Homo sapiens
  CDR3 for beta chain variable domain of TCR clone 353286 (TRBV28, TRBJ1-5)
CASSLGVLVKPQHF

SEQ ID NO: 706573 - protein, 21 aa, Homo sapiens
  CDR3 for alpha chain variable domain of TCR clone 353287 (TRAV1-1, TRAJ6)
CLLLLRCERLERTGGSYIPTF

SEQ ID NO: 706574 - protein, 12 aa, Homo sapiens
  CDR3 for beta chain variable domain of TCR clone 353287 (TRBV7-9, TRBJ1-4)
CASSTDREKLFF

SEQ ID NO: 706575 - protein, 14 aa, Homo sapiens
  CDR3 for alpha chain variable domain of TCR clone 353288 (TRAV8-2, TRAJ6)
CVVISAVGSYIPTF

SEQ ID NO: 706576 - protein, 16 aa, Homo sapiens
  CDR3 for beta chain variable domain of TCR clone 353288 (TRBV7-6, TRBJ2-6)
CASSLPGLSGANVLTF

SEQ ID NO: 706577 - protein, 15 aa, Homo sapiens
  CDR3 for alpha chain variable domain of TCR clone 353289 (TRAV12-1, TRAJ42)
CVVTRDGGSQGNLIF

SEQ ID NO: 706578 - protein, 14 aa, Homo sapiens
  CDR3 for beta chain variable domain of TCR clone 353289 (TRBV11-2, TRBJ2-3)
CGSSLGGGANTQYF

SEQ ID NO: 706579 - protein, 13 aa, Homo sapiens
  CDR3 for alpha chain variable domain of TCR clone 353290 (TRAV2, TRAJ40)
CAVVTSGTYKYIF

SEQ ID NO: 706580 - protein, 16 aa, Homo sapiens
  CDR3 for beta chain variable domain of TCR clone 353290 (TRBV19, TRBJ2-2)
CASRTPGTGATGELFF

SEQ ID NO: 706581 - protein, 13 aa, Homo sapiens
  CDR3 for alpha chain variable domain of TCR clone 353291 (TRAV27, TRAJ6)
CAGGTRGSYIPTF

SEQ ID NO: 706582 - protein, 13 aa, Homo sapiens
  CDR3 for beta chain variable domain of TCR clone 353291 (TRBV20-1, TRBJ1-2)
CSASTERIYGYTF

SEQ ID NO: 706583 - protein, 10 aa, Homo sapiens
  CDR3 for alpha chain variable domain of TCR clone 353292 (TRAV13-2, TRAJ20)
CARRDYKLSF

SEQ ID NO: 706584 - protein, 15 aa, Homo sapiens
  CDR3 for beta chain variable domain of TCR clone 353292 (TRBV6-6, TRBJ2-7)
GASSYSIRGVYEQYF

SEQ ID NO: 706585 - protein, 16 aa, Homo sapiens
  CDR3 for alpha chain variable domain of TCR clone 353293 (TRAV3, TRAJ10)
CAVRDMRAGGGNKLTF

SEQ ID NO: 706586 - protein, 15 aa, Homo sapiens
  CDR3 for beta chain variable domain of TCR clone 353293 (TRBV7-6, TRBJ1-4)
CASSLGAGAGEKLFF

SEQ ID NO: 706587 - protein, 15 aa, Homo sapiens
  CDR3 for alpha chain variable domain of TCR clone 353294 (TRAV26-2, TRAJ13)
CILRDLYGGYQKVTF

SEQ ID NO: 706588 - protein, 14 aa, Homo sapiens
  CDR3 for beta chain variable domain of TCR clone 353294 (TRBV4-1, TRBJ2-3)
CASSQEGSTDTQYF

SEQ ID NO: 706589 - protein, 10 aa, Homo sapiens
  CDR3 for alpha chain variable domain of TCR clone 353295 (TRAV36/DV7, TRAJ48)
CAVGNEKLTF

SEQ ID NO: 706590 - protein, 19 aa, Homo sapiens
  CDR3 for beta chain variable domain of TCR clone 353295 (TRBV19, TRBJ2-5)
CASSIGQVTDFFLGETQYF

SEQ ID NO: 706591 - protein, 15 aa, Homo sapiens
  CDR3 for alpha chain variable domain of TCR clone 353296 (TRAV25, TRAJ10)
CAGPLLTGGGNKLTF

SEQ ID NO: 706592 - protein, 15 aa, Homo sapiens
  CDR3 for beta chain variable domain of TCR clone 353296 (TRBV27, TRBJ1-5)
CASSLGTGFDQPQHF

SEQ ID NO: 706593 - protein, 14 aa, Homo sapiens
  CDR3 for alpha chain variable domain of TCR clone 353297 (TRAV23/DV6, TRAJ57)
CAASNQGGSEKLVF

SEQ ID NO: 706594 - protein, 16 aa, Homo sapiens
  CDR3 for beta chain variable domain of TCR clone 353297 (TRBV11-1, TRBJ1-1)
CASSPRGAHMNSEAFF

SEQ ID NO: 706595 - protein, 19 aa, Homo sapiens
  CDR3 for alpha chain variable domain of TCR clone 353298 (TRAV2, TRAJ20)
ILQVREADAAAYRDCKLRF

SEQ ID NO: 706596 - protein, 12 aa, Homo sapiens
  CDR3 for beta chain variable domain of TCR clone 353298 (TRBV11-2, TRBJ2-1)
CASSPGNNEQFF

SEQ ID NO: 706597 - protein, 14 aa, Homo sapiens
  CDR3 for alpha chain variable domain of TCR clone 353299 (TRAV1-1, TRAJ27)
CAVIYNTNAGKSTF

SEQ ID NO: 706598 - protein, 16 aa, Homo sapiens
  CDR3 for beta chain variable domain of TCR clone 353299 (TRBV13, TRBJ2-2)
CASSPRTGEHTGELFF

SEQ ID NO: 706599 - protein, 13 aa, Homo sapiens
  CDR3 for alpha chain variable domain of TCR clone 353300 (TRAV8-4, TRAJ49)
CAVRTLTGNQFYF

SEQ ID NO: 706600 - protein, 13 aa, Homo sapiens
  CDR3 for beta chain variable domain of TCR clone 353300 (TRBV20-1, TRBJ1-1)
CSARGGGNTEAFF

SEQ ID NO: 706601 - protein, 14 aa, Homo sapiens
  CDR3 for alpha chain variable domain of TCR clone 353301 (TRAV26-1, TRAJ49)
CIVRVPSSGNQFYF

SEQ ID NO: 706602 - protein, 14 aa, Homo sapiens
  CDR3 for beta chain variable domain of TCR clone 353301 (TRBV19, TRBJ2-1)
CASKDPSSYNEQFF

SEQ ID NO: 706603 - protein, 13 aa, Homo sapiens
  CDR3 for alpha chain variable domain of TCR clone 353302 (TRAV21, TRAJ20)
WAVGVFADYKRSF

SEQ ID NO: 706604 - protein, 14 aa, Homo sapiens
  CDR3 for beta chain variable domain of TCR clone 353302 (TRBV4-2, TRBJ1-4)
CASSPSSGNEKLFF

SEQ ID NO: 706605 - protein, 15 aa, Homo sapiens
  CDR3 for alpha chain variable domain of TCR clone 353303 (TRAV3, TRAJ22)
CAVRDRGGSARQLTF

SEQ ID NO: 706606 - protein, 16 aa, Homo sapiens
  CDR3 for beta chain variable domain of TCR clone 353303 (TRBV2, TRBJ2-1)
CASRSPAGGKYNEQFF

SEQ ID NO: 706607 - protein, 14 aa, Homo sapiens
  CDR3 for alpha chain variable domain of TCR clone 353304 (TRAV8-3, TRAJ35)
CAVVPQGFGNVLHC

SEQ ID NO: 706608 - protein, 14 aa, Homo sapiens
  CDR3 for beta chain variable domain of TCR clone 353304 (TRBV7-3, TRBJ2-3)
CASSRLARTDTQYF

SEQ ID NO: 706609 - protein, 12 aa, Homo sapiens
  CDR3 for alpha chain variable domain of TCR clone 353305 (TRAV12-2, TRAJ10)
WGVTGGGNKLTF

SEQ ID NO: 706610 - protein, 14 aa, Homo sapiens
  CDR3 for beta chain variable domain of TCR clone 353305 (TRBV20-1, TRBJ2-1)
CSAAGSGEYNEQFF

SEQ ID NO: 706611 - protein, 14 aa, Homo sapiens
  CDR3 for alpha chain variable domain of TCR clone 353306 (TRAV25, TRAJ35)
CARRMEGFGNVLHC

SEQ ID NO: 706612 - protein, 14 aa, Homo sapiens
  CDR3 for beta chain variable domain of TCR clone 353306 (TRBV13, TRBJ2-5)
CASSLGPRGETQYF

SEQ ID NO: 706613 - protein, 13 aa, Homo sapiens
  CDR3 for alpha chain variable domain of TCR clone 353307 (TRAV23/DV6, TRAJ15)
CAAFPAGRNCSDL

SEQ ID NO: 706614 - protein, 14 aa, Homo sapiens
  CDR3 for beta chain variable domain of TCR clone 353307 (TRBV7-9, TRBJ1-2)
CASSRQGANYGCTF

SEQ ID NO: 706615 - protein, 16 aa, Homo sapiens
  CDR3 for alpha chain variable domain of TCR clone 353308 (TRAV21, TRAJ37)
CAVRPRGSSNTGKLIF

SEQ ID NO: 706616 - protein, 16 aa, Homo sapiens
  CDR3 for beta chain variable domain of TCR clone 353308 (TRBV2, TRBJ2-1)
CASSVGGALAYNEQFF

SEQ ID NO: 706617 - protein, 15 aa, Homo sapiens
  CDR3 for alpha chain variable domain of TCR clone 353309 (TRAV14/DV4, TRAJ26)
CAMREGQNYGQNFVF

SEQ ID NO: 706618 - protein, 16 aa, Homo sapiens
  CDR3 for beta chain variable domain of TCR clone 353309 (TRBV7-9, TRBJ2-4)
CASSLGPPGDKNIQYF

SEQ ID NO: 706619 - protein, 13 aa, Homo sapiens
  CDR3 for alpha chain variable domain of TCR clone 353310 (TRAV8-3, TRAJ41)
CAVGADSGYALNF

SEQ ID NO: 706620 - protein, 16 aa, Homo sapiens
  CDR3 for beta chain variable domain of TCR clone 353310 (TRBV29-1, TRBJ2-2)
CSVEKTSEGNTGELFF

SEQ ID NO: 706621 - protein, 11 aa, Homo sapiens
  CDR3 for alpha chain variable domain of TCR clone 353311 (TRAV2, TRAJ13)
CASGGYQKVTF

SEQ ID NO: 706622 - protein, 16 aa, Homo sapiens
  CDR3 for beta chain variable domain of TCR clone 353311 (TRBV20-1, TRBJ1-5)
CSASRGTGYSNQPQHF

SEQ ID NO: 706623 - protein, 14 aa, Homo sapiens
  CDR3 for alpha chain variable domain of TCR clone 353312 (TRAV1-2, TRAJ16)
CAVNRFSDGKKLLF

SEQ ID NO: 706624 - protein, 20 aa, Homo sapiens
  CDR3 for beta chain variable domain of TCR clone 353312 (TRBV7-8, TRBJ2-2)
CASSHLFPGPTIHITGELFF

SEQ ID NO: 706625 - protein, 13 aa, Homo sapiens
  CDR3 for alpha chain variable domain of TCR clone 353313 (TRAV36/DV7, TRAJ37)
CAVFSSNTGKLIF

SEQ ID NO: 706626 - protein, 16 aa, Homo sapiens
  CDR3 for beta chain variable domain of TCR clone 353313 (TRBV24-1, TRBJ2-3)
CATSDPGTGATDTQYF

SEQ ID NO: 706627 - protein, 16 aa, Homo sapiens
  CDR3 for alpha chain variable domain of TCR clone 353314 (TRAV3, TRAJ5)
CAVRNLMDTGRRALTF

SEQ ID NO: 706628 - protein, 12 aa, Homo sapiens
  CDR3 for beta chain variable domain of TCR clone 353314 (TRBV29-1, TRBJ2-3)
CSVTGGADTQYF

SEQ ID NO: 706629 - protein, 17 aa, Homo sapiens
  CDR3 for alpha chain variable domain of TCR clone 353315 (TRAV13-1, TRAJ28)
CAASPPYSGAGSYQLTF

SEQ ID NO: 706630 - protein, 12 aa, Homo sapiens
  CDR3 for beta chain variable domain of TCR clone 353315 (TRBV11-2, TRBJ2-2)
CASSLPTGEMFF

SEQ ID NO: 706631 - protein, 23 aa, Homo sapiens
  CDR3 for alpha chain variable domain of TCR clone 353316 (TRAV26-1, )
CIADNAGNKHIQDPDPAVYQLRD

SEQ ID NO: 706632 - protein, 15 aa, Homo sapiens
  CDR3 for beta chain variable domain of TCR clone 353316 (TRBV27, TRBJ2-1)
CASSNGGGSSNEQFF

SEQ ID NO: 706633 - protein, 15 aa, Homo sapiens
  CDR3 for alpha chain variable domain of TCR clone 353317 (TRAV12-2, TRAJ53)
CAVNGGGGSNYKLPF

SEQ ID NO: 706634 - protein, 13 aa, Homo sapiens
  CDR3 for beta chain variable domain of TCR clone 353317 (TRBV10-3, TRBJ2-7)
CASKLAVNYEQYF

SEQ ID NO: 706635 - protein, 12 aa, Homo sapiens
  CDR3 for alpha chain variable domain of TCR clone 353318 (TRAV13-1, TRAJ21)
CAAKEGFNKFYF

SEQ ID NO: 706636 - protein, 15 aa, Homo sapiens
  CDR3 for beta chain variable domain of TCR clone 353318 (TRBV15, TRBJ1-5)
CATSRDPVSNQPQHF

SEQ ID NO: 706637 - protein, 11 aa, Homo sapiens
  CDR3 for alpha chain variable domain of TCR clone 353319 (TRAV21, TRAJ48)
WAVDGNEKLTF

SEQ ID NO: 706638 - protein, 16 aa, Homo sapiens
  CDR3 for beta chain variable domain of TCR clone 353319 (TRBV12-4, TRBJ1-5)
CASSSGPRGSNQTQHF

SEQ ID NO: 706639 - protein, 14 aa, Homo sapiens
  CDR3 for alpha chain variable domain of TCR clone 353320 (TRAV1-2, TRAJ8)
CAVREDTGFQKLVF

SEQ ID NO: 706640 - protein, 15 aa, Homo sapiens
  CDR3 for beta chain variable domain of TCR clone 353320 (TRBV27, TRBJ2-1)
CASSNGGGSSNEQFS

SEQ ID NO: 706641 - protein, 16 aa, Homo sapiens
  CDR3 for alpha chain variable domain of TCR clone 353321 (TRAV30, TRAJ24)
CGTEIVDADSWGKFQL

SEQ ID NO: 706642 - protein, 14 aa, Homo sapiens
  CDR3 for beta chain variable domain of TCR clone 353321 (TRBV12-5, TRBJ2-1)
CASGSRTHQETQYF

SEQ ID NO: 706643 - protein, 16 aa, Homo sapiens
  CDR3 for alpha chain variable domain of TCR clone 353322 (TRAV12-3, TRAJ53)
CAMSVGRGGSNYKLTF

SEQ ID NO: 706644 - protein, 11 aa, Homo sapiens
  CDR3 for beta chain variable domain of TCR clone 353322 (TRBV29-1, TRBJ2-5)
CSVASGETQYF

SEQ ID NO: 706645 - protein, 12 aa, Homo sapiens
  CDR3 for alpha chain variable domain of TCR clone 353323 (TRAV8-3, TRAJ26)
CAGDNYGQNFVL

SEQ ID NO: 706646 - protein, 15 aa, Homo sapiens
  CDR3 for beta chain variable domain of TCR clone 353323 (TRBV5-1, TRBJ2-3)
CASSVTSGSTDTQYF

SEQ ID NO: 706647 - protein, 13 aa, Homo sapiens
  CDR3 for alpha chain variable domain of TCR clone 353324 (TRAV27, TRAJ3)
ASLRGSSASKIIF

SEQ ID NO: 706648 - protein, 14 aa, Homo sapiens
  CDR3 for beta chain variable domain of TCR clone 353324 (TRBV12-4, TRBJ1-1)
CASSLGTGGTEAFF

SEQ ID NO: 706649 - protein, 14 aa, Homo sapiens
  CDR3 for alpha chain variable domain of TCR clone 353325 (TRAV24, TRAJ37)
CASDGSSNTGKLIF

SEQ ID NO: 706650 - protein, 15 aa, Homo sapiens
  CDR3 for beta chain variable domain of TCR clone 353325 (TRBV7-3, TRBJ2-2)
CASKANGANTGELFS

SEQ ID NO: 706651 - protein, 14 aa, Homo sapiens
  CDR3 for alpha chain variable domain of TCR clone 353326 (TRAV26-2, TRAJ48)
CILRPPFNFGNEKL

SEQ ID NO: 706652 - protein, 15 aa, Homo sapiens
  CDR3 for beta chain variable domain of TCR clone 353326 (TRBV20-1, TRBJ2-3)
CSARVEGTYTDTQYF

SEQ ID NO: 706653 - protein, 12 aa, Homo sapiens
  CDR3 for alpha chain variable domain of TCR clone 353327 (TRAV13-1, TRAJ53)
AASGGSNYKLTF

SEQ ID NO: 706654 - protein, 14 aa, Homo sapiens
  CDR3 for beta chain variable domain of TCR clone 353327 (TRBV18, TRBJ2-5)
CASSPGVSQETQYF

SEQ ID NO: 706655 - protein, 11 aa, Homo sapiens
  CDR3 for alpha chain variable domain of TCR clone 353328 (TRAV12-1, TRAJ8)
CVVTGFQKLVF

SEQ ID NO: 706656 - protein, 15 aa, Homo sapiens
  CDR3 for beta chain variable domain of TCR clone 353328 (TRBV11-3, TRBJ2-1)
CASSLAGQTYNEQFF

SEQ ID NO: 706657 - protein, 14 aa, Homo sapiens
  CDR3 for alpha chain variable domain of TCR clone 353329 (TRAV1-2, TRAJ8)
CALREDTGFQKLVF

SEQ ID NO: 706658 - protein, 15 aa, Homo sapiens
  CDR3 for beta chain variable domain of TCR clone 353329 (TRBV11-3, TRBJ2-7)
CASSPGPASSYEQYF

SEQ ID NO: 706659 - protein, 15 aa, Homo sapiens
  CDR3 for alpha chain variable domain of TCR clone 353330 (TRAV13-2, TRAJ32)
CAENTHGGATNKLIF

SEQ ID NO: 706660 - protein, 15 aa, Homo sapiens
  CDR3 for beta chain variable domain of TCR clone 353330 (TRBV12-4, TRBJ2-5)
CASSPPTGLQETQYF

SEQ ID NO: 706661 - protein, 16 aa, Homo sapiens
  CDR3 for alpha chain variable domain of TCR clone 353331 (TRAV27, TRAJ53)
CAAREGSGGSNYKLTF

SEQ ID NO: 706662 - protein, 15 aa, Homo sapiens
  CDR3 for beta chain variable domain of TCR clone 353331 (TRBV20-1, TRBJ1-1)
CSASRGVTGNTEAFF

SEQ ID NO: 706663 - protein, 16 aa, Homo sapiens
  CDR3 for alpha chain variable domain of TCR clone 353332 (TRAV30, TRAJ24)
CGTEIVDADSWGKFQF

SEQ ID NO: 706664 - protein, 17 aa, Homo sapiens
  CDR3 for beta chain variable domain of TCR clone 353332 (TRBV20-1, TRBJ2-1)
CSASSSGLAGSYNVQFF

SEQ ID NO: 706665 - protein, 14 aa, Homo sapiens
  CDR3 for alpha chain variable domain of TCR clone 353333 (TRAV17, TRAJ37)
CATDGSSNTGKLIF

SEQ ID NO: 706666 - protein, 20 aa, Homo sapiens
  CDR3 for beta chain variable domain of TCR clone 353333 (TRBV7-8, TRBJ2-2)
CASSHLFPGPTIHITGELFF

SEQ ID NO: 706667 - protein, 15 aa, Homo sapiens
  CDR3 for alpha chain variable domain of TCR clone 353334 (TRAV38-2/DV8, TRAJ32)
CAYRRYGGATNKFIF

SEQ ID NO: 706668 - protein, 13 aa, Homo sapiens
  CDR3 for beta chain variable domain of TCR clone 353334 (TRBV20-1, TRBJ2-7)
CSARGRGAYEQYL

SEQ ID NO: 706669 - protein, 12 aa, Homo sapiens
  CDR3 for alpha chain variable domain of TCR clone 353335 (TRAV4, TRAJ26)
CLVGDYGQNFVF

SEQ ID NO: 706670 - protein, 17 aa, Homo sapiens
  CDR3 for beta chain variable domain of TCR clone 353335 (TRBV7-2, TRBJ1-2)
CASSSNQDARPWLHLRF

SEQ ID NO: 706671 - protein, 18 aa, Homo sapiens
  CDR3 for alpha chain variable domain of TCR clone 353336 (TRAV21, TRAJ52)
CAVRPSPAGGISSGKLTF

SEQ ID NO: 706672 - protein, 17 aa, Homo sapiens
  CDR3 for beta chain variable domain of TCR clone 353336 (TRBV13, TRBJ2-3)
CASSLSRVAGGRNTQYF

SEQ ID NO: 706673 - protein, 13 aa, Homo sapiens
  CDR3 for alpha chain variable domain of TCR clone 353337 (TRAV21, TRAJ40)
CAVRPTGTYKYIF

SEQ ID NO: 706674 - protein, 16 aa, Homo sapiens
  CDR3 for beta chain variable domain of TCR clone 353337 (TRBV12-4, TRBJ1-1)
CASRKRTASENTEAFF

SEQ ID NO: 706675 - protein, 12 aa, Homo sapiens
  CDR3 for alpha chain variable domain of TCR clone 353338 (TRAV9-2, TRAJ36)
CALKKGANNLFF

SEQ ID NO: 706676 - protein, 15 aa, Homo sapiens
  CDR3 for beta chain variable domain of TCR clone 353338 (TRBV5-1, TRBJ2-3)
CASSVTSGSTDTQYF

SEQ ID NO: 706677 - protein, 17 aa, Homo sapiens
  CDR3 for alpha chain variable domain of TCR clone 353339 (TRAV3, TRAJ6)
CAVRDGPRAGGSCIPTF

SEQ ID NO: 706678 - protein, 14 aa, Homo sapiens
  CDR3 for beta chain variable domain of TCR clone 353339 (TRBV6-1, TRBJ1-3)
CASVQGGGGNTIYF

SEQ ID NO: 706679 - protein, 12 aa, Homo sapiens
  CDR3 for alpha chain variable domain of TCR clone 353340 (TRAV21, TRAJ33)
CAKMDSNYQLIW

SEQ ID NO: 706680 - protein, 15 aa, Homo sapiens
  CDR3 for beta chain variable domain of TCR clone 353340 (TRBV9, TRBJ1-6)
CASSVAGTGGSPLHF

SEQ ID NO: 706681 - protein, 23 aa, Homo sapiens
  CDR3 for alpha chain variable domain of TCR clone 353341 (TRAV26-1, TRAJ38)
CIVRPLNAGNNHIQKPDPAVYQL

SEQ ID NO: 706682 - protein, 13 aa, Homo sapiens
  CDR3 for beta chain variable domain of TCR clone 353341 (TRBV18, TRBJ1-1)
CASSPNGDTEAFF

SEQ ID NO: 706683 - protein, 13 aa, Homo sapiens
  CDR3 for alpha chain variable domain of TCR clone 353342 (TRAV30, TRAJ22)
RGTLSGSARQLTF

SEQ ID NO: 706684 - protein, 14 aa, Homo sapiens
  CDR3 for beta chain variable domain of TCR clone 353342 (TRBV6-1, TRBJ2-1)
CASSEATRVNEQFF

SEQ ID NO: 706685 - protein, 17 aa, Homo sapiens
  CDR3 for alpha chain variable domain of TCR clone 353343 (TRAV3, TRAJ6)
CAARDGPRAGGSDIPTF

SEQ ID NO: 706686 - protein, 14 aa, Homo sapiens
  CDR3 for beta chain variable domain of TCR clone 353343 (TRBV7-2, TRBJ2-7)
CASSPKTSFYEQYF

SEQ ID NO: 706687 - protein, 12 aa, Homo sapiens
  CDR3 for alpha chain variable domain of TCR clone 353344 (TRAV13-2, TRAJ30)
CAENFGDDKIIF

SEQ ID NO: 706688 - protein, 14 aa, Homo sapiens
  CDR3 for beta chain variable domain of TCR clone 353344 (TRBV12-4, TRBJ2-5)
CASSLNRAGETQYF

SEQ ID NO: 706689 - protein, 13 aa, Homo sapiens
  CDR3 for alpha chain variable domain of TCR clone 353345 (TRAV1-1, TRAJ23)
CAVVANQGGKLIF

SEQ ID NO: 706690 - protein, 16 aa, Homo sapiens
  CDR3 for beta chain variable domain of TCR clone 353345 (TRBV5-5, TRBJ1-2)
CAGSPTWGRGLYGYTF

SEQ ID NO: 706691 - protein, 15 aa, Homo sapiens
  CDR3 for alpha chain variable domain of TCR clone 353346 (TRAV26-1, TRAJ29)
CSVRVEGSGNTPLVF

SEQ ID NO: 706692 - protein, 14 aa, Homo sapiens
  CDR3 for beta chain variable domain of TCR clone 353346 (TRBV25-1, TRBJ1-1)
CASTHLGGNTEAFF

SEQ ID NO: 706693 - protein, 17 aa, Homo sapiens
  CDR3 for alpha chain variable domain of TCR clone 353347 (TRAV3, TRAJ6)
CAVRDGPRAGGSYIPPF

SEQ ID NO: 706694 - protein, 14 aa, Homo sapiens
  CDR3 for beta chain variable domain of TCR clone 353347 (TRBV7-2, TRBJ2-7)
CASSPNTSFYEQYF

SEQ ID NO: 706695 - protein, 14 aa, Homo sapiens
  CDR3 for alpha chain variable domain of TCR clone 353348 (TRAV26-1, TRAJ38)
CIADNAGNKRKLIW

SEQ ID NO: 706696 - protein, 20 aa, Homo sapiens
  CDR3 for beta chain variable domain of TCR clone 353348 (TRBV7-8, TRBJ2-2)
CASSHLFPGPTIHITGELFF

SEQ ID NO: 706697 - protein, 12 aa, Homo sapiens
  CDR3 for alpha chain variable domain of TCR clone 353349 (TRAV13-1, TRAJ49)
CAASIRSNQFYF

SEQ ID NO: 706698 - protein, 13 aa, Homo sapiens
  CDR3 for beta chain variable domain of TCR clone 353349 (TRBV6-4, TRBJ1-5)
CASSADLNQPQHF

SEQ ID NO: 706699 - protein, 14 aa, Homo sapiens
  CDR3 for alpha chain variable domain of TCR clone 353350 (TRAV12-1, TRAJ6)
CVLPTSGVSYIPTF

SEQ ID NO: 706700 - protein, 16 aa, Homo sapiens
  CDR3 for beta chain variable domain of TCR clone 353350 (TRBV2, TRBJ2-7)
CASSEPWTGPSYEQYF

SEQ ID NO: 706701 - protein, 15 aa, Homo sapiens
  CDR3 for alpha chain variable domain of TCR clone 353351 (TRAV1-2, TRAJ35)
CAVRDREGFGNVLYC

SEQ ID NO: 706702 - protein, 14 aa, Homo sapiens
  CDR3 for beta chain variable domain of TCR clone 353351 (TRBV28, TRBJ1-4)
CASSRTVGNEKLFF

SEQ ID NO: 706703 - protein, 13 aa, Homo sapiens
  CDR3 for alpha chain variable domain of TCR clone 353352 (TRAV12-1, TRAJ21)
CVVTLYNFNKFYF

SEQ ID NO: 706704 - protein, 20 aa, Homo sapiens
  CDR3 for beta chain variable domain of TCR clone 353352 (TRBV7-8, TRBJ2-1)
CASSLEHRLAGVRSYNEQFF

SEQ ID NO: 706705 - protein, 14 aa, Homo sapiens
  CDR3 for alpha chain variable domain of TCR clone 353353 (TRAV14/DV4, TRAJ26)
CAMREGTYGQNFVF

SEQ ID NO: 706706 - protein, 12 aa, Homo sapiens
  CDR3 for beta chain variable domain of TCR clone 353353 (TRBV7-9, TRBJ1-6)
CASSLMTSPLHF

SEQ ID NO: 706707 - protein, 14 aa, Homo sapiens
  CDR3 for alpha chain variable domain of TCR clone 353354 (TRAV12-3, TRAJ5)
CAMTLDTGRRALTF

SEQ ID NO: 706708 - protein, 14 aa, Homo sapiens
  CDR3 for beta chain variable domain of TCR clone 353354 (TRBV10-2, TRBJ1-5)
CASSSTGRNQPQHF

SEQ ID NO: 706709 - protein, 15 aa, Homo sapiens
  CDR3 for alpha chain variable domain of TCR clone 353355 (TRAV12-2, TRAJ32)
CAVNYYGGATNKLIF

SEQ ID NO: 706710 - protein, 14 aa, Homo sapiens
  CDR3 for beta chain variable domain of TCR clone 353355 (TRBV27, TRBJ2-1)
CASSFGREANEQFF

SEQ ID NO: 706711 - protein, 10 aa, Homo sapiens
  CDR3 for alpha chain variable domain of TCR clone 353356 (TRAV23/DV6, TRAJ57)
CAASSTLSQG

SEQ ID NO: 706712 - protein, 14 aa, Homo sapiens
  CDR3 for beta chain variable domain of TCR clone 353356 (TRBV7-2, TRBJ2-7)
CASSLPPGQGPQYF

SEQ ID NO: 706713 - protein, 13 aa, Homo sapiens
  CDR3 for alpha chain variable domain of TCR clone 353357 (TRAV1-2, TRAJ20)
CAVRDGNDYKLSF

SEQ ID NO: 706714 - protein, 12 aa, Homo sapiens
  CDR3 for beta chain variable domain of TCR clone 353357 (TRBV7-8, TRBJ2-2)
YASNSYGGELFF

SEQ ID NO: 706715 - protein, 14 aa, Homo sapiens
  CDR3 for alpha chain variable domain of TCR clone 353358 (TRAV21, TRAJ45)
CAVSSGGGADGLTF

SEQ ID NO: 706716 - protein, 19 aa, Homo sapiens
  CDR3 for beta chain variable domain of TCR clone 353358 (TRBV7-2, TRBJ2-3)
CASSFLSRNWGGGTDTQYF

SEQ ID NO: 706717 - protein, 14 aa, Homo sapiens
  CDR3 for alpha chain variable domain of TCR clone 353359 (TRAV38-1, TRAJ29)
CAFITPSGNTPLVY

SEQ ID NO: 706718 - protein, 14 aa, Homo sapiens
  CDR3 for beta chain variable domain of TCR clone 353359 (TRBV18, TRBJ2-7)
CASSPRGGAYEQYF

SEQ ID NO: 706719 - protein, 16 aa, Homo sapiens
  CDR3 for alpha chain variable domain of TCR clone 353360 (TRAV3, TRAJ37)
CAVRGKGSGNTGKLIF

SEQ ID NO: 706720 - protein, 18 aa, Homo sapiens
  CDR3 for beta chain variable domain of TCR clone 353360 (TRBV5-7, TRBJ2-1)
CASSLDFRRLTGGNEQFF

SEQ ID NO: 706721 - protein, 15 aa, Homo sapiens
  CDR3 for alpha chain variable domain of TCR clone 353361 (TRAV3, TRAJ22)
CAVRDRGGSARQLNF

SEQ ID NO: 706722 - protein, 16 aa, Homo sapiens
  CDR3 for beta chain variable domain of TCR clone 353361 (TRBV25-1, TRBJ1-1)
CASSGDRDRGRIEAFF

SEQ ID NO: 706723 - protein, 11 aa, Homo sapiens
  CDR3 for alpha chain variable domain of TCR clone 353362 (TRAV21, TRAJ34)
CAVTNTDKLIF

SEQ ID NO: 706724 - protein, 14 aa, Homo sapiens
  CDR3 for beta chain variable domain of TCR clone 353362 (TRBV7-9, TRBJ2-3)
CASSLEDGTDTQYF

SEQ ID NO: 706725 - protein, 14 aa, Homo sapiens
  CDR3 for alpha chain variable domain of TCR clone 353363 (TRAV16, TRAJ15)
CALSFNQAGTALIF

SEQ ID NO: 706726 - protein, 19 aa, Homo sapiens
  CDR3 for beta chain variable domain of TCR clone 353363 (TRBV11-3, TRBJ2-2)
CASSTRPGAKTTNTGELFF

SEQ ID NO: 706727 - protein, 13 aa, Homo sapiens
  CDR3 for alpha chain variable domain of TCR clone 353364 (TRAV13-1, TRAJ5)
CAASDTGRGTLTF

SEQ ID NO: 706728 - protein, 12 aa, Homo sapiens
  CDR3 for beta chain variable domain of TCR clone 353364 (TRBV28, TRBJ2-3)
CASSLYRDTQYF

SEQ ID NO: 706729 - protein, 15 aa, Homo sapiens
  CDR3 for alpha chain variable domain of TCR clone 353365 (TRAV8-3, TRAJ11)
CAVGLLNSGYSTPTF

SEQ ID NO: 706730 - protein, 16 aa, Homo sapiens
  CDR3 for beta chain variable domain of TCR clone 353365 (TRBV7-9, TRBJ1-2)
CASSLGFSAGEDGYSF

SEQ ID NO: 706731 - protein, 15 aa, Homo sapiens
  CDR3 for alpha chain variable domain of TCR clone 353366 (TRAV3, TRAJ9)
CAVRARNTGGFKTIF

SEQ ID NO: 706732 - protein, 15 aa, Homo sapiens
  CDR3 for beta chain variable domain of TCR clone 353366 (TRBV27, TRBJ1-1)
CASSPYADPYTEDFF

SEQ ID NO: 706733 - protein, 14 aa, Homo sapiens
  CDR3 for alpha chain variable domain of TCR clone 353367 (TRAV12-3, TRAJ42)
CAMNYGGSQGNLIF

SEQ ID NO: 706734 - protein, 18 aa, Homo sapiens
  CDR3 for beta chain variable domain of TCR clone 353367 (TRBV6-6, TRBJ1-3)
CASSYSKWDSISGNTIYF

SEQ ID NO: 706735 - protein, 13 aa, Homo sapiens
  CDR3 for alpha chain variable domain of TCR clone 353368 (TRAV8-6, TRAJ49)
CAVITNTGNQFYF

SEQ ID NO: 706736 - protein, 15 aa, Homo sapiens
  CDR3 for beta chain variable domain of TCR clone 353368 (TRBV7-2, TRBJ2-7)
CASSWGQGAIYEQYF

SEQ ID NO: 706737 - protein, 11 aa, Homo sapiens
  CDR3 for alpha chain variable domain of TCR clone 353369 (TRAV23/DV6, TRAJ48)
CAPRWGEKLTF

SEQ ID NO: 706738 - protein, 14 aa, Homo sapiens
  CDR3 for beta chain variable domain of TCR clone 353369 (TRBV29-1, TRBJ1-3)
CSVADRVVGNTIYF

SEQ ID NO: 706739 - protein, 14 aa, Homo sapiens
  CDR3 for alpha chain variable domain of TCR clone 353370 (TRAV8-3, TRAJ27)
CAGGRNTNAGKSTF

SEQ ID NO: 706740 - protein, 14 aa, Homo sapiens
  CDR3 for beta chain variable domain of TCR clone 353370 (TRBV11-3, TRBJ2-5)
CHSLRGRVQETQYS

SEQ ID NO: 706741 - protein, 16 aa, Homo sapiens
  CDR3 for alpha chain variable domain of TCR clone 353371 (TRAV13-1, TRAJ48)
CAASIFGNFENEKLTF

SEQ ID NO: 706742 - protein, 16 aa, Homo sapiens
  CDR3 for beta chain variable domain of TCR clone 353371 (TRBV7-2, TRBJ2-6)
CASSERRASGANVLTF

SEQ ID NO: 706743 - protein, 19 aa, Homo sapiens
  CDR3 for alpha chain variable domain of TCR clone 353372 (TRAV2, TRAJ20)
ILQVREADAAVYRDCKLSF

SEQ ID NO: 706744 - protein, 13 aa, Homo sapiens
  CDR3 for beta chain variable domain of TCR clone 353372 (TRBV15, TRBJ1-6)
CATSGGLISPLHF

SEQ ID NO: 706745 - protein, 13 aa, Homo sapiens
  CDR3 for alpha chain variable domain of TCR clone 353373 (TRAV8-3, TRAJ4)
WVFYSGGYNKLIF

SEQ ID NO: 706746 - protein, 16 aa, Homo sapiens
  CDR3 for beta chain variable domain of TCR clone 353373 (TRBV7-8, TRBJ2-3)
CASSTEGQLETDTQYF

SEQ ID NO: 706747 - protein, 16 aa, Homo sapiens
  CDR3 for alpha chain variable domain of TCR clone 353374 (TRAV30, TRAJ24)
CGTEIVDADSWGKFQF

SEQ ID NO: 706748 - protein, 14 aa, Homo sapiens
  CDR3 for beta chain variable domain of TCR clone 353374 (TRBV13, TRBJ2-1)
CASSPRPRYNERFF

SEQ ID NO: 706749 - protein, 14 aa, Homo sapiens
  CDR3 for alpha chain variable domain of TCR clone 353375 (TRAV8-4, TRAJ13)
CAVTLSGGYQKVTF

SEQ ID NO: 706750 - protein, 16 aa, Homo sapiens
  CDR3 for beta chain variable domain of TCR clone 353375 (TRBV11-2, TRBJ2-3)
CASSSRTSGGAGTQYF

SEQ ID NO: 706751 - protein, 14 aa, Homo sapiens
  CDR3 for alpha chain variable domain of TCR clone 353376 (TRAV26-1, TRAJ30)
CIVRATNRDDKIIF

SEQ ID NO: 706752 - protein, 14 aa, Homo sapiens
  CDR3 for beta chain variable domain of TCR clone 353376 (TRBV12-4, TRBJ1-1)
CASTWTGHDTEAFF

SEQ ID NO: 706753 - protein, 11 aa, Homo sapiens
  CDR3 for alpha chain variable domain of TCR clone 353377 (TRAV3, TRAJ21)
CAVGKFNKFYF

SEQ ID NO: 706754 - protein, 16 aa, Homo sapiens
  CDR3 for beta chain variable domain of TCR clone 353377 (TRBV19, TRBJ2-1)
CANSKAGPSSYNEQFF

SEQ ID NO: 706755 - protein, 12 aa, Homo sapiens
  CDR3 for alpha chain variable domain of TCR clone 353378 (TRAV12-3, TRAJ17)
CAMTLTGNKLTF

SEQ ID NO: 706756 - protein, 14 aa, Homo sapiens
  CDR3 for beta chain variable domain of TCR clone 353378 (TRBV20-1, TRBJ2-7)
QSRDRVSGMDEQYF

SEQ ID NO: 706757 - protein, 14 aa, Homo sapiens
  CDR3 for alpha chain variable domain of TCR clone 353379 (TRAV9-2, TRAJ39)
CALYIYNAGNMLTF

SEQ ID NO: 706758 - protein, 11 aa, Homo sapiens
  CDR3 for beta chain variable domain of TCR clone 353379 (TRBV11-2, TRBJ2-2)
CASSLPGEPFF

SEQ ID NO: 706759 - protein, 14 aa, Homo sapiens
  CDR3 for alpha chain variable domain of TCR clone 353380 (TRAV12-3, TRAJ10)
SHLPLTGGGNKLTF

SEQ ID NO: 706760 - protein, 13 aa, Homo sapiens
  CDR3 for beta chain variable domain of TCR clone 353380 (TRBV19, TRBJ1-1)
RASSPSNGGEAFF

SEQ ID NO: 706761 - protein, 12 aa, Homo sapiens
  CDR3 for alpha chain variable domain of TCR clone 353381 (TRAV27, TRAJ21)
CAGVRQLQQILL

SEQ ID NO: 706762 - protein, 14 aa, Homo sapiens
  CDR3 for beta chain variable domain of TCR clone 353381 (TRBV7-9, TRBJ1-4)
CASSLEGQSEILFF

SEQ ID NO: 706763 - protein, 10 aa, Homo sapiens
  CDR3 for alpha chain variable domain of TCR clone 353382 (TRAV3, TRAJ30)
CAVREIEIIF

SEQ ID NO: 706764 - protein, 12 aa, Homo sapiens
  CDR3 for beta chain variable domain of TCR clone 353382 (TRBV12-4, TRBJ1-3)
CASSFSGNTIYF

SEQ ID NO: 706765 - protein, 15 aa, Homo sapiens
  CDR3 for alpha chain variable domain of TCR clone 353383 (TRAV12-1, TRAJ42)
CVVTRDGGSQGNLIF

SEQ ID NO: 706766 - protein, 14 aa, Homo sapiens
  CDR3 for beta chain variable domain of TCR clone 353383 (TRBV11-2, TRBJ2-3)
CASSSGGGANTQYF

SEQ ID NO: 706767 - protein, 15 aa, Homo sapiens
  CDR3 for alpha chain variable domain of TCR clone 353384 (TRAV12-3, TRAJ13)
CAMSARSGGYQKVTF

SEQ ID NO: 706768 - protein, 18 aa, Homo sapiens
  CDR3 for beta chain variable domain of TCR clone 353384 (TRBV3-1, TRBJ2-7)
CASSQEGGGRSWHYEQYL

SEQ ID NO: 706769 - protein, 12 aa, Homo sapiens
  CDR3 for alpha chain variable domain of TCR clone 353385 (TRAV27, TRAJ33)
CAGDGSNYPLIW

SEQ ID NO: 706770 - protein, 15 aa, Homo sapiens
  CDR3 for beta chain variable domain of TCR clone 353385 (TRBV6-5, TRBJ2-7)
CASSYSTSGNYEQYF

SEQ ID NO: 706771 - protein, 12 aa, Homo sapiens
  CDR3 for alpha chain variable domain of TCR clone 353386 (TRAV21, TRAJ37)
CAVRGNTGKLIF

SEQ ID NO: 706772 - protein, 15 aa, Homo sapiens
  CDR3 for beta chain variable domain of TCR clone 353386 (TRBV19, TRBJ1-6)
CASSTQGAVGSPLHF

SEQ ID NO: 706773 - protein, 15 aa, Homo sapiens
  CDR3 for alpha chain variable domain of TCR clone 353387 (TRAV25, TRAJ53)
CPTSNNGGSNYKLKF

SEQ ID NO: 706774 - protein, 14 aa, Homo sapiens
  CDR3 for beta chain variable domain of TCR clone 353387 (TRBV11-2, TRBJ2-3)
CASSRLARTDTQYF

SEQ ID NO: 706775 - protein, 12 aa, Homo sapiens
  CDR3 for alpha chain variable domain of TCR clone 353388 (TRAV12-2, TRAJ3)
FAVWSSASKIIF

SEQ ID NO: 706776 - protein, 12 aa, Homo sapiens
  CDR3 for beta chain variable domain of TCR clone 353388 (TRBV11-2, TRBJ2-1)
CASSPGNNEQFF

SEQ ID NO: 706777 - protein, 16 aa, Homo sapiens
  CDR3 for alpha chain variable domain of TCR clone 353389 (TRAV30, TRAJ24)
CGTEIVDADSWGKFQF

SEQ ID NO: 706778 - protein, 15 aa, Homo sapiens
  CDR3 for beta chain variable domain of TCR clone 353389 (TRBV3-1, TRBJ1-2)
CASSPTRLPEGGYTF

SEQ ID NO: 706779 - protein, 13 aa, Homo sapiens
  CDR3 for alpha chain variable domain of TCR clone 353390 (TRAV21, TRAJ10)
CAVRPGGGNKLTF

SEQ ID NO: 706780 - protein, 14 aa, Homo sapiens
  CDR3 for beta chain variable domain of TCR clone 353390 (TRBV7-3, TRBJ2-1)
CASSLAGGTNEQFF

SEQ ID NO: 706781 - protein, 14 aa, Homo sapiens
  CDR3 for alpha chain variable domain of TCR clone 353391 (TRAV21, TRAJ32)
CCGDYGGATNKLIF

SEQ ID NO: 706782 - protein, 14 aa, Homo sapiens
  CDR3 for beta chain variable domain of TCR clone 353391 (TRBV4-2, TRBJ2-1)
CASGLDRAYNEQFF

SEQ ID NO: 706783 - protein, 14 aa, Homo sapiens
  CDR3 for alpha chain variable domain of TCR clone 353392 (TRAV2, TRAJ3)
CAVEDNSSASKIIF

SEQ ID NO: 706784 - protein, 14 aa, Homo sapiens
  CDR3 for beta chain variable domain of TCR clone 353392 (TRBV6-3, TRBJ2-7)
CASRISGGPGEQYF

SEQ ID NO: 706785 - protein, 16 aa, Homo sapiens
  CDR3 for alpha chain variable domain of TCR clone 353393 (TRAV26-1, TRAJ23)
CIVRVERYNQGGKRIF

SEQ ID NO: 706786 - protein, 15 aa, Homo sapiens
  CDR3 for beta chain variable domain of TCR clone 353393 (TRBV18, TRBJ2-7)
CASSPRGGKGYEQYF

SEQ ID NO: 706787 - protein, 14 aa, Homo sapiens
  CDR3 for alpha chain variable domain of TCR clone 353394 (TRAV13-1, TRAJ40)
CAARSTSGTYKYIF

SEQ ID NO: 706788 - protein, 15 aa, Homo sapiens
  CDR3 for beta chain variable domain of TCR clone 353394 (TRBV18, TRBJ1-5)
CASSETGGNNQTQNF

SEQ ID NO: 706789 - protein, 14 aa, Homo sapiens
  CDR3 for alpha chain variable domain of TCR clone 353395 (TRAV13-1, TRAJ35)
CAASKGGFGNVLHC

SEQ ID NO: 706790 - protein, 13 aa, Homo sapiens
  CDR3 for beta chain variable domain of TCR clone 353395 (TRBV12-4, TRBJ1-2)
CASSSGPNYGYTF

SEQ ID NO: 706791 - protein, 13 aa, Homo sapiens
  CDR3 for alpha chain variable domain of TCR clone 353396 (TRAV21, TRAJ27)
CAARPGNAGKSTF

SEQ ID NO: 706792 - protein, 13 aa, Homo sapiens
  CDR3 for beta chain variable domain of TCR clone 353396 (TRBV7-6, TRBJ2-1)
CQQVGGGADEQFF

SEQ ID NO: 706793 - protein, 11 aa, Homo sapiens
  CDR3 for alpha chain variable domain of TCR clone 353397 (TRAV23/DV6, TRAJ58)
CAARLLRGETS

SEQ ID NO: 706794 - protein, 16 aa, Homo sapiens
  CDR3 for beta chain variable domain of TCR clone 353397 (TRBV15, TRBJ2-6)
CATSVNGGFLANVLTF

SEQ ID NO: 706795 - protein, 15 aa, Homo sapiens
  CDR3 for alpha chain variable domain of TCR clone 353398 (TRAV17, TRAJ54)
CATTRSEQGAQKLVF

SEQ ID NO: 706796 - protein, 16 aa, Homo sapiens
  CDR3 for beta chain variable domain of TCR clone 353398 (TRBV12-4, TRBJ2-3)
CASSLRLAETTDTRYF

SEQ ID NO: 706797 - protein, 13 aa, Homo sapiens
  CDR3 for alpha chain variable domain of TCR clone 353399 (TRAV36/DV7, TRAJ54)
CAVCTQEAQKLVF

SEQ ID NO: 706798 - protein, 13 aa, Homo sapiens
  CDR3 for beta chain variable domain of TCR clone 353399 (TRBV7-6, TRBJ2-7)
CASSLDHTHEQYF

SEQ ID NO: 706799 - protein, 12 aa, Homo sapiens
  CDR3 for alpha chain variable domain of TCR clone 353400 (TRAV12-3, TRAJ5)
CAMHTGRRALTF

SEQ ID NO: 706800 - protein, 13 aa, Homo sapiens
  CDR3 for beta chain variable domain of TCR clone 353400 (TRBV7-7, TRBJ2-2)
CASSLTSAGELFF

SEQ ID NO: 706801 - protein, 20 aa, Homo sapiens
  CDR3 for alpha chain variable domain of TCR clone 353401 (TRAV13-1, )
CAASPMDIQNPDPAVYQLRD

SEQ ID NO: 706802 - protein, 13 aa, Homo sapiens
  CDR3 for beta chain variable domain of TCR clone 353401 (TRBV20-1, TRBJ2-2)
CSASAAGTGELFY

SEQ ID NO: 706803 - protein, 15 aa, Homo sapiens
  CDR3 for alpha chain variable domain of TCR clone 353402 (TRAV12-2, TRAJ53)
CAVNGGGGSNYQLTF

SEQ ID NO: 706804 - protein, 14 aa, Homo sapiens
  CDR3 for beta chain variable domain of TCR clone 353402 (TRBV11-2, TRBJ2-5)
CASSRTGGIETQYF

SEQ ID NO: 706805 - protein, 16 aa, Homo sapiens
  CDR3 for alpha chain variable domain of TCR clone 353403 (TRAV8-3, TRAJ44)
CAVGASHTGTASKLTF

SEQ ID NO: 706806 - protein, 15 aa, Homo sapiens
  CDR3 for beta chain variable domain of TCR clone 353403 (TRBV27, TRBJ1-5)
CASTFNRGSNQPQHF

SEQ ID NO: 706807 - protein, 12 aa, Homo sapiens
  CDR3 for alpha chain variable domain of TCR clone 353404 (TRAV12-3, TRAJ41)
CAMSYSGYALNF

SEQ ID NO: 706808 - protein, 15 aa, Homo sapiens
  CDR3 for beta chain variable domain of TCR clone 353404 (TRBV5-1, TRBJ2-1)
CASSPPRAPYNEQFV

SEQ ID NO: 706809 - protein, 14 aa, Homo sapiens
  CDR3 for alpha chain variable domain of TCR clone 353405 (TRAV12-2, TRAJ13)
CAVKKTGGYQTVTF

SEQ ID NO: 706810 - protein, 16 aa, Homo sapiens
  CDR3 for beta chain variable domain of TCR clone 353405 (TRBV4-2, TRBJ2-4)
CASSQELRRTKNIQYF

SEQ ID NO: 706811 - protein, 16 aa, Homo sapiens
  CDR3 for alpha chain variable domain of TCR clone 353406 (TRAV12-2, TRAJ10)
CAVNRVLTGGGNKLNF

SEQ ID NO: 706812 - protein, 17 aa, Homo sapiens
  CDR3 for beta chain variable domain of TCR clone 353406 (TRBV4-1, TRBJ1-4)
CASSQEGPRGVEEKLFF

SEQ ID NO: 706813 - protein, 18 aa, Homo sapiens
  CDR3 for alpha chain variable domain of TCR clone 353407 (TRAV21, TRAJ52)
CAVRPSPPGGTSYGKLTF

SEQ ID NO: 706814 - protein, 15 aa, Homo sapiens
  CDR3 for beta chain variable domain of TCR clone 353407 (TRBV19, TRBJ1-1)
CASTSGQIQNTEAFF

SEQ ID NO: 706815 - protein, 23 aa, Homo sapiens
  CDR3 for alpha chain variable domain of TCR clone 353408 (TRAV8-3, TRAJ6)
CAVVPHQEEATYLHLEEEPALLF

SEQ ID NO: 706816 - protein, 16 aa, Homo sapiens
  CDR3 for beta chain variable domain of TCR clone 353408 (TRBV4-2, TRBJ2-7)
CASSQDGGSLRGEQYF

SEQ ID NO: 706817 - protein, 17 aa, Homo sapiens
  CDR3 for alpha chain variable domain of TCR clone 353409 (TRAV3, TRAJ42)
CAVRDRDYGGSQGNLIF

SEQ ID NO: 706818 - protein, 20 aa, Homo sapiens
  CDR3 for beta chain variable domain of TCR clone 353409 (TRBV28, TRBJ2-1)
CASTPIGRSPGLAGGNELFF

SEQ ID NO: 706819 - protein, 18 aa, Homo sapiens
  CDR3 for alpha chain variable domain of TCR clone 353410 (TRAV13-1, TRAJ52)
CAAKNPNAGGTSHEKLTF

SEQ ID NO: 706820 - protein, 14 aa, Homo sapiens
  CDR3 for beta chain variable domain of TCR clone 353410 (TRBV7-2, TRBJ1-2)
CASSQTGSTYGYTF

SEQ ID NO: 706821 - protein, 14 aa, Homo sapiens
  CDR3 for alpha chain variable domain of TCR clone 353411 (TRAV13-2, TRAJ17)
CAENSEAAGNKLTF

SEQ ID NO: 706822 - protein, 14 aa, Homo sapiens
  CDR3 for beta chain variable domain of TCR clone 353411 (TRBV19, TRBJ2-1)
CASPTFVLSGEQFF

SEQ ID NO: 706823 - protein, 15 aa, Homo sapiens
  CDR3 for alpha chain variable domain of TCR clone 353412 (TRAV2, TRAJ15)
CAVEDRGQAGTALIF

SEQ ID NO: 706824 - protein, 16 aa, Homo sapiens
  CDR3 for beta chain variable domain of TCR clone 353412 (TRBV10-3, TRBJ2-1)
CAISGVGDGGGGEQFF

SEQ ID NO: 706825 - protein, 14 aa, Homo sapiens
  CDR3 for alpha chain variable domain of TCR clone 353413 (TRAV38-2/DV8, TRAJ30)
CAYMDGLGGDKIIF

SEQ ID NO: 706826 - protein, 15 aa, Homo sapiens
  CDR3 for beta chain variable domain of TCR clone 353413 (TRBV7-9, TRBJ2-2)
CASRPADRDTGELVF

SEQ ID NO: 706827 - protein, 14 aa, Homo sapiens
  CDR3 for alpha chain variable domain of TCR clone 353414 (TRAV13-1, TRAJ35)
CAASKGGFGNVLHC

SEQ ID NO: 706828 - protein, 14 aa, Homo sapiens
  CDR3 for beta chain variable domain of TCR clone 353414 (TRBV9, TRBJ2-1)
CASSVALAVNEQFF

SEQ ID NO: 706829 - protein, 13 aa, Homo sapiens
  CDR3 for alpha chain variable domain of TCR clone 353415 (TRAV3, TRAJ3)
CAVADSSASKIIF

SEQ ID NO: 706830 - protein, 14 aa, Homo sapiens
  CDR3 for beta chain variable domain of TCR clone 353415 (TRBV6-1, TRBJ1-3)
CASVQGGGGNTIYF

SEQ ID NO: 706831 - protein, 16 aa, Homo sapiens
  CDR3 for alpha chain variable domain of TCR clone 353416 (TRAV3, TRAJ37)
CAVRGKGSGNTGKLIF

SEQ ID NO: 706832 - protein, 12 aa, Homo sapiens
  CDR3 for beta chain variable domain of TCR clone 353416 (TRBV20-1, TRBJ2-1)
CSARLGTDEQFF

SEQ ID NO: 706833 - protein, 14 aa, Homo sapiens
  CDR3 for alpha chain variable domain of TCR clone 353417 (TRAV1-2, TRAJ8)
CGVREDTGFKKLVF

SEQ ID NO: 706834 - protein, 15 aa, Homo sapiens
  CDR3 for beta chain variable domain of TCR clone 353417 (TRBV6-3, TRBJ2-7)
CASSSPGTVFYEQYF

SEQ ID NO: 706835 - protein, 16 aa, Homo sapiens
  CDR3 for alpha chain variable domain of TCR clone 353418 (TRAV3, TRAJ37)
CAVRGKGSGNTGKLIF

SEQ ID NO: 706836 - protein, 15 aa, Homo sapiens
  CDR3 for beta chain variable domain of TCR clone 353418 (TRBV11-2, TRBJ2-7)
CASRFPGTGGYEQYF

SEQ ID NO: 706837 - protein, 11 aa, Homo sapiens
  CDR3 for alpha chain variable domain of TCR clone 353419 (TRAV35, TRAJ34)
CWAGNTDKLIF

SEQ ID NO: 706838 - protein, 12 aa, Homo sapiens
  CDR3 for beta chain variable domain of TCR clone 353419 (TRBV12-5, TRBJ2-5)
CASGQGVETQYF

SEQ ID NO: 706839 - protein, 14 aa, Homo sapiens
  CDR3 for alpha chain variable domain of TCR clone 353420 (TRAV8-3, TRAJ39)
CAVGANNAGNMLTF

SEQ ID NO: 706840 - protein, 14 aa, Homo sapiens
  CDR3 for beta chain variable domain of TCR clone 353420 (TRBV28, TRBJ1-3)
CTSASVSSGNTIYF

SEQ ID NO: 706841 - protein, 17 aa, Homo sapiens
  CDR3 for alpha chain variable domain of TCR clone 353421 (TRAV38-1, TRAJ45)
CAFMRSYSGGGADGPTF

SEQ ID NO: 706842 - protein, 15 aa, Homo sapiens
  CDR3 for beta chain variable domain of TCR clone 353421 (TRBV7-2, TRBJ2-3)
CASSLVVRGPDTQYF

SEQ ID NO: 706843 - protein, 12 aa, Homo sapiens
  CDR3 for alpha chain variable domain of TCR clone 353422 (TRAV27, TRAJ34)
CAGAKNTDKLIF

SEQ ID NO: 706844 - protein, 14 aa, Homo sapiens
  CDR3 for beta chain variable domain of TCR clone 353422 (TRBV19, TRBJ2-1)
CASGRSTQYNEQFF

SEQ ID NO: 706845 - protein, 16 aa, Homo sapiens
  CDR3 for alpha chain variable domain of TCR clone 353423 (TRAV23/DV6, TRAJ32)
CAATPGGGGATNKLIF

SEQ ID NO: 706846 - protein, 14 aa, Homo sapiens
  CDR3 for beta chain variable domain of TCR clone 353423 (TRBV28, TRBJ2-7)
CASSLLRISYEQYF

SEQ ID NO: 706847 - protein, 12 aa, Homo sapiens
  CDR3 for alpha chain variable domain of TCR clone 353424 (TRAV13-2, TRAJ23)
CAERHRGGKLIF

SEQ ID NO: 706848 - protein, 15 aa, Homo sapiens
  CDR3 for beta chain variable domain of TCR clone 353424 (TRBV7-9, TRBJ1-6)
CARSSPGRGNSPLHF

SEQ ID NO: 706849 - protein, 16 aa, Homo sapiens
  CDR3 for alpha chain variable domain of TCR clone 353425 (TRAV12-3, TRAJ53)
CAMSPGSGCSNYKLTF

SEQ ID NO: 706850 - protein, 16 aa, Homo sapiens
  CDR3 for beta chain variable domain of TCR clone 353425 (TRBV12-5, TRBJ2-5)
CASGPRTSGNQETQYF

SEQ ID NO: 706851 - protein, 13 aa, Homo sapiens
  CDR3 for alpha chain variable domain of TCR clone 353426 (TRAV13-1, TRAJ6)
CARGSGGSYIHTF

SEQ ID NO: 706852 - protein, 15 aa, Homo sapiens
  CDR3 for beta chain variable domain of TCR clone 353426 (TRBV2, TRBJ2-1)
CASSELAGSYNEQFF

SEQ ID NO: 706853 - protein, 15 aa, Homo sapiens
  CDR3 for alpha chain variable domain of TCR clone 353427 (TRAV12-1, TRAJ5)
CVVNMLETGRRALTF

SEQ ID NO: 706854 - protein, 13 aa, Homo sapiens
  CDR3 for beta chain variable domain of TCR clone 353427 (TRBV19, TRBJ1-2)
CASSQGQVYGYTF

SEQ ID NO: 706855 - protein, 14 aa, Homo sapiens
  CDR3 for alpha chain variable domain of TCR clone 353428 (TRAV16, TRAJ48)
CALTPGFGNEKLTF

SEQ ID NO: 706856 - protein, 14 aa, Homo sapiens
  CDR3 for beta chain variable domain of TCR clone 353428 (TRBV7-2, TRBJ1-1)
CASSLDRYGTEAFF

SEQ ID NO: 706857 - protein, 16 aa, Homo sapiens
  CDR3 for alpha chain variable domain of TCR clone 353429 (TRAV14/DV4, TRAJ20)
CAMRECRSRDDYKLSF

SEQ ID NO: 706858 - protein, 17 aa, Homo sapiens
  CDR3 for beta chain variable domain of TCR clone 353429 (TRBV15, TRBJ1-1)
CATSRVGGADGDTEAFF

SEQ ID NO: 706859 - protein, 13 aa, Homo sapiens
  CDR3 for alpha chain variable domain of TCR clone 353430 (TRAV13-1, TRAJ10)
CAATAGGGNKLTF

SEQ ID NO: 706860 - protein, 13 aa, Homo sapiens
  CDR3 for beta chain variable domain of TCR clone 353430 (TRBV7-3, TRBJ1-2)
CASSLKQNYGYTF

SEQ ID NO: 706861 - protein, 16 aa, Homo sapiens
  CDR3 for alpha chain variable domain of TCR clone 353431 (TRAV3, TRAJ10)
CAVRDMRAGGGNKLTF

SEQ ID NO: 706862 - protein, 15 aa, Homo sapiens
  CDR3 for beta chain variable domain of TCR clone 353431 (TRBV20-1, TRBJ2-1)
CSASSAGSSYNGQFF

SEQ ID NO: 706863 - protein, 14 aa, Homo sapiens
  CDR3 for alpha chain variable domain of TCR clone 353432 (TRAV1-2, TRAJ16)
CAVNRVSDGQKLLF

SEQ ID NO: 706864 - protein, 17 aa, Homo sapiens
  CDR3 for beta chain variable domain of TCR clone 353432 (TRBV7-8, TRBJ2-6)
CASSAGTGGAGANVLTF

SEQ ID NO: 706865 - protein, 13 aa, Homo sapiens
  CDR3 for alpha chain variable domain of TCR clone 353433 (TRAV13-1, TRAJ43)
CAASLSNNNDMRF

SEQ ID NO: 706866 - protein, 15 aa, Homo sapiens
  CDR3 for beta chain variable domain of TCR clone 353433 (TRBV4-1, TRBJ1-4)
CASSDTGGTNEKLFF

SEQ ID NO: 706867 - protein, 12 aa, Homo sapiens
  CDR3 for alpha chain variable domain of TCR clone 353434 (TRAV27, TRAJ35)
CAGADFGNVLHC

SEQ ID NO: 706868 - protein, 14 aa, Homo sapiens
  CDR3 for beta chain variable domain of TCR clone 353434 (TRBV7-3, TRBJ2-2)
CASSSGGYTGELFF

SEQ ID NO: 706869 - protein, 16 aa, Homo sapiens
  CDR3 for alpha chain variable domain of TCR clone 353435 (TRAV23/DV6, TRAJ9)
CAARIGGNTGGFKTIF

SEQ ID NO: 706870 - protein, 11 aa, Homo sapiens
  CDR3 for beta chain variable domain of TCR clone 353435 (TRBV11-2, TRBJ2-2)
CASSLPGELFF

SEQ ID NO: 706871 - protein, 18 aa, Homo sapiens
  CDR3 for alpha chain variable domain of TCR clone 353436 (TRAV21, TRAJ52)
CAVRPSPAGGTSYGKLTF

SEQ ID NO: 706872 - protein, 14 aa, Homo sapiens
  CDR3 for beta chain variable domain of TCR clone 353436 (TRBV27, TRBJ2-5)
CASSSLKGWETQYF

SEQ ID NO: 706873 - protein, 14 aa, Homo sapiens
  CDR3 for alpha chain variable domain of TCR clone 353437 (TRAV4, TRAJ32)
CLVNYGGATNKLIF

SEQ ID NO: 706874 - protein, 14 aa, Homo sapiens
  CDR3 for beta chain variable domain of TCR clone 353437 (TRBV15, TRBJ2-5)
CATSGGTRTVTQYF

SEQ ID NO: 706875 - protein, 14 aa, Homo sapiens
  CDR3 for alpha chain variable domain of TCR clone 353438 (TRAV12-2, TRAJ24)
CAVTPADSWGKLQF

SEQ ID NO: 706876 - protein, 15 aa, Homo sapiens
  CDR3 for beta chain variable domain of TCR clone 353438 (TRBV7-3, TRBJ2-3)
CASSLGLTLGDTQYF

SEQ ID NO: 706877 - protein, 13 aa, Homo sapiens
  CDR3 for alpha chain variable domain of TCR clone 353439 (TRAV17, TRAJ30)
CATDADRDDKIIF

SEQ ID NO: 706878 - protein, 15 aa, Homo sapiens
  CDR3 for beta chain variable domain of TCR clone 353439 (TRBV6-1, TRBJ2-5)
CASPRWGTEGQTQYF

SEQ ID NO: 706879 - protein, 13 aa, Homo sapiens
  CDR3 for alpha chain variable domain of TCR clone 353440 (TRAV3, TRAJ29)
CAVRDWGNTPLVF

SEQ ID NO: 706880 - protein, 15 aa, Homo sapiens
  CDR3 for beta chain variable domain of TCR clone 353440 (TRBV12-4, TRBJ2-5)
CASIGRTGEGETQYV

SEQ ID NO: 706881 - protein, 17 aa, Homo sapiens
  CDR3 for alpha chain variable domain of TCR clone 353441 (TRAV13-1, TRAJ28)
CAASPPYSGPGSYQLTF

SEQ ID NO: 706882 - protein, 15 aa, Homo sapiens
  CDR3 for beta chain variable domain of TCR clone 353441 (TRBV5-1, TRBJ2-7)
CASSLDLTSSYEQYF

SEQ ID NO: 706883 - protein, 13 aa, Homo sapiens
  CDR3 for alpha chain variable domain of TCR clone 353442 (TRAV25, TRAJ10)
CAGRTGGGNKLTF

SEQ ID NO: 706884 - protein, 15 aa, Homo sapiens
  CDR3 for beta chain variable domain of TCR clone 353442 (TRBV19, TRBJ2-1)
CASCSPGVPLDEQFF

SEQ ID NO: 706885 - protein, 15 aa, Homo sapiens
  CDR3 for alpha chain variable domain of TCR clone 353443 (TRAV29/DV5, TRAJ29)
CAASERSSGNTPLVF

SEQ ID NO: 706886 - protein, 17 aa, Homo sapiens
  CDR3 for beta chain variable domain of TCR clone 353443 (TRBV4-1, TRBJ1-4)
CASSQEGPRGVEEKVFF

SEQ ID NO: 706887 - protein, 13 aa, Homo sapiens
  CDR3 for alpha chain variable domain of TCR clone 353444 (TRAV13-1, TRAJ6)
CAARRGGSYIPTF

SEQ ID NO: 706888 - protein, 16 aa, Homo sapiens
  CDR3 for beta chain variable domain of TCR clone 353444 (TRBV20-1, TRBJ1-4)
CSAPGQGLLTNEKLFF

SEQ ID NO: 706889 - protein, 18 aa, Homo sapiens
  CDR3 for alpha chain variable domain of TCR clone 353445 (TRAV12-3, TRAJ52)
CAMSRTNAGVTSYGKLAF

SEQ ID NO: 706890 - protein, 17 aa, Homo sapiens
  CDR3 for beta chain variable domain of TCR clone 353445 (TRBV7-3, TRBJ2-3)
CASSLRKRMRGADTQYF

SEQ ID NO: 706891 - protein, 13 aa, Homo sapiens
  CDR3 for alpha chain variable domain of TCR clone 353446 (TRAV38-2/DV8, TRAJ34)
CDYRNYNTDKLIF

SEQ ID NO: 706892 - protein, 15 aa, Homo sapiens
  CDR3 for beta chain variable domain of TCR clone 353446 (TRBV20-1, TRBJ2-5)
CSAEGTGGLQETQYF

SEQ ID NO: 706893 - protein, 14 aa, Homo sapiens
  CDR3 for alpha chain variable domain of TCR clone 353447 (TRAV2, TRAJ9)
CAVEDRSGGFKTIF

SEQ ID NO: 706894 - protein, 16 aa, Homo sapiens
  CDR3 for beta chain variable domain of TCR clone 353447 (TRBV12-4, TRBJ2-3)
CASSLRLAETTDTQYF

SEQ ID NO: 706895 - protein, 14 aa, Homo sapiens
  CDR3 for alpha chain variable domain of TCR clone 353448 (TRAV12-2, TRAJ9)
CAVSFVTGGFKTIF

SEQ ID NO: 706896 - protein, 18 aa, Homo sapiens
  CDR3 for beta chain variable domain of TCR clone 353448 (TRBV3-1, TRBJ2-7)
CASSRISAGGRSSYEQYF

SEQ ID NO: 706897 - protein, 12 aa, Homo sapiens
  CDR3 for alpha chain variable domain of TCR clone 353449 (TRAV3, TRAJ39)
CAVIEWSNMLTF

SEQ ID NO: 706898 - protein, 14 aa, Homo sapiens
  CDR3 for beta chain variable domain of TCR clone 353449 (TRBV7-8, TRBJ2-3)
CARSFPDGQDTQYF

SEQ ID NO: 706899 - protein, 13 aa, Homo sapiens
  CDR3 for alpha chain variable domain of TCR clone 353450 (TRAV13-1, TRAJ21)
CAASIYNFNKFYF

SEQ ID NO: 706900 - protein, 15 aa, Homo sapiens
  CDR3 for beta chain variable domain of TCR clone 353450 (TRBV20-1, TRBJ2-7)
CSAESGTSGAYEQYF

SEQ ID NO: 706901 - protein, 18 aa, Homo sapiens
  CDR3 for alpha chain variable domain of TCR clone 353451 (TRAV21, TRAJ52)
CAVSPSPAGGTSYGRLTF

SEQ ID NO: 706902 - protein, 17 aa, Homo sapiens
  CDR3 for beta chain variable domain of TCR clone 353451 (TRBV13, TRBJ2-3)
CASSLSRVAGGRNTQYF

SEQ ID NO: 706903 - protein, 14 aa, Homo sapiens
  CDR3 for alpha chain variable domain of TCR clone 353452 (TRAV12-1, TRAJ12)
CVVTRMDSSYKLIF

SEQ ID NO: 706904 - protein, 13 aa, Homo sapiens
  CDR3 for beta chain variable domain of TCR clone 353452 (TRBV20-1, TRBJ2-2)
CSALSGGAGELFF

SEQ ID NO: 706905 - protein, 14 aa, Homo sapiens
  CDR3 for alpha chain variable domain of TCR clone 353453 (TRAV38-2/DV8, TRAJ32)
CAYRSGRATNKLIF

SEQ ID NO: 706906 - protein, 14 aa, Homo sapiens
  CDR3 for beta chain variable domain of TCR clone 353453 (TRBV7-2, TRBJ1-5)
CASSPRGGPQPQHF

SEQ ID NO: 706907 - protein, 14 aa, Homo sapiens
  CDR3 for alpha chain variable domain of TCR clone 353454 (TRAV1-2, TRAJ8)
CAVREDTGFQKLVI

SEQ ID NO: 706908 - protein, 15 aa, Homo sapiens
  CDR3 for beta chain variable domain of TCR clone 353454 (TRBV28, TRBJ2-6)
CASSLAGSGANVLTF

SEQ ID NO: 706909 - protein, 14 aa, Homo sapiens
  CDR3 for alpha chain variable domain of TCR clone 353455 (TRAV3, TRAJ34)
CAVRDINKTDKLIF

SEQ ID NO: 706910 - protein, 13 aa, Homo sapiens
  CDR3 for beta chain variable domain of TCR clone 353455 (TRBV20-1, TRBJ1-1)
CSARGGGNTEAFF

SEQ ID NO: 706911 - protein, 12 aa, Homo sapiens
  CDR3 for alpha chain variable domain of TCR clone 353456 (TRAV27, TRAJ35)
CVGADFGNVLNC

SEQ ID NO: 706912 - protein, 16 aa, Homo sapiens
  CDR3 for beta chain variable domain of TCR clone 353456 (TRBV6-1, TRBJ2-1)
CASILRQGSSYNEQFF

SEQ ID NO: 706913 - protein, 15 aa, Homo sapiens
  CDR3 for alpha chain variable domain of TCR clone 353457 (TRAV29/DV5, TRAJ49)
CAASLPSNTGNQFYF

SEQ ID NO: 706914 - protein, 13 aa, Homo sapiens
  CDR3 for beta chain variable domain of TCR clone 353457 (TRBV24-1, TRBJ2-2)
CATSDWSTGELFF

SEQ ID NO: 706915 - protein, 15 aa, Homo sapiens
  CDR3 for alpha chain variable domain of TCR clone 353458 (TRAV3, TRAJ32)
CAVSSYGGATNKLIF

SEQ ID NO: 706916 - protein, 13 aa, Homo sapiens
  CDR3 for beta chain variable domain of TCR clone 353458 (TRBV20-1, TRBJ2-7)
CSARPSTKYEQYF

SEQ ID NO: 706917 - protein, 16 aa, Homo sapiens
  CDR3 for alpha chain variable domain of TCR clone 353459 (TRAV30, TRAJ24)
CGTEIVDADSWGKFQF

SEQ ID NO: 706918 - protein, 15 aa, Homo sapiens
  CDR3 for beta chain variable domain of TCR clone 353459 (TRBV20-1, TRBJ2-7)
CSARDRVSGMDEQYL

SEQ ID NO: 706919 - protein, 10 aa, Homo sapiens
  CDR3 for alpha chain variable domain of TCR clone 353460 (TRAV13-1, TRAJ27)
SAPLARQINL

SEQ ID NO: 706920 - protein, 13 aa, Homo sapiens
  CDR3 for beta chain variable domain of TCR clone 353460 (TRBV28, TRBJ1-1)
CASSKQGWTEAFF

SEQ ID NO: 706921 - protein, 12 aa, Homo sapiens
  CDR3 for alpha chain variable domain of TCR clone 353461 (TRAV27, TRAJ9)
CAGESGGFKTIF

SEQ ID NO: 706922 - protein, 13 aa, Homo sapiens
  CDR3 for beta chain variable domain of TCR clone 353461 (TRBV6-1, TRBJ1-2)
CASSVGQGTGYTF

SEQ ID NO: 706923 - protein, 15 aa, Homo sapiens
  CDR3 for alpha chain variable domain of TCR clone 353462 (TRAV26-2, TRAJ50)
CILRDEETSYDKVII

SEQ ID NO: 706924 - protein, 12 aa, Homo sapiens
  CDR3 for beta chain variable domain of TCR clone 353462 (TRBV5-7, TRBJ1-2)
CASSDGPYGYTF

SEQ ID NO: 706925 - protein, 14 aa, Homo sapiens
  CDR3 for alpha chain variable domain of TCR clone 353463 (TRAV2, TRAJ16)
CAVERGSDGQKLLF

SEQ ID NO: 706926 - protein, 14 aa, Homo sapiens
  CDR3 for beta chain variable domain of TCR clone 353463 (TRBV6-5, TRBJ2-7)
CASYIYGYESTSGR

SEQ ID NO: 706927 - protein, 15 aa, Homo sapiens
  CDR3 for alpha chain variable domain of TCR clone 353464 (TRAV2, TRAJ15)
CAVEDRGQAGTDLIF

SEQ ID NO: 706928 - protein, 15 aa, Homo sapiens
  CDR3 for beta chain variable domain of TCR clone 353464 (TRBV20-1, TRBJ1-5)
CSATSDRGLGQPQHF

SEQ ID NO: 706929 - protein, 13 aa, Homo sapiens
  CDR3 for alpha chain variable domain of TCR clone 353465 (TRAV12-1, TRAJ22)
CVASGGSARQLTF

SEQ ID NO: 706930 - protein, 12 aa, Homo sapiens
  CDR3 for beta chain variable domain of TCR clone 353465 (TRBV19, TRBJ1-1)
CASGTGWTEAFF

SEQ ID NO: 706931 - protein, 12 aa, Homo sapiens
  CDR3 for alpha chain variable domain of TCR clone 353466 (TRAV21, TRAJ39)
CAADNAGNMLTF

SEQ ID NO: 706932 - protein, 15 aa, Homo sapiens
  CDR3 for beta chain variable domain of TCR clone 353466 (TRBV27, TRBJ2-1)
CASSNGGGSSNEQVF

SEQ ID NO: 706933 - protein, 14 aa, Homo sapiens
  CDR3 for alpha chain variable domain of TCR clone 353467 (TRAV23/DV6, TRAJ8)
CAASKATGFQKLVF

SEQ ID NO: 706934 - protein, 15 aa, Homo sapiens
  CDR3 for beta chain variable domain of TCR clone 353467 (TRBV28, TRBJ2-3)
CASSADRQGANTQYF

SEQ ID NO: 706935 - protein, 11 aa, Homo sapiens
  CDR3 for alpha chain variable domain of TCR clone 353468 (TRAV35, TRAJ30)
CAPGGDDKIIF

SEQ ID NO: 706936 - protein, 14 aa, Homo sapiens
  CDR3 for beta chain variable domain of TCR clone 353468 (TRBV18, TRBJ2-5)
CASSPGVSQETQYF

SEQ ID NO: 706937 - protein, 13 aa, Homo sapiens
  CDR3 for alpha chain variable domain of TCR clone 353469 (TRAV13-2, TRAJ13)
CAERPGGYQQVTF

SEQ ID NO: 706938 - protein, 19 aa, Homo sapiens
  CDR3 for beta chain variable domain of TCR clone 353469 (TRBV4-1, TRBJ2-1)
CASSQGPLPGLGSRNEQFF

SEQ ID NO: 706939 - protein, 14 aa, Homo sapiens
  CDR3 for alpha chain variable domain of TCR clone 353470 (TRAV1-2, TRAJ16)
CAVNRFSEGQKLLF

SEQ ID NO: 706940 - protein, 14 aa, Homo sapiens
  CDR3 for beta chain variable domain of TCR clone 353470 (TRBV19, TRBJ2-7)
CASSVDSESYEQYF

SEQ ID NO: 706941 - protein, 14 aa, Homo sapiens
  CDR3 for alpha chain variable domain of TCR clone 353471 (TRAV17, TRAJ12)
CATDREDSRYKLIF

SEQ ID NO: 706942 - protein, 14 aa, Homo sapiens
  CDR3 for beta chain variable domain of TCR clone 353471 (TRBV4-1, TRBJ2-7)
CASSQERDSSEQYF

SEQ ID NO: 706943 - protein, 15 aa, Homo sapiens
  CDR3 for alpha chain variable domain of TCR clone 353472 (TRAV21, TRAJ53)
CATLNSGGSNYKLTF

SEQ ID NO: 706944 - protein, 15 aa, Homo sapiens
  CDR3 for beta chain variable domain of TCR clone 353472 (TRBV4-1, TRBJ1-6)
CASSAGQGYNSPLHF

SEQ ID NO: 706945 - protein, 14 aa, Homo sapiens
  CDR3 for alpha chain variable domain of TCR clone 353473 (TRAV24, TRAJ42)
CAHNYGGSQGNLIF

SEQ ID NO: 706946 - protein, 15 aa, Homo sapiens
  CDR3 for beta chain variable domain of TCR clone 353473 (TRBV19, TRBJ1-5)
CASSIPGGAGQPQHF

SEQ ID NO: 706947 - protein, 15 aa, Homo sapiens
  CDR3 for alpha chain variable domain of TCR clone 353474 (TRAV3, TRAJ20)
CAVRDIKLSDYKLSF

SEQ ID NO: 706948 - protein, 16 aa, Homo sapiens
  CDR3 for beta chain variable domain of TCR clone 353474 (TRBV5-1, TRBJ1-1)
CASSSGGNSLNTEAFF

SEQ ID NO: 706949 - protein, 14 aa, Homo sapiens
  CDR3 for alpha chain variable domain of TCR clone 353475 (TRAV17, TRAJ16)
CATAAFSDGQKLLF

SEQ ID NO: 706950 - protein, 15 aa, Homo sapiens
  CDR3 for beta chain variable domain of TCR clone 353475 (TRBV5-1, TRBJ1-4)
CASSSWTGREEKLFF

SEQ ID NO: 706951 - protein, 14 aa, Homo sapiens
  CDR3 for alpha chain variable domain of TCR clone 353476 (TRAV12-2, TRAJ17)
CAVLFKSAGNKLTF

SEQ ID NO: 706952 - protein, 15 aa, Homo sapiens
  CDR3 for beta chain variable domain of TCR clone 353476 (TRBV20-1, TRBJ2-7)
CSARDRVSGMDEQYF

SEQ ID NO: 706953 - protein, 17 aa, Homo sapiens
  CDR3 for alpha chain variable domain of TCR clone 353477 (TRAV3, TRAJ42)
CAVRDRDYGGSQGNLIF

SEQ ID NO: 706954 - protein, 15 aa, Homo sapiens
  CDR3 for beta chain variable domain of TCR clone 353477 (TRBV6-6, TRBJ2-7)
CASSYSYVGSYEQYF

SEQ ID NO: 706955 - protein, 12 aa, Homo sapiens
  CDR3 for alpha chain variable domain of TCR clone 353478 (TRAV17, TRAJ53)
CATEGSNYKLTF

SEQ ID NO: 706956 - protein, 12 aa, Homo sapiens
  CDR3 for beta chain variable domain of TCR clone 353478 (TRBV11-2, TRBJ2-2)
CASSLPTGELFF

SEQ ID NO: 706957 - protein, 14 aa, Homo sapiens
  CDR3 for alpha chain variable domain of TCR clone 353479 (TRAV39, TRAJ54)
CAVVLIQGAQKLVF

SEQ ID NO: 706958 - protein, 13 aa, Homo sapiens
  CDR3 for beta chain variable domain of TCR clone 353479 (TRBV29-1, TRBJ2-5)
CSVGWTSAETQYF

SEQ ID NO: 706959 - protein, 12 aa, Homo sapiens
  CDR3 for alpha chain variable domain of TCR clone 353480 (TRAV21, TRAJ29)
CAVTSGNTPLVF

SEQ ID NO: 706960 - protein, 16 aa, Homo sapiens
  CDR3 for beta chain variable domain of TCR clone 353480 (TRBV24-1, TRBJ2-3)
CATSGYRDRDTDTQYF

SEQ ID NO: 706961 - protein, 12 aa, Homo sapiens
  CDR3 for alpha chain variable domain of TCR clone 353481 (TRAV27, TRAJ35)
CAGADLGNVLHC

SEQ ID NO: 706962 - protein, 16 aa, Homo sapiens
  CDR3 for beta chain variable domain of TCR clone 353481 (TRBV6-1, TRBJ2-1)
CASIIRQGSSYNEQFF

SEQ ID NO: 706963 - protein, 14 aa, Homo sapiens
  CDR3 for alpha chain variable domain of TCR clone 353482 (TRAV1-2, TRAJ16)
CAVRSASDGQKLLF

SEQ ID NO: 706964 - protein, 19 aa, Homo sapiens
  CDR3 for beta chain variable domain of TCR clone 353482 (TRBV5-5, TRBJ2-1)
CASSRGSGTGTNLRNEQFF

SEQ ID NO: 706965 - protein, 12 aa, Homo sapiens
  CDR3 for alpha chain variable domain of TCR clone 353483 (TRAV12-3, TRAJ17)
CARTLTGNKLTF

SEQ ID NO: 706966 - protein, 15 aa, Homo sapiens
  CDR3 for beta chain variable domain of TCR clone 353483 (TRBV9, TRBJ1-6)
CASSVAGTGDSPLHF

SEQ ID NO: 706967 - protein, 16 aa, Homo sapiens
  CDR3 for alpha chain variable domain of TCR clone 353484 (TRAV30, TRAJ24)
CGTEIVDADSWGKFQF

SEQ ID NO: 706968 - protein, 15 aa, Homo sapiens
  CDR3 for beta chain variable domain of TCR clone 353484 (TRBV15, TRBJ2-1)
CATSRDLGSYNEQFF

SEQ ID NO: 706969 - protein, 14 aa, Homo sapiens
  CDR3 for alpha chain variable domain of TCR clone 353485 (TRAV21, TRAJ35)
CAVMPIGFGDVLHF

SEQ ID NO: 706970 - protein, 12 aa, Homo sapiens
  CDR3 for beta chain variable domain of TCR clone 353485 (TRBV7-9, TRBJ2-7)
CASSIKREEQYF

SEQ ID NO: 706971 - protein, 13 aa, Homo sapiens
  CDR3 for alpha chain variable domain of TCR clone 353486 (TRAV29/DV5, TRAJ29)
CAASAAGNTPLVF

SEQ ID NO: 706972 - protein, 14 aa, Homo sapiens
  CDR3 for beta chain variable domain of TCR clone 353486 (TRBV19, TRBJ2-3)
CASSAPGGTDTQYF

SEQ ID NO: 706973 - protein, 17 aa, Homo sapiens
  CDR3 for alpha chain variable domain of TCR clone 353487 (TRAV3, TRAJ6)
CAVRDGPRAGGSYIPTF

SEQ ID NO: 706974 - protein, 15 aa, Homo sapiens
  CDR3 for beta chain variable domain of TCR clone 353487 (TRBV27, TRBJ2-7)
CASSLSVQGGYEQYF

SEQ ID NO: 706975 - protein, 16 aa, Homo sapiens
  CDR3 for alpha chain variable domain of TCR clone 353488 (TRAV3, TRAJ37)
CAVRGKGSGNTGKLIF

SEQ ID NO: 706976 - protein, 16 aa, Homo sapiens
  CDR3 for beta chain variable domain of TCR clone 353488 (TRBV12-5, TRBJ2-5)
CANGPRTSGNQETQYF

SEQ ID NO: 706977 - protein, 13 aa, Homo sapiens
  CDR3 for alpha chain variable domain of TCR clone 353489 (TRAV23/DV6, TRAJ26)
CAATYNYGQNFVF

SEQ ID NO: 706978 - protein, 17 aa, Homo sapiens
  CDR3 for beta chain variable domain of TCR clone 353489 (TRBV7-3, TRBJ2-3)
CASSLMKRMRGADTQYF

SEQ ID NO: 706979 - protein, 16 aa, Homo sapiens
  CDR3 for alpha chain variable domain of TCR clone 353490 (TRAV8-2, TRAJ7)
CVVSEGPYYGNNRLAF

SEQ ID NO: 706980 - protein, 15 aa, Homo sapiens
  CDR3 for beta chain variable domain of TCR clone 353490 (TRBV27, TRBJ2-1)
CASSNGGGSSNEQFF

SEQ ID NO: 706981 - protein, 15 aa, Homo sapiens
  CDR3 for alpha chain variable domain of TCR clone 353491 (TRAV14/DV4, TRAJ22)
CAMREGWTTARQLTF

SEQ ID NO: 706982 - protein, 14 aa, Homo sapiens
  CDR3 for beta chain variable domain of TCR clone 353491 (TRBV25-1, TRBJ1-1)
CASTHLGGNTEAFF

SEQ ID NO: 706983 - protein, 15 aa, Homo sapiens
  CDR3 for alpha chain variable domain of TCR clone 353492 (TRAV17, TRAJ48)
CVTDETNFGNEKLTF

SEQ ID NO: 706984 - protein, 14 aa, Homo sapiens
  CDR3 for beta chain variable domain of TCR clone 353492 (TRBV10-3, TRBJ1-3)
CAIRGQRAGNTIYF

SEQ ID NO: 706985 - protein, 18 aa, Homo sapiens
  CDR3 for alpha chain variable domain of TCR clone 353493 (TRAV21, TRAJ52)
CAVKPSPAGGTSYGKLTF

SEQ ID NO: 706986 - protein, 13 aa, Homo sapiens
  CDR3 for beta chain variable domain of TCR clone 353493 (TRBV7-3, TRBJ1-1)
CASSQDWGAEAFF

SEQ ID NO: 706987 - protein, 13 aa, Homo sapiens
  CDR3 for alpha chain variable domain of TCR clone 353494 (TRAV1-2, TRAJ9)
CAALNTGGFKTIF

SEQ ID NO: 706988 - protein, 13 aa, Homo sapiens
  CDR3 for beta chain variable domain of TCR clone 353494 (TRBV12-4, TRBJ1-2)
CASSSGPNYGYTF

SEQ ID NO: 706989 - protein, 14 aa, Homo sapiens
  CDR3 for alpha chain variable domain of TCR clone 353495 (TRAV12-2, TRAJ3)
CAVSLSSSASKIIF

SEQ ID NO: 706990 - protein, 14 aa, Homo sapiens
  CDR3 for beta chain variable domain of TCR clone 353495 (TRBV27, TRBJ2-1)
CAGSIAETYNEQFF

SEQ ID NO: 706991 - protein, 15 aa, Homo sapiens
  CDR3 for alpha chain variable domain of TCR clone 353496 (TRAV2, TRAJ13)
CATPSYSGGYQIVTF

SEQ ID NO: 706992 - protein, 14 aa, Homo sapiens
  CDR3 for beta chain variable domain of TCR clone 353496 (TRBV11-2, TRBJ2-3)
CASSRLARTDTQYF

SEQ ID NO: 706993 - protein, 14 aa, Homo sapiens
  CDR3 for alpha chain variable domain of TCR clone 353497 (TRAV26-1, TRAJ38)
CIADNAGNNRRLIW

SEQ ID NO: 706994 - protein, 15 aa, Homo sapiens
  CDR3 for beta chain variable domain of TCR clone 353497 (TRBV27, TRBJ2-1)
CASSNGGGSSNEQFF

SEQ ID NO: 706995 - protein, 14 aa, Homo sapiens
  CDR3 for alpha chain variable domain of TCR clone 353498 (TRAV12-2, TRAJ11)
CAVEGGSGYSTLTF

SEQ ID NO: 706996 - protein, 14 aa, Homo sapiens
  CDR3 for beta chain variable domain of TCR clone 353498 (TRBV25-1, TRBJ1-1)
CASTHLGGNTEAFF

SEQ ID NO: 706997 - protein, 13 aa, Homo sapiens
  CDR3 for alpha chain variable domain of TCR clone 353499 (TRAV8-3, TRAJ31)
CAVGARNNARLMF

SEQ ID NO: 706998 - protein, 17 aa, Homo sapiens
  CDR3 for beta chain variable domain of TCR clone 353499 (TRBV11-2, TRBJ2-1)
CASSLCPPGVEYNEQFF

SEQ ID NO: 706999 - protein, 15 aa, Homo sapiens
  CDR3 for alpha chain variable domain of TCR clone 353500 (TRAV2, TRAJ9)
CAVAALNTGGFKTIF

SEQ ID NO: 707000 - protein, 17 aa, Homo sapiens
  CDR3 for beta chain variable domain of TCR clone 353500 (TRBV13, TRBJ2-3)
CASRLSRVAGGRNTQYF

SEQ ID NO: 707001 - protein, 13 aa, Homo sapiens
  CDR3 for alpha chain variable domain of TCR clone 353501 (TRAV12-1, TRAJ33)
CGDAPDSNYQLIW

SEQ ID NO: 707002 - protein, 15 aa, Homo sapiens
  CDR3 for beta chain variable domain of TCR clone 353501 (TRBV27, TRBJ2-1)
CASSDGGGSSNEQFF

SEQ ID NO: 707003 - protein, 15 aa, Homo sapiens
  CDR3 for alpha chain variable domain of TCR clone 353502 (TRAV17, TRAJ57)
CATGPSQGGTEKRVF

SEQ ID NO: 707004 - protein, 16 aa, Homo sapiens
  CDR3 for beta chain variable domain of TCR clone 353502 (TRBV12-4, TRBJ1-5)
CASSRPVGGSNQPQHF

SEQ ID NO: 707005 - protein, 14 aa, Homo sapiens
  CDR3 for alpha chain variable domain of TCR clone 353503 (TRAV1-2, TRAJ16)
CAVNRFSDGQKLLF

SEQ ID NO: 707006 - protein, 13 aa, Homo sapiens
  CDR3 for beta chain variable domain of TCR clone 353503 (TRBV19, TRBJ2-7)
CASSTSGAYEQYF

SEQ ID NO: 707007 - protein, 14 aa, Homo sapiens
  CDR3 for alpha chain variable domain of TCR clone 353504 (TRAV30, TRAJ33)
CGTVAPRSNYQLIW

SEQ ID NO: 707008 - protein, 11 aa, Homo sapiens
  CDR3 for beta chain variable domain of TCR clone 353504 (TRBV3-1, TRBJ2-5)
CASSPGQFNGF

SEQ ID NO: 707009 - protein, 14 aa, Homo sapiens
  CDR3 for alpha chain variable domain of TCR clone 353505 (TRAV2, TRAJ9)
CAVDPNTGGVKTIF

SEQ ID NO: 707010 - protein, 14 aa, Homo sapiens
  CDR3 for beta chain variable domain of TCR clone 353505 (TRBV7-2, TRBJ2-7)
CASSPKTSFYEQYF

SEQ ID NO: 707011 - protein, 12 aa, Homo sapiens
  CDR3 for alpha chain variable domain of TCR clone 353506 (TRAV1-2, TRAJ29)
CAVPSGNTPLAF

SEQ ID NO: 707012 - protein, 12 aa, Homo sapiens
  CDR3 for beta chain variable domain of TCR clone 353506 (TRBV12-4, TRBJ2-7)
CASSLGGYEQYF

SEQ ID NO: 707013 - protein, 19 aa, Homo sapiens
  CDR3 for alpha chain variable domain of TCR clone 353507 (TRAV4, TRAJ4)
CCVLLPRDMFSGGYNKLIF

SEQ ID NO: 707014 - protein, 14 aa, Homo sapiens
  CDR3 for beta chain variable domain of TCR clone 353507 (TRBV7-2, TRBJ1-1)
CASSFLTGTTEAFF

SEQ ID NO: 707015 - protein, 12 aa, Homo sapiens
  CDR3 for alpha chain variable domain of TCR clone 353508 (TRAV1-1, TRAJ8)
CAGGPGFQKLVF

SEQ ID NO: 707016 - protein, 13 aa, Homo sapiens
  CDR3 for beta chain variable domain of TCR clone 353508 (TRBV11-3, TRBJ2-1)
CASSSRRVDEQFF

SEQ ID NO: 707017 - protein, 17 aa, Homo sapiens
  CDR3 for alpha chain variable domain of TCR clone 353509 (TRAV8-6, TRAJ58)
CAVSSWVGETNGSRLTF

SEQ ID NO: 707018 - protein, 17 aa, Homo sapiens
  CDR3 for beta chain variable domain of TCR clone 353509 (TRBV11-2, TRBJ2-1)
CASSLYPPGVEYNEQFF

SEQ ID NO: 707019 - protein, 14 aa, Homo sapiens
  CDR3 for alpha chain variable domain of TCR clone 353510 (TRAV1-2, TRAJ8)
CAVREDTGFQKLVF

SEQ ID NO: 707020 - protein, 15 aa, Homo sapiens
  CDR3 for beta chain variable domain of TCR clone 353510 (TRBV9, TRBJ1-6)
CASSVAGTGDSPPHF

SEQ ID NO: 707021 - protein, 13 aa, Homo sapiens
  CDR3 for alpha chain variable domain of TCR clone 353511 (TRAV12-1, TRAJ6)
CVVFPGGRYIPTF

SEQ ID NO: 707022 - protein, 13 aa, Homo sapiens
  CDR3 for beta chain variable domain of TCR clone 353511 (TRBV7-9, TRBJ1-2)
CASSLKQNYGYTF

SEQ ID NO: 707023 - protein, 11 aa, Homo sapiens
  CDR3 for alpha chain variable domain of TCR clone 353512 (TRAV17, TRAJ9)
CATTGGFTTIF

SEQ ID NO: 707024 - protein, 14 aa, Homo sapiens
  CDR3 for beta chain variable domain of TCR clone 353512 (TRBV7-9, TRBJ2-2)
CARSGLADTGELFF

SEQ ID NO: 707025 - protein, 10 aa, Homo sapiens
  CDR3 for alpha chain variable domain of TCR clone 353513 (TRAV36/DV7, TRAJ49)
CALTVNQFYF

SEQ ID NO: 707026 - protein, 14 aa, Homo sapiens
  CDR3 for beta chain variable domain of TCR clone 353513 (TRBV4-2, TRBJ2-5)
CASSQDRGRETQYF

SEQ ID NO: 707027 - protein, 17 aa, Homo sapiens
  CDR3 for alpha chain variable domain of TCR clone 353514 (TRAV3, TRAJ12)
CAVRDGGRMYSSYKLIF

SEQ ID NO: 707028 - protein, 14 aa, Homo sapiens
  CDR3 for beta chain variable domain of TCR clone 353514 (TRBV7-9, TRBJ1-2)
CASSRQGANYGYTF

SEQ ID NO: 707029 - protein, 14 aa, Homo sapiens
  CDR3 for alpha chain variable domain of TCR clone 353515 (TRAV13-1, TRAJ5)
CAASGGTGRRALTF

SEQ ID NO: 707030 - protein, 13 aa, Homo sapiens
  CDR3 for beta chain variable domain of TCR clone 353515 (TRBV12-4, TRBJ2-2)
CASSITGSGELFF

SEQ ID NO: 707031 - protein, 17 aa, Homo sapiens
  CDR3 for alpha chain variable domain of TCR clone 353516 (TRAV3, TRAJ6)
CAVRDGPRAGGSYIPTF

SEQ ID NO: 707032 - protein, 14 aa, Homo sapiens
  CDR3 for beta chain variable domain of TCR clone 353516 (TRBV27, TRBJ2-5)
CASSRTFLVDTQYF

SEQ ID NO: 707033 - protein, 13 aa, Homo sapiens
  CDR3 for alpha chain variable domain of TCR clone 353517 (TRAV27, TRAJ41)
CAGEGNSGYALNF

SEQ ID NO: 707034 - protein, 16 aa, Homo sapiens
  CDR3 for beta chain variable domain of TCR clone 353517 (TRBV13, TRBJ2-2)
CASSPRTGEHTGELFF

SEQ ID NO: 707035 - protein, 13 aa, Homo sapiens
  CDR3 for alpha chain variable domain of TCR clone 353518 (TRAV8-6, TRAJ49)
CAVSGQTGNQFYF

SEQ ID NO: 707036 - protein, 14 aa, Homo sapiens
  CDR3 for beta chain variable domain of TCR clone 353518 (TRBV4-1, TRBJ2-5)
CASSRSGSGETQYF

SEQ ID NO: 707037 - protein, 15 aa, Homo sapiens
  CDR3 for alpha chain variable domain of TCR clone 353519 (TRAV27, TRAJ38)
CAARRNTGNNSKLIW

SEQ ID NO: 707038 - protein, 13 aa, Homo sapiens
  CDR3 for beta chain variable domain of TCR clone 353519 (TRBV20-1, TRBJ1-1)
CSARAGGNTEAFF

SEQ ID NO: 707039 - protein, 15 aa, Homo sapiens
  CDR3 for alpha chain variable domain of TCR clone 353520 (TRAV3, TRAJ22)
CAVRDRGGSARQLTF

SEQ ID NO: 707040 - protein, 15 aa, Homo sapiens
  CDR3 for beta chain variable domain of TCR clone 353520 (TRBV13, TRBJ2-1)
CASSLLSGLNNEQFF

SEQ ID NO: 707041 - protein, 14 aa, Homo sapiens
  CDR3 for alpha chain variable domain of TCR clone 353521 (TRAV8-3, TRAJ4)
CAVGAAGGYNKLIF

SEQ ID NO: 707042 - protein, 14 aa, Homo sapiens
  CDR3 for beta chain variable domain of TCR clone 353521 (TRBV6-6, TRBJ2-7)
CASSDSGAGYEQYF

SEQ ID NO: 707043 - protein, 13 aa, Homo sapiens
  CDR3 for alpha chain variable domain of TCR clone 353522 (TRAV12-3, TRAJ13)
CAMGTGGYQKVNF

SEQ ID NO: 707044 - protein, 14 aa, Homo sapiens
  CDR3 for beta chain variable domain of TCR clone 353522 (TRBV7-2, TRBJ2-5)
CASSTGGELKTQYF

SEQ ID NO: 707045 - protein, 19 aa, Homo sapiens
  CDR3 for alpha chain variable domain of TCR clone 353523 (TRAV38-1, TRAJ53)
CAFMKHGLESGGSNYKLTF

SEQ ID NO: 707046 - protein, 13 aa, Homo sapiens
  CDR3 for beta chain variable domain of TCR clone 353523 (TRBV7-2, TRBJ2-2)
CASSLAVTGELFF

SEQ ID NO: 707047 - protein, 14 aa, Homo sapiens
  CDR3 for alpha chain variable domain of TCR clone 353524 (TRAV21, TRAJ38)
CAVMEAGNNRKLIW

SEQ ID NO: 707048 - protein, 13 aa, Homo sapiens
  CDR3 for beta chain variable domain of TCR clone 353524 (TRBV7-3, TRBJ2-5)
CASSIGFFETQYF

SEQ ID NO: 707049 - protein, 11 aa, Homo sapiens
  CDR3 for alpha chain variable domain of TCR clone 353525 (TRAV13-2, TRAJ31)
CAENMDARLMF

SEQ ID NO: 707050 - protein, 14 aa, Homo sapiens
  CDR3 for beta chain variable domain of TCR clone 353525 (TRBV5-4, TRBJ1-1)
CASSLDSRRDEAFF

SEQ ID NO: 707051 - protein, 15 aa, Homo sapiens
  CDR3 for alpha chain variable domain of TCR clone 353526 (TRAV23/DV6, TRAJ18)
CAARYRGSTLGRLYF

SEQ ID NO: 707052 - protein, 13 aa, Homo sapiens
  CDR3 for beta chain variable domain of TCR clone 353526 (TRBV11-3, TRBJ2-7)
CASSLDKLYEQYF

SEQ ID NO: 707053 - protein, 13 aa, Homo sapiens
  CDR3 for alpha chain variable domain of TCR clone 353527 (TRAV27, TRAJ17)
SAGAATAGNKLTF

SEQ ID NO: 707054 - protein, 15 aa, Homo sapiens
  CDR3 for beta chain variable domain of TCR clone 353527 (TRBV5-1, TRBJ2-3)
CASRNQAGSTDTQYF

SEQ ID NO: 707055 - protein, 16 aa, Homo sapiens
  CDR3 for alpha chain variable domain of TCR clone 353528 (TRAV27, TRAJ52)
CAGAGAGGTSYGKLTS

SEQ ID NO: 707056 - protein, 17 aa, Homo sapiens
  CDR3 for beta chain variable domain of TCR clone 353528 (TRBV24-1, TRBJ2-3)
CATSDLPSGEDTDTQYF

SEQ ID NO: 707057 - protein, 14 aa, Homo sapiens
  CDR3 for alpha chain variable domain of TCR clone 353529 (TRAV8-3, TRAJ4)
CAVGAAGGYNNLIF

SEQ ID NO: 707058 - protein, 15 aa, Homo sapiens
  CDR3 for beta chain variable domain of TCR clone 353529 (TRBV6-3, TRBJ2-7)
CASSSPGTVFYEQYF

SEQ ID NO: 707059 - protein, 14 aa, Homo sapiens
  CDR3 for alpha chain variable domain of TCR clone 353530 (TRAV1-2, TRAJ8)
CAVGEDTGFQKLVF

SEQ ID NO: 707060 - protein, 16 aa, Homo sapiens
  CDR3 for beta chain variable domain of TCR clone 353530 (TRBV4-3, TRBJ2-1)
CASSPALDRGVNEQFF

SEQ ID NO: 707061 - protein, 15 aa, Homo sapiens
  CDR3 for alpha chain variable domain of TCR clone 353531 (TRAV26-1, TRAJ48)
CIVRVGDFGNEKLTF

SEQ ID NO: 707062 - protein, 13 aa, Homo sapiens
  CDR3 for beta chain variable domain of TCR clone 353531 (TRBV7-8, TRBJ2-7)
CASSLTGGREQYF

SEQ ID NO: 707063 - protein, 16 aa, Homo sapiens
  CDR3 for alpha chain variable domain of TCR clone 353532 (TRAV12-2, TRAJ10)
CAVNRVLTGGGNKITF

SEQ ID NO: 707064 - protein, 13 aa, Homo sapiens
  CDR3 for beta chain variable domain of TCR clone 353532 (TRBV7-9, TRBJ1-2)
CASSLKQNYGYTF

SEQ ID NO: 707065 - protein, 14 aa, Homo sapiens
  CDR3 for alpha chain variable domain of TCR clone 353533 (TRAV12-3, TRAJ13)
CAMKNSGGYQKVTF

SEQ ID NO: 707066 - protein, 15 aa, Homo sapiens
  CDR3 for beta chain variable domain of TCR clone 353533 (TRBV7-2, TRBJ2-2)
CASRRPGQNTGELFF

SEQ ID NO: 707067 - protein, 14 aa, Homo sapiens
  CDR3 for alpha chain variable domain of TCR clone 353534 (TRAV12-3, TRAJ40)
CAVKIPSGTYKYIF

SEQ ID NO: 707068 - protein, 14 aa, Homo sapiens
  CDR3 for beta chain variable domain of TCR clone 353534 (TRBV20-1, TRBJ1-1)
CSAQTQIGGTEAFF

SEQ ID NO: 707069 - protein, 15 aa, Homo sapiens
  CDR3 for alpha chain variable domain of TCR clone 353535 (TRAV3, TRAJ22)
CAVRDRGGSARQLTF

SEQ ID NO: 707070 - protein, 14 aa, Homo sapiens
  CDR3 for beta chain variable domain of TCR clone 353535 (TRBV5-1, TRBJ2-7)
CASRRGESLYEQYF

SEQ ID NO: 707071 - protein, 19 aa, Homo sapiens
  CDR3 for alpha chain variable domain of TCR clone 353536 (TRAV2, TRAJ10)
CAVEDQRSREEETNSPLRQ

SEQ ID NO: 707072 - protein, 16 aa, Homo sapiens
  CDR3 for beta chain variable domain of TCR clone 353536 (TRBV18, TRBJ1-5)
CASSPSTGNSNQPQHF

SEQ ID NO: 707073 - protein, 12 aa, Homo sapiens
  CDR3 for alpha chain variable domain of TCR clone 353537 (TRAV38-1, TRAJ32)
CAPWGATNKLIF

SEQ ID NO: 707074 - protein, 14 aa, Homo sapiens
  CDR3 for beta chain variable domain of TCR clone 353537 (TRBV29-1, TRBJ2-5)
CSVETSGGGETQYF

SEQ ID NO: 707075 - protein, 13 aa, Homo sapiens
  CDR3 for alpha chain variable domain of TCR clone 353538 (TRAV1-2, TRAJ40)
CAVVTSGTYEYIF

SEQ ID NO: 707076 - protein, 14 aa, Homo sapiens
  CDR3 for beta chain variable domain of TCR clone 353538 (TRBV19, TRBJ2-1)
CASPTFVLSGEQFF

SEQ ID NO: 707077 - protein, 12 aa, Homo sapiens
  CDR3 for alpha chain variable domain of TCR clone 353539 (TRAV12-3, TRAJ20)
CAMVRGDYKLSF

SEQ ID NO: 707078 - protein, 14 aa, Homo sapiens
  CDR3 for beta chain variable domain of TCR clone 353539 (TRBV20-1, TRBJ2-7)
CSAISREASYEQNF

SEQ ID NO: 707079 - protein, 14 aa, Homo sapiens
  CDR3 for alpha chain variable domain of TCR clone 353540 (TRAV8-3, TRAJ47)
CAVGAQGYGNKLVF

SEQ ID NO: 707080 - protein, 14 aa, Homo sapiens
  CDR3 for beta chain variable domain of TCR clone 353540 (TRBV6-5, TRBJ2-7)
CASSSGVPPYEQYV

SEQ ID NO: 707081 - protein, 15 aa, Homo sapiens
  CDR3 for alpha chain variable domain of TCR clone 353541 (TRAV8-3, TRAJ44)
CAVGAGAGTASKLTF

SEQ ID NO: 707082 - protein, 16 aa, Homo sapiens
  CDR3 for beta chain variable domain of TCR clone 353541 (TRBV7-3, TRBJ2-2)
CASSLKRGTLSGELFF

SEQ ID NO: 707083 - protein, 17 aa, Homo sapiens
  CDR3 for alpha chain variable domain of TCR clone 353542 (TRAV19, TRAJ53)
CALSEADSGGSNDKLTF

SEQ ID NO: 707084 - protein, 13 aa, Homo sapiens
  CDR3 for beta chain variable domain of TCR clone 353542 (TRBV29-1, TRBJ1-1)
CSVGDSRNTEAFF

SEQ ID NO: 707085 - protein, 15 aa, Homo sapiens
  CDR3 for alpha chain variable domain of TCR clone 353543 (TRAV8-3, TRAJ27)
CAVGPSKTNSGKSTF

SEQ ID NO: 707086 - protein, 13 aa, Homo sapiens
  CDR3 for beta chain variable domain of TCR clone 353543 (TRBV12-5, TRBJ1-2)
CASGVRTGNGYTF

SEQ ID NO: 707087 - protein, 14 aa, Homo sapiens
  CDR3 for alpha chain variable domain of TCR clone 353544 (TRAV12-2, TRAJ13)
CAVKKTGGYQKVTF

SEQ ID NO: 707088 - protein, 18 aa, Homo sapiens
  CDR3 for beta chain variable domain of TCR clone 353544 (TRBV19, TRBJ1-1)
CASSIDGGDYTGNTEDFF

SEQ ID NO: 707089 - protein, 15 aa, Homo sapiens
  CDR3 for alpha chain variable domain of TCR clone 353545 (TRAV8-2, TRAJ15)
CVVTMGNQAGTALIF

SEQ ID NO: 707090 - protein, 12 aa, Homo sapiens
  CDR3 for beta chain variable domain of TCR clone 353545 (TRBV11-2, TRBJ2-5)
CASSTPAETQYF

SEQ ID NO: 707091 - protein, 14 aa, Homo sapiens
  CDR3 for alpha chain variable domain of TCR clone 353546 (TRAV35, TRAJ53)
CAGNSGDSNYKLTF

SEQ ID NO: 707092 - protein, 15 aa, Homo sapiens
  CDR3 for beta chain variable domain of TCR clone 353546 (TRBV7-9, TRBJ2-1)
CASSLGWGRANEQFF

SEQ ID NO: 707093 - protein, 10 aa, Homo sapiens
  CDR3 for alpha chain variable domain of TCR clone 353547 (TRAV1-2, TRAJ31)
CAFFDARLMF

SEQ ID NO: 707094 - protein, 13 aa, Homo sapiens
  CDR3 for beta chain variable domain of TCR clone 353547 (TRBV10-1, TRBJ1-1)
CASRLRENTEAFF

SEQ ID NO: 707095 - protein, 14 aa, Homo sapiens
  CDR3 for alpha chain variable domain of TCR clone 353548 (TRAV1-2, TRAJ8)
CAVREDTGFQQLVF

SEQ ID NO: 707096 - protein, 15 aa, Homo sapiens
  CDR3 for beta chain variable domain of TCR clone 353548 (TRBV6-3, TRBJ2-7)
CASSSPGKVFYEQYF

SEQ ID NO: 707097 - protein, 15 aa, Homo sapiens
  CDR3 for alpha chain variable domain of TCR clone 353549 (TRAV26-1, TRAJ44)
CIVRANTGTASKLTF

SEQ ID NO: 707098 - protein, 16 aa, Homo sapiens
  CDR3 for beta chain variable domain of TCR clone 353549 (TRBV5-1, TRBJ2-1)
CASSHGLAGPQNEQFF

SEQ ID NO: 707099 - protein, 12 aa, Homo sapiens
  CDR3 for alpha chain variable domain of TCR clone 353550 (TRAV13-2, TRAJ16)
CAENMYGQKLLF

SEQ ID NO: 707100 - protein, 14 aa, Homo sapiens
  CDR3 for beta chain variable domain of TCR clone 353550 (TRBV12-5, TRBJ2-5)
CASGSRTHQETQYF

SEQ ID NO: 707101 - protein, 16 aa, Homo sapiens
  CDR3 for alpha chain variable domain of TCR clone 353551 (TRAV3, TRAJ37)
CAVRPHGSGNTGKLIF

SEQ ID NO: 707102 - protein, 13 aa, Homo sapiens
  CDR3 for beta chain variable domain of TCR clone 353551 (TRBV7-2, TRBJ2-5)
CASSYWTGETQYF

SEQ ID NO: 707103 - protein, 13 aa, Homo sapiens
  CDR3 for alpha chain variable domain of TCR clone 353552 (TRAV25, TRAJ10)
CAGRTGGRNKLTF

SEQ ID NO: 707104 - protein, 12 aa, Homo sapiens
  CDR3 for beta chain variable domain of TCR clone 353552 (TRBV14, TRBJ1-1)
CASSQLKGLAFF

SEQ ID NO: 707105 - protein, 14 aa, Homo sapiens
  CDR3 for alpha chain variable domain of TCR clone 353553 (TRAV12-2, TRAJ11)
CAVNMNSGYSTLTF

SEQ ID NO: 707106 - protein, 14 aa, Homo sapiens
  CDR3 for beta chain variable domain of TCR clone 353553 (TRBV11-2, TRBJ2-7)
CASSLGAGAYEQYF

SEQ ID NO: 707107 - protein, 14 aa, Homo sapiens
  CDR3 for alpha chain variable domain of TCR clone 353554 (TRAV17, TRAJ57)
CATDPQGGTEKLVF

SEQ ID NO: 707108 - protein, 13 aa, Homo sapiens
  CDR3 for beta chain variable domain of TCR clone 353554 (TRBV19, TRBJ2-7)
CASSPRQSYEQYF

SEQ ID NO: 707109 - protein, 16 aa, Homo sapiens
  CDR3 for alpha chain variable domain of TCR clone 353555 (TRAV3, TRAJ37)
CAVRPYGSGNTGKLIF

SEQ ID NO: 707110 - protein, 14 aa, Homo sapiens
  CDR3 for beta chain variable domain of TCR clone 353555 (TRBV2, TRBJ2-1)
CASSDRAYYNEQFF

SEQ ID NO: 707111 - protein, 14 aa, Homo sapiens
  CDR3 for alpha chain variable domain of TCR clone 353556 (TRAV12-1, TRAJ12)
CVVTRMDSSYKLIL

SEQ ID NO: 707112 - protein, 15 aa, Homo sapiens
  CDR3 for beta chain variable domain of TCR clone 353556 (TRBV20-1, TRBJ2-7)
CSARDRVSGMDEQYF

SEQ ID NO: 707113 - protein, 18 aa, Homo sapiens
  CDR3 for alpha chain variable domain of TCR clone 353557 (TRAV21, TRAJ52)
CAVRPSAAGGTSYGKLTF

SEQ ID NO: 707114 - protein, 14 aa, Homo sapiens
  CDR3 for beta chain variable domain of TCR clone 353557 (TRBV28, TRBJ1-1)
CASSPRTRWAEAFF

SEQ ID NO: 707115 - protein, 15 aa, Homo sapiens
  CDR3 for alpha chain variable domain of TCR clone 353558 (TRAV25, TRAJ52)
CAGRPGGTSYGKLTF

SEQ ID NO: 707116 - protein, 14 aa, Homo sapiens
  CDR3 for beta chain variable domain of TCR clone 353558 (TRBV7-2, TRBJ1-2)
CASSQTGSTYGYTF

SEQ ID NO: 707117 - protein, 11 aa, Homo sapiens
  CDR3 for alpha chain variable domain of TCR clone 353559 (TRAV21, TRAJ34)
CAHYNTDKLIF

SEQ ID NO: 707118 - protein, 13 aa, Homo sapiens
  CDR3 for beta chain variable domain of TCR clone 353559 (TRBV7-6, TRBJ1-2)
CASGLVADYGYTF

SEQ ID NO: 707119 - protein, 16 aa, Homo sapiens
  CDR3 for alpha chain variable domain of TCR clone 353560 (TRAV12-3, TRAJ53)
CAMSPGSGGSNDKLAF

SEQ ID NO: 707120 - protein, 11 aa, Homo sapiens
  CDR3 for beta chain variable domain of TCR clone 353560 (TRBV29-1, TRBJ2-5)
CSEDRTGTQYF

SEQ ID NO: 707121 - protein, 13 aa, Homo sapiens
  CDR3 for alpha chain variable domain of TCR clone 353561 (TRAV13-1, TRAJ39)
CSASIWAGDMLTF

SEQ ID NO: 707122 - protein, 15 aa, Homo sapiens
  CDR3 for beta chain variable domain of TCR clone 353561 (TRBV7-9, TRBJ1-1)
CASSLLEQGGTEAFF

SEQ ID NO: 707123 - protein, 14 aa, Homo sapiens
  CDR3 for alpha chain variable domain of TCR clone 353562 (TRAV38-1, TRAJ40)
CALRPTSGTYKYIF

SEQ ID NO: 707124 - protein, 13 aa, Homo sapiens
  CDR3 for beta chain variable domain of TCR clone 353562 (TRBV19, TRBJ1-2)
CASSVPGQYGYTF

SEQ ID NO: 707125 - protein, 14 aa, Homo sapiens
  CDR3 for alpha chain variable domain of TCR clone 353563 (TRAV8-3, TRAJ4)
CAVGAAGGHNKLIF

SEQ ID NO: 707126 - protein, 14 aa, Homo sapiens
  CDR3 for beta chain variable domain of TCR clone 353563 (TRBV12-5, TRBJ2-5)
CASGSRTHQETQYF

SEQ ID NO: 707127 - protein, 14 aa, Homo sapiens
  CDR3 for alpha chain variable domain of TCR clone 353564 (TRAV12-2, TRAJ40)
CAVKIPSGTYKYIF

SEQ ID NO: 707128 - protein, 12 aa, Homo sapiens
  CDR3 for beta chain variable domain of TCR clone 353564 (TRBV2, TRBJ2-1)
GRGLPSYNEQFF

SEQ ID NO: 707129 - protein, 14 aa, Homo sapiens
  CDR3 for alpha chain variable domain of TCR clone 353565 (TRAV26-1, TRAJ38)
CIADNAGNNRKLIW

SEQ ID NO: 707130 - protein, 16 aa, Homo sapiens
  CDR3 for beta chain variable domain of TCR clone 353565 (TRBV4-3, TRBJ2-2)
CASSHLQGSGTGELFF

SEQ ID NO: 707131 - protein, 14 aa, Homo sapiens
  CDR3 for alpha chain variable domain of TCR clone 353566 (TRAV9-2, TRAJ39)
CALYIYNAVNMLTF

SEQ ID NO: 707132 - protein, 15 aa, Homo sapiens
  CDR3 for beta chain variable domain of TCR clone 353566 (TRBV5-5, TRBJ1-5)
CASSSTPGSNQPQHF

SEQ ID NO: 707133 - protein, 13 aa, Homo sapiens
  CDR3 for alpha chain variable domain of TCR clone 353567 (TRAV2, TRAJ24)
CAVEDSGRGKCQF

SEQ ID NO: 707134 - protein, 13 aa, Homo sapiens
  CDR3 for beta chain variable domain of TCR clone 353567 (TRBV10-3, TRBJ2-7)
CASKLAVNYEQYF

SEQ ID NO: 707135 - protein, 12 aa, Homo sapiens
  CDR3 for alpha chain variable domain of TCR clone 353568 (TRAV1-2, TRAJ33)
CAALDSNYQLIW

SEQ ID NO: 707136 - protein, 13 aa, Homo sapiens
  CDR3 for beta chain variable domain of TCR clone 353568 (TRBV12-4, TRBJ1-1)
CAISPGTGFEAFF

SEQ ID NO: 707137 - protein, 13 aa, Homo sapiens
  CDR3 for alpha chain variable domain of TCR clone 353569 (TRAV23/DV6, TRAJ36)
CAASQTGANNLFF

SEQ ID NO: 707138 - protein, 13 aa, Homo sapiens
  CDR3 for beta chain variable domain of TCR clone 353569 (TRBV5-4, TRBJ1-5)
CASSLGGDQPKHF

SEQ ID NO: 707139 - protein, 14 aa, Homo sapiens
  CDR3 for alpha chain variable domain of TCR clone 353570 (TRAV1-2, TRAJ16)
CAVNRFSDGQKLLF

SEQ ID NO: 707140 - protein, 14 aa, Homo sapiens
  CDR3 for beta chain variable domain of TCR clone 353570 (TRBV5-1, TRBJ2-7)
CASRPQTGFDEQYF

SEQ ID NO: 707141 - protein, 12 aa, Homo sapiens
  CDR3 for alpha chain variable domain of TCR clone 353571 (TRAV20, TRAJ56)
CAVTGANSKLTF

SEQ ID NO: 707142 - protein, 14 aa, Homo sapiens
  CDR3 for beta chain variable domain of TCR clone 353571 (TRBV20-1, TRBJ2-5)
CSALVPGYKETQYF

SEQ ID NO: 707143 - protein, 10 aa, Homo sapiens
  CDR3 for alpha chain variable domain of TCR clone 353572 (TRAV23/DV6, TRAJ43)
CAAAVAALEQ

SEQ ID NO: 707144 - protein, 13 aa, Homo sapiens
  CDR3 for beta chain variable domain of TCR clone 353572 (TRBV12-4, TRBJ1-2)
CASCLRQGKGYTF

SEQ ID NO: 707145 - protein, 13 aa, Homo sapiens
  CDR3 for alpha chain variable domain of TCR clone 353573 (TRAV3, TRAJ3)
CAVADSSASKIIF

SEQ ID NO: 707146 - protein, 13 aa, Homo sapiens
  CDR3 for beta chain variable domain of TCR clone 353573 (TRBV19, TRBJ1-2)
CASSVPGQDGYTF

SEQ ID NO: 707147 - protein, 15 aa, Homo sapiens
  CDR3 for alpha chain variable domain of TCR clone 353574 (TRAV9-2, TRAJ28)
CALSISGAGSYQLTF

SEQ ID NO: 707148 - protein, 11 aa, Homo sapiens
  CDR3 for beta chain variable domain of TCR clone 353574 (TRBV11-2, TRBJ1-1)
CASSINTEAFF

SEQ ID NO: 707149 - protein, 14 aa, Homo sapiens
  CDR3 for alpha chain variable domain of TCR clone 353575 (TRAV12-2, TRAJ3)
CAVSLYSSASKIIF

SEQ ID NO: 707150 - protein, 14 aa, Homo sapiens
  CDR3 for beta chain variable domain of TCR clone 353575 (TRBV27, TRBJ2-1)
CAGSRAETYNEQFF

SEQ ID NO: 707151 - protein, 14 aa, Homo sapiens
  CDR3 for alpha chain variable domain of TCR clone 353576 (TRAV12-2, TRAJ13)
CAVKKTGGYQKVIF

SEQ ID NO: 707152 - protein, 14 aa, Homo sapiens
  CDR3 for beta chain variable domain of TCR clone 353576 (TRBV18, TRBJ2-5)
CASSPGVSQETQYF

SEQ ID NO: 707153 - protein, 10 aa, Homo sapiens
  CDR3 for alpha chain variable domain of TCR clone 353577 (TRAV8-2, TRAJ29)
CTGGNTPLVF

SEQ ID NO: 707154 - protein, 13 aa, Homo sapiens
  CDR3 for beta chain variable domain of TCR clone 353577 (TRBV2, TRBJ1-1)
CASSEGGNTEAFF

SEQ ID NO: 707155 - protein, 13 aa, Homo sapiens
  CDR3 for alpha chain variable domain of TCR clone 353578 (TRAV2, TRAJ43)
TTVLKRGNNDMRF

SEQ ID NO: 707156 - protein, 12 aa, Homo sapiens
  CDR3 for beta chain variable domain of TCR clone 353578 (TRBV7-3, TRBJ2-5)
CASSSPGGTQYF

SEQ ID NO: 707157 - protein, 15 aa, Homo sapiens
  CDR3 for alpha chain variable domain of TCR clone 353579 (TRAV21, TRAJ24)
CAARSSTDSWGKLQF

SEQ ID NO: 707158 - protein, 13 aa, Homo sapiens
  CDR3 for beta chain variable domain of TCR clone 353579 (TRBV11-2, TRBJ2-5)
CTSSATGEGTQYF

SEQ ID NO: 707159 - protein, 15 aa, Homo sapiens
  CDR3 for alpha chain variable domain of TCR clone 353580 (TRAV26-1, TRAJ52)
CIVSDLGTSYGKLTF

SEQ ID NO: 707160 - protein, 16 aa, Homo sapiens
  CDR3 for beta chain variable domain of TCR clone 353580 (TRBV13, TRBJ2-3)
CQQPLRVAGGRNTQYF

SEQ ID NO: 707161 - protein, 14 aa, Homo sapiens
  CDR3 for alpha chain variable domain of TCR clone 353581 (TRAV4, TRAJ26)
CLVGPHNYGQNFVF

SEQ ID NO: 707162 - protein, 17 aa, Homo sapiens
  CDR3 for beta chain variable domain of TCR clone 353581 (TRBV24-1, TRBJ2-1)
CATSDVSTSGPYNEQFF

SEQ ID NO: 707163 - protein, 13 aa, Homo sapiens
  CDR3 for alpha chain variable domain of TCR clone 353582 (TRAV8-3, TRAJ28)
CAVGAVGSYQLTF

SEQ ID NO: 707164 - protein, 15 aa, Homo sapiens
  CDR3 for beta chain variable domain of TCR clone 353582 (TRBV4-3, TRBJ2-1)
CASSQVLSSYNEQFF

SEQ ID NO: 707165 - protein, 15 aa, Homo sapiens
  CDR3 for alpha chain variable domain of TCR clone 353583 (TRAV12-3, TRAJ6)
CAMSATTGGSYVPTF

SEQ ID NO: 707166 - protein, 19 aa, Homo sapiens
  CDR3 for beta chain variable domain of TCR clone 353583 (TRBV25-1, TRBJ2-2)
CAILVYRVDRGRKTGELFF

SEQ ID NO: 707167 - protein, 16 aa, Homo sapiens
  CDR3 for alpha chain variable domain of TCR clone 353584 (TRAV3, TRAJ10)
CAVRDMRAGGGNNLTF

SEQ ID NO: 707168 - protein, 15 aa, Homo sapiens
  CDR3 for beta chain variable domain of TCR clone 353584 (TRBV11-2, TRBJ1-6)
CASTGFGTAVSPLHF

SEQ ID NO: 707169 - protein, 15 aa, Homo sapiens
  CDR3 for alpha chain variable domain of TCR clone 353585 (TRAV26-1, TRAJ40)
CIVRVTTSGTYKYIF

SEQ ID NO: 707170 - protein, 14 aa, Homo sapiens
  CDR3 for beta chain variable domain of TCR clone 353585 (TRBV7-9, TRBJ2-7)
CASSPKTSFYEQYF

SEQ ID NO: 707171 - protein, 17 aa, Homo sapiens
  CDR3 for alpha chain variable domain of TCR clone 353586 (TRAV3, TRAJ42)
CAVRDRDYGGSQGNLIF

SEQ ID NO: 707172 - protein, 15 aa, Homo sapiens
  CDR3 for beta chain variable domain of TCR clone 353586 (TRBV14, TRBJ1-1)
CASSQDGMGLREAFF

SEQ ID NO: 707173 - protein, 14 aa, Homo sapiens
  CDR3 for alpha chain variable domain of TCR clone 353587 (TRAV26-1, TRAJ52)
CIPAGGTSYGKLTF

SEQ ID NO: 707174 - protein, 16 aa, Homo sapiens
  CDR3 for beta chain variable domain of TCR clone 353587 (TRBV19, TRBJ2-2)
CASTIGARAGDGELFF

SEQ ID NO: 707175 - protein, 12 aa, Homo sapiens
  CDR3 for alpha chain variable domain of TCR clone 353588 (TRAV2, TRAJ9)
CAVVAGGFKTIF

SEQ ID NO: 707176 - protein, 16 aa, Homo sapiens
  CDR3 for beta chain variable domain of TCR clone 353588 (TRBV13, TRBJ2-2)
CASSPRTGEHTGELFY

SEQ ID NO: 707177 - protein, 14 aa, Homo sapiens
  CDR3 for alpha chain variable domain of TCR clone 353589 (TRAV12-3, TRAJ9)
CAMSPNTGGFKTIF

SEQ ID NO: 707178 - protein, 13 aa, Homo sapiens
  CDR3 for beta chain variable domain of TCR clone 353589 (TRBV10-2, TRBJ2-3)
CASSESGDHTQYF

SEQ ID NO: 707179 - protein, 19 aa, Homo sapiens
  CDR3 for alpha chain variable domain of TCR clone 353590 (TRAV8-3, TRAJ34)
LSTSVLWVWGLRNTDKLIF

SEQ ID NO: 707180 - protein, 17 aa, Homo sapiens
  CDR3 for beta chain variable domain of TCR clone 353590 (TRBV15, TRBJ1-1)
CATSRVGGADGDTEAFF

SEQ ID NO: 707181 - protein, 13 aa, Homo sapiens
  CDR3 for alpha chain variable domain of TCR clone 353591 (TRAV3, TRAJ21)
CAVREPDFNKFYL

SEQ ID NO: 707182 - protein, 13 aa, Homo sapiens
  CDR3 for beta chain variable domain of TCR clone 353591 (TRBV20-1, TRBJ1-1)
CSARGGGNTEAFF

SEQ ID NO: 707183 - protein, 14 aa, Homo sapiens
  CDR3 for alpha chain variable domain of TCR clone 353592 (TRAV1-2, TRAJ8)
CAVSEDTGFQKLVF

SEQ ID NO: 707184 - protein, 16 aa, Homo sapiens
  CDR3 for beta chain variable domain of TCR clone 353592 (TRBV7-6, TRBJ2-6)
CASSLPGLSGANVLTF

SEQ ID NO: 707185 - protein, 15 aa, Homo sapiens
  CDR3 for alpha chain variable domain of TCR clone 353593 (TRAV1-1, TRAJ20)
CAVRDNVANDYKLSF

SEQ ID NO: 707186 - protein, 13 aa, Homo sapiens
  CDR3 for beta chain variable domain of TCR clone 353593 (TRBV4-1, TRBJ2-2)
CASSQENTGVLFF

SEQ ID NO: 707187 - protein, 15 aa, Homo sapiens
  CDR3 for alpha chain variable domain of TCR clone 353594 (TRAV17, TRAJ40)
CATVSSTSGTYKYIF

SEQ ID NO: 707188 - protein, 13 aa, Homo sapiens
  CDR3 for beta chain variable domain of TCR clone 353594 (TRBV5-1, TRBJ2-1)
CASSLGSYNEQFF

SEQ ID NO: 707189 - protein, 16 aa, Homo sapiens
  CDR3 for alpha chain variable domain of TCR clone 353595 (TRAV14/DV4, TRAJ54)
CAMREGRIQGAQKLVF

SEQ ID NO: 707190 - protein, 15 aa, Homo sapiens
  CDR3 for beta chain variable domain of TCR clone 353595 (TRBV6-6, TRBJ2-7)
CASSYSYGGSYEQYF

SEQ ID NO: 707191 - protein, 13 aa, Homo sapiens
  CDR3 for alpha chain variable domain of TCR clone 353596 (TRAV12-1, TRAJ9)
CVGLNTGGFKTIF

SEQ ID NO: 707192 - protein, 13 aa, Homo sapiens
  CDR3 for beta chain variable domain of TCR clone 353596 (TRBV20-1, TRBJ1-1)
CSARGGGNTEAFF

SEQ ID NO: 707193 - protein, 13 aa, Homo sapiens
  CDR3 for alpha chain variable domain of TCR clone 353597 (TRAV22, TRAJ29)
CAVGGSGNTPLVF

SEQ ID NO: 707194 - protein, 14 aa, Homo sapiens
  CDR3 for beta chain variable domain of TCR clone 353597 (TRBV5-1, TRBJ2-7)
CASSRGESFYEQYF

SEQ ID NO: 707195 - protein, 15 aa, Homo sapiens
  CDR3 for alpha chain variable domain of TCR clone 353598 (TRAV8-3, TRAJ27)
CAVGPSKTNAGKSTF

SEQ ID NO: 707196 - protein, 13 aa, Homo sapiens
  CDR3 for beta chain variable domain of TCR clone 353598 (TRBV12-5, TRBJ1-2)
CASGVRTGNGYAF

SEQ ID NO: 707197 - protein, 14 aa, Homo sapiens
  CDR3 for alpha chain variable domain of TCR clone 353599 (TRAV9-2, TRAJ6)
CALSDPGGSYIPTF

SEQ ID NO: 707198 - protein, 16 aa, Homo sapiens
  CDR3 for beta chain variable domain of TCR clone 353599 (TRBV19, TRBJ2-2)
CDSRSPGTGATGELFF

SEQ ID NO: 707199 - protein, 14 aa, Homo sapiens
  CDR3 for alpha chain variable domain of TCR clone 353600 (TRAV12-1, TRAJ3)
CVVNPGRSASQIIF

SEQ ID NO: 707200 - protein, 18 aa, Homo sapiens
  CDR3 for beta chain variable domain of TCR clone 353600 (TRBV4-2, TRBJ1-2)
CASSQDKVGHTVNYGYTF

SEQ ID NO: 707201 - protein, 12 aa, Homo sapiens
  CDR3 for alpha chain variable domain of TCR clone 353601 (TRAV21, TRAJ49)
CAVNDGGNQFYF

SEQ ID NO: 707202 - protein, 12 aa, Homo sapiens
  CDR3 for beta chain variable domain of TCR clone 353601 (TRBV11-2, TRBJ2-2)
GASSLGGGELFF

SEQ ID NO: 707203 - protein, 13 aa, Homo sapiens
  CDR3 for alpha chain variable domain of TCR clone 353602 (TRAV1-2, TRAJ9)
CAALNTGGFKTIF

SEQ ID NO: 707204 - protein, 14 aa, Homo sapiens
  CDR3 for beta chain variable domain of TCR clone 353602 (TRBV11-2, TRBJ1-2)
CASSLGTANYGYTF

SEQ ID NO: 707205 - protein, 14 aa, Homo sapiens
  CDR3 for alpha chain variable domain of TCR clone 353603 (TRAV12-2, TRAJ45)
CALPERGGADGLTF

SEQ ID NO: 707206 - protein, 14 aa, Homo sapiens
  CDR3 for beta chain variable domain of TCR clone 353603 (TRBV18, TRBJ1-5)
CASSPGNSNQSRHF

SEQ ID NO: 707207 - protein, 14 aa, Homo sapiens
  CDR3 for alpha chain variable domain of TCR clone 353604 (TRAV12-1, TRAJ9)
CVVNRGTGGFKTIF

SEQ ID NO: 707208 - protein, 20 aa, Homo sapiens
  CDR3 for beta chain variable domain of TCR clone 353604 (TRBV28, TRBJ2-1)
CASTPIGRSPGLAGGNEQFF

SEQ ID NO: 707209 - protein, 13 aa, Homo sapiens
  CDR3 for alpha chain variable domain of TCR clone 353605 (TRAV21, TRAJ27)
CAARPGNAVKSTF

SEQ ID NO: 707210 - protein, 15 aa, Homo sapiens
  CDR3 for beta chain variable domain of TCR clone 353605 (TRBV11-3, TRBJ2-7)
CASSPGPASSYEQYF

SEQ ID NO: 707211 - protein, 11 aa, Homo sapiens
  CDR3 for alpha chain variable domain of TCR clone 353606 (TRAV27, TRAJ20)
CAGLNDYKLSF

SEQ ID NO: 707212 - protein, 16 aa, Homo sapiens
  CDR3 for beta chain variable domain of TCR clone 353606 (TRBV7-3, TRBJ2-1)
CASSLVSGSSNNEQFF

SEQ ID NO: 707213 - protein, 14 aa, Homo sapiens
  CDR3 for alpha chain variable domain of TCR clone 353607 (TRAV8-4, TRAJ4)
CAGSPSGGYNKLIF

SEQ ID NO: 707214 - protein, 15 aa, Homo sapiens
  CDR3 for beta chain variable domain of TCR clone 353607 (TRBV7-8, TRBJ2-3)
CASSLSADSGGAQYF

SEQ ID NO: 707215 - protein, 19 aa, Homo sapiens
  CDR3 for alpha chain variable domain of TCR clone 353608 (TRAV26-1, TRAJ22)
CCVLLYRWVFSGSARQLTF

SEQ ID NO: 707216 - protein, 19 aa, Homo sapiens
  CDR3 for beta chain variable domain of TCR clone 353608 (TRBV19, TRBJ2-5)
CASSIGQVTDLFLGETQYF

SEQ ID NO: 707217 - protein, 14 aa, Homo sapiens
  CDR3 for alpha chain variable domain of TCR clone 353609 (TRAV12-2, TRAJ13)
CAVKKTGGYQKVTF

SEQ ID NO: 707218 - protein, 15 aa, Homo sapiens
  CDR3 for beta chain variable domain of TCR clone 353609 (TRBV12-4, TRBJ2-5)
CASSTPTGLQETQYF

SEQ ID NO: 707219 - protein, 12 aa, Homo sapiens
  CDR3 for alpha chain variable domain of TCR clone 353610 (TRAV12-2, TRAJ31)
CAVNTPDDRLMF

SEQ ID NO: 707220 - protein, 17 aa, Homo sapiens
  CDR3 for beta chain variable domain of TCR clone 353610 (TRBV20-1, TRBJ1-6)
CSARGGYTFSYNSPLHF

SEQ ID NO: 707221 - protein, 15 aa, Homo sapiens
  CDR3 for alpha chain variable domain of TCR clone 353611 (TRAV17, TRAJ22)
CATVAPSGSARQLTF

SEQ ID NO: 707222 - protein, 14 aa, Homo sapiens
  CDR3 for beta chain variable domain of TCR clone 353611 (TRBV10-3, TRBJ2-7)
CASSPRGGAYEQYF

SEQ ID NO: 707223 - protein, 12 aa, Homo sapiens
  CDR3 for alpha chain variable domain of TCR clone 353612 (TRAV13-1, TRAJ21)
CAAKEGFNKFYF

SEQ ID NO: 707224 - protein, 20 aa, Homo sapiens
  CDR3 for beta chain variable domain of TCR clone 353612 (TRBV28, TRBJ2-1)
CASTPIGRSPGLAGGNGQFF

SEQ ID NO: 707225 - protein, 14 aa, Homo sapiens
  CDR3 for alpha chain variable domain of TCR clone 353613 (TRAV12-1, TRAJ13)
CVVIDSGGYQKVTF

SEQ ID NO: 707226 - protein, 15 aa, Homo sapiens
  CDR3 for beta chain variable domain of TCR clone 353613 (TRBV7-2, TRBJ2-1)
CASSLASGRVNEQFF

SEQ ID NO: 707227 - protein, 15 aa, Homo sapiens
  CDR3 for alpha chain variable domain of TCR clone 353614 (TRAV16, TRAJ10)
CALEGLTGGGNKLTF

SEQ ID NO: 707228 - protein, 14 aa, Homo sapiens
  CDR3 for beta chain variable domain of TCR clone 353614 (TRBV7-6, TRBJ2-3)
CASSLGTFTDTQYF

SEQ ID NO: 707229 - protein, 18 aa, Homo sapiens
  CDR3 for alpha chain variable domain of TCR clone 353615 (TRAV1-2, TRAJ10)
CAVRALTPVTGGGNKLPF

SEQ ID NO: 707230 - protein, 14 aa, Homo sapiens
  CDR3 for beta chain variable domain of TCR clone 353615 (TRBV4-1, TRBJ1-1)
CASSQQGNGNEAFF

SEQ ID NO: 707231 - protein, 22 aa, Homo sapiens
  CDR3 for alpha chain variable domain of TCR clone 353616 (TRAV21, TRAJ39)
AASQPGDSATPKGAKAGNMLTF

SEQ ID NO: 707232 - protein, 17 aa, Homo sapiens
  CDR3 for beta chain variable domain of TCR clone 353616 (TRBV20-1, TRBJ2-1)
CSASSSGLAGSYNEQFF

SEQ ID NO: 707233 - protein, 11 aa, Homo sapiens
  CDR3 for alpha chain variable domain of TCR clone 353617 (TRAV13-1, TRAJ8)
CAASGFQKLVF

SEQ ID NO: 707234 - protein, 16 aa, Homo sapiens
  CDR3 for beta chain variable domain of TCR clone 353617 (TRBV19, TRBJ1-5)
CASSTRGTRSNQAQHF

SEQ ID NO: 707235 - protein, 11 aa, Homo sapiens
  CDR3 for alpha chain variable domain of TCR clone 353618 (TRAV3, TRAJ21)
CAVCNFNNFYF

SEQ ID NO: 707236 - protein, 16 aa, Homo sapiens
  CDR3 for beta chain variable domain of TCR clone 353618 (TRBV19, TRBJ2-1)
CASSKAGPSSYNEQFF

SEQ ID NO: 707237 - protein, 14 aa, Homo sapiens
  CDR3 for alpha chain variable domain of TCR clone 353619 (TRAV26-1, TRAJ34)
CIVRESYNTDKLIF

SEQ ID NO: 707238 - protein, 15 aa, Homo sapiens
  CDR3 for beta chain variable domain of TCR clone 353619 (TRBV9, TRBJ1-6)
CASSVAGTGDSPLHF

SEQ ID NO: 707239 - protein, 14 aa, Homo sapiens
  CDR3 for alpha chain variable domain of TCR clone 353620 (TRAV12-3, TRAJ10)
SHLPLTGGGNKLTF

SEQ ID NO: 707240 - protein, 14 aa, Homo sapiens
  CDR3 for beta chain variable domain of TCR clone 353620 (TRBV6-1, TRBJ2-2)
CASSQRQATGELFF

SEQ ID NO: 707241 - protein, 11 aa, Homo sapiens
  CDR3 for alpha chain variable domain of TCR clone 353621 (TRAV1-1, TRAJ23)
CAVRQGGKLIF

SEQ ID NO: 707242 - protein, 14 aa, Homo sapiens
  CDR3 for beta chain variable domain of TCR clone 353621 (TRBV18, TRBJ1-5)
CASSPGNSNQPQHF

SEQ ID NO: 707243 - protein, 16 aa, Homo sapiens
  CDR3 for alpha chain variable domain of TCR clone 353622 (TRAV30, TRAJ24)
CGTEIVDAHSWGTFQF

SEQ ID NO: 707244 - protein, 14 aa, Homo sapiens
  CDR3 for beta chain variable domain of TCR clone 353622 (TRBV12-5, TRBJ2-5)
CASGSRTHQETQYF

SEQ ID NO: 707245 - protein, 12 aa, Homo sapiens
  CDR3 for alpha chain variable domain of TCR clone 353623 (TRAV2, TRAJ34)
CAVERNTDKLIF

SEQ ID NO: 707246 - protein, 17 aa, Homo sapiens
  CDR3 for beta chain variable domain of TCR clone 353623 (TRBV7-8, TRBJ2-6)
CASSAGTGGAGANVLTF

SEQ ID NO: 707247 - protein, 14 aa, Homo sapiens
  CDR3 for alpha chain variable domain of TCR clone 353624 (TRAV8-3, TRAJ9)
CAVVYNTGGFKTIF

SEQ ID NO: 707248 - protein, 14 aa, Homo sapiens
  CDR3 for beta chain variable domain of TCR clone 353624 (TRBV11-1, TRBJ2-7)
CASSLEREWGEQYF

SEQ ID NO: 707249 - protein, 12 aa, Homo sapiens
  CDR3 for alpha chain variable domain of TCR clone 353625 (TRAV12-3, TRAJ20)
CAMVRGDYKLSF

SEQ ID NO: 707250 - protein, 14 aa, Homo sapiens
  CDR3 for beta chain variable domain of TCR clone 353625 (TRBV5-4, TRBJ1-1)
CASSLDSRRDEAFF

SEQ ID NO: 707251 - protein, 15 aa, Homo sapiens
  CDR3 for alpha chain variable domain of TCR clone 353626 (TRAV13-1, TRAJ52)
CALRTGGTSYGKLTF

SEQ ID NO: 707252 - protein, 14 aa, Homo sapiens
  CDR3 for beta chain variable domain of TCR clone 353626 (TRBV20-1, TRBJ2-5)
CSAIDSGSGETQYF

SEQ ID NO: 707253 - protein, 12 aa, Homo sapiens
  CDR3 for alpha chain variable domain of TCR clone 353627 (TRAV12-3, TRAJ17)
CAMTLTGNKLTF

SEQ ID NO: 707254 - protein, 15 aa, Homo sapiens
  CDR3 for beta chain variable domain of TCR clone 353627 (TRBV27, TRBJ2-1)
CASSYGGGSSNEQFF

SEQ ID NO: 707255 - protein, 13 aa, Homo sapiens
  CDR3 for alpha chain variable domain of TCR clone 353628 (TRAV12-2, TRAJ12)
CAVNWDSSYKLIF

SEQ ID NO: 707256 - protein, 15 aa, Homo sapiens
  CDR3 for beta chain variable domain of TCR clone 353628 (TRBV18, TRBJ1-1)
CASSPRQGENTEAFF

SEQ ID NO: 707257 - protein, 16 aa, Homo sapiens
  CDR3 for alpha chain variable domain of TCR clone 353629 (TRAV12-2, TRAJ28)
CAVITDSGAGSYQLTS

SEQ ID NO: 707258 - protein, 14 aa, Homo sapiens
  CDR3 for beta chain variable domain of TCR clone 353629 (TRBV25-1, TRBJ1-1)
CASTHLGGNTEAFF

SEQ ID NO: 707259 - protein, 23 aa, Homo sapiens
  CDR3 for alpha chain variable domain of TCR clone 353630 (TRAV41, TRAJ32)
CAVRIMVVLQTSSSLELALCLLS

SEQ ID NO: 707260 - protein, 15 aa, Homo sapiens
  CDR3 for beta chain variable domain of TCR clone 353630 (TRBV11-2, TRBJ2-1)
CASSNNRGLIYEQFF

SEQ ID NO: 707261 - protein, 13 aa, Homo sapiens
  CDR3 for alpha chain variable domain of TCR clone 353631 (TRAV2, TRAJ40)
CAVVTSGTYKYIF

SEQ ID NO: 707262 - protein, 16 aa, Homo sapiens
  CDR3 for beta chain variable domain of TCR clone 353631 (TRBV2, TRBJ2-1)
CASTVGGSLSYNEQFF

SEQ ID NO: 707263 - protein, 13 aa, Homo sapiens
  CDR3 for alpha chain variable domain of TCR clone 353632 (TRAV2, TRAJ40)
CAVVTSGTYKYIF

SEQ ID NO: 707264 - protein, 14 aa, Homo sapiens
  CDR3 for beta chain variable domain of TCR clone 353632 (TRBV7-8, TRBJ2-3)
CASSFKSSTDTQYF

SEQ ID NO: 707265 - protein, 13 aa, Homo sapiens
  CDR3 for alpha chain variable domain of TCR clone 353633 (TRAV13-2, TRAJ53)
CAEYMGSNYKLTF

SEQ ID NO: 707266 - protein, 13 aa, Homo sapiens
  CDR3 for beta chain variable domain of TCR clone 353633 (TRBV4-1, TRBJ2-2)
CASSQENTGELFF

SEQ ID NO: 707267 - protein, 15 aa, Homo sapiens
  CDR3 for alpha chain variable domain of TCR clone 353634 (TRAV38-2/DV8, TRAJ26)
CAYRSRDNYGQNFVF

SEQ ID NO: 707268 - protein, 17 aa, Homo sapiens
  CDR3 for beta chain variable domain of TCR clone 353634 (TRBV11-2, TRBJ2-3)
CQQLRGGLAGAPNTQYF

SEQ ID NO: 707269 - protein, 10 aa, Homo sapiens
  CDR3 for alpha chain variable domain of TCR clone 353635 (TRAV23/DV6, TRAJ31)
CARGGARLMF

SEQ ID NO: 707270 - protein, 14 aa, Homo sapiens
  CDR3 for beta chain variable domain of TCR clone 353635 (TRBV7-8, TRBJ2-3)
CASSLEAGTDTQYF

SEQ ID NO: 707271 - protein, 14 aa, Homo sapiens
  CDR3 for alpha chain variable domain of TCR clone 353636 (TRAV2, TRAJ9)
CAVEDRSGGFKTIF

SEQ ID NO: 707272 - protein, 13 aa, Homo sapiens
  CDR3 for beta chain variable domain of TCR clone 353636 (TRBV2, TRBJ1-1)
CASRWTVNTEAFF

SEQ ID NO: 707273 - protein, 11 aa, Homo sapiens
  CDR3 for alpha chain variable domain of TCR clone 353637 (TRAV1-1, TRAJ23)
CAVRQGGKLIF

SEQ ID NO: 707274 - protein, 17 aa, Homo sapiens
  CDR3 for beta chain variable domain of TCR clone 353637 (TRBV11-1, TRBJ2-7)
CASSRGPGRGSSYEQYF

SEQ ID NO: 707275 - protein, 17 aa, Homo sapiens
  CDR3 for alpha chain variable domain of TCR clone 353638 (TRAV12-2, TRAJ22)
CAVNRSPFSGSARQLTF

SEQ ID NO: 707276 - protein, 13 aa, Homo sapiens
  CDR3 for beta chain variable domain of TCR clone 353638 (TRBV11-3, TRBJ1-1)
CASSSNRDTEAFF

SEQ ID NO: 707277 - protein, 13 aa, Homo sapiens
  CDR3 for alpha chain variable domain of TCR clone 353639 (TRAV21, TRAJ57)
CAVTQGGSEKLVF

SEQ ID NO: 707278 - protein, 16 aa, Homo sapiens
  CDR3 for beta chain variable domain of TCR clone 353639 (TRBV29-1, TRBJ2-7)
CSVEAAEDGTDYEQYF

SEQ ID NO: 707279 - protein, 15 aa, Homo sapiens
  CDR3 for alpha chain variable domain of TCR clone 353640 (TRAV26-1, TRAJ39)
CIVRVASNACNMLTF

SEQ ID NO: 707280 - protein, 14 aa, Homo sapiens
  CDR3 for beta chain variable domain of TCR clone 353640 (TRBV7-6, TRBJ2-3)
CASSVAGGTDTQYF

SEQ ID NO: 707281 - protein, 18 aa, Homo sapiens
  CDR3 for alpha chain variable domain of TCR clone 353641 (TRAV29/DV5, TRAJ52)
CAAGFRGSGGTSYGKLTL

SEQ ID NO: 707282 - protein, 16 aa, Homo sapiens
  CDR3 for beta chain variable domain of TCR clone 353641 (TRBV7-3, TRBJ2-2)
CASSLKRGTLSGELFF

SEQ ID NO: 707283 - protein, 15 aa, Homo sapiens
  CDR3 for alpha chain variable domain of TCR clone 353642 (TRAV12-3, TRAJ11)
CAMSEENSGYSTLTF

SEQ ID NO: 707284 - protein, 16 aa, Homo sapiens
  CDR3 for beta chain variable domain of TCR clone 353642 (TRBV5-1, TRBJ2-7)
CASSLEGLARLYEQYF

SEQ ID NO: 707285 - protein, 15 aa, Homo sapiens
  CDR3 for alpha chain variable domain of TCR clone 353643 (TRAV23/DV6, TRAJ4)
CAASPLRGGYNKLIF

SEQ ID NO: 707286 - protein, 15 aa, Homo sapiens
  CDR3 for beta chain variable domain of TCR clone 353643 (TRBV7-9, TRBJ1-6)
CASSSPGRGNSPLNF

SEQ ID NO: 707287 - protein, 12 aa, Homo sapiens
  CDR3 for alpha chain variable domain of TCR clone 353644 (TRAV8-1, TRAJ26)
CAVNNYGQNFVS

SEQ ID NO: 707288 - protein, 12 aa, Homo sapiens
  CDR3 for beta chain variable domain of TCR clone 353644 (TRBV5-5, TRBJ2-5)
CASSYFGETQYF

SEQ ID NO: 707289 - protein, 14 aa, Homo sapiens
  CDR3 for alpha chain variable domain of TCR clone 353645 (TRAV20, TRAJ16)
CAVRFFSDGQKLLF

SEQ ID NO: 707290 - protein, 17 aa, Homo sapiens
  CDR3 for beta chain variable domain of TCR clone 353645 (TRBV20-1, TRBJ2-2)
CSASGSGQGGLTGELFF

SEQ ID NO: 707291 - protein, 15 aa, Homo sapiens
  CDR3 for alpha chain variable domain of TCR clone 353646 (TRAV17, TRAJ35)
CATAFVIGFGNVLHC

SEQ ID NO: 707292 - protein, 15 aa, Homo sapiens
  CDR3 for beta chain variable domain of TCR clone 353646 (TRBV7-9, TRBJ2-3)
CASSVGDRYTDTQYF

SEQ ID NO: 707293 - protein, 18 aa, Homo sapiens
  CDR3 for alpha chain variable domain of TCR clone 353647 (TRAV21, TRAJ52)
CAVKPSPAGGTSYGKLTF

SEQ ID NO: 707294 - protein, 16 aa, Homo sapiens
  CDR3 for beta chain variable domain of TCR clone 353647 (TRBV7-3, TRBJ2-2)
CASSLKRGTLSGELFF

SEQ ID NO: 707295 - protein, 13 aa, Homo sapiens
  CDR3 for alpha chain variable domain of TCR clone 353648 (TRAV13-1, TRAJ12)
CSKYMGSSYKLIF

SEQ ID NO: 707296 - protein, 14 aa, Homo sapiens
  CDR3 for beta chain variable domain of TCR clone 353648 (TRBV13, TRBJ2-5)
CASSLERVGETQYF

SEQ ID NO: 707297 - protein, 10 aa, Homo sapiens
  CDR3 for alpha chain variable domain of TCR clone 353649 (TRAV12-1, TRAJ33)
CVASNYQLIW

SEQ ID NO: 707298 - protein, 15 aa, Homo sapiens
  CDR3 for beta chain variable domain of TCR clone 353649 (TRBV5-4, TRAJ58)
CASSHGDGENEKLFF

SEQ ID NO: 707299 - protein, 14 aa, Homo sapiens
  CDR3 for alpha chain variable domain of TCR clone 353650 (TRAV12-2, TRAJ17)
CAVNIKAAGNKLTF

SEQ ID NO: 707300 - protein, 18 aa, Homo sapiens
  CDR3 for beta chain variable domain of TCR clone 353650 (TRBV25-1, TRBJ1-2)
CASSGLQNGQGLIFGYTF

SEQ ID NO: 707301 - protein, 14 aa, Homo sapiens
  CDR3 for alpha chain variable domain of TCR clone 353651 (TRAV12-3, TRAJ10)
SLLPLTGGGNKLTF

SEQ ID NO: 707302 - protein, 14 aa, Homo sapiens
  CDR3 for beta chain variable domain of TCR clone 353651 (TRBV19, TRBJ2-1)
CASPTFVLSGEQFF

SEQ ID NO: 707303 - protein, 15 aa, Homo sapiens
  CDR3 for alpha chain variable domain of TCR clone 353652 (TRAV20, TRAJ28)
CAVQYSWAGSYQLTF

SEQ ID NO: 707304 - protein, 12 aa, Homo sapiens
  CDR3 for beta chain variable domain of TCR clone 353652 (TRBV12-4, TRBJ1-3)
CASSASGNTIYF

SEQ ID NO: 707305 - protein, 20 aa, Homo sapiens
  CDR3 for alpha chain variable domain of TCR clone 353653 (TRAV8-3, TRAJ44)
LSTSVLWVRLYTGTASKLTF

SEQ ID NO: 707306 - protein, 15 aa, Homo sapiens
  CDR3 for beta chain variable domain of TCR clone 353653 (TRBV6-5, TRBJ1-2)
CASSYSQGFNYGYTF

SEQ ID NO: 707307 - protein, 13 aa, Homo sapiens
  CDR3 for alpha chain variable domain of TCR clone 353654 (TRAV1-2, TRAJ12)
CAVSMDSSYKLIF

SEQ ID NO: 707308 - protein, 17 aa, Homo sapiens
  CDR3 for beta chain variable domain of TCR clone 353654 (TRBV11-2, TRBJ2-1)
CASSFSPPGVEYNEQFF

SEQ ID NO: 707309 - protein, 13 aa, Homo sapiens
  CDR3 for alpha chain variable domain of TCR clone 353655 (TRAV21, TRAJ27)
CAARPGNAGKQTF

SEQ ID NO: 707310 - protein, 14 aa, Homo sapiens
  CDR3 for beta chain variable domain of TCR clone 353655 (TRBV7-6, TRBJ2-3)
CASSLGTVTDTQYF

SEQ ID NO: 707311 - protein, 14 aa, Homo sapiens
  CDR3 for alpha chain variable domain of TCR clone 353656 (TRAV26-1, TRAJ34)
FIVRVAYNTDKLIF

SEQ ID NO: 707312 - protein, 15 aa, Homo sapiens
  CDR3 for beta chain variable domain of TCR clone 353656 (TRBV20-1, TRBJ2-7)
CSARVPAAYFYEQYL

SEQ ID NO: 707313 - protein, 14 aa, Homo sapiens
  CDR3 for alpha chain variable domain of TCR clone 353657 (TRAV1-2, TRAJ16)
CAVNRFSDGQKLLF

SEQ ID NO: 707314 - protein, 16 aa, Homo sapiens
  CDR3 for beta chain variable domain of TCR clone 353657 (TRBV27, TRBJ2-2)
CASSLLGRGNTGELFF

SEQ ID NO: 707315 - protein, 15 aa, Homo sapiens
  CDR3 for alpha chain variable domain of TCR clone 353658 (TRAV17, TRAJ56)
CATEPFTGANSKLKF

SEQ ID NO: 707316 - protein, 17 aa, Homo sapiens
  CDR3 for beta chain variable domain of TCR clone 353658 (TRBV4-2, TRBJ2-7)
CASSQERARGVPYEQYF

SEQ ID NO: 707317 - protein, 14 aa, Homo sapiens
  CDR3 for alpha chain variable domain of TCR clone 353659 (TRAV4, TRAJ9)
CLVGSGTGGFKTIF

SEQ ID NO: 707318 - protein, 14 aa, Homo sapiens
  CDR3 for beta chain variable domain of TCR clone 353659 (TRBV7-9, TRBJ2-4)
CASSLAMGCNIQYF

SEQ ID NO: 707319 - protein, 14 aa, Homo sapiens
  CDR3 for alpha chain variable domain of TCR clone 353660 (TRAV12-2, TRAJ11)
CAVEGGSGYSTPTF

SEQ ID NO: 707320 - protein, 16 aa, Homo sapiens
  CDR3 for beta chain variable domain of TCR clone 353660 (TRBV2, TRBJ2-3)
FASSTSVEGVTDTRYF

SEQ ID NO: 707321 - protein, 11 aa, Homo sapiens
  CDR3 for alpha chain variable domain of TCR clone 353661 (TRAV2, TRAJ13)
CASGGYQKVTF

SEQ ID NO: 707322 - protein, 15 aa, Homo sapiens
  CDR3 for beta chain variable domain of TCR clone 353661 (TRBV5-1, TRBJ2-7)
CASSLDLTSSYKQYF

SEQ ID NO: 707323 - protein, 18 aa, Homo sapiens
  CDR3 for alpha chain variable domain of TCR clone 353662 (TRAV26-1, TRAJ5)
CIVRVVPPRDTGRRALIF

SEQ ID NO: 707324 - protein, 15 aa, Homo sapiens
  CDR3 for beta chain variable domain of TCR clone 353662 (TRBV7-9, TRBJ2-7)
CASSLPMGQANEQYF

SEQ ID NO: 707325 - protein, 14 aa, Homo sapiens
  CDR3 for alpha chain variable domain of TCR clone 353663 (TRAV12-3, TRAJ12)
CAMSEVDSSYKLIF

SEQ ID NO: 707326 - protein, 16 aa, Homo sapiens
  CDR3 for beta chain variable domain of TCR clone 353663 (TRBV11-3, TRBJ2-3)
CASSSGSGGGTDTQYF

SEQ ID NO: 707327 - protein, 13 aa, Homo sapiens
  CDR3 for alpha chain variable domain of TCR clone 353664 (TRAV1-2, TRAJ24)
CAVTTDSWGKLQF

SEQ ID NO: 707328 - protein, 16 aa, Homo sapiens
  CDR3 for beta chain variable domain of TCR clone 353664 (TRBV6-3, TRBJ1-1)
CASTDLGTVPNTEAFS

SEQ ID NO: 707329 - protein, 14 aa, Homo sapiens
  CDR3 for alpha chain variable domain of TCR clone 353665 (TRAV12-2, TRAJ33)
CAVKRARSNYQLIW

SEQ ID NO: 707330 - protein, 16 aa, Homo sapiens
  CDR3 for beta chain variable domain of TCR clone 353665 (TRBV7-7, TRBJ2-1)
CASSLASGTSYNEQFF

SEQ ID NO: 707331 - protein, 13 aa, Homo sapiens
  CDR3 for alpha chain variable domain of TCR clone 353666 (TRAV8-3, TRAJ36)
CAVGATGANNLFF

SEQ ID NO: 707332 - protein, 14 aa, Homo sapiens
  CDR3 for beta chain variable domain of TCR clone 353666 (TRBV18, TRBJ2-5)
CASSPGVSQETQYF

SEQ ID NO: 707333 - protein, 12 aa, Homo sapiens
  CDR3 for alpha chain variable domain of TCR clone 353667 (TRAV1-1, TRAJ8)
CAGGTGFQKLVF

SEQ ID NO: 707334 - protein, 15 aa, Homo sapiens
  CDR3 for beta chain variable domain of TCR clone 353667 (TRBV7-9, TRBJ1-4)
CAGSRTGGFNETLFF

SEQ ID NO: 707335 - protein, 12 aa, Homo sapiens
  CDR3 for alpha chain variable domain of TCR clone 353668 (TRAV17, TRAJ54)
CATDKGAQKLVF

SEQ ID NO: 707336 - protein, 13 aa, Homo sapiens
  CDR3 for beta chain variable domain of TCR clone 353668 (TRBV4-1, TRBJ2-1)
CASSQAGGDEQFF

SEQ ID NO: 707337 - protein, 12 aa, Homo sapiens
  CDR3 for alpha chain variable domain of TCR clone 353669 (TRAV13-1, TRAJ42)
SVLRGSQGNLIF

SEQ ID NO: 707338 - protein, 16 aa, Homo sapiens
  CDR3 for beta chain variable domain of TCR clone 353669 (TRBV7-9, TRBJ2-1)
CASSDVAGGSYNEQFF

SEQ ID NO: 707339 - protein, 15 aa, Homo sapiens
  CDR3 for alpha chain variable domain of TCR clone 353670 (TRAV3, TRAJ7)
CAVRDKDNGNNRLAF

SEQ ID NO: 707340 - protein, 19 aa, Homo sapiens
  CDR3 for beta chain variable domain of TCR clone 353670 (TRBV5-8, TRBJ2-3)
GASSFLGTSGSHRTDTQYF

SEQ ID NO: 707341 - protein, 13 aa, Homo sapiens
  CDR3 for alpha chain variable domain of TCR clone 353671 (TRAV12-1, TRAJ37)
CVVNAGNTGKLIF

SEQ ID NO: 707342 - protein, 14 aa, Homo sapiens
  CDR3 for beta chain variable domain of TCR clone 353671 (TRBV4-2, TRBJ2-1)
CASGLDRAYNEQFF

SEQ ID NO: 707343 - protein, 14 aa, Homo sapiens
  CDR3 for alpha chain variable domain of TCR clone 353672 (TRAV13-1, TRAJ44)
CAAKATGTASKLTF

SEQ ID NO: 707344 - protein, 16 aa, Homo sapiens
  CDR3 for beta chain variable domain of TCR clone 353672 (TRBV7-9, TRBJ2-6)
CASILKGPLRANVLTF

SEQ ID NO: 707345 - protein, 14 aa, Homo sapiens
  CDR3 for alpha chain variable domain of TCR clone 353673 (TRAV1-2, TRAJ16)
CAVNRFSDGQKLLL

SEQ ID NO: 707346 - protein, 16 aa, Homo sapiens
  CDR3 for beta chain variable domain of TCR clone 353673 (TRBV19, TRBJ2-3)
CASSPEWDRGTDMQYF

SEQ ID NO: 707347 - protein, 17 aa, Homo sapiens
  CDR3 for alpha chain variable domain of TCR clone 353674 (TRAV3, TRAJ42)
CAVRDRDYAGSQGNLIF

SEQ ID NO: 707348 - protein, 15 aa, Homo sapiens
  CDR3 for beta chain variable domain of TCR clone 353674 (TRBV6-6, TRBJ2-7)
CASSYSYGGSYEQYF

SEQ ID NO: 707349 - protein, 14 aa, Homo sapiens
  CDR3 for alpha chain variable domain of TCR clone 353675 (TRAV1-2, TRAJ8)
CAVTEDTGFQQLVF

SEQ ID NO: 707350 - protein, 15 aa, Homo sapiens
  CDR3 for beta chain variable domain of TCR clone 353675 (TRBV6-3, TRBJ2-7)
CASSSPGTVFYEQYF

SEQ ID NO: 707351 - protein, 14 aa, Homo sapiens
  CDR3 for alpha chain variable domain of TCR clone 353676 (TRAV1-2, TRAJ16)
CAVNRFSDGQKLLF

SEQ ID NO: 707352 - protein, 14 aa, Homo sapiens
  CDR3 for beta chain variable domain of TCR clone 353676 (TRBV4-1, TRBJ2-2)
CASGQAVNTGELFF

SEQ ID NO: 707353 - protein, 12 aa, Homo sapiens
  CDR3 for alpha chain variable domain of TCR clone 353677 (TRAV12-3, TRAJ17)
CAMTLTGNKLTF

SEQ ID NO: 707354 - protein, 16 aa, Homo sapiens
  CDR3 for beta chain variable domain of TCR clone 353677 (TRBV7-3, TRBJ2-1)
CASSFTGRRSYNEQFF

SEQ ID NO: 707355 - protein, 16 aa, Homo sapiens
  CDR3 for alpha chain variable domain of TCR clone 353678 (TRAV30, TRAJ24)
CGTEIVDADSWGKFQF

SEQ ID NO: 707356 - protein, 16 aa, Homo sapiens
  CDR3 for beta chain variable domain of TCR clone 353678 (TRBV19, TRBJ2-7)
CASSTPGQASSYEQYF

SEQ ID NO: 707357 - protein, 14 aa, Homo sapiens
  CDR3 for alpha chain variable domain of TCR clone 353679 (TRAV1-2, TRAJ8)
CAVREDTGFQKLVF

SEQ ID NO: 707358 - protein, 16 aa, Homo sapiens
  CDR3 for beta chain variable domain of TCR clone 353679 (TRBV27, TRBJ2-2)
CAGSFRGLVRTGELFF

SEQ ID NO: 707359 - protein, 11 aa, Homo sapiens
  CDR3 for alpha chain variable domain of TCR clone 353680 (TRAV3, TRAJ21)
CAVGKFNKFYF

SEQ ID NO: 707360 - protein, 15 aa, Homo sapiens
  CDR3 for beta chain variable domain of TCR clone 353680 (TRBV5-1, TRBJ2-5)
CASSLSQGVVATQYF

SEQ ID NO: 707361 - protein, 12 aa, Homo sapiens
  CDR3 for alpha chain variable domain of TCR clone 353681 (TRAV20, TRAJ37)
CALHSNTGKLIF

SEQ ID NO: 707362 - protein, 14 aa, Homo sapiens
  CDR3 for beta chain variable domain of TCR clone 353681 (TRBV19, TRBJ2-1)
CASPTFVLSGEQFF

SEQ ID NO: 707363 - protein, 13 aa, Homo sapiens
  CDR3 for alpha chain variable domain of TCR clone 353682 (TRAV8-1, TRAJ34)
CAVRPYNPDKLIF

SEQ ID NO: 707364 - protein, 15 aa, Homo sapiens
  CDR3 for beta chain variable domain of TCR clone 353682 (TRBV7-9, TRBJ1-3)
CASSLRSGSGNTIYF

SEQ ID NO: 707365 - protein, 16 aa, Homo sapiens
  CDR3 for alpha chain variable domain of TCR clone 353683 (TRAV4, TRAJ18)
CCVLLIGGSTLGRLYF

SEQ ID NO: 707366 - protein, 15 aa, Homo sapiens
  CDR3 for beta chain variable domain of TCR clone 353683 (TRBV6-3, TRBJ2-7)
CASSSPGTVFYEQYF

SEQ ID NO: 707367 - protein, 15 aa, Homo sapiens
  CDR3 for alpha chain variable domain of TCR clone 353684 (TRAV3, TRAJ42)
CAVRGGTGSQGNLIF

SEQ ID NO: 707368 - protein, 14 aa, Homo sapiens
  CDR3 for beta chain variable domain of TCR clone 353684 (TRBV19, TRBJ1-2)
CASSSLFGRDVYTF

SEQ ID NO: 707369 - protein, 14 aa, Homo sapiens
  CDR3 for alpha chain variable domain of TCR clone 353685 (TRAV8-6, TRAJ29)
CAVSRASGNTPLVF

SEQ ID NO: 707370 - protein, 16 aa, Homo sapiens
  CDR3 for beta chain variable domain of TCR clone 353685 (TRBV19, TRBJ2-1)
CASSKAGPSSYNEQFF

SEQ ID NO: 707371 - protein, 13 aa, Homo sapiens
  CDR3 for alpha chain variable domain of TCR clone 353686 (TRAV13-1, TRAJ6)
CAARSGGSYIPTF

SEQ ID NO: 707372 - protein, 15 aa, Homo sapiens
  CDR3 for beta chain variable domain of TCR clone 353686 (TRBV12-4, TRBJ2-5)
CASSPPTGLQETQYF

SEQ ID NO: 707373 - protein, 13 aa, Homo sapiens
  CDR3 for alpha chain variable domain of TCR clone 353687 (TRAV8-4, TRAJ48)
CAVSLFGNEKLTF

SEQ ID NO: 707374 - protein, 15 aa, Homo sapiens
  CDR3 for beta chain variable domain of TCR clone 353687 (TRBV20-1, TRBJ2-7)
CSARKGRAESYEQYF

SEQ ID NO: 707375 - protein, 14 aa, Homo sapiens
  CDR3 for alpha chain variable domain of TCR clone 353688 (TRAV13-1, TRAJ9)
CAASALTGGFKTIF

SEQ ID NO: 707376 - protein, 16 aa, Homo sapiens
  CDR3 for beta chain variable domain of TCR clone 353688 (TRBV12-4, TRBJ2-3)
CASIFGTGGISDTQYF

SEQ ID NO: 707377 - protein, 12 aa, Homo sapiens
  CDR3 for alpha chain variable domain of TCR clone 353689 (TRAV16, TRAJ10)
CSRTGGGNKLTF

SEQ ID NO: 707378 - protein, 15 aa, Homo sapiens
  CDR3 for beta chain variable domain of TCR clone 353689 (TRBV6-3, TRBJ2-7)
CASSSTGTVFYEQYF

SEQ ID NO: 707379 - protein, 13 aa, Homo sapiens
  CDR3 for alpha chain variable domain of TCR clone 353690 (TRAV17, TRAJ26)
CATVDNYGQNFVF

SEQ ID NO: 707380 - protein, 14 aa, Homo sapiens
  CDR3 for beta chain variable domain of TCR clone 353690 (TRBV4-1, TRBJ2-2)
CASSQAVNTGELFF

SEQ ID NO: 707381 - protein, 10 aa, Homo sapiens
  CDR3 for alpha chain variable domain of TCR clone 353691 (TRAV23/DV6, TRAJ57)
CAASSTLSQG

SEQ ID NO: 707382 - protein, 19 aa, Homo sapiens
  CDR3 for beta chain variable domain of TCR clone 353691 (TRBV19, TRBJ2-5)
CASSIGQVTDFFLGETQYF

SEQ ID NO: 707383 - protein, 17 aa, Homo sapiens
  CDR3 for alpha chain variable domain of TCR clone 353692 (TRAV3, TRAJ6)
CAVRDGPRAGGSSIPTF

SEQ ID NO: 707384 - protein, 15 aa, Homo sapiens
  CDR3 for beta chain variable domain of TCR clone 353692 (TRBV7-8, TRBJ1-5)
CASSLERRGLEPQHF

SEQ ID NO: 707385 - protein, 16 aa, Homo sapiens
  CDR3 for alpha chain variable domain of TCR clone 353693 (TRAV30, TRAJ24)
CGTEIVDADSWGKFQC

SEQ ID NO: 707386 - protein, 15 aa, Homo sapiens
  CDR3 for beta chain variable domain of TCR clone 353693 (TRBV20-1, TRBJ2-6)
CSARDRGPGANVLTF

SEQ ID NO: 707387 - protein, 13 aa, Homo sapiens
  CDR3 for alpha chain variable domain of TCR clone 353694 (TRAV27, TRAJ6)
CAGGTRGSYIPTF

SEQ ID NO: 707388 - protein, 15 aa, Homo sapiens
  CDR3 for beta chain variable domain of TCR clone 353694 (TRBV5-5, TRBJ2-7)
CASSLAGPLSYEQYF

SEQ ID NO: 707389 - protein, 13 aa, Homo sapiens
  CDR3 for alpha chain variable domain of TCR clone 353695 (TRAV2, TRAJ15)
CAAASQAGTALIF

SEQ ID NO: 707390 - protein, 15 aa, Homo sapiens
  CDR3 for beta chain variable domain of TCR clone 353695 (TRBV27, TRBJ2-1)
CASSNGGGSSNEQFF

SEQ ID NO: 707391 - protein, 14 aa, Homo sapiens
  CDR3 for alpha chain variable domain of TCR clone 353696 (TRAV26-1, TRAJ39)
CIVRGSRAGNMLTF

SEQ ID NO: 707392 - protein, 18 aa, Homo sapiens
  CDR3 for beta chain variable domain of TCR clone 353696 (TRBV7-9, TRBJ2-7)
CASSLTTSGSRTWYEQYF

SEQ ID NO: 707393 - protein, 14 aa, Homo sapiens
  CDR3 for alpha chain variable domain of TCR clone 353697 (TRAV17, TRAJ22)
CATSPSGSARQLTF

SEQ ID NO: 707394 - protein, 15 aa, Homo sapiens
  CDR3 for beta chain variable domain of TCR clone 353697 (TRBV4-1, TRBJ2-5)
CASNQWDLYQETQYF

SEQ ID NO: 707395 - protein, 14 aa, Homo sapiens
  CDR3 for alpha chain variable domain of TCR clone 353698 (TRAV16, TRAJ15)
CALSGPQAGTALIL

SEQ ID NO: 707396 - protein, 12 aa, Homo sapiens
  CDR3 for beta chain variable domain of TCR clone 353698 (TRBV18, TRBJ2-5)
CASSPSKETQYF

SEQ ID NO: 707397 - protein, 15 aa, Homo sapiens
  CDR3 for alpha chain variable domain of TCR clone 353699 (TRAV3, TRAJ17)
CAVRDTGAAGNKLTF

SEQ ID NO: 707398 - protein, 16 aa, Homo sapiens
  CDR3 for beta chain variable domain of TCR clone 353699 (TRBV20-1, TRBJ1-2)
CSASMGQGVANYGYTF

SEQ ID NO: 707399 - protein, 21 aa, Homo sapiens
  CDR3 for alpha chain variable domain of TCR clone 353700 (TRAV6, TRAJ36)
CARQTTSSLGLERDSPLFPIS

SEQ ID NO: 707400 - protein, 17 aa, Homo sapiens
  CDR3 for beta chain variable domain of TCR clone 353700 (TRBV13, TRBJ2-3)
CASSLSRVAGGRNTQYF

SEQ ID NO: 707401 - protein, 16 aa, Homo sapiens
  CDR3 for alpha chain variable domain of TCR clone 353701 (TRAV27, TRAJ53)
CAASEGSGGSNYKLTF

SEQ ID NO: 707402 - protein, 14 aa, Homo sapiens
  CDR3 for beta chain variable domain of TCR clone 353701 (TRBV11-2, TRBJ2-7)
FASSLGNSLYEQYF

SEQ ID NO: 707403 - protein, 19 aa, Homo sapiens
  CDR3 for alpha chain variable domain of TCR clone 353702 (TRAV17, TRAJ40)
TASRAADTASYFCASKYIF

SEQ ID NO: 707404 - protein, 17 aa, Homo sapiens
  CDR3 for beta chain variable domain of TCR clone 353702 (TRBV11-2, TRBJ2-4)
CASSFLALGGARDIQYF

SEQ ID NO: 707405 - protein, 12 aa, Homo sapiens
  CDR3 for alpha chain variable domain of TCR clone 353703 (TRAV27, TRAJ9)
CAGESGGFKTIF

SEQ ID NO: 707406 - protein, 15 aa, Homo sapiens
  CDR3 for beta chain variable domain of TCR clone 353703 (TRBV28, TRBJ2-3)
CASSRLTPGTDTQYF

SEQ ID NO: 707407 - protein, 20 aa, Homo sapiens
  CDR3 for alpha chain variable domain of TCR clone 353704 (TRAV12-1, TRAJ42)
SSVIQPPTSVKGGSQGNLIF

SEQ ID NO: 707408 - protein, 18 aa, Homo sapiens
  CDR3 for beta chain variable domain of TCR clone 353704 (TRBV11-2, TRBJ2-3)
CASSLGGASRGSPNTQYF

SEQ ID NO: 707409 - protein, 23 aa, Homo sapiens
  CDR3 for alpha chain variable domain of TCR clone 353705 (TRAV12-2, TRAJ36)
SLLIRDSQPSDSATLERANNLFF

SEQ ID NO: 707410 - protein, 14 aa, Homo sapiens
  CDR3 for beta chain variable domain of TCR clone 353705 (TRBV18, TRBJ1-2)
CASSPPGQAYGYTF

SEQ ID NO: 707411 - protein, 14 aa, Homo sapiens
  CDR3 for alpha chain variable domain of TCR clone 353706 (TRAV12-2, TRAJ40)
CAVKIPSGTYKYIF

SEQ ID NO: 707412 - protein, 16 aa, Homo sapiens
  CDR3 for beta chain variable domain of TCR clone 353706 (TRBV7-3, TRBJ2-2)
CASSLKRGTLSGELFF

SEQ ID NO: 707413 - protein, 12 aa, Homo sapiens
  CDR3 for alpha chain variable domain of TCR clone 353707 (TRAV13-1, TRAJ21)
CAAKEGFNKFYF

SEQ ID NO: 707414 - protein, 14 aa, Homo sapiens
  CDR3 for beta chain variable domain of TCR clone 353707 (TRBV5-8, TRBJ2-3)
CASSLGQGTDTQYF

SEQ ID NO: 707415 - protein, 14 aa, Homo sapiens
  CDR3 for alpha chain variable domain of TCR clone 353708 (TRAV1-2, TRAJ16)
CAVNRFSDGQKLLF

SEQ ID NO: 707416 - protein, 17 aa, Homo sapiens
  CDR3 for beta chain variable domain of TCR clone 353708 (TRBV11-2, TRBJ2-1)
CASSLHPPGVEYNEQFF

SEQ ID NO: 707417 - protein, 10 aa, Homo sapiens
  CDR3 for alpha chain variable domain of TCR clone 353709 (TRAV1-2, TRAJ23)
CAVQGGKLIF

SEQ ID NO: 707418 - protein, 16 aa, Homo sapiens
  CDR3 for beta chain variable domain of TCR clone 353709 (TRBV11-2, TRBJ1-1)
CASSLRQGGEHSKAFF

SEQ ID NO: 707419 - protein, 14 aa, Homo sapiens
  CDR3 for alpha chain variable domain of TCR clone 353710 (TRAV12-3, TRAJ42)
CAMNDGGSQGNLIF

SEQ ID NO: 707420 - protein, 14 aa, Homo sapiens
  CDR3 for beta chain variable domain of TCR clone 353710 (TRBV7-2, TRBJ2-5)
CASSFTQGQETQYF

SEQ ID NO: 707421 - protein, 17 aa, Homo sapiens
  CDR3 for alpha chain variable domain of TCR clone 353711 (TRAV3, TRAJ12)
CAVRDGGRMDSSYKLIF

SEQ ID NO: 707422 - protein, 13 aa, Homo sapiens
  CDR3 for beta chain variable domain of TCR clone 353711 (TRBV5-7, TRBJ2-3)
CASSLGRTDTQYF

SEQ ID NO: 707423 - protein, 13 aa, Homo sapiens
  CDR3 for alpha chain variable domain of TCR clone 353712 (TRAV26-2, TRAJ57)
CILRPSGSEKLVF

SEQ ID NO: 707424 - protein, 12 aa, Homo sapiens
  CDR3 for beta chain variable domain of TCR clone 353712 (TRBV29-1, TRBJ2-3)
CSVTGGADTQYF

SEQ ID NO: 707425 - protein, 14 aa, Homo sapiens
  CDR3 for alpha chain variable domain of TCR clone 353713 (TRAV1-2, TRAJ8)
CAGREDTGFQKLVF

SEQ ID NO: 707426 - protein, 18 aa, Homo sapiens
  CDR3 for beta chain variable domain of TCR clone 353713 (TRBV4-1, TRBJ1-4)
CASSPRTGGAWTNEKLFF

SEQ ID NO: 707427 - protein, 15 aa, Homo sapiens
  CDR3 for alpha chain variable domain of TCR clone 353714 (TRAV12-3, TRAJ17)
CAMSHSLAAGNKLTF

SEQ ID NO: 707428 - protein, 14 aa, Homo sapiens
  CDR3 for beta chain variable domain of TCR clone 353714 (TRBV6-5, TRBJ1-3)
CASSYRSSGNTIYF

SEQ ID NO: 707429 - protein, 18 aa, Homo sapiens
  CDR3 for alpha chain variable domain of TCR clone 353715 (TRAV21, TRAJ52)
CAVRPSPAGGTSSGKLTF

SEQ ID NO: 707430 - protein, 11 aa, Homo sapiens
  CDR3 for beta chain variable domain of TCR clone 353715 (TRBV12-4, TRBJ2-3)
CASTATDTQYF

SEQ ID NO: 707431 - protein, 19 aa, Homo sapiens
  CDR3 for alpha chain variable domain of TCR clone 353716 (TRAV38-1, TRAJ53)
CAFMNHGLESGGSKYKLTF

SEQ ID NO: 707432 - protein, 13 aa, Homo sapiens
  CDR3 for beta chain variable domain of TCR clone 353716 (TRBV19, TRBJ2-7)
CASSPRQSYEQYF

SEQ ID NO: 707433 - protein, 12 aa, Homo sapiens
  CDR3 for alpha chain variable domain of TCR clone 353717 (TRAV20, TRAJ54)
FAVQEGAQKLVF

SEQ ID NO: 707434 - protein, 17 aa, Homo sapiens
  CDR3 for beta chain variable domain of TCR clone 353717 (TRBV13, TRBJ2-3)
CASSLSRVAGGRNTQYF

SEQ ID NO: 707435 - protein, 14 aa, Homo sapiens
  CDR3 for alpha chain variable domain of TCR clone 353718 (TRAV12-2, TRAJ9)
CAVNMEGGGFKTIF

SEQ ID NO: 707436 - protein, 14 aa, Homo sapiens
  CDR3 for beta chain variable domain of TCR clone 353718 (TRBV2, TRBJ2-5)
CASSEVLAQETLYF

SEQ ID NO: 707437 - protein, 13 aa, Homo sapiens
  CDR3 for alpha chain variable domain of TCR clone 353719 (TRAV26-2, TRAJ54)
CIPRVGGAQQRVF

SEQ ID NO: 707438 - protein, 16 aa, Homo sapiens
  CDR3 for beta chain variable domain of TCR clone 353719 (TRBV4-1, TRBJ1-1)
CASSSMSERPNTEAFF

SEQ ID NO: 707439 - protein, 14 aa, Homo sapiens
  CDR3 for alpha chain variable domain of TCR clone 353720 (TRAV1-2, TRAJ16)
CAVNRFSDVQKPLF

SEQ ID NO: 707440 - protein, 15 aa, Homo sapiens
  CDR3 for beta chain variable domain of TCR clone 353720 (TRBV9, TRBJ1-6)
CASSVAGTGDSPLHF

SEQ ID NO: 707441 - protein, 12 aa, Homo sapiens
  CDR3 for alpha chain variable domain of TCR clone 353721 (TRAV1-1, TRAJ20)
CAVREDDYKLSF

SEQ ID NO: 707442 - protein, 14 aa, Homo sapiens
  CDR3 for beta chain variable domain of TCR clone 353721 (TRBV12-5, TRBJ2-5)
CASGSRTHQETQYF

SEQ ID NO: 707443 - protein, 14 aa, Homo sapiens
  CDR3 for alpha chain variable domain of TCR clone 353722 (TRAV2, TRAJ37)
RSVDFTSNTGKLIF

SEQ ID NO: 707444 - protein, 15 aa, Homo sapiens
  CDR3 for beta chain variable domain of TCR clone 353722 (TRBV20-1, TRBJ1-1)
CSASRGVTGNTEAFF

SEQ ID NO: 707445 - protein, 18 aa, Homo sapiens
  CDR3 for alpha chain variable domain of TCR clone 353723 (TRAV29/DV5, TRAJ52)
CAAGFRGAGGTSYGKLTF

SEQ ID NO: 707446 - protein, 16 aa, Homo sapiens
  CDR3 for beta chain variable domain of TCR clone 353723 (TRBV15, TRBJ1-2)
CATSRGPRTGGGGYTF

SEQ ID NO: 707447 - protein, 11 aa, Homo sapiens
  CDR3 for alpha chain variable domain of TCR clone 353724 (TRAV21, TRAJ48)
CAVDGSEKLTF

SEQ ID NO: 707448 - protein, 16 aa, Homo sapiens
  CDR3 for beta chain variable domain of TCR clone 353724 (TRBV12-4, TRBJ1-5)
CASSSGPRGSNKPQHF

SEQ ID NO: 707449 - protein, 13 aa, Homo sapiens
  CDR3 for alpha chain variable domain of TCR clone 353725 (TRAV13-1, TRAJ22)
CAASRGSARQLTF

SEQ ID NO: 707450 - protein, 15 aa, Homo sapiens
  CDR3 for beta chain variable domain of TCR clone 353725 (TRBV5-1, TRBJ2-7)
CASSLNGGPAREQYF

SEQ ID NO: 707451 - protein, 18 aa, Homo sapiens
  CDR3 for alpha chain variable domain of TCR clone 353726 (TRAV26-1, TRAJ52)
CIVRGEGDGGTSYGKLTF

SEQ ID NO: 707452 - protein, 13 aa, Homo sapiens
  CDR3 for beta chain variable domain of TCR clone 353726 (TRBV7-3, TRBJ1-2)
CASSLKRGYGYTF

SEQ ID NO: 707453 - protein, 13 aa, Homo sapiens
  CDR3 for alpha chain variable domain of TCR clone 353727 (TRAV27, TRAJ6)
CAGGTRGSYIPTF

SEQ ID NO: 707454 - protein, 15 aa, Homo sapiens
  CDR3 for beta chain variable domain of TCR clone 353727 (TRBV5-6, TRBJ1-5)
CASSYGKLWDQPQHF

SEQ ID NO: 707455 - protein, 22 aa, Homo sapiens
  CDR3 for alpha chain variable domain of TCR clone 353728 (TRAV3, TRAJ38)
CAVRDCLNAGNNHIQNPDPAVY

SEQ ID NO: 707456 - protein, 12 aa, Homo sapiens
  CDR3 for beta chain variable domain of TCR clone 353728 (TRBV7-9, TRBJ2-7)
CATRTDAYEQYF

SEQ ID NO: 707457 - protein, 15 aa, Homo sapiens
  CDR3 for alpha chain variable domain of TCR clone 353729 (TRAV2, TRAJ9)
CAMEDRGTGGFKTIF

SEQ ID NO: 707458 - protein, 16 aa, Homo sapiens
  CDR3 for beta chain variable domain of TCR clone 353729 (TRBV6-1, TRBJ2-5)
CASSETLDRGAETQYF

SEQ ID NO: 707459 - protein, 11 aa, Homo sapiens
  CDR3 for alpha chain variable domain of TCR clone 353730 (TRAV2, TRAJ13)
CASGGYQKVTF

SEQ ID NO: 707460 - protein, 20 aa, Homo sapiens
  CDR3 for beta chain variable domain of TCR clone 353730 (TRBV28, TRBJ2-1)
CASSPIGRSPGLAGGNEQFF

SEQ ID NO: 707461 - protein, 16 aa, Homo sapiens
  CDR3 for alpha chain variable domain of TCR clone 353731 (TRAV30, TRAJ24)
CGTELVDADSWGKFQF

SEQ ID NO: 707462 - protein, 13 aa, Homo sapiens
  CDR3 for beta chain variable domain of TCR clone 353731 (TRBV20-1, TRBJ1-1)
CSARGGGNTGAFF

SEQ ID NO: 707463 - protein, 14 aa, Homo sapiens
  CDR3 for alpha chain variable domain of TCR clone 353732 (TRAV12-1, TRAJ13)
CVVIDSGGHQKVTF

SEQ ID NO: 707464 - protein, 17 aa, Homo sapiens
  CDR3 for beta chain variable domain of TCR clone 353732 (TRBV15, TRBJ1-5)
CATSRAPPGTRNKPQHF

SEQ ID NO: 707465 - protein, 18 aa, Homo sapiens
  CDR3 for alpha chain variable domain of TCR clone 353733 (TRAV26-1, TRAJ5)
CIVRVVPPRDTGRRGLTF

SEQ ID NO: 707466 - protein, 15 aa, Homo sapiens
  CDR3 for beta chain variable domain of TCR clone 353733 (TRBV7-9, TRBJ2-7)
CASSLPMGQANEQYF

SEQ ID NO: 707467 - protein, 19 aa, Homo sapiens
  CDR3 for alpha chain variable domain of TCR clone 353734 (TRAV29/DV5, TRAJ49)
CSVLLCSKLTVDTDNQFYF

SEQ ID NO: 707468 - protein, 17 aa, Homo sapiens
  CDR3 for beta chain variable domain of TCR clone 353734 (TRBV13, TRBJ2-3)
CASSLSRVAGGRNTQYF

SEQ ID NO: 707469 - protein, 16 aa, Homo sapiens
  CDR3 for alpha chain variable domain of TCR clone 353735 (TRAV1-1, TRAJ8)
CLLLLRGATGFQKLVF

SEQ ID NO: 707470 - protein, 15 aa, Homo sapiens
  CDR3 for beta chain variable domain of TCR clone 353735 (TRBV7-9, TRBJ1-4)
CASSRTGGFNEKLFF

SEQ ID NO: 707471 - protein, 14 aa, Homo sapiens
  CDR3 for alpha chain variable domain of TCR clone 353736 (TRAV35, TRAJ46)
CDGPQKSSGDKLTF

SEQ ID NO: 707472 - protein, 12 aa, Homo sapiens
  CDR3 for beta chain variable domain of TCR clone 353736 (TRBV19, TRBJ2-1)
CASSMQDTEQFF

SEQ ID NO: 707473 - protein, 14 aa, Homo sapiens
  CDR3 for alpha chain variable domain of TCR clone 353737 (TRAV17, TRAJ57)
CATDPQGGSEKLVF

SEQ ID NO: 707474 - protein, 14 aa, Homo sapiens
  CDR3 for beta chain variable domain of TCR clone 353737 (TRBV7-8, TRBJ2-7)
CASSPRDGVYEQYF

SEQ ID NO: 707475 - protein, 11 aa, Homo sapiens
  CDR3 for alpha chain variable domain of TCR clone 353738 (TRAV21, TRAJ39)
LLVNAGNMLTF

SEQ ID NO: 707476 - protein, 13 aa, Homo sapiens
  CDR3 for beta chain variable domain of TCR clone 353738 (TRBV20-1, TRBJ2-7)
CSATHTSGYEQYF

SEQ ID NO: 707477 - protein, 13 aa, Homo sapiens
  CDR3 for alpha chain variable domain of TCR clone 353739 (TRAV16, TRAJ34)
CITVLSHTDKLIF

SEQ ID NO: 707478 - protein, 12 aa, Homo sapiens
  CDR3 for beta chain variable domain of TCR clone 353739 (TRBV28, TRBJ2-3)
CASSLYRDTQYF

SEQ ID NO: 707479 - protein, 16 aa, Homo sapiens
  CDR3 for alpha chain variable domain of TCR clone 353740 (TRAV3, TRAJ3)
CAVRDRAKSSASKKIF

SEQ ID NO: 707480 - protein, 13 aa, Homo sapiens
  CDR3 for beta chain variable domain of TCR clone 353740 (TRBV10-3, TRBJ2-7)
CASKLAVNYEQYF

SEQ ID NO: 707481 - protein, 19 aa, Homo sapiens
  CDR3 for alpha chain variable domain of TCR clone 353741 (TRAV1-2, TRAJ26)
CLLPLCCERPDNYGQNFVF

SEQ ID NO: 707482 - protein, 12 aa, Homo sapiens
  CDR3 for beta chain variable domain of TCR clone 353741 (TRBV20-1, TRBJ2-1)
CSAQFTYNEQFF

SEQ ID NO: 707483 - protein, 11 aa, Homo sapiens
  CDR3 for alpha chain variable domain of TCR clone 353742 (TRAV3, TRAJ21)
CAVGNFNKFYF

SEQ ID NO: 707484 - protein, 14 aa, Homo sapiens
  CDR3 for beta chain variable domain of TCR clone 353742 (TRBV27, TRBJ2-5)
CASSSLKGWETQYF

SEQ ID NO: 707485 - protein, 16 aa, Homo sapiens
  CDR3 for alpha chain variable domain of TCR clone 353743 (TRAV23/DV6, TRAJ9)
CAASIGGNTGGFKTIF

SEQ ID NO: 707486 - protein, 13 aa, Homo sapiens
  CDR3 for beta chain variable domain of TCR clone 353743 (TRBV28, TRBJ2-7)
CASSNSGNYEQYF

SEQ ID NO: 707487 - protein, 17 aa, Homo sapiens
  CDR3 for alpha chain variable domain of TCR clone 353744 (TRAV3, TRAJ6)
CAVRDGPRAGGSYIPTF

SEQ ID NO: 707488 - protein, 15 aa, Homo sapiens
  CDR3 for beta chain variable domain of TCR clone 353744 (TRBV19, TRBJ2-1)
CASSIVRGEGREQFF

SEQ ID NO: 707489 - protein, 11 aa, Homo sapiens
  CDR3 for alpha chain variable domain of TCR clone 353745 (TRAV17, TRAJ9)
CATTGGFKTIF

SEQ ID NO: 707490 - protein, 15 aa, Homo sapiens
  CDR3 for beta chain variable domain of TCR clone 353745 (TRBV12-5, TRBJ2-5)
CASGSGLAGRETQYF

SEQ ID NO: 707491 - protein, 16 aa, Homo sapiens
  CDR3 for alpha chain variable domain of TCR clone 353746 (TRAV1-2, TRAJ10)
CAVRGVLTGGGNKLTF

SEQ ID NO: 707492 - protein, 15 aa, Homo sapiens
  CDR3 for beta chain variable domain of TCR clone 353746 (TRBV29-1, TRBJ2-1)
CSVGRHALFCNEQFF

SEQ ID NO: 707493 - protein, 14 aa, Homo sapiens
  CDR3 for alpha chain variable domain of TCR clone 353747 (TRAV2, TRAJ9)
CAVEDRSGGFKTIF

SEQ ID NO: 707494 - protein, 16 aa, Homo sapiens
  CDR3 for beta chain variable domain of TCR clone 353747 (TRBV28, TRBJ2-6)
CASSFRTYSGANVLTF

SEQ ID NO: 707495 - protein, 14 aa, Homo sapiens
  CDR3 for alpha chain variable domain of TCR clone 353748 (TRAV21, TRAJ35)
CAVMPIGLGMCCIA

SEQ ID NO: 707496 - protein, 12 aa, Homo sapiens
  CDR3 for beta chain variable domain of TCR clone 353748 (TRBV7-9, TRBJ2-7)
CASSIKREEQYF

SEQ ID NO: 707497 - protein, 11 aa, Homo sapiens
  CDR3 for alpha chain variable domain of TCR clone 353749 (TRAV2, TRAJ13)
CASGGYPKVTF

SEQ ID NO: 707498 - protein, 14 aa, Homo sapiens
  CDR3 for beta chain variable domain of TCR clone 353749 (TRBV7-3, TRBJ2-1)
CASSLAGGTNEQFF

SEQ ID NO: 707499 - protein, 12 aa, Homo sapiens
  CDR3 for alpha chain variable domain of TCR clone 353750 (TRAV12-3, TRAJ17)
CAMTLTGNKLTF

SEQ ID NO: 707500 - protein, 15 aa, Homo sapiens
  CDR3 for beta chain variable domain of TCR clone 353750 (TRBV9, TRBJ1-6)
CASSVAGTGDSTLHF

SEQ ID NO: 707501 - protein, 11 aa, Homo sapiens
  CDR3 for alpha chain variable domain of TCR clone 353751 (TRAV5, TRAJ3)
CGGSSASKIIF

SEQ ID NO: 707502 - protein, 17 aa, Homo sapiens
  CDR3 for beta chain variable domain of TCR clone 353751 (TRBV11-2, TRBJ2-1)
CASSLYPPGVEYNEQFF

SEQ ID NO: 707503 - protein, 11 aa, Homo sapiens
  CDR3 for alpha chain variable domain of TCR clone 353752 (TRAV12-1, TRAJ8)
CVVTGFQKLVF

SEQ ID NO: 707504 - protein, 13 aa, Homo sapiens
  CDR3 for beta chain variable domain of TCR clone 353752 (TRBV12-4, TRBJ1-2)
CASSLRQGKGYTF

SEQ ID NO: 707505 - protein, 17 aa, Homo sapiens
  CDR3 for alpha chain variable domain of TCR clone 353753 (TRAV4, TRAJ18)
CLVGERSVGSTLRRLYF

SEQ ID NO: 707506 - protein, 18 aa, Homo sapiens
  CDR3 for beta chain variable domain of TCR clone 353753 (TRBV11-2, TRBJ2-3)
CASSLGGASRGAPNTQYF

SEQ ID NO: 707507 - protein, 14 aa, Homo sapiens
  CDR3 for alpha chain variable domain of TCR clone 353754 (TRAV1-2, TRAJ16)
CAVNRFSDGQKLLF

SEQ ID NO: 707508 - protein, 15 aa, Homo sapiens
  CDR3 for beta chain variable domain of TCR clone 353754 (TRBV5-8, TRBJ1-1)
CASSCPGTSLKGAFF

SEQ ID NO: 707509 - protein, 13 aa, Homo sapiens
  CDR3 for alpha chain variable domain of TCR clone 353755 (TRAV21, TRAJ57)
CAVTQGGSEKLVF

SEQ ID NO: 707510 - protein, 12 aa, Homo sapiens
  CDR3 for beta chain variable domain of TCR clone 353755 (TRBV7-9, TRBJ2-7)
CASSFGSYEQYF

SEQ ID NO: 707511 - protein, 13 aa, Homo sapiens
  CDR3 for alpha chain variable domain of TCR clone 353756 (TRAV16, TRAJ22)
SAMLAGSARQLTF

SEQ ID NO: 707512 - protein, 15 aa, Homo sapiens
  CDR3 for beta chain variable domain of TCR clone 353756 (TRBV29-1, TRBJ2-1)
CSGRDRKSSYNEQFF

SEQ ID NO: 707513 - protein, 13 aa, Homo sapiens
  CDR3 for alpha chain variable domain of TCR clone 353757 (TRAV12-3, TRAJ13)
CAMSSGGYQKVTF

SEQ ID NO: 707514 - protein, 13 aa, Homo sapiens
  CDR3 for beta chain variable domain of TCR clone 353757 (TRBV7-2, TRBJ2-2)
CASSLAVTGELFF

SEQ ID NO: 707515 - protein, 15 aa, Homo sapiens
  CDR3 for alpha chain variable domain of TCR clone 353758 (TRAV38-2/DV8, TRAJ48)
CAYRSVGFGNEKLTF

SEQ ID NO: 707516 - protein, 16 aa, Homo sapiens
  CDR3 for beta chain variable domain of TCR clone 353758 (TRBV28, TRBJ2-7)
CASSPWVATGDLSQYF

SEQ ID NO: 707517 - protein, 12 aa, Homo sapiens
  CDR3 for alpha chain variable domain of TCR clone 353759 (TRAV2, TRAJ10)
CASTGGGNKLTF

SEQ ID NO: 707518 - protein, 14 aa, Homo sapiens
  CDR3 for beta chain variable domain of TCR clone 353759 (TRBV7-2, TRBJ2-7)
CASRSQGAAYEQYF

SEQ ID NO: 707519 - protein, 16 aa, Homo sapiens
  CDR3 for alpha chain variable domain of TCR clone 353760 (TRAV3, TRAJ37)
CAVRGKGSGNTANLIF

SEQ ID NO: 707520 - protein, 14 aa, Homo sapiens
  CDR3 for beta chain variable domain of TCR clone 353760 (TRBV7-2, TRBJ2-7)
CASSPKTSFYEQYF

SEQ ID NO: 707521 - protein, 14 aa, Homo sapiens
  CDR3 for alpha chain variable domain of TCR clone 353761 (TRAV4, TRAJ26)
CLMGPHNYGQNFVF

SEQ ID NO: 707522 - protein, 17 aa, Homo sapiens
  CDR3 for beta chain variable domain of TCR clone 353761 (TRBV24-1, TRBJ2-1)
CATSDVSTSGTYNEQFF

SEQ ID NO: 707523 - protein, 14 aa, Homo sapiens
  CDR3 for alpha chain variable domain of TCR clone 353762 (TRAV23/DV6, TRAJ13)
CAASATGGYQKVTF

SEQ ID NO: 707524 - protein, 13 aa, Homo sapiens
  CDR3 for beta chain variable domain of TCR clone 353762 (TRBV29-1, TRBJ2-1)
CSVEGGRVNEQFF

SEQ ID NO: 707525 - protein, 12 aa, Homo sapiens
  CDR3 for alpha chain variable domain of TCR clone 353763 (TRAV13-1, TRAJ21)
CAAKEGFSKFYF

SEQ ID NO: 707526 - protein, 19 aa, Homo sapiens
  CDR3 for beta chain variable domain of TCR clone 353763 (TRBV2, TRBJ2-7)
CASSDDETSGRANDYEQYF

SEQ ID NO: 707527 - protein, 13 aa, Homo sapiens
  CDR3 for alpha chain variable domain of TCR clone 353764 (TRAV35, TRAJ53)
CDGQESSNYKLTF

SEQ ID NO: 707528 - protein, 11 aa, Homo sapiens
  CDR3 for beta chain variable domain of TCR clone 353764 (TRBV29-1, TRBJ2-5)
CSEDRTGTQYF

SEQ ID NO: 707529 - protein, 18 aa, Homo sapiens
  CDR3 for alpha chain variable domain of TCR clone 353765 (TRAV12-2, )
CAVEDIQNPDPAVYQLRD

SEQ ID NO: 707530 - protein, 16 aa, Homo sapiens
  CDR3 for beta chain variable domain of TCR clone 353765 (TRBV6-5, TRBJ2-6)
CASSYPLSSGANVLTF

SEQ ID NO: 707531 - protein, 21 aa, Homo sapiens
  CDR3 for alpha chain variable domain of TCR clone 353766 (TRAV3, TRAJ10)
CAVRDMRGRRKQTHLWDRHSA

SEQ ID NO: 707532 - protein, 14 aa, Homo sapiens
  CDR3 for beta chain variable domain of TCR clone 353766 (TRBV25-1, TRBJ1-1)
CASTHLGGNTEAFF

SEQ ID NO: 707533 - protein, 14 aa, Homo sapiens
  CDR3 for alpha chain variable domain of TCR clone 353767 (TRAV29/DV5, TRAJ32)
CAAAYGGATNKLIF

SEQ ID NO: 707534 - protein, 15 aa, Homo sapiens
  CDR3 for beta chain variable domain of TCR clone 353767 (TRBV27, TRBJ2-7)
CASSTAVTGAYEQYF

SEQ ID NO: 707535 - protein, 16 aa, Homo sapiens
  CDR3 for alpha chain variable domain of TCR clone 353768 (TRAV16, TRAJ4)
CALSRMFSGGYNKLIF

SEQ ID NO: 707536 - protein, 16 aa, Homo sapiens
  CDR3 for beta chain variable domain of TCR clone 353768 (TRBV24-1, TRBJ2-3)
SATSDPGTGATDTQYF

SEQ ID NO: 707537 - protein, 15 aa, Homo sapiens
  CDR3 for alpha chain variable domain of TCR clone 353769 (TRAV3, TRAJ13)
CAVRDIGGGYQKVTF

SEQ ID NO: 707538 - protein, 12 aa, Homo sapiens
  CDR3 for beta chain variable domain of TCR clone 353769 (TRBV19, TRBJ1-5)
CASSIAQQPQHF

SEQ ID NO: 707539 - protein, 15 aa, Homo sapiens
  CDR3 for alpha chain variable domain of TCR clone 353770 (TRAV14/DV4, TRAJ12)
CAMREGWDSSYKLIF

SEQ ID NO: 707540 - protein, 12 aa, Homo sapiens
  CDR3 for beta chain variable domain of TCR clone 353770 (TRBV7-9, TRBJ2-7)
CASSFGSYEQYF

SEQ ID NO: 707541 - protein, 11 aa, Homo sapiens
  CDR3 for alpha chain variable domain of TCR clone 353771 (TRAV1-2, TRAJ20)
CAVANDYKLSF

SEQ ID NO: 707542 - protein, 17 aa, Homo sapiens
  CDR3 for beta chain variable domain of TCR clone 353771 (TRBV11-2, TRBJ2-1)
CATSLYPPGVEYNEQFF

SEQ ID NO: 707543 - protein, 16 aa, Homo sapiens
  CDR3 for alpha chain variable domain of TCR clone 353772 (TRAV1-2, TRAJ18)
CAVRVERGSTLGRLYF

SEQ ID NO: 707544 - protein, 16 aa, Homo sapiens
  CDR3 for beta chain variable domain of TCR clone 353772 (TRBV20-1, TRBJ2-7)
CSASTSGRLSSYEQYV

SEQ ID NO: 707545 - protein, 15 aa, Homo sapiens
  CDR3 for alpha chain variable domain of TCR clone 353773 (TRAV17, TRAJ28)
CATDPSGAGSYQLTF

SEQ ID NO: 707546 - protein, 15 aa, Homo sapiens
  CDR3 for beta chain variable domain of TCR clone 353773 (TRBV6-3, TRBJ2-7)
CASSSPGTVFYEQYF

SEQ ID NO: 707547 - protein, 12 aa, Homo sapiens
  CDR3 for alpha chain variable domain of TCR clone 353774 (TRAV12-2, TRAJ44)
CAVGGTASKLTL

SEQ ID NO: 707548 - protein, 14 aa, Homo sapiens
  CDR3 for beta chain variable domain of TCR clone 353774 (TRBV9, TRBJ2-2)
CASSGRERSGELFF

SEQ ID NO: 707549 - protein, 12 aa, Homo sapiens
  CDR3 for alpha chain variable domain of TCR clone 353775 (TRAV12-1, TRAJ40)
CVVYSGTYKYIF

SEQ ID NO: 707550 - protein, 15 aa, Homo sapiens
  CDR3 for beta chain variable domain of TCR clone 353775 (TRBV7-9, TRBJ1-6)
CASGSPGRGNSPLHF

SEQ ID NO: 707551 - protein, 15 aa, Homo sapiens
  CDR3 for alpha chain variable domain of TCR clone 353776 (TRAV3, TRAJ22)
CAVRDRGGPARQLTF

SEQ ID NO: 707552 - protein, 15 aa, Homo sapiens
  CDR3 for beta chain variable domain of TCR clone 353776 (TRBV7-3, TRBJ2-1)
CASSPTGGGEVEQFF

SEQ ID NO: 707553 - protein, 18 aa, Homo sapiens
  CDR3 for alpha chain variable domain of TCR clone 353777 (TRAV12-3, TRAJ52)
CAMSVGGAGGTSYGKLTF

SEQ ID NO: 707554 - protein, 15 aa, Homo sapiens
  CDR3 for beta chain variable domain of TCR clone 353777 (TRBV11-3, TRBJ2-3)
CASLKDGREGDTQYF

SEQ ID NO: 707555 - protein, 16 aa, Homo sapiens
  CDR3 for alpha chain variable domain of TCR clone 353778 (TRAV16, TRAJ4)
CALSRMFSGGYNKLIF

SEQ ID NO: 707556 - protein, 12 aa, Homo sapiens
  CDR3 for beta chain variable domain of TCR clone 353778 (TRBV11-2, TRBJ2-5)
CASSLVGETQYF

SEQ ID NO: 707557 - protein, 17 aa, Homo sapiens
  CDR3 for alpha chain variable domain of TCR clone 353779 (TRAV38-2/DV8, TRAJ38)
CAYRSARGAGNNRKLIW

SEQ ID NO: 707558 - protein, 13 aa, Homo sapiens
  CDR3 for beta chain variable domain of TCR clone 353779 (TRBV6-5, TRBJ2-1)
CASRGRVGNEQVF

SEQ ID NO: 707559 - protein, 14 aa, Homo sapiens
  CDR3 for alpha chain variable domain of TCR clone 353780 (TRAV17, TRAJ12)
CATDEKDSSYKLIF

SEQ ID NO: 707560 - protein, 16 aa, Homo sapiens
  CDR3 for beta chain variable domain of TCR clone 353780 (TRBV11-2, TRBJ2-1)
CANSPRLAGVYNEQFF

SEQ ID NO: 707561 - protein, 14 aa, Homo sapiens
  CDR3 for alpha chain variable domain of TCR clone 353781 (TRAV12-3, TRAJ42)
CAMNYGGSQGNLIF

SEQ ID NO: 707562 - protein, 16 aa, Homo sapiens
  CDR3 for beta chain variable domain of TCR clone 353781 (TRBV7-9, TRBJ2-5)
CASSFLRGGSEGTQYF

SEQ ID NO: 707563 - protein, 14 aa, Homo sapiens
  CDR3 for alpha chain variable domain of TCR clone 353782 (TRAV12-3, TRAJ41)
CAMSAGNSGYALTF

SEQ ID NO: 707564 - protein, 11 aa, Homo sapiens
  CDR3 for beta chain variable domain of TCR clone 353782 (TRBV7-2, TRBJ2-3)
CASSSSDTQYF

SEQ ID NO: 707565 - protein, 12 aa, Homo sapiens
  CDR3 for alpha chain variable domain of TCR clone 353783 (TRAV12-2, TRAJ43)
CAVNVNNNNIRF

SEQ ID NO: 707566 - protein, 14 aa, Homo sapiens
  CDR3 for beta chain variable domain of TCR clone 353783 (TRBV25-1, TRBJ2-2)
CASSELGLPGELFF

SEQ ID NO: 707567 - protein, 14 aa, Homo sapiens
  CDR3 for alpha chain variable domain of TCR clone 353784 (TRAV12-3, TRAJ56)
CAMSVNGANSKLTI

SEQ ID NO: 707568 - protein, 17 aa, Homo sapiens
  CDR3 for beta chain variable domain of TCR clone 353784 (TRBV20-1, TRBJ2-3)
CSASLLGRGGSADTQYF

SEQ ID NO: 707569 - protein, 13 aa, Homo sapiens
  CDR3 for alpha chain variable domain of TCR clone 353785 (TRAV21, TRAJ57)
CAVIEGGSENLVF

SEQ ID NO: 707570 - protein, 15 aa, Homo sapiens
  CDR3 for beta chain variable domain of TCR clone 353785 (TRBV10-3, TRBJ2-5)
CAISEFGRGQETQYF

SEQ ID NO: 707571 - protein, 13 aa, Homo sapiens
  CDR3 for alpha chain variable domain of TCR clone 353786 (TRAV23/DV6, TRAJ24)
CAASEDSWGKLLF

SEQ ID NO: 707572 - protein, 12 aa, Homo sapiens
  CDR3 for beta chain variable domain of TCR clone 353786 (TRBV5-1, TRBJ2-7)
CASSDSTYEQYF

SEQ ID NO: 707573 - protein, 16 aa, Homo sapiens
  CDR3 for alpha chain variable domain of TCR clone 353787 (TRAV27, TRAJ13)
CAGAKSDSGGYLKVTF

SEQ ID NO: 707574 - protein, 15 aa, Homo sapiens
  CDR3 for beta chain variable domain of TCR clone 353787 (TRBV29-1, TRBJ2-1)
CSVGRHALFYNEQFF

SEQ ID NO: 707575 - protein, 13 aa, Homo sapiens
  CDR3 for alpha chain variable domain of TCR clone 353788 (TRAV17, TRAJ9)
CATDYTGGFKTIF

SEQ ID NO: 707576 - protein, 13 aa, Homo sapiens
  CDR3 for beta chain variable domain of TCR clone 353788 (TRBV19, TRBJ1-1)
CASTRRGDTEAFF

SEQ ID NO: 707577 - protein, 14 aa, Homo sapiens
  CDR3 for alpha chain variable domain of TCR clone 353789 (TRAV12-2, TRAJ53)
CAVKGGGSNNKLTF

SEQ ID NO: 707578 - protein, 14 aa, Homo sapiens
  CDR3 for beta chain variable domain of TCR clone 353789 (TRBV7-7, TRBJ2-2)
CATRQDSDTGELFF

SEQ ID NO: 707579 - protein, 15 aa, Homo sapiens
  CDR3 for alpha chain variable domain of TCR clone 353790 (TRAV13-1, TRAJ17)
CAASIERAAGNKLTF

SEQ ID NO: 707580 - protein, 12 aa, Homo sapiens
  CDR3 for beta chain variable domain of TCR clone 353790 (TRBV5-7, TRBJ1-1)
CASSLGREKAFF

SEQ ID NO: 707581 - protein, 15 aa, Homo sapiens
  CDR3 for alpha chain variable domain of TCR clone 353791 (TRAV12-2, TRAJ53)
CAVNGGGGSNYKLTF

SEQ ID NO: 707582 - protein, 12 aa, Homo sapiens
  CDR3 for beta chain variable domain of TCR clone 353791 (TRBV19, TRBJ2-1)
CASSRQGAEQFF

SEQ ID NO: 707583 - protein, 14 aa, Homo sapiens
  CDR3 for alpha chain variable domain of TCR clone 353792 (TRAV12-2, TRAJ9)
CAVRGQTGGFKTIF

SEQ ID NO: 707584 - protein, 15 aa, Homo sapiens
  CDR3 for beta chain variable domain of TCR clone 353792 (TRBV7-9, TRBJ2-2)
CASGPLDTFPGELFF

SEQ ID NO: 707585 - protein, 13 aa, Homo sapiens
  CDR3 for alpha chain variable domain of TCR clone 353793 (TRAV12-3, TRAJ13)
CAMTSAGYQKVTF

SEQ ID NO: 707586 - protein, 13 aa, Homo sapiens
  CDR3 for beta chain variable domain of TCR clone 353793 (TRBV7-9, TRBJ1-2)
CASSLKQNYGYTF

SEQ ID NO: 707587 - protein, 14 aa, Homo sapiens
  CDR3 for alpha chain variable domain of TCR clone 353794 (TRAV1-2, TRAJ8)
FAVREDTGFQKLVF

SEQ ID NO: 707588 - protein, 16 aa, Homo sapiens
  CDR3 for beta chain variable domain of TCR clone 353794 (TRBV7-9, TRBJ2-1)
CASSDVAGGSYNEQFF

SEQ ID NO: 707589 - protein, 15 aa, Homo sapiens
  CDR3 for alpha chain variable domain of TCR clone 353795 (TRAV21, TRAJ53)
CATLNSGGSNYKLTF

SEQ ID NO: 707590 - protein, 15 aa, Homo sapiens
  CDR3 for beta chain variable domain of TCR clone 353795 (TRBV20-1, TRBJ2-7)
CSARDRVSGMDEHYF

SEQ ID NO: 707591 - protein, 14 aa, Homo sapiens
  CDR3 for alpha chain variable domain of TCR clone 353796 (TRAV12-3, TRAJ29)
CAMILLSGNTPLVF

SEQ ID NO: 707592 - protein, 16 aa, Homo sapiens
  CDR3 for beta chain variable domain of TCR clone 353796 (TRBV28, TRBJ2-7)
CASSSGTSGRGYEQFF

SEQ ID NO: 707593 - protein, 10 aa, Homo sapiens
  CDR3 for alpha chain variable domain of TCR clone 353797 (TRAV30, TRAJ16)
CGTGGQKLLF

SEQ ID NO: 707594 - protein, 15 aa, Homo sapiens
  CDR3 for beta chain variable domain of TCR clone 353797 (TRBV2, TRBJ2-7)
CASSEGLARSYEQCF

SEQ ID NO: 707595 - protein, 15 aa, Homo sapiens
  CDR3 for alpha chain variable domain of TCR clone 353798 (TRAV3, TRAJ13)
CAVRDIAGGYQKVTF

SEQ ID NO: 707596 - protein, 13 aa, Homo sapiens
  CDR3 for beta chain variable domain of TCR clone 353798 (TRBV2, TRBJ2-7)
CASSVGGSGEQYF

SEQ ID NO: 707597 - protein, 12 aa, Homo sapiens
  CDR3 for alpha chain variable domain of TCR clone 353799 (TRAV8-3, TRAJ20)
CAVGASDYELSF

SEQ ID NO: 707598 - protein, 16 aa, Homo sapiens
  CDR3 for beta chain variable domain of TCR clone 353799 (TRBV19, TRBJ2-2)
CDSRSPGTGATGELFF

SEQ ID NO: 707599 - protein, 12 aa, Homo sapiens
  CDR3 for alpha chain variable domain of TCR clone 353800 (TRAV2, TRAJ10)
CASTGGGNKLTF

SEQ ID NO: 707600 - protein, 14 aa, Homo sapiens
  CDR3 for beta chain variable domain of TCR clone 353800 (TRBV12-4, TRBJ1-1)
CASSLGTGGTEAFF

SEQ ID NO: 707601 - protein, 16 aa, Homo sapiens
  CDR3 for alpha chain variable domain of TCR clone 353801 (TRAV3, TRAJ37)
CAVRGKGSGNTGKLIF

SEQ ID NO: 707602 - protein, 12 aa, Homo sapiens
  CDR3 for beta chain variable domain of TCR clone 353801 (TRBV7-8, TRBJ2-7)
CASNLGDREQYF

SEQ ID NO: 707603 - protein, 13 aa, Homo sapiens
  CDR3 for alpha chain variable domain of TCR clone 353802 (TRAV12-2, TRAJ52)
CAASGTSYGKLTF

SEQ ID NO: 707604 - protein, 17 aa, Homo sapiens
  CDR3 for beta chain variable domain of TCR clone 353802 (TRBV11-2, TRBJ2-1)
CASSLYPPGVEYNEQFF

SEQ ID NO: 707605 - protein, 11 aa, Homo sapiens
  CDR3 for alpha chain variable domain of TCR clone 353803 (TRAV12-1, TRAJ21)
CVLNNFNKFYF

SEQ ID NO: 707606 - protein, 14 aa, Homo sapiens
  CDR3 for beta chain variable domain of TCR clone 353803 (TRBV15, TRBJ1-5)
CATSREQSNQPQHF

SEQ ID NO: 707607 - protein, 15 aa, Homo sapiens
  CDR3 for alpha chain variable domain of TCR clone 353804 (TRAV12-3, TRAJ6)
CAMSPASGGSYIPTF

SEQ ID NO: 707608 - protein, 14 aa, Homo sapiens
  CDR3 for beta chain variable domain of TCR clone 353804 (TRBV12-4, TRBJ1-1)
CASSLDGLNTEAFF

SEQ ID NO: 707609 - protein, 12 aa, Homo sapiens
  CDR3 for alpha chain variable domain of TCR clone 353805 (TRAV12-3, TRAJ17)
CAMTLTGNKLTF

SEQ ID NO: 707610 - protein, 14 aa, Homo sapiens
  CDR3 for beta chain variable domain of TCR clone 353805 (TRBV20-1, TRBJ2-1)
CSAQIGGSANEQLF

SEQ ID NO: 707611 - protein, 14 aa, Homo sapiens
  CDR3 for alpha chain variable domain of TCR clone 353806 (TRAV1-2, TRAJ8)
CAVREDTGFQKLVF

SEQ ID NO: 707612 - protein, 14 aa, Homo sapiens
  CDR3 for beta chain variable domain of TCR clone 353806 (TRBV20-1, TRBJ2-1)
CSAQIGGSANGQFF

SEQ ID NO: 707613 - protein, 13 aa, Homo sapiens
  CDR3 for alpha chain variable domain of TCR clone 353807 (TRAV2, TRAJ29)
CAAQNSGNTPLVF

SEQ ID NO: 707614 - protein, 15 aa, Homo sapiens
  CDR3 for beta chain variable domain of TCR clone 353807 (TRBV6-5, TRBJ1-2)
CASSYSQAFNYGYTF

SEQ ID NO: 707615 - protein, 14 aa, Homo sapiens
  CDR3 for alpha chain variable domain of TCR clone 353808 (TRAV1-2, TRAJ16)
CAVNGFSDGQKLLF

SEQ ID NO: 707616 - protein, 14 aa, Homo sapiens
  CDR3 for beta chain variable domain of TCR clone 353808 (TRBV19, TRBJ2-2)
CASSTLHRSGELFF

SEQ ID NO: 707617 - protein, 14 aa, Homo sapiens
  CDR3 for alpha chain variable domain of TCR clone 353809 (TRAV8-4, TRAJ13)
CAVTLSGGYQKVTF

SEQ ID NO: 707618 - protein, 11 aa, Homo sapiens
  CDR3 for beta chain variable domain of TCR clone 353809 (TRBV13, TRBJ2-3)
CASGNADTQYF

SEQ ID NO: 707619 - protein, 18 aa, Homo sapiens
  CDR3 for alpha chain variable domain of TCR clone 353810 (TRAV21, TRAJ52)
CAVRPFPAGGTSYGKLKF

SEQ ID NO: 707620 - protein, 15 aa, Homo sapiens
  CDR3 for beta chain variable domain of TCR clone 353810 (TRBV19, TRBJ1-1)
CASTSGQIQNTEAFF

SEQ ID NO: 707621 - protein, 14 aa, Homo sapiens
  CDR3 for alpha chain variable domain of TCR clone 353811 (TRAV12-2, TRAJ13)
CAVKKTGGYQKVTF

SEQ ID NO: 707622 - protein, 15 aa, Homo sapiens
  CDR3 for beta chain variable domain of TCR clone 353811 (TRBV7-2, TRBJ2-1)
CASSLVSGRVNEQFF

SEQ ID NO: 707623 - protein, 15 aa, Homo sapiens
  CDR3 for alpha chain variable domain of TCR clone 353812 (TRAV17, TRAJ42)
CATDHYGGSHGNPIF

SEQ ID NO: 707624 - protein, 14 aa, Homo sapiens
  CDR3 for beta chain variable domain of TCR clone 353812 (TRBV7-2, TRBJ2-7)
CASSPKTSFYEQYF

SEQ ID NO: 707625 - protein, 13 aa, Homo sapiens
  CDR3 for alpha chain variable domain of TCR clone 353813 (TRAV8-3, TRAJ28)
CAVGAVVSYQLTF

SEQ ID NO: 707626 - protein, 14 aa, Homo sapiens
  CDR3 for beta chain variable domain of TCR clone 353813 (TRBV25-1, TRBJ1-1)
CASTHLGGNTEAFF

SEQ ID NO: 707627 - protein, 12 aa, Homo sapiens
  CDR3 for alpha chain variable domain of TCR clone 353814 (TRAV22, TRAJ22)
CAPGGSARQLTF

SEQ ID NO: 707628 - protein, 14 aa, Homo sapiens
  CDR3 for beta chain variable domain of TCR clone 353814 (TRBV19, TRBJ2-5)
CASSMTGQQETQYF

SEQ ID NO: 707629 - protein, 15 aa, Homo sapiens
  CDR3 for alpha chain variable domain of TCR clone 353815 (TRAV8-4, TRAJ12)
CAVSDRGDSSYKLIF

SEQ ID NO: 707630 - protein, 14 aa, Homo sapiens
  CDR3 for beta chain variable domain of TCR clone 353815 (TRBV28, TRBJ2-5)
CASSLYRGTETQYF

SEQ ID NO: 707631 - protein, 15 aa, Homo sapiens
  CDR3 for alpha chain variable domain of TCR clone 353816 (TRAV13-2, TRAJ10)
CAENRDTGGGNKLTF

SEQ ID NO: 707632 - protein, 13 aa, Homo sapiens
  CDR3 for beta chain variable domain of TCR clone 353816 (TRBV2, TRBJ2-1)
CASTRDRNNEQFF

SEQ ID NO: 707633 - protein, 15 aa, Homo sapiens
  CDR3 for alpha chain variable domain of TCR clone 353817 (TRAV21, TRAJ24)
CAARSSTDSWGKLQF

SEQ ID NO: 707634 - protein, 16 aa, Homo sapiens
  CDR3 for beta chain variable domain of TCR clone 353817 (TRBV7-9, TRBJ1-2)
CASSLGFSSGEDGHTF

SEQ ID NO: 707635 - protein, 16 aa, Homo sapiens
  CDR3 for alpha chain variable domain of TCR clone 353818 (TRAV3, TRAJ10)
CAVIDMRAGGGNKLTF

SEQ ID NO: 707636 - protein, 15 aa, Homo sapiens
  CDR3 for beta chain variable domain of TCR clone 353818 (TRBV11-2, TRBJ1-6)
CASTGFGTAVSPLHF

SEQ ID NO: 707637 - protein, 16 aa, Homo sapiens
  CDR3 for alpha chain variable domain of TCR clone 353819 (TRAV8-2, TRAJ7)
CVVSEGPYYGNKRLAF

SEQ ID NO: 707638 - protein, 15 aa, Homo sapiens
  CDR3 for beta chain variable domain of TCR clone 353819 (TRBV27, TRBJ2-3)
CASSLGLAATDTQYF

SEQ ID NO: 707639 - protein, 13 aa, Homo sapiens
  CDR3 for alpha chain variable domain of TCR clone 353820 (TRAV38-2/DV8, TRAJ34)
CAYRNYNTDKLIL

SEQ ID NO: 707640 - protein, 15 aa, Homo sapiens
  CDR3 for beta chain variable domain of TCR clone 353820 (TRBV20-1, TRBJ2-5)
CSAEGIGGLQETQYF

SEQ ID NO: 707641 - protein, 14 aa, Homo sapiens
  CDR3 for alpha chain variable domain of TCR clone 353821 (TRAV12-2, TRAJ13)
CAVKKTGGYQKVTF

SEQ ID NO: 707642 - protein, 16 aa, Homo sapiens
  CDR3 for beta chain variable domain of TCR clone 353821 (TRBV28, TRBJ2-6)
CASSNRRGSGANVLTF

SEQ ID NO: 707643 - protein, 16 aa, Homo sapiens
  CDR3 for alpha chain variable domain of TCR clone 353822 (TRAV23/DV6, TRAJ9)
CAASMGGNTGGFKTIF

SEQ ID NO: 707644 - protein, 14 aa, Homo sapiens
  CDR3 for beta chain variable domain of TCR clone 353822 (TRBV9, TRBJ2-7)
CASSVGVGSYEQYF

SEQ ID NO: 707645 - protein, 13 aa, Homo sapiens
  CDR3 for alpha chain variable domain of TCR clone 353823 (TRAV20, TRAJ29)
CAVQAVGNTPLVF

SEQ ID NO: 707646 - protein, 16 aa, Homo sapiens
  CDR3 for beta chain variable domain of TCR clone 353823 (TRBV4-1, TRBJ1-4)
CASSQDLRRGGEKLFF

SEQ ID NO: 707647 - protein, 14 aa, Homo sapiens
  CDR3 for alpha chain variable domain of TCR clone 353824 (TRAV26-1, TRAJ49)
CIVRPSNTGNQFYF

SEQ ID NO: 707648 - protein, 15 aa, Homo sapiens
  CDR3 for beta chain variable domain of TCR clone 353824 (TRBV6-5, TRBJ2-1)
CASSYDAGAGNEQFF

SEQ ID NO: 707649 - protein, 12 aa, Homo sapiens
  CDR3 for alpha chain variable domain of TCR clone 353825 (TRAV16, TRAJ30)
CALTNGDDKIIF

SEQ ID NO: 707650 - protein, 14 aa, Homo sapiens
  CDR3 for beta chain variable domain of TCR clone 353825 (TRBV28, TRBJ2-7)
CASRPTTGAYEQYF

SEQ ID NO: 707651 - protein, 14 aa, Homo sapiens
  CDR3 for alpha chain variable domain of TCR clone 353826 (TRAV13-1, TRAJ35)
CAASKGGFGNVLHC

SEQ ID NO: 707652 - protein, 12 aa, Homo sapiens
  CDR3 for beta chain variable domain of TCR clone 353826 (TRBV7-3, TRBJ1-1)
CQQPGLGAEAFL

SEQ ID NO: 707653 - protein, 12 aa, Homo sapiens
  CDR3 for alpha chain variable domain of TCR clone 353827 (TRAV20, TRAJ39)
CAVGNAGNMLTF

SEQ ID NO: 707654 - protein, 20 aa, Homo sapiens
  CDR3 for beta chain variable domain of TCR clone 353827 (TRBV28, TRBJ2-1)
CASTPIGRSPGLAGGNEQFF

SEQ ID NO: 707655 - protein, 14 aa, Homo sapiens
  CDR3 for alpha chain variable domain of TCR clone 353828 (TRAV26-1, TRAJ38)
CIADNAGNNRKLIR

SEQ ID NO: 707656 - protein, 13 aa, Homo sapiens
  CDR3 for beta chain variable domain of TCR clone 353828 (TRBV20-1, TRBJ1-1)
CSARVGGNTEAFF

SEQ ID NO: 707657 - protein, 14 aa, Homo sapiens
  CDR3 for alpha chain variable domain of TCR clone 353829 (TRAV1-2, TRAJ16)
CAVNRFSDGQKLLF

SEQ ID NO: 707658 - protein, 13 aa, Homo sapiens
  CDR3 for beta chain variable domain of TCR clone 353829 (TRBV15, TRBJ1-6)
CATSGGLKSPLHF

SEQ ID NO: 707659 - protein, 14 aa, Homo sapiens
  CDR3 for alpha chain variable domain of TCR clone 353830 (TRAV1-2, TRAJ8)
CAVREDTGFQKLVF

SEQ ID NO: 707660 - protein, 11 aa, Homo sapiens
  CDR3 for beta chain variable domain of TCR clone 353830 (TRBV2, TRBJ1-1)
CASREGTEAFF

SEQ ID NO: 707661 - protein, 11 aa, Homo sapiens
  CDR3 for alpha chain variable domain of TCR clone 353831 (TRAV2, TRAJ13)
CASGGYQKVTF

SEQ ID NO: 707662 - protein, 15 aa, Homo sapiens
  CDR3 for beta chain variable domain of TCR clone 353831 (TRBV7-2, TRBJ2-1)
CANSSGLAGGNEQFF

SEQ ID NO: 707663 - protein, 17 aa, Homo sapiens
  CDR3 for alpha chain variable domain of TCR clone 353832 (TRAV3, TRAJ6)
CAVRDGPRAVGSYIPTF

SEQ ID NO: 707664 - protein, 14 aa, Homo sapiens
  CDR3 for beta chain variable domain of TCR clone 353832 (TRBV11-2, TRBJ2-3)
CASSRLARTDTQYF

SEQ ID NO: 707665 - protein, 14 aa, Homo sapiens
  CDR3 for alpha chain variable domain of TCR clone 353833 (TRAV1-2, TRAJ16)
CAVNRFSDGQKLLF

SEQ ID NO: 707666 - protein, 14 aa, Homo sapiens
  CDR3 for beta chain variable domain of TCR clone 353833 (TRBV12-4, TRBJ2-2)
CASNQGANTGELFF

SEQ ID NO: 707667 - protein, 17 aa, Homo sapiens
  CDR3 for alpha chain variable domain of TCR clone 353834 (TRAV27, TRAJ42)
CAERVIYYGGSQGNLIF

SEQ ID NO: 707668 - protein, 12 aa, Homo sapiens
  CDR3 for beta chain variable domain of TCR clone 353834 (TRBV7-9, TRBJ2-7)
CASSLEGYEQYF

SEQ ID NO: 707669 - protein, 14 aa, Homo sapiens
  CDR3 for alpha chain variable domain of TCR clone 353835 (TRAV12-2, TRAJ3)
CAVKGYSSASKIIF

SEQ ID NO: 707670 - protein, 14 aa, Homo sapiens
  CDR3 for beta chain variable domain of TCR clone 353835 (TRBV6-3, TRBJ1-2)
CASIEGGGSYGYTF

SEQ ID NO: 707671 - protein, 13 aa, Homo sapiens
  CDR3 for alpha chain variable domain of TCR clone 353836 (TRAV13-1, TRAJ28)
CAANEAGSYQLTY

SEQ ID NO: 707672 - protein, 15 aa, Homo sapiens
  CDR3 for beta chain variable domain of TCR clone 353836 (TRBV7-9, TRBJ1-6)
CDSSSPGRGNSPLHF

SEQ ID NO: 707673 - protein, 15 aa, Homo sapiens
  CDR3 for alpha chain variable domain of TCR clone 353837 (TRAV27, TRAJ38)
CAARRNAGNNRKLIW

SEQ ID NO: 707674 - protein, 16 aa, Homo sapiens
  CDR3 for beta chain variable domain of TCR clone 353837 (TRBV5-1, TRBJ1-1)
CASSSGGNSLNTEAFF

SEQ ID NO: 707675 - protein, 13 aa, Homo sapiens
  CDR3 for alpha chain variable domain of TCR clone 353838 (TRAV23/DV6, TRAJ22)
CAPWGGSARPLTF

SEQ ID NO: 707676 - protein, 14 aa, Homo sapiens
  CDR3 for beta chain variable domain of TCR clone 353838 (TRBV18, TRBJ2-7)
CASSPTSGGYEQYF

SEQ ID NO: 707677 - protein, 12 aa, Homo sapiens
  CDR3 for alpha chain variable domain of TCR clone 353839 (TRAV12-2, TRAJ10)
CGVTGGGNKLTF

SEQ ID NO: 707678 - protein, 16 aa, Homo sapiens
  CDR3 for beta chain variable domain of TCR clone 353839 (TRBV24-1, TRBJ2-3)
CATSDRRQDLTDTQYF

SEQ ID NO: 707679 - protein, 14 aa, Homo sapiens
  CDR3 for alpha chain variable domain of TCR clone 353840 (TRAV20, TRAJ56)
CAVQFGGANSKLTF

SEQ ID NO: 707680 - protein, 14 aa, Homo sapiens
  CDR3 for beta chain variable domain of TCR clone 353840 (TRBV20-1, TRBJ2-7)
CSAKRSRSSYEQYF

SEQ ID NO: 707681 - protein, 12 aa, Homo sapiens
  CDR3 for alpha chain variable domain of TCR clone 353841 (TRAV12-3, TRAJ17)
CAMTLTGNKLTL

SEQ ID NO: 707682 - protein, 15 aa, Homo sapiens
  CDR3 for beta chain variable domain of TCR clone 353841 (TRBV20-1, TRBJ2-7)
CSARNRVSGMDEQYF

SEQ ID NO: 707683 - protein, 14 aa, Homo sapiens
  CDR3 for alpha chain variable domain of TCR clone 353842 (TRAV2, TRAJ37)
CAVDFTSNTGKLIF

SEQ ID NO: 707684 - protein, 13 aa, Homo sapiens
  CDR3 for beta chain variable domain of TCR clone 353842 (TRBV29-1, TRBJ2-2)
CSTTGANTGELFF

SEQ ID NO: 707685 - protein, 15 aa, Homo sapiens
  CDR3 for alpha chain variable domain of TCR clone 353843 (TRAV8-3, TRAJ45)
CASSYSGGGADGLTF

SEQ ID NO: 707686 - protein, 17 aa, Homo sapiens
  CDR3 for beta chain variable domain of TCR clone 353843 (TRBV6-3, TRBJ2-1)
CASSYSSGTRGLDEQFF

SEQ ID NO: 707687 - protein, 21 aa, Homo sapiens
  CDR3 for alpha chain variable domain of TCR clone 353844 (TRAV1-1, TRAJ6)
CAVRREEATYLHLEEEPALLF

SEQ ID NO: 707688 - protein, 15 aa, Homo sapiens
  CDR3 for beta chain variable domain of TCR clone 353844 (TRBV6-6, TRBJ2-1)
CATRQGVSSYNEQFF

SEQ ID NO: 707689 - protein, 15 aa, Homo sapiens
  CDR3 for alpha chain variable domain of TCR clone 353845 (TRAV19, TRAJ9)
CALSEARTGGFKTIF

SEQ ID NO: 707690 - protein, 13 aa, Homo sapiens
  CDR3 for beta chain variable domain of TCR clone 353845 (TRBV12-4, TRBJ1-2)
CASSLRQGKGYTF

SEQ ID NO: 707691 - protein, 12 aa, Homo sapiens
  CDR3 for alpha chain variable domain of TCR clone 353846 (TRAV20, TRAJ56)
CAVTGANSKLTF

SEQ ID NO: 707692 - protein, 14 aa, Homo sapiens
  CDR3 for beta chain variable domain of TCR clone 353846 (TRBV20-1, TRBJ2-5)
CSALVPGYQETPYF

SEQ ID NO: 707693 - protein, 14 aa, Homo sapiens
  CDR3 for alpha chain variable domain of TCR clone 353847 (TRAV12-3, TRAJ21)
CAMEGHQGFNKVYF

SEQ ID NO: 707694 - protein, 16 aa, Homo sapiens
  CDR3 for beta chain variable domain of TCR clone 353847 (TRBV19, TRBJ2-1)
CASSKAGPSSYNEQFF

SEQ ID NO: 707695 - protein, 11 aa, Homo sapiens
  CDR3 for alpha chain variable domain of TCR clone 353848 (TRAV10, TRAJ20)
CVVSYVYRLQA

SEQ ID NO: 707696 - protein, 17 aa, Homo sapiens
  CDR3 for beta chain variable domain of TCR clone 353848 (TRBV20-1, TRBJ2-1)
CSAPPRLAGTRYNEQFF

SEQ ID NO: 707697 - protein, 14 aa, Homo sapiens
  CDR3 for alpha chain variable domain of TCR clone 353849 (TRAV1-2, TRAJ16)
CAVNRFSDGQKLLF

SEQ ID NO: 707698 - protein, 16 aa, Homo sapiens
  CDR3 for beta chain variable domain of TCR clone 353849 (TRBV7-2, TRBJ2-7)
CASSFPLAGGPLEQYF

SEQ ID NO: 707699 - protein, 14 aa, Homo sapiens
  CDR3 for alpha chain variable domain of TCR clone 353850 (TRAV1-1, TRAJ23)
CAAPIYNQGGKLIF

SEQ ID NO: 707700 - protein, 13 aa, Homo sapiens
  CDR3 for beta chain variable domain of TCR clone 353850 (TRBV5-1, TRBJ2-5)
CASSWEGEETQYS

SEQ ID NO: 707701 - protein, 14 aa, Homo sapiens
  CDR3 for alpha chain variable domain of TCR clone 353851 (TRAV13-1, TRAJ44)
CAAKATGTASKLTV

SEQ ID NO: 707702 - protein, 13 aa, Homo sapiens
  CDR3 for beta chain variable domain of TCR clone 353851 (TRBV5-5, TRBJ1-2)
CASSFWRGEDYTF

SEQ ID NO: 707703 - protein, 14 aa, Homo sapiens
  CDR3 for alpha chain variable domain of TCR clone 353852 (TRAV13-1, TRAJ32)
CAARGSGATNKLIF

SEQ ID NO: 707704 - protein, 15 aa, Homo sapiens
  CDR3 for beta chain variable domain of TCR clone 353852 (TRBV5-5, TRBJ1-1)
CARSLVGKDNTEAFF

SEQ ID NO: 707705 - protein, 15 aa, Homo sapiens
  CDR3 for alpha chain variable domain of TCR clone 353853 (TRAV13-1, TRAJ17)
SAASIERAAGNKLTF

SEQ ID NO: 707706 - protein, 17 aa, Homo sapiens
  CDR3 for beta chain variable domain of TCR clone 353853 (TRBV13, TRBJ2-3)
CASSLSRVAGGRNTQYF

SEQ ID NO: 707707 - protein, 14 aa, Homo sapiens
  CDR3 for alpha chain variable domain of TCR clone 353854 (TRAV12-2, TRAJ9)
CAVNMEGGGFKTIF

SEQ ID NO: 707708 - protein, 13 aa, Homo sapiens
  CDR3 for beta chain variable domain of TCR clone 353854 (TRBV24-1, TRBJ2-2)
CATSDWSTGELFF

SEQ ID NO: 707709 - protein, 11 aa, Homo sapiens
  CDR3 for alpha chain variable domain of TCR clone 353855 (TRAV2, TRAJ13)
CASGGYQEVTF

SEQ ID NO: 707710 - protein, 14 aa, Homo sapiens
  CDR3 for beta chain variable domain of TCR clone 353855 (TRBV7-3, TRBJ2-1)
CASSLAGGTNEQFF

SEQ ID NO: 707711 - protein, 17 aa, Homo sapiens
  CDR3 for alpha chain variable domain of TCR clone 353856 (TRAV38-2/DV8, TRAJ28)
CAFLTLYSGAGSFQLTF

SEQ ID NO: 707712 - protein, 14 aa, Homo sapiens
  CDR3 for beta chain variable domain of TCR clone 353856 (TRBV7-2, TRBJ2-5)
CASSLSGGGETQYF

SEQ ID NO: 707713 - protein, 14 aa, Homo sapiens
  CDR3 for alpha chain variable domain of TCR clone 353857 (TRAV35, TRAJ33)
CAGSSQDSNYQLIW

SEQ ID NO: 707714 - protein, 22 aa, Homo sapiens
  CDR3 for beta chain variable domain of TCR clone 353857 (TRBV19, TRBJ2-1)
CASSVRDRVTGTSGRIYNEQFF

SEQ ID NO: 707715 - protein, 13 aa, Homo sapiens
  CDR3 for alpha chain variable domain of TCR clone 353858 (TRAV8-4, TRAJ21)
CAVSDPGFNKFYF

SEQ ID NO: 707716 - protein, 11 aa, Homo sapiens
  CDR3 for beta chain variable domain of TCR clone 353858 (TRBV29-1, TRBJ1-1)
CSVEVGTRTFF

SEQ ID NO: 707717 - protein, 14 aa, Homo sapiens
  CDR3 for alpha chain variable domain of TCR clone 353859 (TRAV4, TRAJ32)
CLVNYGGATTKLIF

SEQ ID NO: 707718 - protein, 14 aa, Homo sapiens
  CDR3 for beta chain variable domain of TCR clone 353859 (TRBV15, TRBJ2-5)
CATSGGTRTETQYF

SEQ ID NO: 707719 - protein, 14 aa, Homo sapiens
  CDR3 for alpha chain variable domain of TCR clone 353860 (TRAV13-2, TRAJ15)
CAENPNQAGTALIF

SEQ ID NO: 707720 - protein, 16 aa, Homo sapiens
  CDR3 for beta chain variable domain of TCR clone 353860 (TRBV12-4, TRBJ1-2)
CASSPTATGKTHGYTF

SEQ ID NO: 707721 - protein, 15 aa, Homo sapiens
  CDR3 for alpha chain variable domain of TCR clone 353861 (TRAV27, TRAJ38)
CAARRNAGNNRKLIW

SEQ ID NO: 707722 - protein, 13 aa, Homo sapiens
  CDR3 for beta chain variable domain of TCR clone 353861 (TRBV15, TRBJ1-6)
CATSGGLNSPLHF

SEQ ID NO: 707723 - protein, 13 aa, Homo sapiens
  CDR3 for alpha chain variable domain of TCR clone 353862 (TRAV17, TRAJ54)
CAAGIQGAQKLVF

SEQ ID NO: 707724 - protein, 14 aa, Homo sapiens
  CDR3 for beta chain variable domain of TCR clone 353862 (TRBV11-2, TRBJ1-2)
CASSLGTANYGYSF

SEQ ID NO: 707725 - protein, 13 aa, Homo sapiens
  CDR3 for alpha chain variable domain of TCR clone 353863 (TRAV26-1, )
CIVSHRVEGFWNQ

SEQ ID NO: 707726 - protein, 14 aa, Homo sapiens
  CDR3 for beta chain variable domain of TCR clone 353863 (TRBV20-1, TRBJ2-7)
RSAWTALSSYEQYF

SEQ ID NO: 707727 - protein, 15 aa, Homo sapiens
  CDR3 for alpha chain variable domain of TCR clone 353864 (TRAV3, TRAJ29)
CAVRDINSGNTTLVF

SEQ ID NO: 707728 - protein, 16 aa, Homo sapiens
  CDR3 for beta chain variable domain of TCR clone 353864 (TRBV4-1, TRBJ2-5)
CASSQTFYGDQETQYF

SEQ ID NO: 707729 - protein, 12 aa, Homo sapiens
  CDR3 for alpha chain variable domain of TCR clone 353865 (TRAV1-1, TRAJ8)
CAGGTGFQTLVF

SEQ ID NO: 707730 - protein, 15 aa, Homo sapiens
  CDR3 for beta chain variable domain of TCR clone 353865 (TRBV7-2, TRBJ1-2)
CASSPRAGWNYGYTF

SEQ ID NO: 707731 - protein, 12 aa, Homo sapiens
  CDR3 for alpha chain variable domain of TCR clone 353866 (TRAV12-3, TRAJ20)
CAMVRGDYKLSF

SEQ ID NO: 707732 - protein, 15 aa, Homo sapiens
  CDR3 for beta chain variable domain of TCR clone 353866 (TRBV19, TRBJ2-7)
CASSIGRTFSYEQYF

SEQ ID NO: 707733 - protein, 13 aa, Homo sapiens
  CDR3 for alpha chain variable domain of TCR clone 353867 (TRAV21, TRAJ27)
CAARPGNAGNSTV

SEQ ID NO: 707734 - protein, 14 aa, Homo sapiens
  CDR3 for beta chain variable domain of TCR clone 353867 (TRBV11-2, TRBJ2-7)
CASSLGAGAYEQYF

SEQ ID NO: 707735 - protein, 14 aa, Homo sapiens
  CDR3 for alpha chain variable domain of TCR clone 353868 (TRAV12-2, TRAJ13)
CAVKKTGGYQKVTF

SEQ ID NO: 707736 - protein, 13 aa, Homo sapiens
  CDR3 for beta chain variable domain of TCR clone 353868 (TRBV12-4, TRBJ2-7)
CASSLSGVYEQYF

SEQ ID NO: 707737 - protein, 17 aa, Homo sapiens
  CDR3 for alpha chain variable domain of TCR clone 353869 (TRAV3, TRAJ12)
CAVRDGGRLDSSYKLFF

SEQ ID NO: 707738 - protein, 15 aa, Homo sapiens
  CDR3 for beta chain variable domain of TCR clone 353869 (TRBV5-1, TRBJ2-1)
CASSPPRAPYNEQFF

SEQ ID NO: 707739 - protein, 13 aa, Homo sapiens
  CDR3 for alpha chain variable domain of TCR clone 353870 (TRAV12-2, TRAJ50)
CAVIVTSYDKVIF

SEQ ID NO: 707740 - protein, 14 aa, Homo sapiens
  CDR3 for beta chain variable domain of TCR clone 353870 (TRBV7-2, TRBJ2-1)
CASSPGTFYNEQFF

SEQ ID NO: 707741 - protein, 15 aa, Homo sapiens
  CDR3 for alpha chain variable domain of TCR clone 353871 (TRAV26-1, TRAJ29)
CIVRVEGSGNTPLVF

SEQ ID NO: 707742 - protein, 14 aa, Homo sapiens
  CDR3 for beta chain variable domain of TCR clone 353871 (TRBV19, TRBJ2-1)
CAIPTFVLSGEQFF

SEQ ID NO: 707743 - protein, 14 aa, Homo sapiens
  CDR3 for alpha chain variable domain of TCR clone 353872 (TRAV8-4, TRAJ5)
CAVSTDTGRRALTF

SEQ ID NO: 707744 - protein, 14 aa, Homo sapiens
  CDR3 for beta chain variable domain of TCR clone 353872 (TRBV20-1, TRBJ2-2)
CSAPDTANTGELFF

SEQ ID NO: 707745 - protein, 14 aa, Homo sapiens
  CDR3 for alpha chain variable domain of TCR clone 353873 (TRAV13-1, TRAJ35)
CAASKGGFGNLLHC

SEQ ID NO: 707746 - protein, 13 aa, Homo sapiens
  CDR3 for beta chain variable domain of TCR clone 353873 (TRBV7-3, TRBJ1-1)
CASSQDWGAEAFF

SEQ ID NO: 707747 - protein, 13 aa, Homo sapiens
  CDR3 for alpha chain variable domain of TCR clone 353874 (TRAV29/DV5, TRAJ31)
CAASRNNNARLMF

SEQ ID NO: 707748 - protein, 14 aa, Homo sapiens
  CDR3 for beta chain variable domain of TCR clone 353874 (TRBV25-1, TRBJ1-1)
CASTHLRGNTEAFF

SEQ ID NO: 707749 - protein, 20 aa, Homo sapiens
  CDR3 for alpha chain variable domain of TCR clone 353875 (TRAV21, TRAJ26)
SLVTQPPTSVLWGSGQNFVF

SEQ ID NO: 707750 - protein, 14 aa, Homo sapiens
  CDR3 for beta chain variable domain of TCR clone 353875 (TRBV7-2, TRBJ2-7)
CASSGLAGRGEQYF

SEQ ID NO: 707751 - protein, 14 aa, Homo sapiens
  CDR3 for alpha chain variable domain of TCR clone 353876 (TRAV8-4, TRAJ13)
CAVTLSGGYQKVTF

SEQ ID NO: 707752 - protein, 15 aa, Homo sapiens
  CDR3 for beta chain variable domain of TCR clone 353876 (TRBV5-1, TRBJ2-7)
CASSLNGGPAREQYF

SEQ ID NO: 707753 - protein, 10 aa, Homo sapiens
  CDR3 for alpha chain variable domain of TCR clone 353877 (TRAV12-3, TRAJ49)
CAMNDDQFYF

SEQ ID NO: 707754 - protein, 15 aa, Homo sapiens
  CDR3 for beta chain variable domain of TCR clone 353877 (TRBV7-2, TRBJ2-1)
CASSSGLAGGNEQFF

SEQ ID NO: 707755 - protein, 15 aa, Homo sapiens
  CDR3 for alpha chain variable domain of TCR clone 353878 (TRAV3, TRAJ30)
CAVRDEYGRDDKIIF

SEQ ID NO: 707756 - protein, 16 aa, Homo sapiens
  CDR3 for beta chain variable domain of TCR clone 353878 (TRBV5-1, TRBJ2-5)
CASSWASHRGRETQYF

SEQ ID NO: 707757 - protein, 16 aa, Homo sapiens
  CDR3 for alpha chain variable domain of TCR clone 353879 (TRAV35, TRAJ28)
CAGQRYSGAGSYQLTF

SEQ ID NO: 707758 - protein, 18 aa, Homo sapiens
  CDR3 for beta chain variable domain of TCR clone 353879 (TRBV7-6, TRBJ2-1)
CASSPRTSGMSSYNEQFF

SEQ ID NO: 707759 - protein, 14 aa, Homo sapiens
  CDR3 for alpha chain variable domain of TCR clone 353880 (TRAV12-2, TRAJ13)
CAVQKTGGYQQVTF

SEQ ID NO: 707760 - protein, 15 aa, Homo sapiens
  CDR3 for beta chain variable domain of TCR clone 353880 (TRBV27, TRBJ2-1)
CASSNGGGSSNEQFF

SEQ ID NO: 707761 - protein, 14 aa, Homo sapiens
  CDR3 for alpha chain variable domain of TCR clone 353881 (TRAV2, TRAJ9)
CAVEDRSGGFETIF

SEQ ID NO: 707762 - protein, 13 aa, Homo sapiens
  CDR3 for beta chain variable domain of TCR clone 353881 (TRBV7-9, TRBJ1-2)
CAGSLKQNYGYTF

SEQ ID NO: 707763 - protein, 15 aa, Homo sapiens
  CDR3 for alpha chain variable domain of TCR clone 353882 (TRAV3, TRAJ20)
CAVRDSRSNDFKLSF

SEQ ID NO: 707764 - protein, 14 aa, Homo sapiens
  CDR3 for beta chain variable domain of TCR clone 353882 (TRBV20-1, TRBJ2-7)
CSARRGNGIYEQYF

SEQ ID NO: 707765 - protein, 15 aa, Homo sapiens
  CDR3 for alpha chain variable domain of TCR clone 353883 (TRAV3, TRAJ3)
CAVRDGHRSASKITF

SEQ ID NO: 707766 - protein, 14 aa, Homo sapiens
  CDR3 for beta chain variable domain of TCR clone 353883 (TRBV28, TRBJ1-4)
CASSFGTFDEKLFF

SEQ ID NO: 707767 - protein, 17 aa, Homo sapiens
  CDR3 for alpha chain variable domain of TCR clone 353884 (TRAV3, TRAJ12)
CAVRDGGRMDSSSKLIF

SEQ ID NO: 707768 - protein, 13 aa, Homo sapiens
  CDR3 for beta chain variable domain of TCR clone 353884 (TRBV20-1, TRBJ1-1)
CSAPLGGGTEAFF

SEQ ID NO: 707769 - protein, 12 aa, Homo sapiens
  CDR3 for alpha chain variable domain of TCR clone 353885 (TRAV20, TRAJ39)
CAVGNACNMLTF

SEQ ID NO: 707770 - protein, 16 aa, Homo sapiens
  CDR3 for beta chain variable domain of TCR clone 353885 (TRBV15, TRBJ1-2)
CATSRGPRTGGGGYTF

SEQ ID NO: 707771 - protein, 18 aa, Homo sapiens
  CDR3 for alpha chain variable domain of TCR clone 353886 (TRAV3, TRAJ32)
CAVRDIRGYGGATNKLIF

SEQ ID NO: 707772 - protein, 12 aa, Homo sapiens
  CDR3 for beta chain variable domain of TCR clone 353886 (TRBV11-2, TRBJ2-1)
CASSPGNNEQFF

SEQ ID NO: 707773 - protein, 13 aa, Homo sapiens
  CDR3 for alpha chain variable domain of TCR clone 353887 (TRAV13-2, TRAJ13)
CAERPGGYQKVTF

SEQ ID NO: 707774 - protein, 15 aa, Homo sapiens
  CDR3 for beta chain variable domain of TCR clone 353887 (TRBV4-1, TRBJ1-4)
CASSDTGGANEKLFF

SEQ ID NO: 707775 - protein, 14 aa, Homo sapiens
  CDR3 for alpha chain variable domain of TCR clone 353888 (TRAV8-6, TRAJ27)
CAVSARTNAGKSTF

SEQ ID NO: 707776 - protein, 14 aa, Homo sapiens
  CDR3 for beta chain variable domain of TCR clone 353888 (TRBV6-1, TRBJ2-7)
CASNRARPDYEQYF

SEQ ID NO: 707777 - protein, 14 aa, Homo sapiens
  CDR3 for alpha chain variable domain of TCR clone 353889 (TRAV12-3, TRAJ9)
CAMSPNTGGTKTIF

SEQ ID NO: 707778 - protein, 12 aa, Homo sapiens
  CDR3 for beta chain variable domain of TCR clone 353889 (TRBV19, TRBJ1-5)
CASSIAQQPQHF

SEQ ID NO: 707779 - protein, 17 aa, Homo sapiens
  CDR3 for alpha chain variable domain of TCR clone 353890 (TRAV3, TRAJ38)
CAVRDCPNAGNNRKLIW

SEQ ID NO: 707780 - protein, 13 aa, Homo sapiens
  CDR3 for beta chain variable domain of TCR clone 353890 (TRBV23-1, TRBJ1-4)
CASRGKFNEELFF

SEQ ID NO: 707781 - protein, 16 aa, Homo sapiens
  CDR3 for alpha chain variable domain of TCR clone 353891 (TRAV12-2, TRAJ32)
CAVNLGQGGATNKLIF

SEQ ID NO: 707782 - protein, 14 aa, Homo sapiens
  CDR3 for beta chain variable domain of TCR clone 353891 (TRBV19, TRBJ2-1)
CASPTFVLSGEQFF

SEQ ID NO: 707783 - protein, 17 aa, Homo sapiens
  CDR3 for alpha chain variable domain of TCR clone 353892 (TRAV12-2, TRAJ52)
CAVNPYAGGTSYGKLTF

SEQ ID NO: 707784 - protein, 15 aa, Homo sapiens
  CDR3 for beta chain variable domain of TCR clone 353892 (TRBV19, TRBJ1-1)
CASTSGQIQNTEAFF

SEQ ID NO: 707785 - protein, 13 aa, Homo sapiens
  CDR3 for alpha chain variable domain of TCR clone 353893 (TRAV30, TRAJ49)
CGTESQPVTSSIL

SEQ ID NO: 707786 - protein, 18 aa, Homo sapiens
  CDR3 for beta chain variable domain of TCR clone 353893 (TRBV11-2, TRBJ2-3)
CASSLGGASRGAPNTQYF

SEQ ID NO: 707787 - protein, 18 aa, Homo sapiens
  CDR3 for alpha chain variable domain of TCR clone 353894 (TRAV21, TRAJ13)
CAVPRSFWGLPESYLGNW

SEQ ID NO: 707788 - protein, 14 aa, Homo sapiens
  CDR3 for beta chain variable domain of TCR clone 353894 (TRBV19, TRBJ2-1)
CASPTFVLSGEQFF

SEQ ID NO: 707789 - protein, 12 aa, Homo sapiens
  CDR3 for alpha chain variable domain of TCR clone 353895 (TRAV12-2, TRAJ52)
IGGGTSYGKLTF

SEQ ID NO: 707790 - protein, 15 aa, Homo sapiens
  CDR3 for beta chain variable domain of TCR clone 353895 (TRBV10-3, TRBJ2-1)
CAIRNGTSGHNEQFF

SEQ ID NO: 707791 - protein, 17 aa, Homo sapiens
  CDR3 for alpha chain variable domain of TCR clone 353896 (TRAV13-1, TRAJ52)
CAASSGAGGTSYGKLTF

SEQ ID NO: 707792 - protein, 15 aa, Homo sapiens
  CDR3 for beta chain variable domain of TCR clone 353896 (TRBV2, TRBJ2-1)
CASSELAGSYNEKFY

SEQ ID NO: 707793 - protein, 12 aa, Homo sapiens
  CDR3 for alpha chain variable domain of TCR clone 353897 (TRAV3, TRAJ43)
CAVRDPNNDMRF

SEQ ID NO: 707794 - protein, 11 aa, Homo sapiens
  CDR3 for beta chain variable domain of TCR clone 353897 (TRBV27, TRBJ2-3)
CASSLGDTQYF

SEQ ID NO: 707795 - protein, 19 aa, Homo sapiens
  CDR3 for alpha chain variable domain of TCR clone 353898 (TRAV26-1, TRAJ52)
CIVRVANNAGGTSYGNLTF

SEQ ID NO: 707796 - protein, 13 aa, Homo sapiens
  CDR3 for beta chain variable domain of TCR clone 353898 (TRBV13, TRBJ2-5)
CASSPEVGETQYF

SEQ ID NO: 707797 - protein, 12 aa, Homo sapiens
  CDR3 for alpha chain variable domain of TCR clone 353899 (TRAV8-3, TRAJ6)
CAVAGVRYIPTF

SEQ ID NO: 707798 - protein, 14 aa, Homo sapiens
  CDR3 for beta chain variable domain of TCR clone 353899 (TRBV27, TRBJ2-7)
CASATGTERREQYF

SEQ ID NO: 707799 - protein, 13 aa, Homo sapiens
  CDR3 for alpha chain variable domain of TCR clone 353900 (TRAV2, TRAJ29)
CAAGNSGNTLLVF

SEQ ID NO: 707800 - protein, 16 aa, Homo sapiens
  CDR3 for beta chain variable domain of TCR clone 353900 (TRBV7-9, TRBJ1-2)
CASSPGGGAINYGYTF

SEQ ID NO: 707801 - protein, 13 aa, Homo sapiens
  CDR3 for alpha chain variable domain of TCR clone 353901 (TRAV38-2/DV8, TRAJ34)
CAYRNYNTDKLIF

SEQ ID NO: 707802 - protein, 15 aa, Homo sapiens
  CDR3 for beta chain variable domain of TCR clone 353901 (TRBV20-1, TRBJ2-5)
YSAEGPGGLQETQYF

SEQ ID NO: 707803 - protein, 14 aa, Homo sapiens
  CDR3 for alpha chain variable domain of TCR clone 353902 (TRAV38-1, TRAJ29)
CAFITPSGNTPLVF

SEQ ID NO: 707804 - protein, 14 aa, Homo sapiens
  CDR3 for beta chain variable domain of TCR clone 353902 (TRBV18, TRBJ2-7)
CASWPRGGAYEQYF

SEQ ID NO: 707805 - protein, 15 aa, Homo sapiens
  CDR3 for alpha chain variable domain of TCR clone 353903 (TRAV3, TRAJ47)
CAVRDIGEYGNKVVF

SEQ ID NO: 707806 - protein, 14 aa, Homo sapiens
  CDR3 for beta chain variable domain of TCR clone 353903 (TRBV13, TRBJ2-5)
CASSLERVGETQYF

SEQ ID NO: 707807 - protein, 14 aa, Homo sapiens
  CDR3 for alpha chain variable domain of TCR clone 353904 (TRAV1-2, TRAJ8)
CAVREDTGFQKLVF

SEQ ID NO: 707808 - protein, 15 aa, Homo sapiens
  CDR3 for beta chain variable domain of TCR clone 353904 (TRBV6-1, TRBJ1-2)
CASNPGRGGSYGYTF

SEQ ID NO: 707809 - protein, 12 aa, Homo sapiens
  CDR3 for alpha chain variable domain of TCR clone 353905 (TRAV2, TRAJ9)
CAVGSGGFKTIF

SEQ ID NO: 707810 - protein, 16 aa, Homo sapiens
  CDR3 for beta chain variable domain of TCR clone 353905 (TRBV13, TRBJ2-2)
CASSPRTGEHTGELYF

SEQ ID NO: 707811 - protein, 14 aa, Homo sapiens
  CDR3 for alpha chain variable domain of TCR clone 353906 (TRAV17, TRAJ54)
CATDANQGAQKLVF

SEQ ID NO: 707812 - protein, 12 aa, Homo sapiens
  CDR3 for beta chain variable domain of TCR clone 353906 (TRBV6-3, TRBJ2-1)
CASSGSYNGQFF

SEQ ID NO: 707813 - protein, 16 aa, Homo sapiens
  CDR3 for alpha chain variable domain of TCR clone 353907 (TRAV20, TRAJ4)
CAVRPMFSGGYNKLIF

SEQ ID NO: 707814 - protein, 16 aa, Homo sapiens
  CDR3 for beta chain variable domain of TCR clone 353907 (TRBV12-5, TRBJ2-5)
CASGPRTSGNQETQYF

SEQ ID NO: 707815 - protein, 16 aa, Homo sapiens
  CDR3 for alpha chain variable domain of TCR clone 353908 (TRAV8-1, TRAJ39)
CAVNVPLYNAGNMLTF

SEQ ID NO: 707816 - protein, 15 aa, Homo sapiens
  CDR3 for beta chain variable domain of TCR clone 353908 (TRBV4-1, TRBJ2-3)
CASRSTRAGTDTQYF

SEQ ID NO: 707817 - protein, 13 aa, Homo sapiens
  CDR3 for alpha chain variable domain of TCR clone 353909 (TRAV8-3, TRAJ48)
CAVVPFGNEKLTF

SEQ ID NO: 707818 - protein, 19 aa, Homo sapiens
  CDR3 for beta chain variable domain of TCR clone 353909 (TRBV18, TRBJ2-7)
CASSPRGGGLRAVLRAGHQ

SEQ ID NO: 707819 - protein, 17 aa, Homo sapiens
  CDR3 for alpha chain variable domain of TCR clone 353910 (TRAV1-1, TRAJ28)
FAVDPAYSGAGSYQLTF

SEQ ID NO: 707820 - protein, 14 aa, Homo sapiens
  CDR3 for beta chain variable domain of TCR clone 353910 (TRBV19, TRBJ2-1)
CASPTFVLSGEQFF

SEQ ID NO: 707821 - protein, 13 aa, Homo sapiens
  CDR3 for alpha chain variable domain of TCR clone 353911 (TRAV21, TRAJ20)
CAVSRLGDYKRSF

SEQ ID NO: 707822 - protein, 13 aa, Homo sapiens
  CDR3 for beta chain variable domain of TCR clone 353911 (TRBV7-3, TRBJ1-1)
CASSPAGGLEAFF

SEQ ID NO: 707823 - protein, 11 aa, Homo sapiens
  CDR3 for alpha chain variable domain of TCR clone 353912 (TRAV23/DV6, TRAJ47)
CAAGYGNKLVF

SEQ ID NO: 707824 - protein, 12 aa, Homo sapiens
  CDR3 for beta chain variable domain of TCR clone 353912 (TRBV11-2, TRBJ2-2)
CASSLGGGELFF

SEQ ID NO: 707825 - protein, 13 aa, Homo sapiens
  CDR3 for alpha chain variable domain of TCR clone 353913 (TRAV2, TRAJ15)
CAVASQAGTALIL

SEQ ID NO: 707826 - protein, 14 aa, Homo sapiens
  CDR3 for beta chain variable domain of TCR clone 353913 (TRBV5-1, TRBJ2-7)
CASSRGESLYEQYF

SEQ ID NO: 707827 - protein, 17 aa, Homo sapiens
  CDR3 for alpha chain variable domain of TCR clone 353914 (TRAV3, TRAJ6)
CAVRDGPRAGGSYIPTF

SEQ ID NO: 707828 - protein, 15 aa, Homo sapiens
  CDR3 for beta chain variable domain of TCR clone 353914 (TRBV6-1, TRBJ2-5)
CASSEFPLMGETQYF

SEQ ID NO: 707829 - protein, 18 aa, Homo sapiens
  CDR3 for alpha chain variable domain of TCR clone 353915 (TRAV8-3, TRAJ6)
CAVGAEHQEEATYLHLEE

SEQ ID NO: 707830 - protein, 14 aa, Homo sapiens
  CDR3 for beta chain variable domain of TCR clone 353915 (TRBV6-6, TRBJ2-7)
CASSDSGAGYEQNF

SEQ ID NO: 707831 - protein, 16 aa, Homo sapiens
  CDR3 for alpha chain variable domain of TCR clone 353916 (TRAV30, TRAJ24)
CGTEIVDADSWGKFQF

SEQ ID NO: 707832 - protein, 14 aa, Homo sapiens
  CDR3 for beta chain variable domain of TCR clone 353916 (TRBV7-9, TRBJ1-2)
CASSRQGTNYGYTF

SEQ ID NO: 707833 - protein, 16 aa, Homo sapiens
  CDR3 for alpha chain variable domain of TCR clone 353917 (TRAV30, TRAJ24)
CGTEIVGADSWGKFQF

SEQ ID NO: 707834 - protein, 15 aa, Homo sapiens
  CDR3 for beta chain variable domain of TCR clone 353917 (TRBV5-1, TRBJ1-1)
CASSSTTGTNTEAFF

SEQ ID NO: 707835 - protein, 12 aa, Homo sapiens
  CDR3 for alpha chain variable domain of TCR clone 353918 (TRAV16, TRAJ26)
CALRGYGQNFVF

SEQ ID NO: 707836 - protein, 14 aa, Homo sapiens
  CDR3 for beta chain variable domain of TCR clone 353918 (TRBV10-3, TRBJ2-1)
CGISSDLAYNEQFF

SEQ ID NO: 707837 - protein, 13 aa, Homo sapiens
  CDR3 for alpha chain variable domain of TCR clone 353919 (TRAV8-3, TRAJ43)
CAVVPYNNNDMRF

SEQ ID NO: 707838 - protein, 16 aa, Homo sapiens
  CDR3 for beta chain variable domain of TCR clone 353919 (TRBV20-1, TRBJ1-4)
CSAPGQGLLTNEKLFF

SEQ ID NO: 707839 - protein, 13 aa, Homo sapiens
  CDR3 for alpha chain variable domain of TCR clone 353920 (TRAV2, TRAJ40)
CAVVTSRTYKYIF

SEQ ID NO: 707840 - protein, 17 aa, Homo sapiens
  CDR3 for beta chain variable domain of TCR clone 353920 (TRBV11-2, TRBJ2-1)
CASSLYPPGVEYNEQFF

SEQ ID NO: 707841 - protein, 23 aa, Homo sapiens
  CDR3 for alpha chain variable domain of TCR clone 353921 (TRAV12-2, TRAJ36)
SLLIRDSQPSDSATLERANNLFF

SEQ ID NO: 707842 - protein, 16 aa, Homo sapiens
  CDR3 for beta chain variable domain of TCR clone 353921 (TRBV20-1, TRBJ2-2)
CSARSAGGLGTGELFF

SEQ ID NO: 707843 - protein, 16 aa, Homo sapiens
  CDR3 for alpha chain variable domain of TCR clone 353922 (TRAV8-4, TRAJ9)
CAVTFNTGGLKNYLWS

SEQ ID NO: 707844 - protein, 15 aa, Homo sapiens
  CDR3 for beta chain variable domain of TCR clone 353922 (TRBV7-9, TRBJ2-2)
CASSPETGAGGELFF

SEQ ID NO: 707845 - protein, 12 aa, Homo sapiens
  CDR3 for alpha chain variable domain of TCR clone 353923 (TRAV12-3, TRAJ5)
CAMDTGRRALTF

SEQ ID NO: 707846 - protein, 14 aa, Homo sapiens
  CDR3 for beta chain variable domain of TCR clone 353923 (TRBV20-1, TRBJ2-1)
CSAQIGGSTNEQFF

SEQ ID NO: 707847 - protein, 16 aa, Homo sapiens
  CDR3 for alpha chain variable domain of TCR clone 353924 (TRAV3, TRAJ37)
CAVRPHGSGNTGKLIF

SEQ ID NO: 707848 - protein, 15 aa, Homo sapiens
  CDR3 for beta chain variable domain of TCR clone 353924 (TRBV7-6, TRBJ2-1)
CASSSLAGEGNEQFF

SEQ ID NO: 707849 - protein, 14 aa, Homo sapiens
  CDR3 for alpha chain variable domain of TCR clone 353925 (TRAV12-2, TRAJ13)
CAVKKTGGSQKVTF

SEQ ID NO: 707850 - protein, 15 aa, Homo sapiens
  CDR3 for beta chain variable domain of TCR clone 353925 (TRBV4-1, TRBJ1-4)
CASSDTGGTNEKLFF

SEQ ID NO: 707851 - protein, 15 aa, Homo sapiens
  CDR3 for alpha chain variable domain of TCR clone 353926 (TRAV17, TRAJ57)
CATGPSQGGSEKLVF

SEQ ID NO: 707852 - protein, 13 aa, Homo sapiens
  CDR3 for beta chain variable domain of TCR clone 353926 (TRBV11-2, TRBJ2-5)
CASSSTGEETQYV

SEQ ID NO: 707853 - protein, 15 aa, Homo sapiens
  CDR3 for alpha chain variable domain of TCR clone 353927 (TRAV8-3, TRAJ45)
CASSYSGGGAEDSPL

SEQ ID NO: 707854 - protein, 15 aa, Homo sapiens
  CDR3 for beta chain variable domain of TCR clone 353927 (TRBV27, TRBJ1-4)
CASSPRHATNEKLFF

SEQ ID NO: 707855 - protein, 14 aa, Homo sapiens
  CDR3 for alpha chain variable domain of TCR clone 353928 (TRAV8-3, TRAJ44)
CAVGNTGTARKLTF

SEQ ID NO: 707856 - protein, 15 aa, Homo sapiens
  CDR3 for beta chain variable domain of TCR clone 353928 (TRBV28, TRBJ2-7)
CASSFRGQGRYEQYF

SEQ ID NO: 707857 - protein, 14 aa, Homo sapiens
  CDR3 for alpha chain variable domain of TCR clone 353929 (TRAV12-2, TRAJ45)
CAVNIGGGAVGLTF

SEQ ID NO: 707858 - protein, 17 aa, Homo sapiens
  CDR3 for beta chain variable domain of TCR clone 353929 (TRBV7-8, TRBJ2-6)
CASSAGTGGAGANVLTF

SEQ ID NO: 707859 - protein, 15 aa, Homo sapiens
  CDR3 for alpha chain variable domain of TCR clone 353930 (TRAV3, TRAJ3)
CAVRDRDSSASKIIF

SEQ ID NO: 707860 - protein, 15 aa, Homo sapiens
  CDR3 for beta chain variable domain of TCR clone 353930 (TRBV20-1, TRBJ2-7)
CSARDRVSGMDEQYF

SEQ ID NO: 707861 - protein, 15 aa, Homo sapiens
  CDR3 for alpha chain variable domain of TCR clone 353931 (TRAV3, TRAJ22)
CAVRDRGGSGRPLTF

SEQ ID NO: 707862 - protein, 13 aa, Homo sapiens
  CDR3 for beta chain variable domain of TCR clone 353931 (TRBV2, TRBJ1-5)
CATAGPGNQPQHF

SEQ ID NO: 707863 - protein, 11 aa, Homo sapiens
  CDR3 for alpha chain variable domain of TCR clone 353932 (TRAV2, TRAJ33)
CAVDSNYQLIW

SEQ ID NO: 707864 - protein, 19 aa, Homo sapiens
  CDR3 for beta chain variable domain of TCR clone 353932 (TRBV28, TRBJ2-4)
CASSFQPGGPAHSKNIQYF

SEQ ID NO: 707865 - protein, 11 aa, Homo sapiens
  CDR3 for alpha chain variable domain of TCR clone 353933 (TRAV27, TRAJ45)
CAGAQEEVLTD

SEQ ID NO: 707866 - protein, 14 aa, Homo sapiens
  CDR3 for beta chain variable domain of TCR clone 353933 (TRBV7-2, TRBJ2-7)
CASSPKTSFYEQYF

SEQ ID NO: 707867 - protein, 18 aa, Homo sapiens
  CDR3 for alpha chain variable domain of TCR clone 353934 (TRAV21, TRAJ52)
CAVRPSPAGGTSYGKLTF

SEQ ID NO: 707868 - protein, 15 aa, Homo sapiens
  CDR3 for beta chain variable domain of TCR clone 353934 (TRBV7-8, TRBJ2-1)
CASSLAGGLYNEQFF

SEQ ID NO: 707869 - protein, 12 aa, Homo sapiens
  CDR3 for alpha chain variable domain of TCR clone 353935 (TRAV13-1, TRAJ21)
CAAKEGLNQFYF

SEQ ID NO: 707870 - protein, 15 aa, Homo sapiens
  CDR3 for beta chain variable domain of TCR clone 353935 (TRBV7-9, TRBJ1-6)
CASSSPGRGNSPLHF

SEQ ID NO: 707871 - protein, 12 aa, Homo sapiens
  CDR3 for alpha chain variable domain of TCR clone 353936 (TRAV1-1, TRAJ8)
CARGTGFQKLVF

SEQ ID NO: 707872 - protein, 13 aa, Homo sapiens
  CDR3 for beta chain variable domain of TCR clone 353936 (TRBV7-3, TRBJ1-1)
CASSQDWGAEAFF

SEQ ID NO: 707873 - protein, 13 aa, Homo sapiens
  CDR3 for alpha chain variable domain of TCR clone 353937 (TRAV12-1, TRAJ11)
CVVNRAGYSTLTF

SEQ ID NO: 707874 - protein, 15 aa, Homo sapiens
  CDR3 for beta chain variable domain of TCR clone 353937 (TRBV5-1, TRBJ2-5)
CASSFKGGDQETQYF

SEQ ID NO: 707875 - protein, 15 aa, Homo sapiens
  CDR3 for alpha chain variable domain of TCR clone 353938 (TRAV12-3, TRAJ6)
CAMSATTGGSYIPTF

SEQ ID NO: 707876 - protein, 17 aa, Homo sapiens
  CDR3 for beta chain variable domain of TCR clone 353938 (TRBV7-6, TRBJ1-5)
CASSQSSGLISPSILVM

SEQ ID NO: 707877 - protein, 14 aa, Homo sapiens
  CDR3 for alpha chain variable domain of TCR clone 353939 (TRAV8-6, TRAJ13)
CAGGSSGGYQKVTF

SEQ ID NO: 707878 - protein, 15 aa, Homo sapiens
  CDR3 for beta chain variable domain of TCR clone 353939 (TRBV7-2, TRBJ2-7)
CASSLSGALTYEQFF

SEQ ID NO: 707879 - protein, 15 aa, Homo sapiens
  CDR3 for alpha chain variable domain of TCR clone 353940 (TRAV8-4, TRAJ39)
CAVSNHRGAGNMPTF

SEQ ID NO: 707880 - protein, 15 aa, Homo sapiens
  CDR3 for beta chain variable domain of TCR clone 353940 (TRBV20-1, TRBJ1-1)
CSARPRQGAPTEAFF

SEQ ID NO: 707881 - protein, 14 aa, Homo sapiens
  CDR3 for alpha chain variable domain of TCR clone 353941 (TRAV8-3, TRAJ27)
CAGGRNTNAGQSTF

SEQ ID NO: 707882 - protein, 15 aa, Homo sapiens
  CDR3 for beta chain variable domain of TCR clone 353941 (TRBV11-3, TRBJ2-5)
CASSLRGRVQETQYF

SEQ ID NO: 707883 - protein, 15 aa, Homo sapiens
  CDR3 for alpha chain variable domain of TCR clone 353942 (TRAV12-1, TRAJ44)
CVVDTPQGTASKLTF

SEQ ID NO: 707884 - protein, 12 aa, Homo sapiens
  CDR3 for beta chain variable domain of TCR clone 353942 (TRBV12-4, TRBJ2-1)
CASSPGRNEQFF

SEQ ID NO: 707885 - protein, 11 aa, Homo sapiens
  CDR3 for alpha chain variable domain of TCR clone 353943 (TRAV21, TRAJ34)
CAVTNTDKLIF

SEQ ID NO: 707886 - protein, 16 aa, Homo sapiens
  CDR3 for beta chain variable domain of TCR clone 353943 (TRBV18, TRBJ1-1)
CASSPSVGGRGGEAFF

SEQ ID NO: 707887 - protein, 14 aa, Homo sapiens
  CDR3 for alpha chain variable domain of TCR clone 353944 (TRAV26-1, TRAJ21)
CIVRPPYNFNKIYF

SEQ ID NO: 707888 - protein, 14 aa, Homo sapiens
  CDR3 for beta chain variable domain of TCR clone 353944 (TRBV4-1, TRBJ2-2)
CASSQAVNTGELFF

SEQ ID NO: 707889 - protein, 12 aa, Homo sapiens
  CDR3 for alpha chain variable domain of TCR clone 353945 (TRAV26-2, TRAJ21)
CILKGNFNKSYF

SEQ ID NO: 707890 - protein, 14 aa, Homo sapiens
  CDR3 for beta chain variable domain of TCR clone 353945 (TRBV7-9, TRBJ1-1)
CASTPLQSYTEAFC

SEQ ID NO: 707891 - protein, 13 aa, Homo sapiens
  CDR3 for alpha chain variable domain of TCR clone 353946 (TRAV35, TRAJ53)
CAGQESSNYKLTF

SEQ ID NO: 707892 - protein, 11 aa, Homo sapiens
  CDR3 for beta chain variable domain of TCR clone 353946 (TRBV29-1, TRBJ2-5)
GSEDRTGTQYF

SEQ ID NO: 707893 - protein, 13 aa, Homo sapiens
  CDR3 for alpha chain variable domain of TCR clone 353947 (TRAV8-1, TRAJ28)
CAVSGAGIYQLTF

SEQ ID NO: 707894 - protein, 14 aa, Homo sapiens
  CDR3 for beta chain variable domain of TCR clone 353947 (TRBV7-2, TRBJ2-2)
CASRGQGAAGELFF

SEQ ID NO: 707895 - protein, 12 aa, Homo sapiens
  CDR3 for alpha chain variable domain of TCR clone 353948 (TRAV1-2, TRAJ11)
CAVRGGYSTLTF

SEQ ID NO: 707896 - protein, 13 aa, Homo sapiens
  CDR3 for beta chain variable domain of TCR clone 353948 (TRBV2, TRBJ2-5)
CASGTPYQETQYF

SEQ ID NO: 707897 - protein, 13 aa, Homo sapiens
  CDR3 for alpha chain variable domain of TCR clone 353949 (TRAV30, TRAJ6)
CGFIEGGSYIPTF

SEQ ID NO: 707898 - protein, 17 aa, Homo sapiens
  CDR3 for beta chain variable domain of TCR clone 353949 (TRBV5-4, TRBJ2-1)
CASSSAGGRGPYNEQFF

SEQ ID NO: 707899 - protein, 15 aa, Homo sapiens
  CDR3 for alpha chain variable domain of TCR clone 353950 (TRAV36/DV7, TRAJ52)
CAVDAGGTSYGKLTF

SEQ ID NO: 707900 - protein, 17 aa, Homo sapiens
  CDR3 for beta chain variable domain of TCR clone 353950 (TRBV5-1, TRBJ1-6)
CASSLGDRGLINSPLHV

SEQ ID NO: 707901 - protein, 14 aa, Homo sapiens
  CDR3 for alpha chain variable domain of TCR clone 353951 (TRAV13-1, TRAJ35)
CAASKGGFGNVLHC

SEQ ID NO: 707902 - protein, 15 aa, Homo sapiens
  CDR3 for beta chain variable domain of TCR clone 353951 (TRBV7-9, TRBJ1-6)
CASGSPGRGNSTLHF

SEQ ID NO: 707903 - protein, 16 aa, Homo sapiens
  CDR3 for alpha chain variable domain of TCR clone 353952 (TRAV12-3, TRAJ53)
CAMSAGSGGSNYKLTF

SEQ ID NO: 707904 - protein, 13 aa, Homo sapiens
  CDR3 for beta chain variable domain of TCR clone 353952 (TRBV29-1, TRBJ2-3)
CSLGPRGTDTQYF

SEQ ID NO: 707905 - protein, 14 aa, Homo sapiens
  CDR3 for alpha chain variable domain of TCR clone 353953 (TRAV2, TRAJ3)
CAVRPYSSASKILF

SEQ ID NO: 707906 - protein, 17 aa, Homo sapiens
  CDR3 for beta chain variable domain of TCR clone 353953 (TRBV7-6, TRBJ2-5)
CASSSPQAGDPSETQYF

SEQ ID NO: 707907 - protein, 14 aa, Homo sapiens
  CDR3 for alpha chain variable domain of TCR clone 353954 (TRAV16, TRAJ17)
CALSGRAAGNKLTF

SEQ ID NO: 707908 - protein, 15 aa, Homo sapiens
  CDR3 for beta chain variable domain of TCR clone 353954 (TRBV4-2, TRBJ1-2)
CASSQRTGGRDGYAF

SEQ ID NO: 707909 - protein, 13 aa, Homo sapiens
  CDR3 for alpha chain variable domain of TCR clone 353955 (TRAV12-1, TRAJ9)
CVVRNTGGFNTIF

SEQ ID NO: 707910 - protein, 14 aa, Homo sapiens
  CDR3 for beta chain variable domain of TCR clone 353955 (TRBV20-1, TRBJ2-1)
CSAQIGGSANEQFF

SEQ ID NO: 707911 - protein, 12 aa, Homo sapiens
  CDR3 for alpha chain variable domain of TCR clone 353956 (TRAV30, TRAJ43)
CGTEERGNDTRC

SEQ ID NO: 707912 - protein, 15 aa, Homo sapiens
  CDR3 for beta chain variable domain of TCR clone 353956 (TRBV6-3, TRBJ2-7)
CASSSPGTVFYEQYF

SEQ ID NO: 707913 - protein, 14 aa, Homo sapiens
  CDR3 for alpha chain variable domain of TCR clone 353957 (TRAV21, TRAJ17)
CAVRSKAAGNKLTF

SEQ ID NO: 707914 - protein, 15 aa, Homo sapiens
  CDR3 for beta chain variable domain of TCR clone 353957 (TRBV7-9, TRBJ1-5)
CASSQGHQPNQPQHF

SEQ ID NO: 707915 - protein, 15 aa, Homo sapiens
  CDR3 for alpha chain variable domain of TCR clone 353958 (TRAV21, TRAJ53)
CATLNSGGSNSKLTF

SEQ ID NO: 707916 - protein, 12 aa, Homo sapiens
  CDR3 for beta chain variable domain of TCR clone 353958 (TRBV11-2, TRBJ2-2)
CASSLGGGELFF

SEQ ID NO: 707917 - protein, 12 aa, Homo sapiens
  CDR3 for alpha chain variable domain of TCR clone 353959 (TRAV38-1, TRAJ32)
CAPLGATHKLIF

SEQ ID NO: 707918 - protein, 14 aa, Homo sapiens
  CDR3 for beta chain variable domain of TCR clone 353959 (TRBV29-1, TRBJ2-5)
CSVETSGSGETQYF

SEQ ID NO: 707919 - protein, 18 aa, Homo sapiens
  CDR3 for alpha chain variable domain of TCR clone 353960 (TRAV1-2, TRAJ16)
SYDVLDGLEEKDGQKLLF

SEQ ID NO: 707920 - protein, 15 aa, Homo sapiens
  CDR3 for beta chain variable domain of TCR clone 353960 (TRBV9, TRBJ1-6)
CASSVAGTGDSPLHF

SEQ ID NO: 707921 - protein, 13 aa, Homo sapiens
  CDR3 for alpha chain variable domain of TCR clone 353961 (TRAV13-1, TRAJ24)
CAASDGSWGKLHF

SEQ ID NO: 707922 - protein, 13 aa, Homo sapiens
  CDR3 for beta chain variable domain of TCR clone 353961 (TRBV4-3, TRBJ2-5)
CASSQGGGETQYF

SEQ ID NO: 707923 - protein, 15 aa, Homo sapiens
  CDR3 for alpha chain variable domain of TCR clone 353962 (TRAV35, TRAJ52)
CAGPRGGTSYGKLTF

SEQ ID NO: 707924 - protein, 14 aa, Homo sapiens
  CDR3 for beta chain variable domain of TCR clone 353962 (TRBV20-1, TRBJ2-7)
CSAWTALSSYEPYF

SEQ ID NO: 707925 - protein, 12 aa, Homo sapiens
  CDR3 for alpha chain variable domain of TCR clone 353963 (TRAV21, TRAJ39)
CAADNAGNMLTF

SEQ ID NO: 707926 - protein, 14 aa, Homo sapiens
  CDR3 for beta chain variable domain of TCR clone 353963 (TRBV28, TRBJ2-2)
CASSMQGYTGELFF

SEQ ID NO: 707927 - protein, 11 aa, Homo sapiens
  CDR3 for alpha chain variable domain of TCR clone 353964 (TRAV3, TRAJ21)
CAVGNFNKFYF

SEQ ID NO: 707928 - protein, 14 aa, Homo sapiens
  CDR3 for beta chain variable domain of TCR clone 353964 (TRBV9, TRBJ2-2)
CASSSRPYTGELFF

SEQ ID NO: 707929 - protein, 16 aa, Homo sapiens
  CDR3 for alpha chain variable domain of TCR clone 353965 (TRAV13-1, TRAJ45)
CAARGSRKGGADVLTF

SEQ ID NO: 707930 - protein, 13 aa, Homo sapiens
  CDR3 for beta chain variable domain of TCR clone 353965 (TRBV12-4, TRBJ2-5)
CASRKRGKETQYF

SEQ ID NO: 707931 - protein, 14 aa, Homo sapiens
  CDR3 for alpha chain variable domain of TCR clone 353966 (TRAV38-1, TRAJ32)
CAFIYGGATNKLIF

SEQ ID NO: 707932 - protein, 17 aa, Homo sapiens
  CDR3 for beta chain variable domain of TCR clone 353966 (TRBV28, TRBJ2-3)
CASTASGRDLSTDTQYF

SEQ ID NO: 707933 - protein, 12 aa, Homo sapiens
  CDR3 for alpha chain variable domain of TCR clone 353967 (TRAV12-1, TRAJ40)
CVVYSGTYKYVF

SEQ ID NO: 707934 - protein, 16 aa, Homo sapiens
  CDR3 for beta chain variable domain of TCR clone 353967 (TRBV12-4, TRBJ2-5)
CASSFFVRGRQETQYF

SEQ ID NO: 707935 - protein, 13 aa, Homo sapiens
  CDR3 for alpha chain variable domain of TCR clone 353968 (TRAV20, TRAJ40)
CAVRTSGTYKYIF

SEQ ID NO: 707936 - protein, 13 aa, Homo sapiens
  CDR3 for beta chain variable domain of TCR clone 353968 (TRBV20-1, TRBJ1-2)
CSASLGVGYGYTF

SEQ ID NO: 707937 - protein, 12 aa, Homo sapiens
  CDR3 for alpha chain variable domain of TCR clone 353969 (TRAV8-3, TRAJ26)
CAGDNYGQNFVF

SEQ ID NO: 707938 - protein, 17 aa, Homo sapiens
  CDR3 for beta chain variable domain of TCR clone 353969 (TRBV18, TRBJ2-1)
CASSPLAAGAGDNEQFF

SEQ ID NO: 707939 - protein, 13 aa, Homo sapiens
  CDR3 for alpha chain variable domain of TCR clone 353970 (TRAV12-2, TRAJ30)
CAVNLNRDDKIIV

SEQ ID NO: 707940 - protein, 14 aa, Homo sapiens
  CDR3 for beta chain variable domain of TCR clone 353970 (TRBV7-2, TRBJ1-2)
CASSSQGAHYGYTF

SEQ ID NO: 707941 - protein, 12 aa, Homo sapiens
  CDR3 for alpha chain variable domain of TCR clone 353971 (TRAV25, TRAJ29)
CAGPRGNTPLVF

SEQ ID NO: 707942 - protein, 13 aa, Homo sapiens
  CDR3 for beta chain variable domain of TCR clone 353971 (TRBV15, TRBJ1-6)
CATSGGLNSPLHF

SEQ ID NO: 707943 - protein, 16 aa, Homo sapiens
  CDR3 for alpha chain variable domain of TCR clone 353972 (TRAV3, TRAJ32)
CAVRDVEGGATNKLIF

SEQ ID NO: 707944 - protein, 12 aa, Homo sapiens
  CDR3 for beta chain variable domain of TCR clone 353972 (TRBV7-9, TRBJ1-4)
CASSTDREKLFF

SEQ ID NO: 707945 - protein, 10 aa, Homo sapiens
  CDR3 for alpha chain variable domain of TCR clone 353973 (TRAV1-2, TRAJ23)
CARQGGKLIF

SEQ ID NO: 707946 - protein, 12 aa, Homo sapiens
  CDR3 for beta chain variable domain of TCR clone 353973 (TRBV14, TRBJ2-5)
CASSQLKETQYF

SEQ ID NO: 707947 - protein, 15 aa, Homo sapiens
  CDR3 for alpha chain variable domain of TCR clone 353974 (TRAV12-3, TRAJ6)
CAMSATSGGSYIPTF

SEQ ID NO: 707948 - protein, 11 aa, Homo sapiens
  CDR3 for beta chain variable domain of TCR clone 353974 (TRBV20-1, TRBJ1-5)
CSVQGDQPQHF

SEQ ID NO: 707949 - protein, 18 aa, Homo sapiens
  CDR3 for alpha chain variable domain of TCR clone 353975 (TRAV26-2, TRAJ45)
CILRVDKYSEGGADGLTF

SEQ ID NO: 707950 - protein, 14 aa, Homo sapiens
  CDR3 for beta chain variable domain of TCR clone 353975 (TRBV7-2, TRBJ2-7)
CASRSQGAAYEQYF

SEQ ID NO: 707951 - protein, 16 aa, Homo sapiens
  CDR3 for alpha chain variable domain of TCR clone 353976 (TRAV12-3, TRAJ53)
CAMSPGSGGSDYKLTF

SEQ ID NO: 707952 - protein, 11 aa, Homo sapiens
  CDR3 for beta chain variable domain of TCR clone 353976 (TRBV29-1, TRBJ2-5)
FSEDRTGTQYF

SEQ ID NO: 707953 - protein, 18 aa, Homo sapiens
  CDR3 for alpha chain variable domain of TCR clone 353977 (TRAV21, TRAJ52)
CAVRPSPAGGTSYGRLTF

SEQ ID NO: 707954 - protein, 15 aa, Homo sapiens
  CDR3 for beta chain variable domain of TCR clone 353977 (TRBV20-1, TRBJ2-7)
CSARDRVSGMDEQYF

SEQ ID NO: 707955 - protein, 15 aa, Homo sapiens
  CDR3 for alpha chain variable domain of TCR clone 353978 (TRAV26-1, TRAJ42)
FIVRVKGGSQGNLIF

SEQ ID NO: 707956 - protein, 13 aa, Homo sapiens
  CDR3 for beta chain variable domain of TCR clone 353978 (TRBV9, TRBJ2-1)
CASSVGQGGEQFF

SEQ ID NO: 707957 - protein, 12 aa, Homo sapiens
  CDR3 for alpha chain variable domain of TCR clone 353979 (TRAV12-3, TRAJ17)
CAMTLTGNKLTF

SEQ ID NO: 707958 - protein, 15 aa, Homo sapiens
  CDR3 for beta chain variable domain of TCR clone 353979 (TRBV20-1, TRBJ2-7)
CGARDRVSGVDEQYF

SEQ ID NO: 707959 - protein, 14 aa, Homo sapiens
  CDR3 for alpha chain variable domain of TCR clone 353980 (TRAV1-2, TRAJ8)
CAVRGDTGFQKLVF

SEQ ID NO: 707960 - protein, 15 aa, Homo sapiens
  CDR3 for beta chain variable domain of TCR clone 353980 (TRBV6-3, TRBJ2-7)
CASSSSGTVFYEQYF

SEQ ID NO: 707961 - protein, 13 aa, Homo sapiens
  CDR3 for alpha chain variable domain of TCR clone 353981 (TRAV12-3, TRAJ54)
CALVPQGAQKLVF

SEQ ID NO: 707962 - protein, 15 aa, Homo sapiens
  CDR3 for beta chain variable domain of TCR clone 353981 (TRBV4-1, TRBJ2-2)
CASSQDYRGTGELFF

SEQ ID NO: 707963 - protein, 13 aa, Homo sapiens
  CDR3 for alpha chain variable domain of TCR clone 353982 (TRAV35, TRAJ48)
CAGHEFGNERLTF

SEQ ID NO: 707964 - protein, 14 aa, Homo sapiens
  CDR3 for beta chain variable domain of TCR clone 353982 (TRBV19, TRBJ2-1)
CASPTFVLSGEQFF

SEQ ID NO: 707965 - protein, 13 aa, Homo sapiens
  CDR3 for alpha chain variable domain of TCR clone 353983 (TRAV3, TRAJ27)
CAVRPLGAGKSTF

SEQ ID NO: 707966 - protein, 12 aa, Homo sapiens
  CDR3 for beta chain variable domain of TCR clone 353983 (TRBV7-8, TRBJ2-4)
CASSLGGNIQYF

SEQ ID NO: 707967 - protein, 16 aa, Homo sapiens
  CDR3 for alpha chain variable domain of TCR clone 353984 (TRAV25, TRAJ53)
CAGPKGSGGSNYKLTF

SEQ ID NO: 707968 - protein, 14 aa, Homo sapiens
  CDR3 for beta chain variable domain of TCR clone 353984 (TRBV6-3, TRBJ2-2)
CASTYTPDTGELFF

SEQ ID NO: 707969 - protein, 12 aa, Homo sapiens
  CDR3 for alpha chain variable domain of TCR clone 353985 (TRAV12-3, TRAJ20)
CAMVRGDYKLSF

SEQ ID NO: 707970 - protein, 13 aa, Homo sapiens
  CDR3 for beta chain variable domain of TCR clone 353985 (TRBV25-1, TRBJ2-7)
CASSEDGDYEQYF

SEQ ID NO: 707971 - protein, 13 aa, Homo sapiens
  CDR3 for alpha chain variable domain of TCR clone 353986 (TRAV13-1, TRAJ24)
CAASDGSWGKSQF

SEQ ID NO: 707972 - protein, 13 aa, Homo sapiens
  CDR3 for beta chain variable domain of TCR clone 353986 (TRBV4-3, TRBJ2-5)
CASSQGGGETQYF

SEQ ID NO: 707973 - protein, 14 aa, Homo sapiens
  CDR3 for alpha chain variable domain of TCR clone 353987 (TRAV8-4, TRAJ40)
CAVIPTSGTYKYIF

SEQ ID NO: 707974 - protein, 15 aa, Homo sapiens
  CDR3 for beta chain variable domain of TCR clone 353987 (TRBV7-2, TRBJ2-1)
CASTSASGDYNEQFC

SEQ ID NO: 707975 - protein, 14 aa, Homo sapiens
  CDR3 for alpha chain variable domain of TCR clone 353988 (TRAV27, TRAJ23)
CAGAFDNQGGKLIF

SEQ ID NO: 707976 - protein, 15 aa, Homo sapiens
  CDR3 for beta chain variable domain of TCR clone 353988 (TRBV7-3, TRBJ2-7)
CASSLMGQGKYEQYF

SEQ ID NO: 707977 - protein, 15 aa, Homo sapiens
  CDR3 for alpha chain variable domain of TCR clone 353989 (TRAV12-3, TRAJ49)
CAMAVTRNTGNQFFF

SEQ ID NO: 707978 - protein, 18 aa, Homo sapiens
  CDR3 for beta chain variable domain of TCR clone 353989 (TRBV4-1, TRBJ1-5)
CASSQDPRGQGLNQPQHF

SEQ ID NO: 707979 - protein, 14 aa, Homo sapiens
  CDR3 for alpha chain variable domain of TCR clone 353990 (TRAV3, TRAJ20)
CCRDIKLSDYKLSF

SEQ ID NO: 707980 - protein, 18 aa, Homo sapiens
  CDR3 for beta chain variable domain of TCR clone 353990 (TRBV20-1, TRBJ2-5)
CSQTGDSGRLGGKETQYF

SEQ ID NO: 707981 - protein, 11 aa, Homo sapiens
  CDR3 for alpha chain variable domain of TCR clone 353991 (TRAV1-2, TRAJ20)
CAVANDYKLSF

SEQ ID NO: 707982 - protein, 12 aa, Homo sapiens
  CDR3 for beta chain variable domain of TCR clone 353991 (TRBV7-9, TRBJ2-7)
CASSFGSYEQYF

SEQ ID NO: 707983 - protein, 12 aa, Homo sapiens
  CDR3 for alpha chain variable domain of TCR clone 353992 (TRAV30, TRAJ39)
CGRGNAGNMLTF

SEQ ID NO: 707984 - protein, 15 aa, Homo sapiens
  CDR3 for beta chain variable domain of TCR clone 353992 (TRBV5-1, TRBJ1-1)
CASSWTGRGNTEAFF

SEQ ID NO: 707985 - protein, 11 aa, Homo sapiens
  CDR3 for alpha chain variable domain of TCR clone 353993 (TRAV12-2, TRAJ39)
CAVNNMLTFGG

SEQ ID NO: 707986 - protein, 16 aa, Homo sapiens
  CDR3 for beta chain variable domain of TCR clone 353993 (TRBV9, TRBJ2-7)
CAISAGPDRSPYEQYF

SEQ ID NO: 707987 - protein, 13 aa, Homo sapiens
  CDR3 for alpha chain variable domain of TCR clone 353994 (TRAV26-1, TRAJ36)
CIVVGTGANNLFF

SEQ ID NO: 707988 - protein, 14 aa, Homo sapiens
  CDR3 for beta chain variable domain of TCR clone 353994 (TRBV5-1, TRBJ2-7)
CASSRGESLYEQYF

SEQ ID NO: 707989 - protein, 14 aa, Homo sapiens
  CDR3 for alpha chain variable domain of TCR clone 353995 (TRAV3, TRAJ28)
CAVRRGAGSYQLTF

SEQ ID NO: 707990 - protein, 13 aa, Homo sapiens
  CDR3 for beta chain variable domain of TCR clone 353995 (TRBV4-1, TRBJ2-2)
CASSQENTGELFF

SEQ ID NO: 707991 - protein, 15 aa, Homo sapiens
  CDR3 for alpha chain variable domain of TCR clone 353996 (TRAV3, TRAJ3)
CAVRDRDSSASKILF

SEQ ID NO: 707992 - protein, 18 aa, Homo sapiens
  CDR3 for beta chain variable domain of TCR clone 353996 (TRBV25-1, TRBJ1-2)
CAGSGIQNGQGLIFGYTF

SEQ ID NO: 707993 - protein, 17 aa, Homo sapiens
  CDR3 for alpha chain variable domain of TCR clone 353997 (TRAV3, TRAJ12)
CAVRDGGWMDSSYKLIF

SEQ ID NO: 707994 - protein, 12 aa, Homo sapiens
  CDR3 for beta chain variable domain of TCR clone 353997 (TRBV11-2, TRBJ2-2)
CASSLGGGELFF

SEQ ID NO: 707995 - protein, 13 aa, Homo sapiens
  CDR3 for alpha chain variable domain of TCR clone 353998 (TRAV22, TRAJ26)
CAVAHNYGQNFVF

SEQ ID NO: 707996 - protein, 16 aa, Homo sapiens
  CDR3 for beta chain variable domain of TCR clone 353998 (TRBV7-2, TRBJ2-6)
CASSERRASGANVLTF

SEQ ID NO: 707997 - protein, 12 aa, Homo sapiens
  CDR3 for alpha chain variable domain of TCR clone 353999 (TRAV27, TRAJ36)
ASTPAGANNLFF

SEQ ID NO: 707998 - protein, 13 aa, Homo sapiens
  CDR3 for beta chain variable domain of TCR clone 353999 (TRBV7-9, TRBJ2-3)
CASSPGSTDTQNF

SEQ ID NO: 707999 - protein, 14 aa, Homo sapiens
  CDR3 for alpha chain variable domain of TCR clone 354000 (TRAV12-2, TRAJ40)
CAVKIPSGIYKYIF

SEQ ID NO: 708000 - protein, 13 aa, Homo sapiens
  CDR3 for beta chain variable domain of TCR clone 354000 (TRBV20-1, TRBJ2-2)
CSASAAGTGELFF

SEQ ID NO: 708001 - protein, 11 aa, Homo sapiens
  CDR3 for alpha chain variable domain of TCR clone 354001 (TRAV3, TRAJ21)
CALGNFNKFYF

SEQ ID NO: 708002 - protein, 16 aa, Homo sapiens
  CDR3 for beta chain variable domain of TCR clone 354001 (TRBV19, TRBJ2-1)
CASSKAAPSSYNEQFF

SEQ ID NO: 708003 - protein, 12 aa, Homo sapiens
  CDR3 for alpha chain variable domain of TCR clone 354002 (TRAV17, TRAJ54)
CATDKGAQKLVF

SEQ ID NO: 708004 - protein, 17 aa, Homo sapiens
  CDR3 for beta chain variable domain of TCR clone 354002 (TRBV7-8, TRBJ2-6)
CASSAGTGGAGANVLTF

SEQ ID NO: 708005 - protein, 15 aa, Homo sapiens
  CDR3 for alpha chain variable domain of TCR clone 354003 (TRAV25, TRAJ52)
CAGTSGSTSYGMLTF

SEQ ID NO: 708006 - protein, 16 aa, Homo sapiens
  CDR3 for beta chain variable domain of TCR clone 354003 (TRBV15, TRBJ1-2)
CATSRGPRTGGGGYTF

SEQ ID NO: 708007 - protein, 13 aa, Homo sapiens
  CDR3 for alpha chain variable domain of TCR clone 354004 (TRAV12-3, TRAJ4)
CNEQAGGCNKLIF

SEQ ID NO: 708008 - protein, 15 aa, Homo sapiens
  CDR3 for beta chain variable domain of TCR clone 354004 (TRBV5-1, TRBJ1-1)
CASSLSDLGGTEAFF

SEQ ID NO: 708009 - protein, 16 aa, Homo sapiens
  CDR3 for alpha chain variable domain of TCR clone 354005 (TRAV30, TRAJ24)
CGTEIVDADSWGRFQF

SEQ ID NO: 708010 - protein, 14 aa, Homo sapiens
  CDR3 for beta chain variable domain of TCR clone 354005 (TRBV7-9, TRBJ2-4)
CASSLAMGGNIQYL

SEQ ID NO: 708011 - protein, 14 aa, Homo sapiens
  CDR3 for alpha chain variable domain of TCR clone 354006 (TRAV17, TRAJ6)
CATNPAGGSYIPTF

SEQ ID NO: 708012 - protein, 14 aa, Homo sapiens
  CDR3 for beta chain variable domain of TCR clone 354006 (TRBV11-2, TRBJ2-3)
CASSRLARTDTQYF

SEQ ID NO: 708013 - protein, 16 aa, Homo sapiens
  CDR3 for alpha chain variable domain of TCR clone 354007 (TRAV4, TRAJ22)
CLVCDLYSGSSRQLTF

SEQ ID NO: 708014 - protein, 14 aa, Homo sapiens
  CDR3 for beta chain variable domain of TCR clone 354007 (TRBV28, TRBJ2-3)
CASSWRGRADTQYF

SEQ ID NO: 708015 - protein, 15 aa, Homo sapiens
  CDR3 for alpha chain variable domain of TCR clone 354008 (TRAV25, TRAJ52)
CAGTSGGTSYGKLTL

SEQ ID NO: 708016 - protein, 16 aa, Homo sapiens
  CDR3 for beta chain variable domain of TCR clone 354008 (TRBV19, TRBJ2-1)
CASSKAGPSSYNEQFF

SEQ ID NO: 708017 - protein, 14 aa, Homo sapiens
  CDR3 for alpha chain variable domain of TCR clone 354009 (TRAV8-3, TRAJ37)
CAVGSSGNTGKLIF

SEQ ID NO: 708018 - protein, 15 aa, Homo sapiens
  CDR3 for beta chain variable domain of TCR clone 354009 (TRBV20-1, TRBJ2-7)
CSARDRVSGMDEQYF

SEQ ID NO: 708019 - protein, 13 aa, Homo sapiens
  CDR3 for alpha chain variable domain of TCR clone 354010 (TRAV12-3, TRAJ13)
CAMSSVGYQKVTF

SEQ ID NO: 708020 - protein, 17 aa, Homo sapiens
  CDR3 for beta chain variable domain of TCR clone 354010 (TRBV4-1, TRBJ1-4)
CASSQEGPRGVEEKLFF

SEQ ID NO: 708021 - protein, 17 aa, Homo sapiens
  CDR3 for alpha chain variable domain of TCR clone 354011 (TRAV3, TRAJ42)
CAVRDRDYGGSQGNLIF

SEQ ID NO: 708022 - protein, 14 aa, Homo sapiens
  CDR3 for beta chain variable domain of TCR clone 354011 (TRBV19, TRBJ2-2)
CASSIAGAFGELFF

SEQ ID NO: 708023 - protein, 14 aa, Homo sapiens
  CDR3 for alpha chain variable domain of TCR clone 354012 (TRAV26-1, TRAJ39)
CIVRVDNAGNMLTF

SEQ ID NO: 708024 - protein, 14 aa, Homo sapiens
  CDR3 for beta chain variable domain of TCR clone 354012 (TRBV18, TRBJ2-5)
CASSPGVSQETQYF

SEQ ID NO: 708025 - protein, 12 aa, Homo sapiens
  CDR3 for alpha chain variable domain of TCR clone 354013 (TRAV17, TRAJ4)
CATGGGYNKLIF

SEQ ID NO: 708026 - protein, 15 aa, Homo sapiens
  CDR3 for beta chain variable domain of TCR clone 354013 (TRBV7-6, TRBJ1-5)
CASSQSSGINQPQHF

SEQ ID NO: 708027 - protein, 12 aa, Homo sapiens
  CDR3 for alpha chain variable domain of TCR clone 354014 (TRAV12-2, TRAJ20)
CAVNRNDYKLSF

SEQ ID NO: 708028 - protein, 15 aa, Homo sapiens
  CDR3 for beta chain variable domain of TCR clone 354014 (TRBV5-1, TRBJ2-7)
CASSLMTSGSNEQYF

SEQ ID NO: 708029 - protein, 14 aa, Homo sapiens
  CDR3 for alpha chain variable domain of TCR clone 354015 (TRAV27, TRAJ45)
CAGAQEEVLPDSPF

SEQ ID NO: 708030 - protein, 17 aa, Homo sapiens
  CDR3 for beta chain variable domain of TCR clone 354015 (TRBV11-2, TRBJ2-1)
CASSLYPPGVEYNEQFF

SEQ ID NO: 708031 - protein, 16 aa, Homo sapiens
  CDR3 for alpha chain variable domain of TCR clone 354016 (TRAV16, TRAJ52)
CALSGVGGTSYGKLTF

SEQ ID NO: 708032 - protein, 14 aa, Homo sapiens
  CDR3 for beta chain variable domain of TCR clone 354016 (TRBV19, TRBJ1-2)
FASSLQGQAYGYTF

SEQ ID NO: 708033 - protein, 14 aa, Homo sapiens
  CDR3 for alpha chain variable domain of TCR clone 354017 (TRAV8-3, TRAJ4)
CAVGAAGGYNKLIF

SEQ ID NO: 708034 - protein, 15 aa, Homo sapiens
  CDR3 for beta chain variable domain of TCR clone 354017 (TRBV12-5, TRBJ2-2)
CASGFQGSGTGELFF

SEQ ID NO: 708035 - protein, 19 aa, Homo sapiens
  CDR3 for alpha chain variable domain of TCR clone 354018 (TRAV13-1, TRAJ52)
CAASPYQNAGGTSYGKLTF

SEQ ID NO: 708036 - protein, 18 aa, Homo sapiens
  CDR3 for beta chain variable domain of TCR clone 354018 (TRBV10-3, TRBJ2-3)
CAISESRVGPMRGDTQYF

SEQ ID NO: 708037 - protein, 14 aa, Homo sapiens
  CDR3 for alpha chain variable domain of TCR clone 354019 (TRAV13-1, TRAJ44)
CAAKATGTASKLTF

SEQ ID NO: 708038 - protein, 17 aa, Homo sapiens
  CDR3 for beta chain variable domain of TCR clone 354019 (TRBV7-3, TRBJ2-3)
RTSSLMKRMRGADTQYF

SEQ ID NO: 708039 - protein, 14 aa, Homo sapiens
  CDR3 for alpha chain variable domain of TCR clone 354020 (TRAV13-1, TRAJ44)
CAAKATGTASKLTF

SEQ ID NO: 708040 - protein, 23 aa, Homo sapiens
  CDR3 for beta chain variable domain of TCR clone 354020 (TRBV15, TRBJ1-2)
WGTQPCTCVPPRGPRTGGGGYTF

SEQ ID NO: 708041 - protein, 12 aa, Homo sapiens
  CDR3 for alpha chain variable domain of TCR clone 354021 (TRAV13-1, TRAJ21)
CAAKEGFNKFYF

SEQ ID NO: 708042 - protein, 18 aa, Homo sapiens
  CDR3 for beta chain variable domain of TCR clone 354021 (TRBV20-1, TRBJ2-6)
CSAETTPTLGSGANVLTF

SEQ ID NO: 708043 - protein, 11 aa, Homo sapiens
  CDR3 for alpha chain variable domain of TCR clone 354022 (TRAV2, TRAJ33)
CAVESNYRLIW

SEQ ID NO: 708044 - protein, 16 aa, Homo sapiens
  CDR3 for beta chain variable domain of TCR clone 354022 (TRBV20-1, TRBJ1-4)
CSAPGQGLLTNEKLFF

SEQ ID NO: 708045 - protein, 13 aa, Homo sapiens
  CDR3 for alpha chain variable domain of TCR clone 354023 (TRAV20, TRAJ54)
CAVQAGGAQKLVF

SEQ ID NO: 708046 - protein, 16 aa, Homo sapiens
  CDR3 for beta chain variable domain of TCR clone 354023 (TRBV20-1, TRBJ1-4)
CSAPGQGLLTNEKLFF

SEQ ID NO: 708047 - protein, 13 aa, Homo sapiens
  CDR3 for alpha chain variable domain of TCR clone 354024 (TRAV12-1, TRAJ11)
CVVTRGGYSTLTF

SEQ ID NO: 708048 - protein, 13 aa, Homo sapiens
  CDR3 for beta chain variable domain of TCR clone 354024 (TRBV20-1, TRBJ1-2)
CSARDQGAFGYTF

SEQ ID NO: 708049 - protein, 13 aa, Homo sapiens
  CDR3 for alpha chain variable domain of TCR clone 354025 (TRAV12-3, TRAJ52)
CAMSVGGAGGTSY

SEQ ID NO: 708050 - protein, 15 aa, Homo sapiens
  CDR3 for beta chain variable domain of TCR clone 354025 (TRBV27, TRBJ1-6)
CASSFDRGLGSPLHL

SEQ ID NO: 708051 - protein, 22 aa, Homo sapiens
  CDR3 for alpha chain variable domain of TCR clone 354026 (TRAV26-1, TRAJ30)
CIVRVRTEMTRSSLEKGHDFIF

SEQ ID NO: 708052 - protein, 18 aa, Homo sapiens
  CDR3 for beta chain variable domain of TCR clone 354026 (TRBV4-1, TRBJ1-5)
CASSQYPRGQGLNQPQHF

SEQ ID NO: 708053 - protein, 11 aa, Homo sapiens
  CDR3 for alpha chain variable domain of TCR clone 354027 (TRAV2, TRAJ21)
CAVFNFNKFYF

SEQ ID NO: 708054 - protein, 14 aa, Homo sapiens
  CDR3 for beta chain variable domain of TCR clone 354027 (TRBV15, TRBJ2-3)
CTTRSGTRTDMQYF

SEQ ID NO: 708055 - protein, 14 aa, Homo sapiens
  CDR3 for alpha chain variable domain of TCR clone 354028 (TRAV1-2, TRAJ8)
CAVREDTGFHKLVF

SEQ ID NO: 708056 - protein, 12 aa, Homo sapiens
  CDR3 for beta chain variable domain of TCR clone 354028 (TRBV29-1, TRBJ2-3)
CSVTGGADTQYF

SEQ ID NO: 708057 - protein, 15 aa, Homo sapiens
  CDR3 for alpha chain variable domain of TCR clone 354029 (TRAV27, TRAJ38)
CAARRNAVHNRKLIW

SEQ ID NO: 708058 - protein, 13 aa, Homo sapiens
  CDR3 for beta chain variable domain of TCR clone 354029 (TRBV12-5, TRBJ2-3)
CASGDRQSDTQYF

SEQ ID NO: 708059 - protein, 15 aa, Homo sapiens
  CDR3 for alpha chain variable domain of TCR clone 354030 (TRAV8-1, TRAJ6)
CAVNTPPGGRYIPTF

SEQ ID NO: 708060 - protein, 15 aa, Homo sapiens
  CDR3 for beta chain variable domain of TCR clone 354030 (TRBV11-2, TRBJ2-2)
CASSSDRVNAGELFF

SEQ ID NO: 708061 - protein, 15 aa, Homo sapiens
  CDR3 for alpha chain variable domain of TCR clone 354031 (TRAV27, TRAJ38)
CAARRNAGNNRKLIW

SEQ ID NO: 708062 - protein, 15 aa, Homo sapiens
  CDR3 for beta chain variable domain of TCR clone 354031 (TRBV5-1, TRBJ2-7)
CASSLMTSGSNEQYF

SEQ ID NO: 708063 - protein, 15 aa, Homo sapiens
  CDR3 for alpha chain variable domain of TCR clone 354032 (TRAV3, TRAJ3)
CAVRDSDSSASKIIF

SEQ ID NO: 708064 - protein, 12 aa, Homo sapiens
  CDR3 for beta chain variable domain of TCR clone 354032 (TRBV29-1, TRBJ2-3)
CSVTGGADTQYF

SEQ ID NO: 708065 - protein, 18 aa, Homo sapiens
  CDR3 for alpha chain variable domain of TCR clone 354033 (TRAV13-1, TRAJ52)
CAAKKNNAGGTSYGKLTF

SEQ ID NO: 708066 - protein, 15 aa, Homo sapiens
  CDR3 for beta chain variable domain of TCR clone 354033 (TRBV6-1, TRBJ2-3)
CASSERGGITDTQYF

SEQ ID NO: 708067 - protein, 17 aa, Homo sapiens
  CDR3 for alpha chain variable domain of TCR clone 354034 (TRAV3, TRAJ12)
CAVRDGGRMDSSYKLIF

SEQ ID NO: 708068 - protein, 14 aa, Homo sapiens
  CDR3 for beta chain variable domain of TCR clone 354034 (TRBV6-1, TRBJ1-3)
CASVRGGGGNTIYF

SEQ ID NO: 708069 - protein, 15 aa, Homo sapiens
  CDR3 for alpha chain variable domain of TCR clone 354035 (TRAV3, TRAJ4)
CSVRDGTGGYNKLIF

SEQ ID NO: 708070 - protein, 13 aa, Homo sapiens
  CDR3 for beta chain variable domain of TCR clone 354035 (TRBV12-5, TRBJ1-2)
CASGVRTGNGYTF

SEQ ID NO: 708071 - protein, 11 aa, Homo sapiens
  CDR3 for alpha chain variable domain of TCR clone 354036 (TRAV12-1, TRAJ31)
CVADNNARLMF

SEQ ID NO: 708072 - protein, 14 aa, Homo sapiens
  CDR3 for beta chain variable domain of TCR clone 354036 (TRBV12-5, TRBJ2-5)
CASGSRTHQETQYF

SEQ ID NO: 708073 - protein, 14 aa, Homo sapiens
  CDR3 for alpha chain variable domain of TCR clone 354037 (TRAV17, TRAJ57)
CATDPQGGSEKLVF

SEQ ID NO: 708074 - protein, 16 aa, Homo sapiens
  CDR3 for beta chain variable domain of TCR clone 354037 (TRBV6-6, TRBJ2-1)
CASSYSFSGSYNEQFF

SEQ ID NO: 708075 - protein, 15 aa, Homo sapiens
  CDR3 for alpha chain variable domain of TCR clone 354038 (TRAV27, TRAJ38)
CAARRNAGNNRKLLW

SEQ ID NO: 708076 - protein, 13 aa, Homo sapiens
  CDR3 for beta chain variable domain of TCR clone 354038 (TRBV12-5, TRBJ2-3)
CASGDRQLDTQDF

SEQ ID NO: 708077 - protein, 13 aa, Homo sapiens
  CDR3 for alpha chain variable domain of TCR clone 354039 (TRAV8-4, TRAJ10)
GAAFTGGGNKLTF

SEQ ID NO: 708078 - protein, 15 aa, Homo sapiens
  CDR3 for beta chain variable domain of TCR clone 354039 (TRBV2, TRBJ2-3)
CASSDFEKATDTQYF

SEQ ID NO: 708079 - protein, 16 aa, Homo sapiens
  CDR3 for alpha chain variable domain of TCR clone 354040 (TRAV12-2, TRAJ10)
CAVNRVLPGGGNKLTF

SEQ ID NO: 708080 - protein, 12 aa, Homo sapiens
  CDR3 for beta chain variable domain of TCR clone 354040 (TRBV28, TRBJ2-7)
CASSFSSYEQYF

SEQ ID NO: 708081 - protein, 17 aa, Homo sapiens
  CDR3 for alpha chain variable domain of TCR clone 354041 (TRAV3, TRAJ38)
CAVRDCLNAGNNRKLIW

SEQ ID NO: 708082 - protein, 15 aa, Homo sapiens
  CDR3 for beta chain variable domain of TCR clone 354041 (TRBV27, TRBJ2-1)
CASSNGGGSSNEQFV

SEQ ID NO: 708083 - protein, 14 aa, Homo sapiens
  CDR3 for alpha chain variable domain of TCR clone 354042 (TRAV21, TRAJ58)
CAVRRGRSGSRLTF

SEQ ID NO: 708084 - protein, 16 aa, Homo sapiens
  CDR3 for beta chain variable domain of TCR clone 354042 (TRBV10-3, TRBJ2-7)
CAISADFADRPYEQYF

SEQ ID NO: 708085 - protein, 13 aa, Homo sapiens
  CDR3 for alpha chain variable domain of TCR clone 354043 (TRAV8-3, TRAJ44)
CAVVPGTASKLTF

SEQ ID NO: 708086 - protein, 13 aa, Homo sapiens
  CDR3 for beta chain variable domain of TCR clone 354043 (TRBV10-3, TRBJ2-7)
CASKLSVNYEQYF

SEQ ID NO: 708087 - protein, 14 aa, Homo sapiens
  CDR3 for alpha chain variable domain of TCR clone 354044 (TRAV26-1, TRAJ49)
CIVRLTNTGNQFYF

SEQ ID NO: 708088 - protein, 15 aa, Homo sapiens
  CDR3 for beta chain variable domain of TCR clone 354044 (TRBV7-9, TRBJ2-1)
CASSFVGAGKNEQFF

SEQ ID NO: 708089 - protein, 12 aa, Homo sapiens
  CDR3 for alpha chain variable domain of TCR clone 354045 (TRAV12-3, TRAJ17)
CAMTLTGTKLTF

SEQ ID NO: 708090 - protein, 15 aa, Homo sapiens
  CDR3 for beta chain variable domain of TCR clone 354045 (TRBV20-1, TRBJ2-7)
CSARYRVSGMDEQYF

SEQ ID NO: 708091 - protein, 19 aa, Homo sapiens
  CDR3 for alpha chain variable domain of TCR clone 354046 (TRAV2, TRAJ20)
ILQVREADAAVYRDCKLSF

SEQ ID NO: 708092 - protein, 15 aa, Homo sapiens
  CDR3 for beta chain variable domain of TCR clone 354046 (TRBV20-1, TRBJ2-7)
CSARNRVSGMDEQYF

SEQ ID NO: 708093 - protein, 17 aa, Homo sapiens
  CDR3 for alpha chain variable domain of TCR clone 354047 (TRAV3, TRAJ28)
CAVREAYSGAWSYQLTF

SEQ ID NO: 708094 - protein, 18 aa, Homo sapiens
  CDR3 for beta chain variable domain of TCR clone 354047 (TRBV27, TRBJ2-1)
CASGNRAVGVGSKNEQFF

SEQ ID NO: 708095 - protein, 14 aa, Homo sapiens
  CDR3 for alpha chain variable domain of TCR clone 354048 (TRAV1-2, TRAJ16)
CVVNRFSDGQKLLF

SEQ ID NO: 708096 - protein, 19 aa, Homo sapiens
  CDR3 for beta chain variable domain of TCR clone 354048 (TRBV7-2, TRBJ2-3)
CASSFLSRNWGGGTDTQYF

SEQ ID NO: 708097 - protein, 13 aa, Homo sapiens
  CDR3 for alpha chain variable domain of TCR clone 354049 (TRAV12-3, TRAJ13)
CAMSSGGYQKVTF

SEQ ID NO: 708098 - protein, 14 aa, Homo sapiens
  CDR3 for beta chain variable domain of TCR clone 354049 (TRBV12-5, TRBJ2-5)
CASGSRTHQETQYF

SEQ ID NO: 708099 - protein, 13 aa, Homo sapiens
  CDR3 for alpha chain variable domain of TCR clone 354050 (TRAV12-2, TRAJ42)
CAVKRGSQRNLIF

SEQ ID NO: 708100 - protein, 16 aa, Homo sapiens
  CDR3 for beta chain variable domain of TCR clone 354050 (TRBV9, TRBJ2-2)
CASSAMGKGNTGELFF

SEQ ID NO: 708101 - protein, 15 aa, Homo sapiens
  CDR3 for alpha chain variable domain of TCR clone 354051 (TRAV2, TRAJ15)
CAVEDREQAGTALIF

SEQ ID NO: 708102 - protein, 15 aa, Homo sapiens
  CDR3 for beta chain variable domain of TCR clone 354051 (TRBV3-1, TRBJ1-2)
CASSHPGTPGYGYTV

SEQ ID NO: 708103 - protein, 14 aa, Homo sapiens
  CDR3 for alpha chain variable domain of TCR clone 354052 (TRAV26-1, TRAJ38)
CIADNAGNNRKLIW

SEQ ID NO: 708104 - protein, 17 aa, Homo sapiens
  CDR3 for beta chain variable domain of TCR clone 354052 (TRBV15, TRBJ1-1)
CATSRVGGADGDSEAFF

SEQ ID NO: 708105 - protein, 12 aa, Homo sapiens
  CDR3 for alpha chain variable domain of TCR clone 354053 (TRAV13-2, TRAJ23)
CAERHRVGKLIF

SEQ ID NO: 708106 - protein, 13 aa, Homo sapiens
  CDR3 for beta chain variable domain of TCR clone 354053 (TRBV7-9, TRBJ2-3)
CASSPGSTATQYF

SEQ ID NO: 708107 - protein, 16 aa, Homo sapiens
  CDR3 for alpha chain variable domain of TCR clone 354054 (TRAV1-2, TRAJ27)
CAVREPQTPMQAHQPL

SEQ ID NO: 708108 - protein, 13 aa, Homo sapiens
  CDR3 for beta chain variable domain of TCR clone 354054 (TRBV6-1, TRBJ1-2)
CASSAREGYGYTF

SEQ ID NO: 708109 - protein, 15 aa, Homo sapiens
  CDR3 for alpha chain variable domain of TCR clone 354055 (TRAV25, TRAJ52)
CAGTSGGTSYGKLTF

SEQ ID NO: 708110 - protein, 15 aa, Homo sapiens
  CDR3 for beta chain variable domain of TCR clone 354055 (TRBV29-1, TRBJ2-1)
CSGRDRKSSYNEQFF

SEQ ID NO: 708111 - protein, 13 aa, Homo sapiens
  CDR3 for alpha chain variable domain of TCR clone 354056 (TRAV3, TRAJ21)
CAVIPPPFNKFYF

SEQ ID NO: 708112 - protein, 14 aa, Homo sapiens
  CDR3 for beta chain variable domain of TCR clone 354056 (TRBV18, TRBJ2-7)
CASSPRGGAYEQYF

SEQ ID NO: 708113 - protein, 15 aa, Homo sapiens
  CDR3 for alpha chain variable domain of TCR clone 354057 (TRAV3, TRAJ22)
CAVRDRGGSARQLTF

SEQ ID NO: 708114 - protein, 14 aa, Homo sapiens
  CDR3 for beta chain variable domain of TCR clone 354057 (TRBV19, TRBJ2-1)
CGSSRLASINEQFF

SEQ ID NO: 708115 - protein, 12 aa, Homo sapiens
  CDR3 for alpha chain variable domain of TCR clone 354058 (TRAV13-1, TRAJ21)
CAAKEGFNKFYF

SEQ ID NO: 708116 - protein, 13 aa, Homo sapiens
  CDR3 for beta chain variable domain of TCR clone 354058 (TRBV7-3, TRBJ1-1)
RASSQDWGAEAFF

SEQ ID NO: 708117 - protein, 13 aa, Homo sapiens
  CDR3 for alpha chain variable domain of TCR clone 354059 (TRAV2, TRAJ40)
CAVVTSGTYKYIF

SEQ ID NO: 708118 - protein, 14 aa, Homo sapiens
  CDR3 for beta chain variable domain of TCR clone 354059 (TRBV19, TRBJ2-1)
CASPTFVLSGRQFF

SEQ ID NO: 708119 - protein, 16 aa, Homo sapiens
  CDR3 for alpha chain variable domain of TCR clone 354060 (TRAV3, TRAJ10)
CAVRDMRAGGGNTLTF

SEQ ID NO: 708120 - protein, 15 aa, Homo sapiens
  CDR3 for beta chain variable domain of TCR clone 354060 (TRBV9, TRBJ1-6)
CASSVAGTGDSPLHF

SEQ ID NO: 708121 - protein, 12 aa, Homo sapiens
  CDR3 for alpha chain variable domain of TCR clone 354061 (TRAV26-1, TRAJ13)
CIVSRGYQKVTF

SEQ ID NO: 708122 - protein, 14 aa, Homo sapiens
  CDR3 for beta chain variable domain of TCR clone 354061 (TRBV7-2, TRBJ2-7)
CANSPKTSFYEQYF

SEQ ID NO: 708123 - protein, 12 aa, Homo sapiens
  CDR3 for alpha chain variable domain of TCR clone 354062 (TRAV36/DV7, TRAJ54)
CAVVRGAQKLVF

SEQ ID NO: 708124 - protein, 16 aa, Homo sapiens
  CDR3 for beta chain variable domain of TCR clone 354062 (TRBV29-1, TRBJ2-7)
CSVEVVGTSGSYEQYF

SEQ ID NO: 708125 - protein, 12 aa, Homo sapiens
  CDR3 for alpha chain variable domain of TCR clone 354063 (TRAV23/DV6, TRAJ17)
CAAKAAGNKLTF

SEQ ID NO: 708126 - protein, 16 aa, Homo sapiens
  CDR3 for beta chain variable domain of TCR clone 354063 (TRBV6-1, TRBJ2-1)
CASSDLPGQLNNEQFF

SEQ ID NO: 708127 - protein, 14 aa, Homo sapiens
  CDR3 for alpha chain variable domain of TCR clone 354064 (TRAV9-2, TRAJ39)
CALYIYNAGNMLTF

SEQ ID NO: 708128 - protein, 15 aa, Homo sapiens
  CDR3 for beta chain variable domain of TCR clone 354064 (TRBV28, TRBJ1-3)
CASSMGWATGNTIYF

SEQ ID NO: 708129 - protein, 12 aa, Homo sapiens
  CDR3 for alpha chain variable domain of TCR clone 354065 (TRAV13-1, TRAJ21)
CAAKDGFNKFYF

SEQ ID NO: 708130 - protein, 18 aa, Homo sapiens
  CDR3 for beta chain variable domain of TCR clone 354065 (TRBV20-1, TRBJ2-6)
CSAETTPTHGSGANVLTF

SEQ ID NO: 708131 - protein, 13 aa, Homo sapiens
  CDR3 for alpha chain variable domain of TCR clone 354066 (TRAV13-1, TRAJ5)
CAASDTGRRALTF

SEQ ID NO: 708132 - protein, 14 aa, Homo sapiens
  CDR3 for beta chain variable domain of TCR clone 354066 (TRBV18, TRBJ1-5)
CASSPGNSNQPQHF

SEQ ID NO: 708133 - protein, 13 aa, Homo sapiens
  CDR3 for alpha chain variable domain of TCR clone 354067 (TRAV12-1, TRAJ13)
CVVTSGGYHKVTF

SEQ ID NO: 708134 - protein, 14 aa, Homo sapiens
  CDR3 for beta chain variable domain of TCR clone 354067 (TRBV27, TRBJ2-7)
CASSLAGLSYEQYF

SEQ ID NO: 708135 - protein, 14 aa, Homo sapiens
  CDR3 for alpha chain variable domain of TCR clone 354068 (TRAV8-4, TRAJ13)
CAVTLSGGYQKVTF

SEQ ID NO: 708136 - protein, 13 aa, Homo sapiens
  CDR3 for beta chain variable domain of TCR clone 354068 (TRBV7-2, TRBJ1-2)
CASSLKQNYGYTF

SEQ ID NO: 708137 - protein, 17 aa, Homo sapiens
  CDR3 for alpha chain variable domain of TCR clone 354069 (TRAV36/DV7, TRAJ52)
CAVAQRAGGTSYGKLTF

SEQ ID NO: 708138 - protein, 13 aa, Homo sapiens
  CDR3 for beta chain variable domain of TCR clone 354069 (TRBV7-2, TRBJ1-1)
CASSQDWGAEAFF

SEQ ID NO: 708139 - protein, 14 aa, Homo sapiens
  CDR3 for alpha chain variable domain of TCR clone 354070 (TRAV16, TRAJ29)
CALTRNSGNTPLVF

SEQ ID NO: 708140 - protein, 12 aa, Homo sapiens
  CDR3 for beta chain variable domain of TCR clone 354070 (TRBV2, TRBJ2-1)
CAKREGYNEEFF

SEQ ID NO: 708141 - protein, 13 aa, Homo sapiens
  CDR3 for alpha chain variable domain of TCR clone 354071 (TRAV26-1, TRAJ29)
CIVRRSENTPLVF

SEQ ID NO: 708142 - protein, 16 aa, Homo sapiens
  CDR3 for beta chain variable domain of TCR clone 354071 (TRBV11-2, TRBJ2-7)
CASSLAPTGVNYEQYF

SEQ ID NO: 708143 - protein, 14 aa, Homo sapiens
  CDR3 for alpha chain variable domain of TCR clone 354072 (TRAV13-2, TRAJ17)
CAENSKAAGNKLTS

SEQ ID NO: 708144 - protein, 11 aa, Homo sapiens
  CDR3 for beta chain variable domain of TCR clone 354072 (TRBV6-3, TRBJ2-3)
CATGQADTQYF

SEQ ID NO: 708145 - protein, 16 aa, Homo sapiens
  CDR3 for alpha chain variable domain of TCR clone 354073 (TRAV30, TRAJ24)
CGTEIVDADSWGKFQF

SEQ ID NO: 708146 - protein, 19 aa, Homo sapiens
  CDR3 for beta chain variable domain of TCR clone 354073 (TRBV25-1, TRBJ2-2)
YAILVYRVDRGRKTGELFF

SEQ ID NO: 708147 - protein, 10 aa, Homo sapiens
  CDR3 for alpha chain variable domain of TCR clone 354074 (TRAV1-2, TRAJ18)
CAVRGEAQPW

SEQ ID NO: 708148 - protein, 19 aa, Homo sapiens
  CDR3 for beta chain variable domain of TCR clone 354074 (TRBV6-3, TRBJ1-2)
CPSSYSKGRTGPPNYGYTF

SEQ ID NO: 708149 - protein, 17 aa, Homo sapiens
  CDR3 for alpha chain variable domain of TCR clone 354075 (TRAV3, TRAJ13)
CTVRDMRRTGGYQKVNF

SEQ ID NO: 708150 - protein, 14 aa, Homo sapiens
  CDR3 for beta chain variable domain of TCR clone 354075 (TRBV5-1, TRBJ2-7)
CASSLTGSGYEQYF

SEQ ID NO: 708151 - protein, 14 aa, Homo sapiens
  CDR3 for alpha chain variable domain of TCR clone 354076 (TRAV1-2, TRAJ8)
CAVREDTGFQKLIF

SEQ ID NO: 708152 - protein, 15 aa, Homo sapiens
  CDR3 for beta chain variable domain of TCR clone 354076 (TRBV27, TRBJ1-6)
CASSFDRGLGSPLHF

SEQ ID NO: 708153 - protein, 15 aa, Homo sapiens
  CDR3 for alpha chain variable domain of TCR clone 354077 (TRAV17, TRAJ56)
CATEPFTGANSKLTF

SEQ ID NO: 708154 - protein, 14 aa, Homo sapiens
  CDR3 for beta chain variable domain of TCR clone 354077 (TRBV19, TRBJ2-1)
CASPTCVLSGEQFF

SEQ ID NO: 708155 - protein, 12 aa, Homo sapiens
  CDR3 for alpha chain variable domain of TCR clone 354078 (TRAV17, TRAJ57)
CATDGGSEKLVF

SEQ ID NO: 708156 - protein, 16 aa, Homo sapiens
  CDR3 for beta chain variable domain of TCR clone 354078 (TRBV2, TRBJ2-1)
CARSVGGSLSYNEQFF

SEQ ID NO: 708157 - protein, 23 aa, Homo sapiens
  CDR3 for alpha chain variable domain of TCR clone 354079 (TRAV26-1, TRAJ38)
CIADNAGNNHIQNPDPAVYQLRD

SEQ ID NO: 708158 - protein, 13 aa, Homo sapiens
  CDR3 for beta chain variable domain of TCR clone 354079 (TRBV20-1, TRBJ1-1)
CSARGGGNTEEFF

SEQ ID NO: 708159 - protein, 12 aa, Homo sapiens
  CDR3 for alpha chain variable domain of TCR clone 354080 (TRAV2, TRAJ24)
CAATVSWGKFQF

SEQ ID NO: 708160 - protein, 13 aa, Homo sapiens
  CDR3 for beta chain variable domain of TCR clone 354080 (TRBV5-8, TRBJ1-1)
CASSLGGGTEAFF

SEQ ID NO: 708161 - protein, 13 aa, Homo sapiens
  CDR3 for alpha chain variable domain of TCR clone 354081 (TRAV8-3, TRAJ36)
CAVGATGANNLFF

SEQ ID NO: 708162 - protein, 15 aa, Homo sapiens
  CDR3 for beta chain variable domain of TCR clone 354081 (TRBV27, TRBJ1-5)
CASTFTRGSNQPQHF

SEQ ID NO: 708163 - protein, 18 aa, Homo sapiens
  CDR3 for alpha chain variable domain of TCR clone 354082 (TRAV26-1, TRAJ50)
CVLLHRQNPKTSYDKVIF

SEQ ID NO: 708164 - protein, 17 aa, Homo sapiens
  CDR3 for beta chain variable domain of TCR clone 354082 (TRBV4-1, TRBJ1-4)
CASSQEGPRGVEEKLFF

SEQ ID NO: 708165 - protein, 13 aa, Homo sapiens
  CDR3 for alpha chain variable domain of TCR clone 354083 (TRAV27, TRAJ16)
CAGACSDGQKLLL

SEQ ID NO: 708166 - protein, 14 aa, Homo sapiens
  CDR3 for beta chain variable domain of TCR clone 354083 (TRBV11-2, TRBJ1-3)
CASSLAVPGNTIYF

SEQ ID NO: 708167 - protein, 13 aa, Homo sapiens
  CDR3 for alpha chain variable domain of TCR clone 354084 (TRAV27, TRAJ11)
CAGARSGYSTLTF

SEQ ID NO: 708168 - protein, 15 aa, Homo sapiens
  CDR3 for beta chain variable domain of TCR clone 354084 (TRBV7-2, TRBJ2-1)
CASSLASGRVNEQFF

SEQ ID NO: 708169 - protein, 12 aa, Homo sapiens
  CDR3 for alpha chain variable domain of TCR clone 354085 (TRAV29/DV5, TRAJ34)
CAARHNTDKLIF

SEQ ID NO: 708170 - protein, 13 aa, Homo sapiens
  CDR3 for beta chain variable domain of TCR clone 354085 (TRBV7-9, TRBJ1-2)
CASTLKQNYGYTF

SEQ ID NO: 708171 - protein, 16 aa, Homo sapiens
  CDR3 for alpha chain variable domain of TCR clone 354086 (TRAV1-1, TRAJ45)
CAVRAYSGGGADGLTF

SEQ ID NO: 708172 - protein, 13 aa, Homo sapiens
  CDR3 for beta chain variable domain of TCR clone 354086 (TRBV20-1, TRBJ1-2)
CSARGTADYGYAF

SEQ ID NO: 708173 - protein, 15 aa, Homo sapiens
  CDR3 for alpha chain variable domain of TCR clone 354087 (TRAV26-1, TRAJ40)
CIERYATSGTYKYIF

SEQ ID NO: 708174 - protein, 11 aa, Homo sapiens
  CDR3 for beta chain variable domain of TCR clone 354087 (TRBV7-9, TRBJ2-1)
CASSSQNEQFF

SEQ ID NO: 708175 - protein, 13 aa, Homo sapiens
  CDR3 for alpha chain variable domain of TCR clone 354088 (TRAV21, TRAJ34)
CAVSEGDTEKLIF

SEQ ID NO: 708176 - protein, 17 aa, Homo sapiens
  CDR3 for beta chain variable domain of TCR clone 354088 (TRBV20-1, TRBJ1-5)
CSARDPSAQWFNQTQHF

SEQ ID NO: 708177 - protein, 10 aa, Homo sapiens
  CDR3 for alpha chain variable domain of TCR clone 354089 (TRAV12-3, TRAJ18)
RAMSAEAQPW

SEQ ID NO: 708178 - protein, 14 aa, Homo sapiens
  CDR3 for beta chain variable domain of TCR clone 354089 (TRBV19, TRBJ2-1)
CASPTFVLSGEQFF

SEQ ID NO: 708179 - protein, 14 aa, Homo sapiens
  CDR3 for alpha chain variable domain of TCR clone 354090 (TRAV12-2, TRAJ13)
CAVKKTGGYQKVTF

SEQ ID NO: 708180 - protein, 13 aa, Homo sapiens
  CDR3 for beta chain variable domain of TCR clone 354090 (TRBV3-1, TRBJ1-1)
CASSRYRGAEAFF

SEQ ID NO: 708181 - protein, 17 aa, Homo sapiens
  CDR3 for alpha chain variable domain of TCR clone 354091 (TRAV20, TRAJ42)
CAVQAWGYGGSQGNHIF

SEQ ID NO: 708182 - protein, 16 aa, Homo sapiens
  CDR3 for beta chain variable domain of TCR clone 354091 (TRBV29-1, TRBJ2-5)
CSVEGLAGDYQETQYF

SEQ ID NO: 708183 - protein, 12 aa, Homo sapiens
  CDR3 for alpha chain variable domain of TCR clone 354092 (TRAV13-1, TRAJ9)
CASHTGGFETIF

SEQ ID NO: 708184 - protein, 18 aa, Homo sapiens
  CDR3 for beta chain variable domain of TCR clone 354092 (TRBV11-2, TRBJ2-3)
CASSLGGASRGAPNTQYF

SEQ ID NO: 708185 - protein, 12 aa, Homo sapiens
  CDR3 for alpha chain variable domain of TCR clone 354093 (TRAV16, TRAJ10)
RSRTGGGNKLTF

SEQ ID NO: 708186 - protein, 19 aa, Homo sapiens
  CDR3 for beta chain variable domain of TCR clone 354093 (TRBV25-1, TRBJ2-2)
CAILVYRVDRGRKTGELFF

SEQ ID NO: 708187 - protein, 23 aa, Homo sapiens
  CDR3 for alpha chain variable domain of TCR clone 354094 (TRAV21, )
CAVMGAGNNHIQNPDPAVYQLRD

SEQ ID NO: 708188 - protein, 19 aa, Homo sapiens
  CDR3 for beta chain variable domain of TCR clone 354094 (TRBV7-2, TRBJ2-3)
CASSFLSRNWGGGTDTQYF

SEQ ID NO: 708189 - protein, 14 aa, Homo sapiens
  CDR3 for alpha chain variable domain of TCR clone 354095 (TRAV12-3, TRAJ20)
CAMSARRGDYKRSF

SEQ ID NO: 708190 - protein, 14 aa, Homo sapiens
  CDR3 for beta chain variable domain of TCR clone 354095 (TRBV7-3, TRBJ2-3)
CASSPSARTDTQYF

SEQ ID NO: 708191 - protein, 13 aa, Homo sapiens
  CDR3 for alpha chain variable domain of TCR clone 354096 (TRAV26-1, TRAJ20)
CIVRVASDYKLSF

SEQ ID NO: 708192 - protein, 13 aa, Homo sapiens
  CDR3 for beta chain variable domain of TCR clone 354096 (TRBV12-5, TRBJ2-3)
CASGDRQSDTQYF

SEQ ID NO: 708193 - protein, 14 aa, Homo sapiens
  CDR3 for alpha chain variable domain of TCR clone 354097 (TRAV17, TRAJ54)
RATDANQGAQKLVF

SEQ ID NO: 708194 - protein, 12 aa, Homo sapiens
  CDR3 for beta chain variable domain of TCR clone 354097 (TRBV7-9, TRBJ2-7)
CASSIKREEQYF

SEQ ID NO: 708195 - protein, 13 aa, Homo sapiens
  CDR3 for alpha chain variable domain of TCR clone 354098 (TRAV21, TRAJ57)
CAVTQGGSEKLVF

SEQ ID NO: 708196 - protein, 14 aa, Homo sapiens
  CDR3 for beta chain variable domain of TCR clone 354098 (TRBV7-9, TRBJ2-7)
CASSLARGTYEQYF

SEQ ID NO: 708197 - protein, 14 aa, Homo sapiens
  CDR3 for alpha chain variable domain of TCR clone 354099 (TRAV1-2, TRAJ16)
CAVNRFSDGQKLLF

SEQ ID NO: 708198 - protein, 17 aa, Homo sapiens
  CDR3 for beta chain variable domain of TCR clone 354099 (TRBV5-1, TRBJ2-5)
CASSLRGVEGPIETQYF

SEQ ID NO: 708199 - protein, 14 aa, Homo sapiens
  CDR3 for alpha chain variable domain of TCR clone 354100 (TRAV1-2, TRAJ16)
CAVNRFSDGQKLLF

SEQ ID NO: 708200 - protein, 13 aa, Homo sapiens
  CDR3 for beta chain variable domain of TCR clone 354100 (TRBV20-1, TRBJ1-3)
CSARVQGRDTIYF

SEQ ID NO: 708201 - protein, 14 aa, Homo sapiens
  CDR3 for alpha chain variable domain of TCR clone 354101 (TRAV13-1, TRAJ10)
CAALFTGGGNKLTF

SEQ ID NO: 708202 - protein, 15 aa, Homo sapiens
  CDR3 for beta chain variable domain of TCR clone 354101 (TRBV10-3, TRBJ2-2)
CAISEGDRAAVELFF

SEQ ID NO: 708203 - protein, 13 aa, Homo sapiens
  CDR3 for alpha chain variable domain of TCR clone 354102 (TRAV20, TRAJ48)
CAVHLFGNEKLTF

SEQ ID NO: 708204 - protein, 15 aa, Homo sapiens
  CDR3 for beta chain variable domain of TCR clone 354102 (TRBV6-5, TRBJ2-6)
YASSQWEAGANVLTF

SEQ ID NO: 708205 - protein, 11 aa, Homo sapiens
  CDR3 for alpha chain variable domain of TCR clone 354103 (TRAV21, TRAJ11)
CAVNGYSTLTF

SEQ ID NO: 708206 - protein, 13 aa, Homo sapiens
  CDR3 for beta chain variable domain of TCR clone 354103 (TRBV6-5, TRBJ2-5)
CASSPQGGETQYF

SEQ ID NO: 708207 - protein, 14 aa, Homo sapiens
  CDR3 for alpha chain variable domain of TCR clone 354104 (TRAV1-2, TRAJ16)
CAVNRFSDGQKLLF

SEQ ID NO: 708208 - protein, 13 aa, Homo sapiens
  CDR3 for beta chain variable domain of TCR clone 354104 (TRBV10-3, TRBJ2-7)
FAIKKIQGHEQYF

SEQ ID NO: 708209 - protein, 12 aa, Homo sapiens
  CDR3 for alpha chain variable domain of TCR clone 354105 (TRAV13-1, TRAJ21)
RAAKEGFNKFYF

SEQ ID NO: 708210 - protein, 14 aa, Homo sapiens
  CDR3 for beta chain variable domain of TCR clone 354105 (TRBV5-4, TRBJ1-1)
CASSLDSRRDEAFF

SEQ ID NO: 708211 - protein, 13 aa, Homo sapiens
  CDR3 for alpha chain variable domain of TCR clone 354106 (TRAV12-3, TRAJ54)
CAMSGQGAQKLVF

SEQ ID NO: 708212 - protein, 13 aa, Homo sapiens
  CDR3 for beta chain variable domain of TCR clone 354106 (TRBV2, TRBJ1-6)
CADSGSYNSPLHF

SEQ ID NO: 708213 - protein, 14 aa, Homo sapiens
  CDR3 for alpha chain variable domain of TCR clone 354107 (TRAV29/DV5, TRAJ36)
CPARRKTGANNLFF

SEQ ID NO: 708214 - protein, 17 aa, Homo sapiens
  CDR3 for beta chain variable domain of TCR clone 354107 (TRBV11-2, TRBJ2-1)
CASSLYPPGVEYNEQFF

SEQ ID NO: 708215 - protein, 14 aa, Homo sapiens
  CDR3 for alpha chain variable domain of TCR clone 354108 (TRAV26-1, TRAJ40)
CIVRLLSGTYKYIF

SEQ ID NO: 708216 - protein, 23 aa, Homo sapiens
  CDR3 for beta chain variable domain of TCR clone 354108 (TRBV15, TRBJ2-7)
QAWGTQPCTCVPPAETGGYEQYF

SEQ ID NO: 708217 - protein, 14 aa, Homo sapiens
  CDR3 for alpha chain variable domain of TCR clone 354109 (TRAV12-3, TRAJ12)
CAMSRMDSSYKLIF

SEQ ID NO: 708218 - protein, 16 aa, Homo sapiens
  CDR3 for beta chain variable domain of TCR clone 354109 (TRBV7-8, TRBJ2-5)
CASSPAGGRNQETQYF

SEQ ID NO: 708219 - protein, 19 aa, Homo sapiens
  CDR3 for alpha chain variable domain of TCR clone 354110 (TRAV16, )
CALSGDIQNPDPAVYQLRD

SEQ ID NO: 708220 - protein, 16 aa, Homo sapiens
  CDR3 for beta chain variable domain of TCR clone 354110 (TRBV12-5, TRBJ2-5)
CASGPRTSGNQGTQYF

SEQ ID NO: 708221 - protein, 15 aa, Homo sapiens
  CDR3 for alpha chain variable domain of TCR clone 354111 (TRAV26-1, TRAJ40)
CIVRAVPSGTYKYIF

SEQ ID NO: 708222 - protein, 13 aa, Homo sapiens
  CDR3 for beta chain variable domain of TCR clone 354111 (TRBV7-3, TRBJ1-1)
CASSQDWGAEAFF

SEQ ID NO: 708223 - protein, 11 aa, Homo sapiens
  CDR3 for alpha chain variable domain of TCR clone 354112 (TRAV2, TRAJ20)
CAVEYDYKLSF

SEQ ID NO: 708224 - protein, 14 aa, Homo sapiens
  CDR3 for beta chain variable domain of TCR clone 354112 (TRBV27, TRBJ2-2)
CASRPGVNTGELFV

SEQ ID NO: 708225 - protein, 13 aa, Homo sapiens
  CDR3 for alpha chain variable domain of TCR clone 354113 (TRAV34, TRAJ33)
CGADKNSNYQLIW

SEQ ID NO: 708226 - protein, 16 aa, Homo sapiens
  CDR3 for beta chain variable domain of TCR clone 354113 (TRBV20-1, TRBJ2-1)
CSASLAGGPGYNEQFF

SEQ ID NO: 708227 - protein, 14 aa, Homo sapiens
  CDR3 for alpha chain variable domain of TCR clone 354114 (TRAV26-1, TRAJ38)
CIADNAGNNPKLIW

SEQ ID NO: 708228 - protein, 17 aa, Homo sapiens
  CDR3 for beta chain variable domain of TCR clone 354114 (TRBV7-9, TRBJ2-3)
CASSPTVAGDLTDTQYF

SEQ ID NO: 708229 - protein, 14 aa, Homo sapiens
  CDR3 for alpha chain variable domain of TCR clone 354115 (TRAV35, TRAJ22)
CAGLRPGSARQLTF

SEQ ID NO: 708230 - protein, 14 aa, Homo sapiens
  CDR3 for beta chain variable domain of TCR clone 354115 (TRBV4-2, TRBJ1-1)
CASSRKSPNTEAFF

SEQ ID NO: 708231 - protein, 13 aa, Homo sapiens
  CDR3 for alpha chain variable domain of TCR clone 354116 (TRAV3, TRAJ5)
CAVRDTGRRALTF

SEQ ID NO: 708232 - protein, 17 aa, Homo sapiens
  CDR3 for beta chain variable domain of TCR clone 354116 (TRBV11-2, TRBJ2-1)
CASSLYPPGVEYNEQFF

SEQ ID NO: 708233 - protein, 17 aa, Homo sapiens
  CDR3 for alpha chain variable domain of TCR clone 354117 (TRAV13-1, TRAJ52)
CAASSGAGGTSYGKLTF

SEQ ID NO: 708234 - protein, 15 aa, Homo sapiens
  CDR3 for beta chain variable domain of TCR clone 354117 (TRBV7-2, TRBJ2-3)
CASSSTGLETDTQYF

SEQ ID NO: 708235 - protein, 13 aa, Homo sapiens
  CDR3 for alpha chain variable domain of TCR clone 354118 (TRAV12-2, TRAJ42)
CAVKRGSQGNLIF

SEQ ID NO: 708236 - protein, 12 aa, Homo sapiens
  CDR3 for beta chain variable domain of TCR clone 354118 (TRBV5-6, TRBJ1-2)
CAGSLVKNGYTF

SEQ ID NO: 708237 - protein, 13 aa, Homo sapiens
  CDR3 for alpha chain variable domain of TCR clone 354119 (TRAV9-2, TRAJ49)
CALIQIGGNQFYF

SEQ ID NO: 708238 - protein, 17 aa, Homo sapiens
  CDR3 for beta chain variable domain of TCR clone 354119 (TRBV7-8, TRBJ2-6)
CASSAGTGGAGANILTF

SEQ ID NO: 708239 - protein, 14 aa, Homo sapiens
  CDR3 for alpha chain variable domain of TCR clone 354120 (TRAV26-1, TRAJ39)
CIVRGSRAGNMLTF

SEQ ID NO: 708240 - protein, 15 aa, Homo sapiens
  CDR3 for beta chain variable domain of TCR clone 354120 (TRBV7-9, TRBJ1-5)
CASSQGHRPNQPQYF

SEQ ID NO: 708241 - protein, 15 aa, Homo sapiens
  CDR3 for alpha chain variable domain of TCR clone 354121 (TRAV17, TRAJ35)
CATAFVIGFGNVLHC

SEQ ID NO: 708242 - protein, 15 aa, Homo sapiens
  CDR3 for beta chain variable domain of TCR clone 354121 (TRBV7-9, TRBJ2-7)
CASSLALAEAYDQYF

SEQ ID NO: 708243 - protein, 11 aa, Homo sapiens
  CDR3 for alpha chain variable domain of TCR clone 354122 (TRAV35, TRAJ30)
CAGPGDDKIIF

SEQ ID NO: 708244 - protein, 15 aa, Homo sapiens
  CDR3 for beta chain variable domain of TCR clone 354122 (TRBV28, TRBJ2-5)
CASSQTSGSLETQYF

SEQ ID NO: 708245 - protein, 11 aa, Homo sapiens
  CDR3 for alpha chain variable domain of TCR clone 354123 (TRAV12-3, TRAJ27)
CAMANAGKSTF

SEQ ID NO: 708246 - protein, 19 aa, Homo sapiens
  CDR3 for beta chain variable domain of TCR clone 354123 (TRBV6-1, TRBJ2-5)
CASSEQGLAGGLYQETQYC

SEQ ID NO: 708247 - protein, 16 aa, Homo sapiens
  CDR3 for alpha chain variable domain of TCR clone 354124 (TRAV3, TRAJ37)
CAVRGEGSGNTGKLSF

SEQ ID NO: 708248 - protein, 13 aa, Homo sapiens
  CDR3 for beta chain variable domain of TCR clone 354124 (TRBV14, TRBJ2-7)
CASSQDRRYEQYF

SEQ ID NO: 708249 - protein, 11 aa, Homo sapiens
  CDR3 for alpha chain variable domain of TCR clone 354125 (TRAV12-1, TRAJ30)
CVVNGQDKIIF

SEQ ID NO: 708250 - protein, 14 aa, Homo sapiens
  CDR3 for beta chain variable domain of TCR clone 354125 (TRBV6-1, TRBJ1-3)
CASVQGGGGNTIYF

SEQ ID NO: 708251 - protein, 14 aa, Homo sapiens
  CDR3 for alpha chain variable domain of TCR clone 354126 (TRAV8-2, TRAJ11)
CVVSEKSVYSTLTF

SEQ ID NO: 708252 - protein, 16 aa, Homo sapiens
  CDR3 for beta chain variable domain of TCR clone 354126 (TRBV28, TRBJ2-1)
CASSSPEYPRDNEQFF

SEQ ID NO: 708253 - protein, 14 aa, Homo sapiens
  CDR3 for alpha chain variable domain of TCR clone 354127 (TRAV12-2, TRAJ11)
CAVEGGSGYSTLTF

SEQ ID NO: 708254 - protein, 16 aa, Homo sapiens
  CDR3 for beta chain variable domain of TCR clone 354127 (TRBV2, TRBJ2-1)
CASSVGGSLSYNEQFF

SEQ ID NO: 708255 - protein, 12 aa, Homo sapiens
  CDR3 for alpha chain variable domain of TCR clone 354128 (TRAV3, TRAJ20)
CAVRDPAYKLSF

SEQ ID NO: 708256 - protein, 13 aa, Homo sapiens
  CDR3 for beta chain variable domain of TCR clone 354128 (TRBV18, TRBJ1-1)
CASSPETKPEAFF

SEQ ID NO: 708257 - protein, 14 aa, Homo sapiens
  CDR3 for alpha chain variable domain of TCR clone 354129 (TRAV12-2, TRAJ17)
FAVLFKAAGNKPTF

SEQ ID NO: 708258 - protein, 17 aa, Homo sapiens
  CDR3 for beta chain variable domain of TCR clone 354129 (TRBV20-1, TRBJ2-2)
CSASGSGQGGLTGELFF

SEQ ID NO: 708259 - protein, 15 aa, Homo sapiens
  CDR3 for alpha chain variable domain of TCR clone 354130 (TRAV12-3, TRAJ27)
CAMRAYNTNPGKSTF

SEQ ID NO: 708260 - protein, 13 aa, Homo sapiens
  CDR3 for beta chain variable domain of TCR clone 354130 (TRBV11-2, TRBJ2-5)
CASSRGPSETQYF

SEQ ID NO: 708261 - protein, 12 aa, Homo sapiens
  CDR3 for alpha chain variable domain of TCR clone 354131 (TRAV25, TRAJ31)
CAGHLNNARLMF

SEQ ID NO: 708262 - protein, 16 aa, Homo sapiens
  CDR3 for beta chain variable domain of TCR clone 354131 (TRBV18, TRBJ2-7)
CASSPRSQGISYEQYF

SEQ ID NO: 708263 - protein, 13 aa, Homo sapiens
  CDR3 for alpha chain variable domain of TCR clone 354132 (TRAV12-1, TRAJ9)
CVVLNTGGFKNIF

SEQ ID NO: 708264 - protein, 13 aa, Homo sapiens
  CDR3 for beta chain variable domain of TCR clone 354132 (TRBV19, TRBJ1-2)
CASSVPGQDGYTF

SEQ ID NO: 708265 - protein, 17 aa, Homo sapiens
  CDR3 for alpha chain variable domain of TCR clone 354133 (TRAV2, TRAJ36)
CAVEDRGNWGKQPLLWD

SEQ ID NO: 708266 - protein, 13 aa, Homo sapiens
  CDR3 for beta chain variable domain of TCR clone 354133 (TRBV7-9, TRBJ2-5)
ASSLDTAQETQYF

SEQ ID NO: 708267 - protein, 13 aa, Homo sapiens
  CDR3 for alpha chain variable domain of TCR clone 354134 (TRAV8-6, TRAJ58)
CAVRETSGSRLTF

SEQ ID NO: 708268 - protein, 15 aa, Homo sapiens
  CDR3 for beta chain variable domain of TCR clone 354134 (TRBV28, TRBJ2-5)
CASSYLAGGPETQYF

SEQ ID NO: 708269 - protein, 17 aa, Homo sapiens
  CDR3 for alpha chain variable domain of TCR clone 354135 (TRAV3, TRAJ6)
SAVRDGPRAGGSYIPPF

SEQ ID NO: 708270 - protein, 14 aa, Homo sapiens
  CDR3 for beta chain variable domain of TCR clone 354135 (TRBV7-2, TRBJ2-7)
CASSPKTSFYEQYF

SEQ ID NO: 708271 - protein, 14 aa, Homo sapiens
  CDR3 for alpha chain variable domain of TCR clone 354136 (TRAV29/DV5, TRAJ4)
CAATVLGGYNKRIF

SEQ ID NO: 708272 - protein, 18 aa, Homo sapiens
  CDR3 for beta chain variable domain of TCR clone 354136 (TRBV12-4, TRBJ2-2)
CASSLVAGTRGRTGELFF

SEQ ID NO: 708273 - protein, 17 aa, Homo sapiens
  CDR3 for alpha chain variable domain of TCR clone 354137 (TRAV13-1, TRAJ28)
CAASLPYSGAGSYQLTF

SEQ ID NO: 708274 - protein, 12 aa, Homo sapiens
  CDR3 for beta chain variable domain of TCR clone 354137 (TRBV11-2, TRBJ2-2)
CASSLPTGELFF

SEQ ID NO: 708275 - protein, 11 aa, Homo sapiens
  CDR3 for alpha chain variable domain of TCR clone 354138 (TRAV21, TRAJ20)
CAVRDDYKLSF

SEQ ID NO: 708276 - protein, 12 aa, Homo sapiens
  CDR3 for beta chain variable domain of TCR clone 354138 (TRBV28, TRBJ2-7)
CASTGNHYEQYF

SEQ ID NO: 708277 - protein, 13 aa, Homo sapiens
  CDR3 for alpha chain variable domain of TCR clone 354139 (TRAV8-3, TRAJ43)
CAVGPENNNDMRF

SEQ ID NO: 708278 - protein, 13 aa, Homo sapiens
  CDR3 for beta chain variable domain of TCR clone 354139 (TRBV29-1, TRBJ2-1)
CSVEGGRVNEQFF

SEQ ID NO: 708279 - protein, 16 aa, Homo sapiens
  CDR3 for alpha chain variable domain of TCR clone 354140 (TRAV20, TRAJ4)
CAVAAPFSGGYNKLIF

SEQ ID NO: 708280 - protein, 12 aa, Homo sapiens
  CDR3 for beta chain variable domain of TCR clone 354140 (TRBV7-3, TRBJ1-1)
CQQPGLGAEAFF

SEQ ID NO: 708281 - protein, 17 aa, Homo sapiens
  CDR3 for alpha chain variable domain of TCR clone 354141 (TRAV3, TRAJ42)
CAVRDRGYGGSQGNLIF

SEQ ID NO: 708282 - protein, 13 aa, Homo sapiens
  CDR3 for beta chain variable domain of TCR clone 354141 (TRBV20-1, TRBJ2-5)
CSARRGTGATQYF

SEQ ID NO: 708283 - protein, 13 aa, Homo sapiens
  CDR3 for alpha chain variable domain of TCR clone 354142 (TRAV13-1, TRAJ10)
CAALEGGGNKLTF

SEQ ID NO: 708284 - protein, 17 aa, Homo sapiens
  CDR3 for beta chain variable domain of TCR clone 354142 (TRBV7-3, TRBJ2-2)
CASSLSGTSGGTEELFF

SEQ ID NO: 708285 - protein, 17 aa, Homo sapiens
  CDR3 for alpha chain variable domain of TCR clone 354143 (TRAV26-1, TRAJ27)
CIVSTPWINTNAGKSIF

SEQ ID NO: 708286 - protein, 16 aa, Homo sapiens
  CDR3 for beta chain variable domain of TCR clone 354143 (TRBV7-9, TRBJ2-1)
CASSLDPGLAIDEQFF

SEQ ID NO: 708287 - protein, 19 aa, Homo sapiens
  CDR3 for alpha chain variable domain of TCR clone 354144 (TRAV25, TRAJ43)
TATQTTDVGTYFCAVFMLF

SEQ ID NO: 708288 - protein, 13 aa, Homo sapiens
  CDR3 for beta chain variable domain of TCR clone 354144 (TRBV7-9, TRBJ1-2)
CASSLKQNYGYTF

SEQ ID NO: 708289 - protein, 13 aa, Homo sapiens
  CDR3 for alpha chain variable domain of TCR clone 354145 (TRAV20, TRAJ54)
CAVQAGGAQKLVF

SEQ ID NO: 708290 - protein, 17 aa, Homo sapiens
  CDR3 for beta chain variable domain of TCR clone 354145 (TRBV7-9, TRBJ2-1)
CASSLVASYPSYNEQFF

SEQ ID NO: 708291 - protein, 13 aa, Homo sapiens
  CDR3 for alpha chain variable domain of TCR clone 354146 (TRAV17, TRAJ11)
CATRSSGYSTLTF

SEQ ID NO: 708292 - protein, 13 aa, Homo sapiens
  CDR3 for beta chain variable domain of TCR clone 354146 (TRBV4-2, TRBJ1-1)
CASSQAGNTEAFF

SEQ ID NO: 708293 - protein, 14 aa, Homo sapiens
  CDR3 for alpha chain variable domain of TCR clone 354147 (TRAV1-2, TRAJ8)
CAVREDTGFQKLVF

SEQ ID NO: 708294 - protein, 15 aa, Homo sapiens
  CDR3 for beta chain variable domain of TCR clone 354147 (TRBV7-2, TRBJ2-3)
YASSLVVRGPDTQYF

SEQ ID NO: 708295 - protein, 16 aa, Homo sapiens
  CDR3 for alpha chain variable domain of TCR clone 354148 (TRAV3, TRAJ21)
CAVRDIERGNFNSFYF

SEQ ID NO: 708296 - protein, 13 aa, Homo sapiens
  CDR3 for beta chain variable domain of TCR clone 354148 (TRBV27, TRBJ2-7)
CASSLTTGYEQYF

SEQ ID NO: 708297 - protein, 14 aa, Homo sapiens
  CDR3 for alpha chain variable domain of TCR clone 354149 (TRAV12-2, TRAJ13)
CAVKKTGGYQKVTF

SEQ ID NO: 708298 - protein, 14 aa, Homo sapiens
  CDR3 for beta chain variable domain of TCR clone 354149 (TRBV7-2, TRBJ2-7)
CASSSISGFSEQYF

SEQ ID NO: 708299 - protein, 13 aa, Homo sapiens
  CDR3 for alpha chain variable domain of TCR clone 354150 (TRAV2, TRAJ15)
CAVASQAGTALIF

SEQ ID NO: 708300 - protein, 14 aa, Homo sapiens
  CDR3 for beta chain variable domain of TCR clone 354150 (TRBV7-3, TRBJ2-3)
CASSSTGVADTQYF

SEQ ID NO: 708301 - protein, 13 aa, Homo sapiens
  CDR3 for alpha chain variable domain of TCR clone 354151 (TRAV12-2, TRAJ52)
CAVGGTSYGKLTF

SEQ ID NO: 708302 - protein, 14 aa, Homo sapiens
  CDR3 for beta chain variable domain of TCR clone 354151 (TRBV19, TRBJ2-1)
CASPTFALSGEQFF

SEQ ID NO: 708303 - protein, 12 aa, Homo sapiens
  CDR3 for alpha chain variable domain of TCR clone 354152 (TRAV21, TRAJ40)
CATEPGTYKYIF

SEQ ID NO: 708304 - protein, 16 aa, Homo sapiens
  CDR3 for beta chain variable domain of TCR clone 354152 (TRBV28, TRBJ2-1)
CASRQRTSGRASDRFF

SEQ ID NO: 708305 - protein, 13 aa, Homo sapiens
  CDR3 for alpha chain variable domain of TCR clone 354153 (TRAV13-2, TRAJ40)
CAEFTSGTYKYIF

SEQ ID NO: 708306 - protein, 17 aa, Homo sapiens
  CDR3 for beta chain variable domain of TCR clone 354153 (TRBV20-1, TRBJ2-1)
CSASSSGLAGSYNEQFF

SEQ ID NO: 708307 - protein, 15 aa, Homo sapiens
  CDR3 for alpha chain variable domain of TCR clone 354154 (TRAV23/DV6, TRAJ18)
CPARYRGSTLGGLYF

SEQ ID NO: 708308 - protein, 16 aa, Homo sapiens
  CDR3 for beta chain variable domain of TCR clone 354154 (TRBV20-1, TRBJ1-2)
CSASMGQGVANYGYTF

SEQ ID NO: 708309 - protein, 17 aa, Homo sapiens
  CDR3 for alpha chain variable domain of TCR clone 354155 (TRAV26-2, TRAJ42)
CILRDVGYGGSQGNLIF

SEQ ID NO: 708310 - protein, 15 aa, Homo sapiens
  CDR3 for beta chain variable domain of TCR clone 354155 (TRBV28, TRBJ2-7)
CASSPGGRGFYEQYF

SEQ ID NO: 708311 - protein, 14 aa, Homo sapiens
  CDR3 for alpha chain variable domain of TCR clone 354156 (TRAV12-3, TRAJ6)
CAIIATGGSYIPTF

SEQ ID NO: 708312 - protein, 16 aa, Homo sapiens
  CDR3 for beta chain variable domain of TCR clone 354156 (TRBV4-2, TRBJ2-1)
CASSPRAGQGANEQFF

SEQ ID NO: 708313 - protein, 14 aa, Homo sapiens
  CDR3 for alpha chain variable domain of TCR clone 354157 (TRAV17, TRAJ54)
CATDANQGSQKLVF

SEQ ID NO: 708314 - protein, 14 aa, Homo sapiens
  CDR3 for beta chain variable domain of TCR clone 354157 (TRBV4-2, TRBJ2-1)
CASGLDRAYNEQFF

SEQ ID NO: 708315 - protein, 12 aa, Homo sapiens
  CDR3 for alpha chain variable domain of TCR clone 354158 (TRAV23/DV6, TRAJ36)
CAASNEANNLFF

SEQ ID NO: 708316 - protein, 15 aa, Homo sapiens
  CDR3 for beta chain variable domain of TCR clone 354158 (TRBV20-1, TRBJ1-1)
CSASRGVTGNTEAFF

SEQ ID NO: 708317 - protein, 14 aa, Homo sapiens
  CDR3 for alpha chain variable domain of TCR clone 354159 (TRAV12-2, TRAJ44)
CAVNPAGTASKLTF

SEQ ID NO: 708318 - protein, 16 aa, Homo sapiens
  CDR3 for beta chain variable domain of TCR clone 354159 (TRBV2, TRBJ2-1)
CASSVGVSLSYNEQFF

SEQ ID NO: 708319 - protein, 16 aa, Homo sapiens
  CDR3 for alpha chain variable domain of TCR clone 354160 (TRAV30, TRAJ24)
CGTEIVDADSWGKFQF

SEQ ID NO: 708320 - protein, 13 aa, Homo sapiens
  CDR3 for beta chain variable domain of TCR clone 354160 (TRBV28, TRBJ2-7)
CASKAGGVYEQYF

SEQ ID NO: 708321 - protein, 14 aa, Homo sapiens
  CDR3 for alpha chain variable domain of TCR clone 354161 (TRAV13-2, TRAJ22)
CADGTLCSARQLTF

SEQ ID NO: 708322 - protein, 16 aa, Homo sapiens
  CDR3 for beta chain variable domain of TCR clone 354161 (TRBV19, TRBJ2-1)
CASSSKGTRSYNEQFF

SEQ ID NO: 708323 - protein, 13 aa, Homo sapiens
  CDR3 for alpha chain variable domain of TCR clone 354162 (TRAV2, TRAJ24)
CAVPTDSWGKLQL

SEQ ID NO: 708324 - protein, 13 aa, Homo sapiens
  CDR3 for beta chain variable domain of TCR clone 354162 (TRBV20-1, TRBJ1-1)
CSARGGGNTEAFF

SEQ ID NO: 708325 - protein, 12 aa, Homo sapiens
  CDR3 for alpha chain variable domain of TCR clone 354163 (TRAV13-2, TRAJ23)
CAERHRGGKLIF

SEQ ID NO: 708326 - protein, 16 aa, Homo sapiens
  CDR3 for beta chain variable domain of TCR clone 354163 (TRBV20-1, TRBJ1-4)
CCAPGQGLITNEKLFF

SEQ ID NO: 708327 - protein, 13 aa, Homo sapiens
  CDR3 for alpha chain variable domain of TCR clone 354164 (TRAV30, TRAJ39)
CGTENNAGNMLTF

SEQ ID NO: 708328 - protein, 13 aa, Homo sapiens
  CDR3 for beta chain variable domain of TCR clone 354164 (TRBV19, TRBJ1-2)
CASSVPGQDGYTF

SEQ ID NO: 708329 - protein, 14 aa, Homo sapiens
  CDR3 for alpha chain variable domain of TCR clone 354165 (TRAV12-2, TRAJ17)
CAVNIKAAGNKLTF

SEQ ID NO: 708330 - protein, 12 aa, Homo sapiens
  CDR3 for beta chain variable domain of TCR clone 354165 (TRBV11-2, TRBJ2-5)
CASSLDTQTQYF

SEQ ID NO: 708331 - protein, 14 aa, Homo sapiens
  CDR3 for alpha chain variable domain of TCR clone 354166 (TRAV17, TRAJ57)
CATDPQCGSEKLVF

SEQ ID NO: 708332 - protein, 13 aa, Homo sapiens
  CDR3 for beta chain variable domain of TCR clone 354166 (TRBV19, TRBJ2-7)
CASSPRQSYEQYF

SEQ ID NO: 708333 - protein, 13 aa, Homo sapiens
  CDR3 for alpha chain variable domain of TCR clone 354167 (TRAV8-1, TRAJ8)
CAVNRTGFQKLVF

SEQ ID NO: 708334 - protein, 14 aa, Homo sapiens
  CDR3 for beta chain variable domain of TCR clone 354167 (TRBV19, TRBJ2-1)
CASPTFVLSGEQFF

SEQ ID NO: 708335 - protein, 13 aa, Homo sapiens
  CDR3 for alpha chain variable domain of TCR clone 354168 (TRAV13-1, TRAJ53)
CAASKGSNYKLTF

SEQ ID NO: 708336 - protein, 14 aa, Homo sapiens
  CDR3 for beta chain variable domain of TCR clone 354168 (TRBV11-3, TRBJ2-1)
CASSATTSGSIQFF

SEQ ID NO: 708337 - protein, 14 aa, Homo sapiens
  CDR3 for alpha chain variable domain of TCR clone 354169 (TRAV12-2, TRAJ13)
CAVKKTGGNQKVTF

SEQ ID NO: 708338 - protein, 13 aa, Homo sapiens
  CDR3 for beta chain variable domain of TCR clone 354169 (TRBV10-3, TRBJ2-7)
CASKLAVNYEQYF

SEQ ID NO: 708339 - protein, 13 aa, Homo sapiens
  CDR3 for alpha chain variable domain of TCR clone 354170 (TRAV8-3, TRAJ28)
CAVGAVGSYQLTF

SEQ ID NO: 708340 - protein, 17 aa, Homo sapiens
  CDR3 for beta chain variable domain of TCR clone 354170 (TRBV18, TRBJ2-1)
CASSPRVAGGSYNEQFF

SEQ ID NO: 708341 - protein, 17 aa, Homo sapiens
  CDR3 for alpha chain variable domain of TCR clone 354171 (TRAV3, TRAJ42)
CAVRDRDYGGSQGNLIF

SEQ ID NO: 708342 - protein, 15 aa, Homo sapiens
  CDR3 for beta chain variable domain of TCR clone 354171 (TRBV20-1, TRBJ2-7)
CSARDPVKGEGEQYF

SEQ ID NO: 708343 - protein, 15 aa, Homo sapiens
  CDR3 for alpha chain variable domain of TCR clone 354172 (TRAV3, TRAJ22)
CAVRDRGGSARQLTF

SEQ ID NO: 708344 - protein, 14 aa, Homo sapiens
  CDR3 for beta chain variable domain of TCR clone 354172 (TRBV20-1, TRBJ2-5)
CSALVPGYQETLYF

SEQ ID NO: 708345 - protein, 15 aa, Homo sapiens
  CDR3 for alpha chain variable domain of TCR clone 354173 (TRAV17, TRAJ52)
CATEAGGTSYGKLTF

SEQ ID NO: 708346 - protein, 12 aa, Homo sapiens
  CDR3 for beta chain variable domain of TCR clone 354173 (TRBV19, TRBJ1-2)
ISVPERDYGYTF

SEQ ID NO: 708347 - protein, 15 aa, Homo sapiens
  CDR3 for alpha chain variable domain of TCR clone 354174 (TRAV8-2, TRAJ40)
CVALGTTSGTYKYIF

SEQ ID NO: 708348 - protein, 16 aa, Homo sapiens
  CDR3 for beta chain variable domain of TCR clone 354174 (TRBV7-3, TRBJ2-1)
CASSVEGYRSYNEQFF

SEQ ID NO: 708349 - protein, 16 aa, Homo sapiens
  CDR3 for alpha chain variable domain of TCR clone 354175 (TRAV16, TRAJ4)
CALSRMFSGGYNKLIF

SEQ ID NO: 708350 - protein, 16 aa, Homo sapiens
  CDR3 for beta chain variable domain of TCR clone 354175 (TRBV12-4, TRBJ1-5)
CASSRPVGGSNQPQHV

SEQ ID NO: 708351 - protein, 15 aa, Homo sapiens
  CDR3 for alpha chain variable domain of TCR clone 354176 (TRAV12-1, TRAJ45)
CVVLSGGGGADGLTF

SEQ ID NO: 708352 - protein, 15 aa, Homo sapiens
  CDR3 for beta chain variable domain of TCR clone 354176 (TRBV11-2, TRBJ2-1)
CASSPGQGPYNEQFF

SEQ ID NO: 708353 - protein, 11 aa, Homo sapiens
  CDR3 for alpha chain variable domain of TCR clone 354177 (TRAV2, TRAJ13)
CASGGCQKVTF

SEQ ID NO: 708354 - protein, 17 aa, Homo sapiens
  CDR3 for beta chain variable domain of TCR clone 354177 (TRBV7-3, TRBJ2-3)
CASSLMKRMRGADTQYF

SEQ ID NO: 708355 - protein, 12 aa, Homo sapiens
  CDR3 for alpha chain variable domain of TCR clone 354178 (TRAV36/DV7, TRAJ40)
CAVGTGTYKYIF

SEQ ID NO: 708356 - protein, 12 aa, Homo sapiens
  CDR3 for beta chain variable domain of TCR clone 354178 (TRBV12-4, TRBJ1-3)
CASGFSGNTIYF

SEQ ID NO: 708357 - protein, 17 aa, Homo sapiens
  CDR3 for alpha chain variable domain of TCR clone 354179 (TRAV3, TRAJ12)
CAVRERGGMDSSYKLIF

SEQ ID NO: 708358 - protein, 14 aa, Homo sapiens
  CDR3 for beta chain variable domain of TCR clone 354179 (TRBV12-4, TRBJ1-1)
CASSFQSFGTEAFF

SEQ ID NO: 708359 - protein, 13 aa, Homo sapiens
  CDR3 for alpha chain variable domain of TCR clone 354180 (TRAV30, TRAJ24)
CGTVTDSWGKLQL

SEQ ID NO: 708360 - protein, 12 aa, Homo sapiens
  CDR3 for beta chain variable domain of TCR clone 354180 (TRBV11-3, TRBJ1-1)
CASSHRQGEAFF

SEQ ID NO: 708361 - protein, 13 aa, Homo sapiens
  CDR3 for alpha chain variable domain of TCR clone 354181 (TRAV3, TRAJ21)
CAVREPDFNKFYF

SEQ ID NO: 708362 - protein, 14 aa, Homo sapiens
  CDR3 for beta chain variable domain of TCR clone 354181 (TRBV19, TRBJ2-5)
CASSMTGQQETQYF

SEQ ID NO: 708363 - protein, 14 aa, Homo sapiens
  CDR3 for alpha chain variable domain of TCR clone 354182 (TRAV1-2, TRAJ16)
CAVNRFSDCQKLLF

SEQ ID NO: 708364 - protein, 15 aa, Homo sapiens
  CDR3 for beta chain variable domain of TCR clone 354182 (TRBV7-9, TRBJ1-6)
CASSSPGRGNSHLHF

SEQ ID NO: 708365 - protein, 14 aa, Homo sapiens
  CDR3 for alpha chain variable domain of TCR clone 354183 (TRAV38-1, TRAJ48)
CAFMANFGNEKLAF

SEQ ID NO: 708366 - protein, 16 aa, Homo sapiens
  CDR3 for beta chain variable domain of TCR clone 354183 (TRBV4-1, TRBJ2-7)
CASRPSGGGADNEQYF

SEQ ID NO: 708367 - protein, 15 aa, Homo sapiens
  CDR3 for alpha chain variable domain of TCR clone 354184 (TRAV21, TRAJ52)
CAVRGGGTSYGKLTF

SEQ ID NO: 708368 - protein, 15 aa, Homo sapiens
  CDR3 for beta chain variable domain of TCR clone 354184 (TRBV20-1, TRBJ2-7)
CSAESGTSGAYEQYF

SEQ ID NO: 708369 - protein, 14 aa, Homo sapiens
  CDR3 for alpha chain variable domain of TCR clone 354185 (TRAV12-2, TRAJ40)
CAVKIPSGTYKYIF

SEQ ID NO: 708370 - protein, 14 aa, Homo sapiens
  CDR3 for beta chain variable domain of TCR clone 354185 (TRBV27, TRBJ2-2)
CASSLGAATGELFF

SEQ ID NO: 708371 - protein, 15 aa, Homo sapiens
  CDR3 for alpha chain variable domain of TCR clone 354186 (TRAV27, TRAJ38)
CAGRFNAGNNRKLIW

SEQ ID NO: 708372 - protein, 13 aa, Homo sapiens
  CDR3 for beta chain variable domain of TCR clone 354186 (TRBV12-5, TRBJ2-3)
CASQNRCTDTQYF

SEQ ID NO: 708373 - protein, 13 aa, Homo sapiens
  CDR3 for alpha chain variable domain of TCR clone 354187 (TRAV13-2, TRAJ48)
CAEMDFGNEKLTF

SEQ ID NO: 708374 - protein, 12 aa, Homo sapiens
  CDR3 for beta chain variable domain of TCR clone 354187 (TRBV2, TRBJ2-7)
CASKRGSYEQYF

SEQ ID NO: 708375 - protein, 13 aa, Homo sapiens
  CDR3 for alpha chain variable domain of TCR clone 354188 (TRAV16, TRAJ57)
CALSGQGGSEKLV

SEQ ID NO: 708376 - protein, 13 aa, Homo sapiens
  CDR3 for beta chain variable domain of TCR clone 354188 (TRBV5-4, TRBJ2-1)
CASSLQGPREQFF

SEQ ID NO: 708377 - protein, 14 aa, Homo sapiens
  CDR3 for alpha chain variable domain of TCR clone 354189 (TRAV29/DV5, TRAJ36)
CAARRKTGANNLFF

SEQ ID NO: 708378 - protein, 13 aa, Homo sapiens
  CDR3 for beta chain variable domain of TCR clone 354189 (TRBV7-2, TRBJ2-7)
CASSSPSGSEQYF

SEQ ID NO: 708379 - protein, 15 aa, Homo sapiens
  CDR3 for alpha chain variable domain of TCR clone 354190 (TRAV35, TRAJ38)
CAGFSNAGSNRKLIW

SEQ ID NO: 708380 - protein, 15 aa, Homo sapiens
  CDR3 for beta chain variable domain of TCR clone 354190 (TRBV7-8, TRBJ2-1)
CASSLAGGLYNKQFF

SEQ ID NO: 708381 - protein, 14 aa, Homo sapiens
  CDR3 for alpha chain variable domain of TCR clone 354191 (TRAV17, TRAJ53)
CGVGSGGSNYKLTF

SEQ ID NO: 708382 - protein, 13 aa, Homo sapiens
  CDR3 for beta chain variable domain of TCR clone 354191 (TRBV7-9, TRBJ1-2)
CASSLKQNYGYTF

SEQ ID NO: 708383 - protein, 12 aa, Homo sapiens
  CDR3 for alpha chain variable domain of TCR clone 354192 (TRAV21, TRAJ37)
CAVRGNTGKLIF

SEQ ID NO: 708384 - protein, 14 aa, Homo sapiens
  CDR3 for beta chain variable domain of TCR clone 354192 (TRBV19, TRBJ2-1)
CASEVTGGRNEQFF

SEQ ID NO: 708385 - protein, 14 aa, Homo sapiens
  CDR3 for alpha chain variable domain of TCR clone 354193 (TRAV12-2, TRAJ17)
CAVLFKAAGNKLTF

SEQ ID NO: 708386 - protein, 15 aa, Homo sapiens
  CDR3 for beta chain variable domain of TCR clone 354193 (TRBV9, TRBJ2-1)
CASSVGSGFYNEQFF

SEQ ID NO: 708387 - protein, 23 aa, Homo sapiens
  CDR3 for alpha chain variable domain of TCR clone 354194 (TRAV10, TRAJ34)
CVVSGKHRQAHLWDWDQITSLSK

SEQ ID NO: 708388 - protein, 13 aa, Homo sapiens
  CDR3 for beta chain variable domain of TCR clone 354194 (TRBV7-2, TRBJ2-2)
CASSLAVTGELFF

SEQ ID NO: 708389 - protein, 17 aa, Homo sapiens
  CDR3 for alpha chain variable domain of TCR clone 354195 (TRAV3, TRAJ42)
CAVRDRDDGGSKGNLIF

SEQ ID NO: 708390 - protein, 13 aa, Homo sapiens
  CDR3 for beta chain variable domain of TCR clone 354195 (TRBV10-3, TRBJ2-7)
CASKLAVNYEQYF

SEQ ID NO: 708391 - protein, 14 aa, Homo sapiens
  CDR3 for alpha chain variable domain of TCR clone 354196 (TRAV2, TRAJ22)
CAVEVKRVVRELTF

SEQ ID NO: 708392 - protein, 14 aa, Homo sapiens
  CDR3 for beta chain variable domain of TCR clone 354196 (TRBV19, TRBJ2-2)
CASTPGYSGGELFF

SEQ ID NO: 708393 - protein, 13 aa, Homo sapiens
  CDR3 for alpha chain variable domain of TCR clone 354197 (TRAV2, TRAJ40)
CAVVTSGTYKYIF

SEQ ID NO: 708394 - protein, 13 aa, Homo sapiens
  CDR3 for beta chain variable domain of TCR clone 354197 (TRBV27, TRBJ2-7)
CASSLRHRYEQYF

SEQ ID NO: 708395 - protein, 15 aa, Homo sapiens
  CDR3 for alpha chain variable domain of TCR clone 354198 (TRAV20, TRAJ4)
CAVDGSSGGYNKLIF

SEQ ID NO: 708396 - protein, 14 aa, Homo sapiens
  CDR3 for beta chain variable domain of TCR clone 354198 (TRBV7-8, TRBJ2-7)
CASTLGGALGEQYF

SEQ ID NO: 708397 - protein, 13 aa, Homo sapiens
  CDR3 for alpha chain variable domain of TCR clone 354199 (TRAV16, TRAJ10)
CALLTGGGNKLTF

SEQ ID NO: 708398 - protein, 14 aa, Homo sapiens
  CDR3 for beta chain variable domain of TCR clone 354199 (TRBV7-2, TRBJ2-7)
CASRSQGAAYEQYF

SEQ ID NO: 708399 - protein, 13 aa, Homo sapiens
  CDR3 for alpha chain variable domain of TCR clone 354200 (TRAV8-3, TRAJ44)
CAVVPGTASKLTF

SEQ ID NO: 708400 - protein, 15 aa, Homo sapiens
  CDR3 for beta chain variable domain of TCR clone 354200 (TRBV6-6, TRBJ2-7)
CASSYSYGGSYEQYF

SEQ ID NO: 708401 - protein, 16 aa, Homo sapiens
  CDR3 for alpha chain variable domain of TCR clone 354201 (TRAV8-3, TRAJ13)
CAVGAYPSGGHQKVTF

SEQ ID NO: 708402 - protein, 15 aa, Homo sapiens
  CDR3 for beta chain variable domain of TCR clone 354201 (TRBV19, TRBJ1-5)
CASSIVWADKQPQHF

SEQ ID NO: 708403 - protein, 12 aa, Homo sapiens
  CDR3 for alpha chain variable domain of TCR clone 354202 (TRAV29/DV5, TRAJ26)
CAAIPRGQNFVF

SEQ ID NO: 708404 - protein, 15 aa, Homo sapiens
  CDR3 for beta chain variable domain of TCR clone 354202 (TRBV19, TRBJ1-5)
CASSDSGPRNQPQHF

SEQ ID NO: 708405 - protein, 12 aa, Homo sapiens
  CDR3 for alpha chain variable domain of TCR clone 354203 (TRAV25, TRAJ29)
CAGPRGNTPLVF

SEQ ID NO: 708406 - protein, 12 aa, Homo sapiens
  CDR3 for beta chain variable domain of TCR clone 354203 (TRBV11-2, TRBJ2-1)
CASSPGNNEQFF

SEQ ID NO: 708407 - protein, 15 aa, Homo sapiens
  CDR3 for alpha chain variable domain of TCR clone 354204 (TRAV8-3, TRAJ45)
CASSYSGGGADGLTF

SEQ ID NO: 708408 - protein, 15 aa, Homo sapiens
  CDR3 for beta chain variable domain of TCR clone 354204 (TRBV10-3, TRBJ2-7)
CTSVPPNSVNYEQYF

SEQ ID NO: 708409 - protein, 14 aa, Homo sapiens
  CDR3 for alpha chain variable domain of TCR clone 354205 (TRAV38-1, TRAJ28)
CAFTSGAGSYQLTF

SEQ ID NO: 708410 - protein, 18 aa, Homo sapiens
  CDR3 for beta chain variable domain of TCR clone 354205 (TRBV7-9, TRBJ1-1)
CASSKPWDTMGINTEAFF

SEQ ID NO: 708411 - protein, 16 aa, Homo sapiens
  CDR3 for alpha chain variable domain of TCR clone 354206 (TRAV17, TRAJ53)
CATDALSGGSKYKLTF

SEQ ID NO: 708412 - protein, 12 aa, Homo sapiens
  CDR3 for beta chain variable domain of TCR clone 354206 (TRBV5-1, TRBJ2-7)
CASSFRGYEQYF

SEQ ID NO: 708413 - protein, 14 aa, Homo sapiens
  CDR3 for alpha chain variable domain of TCR clone 354207 (TRAV2, TRAJ3)
CAVDSYSSASKIIF

SEQ ID NO: 708414 - protein, 16 aa, Homo sapiens
  CDR3 for beta chain variable domain of TCR clone 354207 (TRBV20-1, TRBJ1-5)
CSAELPGQQTNQPQHF

SEQ ID NO: 708415 - protein, 17 aa, Homo sapiens
  CDR3 for alpha chain variable domain of TCR clone 354208 (TRAV1-2, TRAJ9)
CLLPLCCLKYWRIQTIF

SEQ ID NO: 708416 - protein, 16 aa, Homo sapiens
  CDR3 for beta chain variable domain of TCR clone 354208 (TRBV11-2, TRBJ2-1)
CASSPRLAGVYNEQFF

SEQ ID NO: 708417 - protein, 13 aa, Homo sapiens
  CDR3 for alpha chain variable domain of TCR clone 354209 (TRAV17, TRAJ26)
CATVDNYGQNFVF

SEQ ID NO: 708418 - protein, 13 aa, Homo sapiens
  CDR3 for beta chain variable domain of TCR clone 354209 (TRBV14, TRBJ1-1)
CASSREFGTEAFS

SEQ ID NO: 708419 - protein, 11 aa, Homo sapiens
  CDR3 for alpha chain variable domain of TCR clone 354210 (TRAV20, TRAJ40)
CAVGGTYKYIF

SEQ ID NO: 708420 - protein, 15 aa, Homo sapiens
  CDR3 for beta chain variable domain of TCR clone 354210 (TRBV6-3, TRBJ2-2)
YASSFLATLTGELFF

SEQ ID NO: 708421 - protein, 12 aa, Homo sapiens
  CDR3 for alpha chain variable domain of TCR clone 354211 (TRAV12-3, TRAJ20)
CAMVRGDYKLSF

SEQ ID NO: 708422 - protein, 11 aa, Homo sapiens
  CDR3 for beta chain variable domain of TCR clone 354211 (TRBV12-4, TRBJ2-2)
CASSSAGELFF

SEQ ID NO: 708423 - protein, 16 aa, Homo sapiens
  CDR3 for alpha chain variable domain of TCR clone 354212 (TRAV30, TRAJ24)
CGTEIVDAHSWGKFQF

SEQ ID NO: 708424 - protein, 18 aa, Homo sapiens
  CDR3 for beta chain variable domain of TCR clone 354212 (TRBV7-9, TRBJ2-7)
CASSLTTSGSRTWYEQYF

SEQ ID NO: 708425 - protein, 17 aa, Homo sapiens
  CDR3 for alpha chain variable domain of TCR clone 354213 (TRAV3, TRAJ42)
CAVRDREYGGSQGNLIF

SEQ ID NO: 708426 - protein, 14 aa, Homo sapiens
  CDR3 for beta chain variable domain of TCR clone 354213 (TRBV7-7, TRBJ2-2)
CATRQDSDTGELFF

SEQ ID NO: 708427 - protein, 14 aa, Homo sapiens
  CDR3 for alpha chain variable domain of TCR clone 354214 (TRAV26-1, TRAJ38)
CIADNAGNNRKLIW

SEQ ID NO: 708428 - protein, 13 aa, Homo sapiens
  CDR3 for beta chain variable domain of TCR clone 354214 (TRBV29-1, TRBJ2-1)
CSVEGGRVNEQFF

SEQ ID NO: 708429 - protein, 14 aa, Homo sapiens
  CDR3 for alpha chain variable domain of TCR clone 354215 (TRAV1-2, TRAJ16)
CAVNRFSDGQKLLF

SEQ ID NO: 708430 - protein, 14 aa, Homo sapiens
  CDR3 for beta chain variable domain of TCR clone 354215 (TRBV6-1, TRBJ2-2)
CASRGQSYTGELFF

SEQ ID NO: 708431 - protein, 12 aa, Homo sapiens
  CDR3 for alpha chain variable domain of TCR clone 354216 (TRAV3, TRAJ31)
CAVRDGNARLMF

SEQ ID NO: 708432 - protein, 18 aa, Homo sapiens
  CDR3 for beta chain variable domain of TCR clone 354216 (TRBV7-2, TRBJ2-3)
CASSLKREGGGITETQYF

SEQ ID NO: 708433 - protein, 18 aa, Homo sapiens
  CDR3 for alpha chain variable domain of TCR clone 354217 (TRAV21, TRAJ52)
CAVRPSPAGGTSYGKLTF

SEQ ID NO: 708434 - protein, 13 aa, Homo sapiens
  CDR3 for beta chain variable domain of TCR clone 354217 (TRBV29-1, TRBJ2-2)
CSVYREDNGELFF

SEQ ID NO: 708435 - protein, 14 aa, Homo sapiens
  CDR3 for alpha chain variable domain of TCR clone 354218 (TRAV12-2, TRAJ36)
CAVNPPPGAHNLFF

SEQ ID NO: 708436 - protein, 13 aa, Homo sapiens
  CDR3 for beta chain variable domain of TCR clone 354218 (TRBV20-1, TRBJ1-6)
CSAPTGLGSPLHF

SEQ ID NO: 708437 - protein, 13 aa, Homo sapiens
  CDR3 for alpha chain variable domain of TCR clone 354219 (TRAV8-3, TRAJ43)
CAVVPYNNNDMRF

SEQ ID NO: 708438 - protein, 13 aa, Homo sapiens
  CDR3 for beta chain variable domain of TCR clone 354219 (TRBV20-1, TRBJ2-7)
CSARPSTNYEQYF

SEQ ID NO: 708439 - protein, 12 aa, Homo sapiens
  CDR3 for alpha chain variable domain of TCR clone 354220 (TRAV12-2, TRAJ47)
CAVAEYGNKLVF

SEQ ID NO: 708440 - protein, 15 aa, Homo sapiens
  CDR3 for beta chain variable domain of TCR clone 354220 (TRBV28, TRBJ2-1)
CAGSIIAGGRSEQFF

SEQ ID NO: 708441 - protein, 14 aa, Homo sapiens
  CDR3 for alpha chain variable domain of TCR clone 354221 (TRAV20, TRAJ56)
CAVQFGGANSKLTF

SEQ ID NO: 708442 - protein, 14 aa, Homo sapiens
  CDR3 for beta chain variable domain of TCR clone 354221 (TRBV20-1, TRBJ2-7)
CSAKRCRGSYEQYF

SEQ ID NO: 708443 - protein, 10 aa, Homo sapiens
  CDR3 for alpha chain variable domain of TCR clone 354222 (TRAV26-1, TRAJ22)
CIAGSRQLTF

SEQ ID NO: 708444 - protein, 18 aa, Homo sapiens
  CDR3 for beta chain variable domain of TCR clone 354222 (TRBV20-1, TRBJ2-6)
CSAETTPTHGSGANVLTF

SEQ ID NO: 708445 - protein, 15 aa, Homo sapiens
  CDR3 for alpha chain variable domain of TCR clone 354223 (TRAV26-2, TRAJ13)
CILRDLSGGDQKVTF

SEQ ID NO: 708446 - protein, 14 aa, Homo sapiens
  CDR3 for beta chain variable domain of TCR clone 354223 (TRBV19, TRBJ2-1)
CASPTFVLSGEQFF

SEQ ID NO: 708447 - protein, 16 aa, Homo sapiens
  CDR3 for alpha chain variable domain of TCR clone 354224 (TRAV3, TRAJ37)
CAVRPHGSGNTVKLIC

SEQ ID NO: 708448 - protein, 14 aa, Homo sapiens
  CDR3 for beta chain variable domain of TCR clone 354224 (TRBV25-1, TRBJ1-1)
CASTHLGGNTEAFF

SEQ ID NO: 708449 - protein, 15 aa, Homo sapiens
  CDR3 for alpha chain variable domain of TCR clone 354225 (TRAV3, TRAJ36)
CAVRASQTGANNLFV

SEQ ID NO: 708450 - protein, 14 aa, Homo sapiens
  CDR3 for beta chain variable domain of TCR clone 354225 (TRBV25-1, TRBJ1-1)
CASTHLGGNTEAFF

SEQ ID NO: 708451 - protein, 18 aa, Homo sapiens
  CDR3 for alpha chain variable domain of TCR clone 354226 (TRAV13-1, TRAJ52)
CAAKNPNAGGTSYGKLTF

SEQ ID NO: 708452 - protein, 15 aa, Homo sapiens
  CDR3 for beta chain variable domain of TCR clone 354226 (TRBV6-1, TRBJ2-3)
CASSERSGITDTQYF

SEQ ID NO: 708453 - protein, 11 aa, Homo sapiens
  CDR3 for alpha chain variable domain of TCR clone 354227 (TRAV1-1, TRAJ23)
CAVRQGGKLTF

SEQ ID NO: 708454 - protein, 13 aa, Homo sapiens
  CDR3 for beta chain variable domain of TCR clone 354227 (TRBV11-2, TRBJ2-5)
CASSRGPSETQYF

SEQ ID NO: 708455 - protein, 12 aa, Homo sapiens
  CDR3 for alpha chain variable domain of TCR clone 354228 (TRAV12-3, TRAJ42)
CAPGGSQGNLIF

SEQ ID NO: 708456 - protein, 14 aa, Homo sapiens
  CDR3 for beta chain variable domain of TCR clone 354228 (TRBV7-2, TRBJ1-6)
CASSLQGANSPLLF

SEQ ID NO: 708457 - protein, 15 aa, Homo sapiens
  CDR3 for alpha chain variable domain of TCR clone 354229 (TRAV8-4, TRAJ37)
CAVSRGSGNTGKLIF

SEQ ID NO: 708458 - protein, 15 aa, Homo sapiens
  CDR3 for beta chain variable domain of TCR clone 354229 (TRBV18, TRBJ2-7)
CASSPRSGTAYEQYF

SEQ ID NO: 708459 - protein, 17 aa, Homo sapiens
  CDR3 for alpha chain variable domain of TCR clone 354230 (TRAV13-1, TRAJ28)
CAASPPYSGAGSYQLTF

SEQ ID NO: 708460 - protein, 13 aa, Homo sapiens
  CDR3 for beta chain variable domain of TCR clone 354230 (TRBV28, TRBJ2-1)
CASRSGGLNEQFF

SEQ ID NO: 708461 - protein, 15 aa, Homo sapiens
  CDR3 for alpha chain variable domain of TCR clone 354231 (TRAV8-3, TRAJ45)
CASSYSGGGADGLTF

SEQ ID NO: 708462 - protein, 15 aa, Homo sapiens
  CDR3 for beta chain variable domain of TCR clone 354231 (TRBV27, TRBJ1-4)
CASSPRHATNEKLFF

SEQ ID NO: 708463 - protein, 19 aa, Homo sapiens
  CDR3 for alpha chain variable domain of TCR clone 354232 (TRAV8-4, TRAJ3)
CAVTGENLVQQCFHDNLWI

SEQ ID NO: 708464 - protein, 16 aa, Homo sapiens
  CDR3 for beta chain variable domain of TCR clone 354232 (TRBV4-2, TRBJ1-1)
CASSQAGFGMNTEAVF

SEQ ID NO: 708465 - protein, 14 aa, Homo sapiens
  CDR3 for alpha chain variable domain of TCR clone 354233 (TRAV26-1, TRAJ45)
CIVRVVGGADGLTF

SEQ ID NO: 708466 - protein, 16 aa, Homo sapiens
  CDR3 for beta chain variable domain of TCR clone 354233 (TRBV7-9, TRBJ1-1)
CASSLTQVRSNTEAGF

SEQ ID NO: 708467 - protein, 12 aa, Homo sapiens
  CDR3 for alpha chain variable domain of TCR clone 354234 (TRAV12-2, TRAJ21)
CAPSDNFNKFYF

SEQ ID NO: 708468 - protein, 15 aa, Homo sapiens
  CDR3 for beta chain variable domain of TCR clone 354234 (TRBV19, TRBJ1-1)
CASTSGQIQNTEAFF

SEQ ID NO: 708469 - protein, 13 aa, Homo sapiens
  CDR3 for alpha chain variable domain of TCR clone 354235 (TRAV8-6, TRAJ49)
CDVITNTGNQFYF

SEQ ID NO: 708470 - protein, 17 aa, Homo sapiens
  CDR3 for beta chain variable domain of TCR clone 354235 (TRBV11-2, TRBJ2-1)
CASSLYPPGVEYNEQFF

SEQ ID NO: 708471 - protein, 14 aa, Homo sapiens
  CDR3 for alpha chain variable domain of TCR clone 354236 (TRAV4, TRAJ6)
CLVGEAGGSYLPTF

SEQ ID NO: 708472 - protein, 16 aa, Homo sapiens
  CDR3 for beta chain variable domain of TCR clone 354236 (TRBV7-6, TRBJ2-1)
CASSLNEGPSYNEQFF

SEQ ID NO: 708473 - protein, 16 aa, Homo sapiens
  CDR3 for alpha chain variable domain of TCR clone 354237 (TRAV14/DV4, TRAJ12)
CAMREVLMDSSYKLIF

SEQ ID NO: 708474 - protein, 14 aa, Homo sapiens
  CDR3 for beta chain variable domain of TCR clone 354237 (TRBV7-2, TRBJ2-5)
CASSFTQGQETQSF

SEQ ID NO: 708475 - protein, 13 aa, Homo sapiens
  CDR3 for alpha chain variable domain of TCR clone 354238 (TRAV17, TRAJ9)
CATDYTGVFKTIF

SEQ ID NO: 708476 - protein, 20 aa, Homo sapiens
  CDR3 for beta chain variable domain of TCR clone 354238 (TRBV28, TRBJ2-1)
CASTPIGRSPGLAGGNEQFF

SEQ ID NO: 708477 - protein, 12 aa, Homo sapiens
  CDR3 for alpha chain variable domain of TCR clone 354239 (TRAV13-2, TRAJ23)
GAERHRGGKLIF

SEQ ID NO: 708478 - protein, 13 aa, Homo sapiens
  CDR3 for beta chain variable domain of TCR clone 354239 (TRBV7-9, TRBJ2-3)
CASSPGSTDTQYF

SEQ ID NO: 708479 - protein, 14 aa, Homo sapiens
  CDR3 for alpha chain variable domain of TCR clone 354240 (TRAV1-2, TRAJ8)
CAVREDTGFQKLVF

SEQ ID NO: 708480 - protein, 16 aa, Homo sapiens
  CDR3 for beta chain variable domain of TCR clone 354240 (TRBV20-1, TRBJ2-1)
CSARDFSGRIGDEQFF

SEQ ID NO: 708481 - protein, 13 aa, Homo sapiens
  CDR3 for alpha chain variable domain of TCR clone 354241 (TRAV12-3, TRAJ33)
CAMSVNSNYQLIW

SEQ ID NO: 708482 - protein, 16 aa, Homo sapiens
  CDR3 for beta chain variable domain of TCR clone 354241 (TRBV15, TRBJ2-3)
CATSRDLGIVTDTQYF

SEQ ID NO: 708483 - protein, 10 aa, Homo sapiens
  CDR3 for alpha chain variable domain of TCR clone 354242 (TRAV12-1, TRAJ37)
ARGNTGKLIF

SEQ ID NO: 708484 - protein, 14 aa, Homo sapiens
  CDR3 for beta chain variable domain of TCR clone 354242 (TRBV7-2, TRBJ2-7)
CASSPKTSFYEQYF

SEQ ID NO: 708485 - protein, 23 aa, Homo sapiens
  CDR3 for alpha chain variable domain of TCR clone 354243 (TRAV3, TRAJ32)
CAVRDELGLQTSSSLELALCLLS

SEQ ID NO: 708486 - protein, 16 aa, Homo sapiens
  CDR3 for beta chain variable domain of TCR clone 354243 (TRBV19, TRBJ2-2)
CASSAAGTGGTGELFF

SEQ ID NO: 708487 - protein, 17 aa, Homo sapiens
  CDR3 for alpha chain variable domain of TCR clone 354244 (TRAV12-2, TRAJ18)
CAVNPLDRGSTLGRLDF

SEQ ID NO: 708488 - protein, 14 aa, Homo sapiens
  CDR3 for beta chain variable domain of TCR clone 354244 (TRBV7-3, TRBJ2-2)
CASSSGGYTGELFF

SEQ ID NO: 708489 - protein, 14 aa, Homo sapiens
  CDR3 for alpha chain variable domain of TCR clone 354245 (TRAV38-1, TRAJ29)
CAFITPSGNTPLVF

SEQ ID NO: 708490 - protein, 15 aa, Homo sapiens
  CDR3 for beta chain variable domain of TCR clone 354245 (TRBV5-1, TRBJ2-2)
CASSSQGGNTGELFF

SEQ ID NO: 708491 - protein, 14 aa, Homo sapiens
  CDR3 for alpha chain variable domain of TCR clone 354246 (TRAV12-2, TRAJ13)
CAVKKTGGYQKVTF

SEQ ID NO: 708492 - protein, 14 aa, Homo sapiens
  CDR3 for beta chain variable domain of TCR clone 354246 (TRBV10-3, TRBJ2-1)
CAISSDLAYNEQVF

SEQ ID NO: 708493 - protein, 12 aa, Homo sapiens
  CDR3 for alpha chain variable domain of TCR clone 354247 (TRAV22, TRAJ36)
CAVGTGANNIFF

SEQ ID NO: 708494 - protein, 17 aa, Homo sapiens
  CDR3 for beta chain variable domain of TCR clone 354247 (TRBV15, TRBJ1-4)
CATSRYGTGDPNEKLFF

SEQ ID NO: 708495 - protein, 15 aa, Homo sapiens
  CDR3 for alpha chain variable domain of TCR clone 354248 (TRAV3, TRAJ20)
CAVRDIKLSDYKRSF

SEQ ID NO: 708496 - protein, 18 aa, Homo sapiens
  CDR3 for beta chain variable domain of TCR clone 354248 (TRBV20-1, TRBJ2-5)
CSQTGDSGRLGGKETQYF

SEQ ID NO: 708497 - protein, 17 aa, Homo sapiens
  CDR3 for alpha chain variable domain of TCR clone 354249 (TRAV3, TRAJ6)
CAVRDGPRAGGSYIPTF

SEQ ID NO: 708498 - protein, 18 aa, Homo sapiens
  CDR3 for beta chain variable domain of TCR clone 354249 (TRBV7-9, TRBJ2-7)
CTSSLTTSGSRTWYEQYF

SEQ ID NO: 708499 - protein, 13 aa, Homo sapiens
  CDR3 for alpha chain variable domain of TCR clone 354250 (TRAV8-3, TRAJ43)
CAVVPYNNNDMRF

SEQ ID NO: 708500 - protein, 17 aa, Homo sapiens
  CDR3 for beta chain variable domain of TCR clone 354250 (TRBV7-7, TRBJ1-1)
CASIGDRPNLGVTEAVF

SEQ ID NO: 708501 - protein, 14 aa, Homo sapiens
  CDR3 for alpha chain variable domain of TCR clone 354251 (TRAV2, TRAJ37)
CAVEGSSNTGKLIF

SEQ ID NO: 708502 - protein, 15 aa, Homo sapiens
  CDR3 for beta chain variable domain of TCR clone 354251 (TRBV24-1, TRBJ2-4)
CATSDPRDRANSQYF

SEQ ID NO: 708503 - protein, 15 aa, Homo sapiens
  CDR3 for alpha chain variable domain of TCR clone 354252 (TRAV26-1, TRAJ21)
CIVRVPNYNCNKFYF

SEQ ID NO: 708504 - protein, 16 aa, Homo sapiens
  CDR3 for beta chain variable domain of TCR clone 354252 (TRBV7-9, TRBJ2-3)
CASSLQGNPGTDTQYF

SEQ ID NO: 708505 - protein, 18 aa, Homo sapiens
  CDR3 for alpha chain variable domain of TCR clone 354253 (TRAV13-1, TRAJ52)
CAASKSSAGRTSYGKLTF

SEQ ID NO: 708506 - protein, 12 aa, Homo sapiens
  CDR3 for beta chain variable domain of TCR clone 354253 (TRBV11-2, TRBJ2-2)
CASSLGGGELFF

SEQ ID NO: 708507 - protein, 14 aa, Homo sapiens
  CDR3 for alpha chain variable domain of TCR clone 354254 (TRAV36/DV7, TRAJ57)
CAVGFPGGSEKLVF

SEQ ID NO: 708508 - protein, 12 aa, Homo sapiens
  CDR3 for beta chain variable domain of TCR clone 354254 (TRBV19, TRBJ2-7)
CASTSGTYQQYF

SEQ ID NO: 708509 - protein, 15 aa, Homo sapiens
  CDR3 for alpha chain variable domain of TCR clone 354255 (TRAV17, TRAJ57)
CATGPSQGGSEKLVF

SEQ ID NO: 708510 - protein, 18 aa, Homo sapiens
  CDR3 for beta chain variable domain of TCR clone 354255 (TRBV7-9, TRBJ2-7)
CASSLTTSGRRTWYEQYF

SEQ ID NO: 708511 - protein, 15 aa, Homo sapiens
  CDR3 for alpha chain variable domain of TCR clone 354256 (TRAV6, TRAJ52)
CDLTAGGTSYGKLTF

SEQ ID NO: 708512 - protein, 14 aa, Homo sapiens
  CDR3 for beta chain variable domain of TCR clone 354256 (TRBV11-2, TRBJ2-1)
CASTTGQGNNEQFF

SEQ ID NO: 708513 - protein, 15 aa, Homo sapiens
  CDR3 for alpha chain variable domain of TCR clone 354257 (TRAV8-2, TRAJ40)
CVGVGTTSGTYKYIF

SEQ ID NO: 708514 - protein, 16 aa, Homo sapiens
  CDR3 for beta chain variable domain of TCR clone 354257 (TRBV7-3, TRBJ2-1)
CASSLEGYRSYNEQFF

SEQ ID NO: 708515 - protein, 15 aa, Homo sapiens
  CDR3 for alpha chain variable domain of TCR clone 354258 (TRAV12-3, TRAJ6)
CAMSATTGGRYIPTF

SEQ ID NO: 708516 - protein, 16 aa, Homo sapiens
  CDR3 for beta chain variable domain of TCR clone 354258 (TRBV12-5, TRBJ2-5)
CASGPRTSGNQETQYF

SEQ ID NO: 708517 - protein, 16 aa, Homo sapiens
  CDR3 for alpha chain variable domain of TCR clone 354259 (TRAV12-3, TRAJ53)
FAMSPGSGGSNYKLTF

SEQ ID NO: 708518 - protein, 17 aa, Homo sapiens
  CDR3 for beta chain variable domain of TCR clone 354259 (TRBV20-1, TRBJ2-2)
CSASGSGQGGLTGELFF

SEQ ID NO: 708519 - protein, 15 aa, Homo sapiens
  CDR3 for alpha chain variable domain of TCR clone 354260 (TRAV13-1, TRAJ15)
CAASIERQAGTALIF

SEQ ID NO: 708520 - protein, 13 aa, Homo sapiens
  CDR3 for beta chain variable domain of TCR clone 354260 (TRBV12-4, TRBJ2-7)
CASSLNSAYEQYF

SEQ ID NO: 708521 - protein, 17 aa, Homo sapiens
  CDR3 for alpha chain variable domain of TCR clone 354261 (TRAV13-1, TRAJ31)
CAPRDRLMFGDGTQLVV

SEQ ID NO: 708522 - protein, 12 aa, Homo sapiens
  CDR3 for beta chain variable domain of TCR clone 354261 (TRBV7-9, TRBJ2-7)
CDSSLEGYEQYF

SEQ ID NO: 708523 - protein, 14 aa, Homo sapiens
  CDR3 for alpha chain variable domain of TCR clone 354262 (TRAV1-2, TRAJ8)
CAVREDTGFQKLVF

SEQ ID NO: 708524 - protein, 14 aa, Homo sapiens
  CDR3 for beta chain variable domain of TCR clone 354262 (TRBV7-2, TRBJ2-7)
CASMSQGAAYEQYF

SEQ ID NO: 708525 - protein, 15 aa, Homo sapiens
  CDR3 for alpha chain variable domain of TCR clone 354263 (TRAV27, TRAJ53)
CRAINSGGSNCKLTF

SEQ ID NO: 708526 - protein, 14 aa, Homo sapiens
  CDR3 for beta chain variable domain of TCR clone 354263 (TRBV7-3, TRBJ2-1)
CASSLAGGTNEQFF

SEQ ID NO: 708527 - protein, 15 aa, Homo sapiens
  CDR3 for alpha chain variable domain of TCR clone 354264 (TRAV21, TRAJ53)
CATLNSGGSNYKLTF

SEQ ID NO: 708528 - protein, 14 aa, Homo sapiens
  CDR3 for beta chain variable domain of TCR clone 354264 (TRBV20-1, TRBJ2-7)
CSAWTALSSYEQYF

SEQ ID NO: 708529 - protein, 14 aa, Homo sapiens
  CDR3 for alpha chain variable domain of TCR clone 354265 (TRAV1-2, TRAJ8)
CAVREDTGFQKLVF

SEQ ID NO: 708530 - protein, 15 aa, Homo sapiens
  CDR3 for beta chain variable domain of TCR clone 354265 (TRBV5-7, TRBJ2-3)
CASSAGLATTDTQYF

SEQ ID NO: 708531 - protein, 21 aa, Homo sapiens
  CDR3 for alpha chain variable domain of TCR clone 354266 (TRAV2, TRAJ23)
ILQVREADASVYYCVGGKLIF

SEQ ID NO: 708532 - protein, 20 aa, Homo sapiens
  CDR3 for beta chain variable domain of TCR clone 354266 (TRBV20-1, TRBJ2-5)
CSARAGLAGRLAGHLETQYF

SEQ ID NO: 708533 - protein, 12 aa, Homo sapiens
  CDR3 for alpha chain variable domain of TCR clone 354267 (TRAV13-1, TRAJ52)
CAAGRNAGGTSY

SEQ ID NO: 708534 - protein, 15 aa, Homo sapiens
  CDR3 for beta chain variable domain of TCR clone 354267 (TRBV6-3, TRBJ2-7)
CASSSPGTVFYEQYF

SEQ ID NO: 708535 - protein, 14 aa, Homo sapiens
  CDR3 for alpha chain variable domain of TCR clone 354268 (TRAV12-2, TRAJ40)
CAVKIPSGTYKYIF

SEQ ID NO: 708536 - protein, 18 aa, Homo sapiens
  CDR3 for beta chain variable domain of TCR clone 354268 (TRBV7-3, TRBJ2-1)
CASSLTLASGRAMVSSSS

SEQ ID NO: 708537 - protein, 13 aa, Homo sapiens
  CDR3 for alpha chain variable domain of TCR clone 354269 (TRAV12-2, TRAJ17)
CAVSKAAGNKLTF

SEQ ID NO: 708538 - protein, 14 aa, Homo sapiens
  CDR3 for beta chain variable domain of TCR clone 354269 (TRBV7-9, TRBJ1-1)
CASTPLQSYTEAFF

SEQ ID NO: 708539 - protein, 13 aa, Homo sapiens
  CDR3 for alpha chain variable domain of TCR clone 354270 (TRAV13-2, TRAJ13)
FAERPGGYQKVTF

SEQ ID NO: 708540 - protein, 18 aa, Homo sapiens
  CDR3 for beta chain variable domain of TCR clone 354270 (TRBV7-6, TRBJ2-1)
CASSPRTSGMSSYNEQFF

SEQ ID NO: 708541 - protein, 12 aa, Homo sapiens
  CDR3 for alpha chain variable domain of TCR clone 354271 (TRAV23/DV6, TRAJ58)
CAARLLRGETSG

SEQ ID NO: 708542 - protein, 12 aa, Homo sapiens
  CDR3 for beta chain variable domain of TCR clone 354271 (TRBV7-8, TRBJ2-1)
CASSLGHNEQFF

SEQ ID NO: 708543 - protein, 14 aa, Homo sapiens
  CDR3 for alpha chain variable domain of TCR clone 354272 (TRAV1-2, TRAJ16)
CAVNRFSDGQKLLF

SEQ ID NO: 708544 - protein, 16 aa, Homo sapiens
  CDR3 for beta chain variable domain of TCR clone 354272 (TRBV20-1, TRBJ1-4)
SAVLRDGLLTNEKLFF

SEQ ID NO: 708545 - protein, 14 aa, Homo sapiens
  CDR3 for alpha chain variable domain of TCR clone 354273 (TRAV1-2, TRAJ16)
CAVNRFSDGQKLLF

SEQ ID NO: 708546 - protein, 14 aa, Homo sapiens
  CDR3 for beta chain variable domain of TCR clone 354273 (TRBV19, TRBJ2-3)
CASPTFVLSGEQFF

SEQ ID NO: 708547 - protein, 15 aa, Homo sapiens
  CDR3 for alpha chain variable domain of TCR clone 354274 (TRAV25, TRAJ53)
CTTSNSGGSNYKLTF

SEQ ID NO: 708548 - protein, 14 aa, Homo sapiens
  CDR3 for beta chain variable domain of TCR clone 354274 (TRBV11-2, TRBJ2-3)
CASSRLARTETQYF

SEQ ID NO: 708549 - protein, 16 aa, Homo sapiens
  CDR3 for alpha chain variable domain of TCR clone 354275 (TRAV12-2, TRAJ13)
CAVKKTGGYQKVTLEL

SEQ ID NO: 708550 - protein, 12 aa, Homo sapiens
  CDR3 for beta chain variable domain of TCR clone 354275 (TRBV12-4, TRBJ1-2)
CASSFIWLHLRF

SEQ ID NO: 708551 - protein, 16 aa, Homo sapiens
  CDR3 for alpha chain variable domain of TCR clone 354276 (TRAV30, TRAJ24)
CGTEVVDADSGGKFQF

SEQ ID NO: 708552 - protein, 14 aa, Homo sapiens
  CDR3 for beta chain variable domain of TCR clone 354276 (TRBV7-9, TRBJ2-4)
CASSLAMGGNIQYF

SEQ ID NO: 708553 - protein, 13 aa, Homo sapiens
  CDR3 for alpha chain variable domain of TCR clone 354277 (TRAV12-2, TRAJ39)
CAVNNNAGNMLTF

SEQ ID NO: 708554 - protein, 15 aa, Homo sapiens
  CDR3 for beta chain variable domain of TCR clone 354277 (TRBV2, TRBJ1-5)
CTSVPPRDRAISQHF

SEQ ID NO: 708555 - protein, 15 aa, Homo sapiens
  CDR3 for alpha chain variable domain of TCR clone 354278 (TRAV3, TRAJ22)
CAVRDRGGSARQPTF

SEQ ID NO: 708556 - protein, 16 aa, Homo sapiens
  CDR3 for beta chain variable domain of TCR clone 354278 (TRBV4-1, TRBJ1-4)
CASSQDLRRGGEKLFF

SEQ ID NO: 708557 - protein, 13 aa, Homo sapiens
  CDR3 for alpha chain variable domain of TCR clone 354279 (TRAV35, TRAJ48)
GRSRVFGNEKLTF

SEQ ID NO: 708558 - protein, 14 aa, Homo sapiens
  CDR3 for beta chain variable domain of TCR clone 354279 (TRBV20-1, TRBJ2-5)
CSALVPGYHETQYF

SEQ ID NO: 708559 - protein, 15 aa, Homo sapiens
  CDR3 for alpha chain variable domain of TCR clone 354280 (TRAV8-3, TRAJ37)
CAVGAPASNTGKLIF

SEQ ID NO: 708560 - protein, 15 aa, Homo sapiens
  CDR3 for beta chain variable domain of TCR clone 354280 (TRBV11-2, TRBJ1-2)
CASSQMRGLNYGYTF

SEQ ID NO: 708561 - protein, 13 aa, Homo sapiens
  CDR3 for alpha chain variable domain of TCR clone 354281 (TRAV2, TRAJ15)
CAVASQAGTAMIF

SEQ ID NO: 708562 - protein, 13 aa, Homo sapiens
  CDR3 for beta chain variable domain of TCR clone 354281 (TRBV7-3, TRBJ1-1)
CASSQDWGAEAFF

SEQ ID NO: 708563 - protein, 14 aa, Homo sapiens
  CDR3 for alpha chain variable domain of TCR clone 354282 (TRAV12-2, TRAJ3)
CAVSLYSSASKIIF

SEQ ID NO: 708564 - protein, 13 aa, Homo sapiens
  CDR3 for beta chain variable domain of TCR clone 354282 (TRBV18, TRBJ2-7)
CASQSGGGYEQYF

SEQ ID NO: 708565 - protein, 18 aa, Homo sapiens
  CDR3 for alpha chain variable domain of TCR clone 354283 (TRAV26-2, TRAJ54)
CILRDVEVGIQGAQRLGF

SEQ ID NO: 708566 - protein, 17 aa, Homo sapiens
  CDR3 for beta chain variable domain of TCR clone 354283 (TRBV20-1, TRBJ1-5)
CSASLSPGQGGNQPQHF

SEQ ID NO: 708567 - protein, 15 aa, Homo sapiens
  CDR3 for alpha chain variable domain of TCR clone 354284 (TRAV26-1, TRAJ48)
RIARWSWFGNEKLTF

SEQ ID NO: 708568 - protein, 15 aa, Homo sapiens
  CDR3 for beta chain variable domain of TCR clone 354284 (TRBV27, TRBJ2-1)
CASSNGGGSSNEQFF

SEQ ID NO: 708569 - protein, 12 aa, Homo sapiens
  CDR3 for alpha chain variable domain of TCR clone 354285 (TRAV30, TRAJ43)
CGTEERGNDMRF

SEQ ID NO: 708570 - protein, 13 aa, Homo sapiens
  CDR3 for beta chain variable domain of TCR clone 354285 (TRBV27, TRBJ2-7)
CASSVAQGYEQYF

SEQ ID NO: 708571 - protein, 14 aa, Homo sapiens
  CDR3 for alpha chain variable domain of TCR clone 354286 (TRAV36/DV7, TRAJ48)
CAQRRDVGNEKLTF

SEQ ID NO: 708572 - protein, 14 aa, Homo sapiens
  CDR3 for beta chain variable domain of TCR clone 354286 (TRBV28, TRBJ2-4)
CASTQVTGVNIQYF

SEQ ID NO: 708573 - protein, 13 aa, Homo sapiens
  CDR3 for alpha chain variable domain of TCR clone 354287 (TRAV12-3, TRAJ20)
CAMRRSNDYKLSF

SEQ ID NO: 708574 - protein, 13 aa, Homo sapiens
  CDR3 for beta chain variable domain of TCR clone 354287 (TRBV19, TRBJ2-7)
CASSPRQSYEQYF

SEQ ID NO: 708575 - protein, 13 aa, Homo sapiens
  CDR3 for alpha chain variable domain of TCR clone 354288 (TRAV29/DV5, TRAJ31)
CAASRNNNARLMF

SEQ ID NO: 708576 - protein, 17 aa, Homo sapiens
  CDR3 for beta chain variable domain of TCR clone 354288 (TRBV12-4, TRBJ1-1)
CASSLSGFRTMNTEAFF

SEQ ID NO: 708577 - protein, 12 aa, Homo sapiens
  CDR3 for alpha chain variable domain of TCR clone 354289 (TRAV21, TRAJ41)
CAVESSGYALNF

SEQ ID NO: 708578 - protein, 13 aa, Homo sapiens
  CDR3 for beta chain variable domain of TCR clone 354289 (TRBV7-9, TRBJ1-2)
CASSLKQNYGYTF

SEQ ID NO: 708579 - protein, 17 aa, Homo sapiens
  CDR3 for alpha chain variable domain of TCR clone 354290 (TRAV27, TRAJ26)
CAGARATLDNYGQNFVF

SEQ ID NO: 708580 - protein, 15 aa, Homo sapiens
  CDR3 for beta chain variable domain of TCR clone 354290 (TRBV11-2, TRBJ2-5)
CASSPRSGGLETQYF

SEQ ID NO: 708581 - protein, 11 aa, Homo sapiens
  CDR3 for alpha chain variable domain of TCR clone 354291 (TRAV12-1, TRAJ26)
CVVDYGQNFVF

SEQ ID NO: 708582 - protein, 15 aa, Homo sapiens
  CDR3 for beta chain variable domain of TCR clone 354291 (TRBV12-4, TRBJ2-5)
CASSGTGQAQETQYF

SEQ ID NO: 708583 - protein, 15 aa, Homo sapiens
  CDR3 for alpha chain variable domain of TCR clone 354292 (TRAV13-1, TRAJ48)
CEASTGGFGNEKLTF

SEQ ID NO: 708584 - protein, 14 aa, Homo sapiens
  CDR3 for beta chain variable domain of TCR clone 354292 (TRBV24-1, TRBJ2-2)
CATGGLGNTGELFF

SEQ ID NO: 708585 - protein, 12 aa, Homo sapiens
  CDR3 for alpha chain variable domain of TCR clone 354293 (TRAV13-2, TRAJ8)
CASWLGFQKLVF

SEQ ID NO: 708586 - protein, 13 aa, Homo sapiens
  CDR3 for beta chain variable domain of TCR clone 354293 (TRBV7-8, TRBJ2-7)
CASSLLGTYEQYF

SEQ ID NO: 708587 - protein, 11 aa, Homo sapiens
  CDR3 for alpha chain variable domain of TCR clone 354294 (TRAV1-2, TRAJ40)
CAVPGTYKSIF

SEQ ID NO: 708588 - protein, 16 aa, Homo sapiens
  CDR3 for beta chain variable domain of TCR clone 354294 (TRBV7-3, TRBJ2-2)
CASSLKRGTLSGELFF

SEQ ID NO: 708589 - protein, 12 aa, Homo sapiens
  CDR3 for alpha chain variable domain of TCR clone 354295 (TRAV26-1, TRAJ49)
CIAANTGNQFYF

SEQ ID NO: 708590 - protein, 15 aa, Homo sapiens
  CDR3 for beta chain variable domain of TCR clone 354295 (TRBV20-1, TRBJ1-5)
CSASFGKGIHQPQHF

SEQ ID NO: 708591 - protein, 14 aa, Homo sapiens
  CDR3 for alpha chain variable domain of TCR clone 354296 (TRAV1-1, TRAJ27)
RAVIDNTNAGKSTF

SEQ ID NO: 708592 - protein, 12 aa, Homo sapiens
  CDR3 for beta chain variable domain of TCR clone 354296 (TRBV11-2, TRBJ2-1)
CASSPGNNEQFF

SEQ ID NO: 708593 - protein, 12 aa, Homo sapiens
  CDR3 for alpha chain variable domain of TCR clone 354297 (TRAV27, TRAJ35)
CAGADFGNVLHC

SEQ ID NO: 708594 - protein, 15 aa, Homo sapiens
  CDR3 for beta chain variable domain of TCR clone 354297 (TRBV20-1, TRBJ2-7)
CSAESGTSGAYEQYF

SEQ ID NO: 708595 - protein, 13 aa, Homo sapiens
  CDR3 for alpha chain variable domain of TCR clone 354298 (TRAV8-4, TRAJ30)
CAVSVNRDDKIIF

SEQ ID NO: 708596 - protein, 20 aa, Homo sapiens
  CDR3 for beta chain variable domain of TCR clone 354298 (TRBV7-8, TRBJ2-2)
CASSHLFPGPTIHITGELFF

SEQ ID NO: 708597 - protein, 15 aa, Homo sapiens
  CDR3 for alpha chain variable domain of TCR clone 354299 (TRAV25, TRAJ52)
CAGTSGGTSYGKLTF

SEQ ID NO: 708598 - protein, 13 aa, Homo sapiens
  CDR3 for beta chain variable domain of TCR clone 354299 (TRBV6-5, TRBJ2-5)
CGSSPQGGETQYF

SEQ ID NO: 708599 - protein, 18 aa, Homo sapiens
  CDR3 for alpha chain variable domain of TCR clone 354300 (TRAV26-1, TRAJ23)
CIVRVGLEVWNQGGKPIF

SEQ ID NO: 708600 - protein, 12 aa, Homo sapiens
  CDR3 for beta chain variable domain of TCR clone 354300 (TRBV12-4, TRBJ2-5)
CASSNSQENQYF

SEQ ID NO: 708601 - protein, 11 aa, Homo sapiens
  CDR3 for alpha chain variable domain of TCR clone 354301 (TRAV12-1, TRAJ34)
CVVNKGRELIF

SEQ ID NO: 708602 - protein, 13 aa, Homo sapiens
  CDR3 for beta chain variable domain of TCR clone 354301 (TRBV2, TRBJ2-7)
CASSGAAAYEQYF

SEQ ID NO: 708603 - protein, 16 aa, Homo sapiens
  CDR3 for alpha chain variable domain of TCR clone 354302 (TRAV12-2, TRAJ32)
CAVNLGQGSATNKLIF

SEQ ID NO: 708604 - protein, 15 aa, Homo sapiens
  CDR3 for beta chain variable domain of TCR clone 354302 (TRBV20-1, TRBJ2-7)
CSARGPLAGGREQYF

SEQ ID NO: 708605 - protein, 13 aa, Homo sapiens
  CDR3 for alpha chain variable domain of TCR clone 354303 (TRAV12-3, TRAJ13)
CAMGTGGYQKVTF

SEQ ID NO: 708606 - protein, 16 aa, Homo sapiens
  CDR3 for beta chain variable domain of TCR clone 354303 (TRBV18, TRBJ1-6)
CASSQTEISYNSPLHF

SEQ ID NO: 708607 - protein, 14 aa, Homo sapiens
  CDR3 for alpha chain variable domain of TCR clone 354304 (TRAV20, TRAJ56)
CAVQFGGANSKLTF

SEQ ID NO: 708608 - protein, 14 aa, Homo sapiens
  CDR3 for beta chain variable domain of TCR clone 354304 (TRBV20-1, TRBJ2-7)
CSAKRGRCSYEQYF

SEQ ID NO: 708609 - protein, 12 aa, Homo sapiens
  CDR3 for alpha chain variable domain of TCR clone 354305 (TRAV27, TRAJ58)
CAGARDTSRLTF

SEQ ID NO: 708610 - protein, 15 aa, Homo sapiens
  CDR3 for beta chain variable domain of TCR clone 354305 (TRBV27, TRBJ1-4)
CASSAQQDLNEKLFF

SEQ ID NO: 708611 - protein, 12 aa, Homo sapiens
  CDR3 for alpha chain variable domain of TCR clone 354306 (TRAV1-1, TRAJ43)
CAPRVSSNDMRF

SEQ ID NO: 708612 - protein, 17 aa, Homo sapiens
  CDR3 for beta chain variable domain of TCR clone 354306 (TRBV7-3, TRBJ2-3)
CASSLMKRMRGADTQYF

SEQ ID NO: 708613 - protein, 13 aa, Homo sapiens
  CDR3 for alpha chain variable domain of TCR clone 354307 (TRAV17, TRAJ5)
CALRGTGRRALTF

SEQ ID NO: 708614 - protein, 15 aa, Homo sapiens
  CDR3 for beta chain variable domain of TCR clone 354307 (TRBV2, TRBJ2-1)
CASSELAGSYNEQFF

SEQ ID NO: 708615 - protein, 19 aa, Homo sapiens
  CDR3 for alpha chain variable domain of TCR clone 354308 (TRAV26-1, TRAJ22)
CCVLLHRWVFSGSARQLTF

SEQ ID NO: 708616 - protein, 19 aa, Homo sapiens
  CDR3 for beta chain variable domain of TCR clone 354308 (TRBV19, TRBJ2-5)
CASSIGQVTDSFLGETQYF

SEQ ID NO: 708617 - protein, 15 aa, Homo sapiens
  CDR3 for alpha chain variable domain of TCR clone 354309 (TRAV12-3, TRAJ27)
CAMRAYNTNAGKSTF

SEQ ID NO: 708618 - protein, 13 aa, Homo sapiens
  CDR3 for beta chain variable domain of TCR clone 354309 (TRBV2, TRBJ1-1)
CASRWTVNTEAFF

SEQ ID NO: 708619 - protein, 15 aa, Homo sapiens
  CDR3 for alpha chain variable domain of TCR clone 354310 (TRAV3, TRAJ3)
CAVRDGHSSASKIVF

SEQ ID NO: 708620 - protein, 17 aa, Homo sapiens
  CDR3 for beta chain variable domain of TCR clone 354310 (TRBV25-1, TRBJ2-7)
CASSDARVVFSSYKQYF

SEQ ID NO: 708621 - protein, 13 aa, Homo sapiens
  CDR3 for alpha chain variable domain of TCR clone 354311 (TRAV21, TRAJ27)
CAALNTNAGKSTF

SEQ ID NO: 708622 - protein, 14 aa, Homo sapiens
  CDR3 for beta chain variable domain of TCR clone 354311 (TRBV27, TRBJ1-1)
CASSLLGGLSEASF

SEQ ID NO: 708623 - protein, 16 aa, Homo sapiens
  CDR3 for alpha chain variable domain of TCR clone 354312 (TRAV3, TRAJ10)
CAVRDMRAGGGNKLTF

SEQ ID NO: 708624 - protein, 19 aa, Homo sapiens
  CDR3 for beta chain variable domain of TCR clone 354312 (TRBV6-3, TRBJ1-2)
CASSYSKGRTGPPNYGYYF

SEQ ID NO: 708625 - protein, 17 aa, Homo sapiens
  CDR3 for alpha chain variable domain of TCR clone 354313 (TRAV3, TRAJ42)
CAVRDRDYGGSQGNLIF

SEQ ID NO: 708626 - protein, 15 aa, Homo sapiens
  CDR3 for beta chain variable domain of TCR clone 354313 (TRBV6-6, TRBJ2-7)
CASSDSDGGSYEQYF

SEQ ID NO: 708627 - protein, 12 aa, Homo sapiens
  CDR3 for alpha chain variable domain of TCR clone 354314 (TRAV12-2, TRAJ31)
CTVNTPDARLMF

SEQ ID NO: 708628 - protein, 15 aa, Homo sapiens
  CDR3 for beta chain variable domain of TCR clone 354314 (TRBV20-1, TRBJ2-7)
CSAESGTSGAYEQYF

SEQ ID NO: 708629 - protein, 17 aa, Homo sapiens
  CDR3 for alpha chain variable domain of TCR clone 354315 (TRAV3, TRAJ6)
CAVRDGPRVGGSYIPTF

SEQ ID NO: 708630 - protein, 14 aa, Homo sapiens
  CDR3 for beta chain variable domain of TCR clone 354315 (TRBV7-2, TRBJ2-7)
CAGSPKTSFYEQYF

SEQ ID NO: 708631 - protein, 14 aa, Homo sapiens
  CDR3 for alpha chain variable domain of TCR clone 354316 (TRAV12-2, TRAJ17)
CAVLFKAAGNKLTF

SEQ ID NO: 708632 - protein, 15 aa, Homo sapiens
  CDR3 for beta chain variable domain of TCR clone 354316 (TRBV7-2, TRBJ2-1)
CASSSGRAGGNEQFF

SEQ ID NO: 708633 - protein, 12 aa, Homo sapiens
  CDR3 for alpha chain variable domain of TCR clone 354317 (TRAV10, TRAJ43)
CVVVRVGNDMRF

SEQ ID NO: 708634 - protein, 15 aa, Homo sapiens
  CDR3 for beta chain variable domain of TCR clone 354317 (TRBV2, TRBJ2-7)
CASSEGLAGSYEQYF

SEQ ID NO: 708635 - protein, 14 aa, Homo sapiens
  CDR3 for alpha chain variable domain of TCR clone 354318 (TRAV14/DV4, TRAJ49)
CAMREGVNGNQFYF

SEQ ID NO: 708636 - protein, 14 aa, Homo sapiens
  CDR3 for beta chain variable domain of TCR clone 354318 (TRBV5-5, TRBJ2-7)
CASSLELAVYEQYF

SEQ ID NO: 708637 - protein, 13 aa, Homo sapiens
  CDR3 for alpha chain variable domain of TCR clone 354319 (TRAV38-1, TRAJ42)
CARWGGSQGNLIF

SEQ ID NO: 708638 - protein, 13 aa, Homo sapiens
  CDR3 for beta chain variable domain of TCR clone 354319 (TRBV20-1, TRBJ2-2)
CSASAAGTGELFF

SEQ ID NO: 708639 - protein, 14 aa, Homo sapiens
  CDR3 for alpha chain variable domain of TCR clone 354320 (TRAV17, TRAJ40)
CATALTSGTYKYIF

SEQ ID NO: 708640 - protein, 13 aa, Homo sapiens
  CDR3 for beta chain variable domain of TCR clone 354320 (TRBV27, TRBJ2-1)
CASSSGSYSEQFF

SEQ ID NO: 708641 - protein, 14 aa, Homo sapiens
  CDR3 for alpha chain variable domain of TCR clone 354321 (TRAV12-3, TRAJ10)
SHLPLTGGGNKLTF

SEQ ID NO: 708642 - protein, 14 aa, Homo sapiens
  CDR3 for beta chain variable domain of TCR clone 354321 (TRBV11-3, TRBJ2-7)
CASSPDRNTYEQYV

SEQ ID NO: 708643 - protein, 12 aa, Homo sapiens
  CDR3 for alpha chain variable domain of TCR clone 354322 (TRAV26-1, TRAJ13)
CIVSRGYQKVTF

SEQ ID NO: 708644 - protein, 14 aa, Homo sapiens
  CDR3 for beta chain variable domain of TCR clone 354322 (TRBV7-9, TRBJ2-5)
CASSLDTAQETQYF

SEQ ID NO: 708645 - protein, 13 aa, Homo sapiens
  CDR3 for alpha chain variable domain of TCR clone 354323 (TRAV3, TRAJ21)
CAVGEPDFNKFYF

SEQ ID NO: 708646 - protein, 13 aa, Homo sapiens
  CDR3 for beta chain variable domain of TCR clone 354323 (TRBV20-1, TRBJ1-1)
CSARGGGNTEAFF

SEQ ID NO: 708647 - protein, 11 aa, Homo sapiens
  CDR3 for alpha chain variable domain of TCR clone 354324 (TRAV21, TRAJ34)
CAHYNTDKLIF

SEQ ID NO: 708648 - protein, 15 aa, Homo sapiens
  CDR3 for beta chain variable domain of TCR clone 354324 (TRBV7-6, TRBJ2-5)
CASSKPTGPQETQYF

SEQ ID NO: 708649 - protein, 18 aa, Homo sapiens
  CDR3 for alpha chain variable domain of TCR clone 354325 (TRAV21, TRAJ52)
CAVRPPPAGGTSYGKLTF

SEQ ID NO: 708650 - protein, 14 aa, Homo sapiens
  CDR3 for beta chain variable domain of TCR clone 354325 (TRBV5-1, TRBJ1-1)
CASSTEGMNTEAFF

SEQ ID NO: 708651 - protein, 13 aa, Homo sapiens
  CDR3 for alpha chain variable domain of TCR clone 354326 (TRAV21, TRAJ57)
CAVTQGGSGKLGF

SEQ ID NO: 708652 - protein, 11 aa, Homo sapiens
  CDR3 for beta chain variable domain of TCR clone 354326 (TRBV11-2, TRBJ2-2)
CASSLPGELFF

SEQ ID NO: 708653 - protein, 13 aa, Homo sapiens
  CDR3 for alpha chain variable domain of TCR clone 354327 (TRAV17, TRAJ54)
CATVIQVAQKLVF

SEQ ID NO: 708654 - protein, 15 aa, Homo sapiens
  CDR3 for beta chain variable domain of TCR clone 354327 (TRBV13, TRBJ2-1)
CASSLLSGLNNEQFF

SEQ ID NO: 708655 - protein, 14 aa, Homo sapiens
  CDR3 for alpha chain variable domain of TCR clone 354328 (TRAV17, TRAJ16)
CATADFSDGQKPLF

SEQ ID NO: 708656 - protein, 12 aa, Homo sapiens
  CDR3 for beta chain variable domain of TCR clone 354328 (TRBV24-1, TRBJ1-1)
CATLYPDTEAFF

SEQ ID NO: 708657 - protein, 11 aa, Homo sapiens
  CDR3 for alpha chain variable domain of TCR clone 354329 (TRAV1-1, TRAJ23)
CAVRQGGKLIF

SEQ ID NO: 708658 - protein, 14 aa, Homo sapiens
  CDR3 for beta chain variable domain of TCR clone 354329 (TRBV4-1, TRBJ1-1)
CASSRSGQSFEAFF

SEQ ID NO: 708659 - protein, 13 aa, Homo sapiens
  CDR3 for alpha chain variable domain of TCR clone 354330 (TRAV21, TRAJ27)
CAARPCNAGKSTF

SEQ ID NO: 708660 - protein, 14 aa, Homo sapiens
  CDR3 for beta chain variable domain of TCR clone 354330 (TRBV20-1, TRBJ2-1)
CSAAGSGEYNEQFF

SEQ ID NO: 708661 - protein, 18 aa, Homo sapiens
  CDR3 for alpha chain variable domain of TCR clone 354331 (TRAV12-3, TRAJ52)
CAMSVGGAGGTSYGKLTF

SEQ ID NO: 708662 - protein, 16 aa, Homo sapiens
  CDR3 for beta chain variable domain of TCR clone 354331 (TRBV19, TRBJ2-2)
CASTRGSGGATGELFF

SEQ ID NO: 708663 - protein, 14 aa, Homo sapiens
  CDR3 for alpha chain variable domain of TCR clone 354332 (TRAV21, TRAJ15)
CAVSLNQAGTALIF

SEQ ID NO: 708664 - protein, 14 aa, Homo sapiens
  CDR3 for beta chain variable domain of TCR clone 354332 (TRBV27, TRBJ1-1)
CASSLLSGLSEAFF

SEQ ID NO: 708665 - protein, 11 aa, Homo sapiens
  CDR3 for alpha chain variable domain of TCR clone 354333 (TRAV17, TRAJ9)
CATTGGFKTIF

SEQ ID NO: 708666 - protein, 20 aa, Homo sapiens
  CDR3 for beta chain variable domain of TCR clone 354333 (TRBV7-8, TRBJ2-2)
CASSHLFPGPTVHITGELFF

SEQ ID NO: 708667 - protein, 13 aa, Homo sapiens
  CDR3 for alpha chain variable domain of TCR clone 354334 (TRAV21, TRAJ20)
CAVGLRVDYKLSF

SEQ ID NO: 708668 - protein, 13 aa, Homo sapiens
  CDR3 for beta chain variable domain of TCR clone 354334 (TRBV3-1, TRBJ1-5)
CASSQDLDQPQHF

SEQ ID NO: 708669 - protein, 12 aa, Homo sapiens
  CDR3 for alpha chain variable domain of TCR clone 354335 (TRAV21, TRAJ29)
CAVTSGNTPLVF

SEQ ID NO: 708670 - protein, 11 aa, Homo sapiens
  CDR3 for beta chain variable domain of TCR clone 354335 (TRBV29-1, TRBJ2-5)
CSEDRTGTQYF

SEQ ID NO: 708671 - protein, 12 aa, Homo sapiens
  CDR3 for alpha chain variable domain of TCR clone 354336 (TRAV36/DV7, TRAJ54)
CAVVRGAQKLVF

SEQ ID NO: 708672 - protein, 17 aa, Homo sapiens
  CDR3 for beta chain variable domain of TCR clone 354336 (TRBV20-1, TRBJ1-1)
CSASRGVTGNTEAFLDK

SEQ ID NO: 708673 - protein, 10 aa, Homo sapiens
  CDR3 for alpha chain variable domain of TCR clone 354337 (TRAV1-2, TRAJ34)
CAVNTDKLIF

SEQ ID NO: 708674 - protein, 14 aa, Homo sapiens
  CDR3 for beta chain variable domain of TCR clone 354337 (TRBV2, TRBJ2-7)
CASSLTSGGYEQYF

SEQ ID NO: 708675 - protein, 14 aa, Homo sapiens
  CDR3 for alpha chain variable domain of TCR clone 354338 (TRAV38-1, TRAJ54)
CAFMSPSGAQKLVF

SEQ ID NO: 708676 - protein, 16 aa, Homo sapiens
  CDR3 for beta chain variable domain of TCR clone 354338 (TRBV28, TRBJ2-1)
CAGSLGGSGSYNEQFF

SEQ ID NO: 708677 - protein, 11 aa, Homo sapiens
  CDR3 for alpha chain variable domain of TCR clone 354339 (TRAV12-3, TRAJ26)
CAMSHGQNFVF

SEQ ID NO: 708678 - protein, 13 aa, Homo sapiens
  CDR3 for beta chain variable domain of TCR clone 354339 (TRBV7-2, TRBJ1-1)
CASSLARPAEAFF

SEQ ID NO: 708679 - protein, 14 aa, Homo sapiens
  CDR3 for alpha chain variable domain of TCR clone 354340 (TRAV2, TRAJ22)
CAVGRGGSARQLTF

SEQ ID NO: 708680 - protein, 14 aa, Homo sapiens
  CDR3 for beta chain variable domain of TCR clone 354340 (TRBV19, TRBJ2-1)
CASPTFVLSGGQFF

SEQ ID NO: 708681 - protein, 13 aa, Homo sapiens
  CDR3 for alpha chain variable domain of TCR clone 354341 (TRAV35, TRAJ42)
CAGFPGSEGNLIF

SEQ ID NO: 708682 - protein, 14 aa, Homo sapiens
  CDR3 for beta chain variable domain of TCR clone 354341 (TRBV19, TRBJ2-1)
CASPTFVLSGEQFF

SEQ ID NO: 708683 - protein, 11 aa, Homo sapiens
  CDR3 for alpha chain variable domain of TCR clone 354342 (TRAV23/DV6, TRAJ49)
CAARAGNQVYF

SEQ ID NO: 708684 - protein, 13 aa, Homo sapiens
  CDR3 for beta chain variable domain of TCR clone 354342 (TRBV19, TRBJ1-5)
CASSINFNQPQHF

SEQ ID NO: 708685 - protein, 18 aa, Homo sapiens
  CDR3 for alpha chain variable domain of TCR clone 354343 (TRAV21, TRAJ52)
CAVRPSTAGGTSYGTLTF

SEQ ID NO: 708686 - protein, 17 aa, Homo sapiens
  CDR3 for beta chain variable domain of TCR clone 354343 (TRBV13, TRBJ2-3)
CASSLSRVAGGRNTQYF

SEQ ID NO: 708687 - protein, 17 aa, Homo sapiens
  CDR3 for alpha chain variable domain of TCR clone 354344 (TRAV3, TRAJ42)
CAVRDRDYGGSQGNLIF

SEQ ID NO: 708688 - protein, 14 aa, Homo sapiens
  CDR3 for beta chain variable domain of TCR clone 354344 (TRBV11-2, TRBJ1-5)
CASSLDRGRQPQHF

SEQ ID NO: 708689 - protein, 14 aa, Homo sapiens
  CDR3 for alpha chain variable domain of TCR clone 354345 (TRAV10, TRAJ36)
CVVKYEGGANNLFF

SEQ ID NO: 708690 - protein, 15 aa, Homo sapiens
  CDR3 for beta chain variable domain of TCR clone 354345 (TRBV7-8, TRBJ2-1)
CASSLADSLYNEQFF

SEQ ID NO: 708691 - protein, 16 aa, Homo sapiens
  CDR3 for alpha chain variable domain of TCR clone 354346 (TRAV3, TRAJ37)
CAVRPHGSGNTGKLIF

SEQ ID NO: 708692 - protein, 15 aa, Homo sapiens
  CDR3 for beta chain variable domain of TCR clone 354346 (TRBV9, TRBJ1-2)
CQQREEKVSPYGYTF

SEQ ID NO: 708693 - protein, 19 aa, Homo sapiens
  CDR3 for alpha chain variable domain of TCR clone 354347 (TRAV26-1, TRAJ52)
CIVRAHRNAGGTSYGKLTF

SEQ ID NO: 708694 - protein, 15 aa, Homo sapiens
  CDR3 for beta chain variable domain of TCR clone 354347 (TRBV12-4, TRBJ2-5)
CASSPPTGLRETQYF

SEQ ID NO: 708695 - protein, 12 aa, Homo sapiens
  CDR3 for alpha chain variable domain of TCR clone 354348 (TRAV26-2, TRAJ48)
CILRKGNGKLTF

SEQ ID NO: 708696 - protein, 14 aa, Homo sapiens
  CDR3 for beta chain variable domain of TCR clone 354348 (TRBV28, TRBJ2-7)
CASSTLRGRFEQYF

SEQ ID NO: 708697 - protein, 13 aa, Homo sapiens
  CDR3 for alpha chain variable domain of TCR clone 354349 (TRAV21, TRAJ20)
CAVGLRVDYKLSF

SEQ ID NO: 708698 - protein, 13 aa, Homo sapiens
  CDR3 for beta chain variable domain of TCR clone 354349 (TRBV6-3, TRBJ2-1)
CASSWEGSDEQFF

SEQ ID NO: 708699 - protein, 12 aa, Homo sapiens
  CDR3 for alpha chain variable domain of TCR clone 354350 (TRAV8-3, TRAJ20)
CAVGANDYKLSF

SEQ ID NO: 708700 - protein, 16 aa, Homo sapiens
  CDR3 for beta chain variable domain of TCR clone 354350 (TRBV7-9, TRBJ2-3)
CASSPWREVGTDTQYF

SEQ ID NO: 708701 - protein, 10 aa, Homo sapiens
  CDR3 for alpha chain variable domain of TCR clone 354351 (TRAV36/DV7, TRAJ48)
CAVGNEKLTF

SEQ ID NO: 708702 - protein, 11 aa, Homo sapiens
  CDR3 for beta chain variable domain of TCR clone 354351 (TRBV12-4, TRBJ2-2)
CASSSAGELFF

SEQ ID NO: 708703 - protein, 13 aa, Homo sapiens
  CDR3 for alpha chain variable domain of TCR clone 354352 (TRAV8-3, TRAJ42)
CARYGGSQGNLIF

SEQ ID NO: 708704 - protein, 14 aa, Homo sapiens
  CDR3 for beta chain variable domain of TCR clone 354352 (TRBV20-1, TRBJ2-1)
CSARDRGTYNEQFF

SEQ ID NO: 708705 - protein, 12 aa, Homo sapiens
  CDR3 for alpha chain variable domain of TCR clone 354353 (TRAV1-1, TRAJ8)
CAGGTGCQKLVF

SEQ ID NO: 708706 - protein, 13 aa, Homo sapiens
  CDR3 for beta chain variable domain of TCR clone 354353 (TRBV7-3, TRBJ1-1)
CASSQDWGAEAFF

SEQ ID NO: 708707 - protein, 13 aa, Homo sapiens
  CDR3 for alpha chain variable domain of TCR clone 354354 (TRAV27, TRAJ45)
CRSSGGGSDGLTF

SEQ ID NO: 708708 - protein, 15 aa, Homo sapiens
  CDR3 for beta chain variable domain of TCR clone 354354 (TRBV9, TRBJ2-2)
CASSDFAGASGELFF

SEQ ID NO: 708709 - protein, 14 aa, Homo sapiens
  CDR3 for alpha chain variable domain of TCR clone 354355 (TRAV12-2, TRAJ15)
CAPHTGQAGPALIF

SEQ ID NO: 708710 - protein, 14 aa, Homo sapiens
  CDR3 for beta chain variable domain of TCR clone 354355 (TRBV7-2, TRBJ2-7)
CASSPKTSFYEQYF

SEQ ID NO: 708711 - protein, 14 aa, Homo sapiens
  CDR3 for alpha chain variable domain of TCR clone 354356 (TRAV12-2, TRAJ40)
CAVKIPSGTYKYIF

SEQ ID NO: 708712 - protein, 14 aa, Homo sapiens
  CDR3 for beta chain variable domain of TCR clone 354356 (TRBV20-1, TRBJ1-1)
CSAPTRVGGTEAFF

SEQ ID NO: 708713 - protein, 16 aa, Homo sapiens
  CDR3 for alpha chain variable domain of TCR clone 354357 (TRAV12-3, TRAJ53)
CAMSPGSGGSNYKLKF

SEQ ID NO: 708714 - protein, 17 aa, Homo sapiens
  CDR3 for beta chain variable domain of TCR clone 354357 (TRBV7-8, TRBJ2-6)
CASSAGTGGAGANVLTF

SEQ ID NO: 708715 - protein, 15 aa, Homo sapiens
  CDR3 for alpha chain variable domain of TCR clone 354358 (TRAV8-3, TRAJ21)
CAVGALPPRGYKFYF

SEQ ID NO: 708716 - protein, 12 aa, Homo sapiens
  CDR3 for beta chain variable domain of TCR clone 354358 (TRBV7-3, TRBJ2-1)
CASSFINNEQFF

SEQ ID NO: 708717 - protein, 15 aa, Homo sapiens
  CDR3 for alpha chain variable domain of TCR clone 354359 (TRAV27, TRAJ45)
CAPVDSGGGADGLTF

SEQ ID NO: 708718 - protein, 11 aa, Homo sapiens
  CDR3 for beta chain variable domain of TCR clone 354359 (TRBV19, TRBJ1-2)
CASSISSGYTF

SEQ ID NO: 708719 - protein, 18 aa, Homo sapiens
  CDR3 for alpha chain variable domain of TCR clone 354360 (TRAV13-1, TRAJ52)
CAAKNPNAGGTSYGKLTF

SEQ ID NO: 708720 - protein, 13 aa, Homo sapiens
  CDR3 for beta chain variable domain of TCR clone 354360 (TRBV3-1, TRBJ1-1)
SASSPGVITEAFF

SEQ ID NO: 708721 - protein, 14 aa, Homo sapiens
  CDR3 for alpha chain variable domain of TCR clone 354361 (TRAV12-3, TRAJ9)
CAMSPNTGGFKTIF

SEQ ID NO: 708722 - protein, 12 aa, Homo sapiens
  CDR3 for beta chain variable domain of TCR clone 354361 (TRBV19, TRBJ1-5)
CARSIAQQPQHF

SEQ ID NO: 708723 - protein, 12 aa, Homo sapiens
  CDR3 for alpha chain variable domain of TCR clone 354362 (TRAV21, TRAJ33)
CAKMNSNYQSIW

SEQ ID NO: 708724 - protein, 14 aa, Homo sapiens
  CDR3 for beta chain variable domain of TCR clone 354362 (TRBV2, TRBJ2-7)
CASSLTSGGYEQYF

SEQ ID NO: 708725 - protein, 14 aa, Homo sapiens
  CDR3 for alpha chain variable domain of TCR clone 354363 (TRAV12-3, TRAJ56)
CAMSVTGANSKLKF

SEQ ID NO: 708726 - protein, 18 aa, Homo sapiens
  CDR3 for beta chain variable domain of TCR clone 354363 (TRBV11-2, TRBJ2-3)
CASSLGGASRGAPNTQCF

SEQ ID NO: 708727 - protein, 16 aa, Homo sapiens
  CDR3 for alpha chain variable domain of TCR clone 354364 (TRAV3, TRAJ27)
CAVRDPQGTNAGKSTL

SEQ ID NO: 708728 - protein, 17 aa, Homo sapiens
  CDR3 for beta chain variable domain of TCR clone 354364 (TRBV4-1, TRBJ2-7)
CASSQGRGLQTSYEQYF

SEQ ID NO: 708729 - protein, 13 aa, Homo sapiens
  CDR3 for alpha chain variable domain of TCR clone 354365 (TRAV3, TRAJ3)
CAVADSSASQIIF

SEQ ID NO: 708730 - protein, 12 aa, Homo sapiens
  CDR3 for beta chain variable domain of TCR clone 354365 (TRBV7-8, TRBJ2-7)
CASEGGPHGQYF

SEQ ID NO: 708731 - protein, 16 aa, Homo sapiens
  CDR3 for alpha chain variable domain of TCR clone 354366 (TRAV3, TRAJ6)
CAVRDGMGRRKLHTYF

SEQ ID NO: 708732 - protein, 15 aa, Homo sapiens
  CDR3 for beta chain variable domain of TCR clone 354366 (TRBV9, TRBJ2-1)
CASSLAGSSYNEQFF

SEQ ID NO: 708733 - protein, 14 aa, Homo sapiens
  CDR3 for alpha chain variable domain of TCR clone 354367 (TRAV1-2, TRAJ8)
CAVREDTGFQKLVF

SEQ ID NO: 708734 - protein, 13 aa, Homo sapiens
  CDR3 for beta chain variable domain of TCR clone 354367 (TRBV7-8, TRBJ2-3)
CQQLRGRDRYAYF

SEQ ID NO: 708735 - protein, 15 aa, Homo sapiens
  CDR3 for alpha chain variable domain of TCR clone 354368 (TRAV17, TRAJ35)
CATAFVIGFGNVLHC

SEQ ID NO: 708736 - protein, 16 aa, Homo sapiens
  CDR3 for beta chain variable domain of TCR clone 354368 (TRBV11-2, TRBJ2-7)
CASSPLAGGPRYGQYF

SEQ ID NO: 708737 - protein, 14 aa, Homo sapiens
  CDR3 for alpha chain variable domain of TCR clone 354369 (TRAV1-2, TRAJ16)
CAVNRFSDCQKLLF

SEQ ID NO: 708738 - protein, 14 aa, Homo sapiens
  CDR3 for beta chain variable domain of TCR clone 354369 (TRBV19, TRBJ2-1)
CASPTFVVSGEQFF

SEQ ID NO: 708739 - protein, 12 aa, Homo sapiens
  CDR3 for alpha chain variable domain of TCR clone 354370 (TRAV21, TRAJ49)
CAVRNTGTQFYF

SEQ ID NO: 708740 - protein, 12 aa, Homo sapiens
  CDR3 for beta chain variable domain of TCR clone 354370 (TRBV7-9, TRBJ2-7)
CATRTDAYEQYF

SEQ ID NO: 708741 - protein, 16 aa, Homo sapiens
  CDR3 for alpha chain variable domain of TCR clone 354371 (TRAV3, TRAJ10)
CAVRDMRAGGGDKLTF

SEQ ID NO: 708742 - protein, 19 aa, Homo sapiens
  CDR3 for beta chain variable domain of TCR clone 354371 (TRBV6-3, TRBJ1-2)
CASSYSKGRTGPPNYGYTF

SEQ ID NO: 708743 - protein, 13 aa, Homo sapiens
  CDR3 for alpha chain variable domain of TCR clone 354372 (TRAV21, TRAJ57)
CAVTQGGSEKLVF

SEQ ID NO: 708744 - protein, 13 aa, Homo sapiens
  CDR3 for beta chain variable domain of TCR clone 354372 (TRBV7-2, TRBJ2-1)
CASSPGTSNEQFF

SEQ ID NO: 708745 - protein, 16 aa, Homo sapiens
  CDR3 for alpha chain variable domain of TCR clone 354373 (TRAV1-1, TRAJ29)
CAVRSTRNSGNTPLVF

SEQ ID NO: 708746 - protein, 12 aa, Homo sapiens
  CDR3 for beta chain variable domain of TCR clone 354373 (TRBV11-2, TRBJ2-1)
CASSTGNNEQFF

SEQ ID NO: 708747 - protein, 15 aa, Homo sapiens
  CDR3 for alpha chain variable domain of TCR clone 354374 (TRAV12-1, TRAJ44)
CVVFVNTGTASKLTF

SEQ ID NO: 708748 - protein, 13 aa, Homo sapiens
  CDR3 for beta chain variable domain of TCR clone 354374 (TRBV10-3, TRBJ2-7)
CASKLAVNYEQYF

SEQ ID NO: 708749 - protein, 11 aa, Homo sapiens
  CDR3 for alpha chain variable domain of TCR clone 354375 (TRAV17, TRAJ36)
CAPTGANNLFF

SEQ ID NO: 708750 - protein, 13 aa, Homo sapiens
  CDR3 for beta chain variable domain of TCR clone 354375 (TRBV20-1, TRBJ1-1)
CSAPPGGHTEAFF

SEQ ID NO: 708751 - protein, 12 aa, Homo sapiens
  CDR3 for alpha chain variable domain of TCR clone 354376 (TRAV3, TRAJ43)
CAVRDPNNDMRF

SEQ ID NO: 708752 - protein, 13 aa, Homo sapiens
  CDR3 for beta chain variable domain of TCR clone 354376 (TRBV19, TRBJ1-2)
CASSVPGQDRYTF

SEQ ID NO: 708753 - protein, 12 aa, Homo sapiens
  CDR3 for alpha chain variable domain of TCR clone 354377 (TRAV21, TRAJ33)
CAKMDSNYQLIW

SEQ ID NO: 708754 - protein, 16 aa, Homo sapiens
  CDR3 for beta chain variable domain of TCR clone 354377 (TRBV7-9, TRBJ2-3)
CASSPWREVGTDTQYF

SEQ ID NO: 708755 - protein, 12 aa, Homo sapiens
  CDR3 for alpha chain variable domain of TCR clone 354378 (TRAV12-2, TRAJ9)
CAVNTGGLKTIF

SEQ ID NO: 708756 - protein, 17 aa, Homo sapiens
  CDR3 for beta chain variable domain of TCR clone 354378 (TRBV11-2, TRBJ2-1)
CASSLYPPGVEYNEQFF

SEQ ID NO: 708757 - protein, 13 aa, Homo sapiens
  CDR3 for alpha chain variable domain of TCR clone 354379 (TRAV12-2, TRAJ31)
CAVKADNNAGLMF

SEQ ID NO: 708758 - protein, 15 aa, Homo sapiens
  CDR3 for beta chain variable domain of TCR clone 354379 (TRBV15, TRBJ1-5)
CATSREQGGNQPQHF

SEQ ID NO: 708759 - protein, 13 aa, Homo sapiens
  CDR3 for alpha chain variable domain of TCR clone 354380 (TRAV12-2, TRAJ13)
CAVTAGGYQKVTF

SEQ ID NO: 708760 - protein, 14 aa, Homo sapiens
  CDR3 for beta chain variable domain of TCR clone 354380 (TRBV19, TRBJ2-3)
CASSAPRGTDTQYF

SEQ ID NO: 708761 - protein, 13 aa, Homo sapiens
  CDR3 for alpha chain variable domain of TCR clone 354381 (TRAV25, TRAJ54)
CAGTIQGARKLVF

SEQ ID NO: 708762 - protein, 15 aa, Homo sapiens
  CDR3 for beta chain variable domain of TCR clone 354381 (TRBV19, TRBJ1-5)
CASSILTGENQPQHF

SEQ ID NO: 708763 - protein, 15 aa, Homo sapiens
  CDR3 for alpha chain variable domain of TCR clone 354382 (TRAV4, TRAJ32)
CLVGEDGGATNKLIF

SEQ ID NO: 708764 - protein, 14 aa, Homo sapiens
  CDR3 for beta chain variable domain of TCR clone 354382 (TRBV7-2, TRBJ2-5)
CASSPRGSSETQSF

SEQ ID NO: 708765 - protein, 11 aa, Homo sapiens
  CDR3 for alpha chain variable domain of TCR clone 354383 (TRAV13-1, TRAJ16)
CAANDGQKLLF

SEQ ID NO: 708766 - protein, 13 aa, Homo sapiens
  CDR3 for beta chain variable domain of TCR clone 354383 (TRBV20-1, TRBJ2-7)
CSATGQVHYEQYF

SEQ ID NO: 708767 - protein, 15 aa, Homo sapiens
  CDR3 for alpha chain variable domain of TCR clone 354384 (TRAV25, TRAJ52)
CAGRPGGTSYGKLTF

SEQ ID NO: 708768 - protein, 16 aa, Homo sapiens
  CDR3 for beta chain variable domain of TCR clone 354384 (TRBV15, TRBJ1-2)
CATSRGPRTGGGGYTF

SEQ ID NO: 708769 - protein, 13 aa, Homo sapiens
  CDR3 for alpha chain variable domain of TCR clone 354385 (TRAV12-3, TRAJ23)
CRPLYNQGGKLIF

SEQ ID NO: 708770 - protein, 15 aa, Homo sapiens
  CDR3 for beta chain variable domain of TCR clone 354385 (TRBV19, TRBJ1-1)
CASTSGQIQNTEAFF

SEQ ID NO: 708771 - protein, 16 aa, Homo sapiens
  CDR3 for alpha chain variable domain of TCR clone 354386 (TRAV27, TRAJ52)
CAGAGAGGTSYGKLTF

SEQ ID NO: 708772 - protein, 17 aa, Homo sapiens
  CDR3 for beta chain variable domain of TCR clone 354386 (TRBV24-1, TRBJ2-3)
CATSDLPAGEDTDTQYF

SEQ ID NO: 708773 - protein, 12 aa, Homo sapiens
  CDR3 for alpha chain variable domain of TCR clone 354387 (TRAV3, TRAJ43)
CAVRDPNNDMRF

SEQ ID NO: 708774 - protein, 15 aa, Homo sapiens
  CDR3 for beta chain variable domain of TCR clone 354387 (TRBV2, TRBJ1-5)
CASSLGTGFDQPQHF

SEQ ID NO: 708775 - protein, 17 aa, Homo sapiens
  CDR3 for alpha chain variable domain of TCR clone 354388 (TRAV38-2/DV8, TRAJ45)
CAYRSRYSVGGADGLTF

SEQ ID NO: 708776 - protein, 15 aa, Homo sapiens
  CDR3 for beta chain variable domain of TCR clone 354388 (TRBV19, TRBJ2-1)
CASIKGRGPYNEQFF

SEQ ID NO: 708777 - protein, 13 aa, Homo sapiens
  CDR3 for alpha chain variable domain of TCR clone 354389 (TRAV21, TRAJ57)
CAVTQGGSEKLVF

SEQ ID NO: 708778 - protein, 16 aa, Homo sapiens
  CDR3 for beta chain variable domain of TCR clone 354389 (TRBV19, TRBJ2-2)
CASTIGARAGAGELFF

SEQ ID NO: 708779 - protein, 14 aa, Homo sapiens
  CDR3 for alpha chain variable domain of TCR clone 354390 (TRAV12-2, TRAJ40)
CAVKIPSGTYKCIF

SEQ ID NO: 708780 - protein, 15 aa, Homo sapiens
  CDR3 for beta chain variable domain of TCR clone 354390 (TRBV7-6, TRBJ2-1)
CASSSLAGEGNEQFF

SEQ ID NO: 708781 - protein, 12 aa, Homo sapiens
  CDR3 for alpha chain variable domain of TCR clone 354391 (TRAV12-2, TRAJ52)
IGGGTSYGKLTF

SEQ ID NO: 708782 - protein, 13 aa, Homo sapiens
  CDR3 for beta chain variable domain of TCR clone 354391 (TRBV12-4, TRBJ1-1)
CASSTGTGFEAFF

SEQ ID NO: 708783 - protein, 13 aa, Homo sapiens
  CDR3 for alpha chain variable domain of TCR clone 354392 (TRAV3, TRAJ21)
CAVREPDFNKFYF

SEQ ID NO: 708784 - protein, 13 aa, Homo sapiens
  CDR3 for beta chain variable domain of TCR clone 354392 (TRBV9, TRBJ2-1)
CASSPSGGNEQCF

SEQ ID NO: 708785 - protein, 15 aa, Homo sapiens
  CDR3 for alpha chain variable domain of TCR clone 354393 (TRAV27, TRAJ38)
CAGRFNAGNNRKLIW

SEQ ID NO: 708786 - protein, 13 aa, Homo sapiens
  CDR3 for beta chain variable domain of TCR clone 354393 (TRBV12-5, TRBJ2-3)
CSSQNRGTDTQYF

SEQ ID NO: 708787 - protein, 13 aa, Homo sapiens
  CDR3 for alpha chain variable domain of TCR clone 354394 (TRAV8-3, TRAJ6)
CAARRGGSYIPTF

SEQ ID NO: 708788 - protein, 15 aa, Homo sapiens
  CDR3 for beta chain variable domain of TCR clone 354394 (TRBV4-1, TRBJ2-3)
CDSSNLAGGRDTQYF

SEQ ID NO: 708789 - protein, 11 aa, Homo sapiens
  CDR3 for alpha chain variable domain of TCR clone 354395 (TRAV16, TRAJ52)
CALSAAGGTSY

SEQ ID NO: 708790 - protein, 12 aa, Homo sapiens
  CDR3 for beta chain variable domain of TCR clone 354395 (TRBV12-4, TRBJ1-3)
CASSFSGNTIYF

SEQ ID NO: 708791 - protein, 14 aa, Homo sapiens
  CDR3 for alpha chain variable domain of TCR clone 354396 (TRAV8-3, TRAJ4)
CAVGASGGYNKLIF

SEQ ID NO: 708792 - protein, 20 aa, Homo sapiens
  CDR3 for beta chain variable domain of TCR clone 354396 (TRBV7-8, TRBJ2-2)
CASSHLFPGPTIHITGELFF

SEQ ID NO: 708793 - protein, 14 aa, Homo sapiens
  CDR3 for alpha chain variable domain of TCR clone 354397 (TRAV4, TRAJ17)
CLVGPRAAGNKLTF

SEQ ID NO: 708794 - protein, 15 aa, Homo sapiens
  CDR3 for beta chain variable domain of TCR clone 354397 (TRBV7-2, TRBJ2-2)
CASSLVSQFTGELFF

SEQ ID NO: 708795 - protein, 12 aa, Homo sapiens
  CDR3 for alpha chain variable domain of TCR clone 354398 (TRAV12-3, TRAJ17)
CAMTLTGNKLTF

SEQ ID NO: 708796 - protein, 18 aa, Homo sapiens
  CDR3 for beta chain variable domain of TCR clone 354398 (TRBV25-1, TRBJ1-2)
CASSGPQNGQGLIFGYTF

SEQ ID NO: 708797 - protein, 16 aa, Homo sapiens
  CDR3 for alpha chain variable domain of TCR clone 354399 (TRAV26-1, TRAJ23)
CIVRVHPYNQGGKRIF

SEQ ID NO: 708798 - protein, 13 aa, Homo sapiens
  CDR3 for beta chain variable domain of TCR clone 354399 (TRBV20-1, TRBJ2-5)
CSARGDYQETQYF

SEQ ID NO: 708799 - protein, 20 aa, Homo sapiens
  CDR3 for alpha chain variable domain of TCR clone 354400 (TRAV38-1, TRAJ32)
CDVFLCFHAFPFGATNKLIF

SEQ ID NO: 708800 - protein, 12 aa, Homo sapiens
  CDR3 for beta chain variable domain of TCR clone 354400 (TRBV11-2, TRBJ2-2)
CASSLPTGELFF

SEQ ID NO: 708801 - protein, 13 aa, Homo sapiens
  CDR3 for alpha chain variable domain of TCR clone 354401 (TRAV12-2, TRAJ12)
CAVNEDSSSKLIF

SEQ ID NO: 708802 - protein, 17 aa, Homo sapiens
  CDR3 for beta chain variable domain of TCR clone 354401 (TRBV20-1, TRBJ2-7)
CSATRAGGVAGVEEQYF

SEQ ID NO: 708803 - protein, 13 aa, Homo sapiens
  CDR3 for alpha chain variable domain of TCR clone 354402 (TRAV21, TRAJ15)
CCEPQPGRTALIF

SEQ ID NO: 708804 - protein, 11 aa, Homo sapiens
  CDR3 for beta chain variable domain of TCR clone 354402 (TRBV20-1, TRBJ2-7)
CSARTSYEQYF

SEQ ID NO: 708805 - protein, 14 aa, Homo sapiens
  CDR3 for alpha chain variable domain of TCR clone 354403 (TRAV25, TRAJ35)
CARRMEGFGNVLHC

SEQ ID NO: 708806 - protein, 13 aa, Homo sapiens
  CDR3 for beta chain variable domain of TCR clone 354403 (TRBV7-2, TRBJ1-4)
CTSSLAGLEKLFF

SEQ ID NO: 708807 - protein, 14 aa, Homo sapiens
  CDR3 for alpha chain variable domain of TCR clone 354404 (TRAV3, TRAJ7)
CAVREEEREQQTRF

SEQ ID NO: 708808 - protein, 18 aa, Homo sapiens
  CDR3 for beta chain variable domain of TCR clone 354404 (TRBV11-2, TRBJ2-7)
CASSWRTVQTGQSYEQYF

SEQ ID NO: 708809 - protein, 19 aa, Homo sapiens
  CDR3 for alpha chain variable domain of TCR clone 354405 (TRAV3, TRAJ6)
CAVRVRNPSRSGGSYIPTF

SEQ ID NO: 708810 - protein, 15 aa, Homo sapiens
  CDR3 for beta chain variable domain of TCR clone 354405 (TRBV18, TRBJ2-7)
CASSPTFMDSYEQYF

SEQ ID NO: 708811 - protein, 13 aa, Homo sapiens
  CDR3 for alpha chain variable domain of TCR clone 354406 (TRAV12-3, TRAJ40)
CAVSARGTYKYIF

SEQ ID NO: 708812 - protein, 16 aa, Homo sapiens
  CDR3 for beta chain variable domain of TCR clone 354406 (TRBV20-1, TRBJ2-3)
CSGEAGLAGGQDTQYF

SEQ ID NO: 708813 - protein, 13 aa, Homo sapiens
  CDR3 for alpha chain variable domain of TCR clone 354407 (TRAV29/DV5, TRAJ31)
CEASRNNNARLMF

SEQ ID NO: 708814 - protein, 12 aa, Homo sapiens
  CDR3 for beta chain variable domain of TCR clone 354407 (TRBV14, TRBJ2-7)
CASSLYKDEQYF

SEQ ID NO: 708815 - protein, 12 aa, Homo sapiens
  CDR3 for alpha chain variable domain of TCR clone 354408 (TRAV26-1, TRAJ43)
CIVRPRGDDMRF

SEQ ID NO: 708816 - protein, 16 aa, Homo sapiens
  CDR3 for beta chain variable domain of TCR clone 354408 (TRBV3-1, TRBJ2-1)
CASSQRGRRSFDEQFF

SEQ ID NO: 708817 - protein, 12 aa, Homo sapiens
  CDR3 for alpha chain variable domain of TCR clone 354409 (TRAV12-3, TRAJ20)
CAMVRGDYKLSF

SEQ ID NO: 708818 - protein, 14 aa, Homo sapiens
  CDR3 for beta chain variable domain of TCR clone 354409 (TRBV5-5, TRBJ1-5)
CASSGKGVDQPQHF

SEQ ID NO: 708819 - protein, 15 aa, Homo sapiens
  CDR3 for alpha chain variable domain of TCR clone 354410 (TRAV20, TRAJ39)
CAVQALLVAGNMRTF

SEQ ID NO: 708820 - protein, 13 aa, Homo sapiens
  CDR3 for beta chain variable domain of TCR clone 354410 (TRBV10-3, TRBJ2-7)
CASKLAVNYEQYF

SEQ ID NO: 708821 - protein, 12 aa, Homo sapiens
  CDR3 for alpha chain variable domain of TCR clone 354411 (TRAV9-2, TRAJ57)
CALRSGSEKLVF

SEQ ID NO: 708822 - protein, 14 aa, Homo sapiens
  CDR3 for beta chain variable domain of TCR clone 354411 (TRBV7-7, TRBJ2-7)
CASSLGRGVGEQYF

SEQ ID NO: 708823 - protein, 13 aa, Homo sapiens
  CDR3 for alpha chain variable domain of TCR clone 354412 (TRAV12-1, TRAJ26)
CVVRRNYGQNFVF

SEQ ID NO: 708824 - protein, 13 aa, Homo sapiens
  CDR3 for beta chain variable domain of TCR clone 354412 (TRBV9, TRBJ2-7)
CASSVAEYYEQYF

SEQ ID NO: 708825 - protein, 15 aa, Homo sapiens
  CDR3 for alpha chain variable domain of TCR clone 354413 (TRAV17, TRAJ16)
CATALRFSDGQKLLF

SEQ ID NO: 708826 - protein, 12 aa, Homo sapiens
  CDR3 for beta chain variable domain of TCR clone 354413 (TRBV12-5, TRBJ2-5)
CASGQGVETQYF

SEQ ID NO: 708827 - protein, 13 aa, Homo sapiens
  CDR3 for alpha chain variable domain of TCR clone 354414 (TRAV13-1, TRAJ13)
CAASKGGYQKVTF

SEQ ID NO: 708828 - protein, 16 aa, Homo sapiens
  CDR3 for beta chain variable domain of TCR clone 354414 (TRBV18, TRBJ1-2)
CARSPPERVTIYGYTF

SEQ ID NO: 708829 - protein, 17 aa, Homo sapiens
  CDR3 for alpha chain variable domain of TCR clone 354415 (TRAV26-1, TRAJ11)
CIVRGGRSNSGYSTLTF

SEQ ID NO: 708830 - protein, 15 aa, Homo sapiens
  CDR3 for beta chain variable domain of TCR clone 354415 (TRBV27, TRBJ2-5)
CASSLIPSGGETQYF

SEQ ID NO: 708831 - protein, 12 aa, Homo sapiens
  CDR3 for alpha chain variable domain of TCR clone 354416 (TRAV16, TRAJ10)
CSRTGGGNKLTF

SEQ ID NO: 708832 - protein, 14 aa, Homo sapiens
  CDR3 for beta chain variable domain of TCR clone 354416 (TRBV12-4, TRBJ1-1)
CASTWTGHDTEAFF

SEQ ID NO: 708833 - protein, 15 aa, Homo sapiens
  CDR3 for alpha chain variable domain of TCR clone 354417 (TRAV26-1, TRAJ39)
CIVRVARNAGHMLTF

SEQ ID NO: 708834 - protein, 14 aa, Homo sapiens
  CDR3 for beta chain variable domain of TCR clone 354417 (TRBV7-2, TRBJ2-7)
CASSPKTSFYEQYF

SEQ ID NO: 708835 - protein, 14 aa, Homo sapiens
  CDR3 for alpha chain variable domain of TCR clone 354418 (TRAV12-2, TRAJ40)
CAVKIPSGTYKYIF

SEQ ID NO: 708836 - protein, 20 aa, Homo sapiens
  CDR3 for beta chain variable domain of TCR clone 354418 (TRBV20-1, TRBJ2-1)
CSARPYSVAGGPSYYNEQFF

SEQ ID NO: 708837 - protein, 14 aa, Homo sapiens
  CDR3 for alpha chain variable domain of TCR clone 354419 (TRAV1-2, TRAJ8)
CAVREDTGFQKLVF

SEQ ID NO: 708838 - protein, 12 aa, Homo sapiens
  CDR3 for beta chain variable domain of TCR clone 354419 (TRBV5-1, TRBJ2-5)
CASSFSWETQYF

SEQ ID NO: 708839 - protein, 13 aa, Homo sapiens
  CDR3 for alpha chain variable domain of TCR clone 354420 (TRAV12-2, TRAJ20)
CAVYPSNDYNLSF

SEQ ID NO: 708840 - protein, 15 aa, Homo sapiens
  CDR3 for beta chain variable domain of TCR clone 354420 (TRBV27, TRBJ2-5)
CASSLYPRGGGTQYF

SEQ ID NO: 708841 - protein, 13 aa, Homo sapiens
  CDR3 for alpha chain variable domain of TCR clone 354421 (TRAV27, TRAJ17)
CAGAATAGNELTF

SEQ ID NO: 708842 - protein, 13 aa, Homo sapiens
  CDR3 for beta chain variable domain of TCR clone 354421 (TRBV7-3, TRBJ1-1)
CASSQDWGAEAFF

SEQ ID NO: 708843 - protein, 14 aa, Homo sapiens
  CDR3 for alpha chain variable domain of TCR clone 354422 (TRAV35, TRAJ42)
CAGRYGGSQGNLIF

SEQ ID NO: 708844 - protein, 15 aa, Homo sapiens
  CDR3 for beta chain variable domain of TCR clone 354422 (TRBV24-1, TRBJ2-1)
CATSEPGQGYNEQFF

SEQ ID NO: 708845 - protein, 13 aa, Homo sapiens
  CDR3 for alpha chain variable domain of TCR clone 354423 (TRAV2, TRAJ40)
CAVVTSGTYKYIF

SEQ ID NO: 708846 - protein, 14 aa, Homo sapiens
  CDR3 for beta chain variable domain of TCR clone 354423 (TRBV19, TRBJ2-1)
CASPTLGLSGEQFF

SEQ ID NO: 708847 - protein, 15 aa, Homo sapiens
  CDR3 for alpha chain variable domain of TCR clone 354424 (TRAV20, TRAJ53)
RAVQASGGSNYKLTF

SEQ ID NO: 708848 - protein, 12 aa, Homo sapiens
  CDR3 for beta chain variable domain of TCR clone 354424 (TRBV7-8, TRBJ2-7)
CASSLGDREQYF

SEQ ID NO: 708849 - protein, 14 aa, Homo sapiens
  CDR3 for alpha chain variable domain of TCR clone 354425 (TRAV13-1, TRAJ44)
CAAKATGTASKLTF

SEQ ID NO: 708850 - protein, 14 aa, Homo sapiens
  CDR3 for beta chain variable domain of TCR clone 354425 (TRBV7-7, TRBJ2-7)
CASSLGRGVGEQYF

SEQ ID NO: 708851 - protein, 13 aa, Homo sapiens
  CDR3 for alpha chain variable domain of TCR clone 354426 (TRAV3, TRAJ27)
CAVRPLGAGKSTF

SEQ ID NO: 708852 - protein, 16 aa, Homo sapiens
  CDR3 for beta chain variable domain of TCR clone 354426 (TRBV7-9, TRBJ1-2)
CASSLGAPVPNYGYTF

SEQ ID NO: 708853 - protein, 15 aa, Homo sapiens
  CDR3 for alpha chain variable domain of TCR clone 354427 (TRAV21, TRAJ27)
CAALTPMQANQPLGM

SEQ ID NO: 708854 - protein, 14 aa, Homo sapiens
  CDR3 for beta chain variable domain of TCR clone 354427 (TRBV27, TRBJ1-1)
CASSLLSGLSEAFF

SEQ ID NO: 708855 - protein, 13 aa, Homo sapiens
  CDR3 for alpha chain variable domain of TCR clone 354428 (TRAV20, TRAJ37)
CAGCSSNTSELIF

SEQ ID NO: 708856 - protein, 11 aa, Homo sapiens
  CDR3 for beta chain variable domain of TCR clone 354428 (TRBV12-4, TRBJ2-3)
CASTATDTQYF

SEQ ID NO: 708857 - protein, 23 aa, Homo sapiens
  CDR3 for alpha chain variable domain of TCR clone 354429 (TRAV1-1, TRAJ11)
LLQELQMKDSASYFCAGYSTLTF

SEQ ID NO: 708858 - protein, 15 aa, Homo sapiens
  CDR3 for beta chain variable domain of TCR clone 354429 (TRBV6-5, TRBJ2-1)
CASRGDFYSYNEQFF

SEQ ID NO: 708859 - protein, 14 aa, Homo sapiens
  CDR3 for alpha chain variable domain of TCR clone 354430 (TRAV12-2, TRAJ40)
FAVKIPSGTYKYIF

SEQ ID NO: 708860 - protein, 17 aa, Homo sapiens
  CDR3 for beta chain variable domain of TCR clone 354430 (TRBV20-1, TRBJ2-1)
CSASSSGLAGSYNEQFF

SEQ ID NO: 708861 - protein, 14 aa, Homo sapiens
  CDR3 for alpha chain variable domain of TCR clone 354431 (TRAV1-2, TRAJ16)
CAVNRFSDGQKLLF

SEQ ID NO: 708862 - protein, 12 aa, Homo sapiens
  CDR3 for beta chain variable domain of TCR clone 354431 (TRBV12-4, TRBJ2-5)
CQQFGGSRTQYF

SEQ ID NO: 708863 - protein, 12 aa, Homo sapiens
  CDR3 for alpha chain variable domain of TCR clone 354432 (TRAV35, TRAJ28)
GVEGAGSYQLTF

SEQ ID NO: 708864 - protein, 13 aa, Homo sapiens
  CDR3 for beta chain variable domain of TCR clone 354432 (TRBV9, TRBJ2-1)
RASSPSGGSEQFF

SEQ ID NO: 708865 - protein, 13 aa, Homo sapiens
  CDR3 for alpha chain variable domain of TCR clone 354433 (TRAV2, TRAJ21)
CAVEDLNFNKFYF

SEQ ID NO: 708866 - protein, 15 aa, Homo sapiens
  CDR3 for beta chain variable domain of TCR clone 354433 (TRBV28, TRBJ2-5)
CASSPGQGSIETEYF

SEQ ID NO: 708867 - protein, 18 aa, Homo sapiens
  CDR3 for alpha chain variable domain of TCR clone 354434 (TRAV26-2, TRAJ45)
CILRVDKYSGGGADGLTF

SEQ ID NO: 708868 - protein, 14 aa, Homo sapiens
  CDR3 for beta chain variable domain of TCR clone 354434 (TRBV7-2, TRBJ2-7)
CASRSQGVAYEQYF

SEQ ID NO: 708869 - protein, 12 aa, Homo sapiens
  CDR3 for alpha chain variable domain of TCR clone 354435 (TRAV3, TRAJ26)
CAVRDYGQNFVL

SEQ ID NO: 708870 - protein, 16 aa, Homo sapiens
  CDR3 for beta chain variable domain of TCR clone 354435 (TRBV11-2, TRBJ1-2)
SASSPSGREANYGYTF

SEQ ID NO: 708871 - protein, 13 aa, Homo sapiens
  CDR3 for alpha chain variable domain of TCR clone 354436 (TRAV25, TRAJ26)
WSGMDNYGQNFVF

SEQ ID NO: 708872 - protein, 15 aa, Homo sapiens
  CDR3 for beta chain variable domain of TCR clone 354436 (TRBV10-3, TRBJ2-1)
CAIRNGTSGHNEQFF

SEQ ID NO: 708873 - protein, 12 aa, Homo sapiens
  CDR3 for alpha chain variable domain of TCR clone 354437 (TRAV12-3, TRAJ17)
CAMTLTGNKLTF

SEQ ID NO: 708874 - protein, 16 aa, Homo sapiens
  CDR3 for beta chain variable domain of TCR clone 354437 (TRBV27, TRBJ2-7)
CASSLGSGTGPYEQYF

SEQ ID NO: 708875 - protein, 15 aa, Homo sapiens
  CDR3 for alpha chain variable domain of TCR clone 354438 (TRAV16, TRAJ4)
ALSRMFSGGYNKLIF

SEQ ID NO: 708876 - protein, 16 aa, Homo sapiens
  CDR3 for beta chain variable domain of TCR clone 354438 (TRBV24-1, TRBJ2-3)
CATSDPGTGATDTQYF

SEQ ID NO: 708877 - protein, 13 aa, Homo sapiens
  CDR3 for alpha chain variable domain of TCR clone 354439 (TRAV27, TRAJ45)
CRSSGGGADGLTF

SEQ ID NO: 708878 - protein, 14 aa, Homo sapiens
  CDR3 for beta chain variable domain of TCR clone 354439 (TRBV11-2, TRBJ2-5)
CASSPGVSQETQYF

SEQ ID NO: 708879 - protein, 14 aa, Homo sapiens
  CDR3 for alpha chain variable domain of TCR clone 354440 (TRAV13-1, TRAJ4)
CAATLPSGYNKLIF

SEQ ID NO: 708880 - protein, 14 aa, Homo sapiens
  CDR3 for beta chain variable domain of TCR clone 354440 (TRBV4-3, TRBJ2-2)
CASSQGHVTGELFF

SEQ ID NO: 708881 - protein, 13 aa, Homo sapiens
  CDR3 for alpha chain variable domain of TCR clone 354441 (TRAV27, TRAJ41)
CAGEGNSGYALNL

SEQ ID NO: 708882 - protein, 13 aa, Homo sapiens
  CDR3 for beta chain variable domain of TCR clone 354441 (TRBV19, TRBJ1-2)
CASSATGQDGYTF

SEQ ID NO: 708883 - protein, 18 aa, Homo sapiens
  CDR3 for alpha chain variable domain of TCR clone 354442 (TRAV21, TRAJ52)
CAVRPSPAGGTSYGKLTF

SEQ ID NO: 708884 - protein, 15 aa, Homo sapiens
  CDR3 for beta chain variable domain of TCR clone 354442 (TRBV27, TRBJ2-1)
CASSNGGGSANEQFF

SEQ ID NO: 708885 - protein, 13 aa, Homo sapiens
  CDR3 for alpha chain variable domain of TCR clone 354443 (TRAV12-2, TRAJ20)
CAVYPSNDYKLSF

SEQ ID NO: 708886 - protein, 15 aa, Homo sapiens
  CDR3 for beta chain variable domain of TCR clone 354443 (TRBV27, TRBJ2-5)
CASSLYPRGGDTQYF

SEQ ID NO: 708887 - protein, 13 aa, Homo sapiens
  CDR3 for alpha chain variable domain of TCR clone 354444 (TRAV17, TRAJ13)
CATDSGGYQKVTF

SEQ ID NO: 708888 - protein, 15 aa, Homo sapiens
  CDR3 for beta chain variable domain of TCR clone 354444 (TRBV6-3, TRBJ2-7)
CASSSPGTVFYEQYF

SEQ ID NO: 708889 - protein, 13 aa, Homo sapiens
  CDR3 for alpha chain variable domain of TCR clone 354445 (TRAV21, TRAJ27)
CAARPGNAGKSTF

SEQ ID NO: 708890 - protein, 13 aa, Homo sapiens
  CDR3 for beta chain variable domain of TCR clone 354445 (TRBV29-1, TRBJ1-1)
CSVGDSRNTEAFF

SEQ ID NO: 708891 - protein, 18 aa, Homo sapiens
  CDR3 for alpha chain variable domain of TCR clone 354446 (TRAV21, TRAJ52)
CAVRPSPAGGTSYGKLTF

SEQ ID NO: 708892 - protein, 14 aa, Homo sapiens
  CDR3 for beta chain variable domain of TCR clone 354446 (TRBV15, TRBJ2-4)
CATEGGQGANIQYF

SEQ ID NO: 708893 - protein, 23 aa, Homo sapiens
  CDR3 for alpha chain variable domain of TCR clone 354447 (TRAV8-3, TRAJ38)
CAVGASNAGNNHIQNPDPAVYQL

SEQ ID NO: 708894 - protein, 15 aa, Homo sapiens
  CDR3 for beta chain variable domain of TCR clone 354447 (TRBV11-3, TRBJ1-3)
CASSLFGPPGNTIYF

SEQ ID NO: 708895 - protein, 16 aa, Homo sapiens
  CDR3 for alpha chain variable domain of TCR clone 354448 (TRAV20, TRAJ53)
CAVQAESGGSNYKLTF

SEQ ID NO: 708896 - protein, 16 aa, Homo sapiens
  CDR3 for beta chain variable domain of TCR clone 354448 (TRBV12-4, TRBJ2-5)
CASSFFVRGRQETQYF

SEQ ID NO: 708897 - protein, 14 aa, Homo sapiens
  CDR3 for alpha chain variable domain of TCR clone 354449 (TRAV8-3, TRAJ4)
CAVGASGGYNKLIF

SEQ ID NO: 708898 - protein, 13 aa, Homo sapiens
  CDR3 for beta chain variable domain of TCR clone 354449 (TRBV18, TRBJ2-5)
CASSLQGQETRYF

SEQ ID NO: 708899 - protein, 15 aa, Homo sapiens
  CDR3 for alpha chain variable domain of TCR clone 354450 (TRAV6, TRAJ13)
CALGGDSRGYQKVTF

SEQ ID NO: 708900 - protein, 12 aa, Homo sapiens
  CDR3 for beta chain variable domain of TCR clone 354450 (TRBV5-7, TRBJ1-2)
CASSDRIHGYTS

SEQ ID NO: 708901 - protein, 13 aa, Homo sapiens
  CDR3 for alpha chain variable domain of TCR clone 354451 (TRAV29/DV5, TRAJ31)
CAASRHNNARLMF

SEQ ID NO: 708902 - protein, 13 aa, Homo sapiens
  CDR3 for beta chain variable domain of TCR clone 354451 (TRBV9, TRBJ2-7)
CASSVAEYYEQYF

SEQ ID NO: 708903 - protein, 16 aa, Homo sapiens
  CDR3 for alpha chain variable domain of TCR clone 354452 (TRAV4, TRAJ8)
CLVGDSGNTGFQKLVF

SEQ ID NO: 708904 - protein, 12 aa, Homo sapiens
  CDR3 for beta chain variable domain of TCR clone 354452 (TRBV12-4, TRBJ2-7)
CASSLGGYEQYF

SEQ ID NO: 708905 - protein, 12 aa, Homo sapiens
  CDR3 for alpha chain variable domain of TCR clone 354453 (TRAV35, TRAJ54)
CADLQGAQKLVF

SEQ ID NO: 708906 - protein, 11 aa, Homo sapiens
  CDR3 for beta chain variable domain of TCR clone 354453 (TRBV12-4, TRBJ2-3)
CASTATDTQYF

SEQ ID NO: 708907 - protein, 13 aa, Homo sapiens
  CDR3 for alpha chain variable domain of TCR clone 354454 (TRAV26-1, TRAJ48)
CIVRVVGGEKFTF

SEQ ID NO: 708908 - protein, 19 aa, Homo sapiens
  CDR3 for beta chain variable domain of TCR clone 354454 (TRBV11-3, TRBJ2-2)
CASSTRPGAKTTNTGELFF

SEQ ID NO: 708909 - protein, 16 aa, Homo sapiens
  CDR3 for alpha chain variable domain of TCR clone 354455 (TRAV30, TRAJ24)
CGTEMVDAGSWGKFQF

SEQ ID NO: 708910 - protein, 14 aa, Homo sapiens
  CDR3 for beta chain variable domain of TCR clone 354455 (TRBV12-5, TRBJ2-5)
CASGSRTHQETQYF

SEQ ID NO: 708911 - protein, 17 aa, Homo sapiens
  CDR3 for alpha chain variable domain of TCR clone 354456 (TRAV20, TRAJ57)
CAVQAIGAQGGSEKLVF

SEQ ID NO: 708912 - protein, 13 aa, Homo sapiens
  CDR3 for beta chain variable domain of TCR clone 354456 (TRBV20-1, TRBJ2-5)
CSAFVGGGETQYF

SEQ ID NO: 708913 - protein, 14 aa, Homo sapiens
  CDR3 for alpha chain variable domain of TCR clone 354457 (TRAV3, TRAJ9)
CAVRGNTGGFKTIF

SEQ ID NO: 708914 - protein, 12 aa, Homo sapiens
  CDR3 for beta chain variable domain of TCR clone 354457 (TRBV28, TRBJ2-3)
CASSLYRDTQYF

SEQ ID NO: 708915 - protein, 14 aa, Homo sapiens
  CDR3 for alpha chain variable domain of TCR clone 354458 (TRAV1-2, TRAJ16)
CAVNRFSDGQKRLF

SEQ ID NO: 708916 - protein, 11 aa, Homo sapiens
  CDR3 for beta chain variable domain of TCR clone 354458 (TRBV4-1, TRBJ2-2)
CASEHTGELFF

SEQ ID NO: 708917 - protein, 14 aa, Homo sapiens
  CDR3 for alpha chain variable domain of TCR clone 354459 (TRAV13-1, TRAJ35)
CAASKGGFGNVMHC

SEQ ID NO: 708918 - protein, 14 aa, Homo sapiens
  CDR3 for beta chain variable domain of TCR clone 354459 (TRBV7-8, TRBJ2-3)
CASSFPDGQDTQYF

SEQ ID NO: 708919 - protein, 12 aa, Homo sapiens
  CDR3 for alpha chain variable domain of TCR clone 354460 (TRAV17, TRAJ20)
CATYSNDYKLSF

SEQ ID NO: 708920 - protein, 15 aa, Homo sapiens
  CDR3 for beta chain variable domain of TCR clone 354460 (TRBV7-9, TRBJ2-5)
CASSDTGRGRETQYF

SEQ ID NO: 708921 - protein, 19 aa, Homo sapiens
  CDR3 for alpha chain variable domain of TCR clone 354461 (TRAV2, TRAJ20)
ILQVREADAAVYRDCKLSF

SEQ ID NO: 708922 - protein, 16 aa, Homo sapiens
  CDR3 for beta chain variable domain of TCR clone 354461 (TRBV5-1, TRBJ2-3)
CASSSVGRRSTDTQYF

SEQ ID NO: 708923 - protein, 12 aa, Homo sapiens
  CDR3 for alpha chain variable domain of TCR clone 354462 (TRAV12-2, TRAJ4)
TAFSGGYNKLIF

SEQ ID NO: 708924 - protein, 18 aa, Homo sapiens
  CDR3 for beta chain variable domain of TCR clone 354462 (TRBV12-4, TRBJ2-2)
CASSLVAGTRGRTGELFF

SEQ ID NO: 708925 - protein, 16 aa, Homo sapiens
  CDR3 for alpha chain variable domain of TCR clone 354463 (TRAV3, TRAJ37)
CAVRPHGSGNTGKLIF

SEQ ID NO: 708926 - protein, 15 aa, Homo sapiens
  CDR3 for beta chain variable domain of TCR clone 354463 (TRBV19, TRBJ2-7)
CASSPAGSGEALRYF

SEQ ID NO: 708927 - protein, 14 aa, Homo sapiens
  CDR3 for alpha chain variable domain of TCR clone 354464 (TRAV26-1, TRAJ44)
CIPQGTGTASKLTF

SEQ ID NO: 708928 - protein, 14 aa, Homo sapiens
  CDR3 for beta chain variable domain of TCR clone 354464 (TRBV7-3, TRBJ2-7)
CASSLKADSYEQYF

SEQ ID NO: 708929 - protein, 15 aa, Homo sapiens
  CDR3 for alpha chain variable domain of TCR clone 354465 (TRAV12-2, TRAJ20)
CAVKGGFGAGTTVTV

SEQ ID NO: 708930 - protein, 13 aa, Homo sapiens
  CDR3 for beta chain variable domain of TCR clone 354465 (TRBV19, TRBJ1-2)
CASSVPGQDGYTF

SEQ ID NO: 708931 - protein, 13 aa, Homo sapiens
  CDR3 for alpha chain variable domain of TCR clone 354466 (TRAV12-1, TRAJ13)
CVVGTGGYQKVTF

SEQ ID NO: 708932 - protein, 18 aa, Homo sapiens
  CDR3 for beta chain variable domain of TCR clone 354466 (TRBV25-1, TRBJ1-2)
CASSGLQNGQGLICGYTF

SEQ ID NO: 708933 - protein, 13 aa, Homo sapiens
  CDR3 for alpha chain variable domain of TCR clone 354467 (TRAV21, TRAJ40)
CAVRPSRAYEYIF

SEQ ID NO: 708934 - protein, 12 aa, Homo sapiens
  CDR3 for beta chain variable domain of TCR clone 354467 (TRBV14, TRBJ2-5)
CASSQLKETQYF

SEQ ID NO: 708935 - protein, 12 aa, Homo sapiens
  CDR3 for alpha chain variable domain of TCR clone 354468 (TRAV21, TRAJ49)
CAVNDGGNQLYF

SEQ ID NO: 708936 - protein, 13 aa, Homo sapiens
  CDR3 for beta chain variable domain of TCR clone 354468 (TRBV2, TRBJ1-1)
CASSVLMNTEAFF

SEQ ID NO: 708937 - protein, 18 aa, Homo sapiens
  CDR3 for alpha chain variable domain of TCR clone 354469 (TRAV13-1, TRAJ52)
CAASKRSAGGTSYGKLTF

SEQ ID NO: 708938 - protein, 13 aa, Homo sapiens
  CDR3 for beta chain variable domain of TCR clone 354469 (TRBV6-3, TRBJ1-2)
CASSLTGDYGYTF

SEQ ID NO: 708939 - protein, 13 aa, Homo sapiens
  CDR3 for alpha chain variable domain of TCR clone 354470 (TRAV20, TRAJ20)
CAVQAGSGYKLSF

SEQ ID NO: 708940 - protein, 15 aa, Homo sapiens
  CDR3 for beta chain variable domain of TCR clone 354470 (TRBV5-7, TRBJ1-5)
CASSYGKLWDQPQHF

SEQ ID NO: 708941 - protein, 16 aa, Homo sapiens
  CDR3 for alpha chain variable domain of TCR clone 354471 (TRAV3, TRAJ21)
CAVRDIERGNFNKFYF

SEQ ID NO: 708942 - protein, 16 aa, Homo sapiens
  CDR3 for beta chain variable domain of TCR clone 354471 (TRBV4-3, TRBJ2-3)
CASSLGLAGEGDTQYF

SEQ ID NO: 708943 - protein, 13 aa, Homo sapiens
  CDR3 for alpha chain variable domain of TCR clone 354472 (TRAV21, TRAJ45)
CAVMAGGADGLTF

SEQ ID NO: 708944 - protein, 14 aa, Homo sapiens
  CDR3 for beta chain variable domain of TCR clone 354472 (TRBV4-3, TRBJ1-4)
CASSPLQRNEKLFF

SEQ ID NO: 708945 - protein, 12 aa, Homo sapiens
  CDR3 for alpha chain variable domain of TCR clone 354473 (TRAV12-3, TRAJ17)
CAMTLTGNKLTF

SEQ ID NO: 708946 - protein, 15 aa, Homo sapiens
  CDR3 for beta chain variable domain of TCR clone 354473 (TRBV5-1, TRBJ2-1)
CASSPPRAPYNEQSF

SEQ ID NO: 708947 - protein, 10 aa, Homo sapiens
  CDR3 for alpha chain variable domain of TCR clone 354474 (TRAV13-1, TRAJ8)
CAAPFQKLVF

SEQ ID NO: 708948 - protein, 20 aa, Homo sapiens
  CDR3 for beta chain variable domain of TCR clone 354474 (TRBV10-3, TRBJ2-3)
CTSVQSPTLWRTSSTDTQYF

SEQ ID NO: 708949 - protein, 17 aa, Homo sapiens
  CDR3 for alpha chain variable domain of TCR clone 354475 (TRAV8-3, TRAJ15)
LSTSVLGRHQAGTALIF

SEQ ID NO: 708950 - protein, 13 aa, Homo sapiens
  CDR3 for beta chain variable domain of TCR clone 354475 (TRBV9, TRBJ2-7)
CASSASDSYEQYF

SEQ ID NO: 708951 - protein, 13 aa, Homo sapiens
  CDR3 for alpha chain variable domain of TCR clone 354476 (TRAV8-6, TRAJ49)
CAVITNTGNRSYF

SEQ ID NO: 708952 - protein, 17 aa, Homo sapiens
  CDR3 for beta chain variable domain of TCR clone 354476 (TRBV11-2, TRBJ2-1)
CASSLYPPGVEYNEQFF

SEQ ID NO: 708953 - protein, 12 aa, Homo sapiens
  CDR3 for alpha chain variable domain of TCR clone 354477 (TRAV17, TRAJ47)
CAPTVKGNKLVF

SEQ ID NO: 708954 - protein, 13 aa, Homo sapiens
  CDR3 for beta chain variable domain of TCR clone 354477 (TRBV7-2, TRBJ2-4)
CASSLAEGGTQYF

SEQ ID NO: 708955 - protein, 14 aa, Homo sapiens
  CDR3 for alpha chain variable domain of TCR clone 354478 (TRAV1-2, TRAJ16)
CAVNRFSDGQKLLF

SEQ ID NO: 708956 - protein, 13 aa, Homo sapiens
  CDR3 for beta chain variable domain of TCR clone 354478 (TRBV28, TRBJ2-7)
CAGAQQGLDEQYF

SEQ ID NO: 708957 - protein, 15 aa, Homo sapiens
  CDR3 for alpha chain variable domain of TCR clone 354479 (TRAV26-1, TRAJ29)
CIVRVEGSGNKPLVC

SEQ ID NO: 708958 - protein, 15 aa, Homo sapiens
  CDR3 for beta chain variable domain of TCR clone 354479 (TRBV7-9, TRBJ1-5)
CASSQGHQPNQPQHF

SEQ ID NO: 708959 - protein, 13 aa, Homo sapiens
  CDR3 for alpha chain variable domain of TCR clone 354480 (TRAV35, TRAJ36)
CAGPRIGANNPFF

SEQ ID NO: 708960 - protein, 15 aa, Homo sapiens
  CDR3 for beta chain variable domain of TCR clone 354480 (TRBV28, TRBJ2-5)
CASSPPWSYQGTQYF

SEQ ID NO: 708961 - protein, 15 aa, Homo sapiens
  CDR3 for alpha chain variable domain of TCR clone 354481 (TRAV29/DV5, TRAJ29)
CAASERSSGNTPLVF

SEQ ID NO: 708962 - protein, 15 aa, Homo sapiens
  CDR3 for beta chain variable domain of TCR clone 354481 (TRBV11-2, TRBJ2-2)
CASSSDRVNAGELFF

SEQ ID NO: 708963 - protein, 23 aa, Homo sapiens
  CDR3 for alpha chain variable domain of TCR clone 354482 (TRAV3, TRAJ32)
CAVRDELLLQTSSSFELALCLLS

SEQ ID NO: 708964 - protein, 13 aa, Homo sapiens
  CDR3 for beta chain variable domain of TCR clone 354482 (TRBV12-5, TRBJ2-3)
CASGDRQSDTQYF

SEQ ID NO: 708965 - protein, 14 aa, Homo sapiens
  CDR3 for alpha chain variable domain of TCR clone 354483 (TRAV4, TRAJ26)
CLVGPHIYGQNFVF

SEQ ID NO: 708966 - protein, 17 aa, Homo sapiens
  CDR3 for beta chain variable domain of TCR clone 354483 (TRBV24-1, TRBJ2-1)
CATSDVSTSGTYNEQFF

SEQ ID NO: 708967 - protein, 17 aa, Homo sapiens
  CDR3 for alpha chain variable domain of TCR clone 354484 (TRAV12-2, TRAJ36)
CAVKDNLFFGTGTRLTV

SEQ ID NO: 708968 - protein, 15 aa, Homo sapiens
  CDR3 for beta chain variable domain of TCR clone 354484 (TRBV28, TRBJ2-2)
CASTVAGANTGELFS

SEQ ID NO: 708969 - protein, 12 aa, Homo sapiens
  CDR3 for alpha chain variable domain of TCR clone 354485 (TRAV2, TRAJ9)
CAVGAGGFKTIF

SEQ ID NO: 708970 - protein, 16 aa, Homo sapiens
  CDR3 for beta chain variable domain of TCR clone 354485 (TRBV13, TRBJ2-2)
CDSSRRTGEHTGELFF

SEQ ID NO: 708971 - protein, 17 aa, Homo sapiens
  CDR3 for alpha chain variable domain of TCR clone 354486 (TRAV26-1, TRAJ37)
CIVRVITVSSNTGKLIF

SEQ ID NO: 708972 - protein, 14 aa, Homo sapiens
  CDR3 for beta chain variable domain of TCR clone 354486 (TRBV7-8, TRBJ1-2)
CASSPDSVSYGYTF

SEQ ID NO: 708973 - protein, 14 aa, Homo sapiens
  CDR3 for alpha chain variable domain of TCR clone 354487 (TRAV12-1, TRAJ17)
CVGNYKAAGNKLTF

SEQ ID NO: 708974 - protein, 17 aa, Homo sapiens
  CDR3 for beta chain variable domain of TCR clone 354487 (TRBV20-1, TRBJ2-1)
CSASSSGLAGAYNEQFF

SEQ ID NO: 708975 - protein, 14 aa, Homo sapiens
  CDR3 for alpha chain variable domain of TCR clone 354488 (TRAV1-2, TRAJ8)
CAVREDTGFRKLVF

SEQ ID NO: 708976 - protein, 14 aa, Homo sapiens
  CDR3 for beta chain variable domain of TCR clone 354488 (TRBV28, TRBJ1-1)
CASSPRTRWADAFF

SEQ ID NO: 708977 - protein, 14 aa, Homo sapiens
  CDR3 for alpha chain variable domain of TCR clone 354489 (TRAV17, TRAJ57)
CATDPQCGSEKLVF

SEQ ID NO: 708978 - protein, 13 aa, Homo sapiens
  CDR3 for beta chain variable domain of TCR clone 354489 (TRBV10-3, TRBJ2-7)
CASKLAVNYEQNF

SEQ ID NO: 708979 - protein, 11 aa, Homo sapiens
  CDR3 for alpha chain variable domain of TCR clone 354490 (TRAV12-3, TRAJ27)
CAMANAGKSTF

SEQ ID NO: 708980 - protein, 12 aa, Homo sapiens
  CDR3 for beta chain variable domain of TCR clone 354490 (TRBV11-2, TRBJ2-2)
CASSRGGGELFF

SEQ ID NO: 708981 - protein, 14 aa, Homo sapiens
  CDR3 for alpha chain variable domain of TCR clone 354491 (TRAV22, TRAJ40)
CAVESTSGTYEYIF

SEQ ID NO: 708982 - protein, 17 aa, Homo sapiens
  CDR3 for beta chain variable domain of TCR clone 354491 (TRBV7-9, TRBJ2-2)
CASSLGVAGMNTGELVF

SEQ ID NO: 708983 - protein, 16 aa, Homo sapiens
  CDR3 for alpha chain variable domain of TCR clone 354492 (TRAV12-3, TRAJ45)
CAMGWGSGGGADGLTF

SEQ ID NO: 708984 - protein, 18 aa, Homo sapiens
  CDR3 for beta chain variable domain of TCR clone 354492 (TRBV12-4, TRBJ2-2)
CASSLVAGTLGRTGELFF

SEQ ID NO: 708985 - protein, 16 aa, Homo sapiens
  CDR3 for alpha chain variable domain of TCR clone 354493 (TRAV3, TRAJ21)
CAVRDIERGNFNKFYF

SEQ ID NO: 708986 - protein, 14 aa, Homo sapiens
  CDR3 for beta chain variable domain of TCR clone 354493 (TRBV7-9, TRBJ2-2)
CASSFDRGTGELFF

SEQ ID NO: 708987 - protein, 15 aa, Homo sapiens
  CDR3 for alpha chain variable domain of TCR clone 354494 (TRAV25, TRAJ52)
CAGRPGGTSYGKLTF

SEQ ID NO: 708988 - protein, 19 aa, Homo sapiens
  CDR3 for beta chain variable domain of TCR clone 354494 (TRBV25-1, TRBJ2-2)
CAILVYRVDRGRKTGELFF

SEQ ID NO: 708989 - protein, 13 aa, Homo sapiens
  CDR3 for alpha chain variable domain of TCR clone 354495 (TRAV1-2, TRAJ9)
CAASNTGGFKTIF

SEQ ID NO: 708990 - protein, 15 aa, Homo sapiens
  CDR3 for beta chain variable domain of TCR clone 354495 (TRBV19, TRBJ1-1)
CASTSGQIQNTEAFF

SEQ ID NO: 708991 - protein, 14 aa, Homo sapiens
  CDR3 for alpha chain variable domain of TCR clone 354496 (TRAV12-1, TRAJ17)
CVVNYKAAGNKLTF

SEQ ID NO: 708992 - protein, 17 aa, Homo sapiens
  CDR3 for beta chain variable domain of TCR clone 354496 (TRBV20-1, TRBJ2-1)
CSASSSGLAGTYNEQFF

SEQ ID NO: 708993 - protein, 11 aa, Homo sapiens
  CDR3 for alpha chain variable domain of TCR clone 354497 (TRAV17, TRAJ9)
CATTGGFKTIF

SEQ ID NO: 708994 - protein, 13 aa, Homo sapiens
  CDR3 for beta chain variable domain of TCR clone 354497 (TRBV6-1, TRBJ1-1)
CASSRQGNTEAFF

SEQ ID NO: 708995 - protein, 16 aa, Homo sapiens
  CDR3 for alpha chain variable domain of TCR clone 354498 (TRAV17, TRAJ52)
CATGIIGGTSYVKLTF

SEQ ID NO: 708996 - protein, 16 aa, Homo sapiens
  CDR3 for beta chain variable domain of TCR clone 354498 (TRBV4-2, TRBJ2-3)
CASSQELAGDTDTQYF

SEQ ID NO: 708997 - protein, 15 aa, Homo sapiens
  CDR3 for alpha chain variable domain of TCR clone 354499 (TRAV13-2, TRAJ45)
CAESDSGGGADGLTF

SEQ ID NO: 708998 - protein, 15 aa, Homo sapiens
  CDR3 for beta chain variable domain of TCR clone 354499 (TRBV11-3, TRBJ2-3)
CASLMDGREGDTQYF

SEQ ID NO: 708999 - protein, 16 aa, Homo sapiens
  CDR3 for alpha chain variable domain of TCR clone 354500 (TRAV12-3, TRAJ53)
CAMSPGSGGSNYKLTF

SEQ ID NO: 709000 - protein, 16 aa, Homo sapiens
  CDR3 for beta chain variable domain of TCR clone 354500 (TRBV12-4, TRBJ1-5)
CASRRPVGGSNQHQHF

SEQ ID NO: 709001 - protein, 14 aa, Homo sapiens
  CDR3 for alpha chain variable domain of TCR clone 354501 (TRAV12-2, TRAJ44)
CAVNPAGTASKLTF

SEQ ID NO: 709002 - protein, 15 aa, Homo sapiens
  CDR3 for beta chain variable domain of TCR clone 354501 (TRBV20-1, TRBJ1-6)
CSAPLGVGSPSTLGM

SEQ ID NO: 709003 - protein, 15 aa, Homo sapiens
  CDR3 for alpha chain variable domain of TCR clone 354502 (TRAV12-1, TRAJ42)
CVLTRDGGSQGNLIF

SEQ ID NO: 709004 - protein, 13 aa, Homo sapiens
  CDR3 for beta chain variable domain of TCR clone 354502 (TRBV27, TRBJ2-7)
CASSLTTGYEQYF

SEQ ID NO: 709005 - protein, 13 aa, Homo sapiens
  CDR3 for alpha chain variable domain of TCR clone 354503 (TRAV4, TRAJ42)
CLVGGGSQGNLIF

SEQ ID NO: 709006 - protein, 12 aa, Homo sapiens
  CDR3 for beta chain variable domain of TCR clone 354503 (TRBV5-1, TRBJ2-3)
LAGRVGADTQYF

SEQ ID NO: 709007 - protein, 16 aa, Homo sapiens
  CDR3 for alpha chain variable domain of TCR clone 354504 (TRAV12-2, TRAJ32)
CAVNLGQGGATNKLIF

SEQ ID NO: 709008 - protein, 15 aa, Homo sapiens
  CDR3 for beta chain variable domain of TCR clone 354504 (TRBV20-1, TRBJ2-7)
CSARGRLAGGREQYF

SEQ ID NO: 709009 - protein, 14 aa, Homo sapiens
  CDR3 for alpha chain variable domain of TCR clone 354505 (TRAV12-3, TRAJ53)
CGATCGGSNYKLTF

SEQ ID NO: 709010 - protein, 13 aa, Homo sapiens
  CDR3 for beta chain variable domain of TCR clone 354505 (TRBV19, TRBJ1-5)
CASSTQDGQPQHF

SEQ ID NO: 709011 - protein, 13 aa, Homo sapiens
  CDR3 for alpha chain variable domain of TCR clone 354506 (TRAV21, TRAJ20)
CAVGLRVDYKLSF

SEQ ID NO: 709012 - protein, 13 aa, Homo sapiens
  CDR3 for beta chain variable domain of TCR clone 354506 (TRBV12-4, TRBJ2-5)
CASRLAVQETQYF

SEQ ID NO: 709013 - protein, 17 aa, Homo sapiens
  CDR3 for alpha chain variable domain of TCR clone 354507 (TRAV12-2, TRAJ26)
CAIPGKYRDNYGQNFVF

SEQ ID NO: 709014 - protein, 14 aa, Homo sapiens
  CDR3 for beta chain variable domain of TCR clone 354507 (TRBV19, TRBJ1-5)
CASRAPDSFLSQHF

SEQ ID NO: 709015 - protein, 14 aa, Homo sapiens
  CDR3 for alpha chain variable domain of TCR clone 354508 (TRAV17, TRAJ54)
CATDANQGAQKLVF

SEQ ID NO: 709016 - protein, 17 aa, Homo sapiens
  CDR3 for beta chain variable domain of TCR clone 354508 (TRBV13, TRBJ2-3)
CASSLSRVAGGRNTQYF

SEQ ID NO: 709017 - protein, 15 aa, Homo sapiens
  CDR3 for alpha chain variable domain of TCR clone 354509 (TRAV12-2, TRAJ53)
CAVNTGGGSNYKLTF

SEQ ID NO: 709018 - protein, 13 aa, Homo sapiens
  CDR3 for beta chain variable domain of TCR clone 354509 (TRBV7-2, TRBJ2-7)
CASSSPSGSEQYF

SEQ ID NO: 709019 - protein, 15 aa, Homo sapiens
  CDR3 for alpha chain variable domain of TCR clone 354510 (TRAV17, TRAJ13)
CATDAGSGGYQKVTF

SEQ ID NO: 709020 - protein, 17 aa, Homo sapiens
  CDR3 for beta chain variable domain of TCR clone 354510 (TRBV11-2, TRBJ2-1)
RASSLYPPGVEYNEQFF

SEQ ID NO: 709021 - protein, 11 aa, Homo sapiens
  CDR3 for alpha chain variable domain of TCR clone 354511 (TRAV12-3, TRAJ16)
LKGGDGQKLLF

SEQ ID NO: 709022 - protein, 13 aa, Homo sapiens
  CDR3 for beta chain variable domain of TCR clone 354511 (TRBV12-4, TRBJ1-4)
CASAMGHNEKLFF

SEQ ID NO: 709023 - protein, 15 aa, Homo sapiens
  CDR3 for alpha chain variable domain of TCR clone 354512 (TRAV35, TRAJ52)
CPGPRGGTSYGKLTF

SEQ ID NO: 709024 - protein, 14 aa, Homo sapiens
  CDR3 for beta chain variable domain of TCR clone 354512 (TRBV20-1, TRBJ2-7)
CSAWTARSSYEQYF

SEQ ID NO: 709025 - protein, 14 aa, Homo sapiens
  CDR3 for alpha chain variable domain of TCR clone 354513 (TRAV12-2, TRAJ15)
CAPHTGKAGTALTF

SEQ ID NO: 709026 - protein, 17 aa, Homo sapiens
  CDR3 for beta chain variable domain of TCR clone 354513 (TRBV5-5, TRBJ1-2)
CASSLGSLDGQSEGYTF

SEQ ID NO: 709027 - protein, 13 aa, Homo sapiens
  CDR3 for alpha chain variable domain of TCR clone 354514 (TRAV13-2, TRAJ43)
CRDPHVHNNDMRF

SEQ ID NO: 709028 - protein, 15 aa, Homo sapiens
  CDR3 for beta chain variable domain of TCR clone 354514 (TRBV7-9, TRBJ2-2)
CASGPLDTFPGELFF

SEQ ID NO: 709029 - protein, 14 aa, Homo sapiens
  CDR3 for alpha chain variable domain of TCR clone 354515 (TRAV16, TRAJ54)
CALSLIQGAQKLVF

SEQ ID NO: 709030 - protein, 13 aa, Homo sapiens
  CDR3 for beta chain variable domain of TCR clone 354515 (TRBV4-1, TRBJ2-2)
CASSQENTGELFF

SEQ ID NO: 709031 - protein, 15 aa, Homo sapiens
  CDR3 for alpha chain variable domain of TCR clone 354516 (TRAV10, TRAJ6)
CVVRPRTGGSYIPTF

SEQ ID NO: 709032 - protein, 14 aa, Homo sapiens
  CDR3 for beta chain variable domain of TCR clone 354516 (TRBV20-1, TRBJ2-4)
CSASGRVGENRQYF

SEQ ID NO: 709033 - protein, 16 aa, Homo sapiens
  CDR3 for alpha chain variable domain of TCR clone 354517 (TRAV3, TRAJ10)
CAVRDMRAGGGDKITF

SEQ ID NO: 709034 - protein, 15 aa, Homo sapiens
  CDR3 for beta chain variable domain of TCR clone 354517 (TRBV11-2, TRBJ1-6)
CASTGCGTAVSPLHF

SEQ ID NO: 709035 - protein, 16 aa, Homo sapiens
  CDR3 for alpha chain variable domain of TCR clone 354518 (TRAV38-1, TRAJ56)
CAFMKRQTVANSKLTF

SEQ ID NO: 709036 - protein, 11 aa, Homo sapiens
  CDR3 for beta chain variable domain of TCR clone 354518 (TRBV12-4, TRBJ2-3)
CASTATDTQYF

SEQ ID NO: 709037 - protein, 17 aa, Homo sapiens
  CDR3 for alpha chain variable domain of TCR clone 354519 (TRAV4, TRAJ18)
CLVGERSVGPNLGRLYF

SEQ ID NO: 709038 - protein, 16 aa, Homo sapiens
  CDR3 for beta chain variable domain of TCR clone 354519 (TRBV4-2, TRBJ1-1)
CASSPPPGRAAPEAFF

SEQ ID NO: 709039 - protein, 12 aa, Homo sapiens
  CDR3 for alpha chain variable domain of TCR clone 354520 (TRAV16, TRAJ10)
CSRTGGGNKLTF

SEQ ID NO: 709040 - protein, 16 aa, Homo sapiens
  CDR3 for beta chain variable domain of TCR clone 354520 (TRBV12-4, TRBJ2-3)
CASSLRLAETTDTQYF

SEQ ID NO: 709041 - protein, 13 aa, Homo sapiens
  CDR3 for alpha chain variable domain of TCR clone 354521 (TRAV13-1, TRAJ21)
CAASIYNFNKFYF

SEQ ID NO: 709042 - protein, 17 aa, Homo sapiens
  CDR3 for beta chain variable domain of TCR clone 354521 (TRBV15, TRBJ1-4)
CATSRYGTGDPNEKLFF

SEQ ID NO: 709043 - protein, 14 aa, Homo sapiens
  CDR3 for alpha chain variable domain of TCR clone 354522 (TRAV21, TRAJ21)
CAVGVEDNFNKFYF

SEQ ID NO: 709044 - protein, 14 aa, Homo sapiens
  CDR3 for beta chain variable domain of TCR clone 354522 (TRBV9, TRBJ2-4)
CASSPSGTSGFQYF

SEQ ID NO: 709045 - protein, 12 aa, Homo sapiens
  CDR3 for alpha chain variable domain of TCR clone 354523 (TRAV13-1, TRAJ27)
CAAHTHAGKSTF

SEQ ID NO: 709046 - protein, 14 aa, Homo sapiens
  CDR3 for beta chain variable domain of TCR clone 354523 (TRBV19, TRBJ2-2)
WASSGQGIAGELFF

SEQ ID NO: 709047 - protein, 14 aa, Homo sapiens
  CDR3 for alpha chain variable domain of TCR clone 354524 (TRAV12-2, TRAJ53)
CDVKGGGSNYKLTF

SEQ ID NO: 709048 - protein, 14 aa, Homo sapiens
  CDR3 for beta chain variable domain of TCR clone 354524 (TRBV19, TRBJ2-1)
CASPTFVLSGEQFF

SEQ ID NO: 709049 - protein, 12 aa, Homo sapiens
  CDR3 for alpha chain variable domain of TCR clone 354525 (TRAV1-1, TRAJ8)
CAGGTGFQKLVF

SEQ ID NO: 709050 - protein, 13 aa, Homo sapiens
  CDR3 for beta chain variable domain of TCR clone 354525 (TRBV19, TRBJ1-2)
CASSVPGQDGYTF

SEQ ID NO: 709051 - protein, 13 aa, Homo sapiens
  CDR3 for alpha chain variable domain of TCR clone 354526 (TRAV12-1, TRAJ37)
CVVNAGNNGKLIF

SEQ ID NO: 709052 - protein, 14 aa, Homo sapiens
  CDR3 for beta chain variable domain of TCR clone 354526 (TRBV7-2, TRBJ2-3)
CASRRGLAADTQYF

SEQ ID NO: 709053 - protein, 12 aa, Homo sapiens
  CDR3 for alpha chain variable domain of TCR clone 354527 (TRAV13-1, TRAJ53)
AASGGSNYKLTF

SEQ ID NO: 709054 - protein, 14 aa, Homo sapiens
  CDR3 for beta chain variable domain of TCR clone 354527 (TRBV3-1, TRBJ2-5)
CASSQGPDQETQYL

SEQ ID NO: 709055 - protein, 16 aa, Homo sapiens
  CDR3 for alpha chain variable domain of TCR clone 354528 (TRAV38-2/DV8, TRAJ33)
CAYRTGLFDSYYQLTW

SEQ ID NO: 709056 - protein, 13 aa, Homo sapiens
  CDR3 for beta chain variable domain of TCR clone 354528 (TRBV27, TRBJ1-4)
CASSLMGDEKLFF

SEQ ID NO: 709057 - protein, 13 aa, Homo sapiens
  CDR3 for alpha chain variable domain of TCR clone 354529 (TRAV38-2/DV8, TRAJ34)
CAYRTWNTDKLIF

SEQ ID NO: 709058 - protein, 13 aa, Homo sapiens
  CDR3 for beta chain variable domain of TCR clone 354529 (TRBV7-9, TRBJ2-3)
CASSPGSTDTQYF

SEQ ID NO: 709059 - protein, 12 aa, Homo sapiens
  CDR3 for alpha chain variable domain of TCR clone 354530 (TRAV26-1, TRAJ35)
CIGLSFGNVLHC

SEQ ID NO: 709060 - protein, 17 aa, Homo sapiens
  CDR3 for beta chain variable domain of TCR clone 354530 (TRBV11-2, TRBJ2-1)
CASSLYPPGVEYNEQFF

SEQ ID NO: 709061 - protein, 15 aa, Homo sapiens
  CDR3 for alpha chain variable domain of TCR clone 354531 (TRAV23/DV6, TRAJ18)
CAARYRGSTLGRRYF

SEQ ID NO: 709062 - protein, 15 aa, Homo sapiens
  CDR3 for beta chain variable domain of TCR clone 354531 (TRBV7-8, TRBJ2-1)
CASSLADSLYNEQFF

SEQ ID NO: 709063 - protein, 10 aa, Homo sapiens
  CDR3 for alpha chain variable domain of TCR clone 354532 (TRAV1-2, TRAJ20)
CACNDYKLSF

SEQ ID NO: 709064 - protein, 16 aa, Homo sapiens
  CDR3 for beta chain variable domain of TCR clone 354532 (TRBV20-1, TRBJ2-1)
CSARNLKQGMNNEQFF

SEQ ID NO: 709065 - protein, 11 aa, Homo sapiens
  CDR3 for alpha chain variable domain of TCR clone 354533 (TRAV3, TRAJ21)
CAVGNFNKFHF

SEQ ID NO: 709066 - protein, 16 aa, Homo sapiens
  CDR3 for beta chain variable domain of TCR clone 354533 (TRBV19, TRBJ2-1)
CASSKAGPSSFNEQFF

SEQ ID NO: 709067 - protein, 11 aa, Homo sapiens
  CDR3 for alpha chain variable domain of TCR clone 354534 (TRAV2, TRAJ13)
CASGGYQKVTF

SEQ ID NO: 709068 - protein, 20 aa, Homo sapiens
  CDR3 for beta chain variable domain of TCR clone 354534 (TRBV11-2, TRBJ2-1)
CASSPRISALGRGAMNEQFF

SEQ ID NO: 709069 - protein, 14 aa, Homo sapiens
  CDR3 for alpha chain variable domain of TCR clone 354535 (TRAV12-2, TRAJ13)
CAVKKTGGYQKVTF

SEQ ID NO: 709070 - protein, 15 aa, Homo sapiens
  CDR3 for beta chain variable domain of TCR clone 354535 (TRBV27, TRBJ2-1)
CTSSNGGGSSNAQFF

SEQ ID NO: 709071 - protein, 14 aa, Homo sapiens
  CDR3 for alpha chain variable domain of TCR clone 354536 (TRAV16, TRAJ40)
CALHESYYPRNLQI

SEQ ID NO: 709072 - protein, 12 aa, Homo sapiens
  CDR3 for beta chain variable domain of TCR clone 354536 (TRBV7-3, TRBJ2-3)
CASSSLTDTQYF

SEQ ID NO: 709073 - protein, 12 aa, Homo sapiens
  CDR3 for alpha chain variable domain of TCR clone 354537 (TRAV3, TRAJ27)
CAVRDGAGKLTF

SEQ ID NO: 709074 - protein, 13 aa, Homo sapiens
  CDR3 for beta chain variable domain of TCR clone 354537 (TRBV10-3, TRBJ1-2)
CAINADLNYGDTF

SEQ ID NO: 709075 - protein, 15 aa, Homo sapiens
  CDR3 for alpha chain variable domain of TCR clone 354538 (TRAV1-1, TRAJ22)
CAVRVSSGSARQQTF

SEQ ID NO: 709076 - protein, 15 aa, Homo sapiens
  CDR3 for beta chain variable domain of TCR clone 354538 (TRBV20-1, TRBJ2-7)
CSARDRVSGMDEQYF

SEQ ID NO: 709077 - protein, 15 aa, Homo sapiens
  CDR3 for alpha chain variable domain of TCR clone 354539 (TRAV26-1, TRAJ44)
CIVRANTGTASKLTF

SEQ ID NO: 709078 - protein, 15 aa, Homo sapiens
  CDR3 for beta chain variable domain of TCR clone 354539 (TRBV15, TRBJ1-5)
CASSREQGGNQPQHF

SEQ ID NO: 709079 - protein, 12 aa, Homo sapiens
  CDR3 for alpha chain variable domain of TCR clone 354540 (TRAV12-3, TRAJ17)
CAMTLTGNKLTF

SEQ ID NO: 709080 - protein, 13 aa, Homo sapiens
  CDR3 for beta chain variable domain of TCR clone 354540 (TRBV15, TRBJ2-5)
CATSQIGEETQYF

SEQ ID NO: 709081 - protein, 15 aa, Homo sapiens
  CDR3 for alpha chain variable domain of TCR clone 354541 (TRAV2, TRAJ15)
CAVEDREQAGTALIF

SEQ ID NO: 709082 - protein, 13 aa, Homo sapiens
  CDR3 for beta chain variable domain of TCR clone 354541 (TRBV10-2, TRBJ2-3)
CTSSESGDHTQYF

SEQ ID NO: 709083 - protein, 16 aa, Homo sapiens
  CDR3 for alpha chain variable domain of TCR clone 354542 (TRAV3, TRAJ37)
CAVRGKGPGNTGKLIF

SEQ ID NO: 709084 - protein, 15 aa, Homo sapiens
  CDR3 for beta chain variable domain of TCR clone 354542 (TRBV4-1, TRBJ1-4)
CASSDTGGTNEKLFF

SEQ ID NO: 709085 - protein, 14 aa, Homo sapiens
  CDR3 for alpha chain variable domain of TCR clone 354543 (TRAV23/DV6, TRAJ37)
CAASTSSNTGKLIF

SEQ ID NO: 709086 - protein, 16 aa, Homo sapiens
  CDR3 for beta chain variable domain of TCR clone 354543 (TRBV13, TRBJ2-2)
CASSPRTGEHTGELFF

SEQ ID NO: 709087 - protein, 15 aa, Homo sapiens
  CDR3 for alpha chain variable domain of TCR clone 354544 (TRAV13-2, TRAJ32)
CAENTHGGATNKLIF

SEQ ID NO: 709088 - protein, 12 aa, Homo sapiens
  CDR3 for beta chain variable domain of TCR clone 354544 (TRBV29-1, TRBJ2-3)
CSVTGGADTQYF

SEQ ID NO: 709089 - protein, 13 aa, Homo sapiens
  CDR3 for alpha chain variable domain of TCR clone 354545 (TRAV12-2, TRAJ50)
CAMIVTSYDKVIF

SEQ ID NO: 709090 - protein, 14 aa, Homo sapiens
  CDR3 for beta chain variable domain of TCR clone 354545 (TRBV11-2, TRBJ2-3)
CASSRLARTDTQYF

SEQ ID NO: 709091 - protein, 11 aa, Homo sapiens
  CDR3 for alpha chain variable domain of TCR clone 354546 (TRAV13-1, )
CAASPMDIQNP

SEQ ID NO: 709092 - protein, 13 aa, Homo sapiens
  CDR3 for beta chain variable domain of TCR clone 354546 (TRBV20-1, TRBJ2-2)
CSASAAGTGELFF

SEQ ID NO: 709093 - protein, 14 aa, Homo sapiens
  CDR3 for alpha chain variable domain of TCR clone 354547 (TRAV8-2, TRAJ10)
CVVSDPGGGNKLTF

SEQ ID NO: 709094 - protein, 15 aa, Homo sapiens
  CDR3 for beta chain variable domain of TCR clone 354547 (TRBV28, TRBJ2-1)
CASSIIAGGRSEQFF

SEQ ID NO: 709095 - protein, 12 aa, Homo sapiens
  CDR3 for alpha chain variable domain of TCR clone 354548 (TRAV2, TRAJ31)
CAVEDNNARLMF

SEQ ID NO: 709096 - protein, 14 aa, Homo sapiens
  CDR3 for beta chain variable domain of TCR clone 354548 (TRBV7-3, TRBJ1-1)
CASSLKGGNTEAFF

SEQ ID NO: 709097 - protein, 11 aa, Homo sapiens
  CDR3 for alpha chain variable domain of TCR clone 354549 (TRAV2, TRAJ33)
CAVERNYQLIW

SEQ ID NO: 709098 - protein, 15 aa, Homo sapiens
  CDR3 for beta chain variable domain of TCR clone 354549 (TRBV19, TRBJ1-1)
CASTAGQIQNTEAFF

SEQ ID NO: 709099 - protein, 14 aa, Homo sapiens
  CDR3 for alpha chain variable domain of TCR clone 354550 (TRAV29/DV5, TRAJ34)
CAASASRETDKIIF

SEQ ID NO: 709100 - protein, 15 aa, Homo sapiens
  CDR3 for beta chain variable domain of TCR clone 354550 (TRBV7-8, TRBJ2-7)
CASSLERAGSYEQYF

SEQ ID NO: 709101 - protein, 12 aa, Homo sapiens
  CDR3 for alpha chain variable domain of TCR clone 354551 (TRAV17, TRAJ20)
CATDGDDYKLSF

SEQ ID NO: 709102 - protein, 17 aa, Homo sapiens
  CDR3 for beta chain variable domain of TCR clone 354551 (TRBV15, TRBJ1-5)
CATSRAPPGTRNQPQHF

SEQ ID NO: 709103 - protein, 16 aa, Homo sapiens
  CDR3 for alpha chain variable domain of TCR clone 354552 (TRAV21, TRAJ17)
CAVRPGEEAAGNKLTF

SEQ ID NO: 709104 - protein, 16 aa, Homo sapiens
  CDR3 for beta chain variable domain of TCR clone 354552 (TRBV2, TRBJ2-7)
CASSEPWTGPSYEQHF

SEQ ID NO: 709105 - protein, 14 aa, Homo sapiens
  CDR3 for alpha chain variable domain of TCR clone 354553 (TRAV2, TRAJ9)
CAVEDRSGGFKTIF

SEQ ID NO: 709106 - protein, 11 aa, Homo sapiens
  CDR3 for beta chain variable domain of TCR clone 354553 (TRBV7-9, TRBJ2-5)
CGSSLGETQYF

SEQ ID NO: 709107 - protein, 18 aa, Homo sapiens
  CDR3 for alpha chain variable domain of TCR clone 354554 (TRAV13-1, TRAJ52)
CAAKNPNAGGTSYGKLTF

SEQ ID NO: 709108 - protein, 13 aa, Homo sapiens
  CDR3 for beta chain variable domain of TCR clone 354554 (TRBV27, TRBJ1-1)
CASSVSSGAEAFF

SEQ ID NO: 709109 - protein, 13 aa, Homo sapiens
  CDR3 for alpha chain variable domain of TCR clone 354555 (TRAV16, TRAJ28)
CAPTGAGSYQLTF

SEQ ID NO: 709110 - protein, 16 aa, Homo sapiens
  CDR3 for beta chain variable domain of TCR clone 354555 (TRBV28, TRBJ1-5)
CTSSLTGQGWNQPQHF

SEQ ID NO: 709111 - protein, 15 aa, Homo sapiens
  CDR3 for alpha chain variable domain of TCR clone 354556 (TRAV21, TRAJ32)
CAVNAYGGATNKLIF

SEQ ID NO: 709112 - protein, 18 aa, Homo sapiens
  CDR3 for beta chain variable domain of TCR clone 354556 (TRBV7-9, TRBJ2-1)
CASSTGLAEGSSNNEQFF

SEQ ID NO: 709113 - protein, 14 aa, Homo sapiens
  CDR3 for alpha chain variable domain of TCR clone 354557 (TRAV13-1, TRAJ9)
CAASALTGGFKTIF

SEQ ID NO: 709114 - protein, 15 aa, Homo sapiens
  CDR3 for beta chain variable domain of TCR clone 354557 (TRBV7-8, TRBJ2-7)
CASSLERAGSYEQYF

SEQ ID NO: 709115 - protein, 16 aa, Homo sapiens
  CDR3 for alpha chain variable domain of TCR clone 354558 (TRAV3, TRAJ37)
CAVREGTYGNTGKLIF

SEQ ID NO: 709116 - protein, 14 aa, Homo sapiens
  CDR3 for beta chain variable domain of TCR clone 354558 (TRBV7-2, TRBJ2-7)
CASSPKTSFYEQYF

SEQ ID NO: 709117 - protein, 12 aa, Homo sapiens
  CDR3 for alpha chain variable domain of TCR clone 354559 (TRAV13-1, TRAJ11)
CAGPSGYITLTF

SEQ ID NO: 709118 - protein, 13 aa, Homo sapiens
  CDR3 for beta chain variable domain of TCR clone 354559 (TRBV12-4, TRBJ2-1)
CASSLSPSNEQFF

SEQ ID NO: 709119 - protein, 12 aa, Homo sapiens
  CDR3 for alpha chain variable domain of TCR clone 354560 (TRAV1-1, TRAJ24)
CAATDSWGKLQF

SEQ ID NO: 709120 - protein, 15 aa, Homo sapiens
  CDR3 for beta chain variable domain of TCR clone 354560 (TRBV7-2, TRBJ2-1)
CASSSGLAGGNEQFF

SEQ ID NO: 709121 - protein, 14 aa, Homo sapiens
  CDR3 for alpha chain variable domain of TCR clone 354561 (TRAV12-2, TRAJ17)
CAALFKASGNKLTF

SEQ ID NO: 709122 - protein, 17 aa, Homo sapiens
  CDR3 for beta chain variable domain of TCR clone 354561 (TRBV11-2, TRBJ2-1)
CASSLYPPGVEYNEQFF

SEQ ID NO: 709123 - protein, 15 aa, Homo sapiens
  CDR3 for alpha chain variable domain of TCR clone 354562 (TRAV26-1, TRAJ44)
CIVRANTGTASKLTF

SEQ ID NO: 709124 - protein, 15 aa, Homo sapiens
  CDR3 for beta chain variable domain of TCR clone 354562 (TRBV7-7, TRBJ2-1)
CSSLASGTSYNEQFF

SEQ ID NO: 709125 - protein, 14 aa, Homo sapiens
  CDR3 for alpha chain variable domain of TCR clone 354563 (TRAV8-4, TRAJ9)
CAVRINTGGFKTIF

SEQ ID NO: 709126 - protein, 15 aa, Homo sapiens
  CDR3 for beta chain variable domain of TCR clone 354563 (TRBV10-2, TRBJ2-6)
CAGSEQGTGANVLTF

SEQ ID NO: 709127 - protein, 15 aa, Homo sapiens
  CDR3 for alpha chain variable domain of TCR clone 354564 (TRAV8-3, TRAJ45)
CASSYSGGGSDGLPF

SEQ ID NO: 709128 - protein, 13 aa, Homo sapiens
  CDR3 for beta chain variable domain of TCR clone 354564 (TRBV10-3, TRBJ2-7)
CASKLAVNYEQYF

SEQ ID NO: 709129 - protein, 15 aa, Homo sapiens
  CDR3 for alpha chain variable domain of TCR clone 354565 (TRAV8-3, TRAJ28)
CAVAYSGAGSYQLTF

SEQ ID NO: 709130 - protein, 13 aa, Homo sapiens
  CDR3 for beta chain variable domain of TCR clone 354565 (TRBV4-2, TRBJ1-1)
CASSQAGNTEAFF

SEQ ID NO: 709131 - protein, 13 aa, Homo sapiens
  CDR3 for alpha chain variable domain of TCR clone 354566 (TRAV29/DV5, TRAJ47)
CAASAEYGNKLVF

SEQ ID NO: 709132 - protein, 12 aa, Homo sapiens
  CDR3 for beta chain variable domain of TCR clone 354566 (TRBV10-3, TRBJ2-2)
CAIRENTGELFF

SEQ ID NO: 709133 - protein, 15 aa, Homo sapiens
  CDR3 for alpha chain variable domain of TCR clone 354567 (TRAV38-2/DV8, TRAJ45)
CAYWDSGGGADGLTF

SEQ ID NO: 709134 - protein, 15 aa, Homo sapiens
  CDR3 for beta chain variable domain of TCR clone 354567 (TRBV9, TRBJ1-6)
CASSVAGTGDSPLHF

SEQ ID NO: 709135 - protein, 11 aa, Homo sapiens
  CDR3 for alpha chain variable domain of TCR clone 354568 (TRAV3, TRAJ17)
CAEAAGNKLTF

SEQ ID NO: 709136 - protein, 15 aa, Homo sapiens
  CDR3 for beta chain variable domain of TCR clone 354568 (TRBV12-5, TRBJ2-2)
CASGFQGSGTGELFF

SEQ ID NO: 709137 - protein, 18 aa, Homo sapiens
  CDR3 for alpha chain variable domain of TCR clone 354569 (TRAV21, TRAJ52)
CAVRPSPAGGTIYGRLTF

SEQ ID NO: 709138 - protein, 17 aa, Homo sapiens
  CDR3 for beta chain variable domain of TCR clone 354569 (TRBV13, TRBJ2-3)
CASSLSRVAGGRNTQYF

SEQ ID NO: 709139 - protein, 16 aa, Homo sapiens
  CDR3 for alpha chain variable domain of TCR clone 354570 (TRAV26-1, TRAJ38)
CIVRVSGAGNNRKLIW

SEQ ID NO: 709140 - protein, 13 aa, Homo sapiens
  CDR3 for beta chain variable domain of TCR clone 354570 (TRBV14, TRBJ1-2)
CASGQDRRRGYTF

SEQ ID NO: 709141 - protein, 12 aa, Homo sapiens
  CDR3 for alpha chain variable domain of TCR clone 354571 (TRAV8-4, TRAJ37)
CAVRSSTGKLIF

SEQ ID NO: 709142 - protein, 16 aa, Homo sapiens
  CDR3 for beta chain variable domain of TCR clone 354571 (TRBV7-2, TRBJ2-3)
CASSLVGDASTDTQYF

SEQ ID NO: 709143 - protein, 12 aa, Homo sapiens
  CDR3 for alpha chain variable domain of TCR clone 354572 (TRAV29/DV5, TRAJ41)
CAAISSGYALNF

SEQ ID NO: 709144 - protein, 17 aa, Homo sapiens
  CDR3 for beta chain variable domain of TCR clone 354572 (TRBV18, TRBJ2-1)
CASSTGLSGGADNEQFF

SEQ ID NO: 709145 - protein, 14 aa, Homo sapiens
  CDR3 for alpha chain variable domain of TCR clone 354573 (TRAV29/DV5, TRAJ36)
CAARLKTGANNLFF

SEQ ID NO: 709146 - protein, 15 aa, Homo sapiens
  CDR3 for beta chain variable domain of TCR clone 354573 (TRBV29-1, TRBJ2-1)
CSGRDRKSSYNEQFF

SEQ ID NO: 709147 - protein, 16 aa, Homo sapiens
  CDR3 for alpha chain variable domain of TCR clone 354574 (TRAV1-2, TRAJ10)
CAVRGVLTGGGNKLTF

SEQ ID NO: 709148 - protein, 14 aa, Homo sapiens
  CDR3 for beta chain variable domain of TCR clone 354574 (TRBV4-2, TRBJ1-5)
CASSRDRGNQPQHF

SEQ ID NO: 709149 - protein, 16 aa, Homo sapiens
  CDR3 for alpha chain variable domain of TCR clone 354575 (TRAV12-1, TRAJ8)
CVVNGRGNTGFQKLVF

SEQ ID NO: 709150 - protein, 15 aa, Homo sapiens
  CDR3 for beta chain variable domain of TCR clone 354575 (TRBV6-1, TRBJ1-2)
CASNPGRGGSYGYSF

SEQ ID NO: 709151 - protein, 14 aa, Homo sapiens
  CDR3 for alpha chain variable domain of TCR clone 354576 (TRAV12-2, TRAJ13)
CAVKKTGGYQKVTF

SEQ ID NO: 709152 - protein, 15 aa, Homo sapiens
  CDR3 for beta chain variable domain of TCR clone 354576 (TRBV28, TRBJ2-3)
CAPTFRDWSTDTQYF

SEQ ID NO: 709153 - protein, 14 aa, Homo sapiens
  CDR3 for alpha chain variable domain of TCR clone 354577 (TRAV35, TRAJ13)
CAGSPSGVYQKVTF

SEQ ID NO: 709154 - protein, 13 aa, Homo sapiens
  CDR3 for beta chain variable domain of TCR clone 354577 (TRBV29-1, TRBJ1-1)
CSVGDSRNTEAFS

SEQ ID NO: 709155 - protein, 14 aa, Homo sapiens
  CDR3 for alpha chain variable domain of TCR clone 354578 (TRAV38-1, TRAJ39)
CAFAYNNAGNMITF

SEQ ID NO: 709156 - protein, 15 aa, Homo sapiens
  CDR3 for beta chain variable domain of TCR clone 354578 (TRBV7-3, TRBJ2-1)
CASSLAGAGADEQFF

SEQ ID NO: 709157 - protein, 14 aa, Homo sapiens
  CDR3 for alpha chain variable domain of TCR clone 354579 (TRAV12-3, TRAJ42)
CAMNYGGSQGNLIF

SEQ ID NO: 709158 - protein, 18 aa, Homo sapiens
  CDR3 for beta chain variable domain of TCR clone 354579 (TRBV11-2, TRBJ2-7)
CASSWRTVQTGQSYEQYF

SEQ ID NO: 709159 - protein, 12 aa, Homo sapiens
  CDR3 for alpha chain variable domain of TCR clone 354580 (TRAV23/DV6, TRAJ16)
CAARGRGQQLLF

SEQ ID NO: 709160 - protein, 14 aa, Homo sapiens
  CDR3 for beta chain variable domain of TCR clone 354580 (TRBV4-1, TRBJ1-1)
CASSRSGQSFEAFF

SEQ ID NO: 709161 - protein, 14 aa, Homo sapiens
  CDR3 for alpha chain variable domain of TCR clone 354581 (TRAV12-1, TRAJ22)
CVVNVGGSARQLTF

SEQ ID NO: 709162 - protein, 15 aa, Homo sapiens
  CDR3 for beta chain variable domain of TCR clone 354581 (TRBV11-1, TRBJ2-7)
CASSLNYGASYEQYF

SEQ ID NO: 709163 - protein, 12 aa, Homo sapiens
  CDR3 for alpha chain variable domain of TCR clone 354582 (TRAV12-3, TRAJ17)
CAMTLTGNKPTF

SEQ ID NO: 709164 - protein, 14 aa, Homo sapiens
  CDR3 for beta chain variable domain of TCR clone 354582 (TRBV12-4, TRBJ1-1)
CASSLGTGGTEAFF

SEQ ID NO: 709165 - protein, 11 aa, Homo sapiens
  CDR3 for alpha chain variable domain of TCR clone 354583 (TRAV3, TRAJ21)
CAVGNFTKFYF

SEQ ID NO: 709166 - protein, 13 aa, Homo sapiens
  CDR3 for beta chain variable domain of TCR clone 354583 (TRBV20-1, TRBJ2-2)
CSASAACTGELLF

SEQ ID NO: 709167 - protein, 15 aa, Homo sapiens
  CDR3 for alpha chain variable domain of TCR clone 354584 (TRAV3, TRAJ13)
CAVRVYSGGYQKVTF

SEQ ID NO: 709168 - protein, 13 aa, Homo sapiens
  CDR3 for beta chain variable domain of TCR clone 354584 (TRBV27, TRBJ2-7)
CASSLTTGYEQYF

SEQ ID NO: 709169 - protein, 12 aa, Homo sapiens
  CDR3 for alpha chain variable domain of TCR clone 354585 (TRAV1-1, TRAJ43)
CAPRVSSNDMRF

SEQ ID NO: 709170 - protein, 13 aa, Homo sapiens
  CDR3 for beta chain variable domain of TCR clone 354585 (TRBV7-8, TRBJ2-7)
CASSLTGGREQYF

SEQ ID NO: 709171 - protein, 12 aa, Homo sapiens
  CDR3 for alpha chain variable domain of TCR clone 354586 (TRAV8-2, TRAJ30)
CVVSDRDDKIIF

SEQ ID NO: 709172 - protein, 11 aa, Homo sapiens
  CDR3 for beta chain variable domain of TCR clone 354586 (TRBV7-9, TRBJ2-3)
CASSYTDTQYF

SEQ ID NO: 709173 - protein, 13 aa, Homo sapiens
  CDR3 for alpha chain variable domain of TCR clone 354587 (TRAV8-3, TRAJ37)
CAVPSSNTGKLIF

SEQ ID NO: 709174 - protein, 12 aa, Homo sapiens
  CDR3 for beta chain variable domain of TCR clone 354587 (TRBV11-2, TRBJ2-1)
CGSSPGNNEQFF

SEQ ID NO: 709175 - protein, 13 aa, Homo sapiens
  CDR3 for alpha chain variable domain of TCR clone 354588 (TRAV21, TRAJ57)
CTVTQGGSEKLVF

SEQ ID NO: 709176 - protein, 16 aa, Homo sapiens
  CDR3 for beta chain variable domain of TCR clone 354588 (TRBV29-1, TRBJ2-7)
CSVDDAEDGTAYEQYF

SEQ ID NO: 709177 - protein, 12 aa, Homo sapiens
  CDR3 for alpha chain variable domain of TCR clone 354589 (TRAV21, TRAJ37)
CAVRGNTGKLIF

SEQ ID NO: 709178 - protein, 12 aa, Homo sapiens
  CDR3 for beta chain variable domain of TCR clone 354589 (TRBV25-1, TRBJ1-1)
CASRHMNTEAFL

SEQ ID NO: 709179 - protein, 15 aa, Homo sapiens
  CDR3 for alpha chain variable domain of TCR clone 354590 (TRAV25, TRAJ23)
CALAPNYNQGGNLIF

SEQ ID NO: 709180 - protein, 13 aa, Homo sapiens
  CDR3 for beta chain variable domain of TCR clone 354590 (TRBV11-3, TRBJ1-1)
CASSWDGNTEAFF

SEQ ID NO: 709181 - protein, 11 aa, Homo sapiens
  CDR3 for alpha chain variable domain of TCR clone 354591 (TRAV21, TRAJ31)
CAVRNNARLMF

SEQ ID NO: 709182 - protein, 15 aa, Homo sapiens
  CDR3 for beta chain variable domain of TCR clone 354591 (TRBV20-1, TRBJ2-7)
CSARDRVFGMDEQYF

SEQ ID NO: 709183 - protein, 14 aa, Homo sapiens
  CDR3 for alpha chain variable domain of TCR clone 354592 (TRAV26-1, TRAJ22)
CIVRDYGSARQLTF

SEQ ID NO: 709184 - protein, 17 aa, Homo sapiens
  CDR3 for beta chain variable domain of TCR clone 354592 (TRBV7-3, TRBJ2-3)
CASSPGGLAGFGDTQYF

SEQ ID NO: 709185 - protein, 14 aa, Homo sapiens
  CDR3 for alpha chain variable domain of TCR clone 354593 (TRAV12-3, TRAJ42)
CAMNYGGSQVNLIF

SEQ ID NO: 709186 - protein, 15 aa, Homo sapiens
  CDR3 for beta chain variable domain of TCR clone 354593 (TRBV5-7, TRBJ1-5)
CASSYGKLWDQPQHF

SEQ ID NO: 709187 - protein, 15 aa, Homo sapiens
  CDR3 for alpha chain variable domain of TCR clone 354594 (TRAV16, TRAJ4)
CALEDPSGGYNKLIF

SEQ ID NO: 709188 - protein, 13 aa, Homo sapiens
  CDR3 for beta chain variable domain of TCR clone 354594 (TRBV7-3, TRBJ2-7)
CDSSQAGGYEQYF

SEQ ID NO: 709189 - protein, 17 aa, Homo sapiens
  CDR3 for alpha chain variable domain of TCR clone 354595 (TRAV25, TRAJ45)
CAGPFWRSGGGADGLTF

SEQ ID NO: 709190 - protein, 14 aa, Homo sapiens
  CDR3 for beta chain variable domain of TCR clone 354595 (TRBV7-2, TRBJ1-1)
CASSFLTGTTEAFF

SEQ ID NO: 709191 - protein, 12 aa, Homo sapiens
  CDR3 for alpha chain variable domain of TCR clone 354596 (TRAV21, TRAJ40)
CATEPGTYKYIF

SEQ ID NO: 709192 - protein, 14 aa, Homo sapiens
  CDR3 for beta chain variable domain of TCR clone 354596 (TRBV11-1, TRBJ2-7)
CASSGQSSSYEQYF

SEQ ID NO: 709193 - protein, 12 aa, Homo sapiens
  CDR3 for alpha chain variable domain of TCR clone 354597 (TRAV16, TRAJ26)
CALRSYGKNFVF

SEQ ID NO: 709194 - protein, 13 aa, Homo sapiens
  CDR3 for beta chain variable domain of TCR clone 354597 (TRBV12-4, TRBJ1-1)
CASSPGTGFEAFF

SEQ ID NO: 709195 - protein, 13 aa, Homo sapiens
  CDR3 for alpha chain variable domain of TCR clone 354598 (TRAV13-1, TRAJ49)
CAAMLYTGNQFYF

SEQ ID NO: 709196 - protein, 15 aa, Homo sapiens
  CDR3 for beta chain variable domain of TCR clone 354598 (TRBV11-1, TRBJ2-1)
CASSNGGGSSNEQFF

SEQ ID NO: 709197 - protein, 15 aa, Homo sapiens
  CDR3 for alpha chain variable domain of TCR clone 354599 (TRAV3, TRAJ24)
CAVRDKMTAGGNCSL

SEQ ID NO: 709198 - protein, 14 aa, Homo sapiens
  CDR3 for beta chain variable domain of TCR clone 354599 (TRBV7-2, TRBJ2-3)
CASSQTGSSYTQYS

SEQ ID NO: 709199 - protein, 14 aa, Homo sapiens
  CDR3 for alpha chain variable domain of TCR clone 354600 (TRAV2, TRAJ9)
CAVEDRSGGFKTIF

SEQ ID NO: 709200 - protein, 12 aa, Homo sapiens
  CDR3 for beta chain variable domain of TCR clone 354600 (TRBV14, TRBJ2-5)
CASSHLKETQYF

SEQ ID NO: 709201 - protein, 16 aa, Homo sapiens
  CDR3 for alpha chain variable domain of TCR clone 354601 (TRAV12-2, TRAJ28)
CAVITDSGAGGYQLTF

SEQ ID NO: 709202 - protein, 13 aa, Homo sapiens
  CDR3 for beta chain variable domain of TCR clone 354601 (TRBV12-4, TRBJ1-5)
CASSPDRAQPQHF

SEQ ID NO: 709203 - protein, 12 aa, Homo sapiens
  CDR3 for alpha chain variable domain of TCR clone 354602 (TRAV20, TRAJ39)
CAVGNAGNMLTF

SEQ ID NO: 709204 - protein, 14 aa, Homo sapiens
  CDR3 for beta chain variable domain of TCR clone 354602 (TRBV7-2, TRBJ2-2)
CASSLGQNTGELFF

SEQ ID NO: 709205 - protein, 16 aa, Homo sapiens
  CDR3 for alpha chain variable domain of TCR clone 354603 (TRAV36/DV7, TRAJ30)
CAVETYGLDRDDKIIF

SEQ ID NO: 709206 - protein, 14 aa, Homo sapiens
  CDR3 for beta chain variable domain of TCR clone 354603 (TRBV10-3, TRBJ1-1)
CAISDGSGVTEAFF

SEQ ID NO: 709207 - protein, 13 aa, Homo sapiens
  CDR3 for alpha chain variable domain of TCR clone 354604 (TRAV23/DV6, TRAJ47)
CAASSQYGNKLVF

SEQ ID NO: 709208 - protein, 15 aa, Homo sapiens
  CDR3 for beta chain variable domain of TCR clone 354604 (TRBV7-3, TRBJ2-1)
CASSLDGNSHNEQFF

SEQ ID NO: 709209 - protein, 15 aa, Homo sapiens
  CDR3 for alpha chain variable domain of TCR clone 354605 (TRAV26-1, TRAJ22)
CIVRVSFWFCKATDL

SEQ ID NO: 709210 - protein, 13 aa, Homo sapiens
  CDR3 for beta chain variable domain of TCR clone 354605 (TRBV7-2, TRBJ2-2)
CASSSVRAGELFF

SEQ ID NO: 709211 - protein, 17 aa, Homo sapiens
  CDR3 for alpha chain variable domain of TCR clone 354606 (TRAV2, TRAJ36)
CAVEDRGNWGKQPLLWD

SEQ ID NO: 709212 - protein, 18 aa, Homo sapiens
  CDR3 for beta chain variable domain of TCR clone 354606 (TRBV7-9, TRBJ2-5)
CASSLDTAQRPSTSGQAR

SEQ ID NO: 709213 - protein, 15 aa, Homo sapiens
  CDR3 for alpha chain variable domain of TCR clone 354607 (TRAV13-1, TRAJ5)
CAASPRGHGQESTYF

SEQ ID NO: 709214 - protein, 15 aa, Homo sapiens
  CDR3 for beta chain variable domain of TCR clone 354607 (TRBV7-3, TRBJ2-1)
CASSLGQGPFGEQFF

SEQ ID NO: 709215 - protein, 11 aa, Homo sapiens
  CDR3 for alpha chain variable domain of TCR clone 354608 (TRAV23/DV6, TRAJ48)
CAPRWGEKLTF

SEQ ID NO: 709216 - protein, 15 aa, Homo sapiens
  CDR3 for beta chain variable domain of TCR clone 354608 (TRBV19, TRBJ1-1)
CASTSGQIQNTEAFF

SEQ ID NO: 709217 - protein, 11 aa, Homo sapiens
  CDR3 for alpha chain variable domain of TCR clone 354609 (TRAV3, TRAJ23)
CAPAREESLSS

SEQ ID NO: 709218 - protein, 18 aa, Homo sapiens
  CDR3 for beta chain variable domain of TCR clone 354609 (TRBV11-2, TRBJ2-1)
CASRAGTSGAKYYNEQFF

SEQ ID NO: 709219 - protein, 12 aa, Homo sapiens
  CDR3 for alpha chain variable domain of TCR clone 354610 (TRAV12-3, TRAJ17)
CAMTLTGNKLTF

SEQ ID NO: 709220 - protein, 17 aa, Homo sapiens
  CDR3 for beta chain variable domain of TCR clone 354610 (TRBV11-2, TRBJ2-1)
FASSLYPPGVEYNEQFF

SEQ ID NO: 709221 - protein, 12 aa, Homo sapiens
  CDR3 for alpha chain variable domain of TCR clone 354611 (TRAV1-1, TRAJ30)
CAVRGRDDKIIS

SEQ ID NO: 709222 - protein, 14 aa, Homo sapiens
  CDR3 for beta chain variable domain of TCR clone 354611 (TRBV6-1, TRBJ1-3)
CASVQGGGGNTMYF

SEQ ID NO: 709223 - protein, 13 aa, Homo sapiens
  CDR3 for alpha chain variable domain of TCR clone 354612 (TRAV1-2, TRAJ9)
CAALNTGGFKTIF

SEQ ID NO: 709224 - protein, 15 aa, Homo sapiens
  CDR3 for beta chain variable domain of TCR clone 354612 (TRBV24-1, TRBJ2-1)
CATSGCGGFYNEQFF

SEQ ID NO: 709225 - protein, 14 aa, Homo sapiens
  CDR3 for alpha chain variable domain of TCR clone 354613 (TRAV13-1, TRAJ24)
CAASRTDSWGKLQF

SEQ ID NO: 709226 - protein, 13 aa, Homo sapiens
  CDR3 for beta chain variable domain of TCR clone 354613 (TRBV13, TRBJ2-5)
CASSPEVGETQYF

SEQ ID NO: 709227 - protein, 14 aa, Homo sapiens
  CDR3 for alpha chain variable domain of TCR clone 354614 (TRAV8-1, TRAJ24)
CAENAADSWGKLQF

SEQ ID NO: 709228 - protein, 16 aa, Homo sapiens
  CDR3 for beta chain variable domain of TCR clone 354614 (TRBV4-3, TRBJ2-1)
CASSPALDRGVNEQFF

SEQ ID NO: 709229 - protein, 13 aa, Homo sapiens
  CDR3 for alpha chain variable domain of TCR clone 354615 (TRAV12-3, TRAJ9)
CAMRNTGGFKTIF

SEQ ID NO: 709230 - protein, 14 aa, Homo sapiens
  CDR3 for beta chain variable domain of TCR clone 354615 (TRBV5-5, TRBJ1-5)
CASSGQGVDQPQHF

SEQ ID NO: 709231 - protein, 22 aa, Homo sapiens
  CDR3 for alpha chain variable domain of TCR clone 354616 (TRAV40, )
CLLGDGIPDIQNPDPAVSQLRD

SEQ ID NO: 709232 - protein, 16 aa, Homo sapiens
  CDR3 for beta chain variable domain of TCR clone 354616 (TRBV20-1, TRBJ1-5)
CSAELPGQQTNQPQHF

SEQ ID NO: 709233 - protein, 14 aa, Homo sapiens
  CDR3 for alpha chain variable domain of TCR clone 354617 (TRAV1-2, TRAJ16)
CAVNRFSDGQKLLF

SEQ ID NO: 709234 - protein, 15 aa, Homo sapiens
  CDR3 for beta chain variable domain of TCR clone 354617 (TRBV9, TRBJ1-6)
CASSVAGTGDSPVHF

SEQ ID NO: 709235 - protein, 17 aa, Homo sapiens
  CDR3 for alpha chain variable domain of TCR clone 354618 (TRAV26-1, TRAJ58)
RIVRVGAEETSSSRLTF

SEQ ID NO: 709236 - protein, 18 aa, Homo sapiens
  CDR3 for beta chain variable domain of TCR clone 354618 (TRBV7-9, TRBJ2-7)
CASSLTTSGSRTWYEQYF

SEQ ID NO: 709237 - protein, 16 aa, Homo sapiens
  CDR3 for alpha chain variable domain of TCR clone 354619 (TRAV14/DV4, TRAJ53)
YAMREGGGGSNYKLTF

SEQ ID NO: 709238 - protein, 19 aa, Homo sapiens
  CDR3 for beta chain variable domain of TCR clone 354619 (TRBV28, TRBJ2-4)
CASSFQPGGPAHSKNIQYF

SEQ ID NO: 709239 - protein, 14 aa, Homo sapiens
  CDR3 for alpha chain variable domain of TCR clone 354620 (TRAV12-2, TRAJ13)
CAVNPSGGCQKVTF

SEQ ID NO: 709240 - protein, 13 aa, Homo sapiens
  CDR3 for beta chain variable domain of TCR clone 354620 (TRBV20-1, TRBJ1-6)
CSAKLGGTSPLHL

SEQ ID NO: 709241 - protein, 14 aa, Homo sapiens
  CDR3 for alpha chain variable domain of TCR clone 354621 (TRAV26-1, TRAJ38)
CIADNAGNNRKLTW

SEQ ID NO: 709242 - protein, 15 aa, Homo sapiens
  CDR3 for beta chain variable domain of TCR clone 354621 (TRBV20-1, TRBJ2-7)
CSARDRVSGMDEQYF

SEQ ID NO: 709243 - protein, 14 aa, Homo sapiens
  CDR3 for alpha chain variable domain of TCR clone 354622 (TRAV26-1, TRAJ49)
CIVRLTNTGNQFYL

SEQ ID NO: 709244 - protein, 13 aa, Homo sapiens
  CDR3 for beta chain variable domain of TCR clone 354622 (TRBV10-1, TRBJ1-1)
CASQGQTNTEAFF

SEQ ID NO: 709245 - protein, 13 aa, Homo sapiens
  CDR3 for alpha chain variable domain of TCR clone 354623 (TRAV12-1, TRAJ38)
CVVPAGNNRKLIW

SEQ ID NO: 709246 - protein, 17 aa, Homo sapiens
  CDR3 for beta chain variable domain of TCR clone 354623 (TRBV4-1, TRBJ2-3)
CASSHSATGGPVDTQYF

SEQ ID NO: 709247 - protein, 14 aa, Homo sapiens
  CDR3 for alpha chain variable domain of TCR clone 354624 (TRAV8-3, TRAJ39)
CAVGANNACNMLTF

SEQ ID NO: 709248 - protein, 19 aa, Homo sapiens
  CDR3 for beta chain variable domain of TCR clone 354624 (TRBV25-1, TRBJ2-2)
CAILVYRVDRGRKTGELFF

SEQ ID NO: 709249 - protein, 14 aa, Homo sapiens
  CDR3 for alpha chain variable domain of TCR clone 354625 (TRAV12-3, TRAJ29)
YAMSPYSGNTPLVF

SEQ ID NO: 709250 - protein, 15 aa, Homo sapiens
  CDR3 for beta chain variable domain of TCR clone 354625 (TRBV27, TRBJ2-1)
CASSNGGGSSNEQFF

SEQ ID NO: 709251 - protein, 16 aa, Homo sapiens
  CDR3 for alpha chain variable domain of TCR clone 354626 (TRAV3, TRAJ10)
CAVRDMRAGGGNKLTF

SEQ ID NO: 709252 - protein, 19 aa, Homo sapiens
  CDR3 for beta chain variable domain of TCR clone 354626 (TRBV6-3, TRBJ1-2)
CASSYSKGRTEPPNYGYTF

SEQ ID NO: 709253 - protein, 19 aa, Homo sapiens
  CDR3 for alpha chain variable domain of TCR clone 354627 (TRAV26-1, TRAJ52)
CIVRAHRNAGGTSDGKLTF

SEQ ID NO: 709254 - protein, 14 aa, Homo sapiens
  CDR3 for beta chain variable domain of TCR clone 354627 (TRBV7-6, TRBJ2-3)
CASSLGTVTDTQYF

SEQ ID NO: 709255 - protein, 13 aa, Homo sapiens
  CDR3 for alpha chain variable domain of TCR clone 354628 (TRAV21, TRAJ27)
CAALNTNAGKSTF

SEQ ID NO: 709256 - protein, 15 aa, Homo sapiens
  CDR3 for beta chain variable domain of TCR clone 354628 (TRBV19, TRBJ2-7)
CASSFNSGGVWEQYF

SEQ ID NO: 709257 - protein, 16 aa, Homo sapiens
  CDR3 for alpha chain variable domain of TCR clone 354629 (TRAV3, TRAJ6)
CAVRDGMGRRKLHTYI

SEQ ID NO: 709258 - protein, 15 aa, Homo sapiens
  CDR3 for beta chain variable domain of TCR clone 354629 (TRBV9, TRBJ2-1)
CDSSLAGSSYNEQFF

SEQ ID NO: 709259 - protein, 12 aa, Homo sapiens
  CDR3 for alpha chain variable domain of TCR clone 354630 (TRAV27, )
CAARRNAGTTIS

SEQ ID NO: 709260 - protein, 18 aa, Homo sapiens
  CDR3 for beta chain variable domain of TCR clone 354630 (TRBV11-2, TRBJ2-3)
CASSLGGASRGAPNTQYF

SEQ ID NO: 709261 - protein, 15 aa, Homo sapiens
  CDR3 for alpha chain variable domain of TCR clone 354631 (TRAV8-1, TRAJ6)
CAVNTPPGGSNIPTF

SEQ ID NO: 709262 - protein, 15 aa, Homo sapiens
  CDR3 for beta chain variable domain of TCR clone 354631 (TRBV11-2, TRBJ2-2)
CASSSDRVNAGELFF

SEQ ID NO: 709263 - protein, 14 aa, Homo sapiens
  CDR3 for alpha chain variable domain of TCR clone 354632 (TRAV12-3, TRAJ10)
SHLPLTGGGNKLTF

SEQ ID NO: 709264 - protein, 19 aa, Homo sapiens
  CDR3 for beta chain variable domain of TCR clone 354632 (TRBV19, TRBJ2-5)
RASSIGQVTDFFLGETQYF

SEQ ID NO: 709265 - protein, 15 aa, Homo sapiens
  CDR3 for alpha chain variable domain of TCR clone 354633 (TRAV27, TRAJ38)
CAARRNAGHNRKLIW

SEQ ID NO: 709266 - protein, 13 aa, Homo sapiens
  CDR3 for beta chain variable domain of TCR clone 354633 (TRBV12-5, TRBJ2-3)
CASGDRQSDTQYL

SEQ ID NO: 709267 - protein, 15 aa, Homo sapiens
  CDR3 for alpha chain variable domain of TCR clone 354634 (TRAV12-3, TRAJ6)
CAMSPVGGGSYIPTF

SEQ ID NO: 709268 - protein, 16 aa, Homo sapiens
  CDR3 for beta chain variable domain of TCR clone 354634 (TRBV7-2, TRBJ1-2)
CASSLVRDTVKYGYTF

SEQ ID NO: 709269 - protein, 13 aa, Homo sapiens
  CDR3 for alpha chain variable domain of TCR clone 354635 (TRAV8-3, TRAJ48)
CAVVPFGHEKLTF

SEQ ID NO: 709270 - protein, 15 aa, Homo sapiens
  CDR3 for beta chain variable domain of TCR clone 354635 (TRBV11-2, TRBJ2-1)
CARSSPATRYNEQFF

SEQ ID NO: 709271 - protein, 13 aa, Homo sapiens
  CDR3 for alpha chain variable domain of TCR clone 354636 (TRAV2, TRAJ40)
CAVVTSGTYKYIF

SEQ ID NO: 709272 - protein, 15 aa, Homo sapiens
  CDR3 for beta chain variable domain of TCR clone 354636 (TRBV9, TRBJ1-6)
CASSVAGTRDSPLHF

SEQ ID NO: 709273 - protein, 13 aa, Homo sapiens
  CDR3 for alpha chain variable domain of TCR clone 354637 (TRAV1-2, TRAJ9)
CAALNTGGFKTIF

SEQ ID NO: 709274 - protein, 14 aa, Homo sapiens
  CDR3 for beta chain variable domain of TCR clone 354637 (TRBV6-3, TRBJ2-2)
CASTYTPDTGELFF

SEQ ID NO: 709275 - protein, 12 aa, Homo sapiens
  CDR3 for alpha chain variable domain of TCR clone 354638 (TRAV8-4, TRAJ43)
CAVSVNNNDMRF

SEQ ID NO: 709276 - protein, 15 aa, Homo sapiens
  CDR3 for beta chain variable domain of TCR clone 354638 (TRBV7-9, TRBJ1-6)
CASSSPGRGNSPLHF

SEQ ID NO: 709277 - protein, 11 aa, Homo sapiens
  CDR3 for alpha chain variable domain of TCR clone 354639 (TRAV1-2, TRAJ20)
CAVANDYKLSF

SEQ ID NO: 709278 - protein, 16 aa, Homo sapiens
  CDR3 for beta chain variable domain of TCR clone 354639 (TRBV28, TRBJ2-3)
CASSFFRDPRLGTQYF

SEQ ID NO: 709279 - protein, 14 aa, Homo sapiens
  CDR3 for alpha chain variable domain of TCR clone 354640 (TRAV16, TRAJ33)
CALSAMDSNYQLIR

SEQ ID NO: 709280 - protein, 15 aa, Homo sapiens
  CDR3 for beta chain variable domain of TCR clone 354640 (TRBV28, TRBJ2-7)
CASSLEAYPIYEQYF

SEQ ID NO: 709281 - protein, 13 aa, Homo sapiens
  CDR3 for alpha chain variable domain of TCR clone 354641 (TRAV1-2, TRAJ33)
CAVSEDSNYQLIW

SEQ ID NO: 709282 - protein, 16 aa, Homo sapiens
  CDR3 for beta chain variable domain of TCR clone 354641 (TRBV4-2, TRBJ2-7)
CASSEDGVERGYEQYF

SEQ ID NO: 709283 - protein, 12 aa, Homo sapiens
  CDR3 for alpha chain variable domain of TCR clone 354642 (TRAV12-2, TRAJ4)
GWPEGGYNKLIF

SEQ ID NO: 709284 - protein, 17 aa, Homo sapiens
  CDR3 for beta chain variable domain of TCR clone 354642 (TRBV11-2, TRBJ2-1)
CASSLYPPGVEYNEQFF

SEQ ID NO: 709285 - protein, 14 aa, Homo sapiens
  CDR3 for alpha chain variable domain of TCR clone 354643 (TRAV2, TRAJ9)
CAVEDRCGGFKTIF

SEQ ID NO: 709286 - protein, 13 aa, Homo sapiens
  CDR3 for beta chain variable domain of TCR clone 354643 (TRBV3-1, TRBJ1-5)
CAITRRDGQPQHF

SEQ ID NO: 709287 - protein, 14 aa, Homo sapiens
  CDR3 for alpha chain variable domain of TCR clone 354644 (TRAV1-2, TRAJ8)
CAVREDTGFQKIVF

SEQ ID NO: 709288 - protein, 12 aa, Homo sapiens
  CDR3 for beta chain variable domain of TCR clone 354644 (TRBV14, TRBJ2-7)
CASSSLKGEQYF

SEQ ID NO: 709289 - protein, 11 aa, Homo sapiens
  CDR3 for alpha chain variable domain of TCR clone 354645 (TRAV16, TRAJ49)
CSLNTGNQIYF

SEQ ID NO: 709290 - protein, 12 aa, Homo sapiens
  CDR3 for beta chain variable domain of TCR clone 354645 (TRBV7-9, TRBJ1-4)
CASSTDREKLFF

SEQ ID NO: 709291 - protein, 12 aa, Homo sapiens
  CDR3 for alpha chain variable domain of TCR clone 354646 (TRAV16, TRAJ10)
CSRTGGGNKLTF

SEQ ID NO: 709292 - protein, 17 aa, Homo sapiens
  CDR3 for beta chain variable domain of TCR clone 354646 (TRBV6-3, TRBJ2-7)
CASSSPGTVFTSSTSGR

SEQ ID NO: 709293 - protein, 14 aa, Homo sapiens
  CDR3 for alpha chain variable domain of TCR clone 354647 (TRAV17, TRAJ40)
CATALTSGTSKYIF

SEQ ID NO: 709294 - protein, 13 aa, Homo sapiens
  CDR3 for beta chain variable domain of TCR clone 354647 (TRBV27, TRBJ2-1)
CASSSGSYNEQFF

SEQ ID NO: 709295 - protein, 14 aa, Homo sapiens
  CDR3 for alpha chain variable domain of TCR clone 354648 (TRAV14/DV4, TRAJ54)
CAMREAPGAQKLVF

SEQ ID NO: 709296 - protein, 14 aa, Homo sapiens
  CDR3 for beta chain variable domain of TCR clone 354648 (TRBV2, TRBJ2-1)
CASSEARQGVSEFF

SEQ ID NO: 709297 - protein, 13 aa, Homo sapiens
  CDR3 for alpha chain variable domain of TCR clone 354649 (TRAV21, TRAJ27)
CAARPGDAGKSTL

SEQ ID NO: 709298 - protein, 14 aa, Homo sapiens
  CDR3 for beta chain variable domain of TCR clone 354649 (TRBV7-6, TRBJ2-3)
CASSLGTVTDTQYF

SEQ ID NO: 709299 - protein, 16 aa, Homo sapiens
  CDR3 for alpha chain variable domain of TCR clone 354650 (TRAV3, TRAJ37)
CAVRVRGSGNTGKLIF

SEQ ID NO: 709300 - protein, 13 aa, Homo sapiens
  CDR3 for beta chain variable domain of TCR clone 354650 (TRBV14, TRBJ2-1)
CASSQDRMNEQFF

SEQ ID NO: 709301 - protein, 14 aa, Homo sapiens
  CDR3 for alpha chain variable domain of TCR clone 354651 (TRAV12-2, TRAJ13)
CAVKKTGGYQKVTF

SEQ ID NO: 709302 - protein, 14 aa, Homo sapiens
  CDR3 for beta chain variable domain of TCR clone 354651 (TRBV25-1, TRBJ2-3)
CASSVHRERDTQYF

SEQ ID NO: 709303 - protein, 12 aa, Homo sapiens
  CDR3 for alpha chain variable domain of TCR clone 354652 (TRAV12-3, TRAJ17)
CAMTLTGNKLTF

SEQ ID NO: 709304 - protein, 15 aa, Homo sapiens
  CDR3 for beta chain variable domain of TCR clone 354652 (TRBV7-2, TRBJ2-1)
CASSSRTSREDEQFF

SEQ ID NO: 709305 - protein, 14 aa, Homo sapiens
  CDR3 for alpha chain variable domain of TCR clone 354653 (TRAV29/DV5, TRAJ32)
CAASQGGATNKLIF

SEQ ID NO: 709306 - protein, 15 aa, Homo sapiens
  CDR3 for beta chain variable domain of TCR clone 354653 (TRBV2, TRBJ2-1)
CASRQGGSSYNEQFF

SEQ ID NO: 709307 - protein, 16 aa, Homo sapiens
  CDR3 for alpha chain variable domain of TCR clone 354654 (TRAV13-1, TRAJ48)
CAASIFGNFGNEKSTF

SEQ ID NO: 709308 - protein, 12 aa, Homo sapiens
  CDR3 for beta chain variable domain of TCR clone 354654 (TRBV14, TRBJ2-4)
CASSNLKSIQYF

SEQ ID NO: 709309 - protein, 14 aa, Homo sapiens
  CDR3 for alpha chain variable domain of TCR clone 354655 (TRAV1-1, TRAJ27)
CAVIYNTNAGKSTF

SEQ ID NO: 709310 - protein, 16 aa, Homo sapiens
  CDR3 for beta chain variable domain of TCR clone 354655 (TRBV11-2, TRBJ2-7)
CASSPTTGGVSYEQYF

SEQ ID NO: 709311 - protein, 11 aa, Homo sapiens
  CDR3 for alpha chain variable domain of TCR clone 354656 (TRAV2, TRAJ13)
CASGGYQKVTF

SEQ ID NO: 709312 - protein, 13 aa, Homo sapiens
  CDR3 for beta chain variable domain of TCR clone 354656 (TRBV28, TRBJ1-2)
CAGRDRGNYGYTF

SEQ ID NO: 709313 - protein, 14 aa, Homo sapiens
  CDR3 for alpha chain variable domain of TCR clone 354657 (TRAV12-2, TRAJ40)
CAVKIPSGTYKYIF

SEQ ID NO: 709314 - protein, 16 aa, Homo sapiens
  CDR3 for beta chain variable domain of TCR clone 354657 (TRBV7-3, TRBJ2-1)
CASSLSSGGGAKEQFF

SEQ ID NO: 709315 - protein, 14 aa, Homo sapiens
  CDR3 for alpha chain variable domain of TCR clone 354658 (TRAV1-2, TRAJ16)
CAVNRFSDGQKLLF

SEQ ID NO: 709316 - protein, 14 aa, Homo sapiens
  CDR3 for beta chain variable domain of TCR clone 354658 (TRBV18, TRBJ2-7)
CAGSPRGGAYEQYF

SEQ ID NO: 709317 - protein, 15 aa, Homo sapiens
  CDR3 for alpha chain variable domain of TCR clone 354659 (TRAV21, TRAJ53)
CATLNSGGSNHKLTF

SEQ ID NO: 709318 - protein, 16 aa, Homo sapiens
  CDR3 for beta chain variable domain of TCR clone 354659 (TRBV12-4, TRBJ2-3)
CASSLRLAETTDTQYF

SEQ ID NO: 709319 - protein, 14 aa, Homo sapiens
  CDR3 for alpha chain variable domain of TCR clone 354660 (TRAV29/DV5, TRAJ28)
CAATAGAGSYQLTF

SEQ ID NO: 709320 - protein, 15 aa, Homo sapiens
  CDR3 for beta chain variable domain of TCR clone 354660 (TRBV7-8, TRBJ2-1)
CASSLHGGPYNEQFF

SEQ ID NO: 709321 - protein, 11 aa, Homo sapiens
  CDR3 for alpha chain variable domain of TCR clone 354661 (TRAV12-1, TRAJ26)
CVVAYGQNFVF

SEQ ID NO: 709322 - protein, 15 aa, Homo sapiens
  CDR3 for beta chain variable domain of TCR clone 354661 (TRBV12-4, TRBJ2-5)
YASSGTGQAQETQYF

SEQ ID NO: 709323 - protein, 14 aa, Homo sapiens
  CDR3 for alpha chain variable domain of TCR clone 354662 (TRAV8-3, TRAJ30)
CAVGDMNRDDKIIF

SEQ ID NO: 709324 - protein, 17 aa, Homo sapiens
  CDR3 for beta chain variable domain of TCR clone 354662 (TRBV19, TRBJ2-2)
CASSRNPGGFRTGELFF

SEQ ID NO: 709325 - protein, 13 aa, Homo sapiens
  CDR3 for alpha chain variable domain of TCR clone 354663 (TRAV12-1, TRAJ39)
CGDDNNAGNMLTF

SEQ ID NO: 709326 - protein, 14 aa, Homo sapiens
  CDR3 for beta chain variable domain of TCR clone 354663 (TRBV5-6, TRBJ1-1)
CASSLAGDWTEAFF

SEQ ID NO: 709327 - protein, 13 aa, Homo sapiens
  CDR3 for alpha chain variable domain of TCR clone 354664 (TRAV1-2, TRAJ20)
CSVPRSNDYKLSF

SEQ ID NO: 709328 - protein, 14 aa, Homo sapiens
  CDR3 for beta chain variable domain of TCR clone 354664 (TRBV20-1, TRBJ2-7)
CSARYGTTYYEQYF

SEQ ID NO: 709329 - protein, 17 aa, Homo sapiens
  CDR3 for alpha chain variable domain of TCR clone 354665 (TRAV38-2/DV8, TRAJ38)
CAYRSARGAGNNRKLIW

SEQ ID NO: 709330 - protein, 20 aa, Homo sapiens
  CDR3 for beta chain variable domain of TCR clone 354665 (TRBV7-8, TRBJ2-2)
CASSHLFPGPTIHITGELFF

SEQ ID NO: 709331 - protein, 15 aa, Homo sapiens
  CDR3 for alpha chain variable domain of TCR clone 354666 (TRAV4, TRAJ26)
CLVGDMNNYGQNFVF

SEQ ID NO: 709332 - protein, 16 aa, Homo sapiens
  CDR3 for beta chain variable domain of TCR clone 354666 (TRBV28, TRBJ1-4)
CASSSRTGASNEKLFF

SEQ ID NO: 709333 - protein, 14 aa, Homo sapiens
  CDR3 for alpha chain variable domain of TCR clone 354667 (TRAV38-2/DV8, TRAJ30)
CAYMDGLGGEKIIL

SEQ ID NO: 709334 - protein, 15 aa, Homo sapiens
  CDR3 for beta chain variable domain of TCR clone 354667 (TRBV7-9, TRBJ2-2)
CASRPADRDTGELFF

SEQ ID NO: 709335 - protein, 16 aa, Homo sapiens
  CDR3 for alpha chain variable domain of TCR clone 354668 (TRAV3, TRAJ32)
CAVRDVEGGATNKLIV

SEQ ID NO: 709336 - protein, 18 aa, Homo sapiens
  CDR3 for beta chain variable domain of TCR clone 354668 (TRBV7-9, TRBJ2-7)
CASSLTTSGSRTWYEQYF

SEQ ID NO: 709337 - protein, 14 aa, Homo sapiens
  CDR3 for alpha chain variable domain of TCR clone 354669 (TRAV13-1, TRAJ35)
CAASKGGFGNVLHC

SEQ ID NO: 709338 - protein, 14 aa, Homo sapiens
  CDR3 for beta chain variable domain of TCR clone 354669 (TRBV10-3, TRBJ2-3)
CAISVTRSRDTQYF

SEQ ID NO: 709339 - protein, 14 aa, Homo sapiens
  CDR3 for alpha chain variable domain of TCR clone 354670 (TRAV38-1, TRAJ45)
CASHSGGGADGLTF

SEQ ID NO: 709340 - protein, 14 aa, Homo sapiens
  CDR3 for beta chain variable domain of TCR clone 354670 (TRBV20-1, TRBJ1-1)
CSARTRIGGTEAFF

SEQ ID NO: 709341 - protein, 15 aa, Homo sapiens
  CDR3 for alpha chain variable domain of TCR clone 354671 (TRAV8-4, TRAJ29)
CAVSEDFRGNTPLVF

SEQ ID NO: 709342 - protein, 18 aa, Homo sapiens
  CDR3 for beta chain variable domain of TCR clone 354671 (TRBV20-1, TRBJ2-6)
CSARALAGGPSGANVLTF

SEQ ID NO: 709343 - protein, 15 aa, Homo sapiens
  CDR3 for alpha chain variable domain of TCR clone 354672 (TRAV8-4, TRAJ37)
CAVSRGSGNTGKLIF

SEQ ID NO: 709344 - protein, 14 aa, Homo sapiens
  CDR3 for beta chain variable domain of TCR clone 354672 (TRBV7-2, TRBJ2-7)
CASRSQGAAYEQYF

SEQ ID NO: 709345 - protein, 16 aa, Homo sapiens
  CDR3 for alpha chain variable domain of TCR clone 354673 (TRAV3, TRAJ4)
CAVRPSSSGGYNKLIF

SEQ ID NO: 709346 - protein, 12 aa, Homo sapiens
  CDR3 for beta chain variable domain of TCR clone 354673 (TRBV7-9, TRBJ2-7)
CASSQGVYEQYF

SEQ ID NO: 709347 - protein, 14 aa, Homo sapiens
  CDR3 for alpha chain variable domain of TCR clone 354674 (TRAV27, TRAJ13)
CRSSNSGGYQKVTF

SEQ ID NO: 709348 - protein, 13 aa, Homo sapiens
  CDR3 for beta chain variable domain of TCR clone 354674 (TRBV7-3, TRBJ1-1)
CASSQDWGAEAVF

SEQ ID NO: 709349 - protein, 13 aa, Homo sapiens
  CDR3 for alpha chain variable domain of TCR clone 354675 (TRAV12-3, TRAJ43)
CAMIRPNNNDMRF

SEQ ID NO: 709350 - protein, 12 aa, Homo sapiens
  CDR3 for beta chain variable domain of TCR clone 354675 (TRBV11-2, TRBJ2-5)
CASSLGRETQYF

SEQ ID NO: 709351 - protein, 11 aa, Homo sapiens
  CDR3 for alpha chain variable domain of TCR clone 354676 (TRAV21, TRAJ11)
CAVNGYSTLTF

SEQ ID NO: 709352 - protein, 14 aa, Homo sapiens
  CDR3 for beta chain variable domain of TCR clone 354676 (TRBV4-2, TRBJ2-1)
CASGLDRAYNQQFF

SEQ ID NO: 709353 - protein, 11 aa, Homo sapiens
  CDR3 for alpha chain variable domain of TCR clone 354677 (TRAV4, TRAJ28)
NSGAGSYQLTF

SEQ ID NO: 709354 - protein, 15 aa, Homo sapiens
  CDR3 for beta chain variable domain of TCR clone 354677 (TRBV10-2, TRBJ2-6)
CASSEQGTGANVLTF

SEQ ID NO: 709355 - protein, 11 aa, Homo sapiens
  CDR3 for alpha chain variable domain of TCR clone 354678 (TRAV12-3, TRAJ42)
CPRGSQGNLIF

SEQ ID NO: 709356 - protein, 13 aa, Homo sapiens
  CDR3 for beta chain variable domain of TCR clone 354678 (TRBV5-7, TRBJ2-6)
CASTSSGANVLTF

SEQ ID NO: 709357 - protein, 16 aa, Homo sapiens
  CDR3 for alpha chain variable domain of TCR clone 354679 (TRAV3, TRAJ28)
CAVLPRSGAGCYQLTF

SEQ ID NO: 709358 - protein, 15 aa, Homo sapiens
  CDR3 for beta chain variable domain of TCR clone 354679 (TRBV2, TRBJ2-1)
CASSETGGNYNEQFF

SEQ ID NO: 709359 - protein, 14 aa, Homo sapiens
  CDR3 for alpha chain variable domain of TCR clone 354680 (TRAV12-3, TRAJ33)
CNDHGRDSNYQLIW

SEQ ID NO: 709360 - protein, 15 aa, Homo sapiens
  CDR3 for beta chain variable domain of TCR clone 354680 (TRBV28, TRBJ1-5)
CASSLPQQGEQTQHF

SEQ ID NO: 709361 - protein, 13 aa, Homo sapiens
  CDR3 for alpha chain variable domain of TCR clone 354681 (TRAV27, TRAJ45)
CRSSGGGADGLTF

SEQ ID NO: 709362 - protein, 17 aa, Homo sapiens
  CDR3 for beta chain variable domain of TCR clone 354681 (TRBV11-2, TRBJ2-7)
CASSLYPPGVEYNEQYF

SEQ ID NO: 709363 - protein, 13 aa, Homo sapiens
  CDR3 for alpha chain variable domain of TCR clone 354682 (TRAV12-1, TRAJ33)
CGDAPDSNYQLIW

SEQ ID NO: 709364 - protein, 14 aa, Homo sapiens
  CDR3 for beta chain variable domain of TCR clone 354682 (TRBV7-2, TRBJ2-7)
CASSPKTSCYEQYF

SEQ ID NO: 709365 - protein, 12 aa, Homo sapiens
  CDR3 for alpha chain variable domain of TCR clone 354683 (TRAV23/DV6, TRAJ31)
CAARRIGARTMF

SEQ ID NO: 709366 - protein, 13 aa, Homo sapiens
  CDR3 for beta chain variable domain of TCR clone 354683 (TRBV28, TRBJ2-7)
CASKAGGVYEQYF

SEQ ID NO: 709367 - protein, 13 aa, Homo sapiens
  CDR3 for alpha chain variable domain of TCR clone 354684 (TRAV17, TRAJ39)
CATDYGAGNMLTF

SEQ ID NO: 709368 - protein, 13 aa, Homo sapiens
  CDR3 for beta chain variable domain of TCR clone 354684 (TRBV7-3, TRBJ1-1)
CASSQDWGAEAFF

SEQ ID NO: 709369 - protein, 14 aa, Homo sapiens
  CDR3 for alpha chain variable domain of TCR clone 354685 (TRAV13-2, TRAJ57)
CAENFQGGSEKLVF

SEQ ID NO: 709370 - protein, 16 aa, Homo sapiens
  CDR3 for beta chain variable domain of TCR clone 354685 (TRBV18, TRBJ1-1)
CASSPGVGGRGGEAFF

SEQ ID NO: 709371 - protein, 12 aa, Homo sapiens
  CDR3 for alpha chain variable domain of TCR clone 354686 (TRAV27, TRAJ9)
CAGEAGGFKTIF

SEQ ID NO: 709372 - protein, 14 aa, Homo sapiens
  CDR3 for beta chain variable domain of TCR clone 354686 (TRBV6-1, TRBJ2-1)
CASAKDGFYNEQFF

SEQ ID NO: 709373 - protein, 12 aa, Homo sapiens
  CDR3 for alpha chain variable domain of TCR clone 354687 (TRAV12-3, TRAJ17)
CAMTLTGNKLTF

SEQ ID NO: 709374 - protein, 13 aa, Homo sapiens
  CDR3 for beta chain variable domain of TCR clone 354687 (TRBV28, TRBJ2-7)
CASSLPSRYEQYF

SEQ ID NO: 709375 - protein, 11 aa, Homo sapiens
  CDR3 for alpha chain variable domain of TCR clone 354688 (TRAV21, TRAJ30)
CCEVTDDKIIF

SEQ ID NO: 709376 - protein, 15 aa, Homo sapiens
  CDR3 for beta chain variable domain of TCR clone 354688 (TRBV6-6, TRBJ2-7)
CASSYSHGGSYEQYF

SEQ ID NO: 709377 - protein, 17 aa, Homo sapiens
  CDR3 for alpha chain variable domain of TCR clone 354689 (TRAV29/DV5, TRAJ52)
CAATSTADGTSYGNLTF

SEQ ID NO: 709378 - protein, 15 aa, Homo sapiens
  CDR3 for beta chain variable domain of TCR clone 354689 (TRBV3-1, TRBJ2-7)
CASSQEWTGSYEQYF

SEQ ID NO: 709379 - protein, 14 aa, Homo sapiens
  CDR3 for alpha chain variable domain of TCR clone 354690 (TRAV9-2, TRAJ39)
CALYIYNAGNMLTF

SEQ ID NO: 709380 - protein, 15 aa, Homo sapiens
  CDR3 for beta chain variable domain of TCR clone 354690 (TRBV7-3, TRBJ2-1)
CASSQRGGALIEQFF

SEQ ID NO: 709381 - protein, 19 aa, Homo sapiens
  CDR3 for alpha chain variable domain of TCR clone 354691 (TRAV27, TRAJ53)
ASTSVQSRNSGGSNYKLTF

SEQ ID NO: 709382 - protein, 14 aa, Homo sapiens
  CDR3 for beta chain variable domain of TCR clone 354691 (TRBV11-1, TRBJ2-7)
CASNFAVPSYEQYF

SEQ ID NO: 709383 - protein, 15 aa, Homo sapiens
  CDR3 for alpha chain variable domain of TCR clone 354692 (TRAV27, TRAJ38)
CAARRNAGNNRKLIL

SEQ ID NO: 709384 - protein, 13 aa, Homo sapiens
  CDR3 for beta chain variable domain of TCR clone 354692 (TRBV12-5, TRBJ2-3)
CASGDRQSDTQYF

SEQ ID NO: 709385 - protein, 15 aa, Homo sapiens
  CDR3 for alpha chain variable domain of TCR clone 354693 (TRAV38-2/DV8, TRAJ57)
CAYGRVFGKGTKLTV

SEQ ID NO: 709386 - protein, 13 aa, Homo sapiens
  CDR3 for beta chain variable domain of TCR clone 354693 (TRBV4-2, TRBJ1-1)
CASSQAGNTEAFF

SEQ ID NO: 709387 - protein, 15 aa, Homo sapiens
  CDR3 for alpha chain variable domain of TCR clone 354694 (TRAV1-1, TRAJ20)
CAVRDNVANDYKLSF

SEQ ID NO: 709388 - protein, 14 aa, Homo sapiens
  CDR3 for beta chain variable domain of TCR clone 354694 (TRBV7-2, TRBJ1-2)
CASSQTGSTYGYTF

SEQ ID NO: 709389 - protein, 14 aa, Homo sapiens
  CDR3 for alpha chain variable domain of TCR clone 354695 (TRAV35, TRAJ42)
CAGRYGGSQGNLIF

SEQ ID NO: 709390 - protein, 14 aa, Homo sapiens
  CDR3 for beta chain variable domain of TCR clone 354695 (TRBV25-1, TRBJ1-1)
CASTHLGGNTEAFF

SEQ ID NO: 709391 - protein, 16 aa, Homo sapiens
  CDR3 for alpha chain variable domain of TCR clone 354696 (TRAV12-2, TRAJ32)
CAVNLGQGGATNKLIF

SEQ ID NO: 709392 - protein, 15 aa, Homo sapiens
  CDR3 for beta chain variable domain of TCR clone 354696 (TRBV6-3, TRBJ2-7)
CASSSPGTVFYEQYF

SEQ ID NO: 709393 - protein, 13 aa, Homo sapiens
  CDR3 for alpha chain variable domain of TCR clone 354697 (TRAV13-2, TRAJ48)
CAEMDFGNEKLTF

SEQ ID NO: 709394 - protein, 12 aa, Homo sapiens
  CDR3 for beta chain variable domain of TCR clone 354697 (TRBV7-9, TRBJ1-4)
CASSTDREKLFF

SEQ ID NO: 709395 - protein, 16 aa, Homo sapiens
  CDR3 for alpha chain variable domain of TCR clone 354698 (TRAV29/DV5, TRAJ37)
CAASDEGSGNTGKLIF

SEQ ID NO: 709396 - protein, 15 aa, Homo sapiens
  CDR3 for beta chain variable domain of TCR clone 354698 (TRBV7-3, TRBJ2-1)
CASSLIAGGYNERFF

SEQ ID NO: 709397 - protein, 14 aa, Homo sapiens
  CDR3 for alpha chain variable domain of TCR clone 354699 (TRAV26-1, TRAJ40)
CIVRVGEGTYKYIF

SEQ ID NO: 709398 - protein, 14 aa, Homo sapiens
  CDR3 for beta chain variable domain of TCR clone 354699 (TRBV12-5, TRBJ2-5)
CASGSRTHQETQYF

SEQ ID NO: 709399 - protein, 13 aa, Homo sapiens
  CDR3 for alpha chain variable domain of TCR clone 354700 (TRAV20, TRAJ20)
CAVQAGSGYKLSF

SEQ ID NO: 709400 - protein, 15 aa, Homo sapiens
  CDR3 for beta chain variable domain of TCR clone 354700 (TRBV12-4, TRBJ2-5)
CASSPPTGLQETQYF

SEQ ID NO: 709401 - protein, 13 aa, Homo sapiens
  CDR3 for alpha chain variable domain of TCR clone 354701 (TRAV36/DV7, TRAJ54)
CAVDIQGAQKLVF

SEQ ID NO: 709402 - protein, 14 aa, Homo sapiens
  CDR3 for beta chain variable domain of TCR clone 354701 (TRBV19, TRBJ2-7)
CASNFRVTFTGMYF

SEQ ID NO: 709403 - protein, 17 aa, Homo sapiens
  CDR3 for alpha chain variable domain of TCR clone 354702 (TRAV3, TRAJ6)
CAVRDGPRAGGSYKPTF

SEQ ID NO: 709404 - protein, 14 aa, Homo sapiens
  CDR3 for beta chain variable domain of TCR clone 354702 (TRBV20-1, TRBJ2-7)
CSAKRGRSSYEQYF

SEQ ID NO: 709405 - protein, 14 aa, Homo sapiens
  CDR3 for alpha chain variable domain of TCR clone 354703 (TRAV1-2, TRAJ8)
CAVREDTGFQKLVV

SEQ ID NO: 709406 - protein, 15 aa, Homo sapiens
  CDR3 for beta chain variable domain of TCR clone 354703 (TRBV6-3, TRBJ2-7)
CASISPGTVFYEQYF

SEQ ID NO: 709407 - protein, 17 aa, Homo sapiens
  CDR3 for alpha chain variable domain of TCR clone 354704 (TRAV13-1, TRAJ31)
CAPRDRLMFGIGTQLVV

SEQ ID NO: 709408 - protein, 12 aa, Homo sapiens
  CDR3 for beta chain variable domain of TCR clone 354704 (TRBV7-9, TRBJ2-7)
CASSLEGYEQYF

SEQ ID NO: 709409 - protein, 13 aa, Homo sapiens
  CDR3 for alpha chain variable domain of TCR clone 354705 (TRAV38-1, TRAJ42)
CARWGGSQGNLIF

SEQ ID NO: 709410 - protein, 14 aa, Homo sapiens
  CDR3 for beta chain variable domain of TCR clone 354705 (TRBV6-1, TRBJ1-3)
CASVQGGGWKHHIF

SEQ ID NO: 709411 - protein, 13 aa, Homo sapiens
  CDR3 for alpha chain variable domain of TCR clone 354706 (TRAV8-3, TRAJ6)
CAVEKGGSFIPTF

SEQ ID NO: 709412 - protein, 15 aa, Homo sapiens
  CDR3 for beta chain variable domain of TCR clone 354706 (TRBV28, TRBJ2-5)
CASSADRGRGETQYF

SEQ ID NO: 709413 - protein, 11 aa, Homo sapiens
  CDR3 for alpha chain variable domain of TCR clone 354707 (TRAV12-1, TRAJ40)
CGYSGTYKYIF

SEQ ID NO: 709414 - protein, 18 aa, Homo sapiens
  CDR3 for beta chain variable domain of TCR clone 354707 (TRBV11-2, TRBJ2-3)
CASSLGGASRVAPNTQYF

SEQ ID NO: 709415 - protein, 14 aa, Homo sapiens
  CDR3 for alpha chain variable domain of TCR clone 354708 (TRAV1-2, TRAJ16)
CAVNRFSDGQKLLF

SEQ ID NO: 709416 - protein, 16 aa, Homo sapiens
  CDR3 for beta chain variable domain of TCR clone 354708 (TRBV4-1, TRBJ2-7)
CASSQGPGQGVYEQYF

SEQ ID NO: 709417 - protein, 15 aa, Homo sapiens
  CDR3 for alpha chain variable domain of TCR clone 354709 (TRAV26-1, TRAJ21)
CIVRGPNYNFNKFYF

SEQ ID NO: 709418 - protein, 16 aa, Homo sapiens
  CDR3 for beta chain variable domain of TCR clone 354709 (TRBV7-9, TRBJ2-3)
CASSLQGNPGTDTQYF

SEQ ID NO: 709419 - protein, 21 aa, Homo sapiens
  CDR3 for alpha chain variable domain of TCR clone 354710 (TRAV3, )
CAVRPTPDIQNPDPAVCQLRD

SEQ ID NO: 709420 - protein, 15 aa, Homo sapiens
  CDR3 for beta chain variable domain of TCR clone 354710 (TRBV11-3, TRBJ2-5)
CASSDTSGGIETQYF

SEQ ID NO: 709421 - protein, 15 aa, Homo sapiens
  CDR3 for alpha chain variable domain of TCR clone 354711 (TRAV8-2, TRAJ16)
CVVSDGFSDGLKLLF

SEQ ID NO: 709422 - protein, 15 aa, Homo sapiens
  CDR3 for beta chain variable domain of TCR clone 354711 (TRBV12-4, TRBJ2-5)
CASSPPTGLQETQYF

SEQ ID NO: 709423 - protein, 13 aa, Homo sapiens
  CDR3 for alpha chain variable domain of TCR clone 354712 (TRAV23/DV6, TRAJ12)
CAPRVDSSYELIF

SEQ ID NO: 709424 - protein, 12 aa, Homo sapiens
  CDR3 for beta chain variable domain of TCR clone 354712 (TRBV7-8, TRBJ2-7)
CASSLGDREQYF

SEQ ID NO: 709425 - protein, 14 aa, Homo sapiens
  CDR3 for alpha chain variable domain of TCR clone 354713 (TRAV3, TRAJ33)
CAVRDMGSNYQLLW

SEQ ID NO: 709426 - protein, 17 aa, Homo sapiens
  CDR3 for beta chain variable domain of TCR clone 354713 (TRBV19, TRBJ2-1)
CASSIWSAQPTHNEQFF

SEQ ID NO: 709427 - protein, 16 aa, Homo sapiens
  CDR3 for alpha chain variable domain of TCR clone 354714 (TRAV4, TRAJ22)
CIVGDLYSGSARQLTF

SEQ ID NO: 709428 - protein, 16 aa, Homo sapiens
  CDR3 for beta chain variable domain of TCR clone 354714 (TRBV7-9, TRBJ2-1)
CASSDVAGGSYNEQVF

SEQ ID NO: 709429 - protein, 14 aa, Homo sapiens
  CDR3 for alpha chain variable domain of TCR clone 354715 (TRAV26-1, TRAJ38)
CIADNAGNNRKLIW

SEQ ID NO: 709430 - protein, 20 aa, Homo sapiens
  CDR3 for beta chain variable domain of TCR clone 354715 (TRBV7-8, TRBJ2-2)
CASSHSFPGPTIHITGELFF

SEQ ID NO: 709431 - protein, 12 aa, Homo sapiens
  CDR3 for alpha chain variable domain of TCR clone 354716 (TRAV12-3, TRAJ17)
CAMTLTGNKLTF

SEQ ID NO: 709432 - protein, 15 aa, Homo sapiens
  CDR3 for beta chain variable domain of TCR clone 354716 (TRBV6-1, TRBJ2-2)
CASSRLRGDTGELFF

SEQ ID NO: 709433 - protein, 21 aa, Homo sapiens
  CDR3 for alpha chain variable domain of TCR clone 354717 (TRAV35, TRAJ42)
CAGFPGSQGNLILEKALNSLL

SEQ ID NO: 709434 - protein, 14 aa, Homo sapiens
  CDR3 for beta chain variable domain of TCR clone 354717 (TRBV19, TRBJ2-1)
CASPTFVLSGEQFF

SEQ ID NO: 709435 - protein, 15 aa, Homo sapiens
  CDR3 for alpha chain variable domain of TCR clone 354718 (TRAV26-2, TRAJ28)
CILVESWAGSYQLPF

SEQ ID NO: 709436 - protein, 16 aa, Homo sapiens
  CDR3 for beta chain variable domain of TCR clone 354718 (TRBV4-2, TRBJ1-2)
CASSQEIGGASYGYTF

SEQ ID NO: 709437 - protein, 14 aa, Homo sapiens
  CDR3 for alpha chain variable domain of TCR clone 354719 (TRAV8-6, TRAJ15)
CAVILNQAGTALIF

SEQ ID NO: 709438 - protein, 12 aa, Homo sapiens
  CDR3 for beta chain variable domain of TCR clone 354719 (TRBV7-9, TRBJ1-6)
CASSASESPLHF

SEQ ID NO: 709439 - protein, 15 aa, Homo sapiens
  CDR3 for alpha chain variable domain of TCR clone 354720 (TRAV12-2, TRAJ23)
CAVKPIYNQGGKLIF

SEQ ID NO: 709440 - protein, 13 aa, Homo sapiens
  CDR3 for beta chain variable domain of TCR clone 354720 (TRBV19, TRBJ2-7)
CASSPRQSYEQYF

SEQ ID NO: 709441 - protein, 20 aa, Homo sapiens
  CDR3 for alpha chain variable domain of TCR clone 354721 (TRAV12-1, TRAJ42)
SSVIQPPTSVKGGSQGNLIF

SEQ ID NO: 709442 - protein, 18 aa, Homo sapiens
  CDR3 for beta chain variable domain of TCR clone 354721 (TRBV11-2, TRBJ2-3)
FASSLGGASRGAPNTQYF

SEQ ID NO: 709443 - protein, 13 aa, Homo sapiens
  CDR3 for alpha chain variable domain of TCR clone 354722 (TRAV13-2, TRAJ13)
CADLSGGYQKVTF

SEQ ID NO: 709444 - protein, 15 aa, Homo sapiens
  CDR3 for beta chain variable domain of TCR clone 354722 (TRBV20-1, TRBJ2-7)
CSARDRVSGMDEQYF

SEQ ID NO: 709445 - protein, 17 aa, Homo sapiens
  CDR3 for alpha chain variable domain of TCR clone 354723 (TRAV3, TRAJ12)
CAVRDGGRMDSGYKLIF

SEQ ID NO: 709446 - protein, 16 aa, Homo sapiens
  CDR3 for beta chain variable domain of TCR clone 354723 (TRBV12-5, TRBJ2-5)
CASGPRTSGNQETQYF

SEQ ID NO: 709447 - protein, 12 aa, Homo sapiens
  CDR3 for alpha chain variable domain of TCR clone 354724 (TRAV8-3, TRAJ20)
CAVGRGDYKLSF

SEQ ID NO: 709448 - protein, 14 aa, Homo sapiens
  CDR3 for beta chain variable domain of TCR clone 354724 (TRBV19, TRBJ2-3)
CASSAPRGTDTQYF

SEQ ID NO: 709449 - protein, 15 aa, Homo sapiens
  CDR3 for alpha chain variable domain of TCR clone 354725 (TRAV8-3, TRAJ13)
CAVAPNSGGYQKVTF

SEQ ID NO: 709450 - protein, 15 aa, Homo sapiens
  CDR3 for beta chain variable domain of TCR clone 354725 (TRBV4-1, TRBJ2-1)
CSSSQVLAGGDEQFF

SEQ ID NO: 709451 - protein, 13 aa, Homo sapiens
  CDR3 for alpha chain variable domain of TCR clone 354726 (TRAV12-2, TRAJ47)
CAVFMEYGNKLVF

SEQ ID NO: 709452 - protein, 15 aa, Homo sapiens
  CDR3 for beta chain variable domain of TCR clone 354726 (TRBV20-1, TRBJ1-1)
CSASRGVTGNTEAFF

SEQ ID NO: 709453 - protein, 15 aa, Homo sapiens
  CDR3 for alpha chain variable domain of TCR clone 354727 (TRAV3, TRAJ22)
CAVRDRGGSARQTTF

SEQ ID NO: 709454 - protein, 14 aa, Homo sapiens
  CDR3 for beta chain variable domain of TCR clone 354727 (TRBV20-1, TRBJ2-5)
CSALVPGYQETQYF

SEQ ID NO: 709455 - protein, 14 aa, Homo sapiens
  CDR3 for alpha chain variable domain of TCR clone 354728 (TRAV17, TRAJ57)
CATDPQGGSEKLVL

SEQ ID NO: 709456 - protein, 15 aa, Homo sapiens
  CDR3 for beta chain variable domain of TCR clone 354728 (TRBV7-6, TRBJ1-5)
CASSQSSGINQPQHF

SEQ ID NO: 709457 - protein, 22 aa, Homo sapiens
  CDR3 for alpha chain variable domain of TCR clone 354729 (TRAV40, )
CLLADGIPDIQNPDPAVYQLRD

SEQ ID NO: 709458 - protein, 16 aa, Homo sapiens
  CDR3 for beta chain variable domain of TCR clone 354729 (TRBV20-1, TRBJ1-5)
CSAELPGQQTNQPQHF

SEQ ID NO: 709459 - protein, 14 aa, Homo sapiens
  CDR3 for alpha chain variable domain of TCR clone 354730 (TRAV12-2, TRAJ40)
CAVKIPSGTYKYNF

SEQ ID NO: 709460 - protein, 16 aa, Homo sapiens
  CDR3 for beta chain variable domain of TCR clone 354730 (TRBV28, TRBJ2-5)
CASSFSPAGGWETQYF

SEQ ID NO: 709461 - protein, 13 aa, Homo sapiens
  CDR3 for alpha chain variable domain of TCR clone 354731 (TRAV21, TRAJ27)
CAALNTNAGKSTF

SEQ ID NO: 709462 - protein, 14 aa, Homo sapiens
  CDR3 for beta chain variable domain of TCR clone 354731 (TRBV27, TRBJ1-1)
CASSLLSGLAEAFF

SEQ ID NO: 709463 - protein, 12 aa, Homo sapiens
  CDR3 for alpha chain variable domain of TCR clone 354732 (TRAV13-1, TRAJ21)
CAAKEGFNKFYF

SEQ ID NO: 709464 - protein, 14 aa, Homo sapiens
  CDR3 for beta chain variable domain of TCR clone 354732 (TRBV19, TRBJ2-1)
CASGKSTQYNEQFF

SEQ ID NO: 709465 - protein, 12 aa, Homo sapiens
  CDR3 for alpha chain variable domain of TCR clone 354733 (TRAV20, TRAJ39)
SAVGNAGNMLTF

SEQ ID NO: 709466 - protein, 14 aa, Homo sapiens
  CDR3 for beta chain variable domain of TCR clone 354733 (TRBV4-1, TRBJ2-2)
CASSQAVNTGELFF

SEQ ID NO: 709467 - protein, 13 aa, Homo sapiens
  CDR3 for alpha chain variable domain of TCR clone 354734 (TRAV12-1, TRAJ40)
CVVPTSGTYKYIF

SEQ ID NO: 709468 - protein, 15 aa, Homo sapiens
  CDR3 for beta chain variable domain of TCR clone 354734 (TRBV5-1, TRBJ2-5)
CASSFKGGDQETQYF

SEQ ID NO: 709469 - protein, 11 aa, Homo sapiens
  CDR3 for alpha chain variable domain of TCR clone 354735 (TRAV1-1, TRAJ23)
CAVRQGGKLIF

SEQ ID NO: 709470 - protein, 15 aa, Homo sapiens
  CDR3 for beta chain variable domain of TCR clone 354735 (TRBV20-1, TRBJ1-5)
CSAKPPGQGPQPQHF

SEQ ID NO: 709471 - protein, 13 aa, Homo sapiens
  CDR3 for alpha chain variable domain of TCR clone 354736 (TRAV13-2, TRAJ13)
CAERPGGYQKVTF

SEQ ID NO: 709472 - protein, 16 aa, Homo sapiens
  CDR3 for beta chain variable domain of TCR clone 354736 (TRBV19, TRBJ1-1)
CASSIEVSGGRLSLDK

SEQ ID NO: 709473 - protein, 13 aa, Homo sapiens
  CDR3 for alpha chain variable domain of TCR clone 354737 (TRAV2, TRAJ29)
CAAQNSGNTPLVF

SEQ ID NO: 709474 - protein, 15 aa, Homo sapiens
  CDR3 for beta chain variable domain of TCR clone 354737 (TRBV19, TRBJ1-1)
CASTSGQIQNTEAFF

SEQ ID NO: 709475 - protein, 14 aa, Homo sapiens
  CDR3 for alpha chain variable domain of TCR clone 354738 (TRAV2, TRAJ9)
CAVEDRCGGFKAIF

SEQ ID NO: 709476 - protein, 13 aa, Homo sapiens
  CDR3 for beta chain variable domain of TCR clone 354738 (TRBV10-3, TRBJ2-7)
CASKLAVNYEQYF

SEQ ID NO: 709477 - protein, 15 aa, Homo sapiens
  CDR3 for alpha chain variable domain of TCR clone 354739 (TRAV1-2, TRAJ12)
CAVIPEVDSRYKLIF

SEQ ID NO: 709478 - protein, 12 aa, Homo sapiens
  CDR3 for beta chain variable domain of TCR clone 354739 (TRBV11-2, TRBJ2-2)
CASSLPTGELFF

SEQ ID NO: 709479 - protein, 11 aa, Homo sapiens
  CDR3 for alpha chain variable domain of TCR clone 354740 (TRAV26-1, TRAJ37)
CIVRVGRKLIF

SEQ ID NO: 709480 - protein, 14 aa, Homo sapiens
  CDR3 for beta chain variable domain of TCR clone 354740 (TRBV5-1, TRBJ1-4)
AAAAWKDGNEKLFF

SEQ ID NO: 709481 - protein, 14 aa, Homo sapiens
  CDR3 for alpha chain variable domain of TCR clone 354741 (TRAV35, TRAJ22)
CSGLRPGSARQLTF

SEQ ID NO: 709482 - protein, 13 aa, Homo sapiens
  CDR3 for beta chain variable domain of TCR clone 354741 (TRBV20-1, TRBJ1-1)
CSARGGGNTEAFF

SEQ ID NO: 709483 - protein, 15 aa, Homo sapiens
  CDR3 for alpha chain variable domain of TCR clone 354742 (TRAV8-6, TRAJ26)
CAVSDQSPGGQTFVF

SEQ ID NO: 709484 - protein, 13 aa, Homo sapiens
  CDR3 for beta chain variable domain of TCR clone 354742 (TRBV27, TRBJ2-7)
CASSLRHRYEQYL

SEQ ID NO: 709485 - protein, 15 aa, Homo sapiens
  CDR3 for alpha chain variable domain of TCR clone 354743 (TRAV12-3, TRAJ42)
CAISGHGGSQGNLIC

SEQ ID NO: 709486 - protein, 14 aa, Homo sapiens
  CDR3 for beta chain variable domain of TCR clone 354743 (TRBV7-2, TRBJ2-7)
CASSPKTSFYEQYF

SEQ ID NO: 709487 - protein, 13 aa, Homo sapiens
  CDR3 for alpha chain variable domain of TCR clone 354744 (TRAV20, TRAJ17)
CAVLRDAGNKLTF

SEQ ID NO: 709488 - protein, 12 aa, Homo sapiens
  CDR3 for beta chain variable domain of TCR clone 354744 (TRBV5-7, TRBJ2-7)
CASSLGGYEQYF

SEQ ID NO: 709489 - protein, 14 aa, Homo sapiens
  CDR3 for alpha chain variable domain of TCR clone 354745 (TRAV26-1, TRAJ21)
CIVRVVYNFNKFYF

SEQ ID NO: 709490 - protein, 14 aa, Homo sapiens
  CDR3 for beta chain variable domain of TCR clone 354745 (TRBV20-1, TRBJ2-3)
CSARGGTSTDTQYF

SEQ ID NO: 709491 - protein, 14 aa, Homo sapiens
  CDR3 for alpha chain variable domain of TCR clone 354746 (TRAV27, TRAJ22)
CAGLPSGSTRQLTF

SEQ ID NO: 709492 - protein, 16 aa, Homo sapiens
  CDR3 for beta chain variable domain of TCR clone 354746 (TRBV7-3, TRBJ2-2)
CASSLKRGTLSGELFF

SEQ ID NO: 709493 - protein, 13 aa, Homo sapiens
  CDR3 for alpha chain variable domain of TCR clone 354747 (TRAV12-2, TRAJ4)
CAVKGGGYNKLIF

SEQ ID NO: 709494 - protein, 14 aa, Homo sapiens
  CDR3 for beta chain variable domain of TCR clone 354747 (TRBV19, TRBJ2-1)
CASPTFVLSGEQFF

SEQ ID NO: 709495 - protein, 10 aa, Homo sapiens
  CDR3 for alpha chain variable domain of TCR clone 354748 (TRAV30, TRAJ48)
CGIGNEKLTF

SEQ ID NO: 709496 - protein, 13 aa, Homo sapiens
  CDR3 for beta chain variable domain of TCR clone 354748 (TRBV7-2, TRBJ2-7)
CASSSPSGSEQYF

SEQ ID NO: 709497 - protein, 14 aa, Homo sapiens
  CDR3 for alpha chain variable domain of TCR clone 354749 (TRAV26-2, TRAJ32)
CCVGYGGATNKLIF

SEQ ID NO: 709498 - protein, 13 aa, Homo sapiens
  CDR3 for beta chain variable domain of TCR clone 354749 (TRBV12-5, TRBJ2-3)
CASGDRQSDTLYF

SEQ ID NO: 709499 - protein, 13 aa, Homo sapiens
  CDR3 for alpha chain variable domain of TCR clone 354750 (TRAV17, TRAJ54)
CAAGIQGAQKLVF

SEQ ID NO: 709500 - protein, 13 aa, Homo sapiens
  CDR3 for beta chain variable domain of TCR clone 354750 (TRBV20-1, TRBJ1-6)
CSAPLGVGSPLHF

SEQ ID NO: 709501 - protein, 11 aa, Homo sapiens
  CDR3 for alpha chain variable domain of TCR clone 354751 (TRAV27, TRAJ20)
CAGADDYKLSS

SEQ ID NO: 709502 - protein, 12 aa, Homo sapiens
  CDR3 for beta chain variable domain of TCR clone 354751 (TRBV2, TRBJ1-1)
CATPSRGTEALF

SEQ ID NO: 709503 - protein, 15 aa, Homo sapiens
  CDR3 for alpha chain variable domain of TCR clone 354752 (TRAV35, TRAJ40)
CAGQHGTSGTYKYIF

SEQ ID NO: 709504 - protein, 14 aa, Homo sapiens
  CDR3 for beta chain variable domain of TCR clone 354752 (TRBV7-3, TRBJ2-1)
CASSLAGGTNEQFF

SEQ ID NO: 709505 - protein, 16 aa, Homo sapiens
  CDR3 for alpha chain variable domain of TCR clone 354753 (TRAV3, TRAJ23)
CAVEPLIYNQGGKLIF

SEQ ID NO: 709506 - protein, 14 aa, Homo sapiens
  CDR3 for beta chain variable domain of TCR clone 354753 (TRBV20-1, TRBJ2-1)
CSAQIGGSANEQFF

SEQ ID NO: 709507 - protein, 11 aa, Homo sapiens
  CDR3 for alpha chain variable domain of TCR clone 354754 (TRAV1-2, TRAJ20)
CAVANDYKLSF

SEQ ID NO: 709508 - protein, 15 aa, Homo sapiens
  CDR3 for beta chain variable domain of TCR clone 354754 (TRBV2, TRBJ2-1)
CASSELAGSYNEPFF

SEQ ID NO: 709509 - protein, 13 aa, Homo sapiens
  CDR3 for alpha chain variable domain of TCR clone 354755 (TRAV8-3, TRAJ28)
CAVGAVGSYQLTF

SEQ ID NO: 709510 - protein, 15 aa, Homo sapiens
  CDR3 for beta chain variable domain of TCR clone 354755 (TRBV25-1, TRBJ1-4)
CASSPGDSTNEKLFF

SEQ ID NO: 709511 - protein, 14 aa, Homo sapiens
  CDR3 for alpha chain variable domain of TCR clone 354756 (TRAV26-1, TRAJ44)
CISPLPGTASRLTF

SEQ ID NO: 709512 - protein, 16 aa, Homo sapiens
  CDR3 for beta chain variable domain of TCR clone 354756 (TRBV19, TRBJ2-1)
CASSKAGPSSYNEQFF

SEQ ID NO: 709513 - protein, 15 aa, Homo sapiens
  CDR3 for alpha chain variable domain of TCR clone 354757 (TRAV12-3, TRAJ6)
CAMSATTGGSYIPPF

SEQ ID NO: 709514 - protein, 15 aa, Homo sapiens
  CDR3 for beta chain variable domain of TCR clone 354757 (TRBV12-4, TRBJ2-5)
CASSPPTGLQETQYF

SEQ ID NO: 709515 - protein, 13 aa, Homo sapiens
  CDR3 for alpha chain variable domain of TCR clone 354758 (TRAV23/DV6, TRAJ58)
CAARLIPGSRLTF

SEQ ID NO: 709516 - protein, 13 aa, Homo sapiens
  CDR3 for beta chain variable domain of TCR clone 354758 (TRBV2, TRBJ1-6)
CADSGSYNSPLHF

SEQ ID NO: 709517 - protein, 14 aa, Homo sapiens
  CDR3 for alpha chain variable domain of TCR clone 354759 (TRAV9-2, TRAJ39)
CALYIYNAGNMLNF

SEQ ID NO: 709518 - protein, 16 aa, Homo sapiens
  CDR3 for beta chain variable domain of TCR clone 354759 (TRBV29-1, TRBJ1-2)
CSVEANRDIANYGYTF

SEQ ID NO: 709519 - protein, 14 aa, Homo sapiens
  CDR3 for alpha chain variable domain of TCR clone 354760 (TRAV26-1, TRAJ48)
CIVRVPFGNEKLTF

SEQ ID NO: 709520 - protein, 15 aa, Homo sapiens
  CDR3 for beta chain variable domain of TCR clone 354760 (TRBV20-1, TRBJ2-7)
CSAESGTSGAYEQYF

SEQ ID NO: 709521 - protein, 10 aa, Homo sapiens
  CDR3 for alpha chain variable domain of TCR clone 354761 (TRAV2, TRAJ34)
CAVVNDKLIF

SEQ ID NO: 709522 - protein, 14 aa, Homo sapiens
  CDR3 for beta chain variable domain of TCR clone 354761 (TRBV19, TRBJ1-4)
CASSMGRHNEKLFF

SEQ ID NO: 709523 - protein, 14 aa, Homo sapiens
  CDR3 for alpha chain variable domain of TCR clone 354762 (TRAV1-2, TRAJ16)
CAVNRFSDGQKMLS

SEQ ID NO: 709524 - protein, 13 aa, Homo sapiens
  CDR3 for beta chain variable domain of TCR clone 354762 (TRBV11-2, TRBJ2-1)
CASSLGLAGGRFF

SEQ ID NO: 709525 - protein, 14 aa, Homo sapiens
  CDR3 for alpha chain variable domain of TCR clone 354763 (TRAV12-2, TRAJ17)
CAVLFKSAGNKLTF

SEQ ID NO: 709526 - protein, 14 aa, Homo sapiens
  CDR3 for beta chain variable domain of TCR clone 354763 (TRBV4-1, TRBJ2-2)
CASSQAVNTGELFF

SEQ ID NO: 709527 - protein, 16 aa, Homo sapiens
  CDR3 for alpha chain variable domain of TCR clone 354764 (TRAV38-2/DV8, TRAJ57)
CAYRRRAQGGSAKLVF

SEQ ID NO: 709528 - protein, 15 aa, Homo sapiens
  CDR3 for beta chain variable domain of TCR clone 354764 (TRBV3-1, TRBJ2-5)
CASSANLGGPETQYF

SEQ ID NO: 709529 - protein, 16 aa, Homo sapiens
  CDR3 for alpha chain variable domain of TCR clone 354765 (TRAV21, TRAJ52)
CAVTTAGGTSYGKLTF

SEQ ID NO: 709530 - protein, 17 aa, Homo sapiens
  CDR3 for beta chain variable domain of TCR clone 354765 (TRBV28, TRBJ2-5)
CASSRQGGLAGAETQYF

SEQ ID NO: 709531 - protein, 14 aa, Homo sapiens
  CDR3 for alpha chain variable domain of TCR clone 354766 (TRAV12-1, TRAJ17)
CVVNYKAAGNKLTF

SEQ ID NO: 709532 - protein, 15 aa, Homo sapiens
  CDR3 for beta chain variable domain of TCR clone 354766 (TRBV29-1, TRBJ2-1)
CSVPGTSGGSGRWFF

SEQ ID NO: 709533 - protein, 14 aa, Homo sapiens
  CDR3 for alpha chain variable domain of TCR clone 354767 (TRAV36/DV7, TRAJ40)
CAVETTPGTYKYIF

SEQ ID NO: 709534 - protein, 15 aa, Homo sapiens
  CDR3 for beta chain variable domain of TCR clone 354767 (TRBV10-3, TRBJ2-5)
CTCAMTSGAGETQYF

SEQ ID NO: 709535 - protein, 12 aa, Homo sapiens
  CDR3 for alpha chain variable domain of TCR clone 354768 (TRAV21, TRAJ3)
CCFYSSASKIIF

SEQ ID NO: 709536 - protein, 13 aa, Homo sapiens
  CDR3 for beta chain variable domain of TCR clone 354768 (TRBV28, TRBJ2-7)
CAGAQQGLDEQCF

SEQ ID NO: 709537 - protein, 14 aa, Homo sapiens
  CDR3 for alpha chain variable domain of TCR clone 354769 (TRAV27, TRAJ22)
CAGVVPGSARQLTF

SEQ ID NO: 709538 - protein, 13 aa, Homo sapiens
  CDR3 for beta chain variable domain of TCR clone 354769 (TRBV18, TRBJ1-1)
CASSGGRNTEAFF

SEQ ID NO: 709539 - protein, 13 aa, Homo sapiens
  CDR3 for alpha chain variable domain of TCR clone 354770 (TRAV35, TRAJ42)
CAGFPGSQVNLIF

SEQ ID NO: 709540 - protein, 14 aa, Homo sapiens
  CDR3 for beta chain variable domain of TCR clone 354770 (TRBV4-1, TRBJ2-2)
CASSQAVNTGELFF

SEQ ID NO: 709541 - protein, 14 aa, Homo sapiens
  CDR3 for alpha chain variable domain of TCR clone 354771 (TRAV12-2, TRAJ17)
CAVLFKAAGNKLTS

SEQ ID NO: 709542 - protein, 17 aa, Homo sapiens
  CDR3 for beta chain variable domain of TCR clone 354771 (TRBV20-1, TRBJ2-2)
CSASGSGRGGLTGELVF

SEQ ID NO: 709543 - protein, 15 aa, Homo sapiens
  CDR3 for alpha chain variable domain of TCR clone 354772 (TRAV26-1, TRAJ29)
CIVRVEGSGNTPIVF

SEQ ID NO: 709544 - protein, 15 aa, Homo sapiens
  CDR3 for beta chain variable domain of TCR clone 354772 (TRBV7-9, TRBJ1-5)
CASSRGHQPNQPQHF

SEQ ID NO: 709545 - protein, 13 aa, Homo sapiens
  CDR3 for alpha chain variable domain of TCR clone 354773 (TRAV17, TRAJ21)
CATDGGNFNKFYF

SEQ ID NO: 709546 - protein, 15 aa, Homo sapiens
  CDR3 for beta chain variable domain of TCR clone 354773 (TRBV6-5, TRBJ2-7)
CASSRTSGFSYEQYF

SEQ ID NO: 709547 - protein, 15 aa, Homo sapiens
  CDR3 for alpha chain variable domain of TCR clone 354774 (TRAV12-2, TRAJ53)
CAVNTGGGSNYKLTF

SEQ ID NO: 709548 - protein, 14 aa, Homo sapiens
  CDR3 for beta chain variable domain of TCR clone 354774 (TRBV19, TRBJ2-1)
CASPTFVLSGEQFF

SEQ ID NO: 709549 - protein, 16 aa, Homo sapiens
  CDR3 for alpha chain variable domain of TCR clone 354775 (TRAV23/DV6, TRAJ9)
CAASIGGNTGGFKTIF

SEQ ID NO: 709550 - protein, 16 aa, Homo sapiens
  CDR3 for beta chain variable domain of TCR clone 354775 (TRBV6-1, TRBJ2-2)
CASSFGQGANTGELFF

SEQ ID NO: 709551 - protein, 12 aa, Homo sapiens
  CDR3 for alpha chain variable domain of TCR clone 354776 (TRAV4, TRAJ6)
CLAPGGSYIPTF

SEQ ID NO: 709552 - protein, 18 aa, Homo sapiens
  CDR3 for beta chain variable domain of TCR clone 354776 (TRBV20-1, TRBJ2-3)
CSASGLAGGPWTTDTQYF

SEQ ID NO: 709553 - protein, 14 aa, Homo sapiens
  CDR3 for alpha chain variable domain of TCR clone 354777 (TRAV23/DV6, TRAJ22)
CAASVSGSARQPTF

SEQ ID NO: 709554 - protein, 16 aa, Homo sapiens
  CDR3 for beta chain variable domain of TCR clone 354777 (TRBV19, TRBJ2-2)
CASSFPGQGLAGELFF

SEQ ID NO: 709555 - protein, 16 aa, Homo sapiens
  CDR3 for alpha chain variable domain of TCR clone 354778 (TRAV3, TRAJ37)
CAVRGKGSGNTGRLIF

SEQ ID NO: 709556 - protein, 20 aa, Homo sapiens
  CDR3 for beta chain variable domain of TCR clone 354778 (TRBV7-8, TRBJ2-2)
CASSHLFPGPTIHITGELFF

SEQ ID NO: 709557 - protein, 15 aa, Homo sapiens
  CDR3 for alpha chain variable domain of TCR clone 354779 (TRAV2, TRAJ37)
CAVGDGSSNTGKLIF

SEQ ID NO: 709558 - protein, 13 aa, Homo sapiens
  CDR3 for beta chain variable domain of TCR clone 354779 (TRBV7-9, TRBJ2-5)
CASLSPGQETQYF

SEQ ID NO: 709559 - protein, 14 aa, Homo sapiens
  CDR3 for alpha chain variable domain of TCR clone 354780 (TRAV12-2, TRAJ44)
CAVNPAGTASKLTF

SEQ ID NO: 709560 - protein, 16 aa, Homo sapiens
  CDR3 for beta chain variable domain of TCR clone 354780 (TRBV2, TRBJ2-6)
CASSEVGGAGANVLAF

SEQ ID NO: 709561 - protein, 14 aa, Homo sapiens
  CDR3 for alpha chain variable domain of TCR clone 354781 (TRAV12-2, TRAJ45)
CTVYSGGGADGLTF

SEQ ID NO: 709562 - protein, 13 aa, Homo sapiens
  CDR3 for beta chain variable domain of TCR clone 354781 (TRBV7-7, TRBJ2-3)
CASSLSRADTQYF

SEQ ID NO: 709563 - protein, 13 aa, Homo sapiens
  CDR3 for alpha chain variable domain of TCR clone 354782 (TRAV27, TRAJ6)
CAGGTRGGYIPTF

SEQ ID NO: 709564 - protein, 13 aa, Homo sapiens
  CDR3 for beta chain variable domain of TCR clone 354782 (TRBV11-3, TRBJ2-3)
CASSHDTKDTQYF

SEQ ID NO: 709565 - protein, 15 aa, Homo sapiens
  CDR3 for alpha chain variable domain of TCR clone 354783 (TRAV2, TRAJ15)
CAVEDRNQAGTALIF

SEQ ID NO: 709566 - protein, 13 aa, Homo sapiens
  CDR3 for beta chain variable domain of TCR clone 354783 (TRBV10-2, TRBJ2-1)
CASGASGDAKQSF

SEQ ID NO: 709567 - protein, 14 aa, Homo sapiens
  CDR3 for alpha chain variable domain of TCR clone 354784 (TRAV38-1, TRAJ45)
CASHSGGGADGLTF

SEQ ID NO: 709568 - protein, 16 aa, Homo sapiens
  CDR3 for beta chain variable domain of TCR clone 354784 (TRBV2, TRBJ2-2)
CASSAFGDANTGELFF

SEQ ID NO: 709569 - protein, 13 aa, Homo sapiens
  CDR3 for alpha chain variable domain of TCR clone 354785 (TRAV27, TRAJ29)
FAGAHSGNTPLVF

SEQ ID NO: 709570 - protein, 15 aa, Homo sapiens
  CDR3 for beta chain variable domain of TCR clone 354785 (TRBV15, TRBJ1-4)
CATSRDMGSYEKLFF

SEQ ID NO: 709571 - protein, 18 aa, Homo sapiens
  CDR3 for alpha chain variable domain of TCR clone 354786 (TRAV21, TRAJ52)
CAVRPSPAGGTSYGKLTF

SEQ ID NO: 709572 - protein, 17 aa, Homo sapiens
  CDR3 for beta chain variable domain of TCR clone 354786 (TRBV13, TRBJ2-3)
CASSLPRAAGGRNTQYF

SEQ ID NO: 709573 - protein, 13 aa, Homo sapiens
  CDR3 for alpha chain variable domain of TCR clone 354787 (TRAV12-3, TRAJ13)
CAMISGGYQKVTF

SEQ ID NO: 709574 - protein, 13 aa, Homo sapiens
  CDR3 for beta chain variable domain of TCR clone 354787 (TRBV20-1, TRBJ1-1)
CSAPPGGHTEAFF

SEQ ID NO: 709575 - protein, 13 aa, Homo sapiens
  CDR3 for alpha chain variable domain of TCR clone 354788 (TRAV13-2, TRAJ40)
CAEFTSGTYKYIF

SEQ ID NO: 709576 - protein, 15 aa, Homo sapiens
  CDR3 for beta chain variable domain of TCR clone 354788 (TRBV12-4, TRBJ2-5)
CASSPPTGLQETQYF

SEQ ID NO: 709577 - protein, 12 aa, Homo sapiens
  CDR3 for alpha chain variable domain of TCR clone 354789 (TRAV1-1, TRAJ39)
CAVPVVGNMLTF

SEQ ID NO: 709578 - protein, 14 aa, Homo sapiens
  CDR3 for beta chain variable domain of TCR clone 354789 (TRBV11-2, TRBJ2-5)
CASSRTGGIETQYF

SEQ ID NO: 709579 - protein, 16 aa, Homo sapiens
  CDR3 for alpha chain variable domain of TCR clone 354790 (TRAV3, TRAJ10)
CAVRDMRAGGGNKLTS

SEQ ID NO: 709580 - protein, 15 aa, Homo sapiens
  CDR3 for beta chain variable domain of TCR clone 354790 (TRBV6-5, TRBJ2-7)
CASSRTSGFSYEQYF

SEQ ID NO: 709581 - protein, 15 aa, Homo sapiens
  CDR3 for alpha chain variable domain of TCR clone 354791 (TRAV23/DV6, TRAJ38)
CAASGRAGNNRKLIW

SEQ ID NO: 709582 - protein, 13 aa, Homo sapiens
  CDR3 for beta chain variable domain of TCR clone 354791 (TRBV7-2, TRBJ1-2)
CASSLPGLYGYTF

SEQ ID NO: 709583 - protein, 21 aa, Homo sapiens
  CDR3 for alpha chain variable domain of TCR clone 354792 (TRAV4, TRAJ42)
CCVLLPVGVLNYGGSQGNPIF

SEQ ID NO: 709584 - protein, 12 aa, Homo sapiens
  CDR3 for beta chain variable domain of TCR clone 354792 (TRBV20-1, TRBJ2-1)
CSAQYTYNEQFF

SEQ ID NO: 709585 - protein, 12 aa, Homo sapiens
  CDR3 for alpha chain variable domain of TCR clone 354793 (TRAV30, TRAJ29)
CGTGSGNTPLVF

SEQ ID NO: 709586 - protein, 15 aa, Homo sapiens
  CDR3 for beta chain variable domain of TCR clone 354793 (TRBV11-3, TRBJ2-7)
CASSPGPASSYEQYF

SEQ ID NO: 709587 - protein, 14 aa, Homo sapiens
  CDR3 for alpha chain variable domain of TCR clone 354794 (TRAV13-1, TRAJ35)
CAASKGGFGNVLHC

SEQ ID NO: 709588 - protein, 13 aa, Homo sapiens
  CDR3 for beta chain variable domain of TCR clone 354794 (TRBV4-1, TRBJ1-1)
CASSQLGTGEAFF

SEQ ID NO: 709589 - protein, 13 aa, Homo sapiens
  CDR3 for alpha chain variable domain of TCR clone 354795 (TRAV30, TRAJ24)
CGTVTDSWGKLQF

SEQ ID NO: 709590 - protein, 16 aa, Homo sapiens
  CDR3 for beta chain variable domain of TCR clone 354795 (TRBV7-3, TRBJ2-2)
CASSLKRGTLSAELFF

SEQ ID NO: 709591 - protein, 16 aa, Homo sapiens
  CDR3 for alpha chain variable domain of TCR clone 354796 (TRAV3, TRAJ37)
CAVRGKGSGNTGKLIF

SEQ ID NO: 709592 - protein, 16 aa, Homo sapiens
  CDR3 for beta chain variable domain of TCR clone 354796 (TRBV27, TRBJ2-2)
CASSFRGLVRTGELFF

SEQ ID NO: 709593 - protein, 16 aa, Homo sapiens
  CDR3 for alpha chain variable domain of TCR clone 354797 (TRAV23/DV6, TRAJ9)
CAASIGGNTGGFKTIF

SEQ ID NO: 709594 - protein, 12 aa, Homo sapiens
  CDR3 for beta chain variable domain of TCR clone 354797 (TRBV6-3, TRBJ2-7)
CASSGPGFEQYF

SEQ ID NO: 709595 - protein, 16 aa, Homo sapiens
  CDR3 for alpha chain variable domain of TCR clone 354798 (TRAV3, TRAJ37)
CAVRGTGSGNTGKLIF

SEQ ID NO: 709596 - protein, 15 aa, Homo sapiens
  CDR3 for beta chain variable domain of TCR clone 354798 (TRBV5-1, TRBJ2-7)
CASSLNGGPAREQYF

SEQ ID NO: 709597 - protein, 13 aa, Homo sapiens
  CDR3 for alpha chain variable domain of TCR clone 354799 (TRAV8-3, TRAJ43)
CAVGPGNNNDMRF

SEQ ID NO: 709598 - protein, 19 aa, Homo sapiens
  CDR3 for beta chain variable domain of TCR clone 354799 (TRBV7-2, TRBJ2-3)
CASSFLSRNWGGGTDTQYF

SEQ ID NO: 709599 - protein, 14 aa, Homo sapiens
  CDR3 for alpha chain variable domain of TCR clone 354800 (TRAV13-1, TRAJ27)
CAASIRTNAGKSTF

SEQ ID NO: 709600 - protein, 16 aa, Homo sapiens
  CDR3 for beta chain variable domain of TCR clone 354800 (TRBV20-1, TRBJ1-6)
CSARAVGRVYNSPLHF

SEQ ID NO: 709601 - protein, 16 aa, Homo sapiens
  CDR3 for alpha chain variable domain of TCR clone 354801 (TRAV30, TRAJ24)
CGTEIVDADCWGKFQF

SEQ ID NO: 709602 - protein, 13 aa, Homo sapiens
  CDR3 for beta chain variable domain of TCR clone 354801 (TRBV12-4, TRBJ2-5)
CASSPGTEETQYF

SEQ ID NO: 709603 - protein, 14 aa, Homo sapiens
  CDR3 for alpha chain variable domain of TCR clone 354802 (TRAV26-1, TRAJ53)
CIAPPDGSNYKLTF

SEQ ID NO: 709604 - protein, 12 aa, Homo sapiens
  CDR3 for beta chain variable domain of TCR clone 354802 (TRBV11-2, TRBJ2-2)
CASSLGGGELSF

SEQ ID NO: 709605 - protein, 14 aa, Homo sapiens
  CDR3 for alpha chain variable domain of TCR clone 354803 (TRAV8-3, TRAJ4)
CAVGASGGYNKLIF

SEQ ID NO: 709606 - protein, 16 aa, Homo sapiens
  CDR3 for beta chain variable domain of TCR clone 354803 (TRBV4-3, TRBJ2-2)
CASSHLRGSGTGELFF

SEQ ID NO: 709607 - protein, 12 aa, Homo sapiens
  CDR3 for alpha chain variable domain of TCR clone 354804 (TRAV3, TRAJ4)
CAVSGGYNKLIF

SEQ ID NO: 709608 - protein, 14 aa, Homo sapiens
  CDR3 for beta chain variable domain of TCR clone 354804 (TRBV10-3, TRBJ2-7)
CAISAPRGAYEQYV

SEQ ID NO: 709609 - protein, 18 aa, Homo sapiens
  CDR3 for alpha chain variable domain of TCR clone 354805 (TRAV26-2, TRAJ17)
CCVLLHPAIKAAGNKLTF

SEQ ID NO: 709610 - protein, 12 aa, Homo sapiens
  CDR3 for beta chain variable domain of TCR clone 354805 (TRBV29-1, TRBJ2-7)
CSARDRPYEQYV

SEQ ID NO: 709611 - protein, 18 aa, Homo sapiens
  CDR3 for alpha chain variable domain of TCR clone 354806 (TRAV3, TRAJ32)
CAVRDIRGYVGATNKLIF

SEQ ID NO: 709612 - protein, 10 aa, Homo sapiens
  CDR3 for beta chain variable domain of TCR clone 354806 (TRBV12-4, TRBJ2-2)
CASSVGVRHT

SEQ ID NO: 709613 - protein, 16 aa, Homo sapiens
  CDR3 for alpha chain variable domain of TCR clone 354807 (TRAV23/DV6, TRAJ9)
CAASIGGNTGGFKTIF

SEQ ID NO: 709614 - protein, 16 aa, Homo sapiens
  CDR3 for beta chain variable domain of TCR clone 354807 (TRBV4-1, TRBJ2-1)
CASSQEAGQGSDEQFF

SEQ ID NO: 709615 - protein, 12 aa, Homo sapiens
  CDR3 for alpha chain variable domain of TCR clone 354808 (TRAV12-3, TRAJ17)
CAMTLTGNKLTF

SEQ ID NO: 709616 - protein, 14 aa, Homo sapiens
  CDR3 for beta chain variable domain of TCR clone 354808 (TRBV24-1, TRBJ2-2)
CATGGLGNTGELFF

SEQ ID NO: 709617 - protein, 14 aa, Homo sapiens
  CDR3 for alpha chain variable domain of TCR clone 354809 (TRAV29/DV5, TRAJ49)
CAASAQNTGNQFSF

SEQ ID NO: 709618 - protein, 14 aa, Homo sapiens
  CDR3 for beta chain variable domain of TCR clone 354809 (TRBV20-1, TRBJ2-7)
CSASEAGEKYEQYF

SEQ ID NO: 709619 - protein, 12 aa, Homo sapiens
  CDR3 for alpha chain variable domain of TCR clone 354810 (TRAV1-1, TRAJ39)
CAVPVVGNMLTF

SEQ ID NO: 709620 - protein, 16 aa, Homo sapiens
  CDR3 for beta chain variable domain of TCR clone 354810 (TRBV7-3, TRBJ2-1)
CASSLSSGGGAKEQFF

SEQ ID NO: 709621 - protein, 12 aa, Homo sapiens
  CDR3 for alpha chain variable domain of TCR clone 354811 (TRAV13-2, TRAJ23)
CAERHRGGKLIF

SEQ ID NO: 709622 - protein, 14 aa, Homo sapiens
  CDR3 for beta chain variable domain of TCR clone 354811 (TRBV27, TRBJ2-1)
CASSATGGYNEQFF

SEQ ID NO: 709623 - protein, 19 aa, Homo sapiens
  CDR3 for alpha chain variable domain of TCR clone 354812 (TRAV2, TRAJ20)
ILQVREADAAVYRDCKLSF

SEQ ID NO: 709624 - protein, 16 aa, Homo sapiens
  CDR3 for beta chain variable domain of TCR clone 354812 (TRBV11-2, TRBJ2-7)
CASSLAPTGVNYEQYF

SEQ ID NO: 709625 - protein, 15 aa, Homo sapiens
  CDR3 for alpha chain variable domain of TCR clone 354813 (TRAV17, TRAJ45)
TSVLRTGGGADGLTF

SEQ ID NO: 709626 - protein, 15 aa, Homo sapiens
  CDR3 for beta chain variable domain of TCR clone 354813 (TRBV5-7, TRBJ1-5)
CAISYGKLWDQPQHF

SEQ ID NO: 709627 - protein, 16 aa, Homo sapiens
  CDR3 for alpha chain variable domain of TCR clone 354814 (TRAV26-1, TRAJ23)
CIVRVHPYNQGGKLIF

SEQ ID NO: 709628 - protein, 15 aa, Homo sapiens
  CDR3 for beta chain variable domain of TCR clone 354814 (TRBV5-7, TRBJ2-7)
CSSSPYFEGSYEQYF

SEQ ID NO: 709629 - protein, 15 aa, Homo sapiens
  CDR3 for alpha chain variable domain of TCR clone 354815 (TRAV3, TRAJ10)
CAVRDGTGGGNKLTF

SEQ ID NO: 709630 - protein, 15 aa, Homo sapiens
  CDR3 for beta chain variable domain of TCR clone 354815 (TRBV4-2, IGHJ2)
CASSLVQREVDKLFF

SEQ ID NO: 709631 - protein, 18 aa, Homo sapiens
  CDR3 for alpha chain variable domain of TCR clone 354816 (TRAV21, TRAJ52)
CAVSPSPAGGTSNGKLTF

SEQ ID NO: 709632 - protein, 17 aa, Homo sapiens
  CDR3 for beta chain variable domain of TCR clone 354816 (TRBV13, TRBJ2-3)
CASSLSRVAGGRNTQYF

SEQ ID NO: 709633 - protein, 15 aa, Homo sapiens
  CDR3 for alpha chain variable domain of TCR clone 354817 (TRAV3, TRAJ22)
CAVRDRGGSARQLTF

SEQ ID NO: 709634 - protein, 17 aa, Homo sapiens
  CDR3 for beta chain variable domain of TCR clone 354817 (TRBV13, TRBJ2-3)
CASSLSRVAGGRNKQYF

SEQ ID NO: 709635 - protein, 17 aa, Homo sapiens
  CDR3 for alpha chain variable domain of TCR clone 354818 (TRAV3, TRAJ6)
CAVRDGPRAGGRYIPTF

SEQ ID NO: 709636 - protein, 14 aa, Homo sapiens
  CDR3 for beta chain variable domain of TCR clone 354818 (TRBV7-2, TRBJ2-7)
CASSPKTSFCEQYF

SEQ ID NO: 709637 - protein, 12 aa, Homo sapiens
  CDR3 for alpha chain variable domain of TCR clone 354819 (TRAV1-2, TRAJ29)
CAVPSGITPLVF

SEQ ID NO: 709638 - protein, 12 aa, Homo sapiens
  CDR3 for beta chain variable domain of TCR clone 354819 (TRBV12-4, TRBJ2-7)
CASSLGGYEQYF

SEQ ID NO: 709639 - protein, 14 aa, Homo sapiens
  CDR3 for alpha chain variable domain of TCR clone 354820 (TRAV21, TRAJ12)
CAVRNGDSSYKLIF

SEQ ID NO: 709640 - protein, 14 aa, Homo sapiens
  CDR3 for beta chain variable domain of TCR clone 354820 (TRBV7-6, TRBJ2-7)
CASSLTGTGNEQNF

SEQ ID NO: 709641 - protein, 15 aa, Homo sapiens
  CDR3 for alpha chain variable domain of TCR clone 354821 (TRAV35, TRAJ28)
CWAKYSGAGSYQLTF

SEQ ID NO: 709642 - protein, 13 aa, Homo sapiens
  CDR3 for beta chain variable domain of TCR clone 354821 (TRBV19, TRBJ1-2)
CASSQGQVYGYTF

SEQ ID NO: 709643 - protein, 17 aa, Homo sapiens
  CDR3 for alpha chain variable domain of TCR clone 354822 (TRAV3, TRAJ6)
CAVRDGPRAGGSYMPTF

SEQ ID NO: 709644 - protein, 16 aa, Homo sapiens
  CDR3 for beta chain variable domain of TCR clone 354822 (TRBV19, TRBJ2-2)
CASRSPGTGATGELFF

SEQ ID NO: 709645 - protein, 13 aa, Homo sapiens
  CDR3 for alpha chain variable domain of TCR clone 354823 (TRAV23/DV6, TRAJ22)
CASRAGSARQLTF

SEQ ID NO: 709646 - protein, 14 aa, Homo sapiens
  CDR3 for beta chain variable domain of TCR clone 354823 (TRBV7-2, TRBJ2-7)
CARSPKTSFYEQYF

SEQ ID NO: 709647 - protein, 14 aa, Homo sapiens
  CDR3 for alpha chain variable domain of TCR clone 354824 (TRAV4, TRAJ30)
CLVGDMNRDDNIIF

SEQ ID NO: 709648 - protein, 16 aa, Homo sapiens
  CDR3 for beta chain variable domain of TCR clone 354824 (TRBV20-1, TRBJ1-4)
CSAPGQGLLTNEKLFF

SEQ ID NO: 709649 - protein, 15 aa, Homo sapiens
  CDR3 for alpha chain variable domain of TCR clone 354825 (TRAV27, TRAJ38)
CSARRSAGNNRKLIW

SEQ ID NO: 709650 - protein, 13 aa, Homo sapiens
  CDR3 for beta chain variable domain of TCR clone 354825 (TRBV12-5, TRBJ2-3)
CASGDRQSDTQYF

SEQ ID NO: 709651 - protein, 12 aa, Homo sapiens
  CDR3 for alpha chain variable domain of TCR clone 354826 (TRAV13-1, TRAJ9)
CASHTGGFKTIF

SEQ ID NO: 709652 - protein, 18 aa, Homo sapiens
  CDR3 for beta chain variable domain of TCR clone 354826 (TRBV11-2, TRBJ2-3)
CASSLGGVSRGAPNTQYF

SEQ ID NO: 709653 - protein, 14 aa, Homo sapiens
  CDR3 for alpha chain variable domain of TCR clone 354827 (TRAV16, TRAJ4)
CALHFSGGYNKLIF

SEQ ID NO: 709654 - protein, 14 aa, Homo sapiens
  CDR3 for beta chain variable domain of TCR clone 354827 (TRBV9, TRBJ2-4)
CASSPSGTSGFQYF

SEQ ID NO: 709655 - protein, 10 aa, Homo sapiens
  CDR3 for alpha chain variable domain of TCR clone 354828 (TRAV30, TRAJ34)
CGTNPDMLIF

SEQ ID NO: 709656 - protein, 12 aa, Homo sapiens
  CDR3 for beta chain variable domain of TCR clone 354828 (TRBV19, TRBJ1-1)
CASSLSDTEAFF

SEQ ID NO: 709657 - protein, 14 aa, Homo sapiens
  CDR3 for alpha chain variable domain of TCR clone 354829 (TRAV3, TRAJ5)
CAVSSDTGRRALTF

SEQ ID NO: 709658 - protein, 14 aa, Homo sapiens
  CDR3 for beta chain variable domain of TCR clone 354829 (TRBV7-2, TRBJ2-3)
CASSFVMPTDTQYF

SEQ ID NO: 709659 - protein, 18 aa, Homo sapiens
  CDR3 for alpha chain variable domain of TCR clone 354830 (TRAV29/DV5, TRAJ52)
CAAGFRGAGGTSYGKLTF

SEQ ID NO: 709660 - protein, 17 aa, Homo sapiens
  CDR3 for beta chain variable domain of TCR clone 354830 (TRBV7-3, TRBJ2-1)
CQQLNVGWREGNGEQFF

SEQ ID NO: 709661 - protein, 16 aa, Homo sapiens
  CDR3 for alpha chain variable domain of TCR clone 354831 (TRAV30, TRAJ24)
CGTEIVDADSWGRFQF

SEQ ID NO: 709662 - protein, 17 aa, Homo sapiens
  CDR3 for beta chain variable domain of TCR clone 354831 (TRBV20-1, TRBJ2-1)
CSARDPLAGVWDNEQFF

SEQ ID NO: 709663 - protein, 14 aa, Homo sapiens
  CDR3 for alpha chain variable domain of TCR clone 354832 (TRAV13-1, TRAJ20)
CAARPGSNDYKLSF

SEQ ID NO: 709664 - protein, 15 aa, Homo sapiens
  CDR3 for beta chain variable domain of TCR clone 354832 (TRBV4-1, TRBJ2-7)
CASSQQGQVFDEQYF

SEQ ID NO: 709665 - protein, 13 aa, Homo sapiens
  CDR3 for alpha chain variable domain of TCR clone 354833 (TRAV36/DV7, TRAJ49)
CAVEANTGNQFYF

SEQ ID NO: 709666 - protein, 17 aa, Homo sapiens
  CDR3 for beta chain variable domain of TCR clone 354833 (TRBV20-1, TRBJ2-6)
CSAPPGTVASEANVLTF

SEQ ID NO: 709667 - protein, 14 aa, Homo sapiens
  CDR3 for alpha chain variable domain of TCR clone 354834 (TRAV12-2, TRAJ40)
CTVKTPSGTYKYIF

SEQ ID NO: 709668 - protein, 14 aa, Homo sapiens
  CDR3 for beta chain variable domain of TCR clone 354834 (TRBV20-1, TRBJ1-1)
CSAQTRIGGTEAFF

SEQ ID NO: 709669 - protein, 11 aa, Homo sapiens
  CDR3 for alpha chain variable domain of TCR clone 354835 (TRAV21, TRAJ41)
CAMRSGYALNF

SEQ ID NO: 709670 - protein, 13 aa, Homo sapiens
  CDR3 for beta chain variable domain of TCR clone 354835 (TRBV7-9, TRBJ1-2)
CASSLKQNYGYTF

SEQ ID NO: 709671 - protein, 16 aa, Homo sapiens
  CDR3 for alpha chain variable domain of TCR clone 354836 (TRAV16, TRAJ42)
CALSGLLGGSQGNLIF

SEQ ID NO: 709672 - protein, 15 aa, Homo sapiens
  CDR3 for beta chain variable domain of TCR clone 354836 (TRBV5-1, TRBJ2-1)
CASSPGGLAGNEQVF

SEQ ID NO: 709673 - protein, 13 aa, Homo sapiens
  CDR3 for alpha chain variable domain of TCR clone 354837 (TRAV27, TRAJ53)
CAGPGGSNYKLTF

SEQ ID NO: 709674 - protein, 13 aa, Homo sapiens
  CDR3 for beta chain variable domain of TCR clone 354837 (TRBV29-1, TRBJ1-1)
CSVESGFGTEAFF

SEQ ID NO: 709675 - protein, 17 aa, Homo sapiens
  CDR3 for alpha chain variable domain of TCR clone 354838 (TRAV13-1, TRAJ52)
CAAGRNAGGTSYGKLKF

SEQ ID NO: 709676 - protein, 13 aa, Homo sapiens
  CDR3 for beta chain variable domain of TCR clone 354838 (TRBV7-2, TRBJ1-1)
RASNLKGAKVAFF

SEQ ID NO: 709677 - protein, 13 aa, Homo sapiens
  CDR3 for alpha chain variable domain of TCR clone 354839 (TRAV20, TRAJ54)
CAVQAGGAQKLVL

SEQ ID NO: 709678 - protein, 15 aa, Homo sapiens
  CDR3 for beta chain variable domain of TCR clone 354839 (TRBV7-2, TRBJ2-1)
CASSSGLAGDNEQFF

SEQ ID NO: 709679 - protein, 14 aa, Homo sapiens
  CDR3 for alpha chain variable domain of TCR clone 354840 (TRAV4, TRAJ13)
CLVGYSWGYQKVTF

SEQ ID NO: 709680 - protein, 13 aa, Homo sapiens
  CDR3 for beta chain variable domain of TCR clone 354840 (TRBV18, TRBJ1-1)
CASSGGRNTEAFF

SEQ ID NO: 709681 - protein, 13 aa, Homo sapiens
  CDR3 for alpha chain variable domain of TCR clone 354841 (TRAV2, TRAJ15)
CAVASQAGTALIF

SEQ ID NO: 709682 - protein, 16 aa, Homo sapiens
  CDR3 for beta chain variable domain of TCR clone 354841 (TRBV20-1, TRBJ1-4)
CSAPGQGLLTNEKLFC

SEQ ID NO: 709683 - protein, 12 aa, Homo sapiens
  CDR3 for alpha chain variable domain of TCR clone 354842 (TRAV2, TRAJ9)
CAVGAGGFKTIF

SEQ ID NO: 709684 - protein, 14 aa, Homo sapiens
  CDR3 for beta chain variable domain of TCR clone 354842 (TRBV19, TRBJ1-1)
CASRRGQGNTEAFF

SEQ ID NO: 709685 - protein, 13 aa, Homo sapiens
  CDR3 for alpha chain variable domain of TCR clone 354843 (TRAV12-1, TRAJ40)
CVVPTSGTYKYIF

SEQ ID NO: 709686 - protein, 16 aa, Homo sapiens
  CDR3 for beta chain variable domain of TCR clone 354843 (TRBV19, TRBJ2-1)
CASSKAGPSSYNEQFF

SEQ ID NO: 709687 - protein, 13 aa, Homo sapiens
  CDR3 for alpha chain variable domain of TCR clone 354844 (TRAV29/DV5, TRAJ31)
CAASRNNNARLMF

SEQ ID NO: 709688 - protein, 16 aa, Homo sapiens
  CDR3 for beta chain variable domain of TCR clone 354844 (TRBV7-8, TRBJ2-1)
CASSALGRAGYNEQFF

SEQ ID NO: 709689 - protein, 13 aa, Homo sapiens
  CDR3 for alpha chain variable domain of TCR clone 354845 (TRAV8-3, TRAJ28)
CAVGAVGSYQLTF

SEQ ID NO: 709690 - protein, 15 aa, Homo sapiens
  CDR3 for beta chain variable domain of TCR clone 354845 (TRBV5-1, TRBJ1-2)
CASSPGDRGSYGYTF

SEQ ID NO: 709691 - protein, 16 aa, Homo sapiens
  CDR3 for alpha chain variable domain of TCR clone 354846 (TRAV30, TRAJ24)
CGTAIVDADSWGKFQF

SEQ ID NO: 709692 - protein, 14 aa, Homo sapiens
  CDR3 for beta chain variable domain of TCR clone 354846 (TRBV19, TRBJ2-1)
CASPTFVLSGEQFF

SEQ ID NO: 709693 - protein, 12 aa, Homo sapiens
  CDR3 for alpha chain variable domain of TCR clone 354847 (TRAV12-3, TRAJ40)
CAVTSGTYKYIF

SEQ ID NO: 709694 - protein, 12 aa, Homo sapiens
  CDR3 for beta chain variable domain of TCR clone 354847 (TRBV7-8, TRBJ2-7)
CASSLGDREQYF

SEQ ID NO: 709695 - protein, 17 aa, Homo sapiens
  CDR3 for alpha chain variable domain of TCR clone 354848 (TRAV3, TRAJ28)
CAVREAYSGAWSYQLTF

SEQ ID NO: 709696 - protein, 17 aa, Homo sapiens
  CDR3 for beta chain variable domain of TCR clone 354848 (TRBV20-1, TRBJ2-1)
CSASSSGLAGSYNEQFF

SEQ ID NO: 709697 - protein, 14 aa, Homo sapiens
  CDR3 for alpha chain variable domain of TCR clone 354849 (TRAV17, TRAJ57)
CATDPQGGSEKLVF

SEQ ID NO: 709698 - protein, 18 aa, Homo sapiens
  CDR3 for beta chain variable domain of TCR clone 354849 (TRBV6-5, TRBJ2-6)
CASSYSGNMESGANVPTF

SEQ ID NO: 709699 - protein, 12 aa, Homo sapiens
  CDR3 for alpha chain variable domain of TCR clone 354850 (TRAV16, TRAJ10)
CSRTGGGNKLTF

SEQ ID NO: 709700 - protein, 15 aa, Homo sapiens
  CDR3 for beta chain variable domain of TCR clone 354850 (TRBV7-3, TRBJ2-1)
CASSLAGAGADEQFF

SEQ ID NO: 709701 - protein, 14 aa, Homo sapiens
  CDR3 for alpha chain variable domain of TCR clone 354851 (TRAV12-2, TRAJ44)
CAVNPAGTASKLTF

SEQ ID NO: 709702 - protein, 13 aa, Homo sapiens
  CDR3 for beta chain variable domain of TCR clone 354851 (TRBV7-3, TRBJ1-5)
CASSLDSNQPQHF

SEQ ID NO: 709703 - protein, 14 aa, Homo sapiens
  CDR3 for alpha chain variable domain of TCR clone 354852 (TRAV12-3, TRAJ42)
CAMNYGGSQGNLIF

SEQ ID NO: 709704 - protein, 15 aa, Homo sapiens
  CDR3 for beta chain variable domain of TCR clone 354852 (TRBV5-7, TRBJ1-5)
CASSYGKLWEQPQLF

SEQ ID NO: 709705 - protein, 10 aa, Homo sapiens
  CDR3 for alpha chain variable domain of TCR clone 354853 (TRAV21, TRAJ31)
CAVHNARLMF

SEQ ID NO: 709706 - protein, 13 aa, Homo sapiens
  CDR3 for beta chain variable domain of TCR clone 354853 (TRBV4-1, TRBJ1-1)
CASSRKMNAEAFF

SEQ ID NO: 709707 - protein, 15 aa, Homo sapiens
  CDR3 for alpha chain variable domain of TCR clone 354854 (TRAV8-3, TRAJ11)
CAVGLLNSGYSTLTF

SEQ ID NO: 709708 - protein, 15 aa, Homo sapiens
  CDR3 for beta chain variable domain of TCR clone 354854 (TRBV7-6, TRBJ2-7)
CASSGRRDTFGEQYF

SEQ ID NO: 709709 - protein, 17 aa, Homo sapiens
  CDR3 for alpha chain variable domain of TCR clone 354855 (TRAV23/DV6, TRAJ57)
CAASSTLSQGGSEKLVF

SEQ ID NO: 709710 - protein, 16 aa, Homo sapiens
  CDR3 for beta chain variable domain of TCR clone 354855 (TRBV12-4, TRBJ1-5)
CASSRPVVGSNQPQHF

SEQ ID NO: 709711 - protein, 14 aa, Homo sapiens
  CDR3 for alpha chain variable domain of TCR clone 354856 (TRAV17, TRAJ12)
CATDEKDTSYKLIF

SEQ ID NO: 709712 - protein, 16 aa, Homo sapiens
  CDR3 for beta chain variable domain of TCR clone 354856 (TRBV11-2, TRBJ2-1)
CASSPRLAGVYNEQFF

SEQ ID NO: 709713 - protein, 17 aa, Homo sapiens
  CDR3 for alpha chain variable domain of TCR clone 354857 (TRAV38-1, TRAJ45)
CAFMKHYMGGGADGLTF

SEQ ID NO: 709714 - protein, 19 aa, Homo sapiens
  CDR3 for beta chain variable domain of TCR clone 354857 (TRBV6-1, TRBJ2-5)
CASSEQGRAGGLYQETQYF

SEQ ID NO: 709715 - protein, 15 aa, Homo sapiens
  CDR3 for alpha chain variable domain of TCR clone 354858 (TRAV21, TRAJ53)
CATLNSGGSNYKLTF

SEQ ID NO: 709716 - protein, 15 aa, Homo sapiens
  CDR3 for beta chain variable domain of TCR clone 354858 (TRBV5-5, TRBJ1-5)
CASSSTPGSNQPQHF

SEQ ID NO: 709717 - protein, 11 aa, Homo sapiens
  CDR3 for alpha chain variable domain of TCR clone 354859 (TRAV4, TRAJ23)
CLVAPAGKLIF

SEQ ID NO: 709718 - protein, 15 aa, Homo sapiens
  CDR3 for beta chain variable domain of TCR clone 354859 (TRBV7-2, TRBJ2-1)
CASSFQADEYNEQFF

SEQ ID NO: 709719 - protein, 16 aa, Homo sapiens
  CDR3 for alpha chain variable domain of TCR clone 354860 (TRAV16, TRAJ52)
FALSAAGGTSYGKLTF

SEQ ID NO: 709720 - protein, 16 aa, Homo sapiens
  CDR3 for beta chain variable domain of TCR clone 354860 (TRBV7-3, TRBJ2-3)
CASSPTGYQSTDTQYF

SEQ ID NO: 709721 - protein, 14 aa, Homo sapiens
  CDR3 for alpha chain variable domain of TCR clone 354861 (TRAV23/DV6, TRAJ24)
CAASLRDSWGKLQF

SEQ ID NO: 709722 - protein, 15 aa, Homo sapiens
  CDR3 for beta chain variable domain of TCR clone 354861 (TRBV4-1, TRBJ2-7)
CASSQNTGRLYEQYF

SEQ ID NO: 709723 - protein, 22 aa, Homo sapiens
  CDR3 for alpha chain variable domain of TCR clone 354862 (TRAV2, TRAJ38)
CAVEDFPNAGNNHVQNPDPAVY

SEQ ID NO: 709724 - protein, 14 aa, Homo sapiens
  CDR3 for beta chain variable domain of TCR clone 354862 (TRBV29-1, TRBJ1-4)
CSVSGRQGGEKLFF

SEQ ID NO: 709725 - protein, 15 aa, Homo sapiens
  CDR3 for alpha chain variable domain of TCR clone 354863 (TRAV3, TRAJ9)
CAVRDSNTGGFKTIF

SEQ ID NO: 709726 - protein, 16 aa, Homo sapiens
  CDR3 for beta chain variable domain of TCR clone 354863 (TRBV15, TRBJ2-5)
CATSPTAGQGMETQYF

SEQ ID NO: 709727 - protein, 13 aa, Homo sapiens
  CDR3 for alpha chain variable domain of TCR clone 354864 (TRAV26-1, TRAJ41)
CIVRLNSGYALNF

SEQ ID NO: 709728 - protein, 13 aa, Homo sapiens
  CDR3 for beta chain variable domain of TCR clone 354864 (TRBV20-1, TRBJ1-5)
CSATAAGGQPQHF

SEQ ID NO: 709729 - protein, 14 aa, Homo sapiens
  CDR3 for alpha chain variable domain of TCR clone 354865 (TRAV13-1, TRAJ35)
CAASKGGFGNVLHC

SEQ ID NO: 709730 - protein, 15 aa, Homo sapiens
  CDR3 for beta chain variable domain of TCR clone 354865 (TRBV7-9, TRBJ1-6)
CASSSPGRGNSTLHF

SEQ ID NO: 709731 - protein, 14 aa, Homo sapiens
  CDR3 for alpha chain variable domain of TCR clone 354866 (TRAV12-2, TRAJ32)
CAHPESGATNKLIV

SEQ ID NO: 709732 - protein, 14 aa, Homo sapiens
  CDR3 for beta chain variable domain of TCR clone 354866 (TRBV4-2, TRBJ2-3)
CASRETRAPGMQYF

SEQ ID NO: 709733 - protein, 10 aa, Homo sapiens
  CDR3 for alpha chain variable domain of TCR clone 354867 (TRAV2, TRAJ15)
RGQAGTALIF

SEQ ID NO: 709734 - protein, 16 aa, Homo sapiens
  CDR3 for beta chain variable domain of TCR clone 354867 (TRBV20-1, TRBJ2-1)
CSALTWTSGSYNEQFF

SEQ ID NO: 709735 - protein, 14 aa, Homo sapiens
  CDR3 for alpha chain variable domain of TCR clone 354868 (TRAV38-1, TRAJ39)
CAFAHNNEGNMLTF

SEQ ID NO: 709736 - protein, 15 aa, Homo sapiens
  CDR3 for beta chain variable domain of TCR clone 354868 (TRBV19, TRBJ2-6)
CASSIGPSGANVLTF

SEQ ID NO: 709737 - protein, 14 aa, Homo sapiens
  CDR3 for alpha chain variable domain of TCR clone 354869 (TRAV2, TRAJ23)
CAVGLRNQGGKLIF

SEQ ID NO: 709738 - protein, 14 aa, Homo sapiens
  CDR3 for beta chain variable domain of TCR clone 354869 (TRBV2, TRBJ2-7)
CASSLTSGGYEQYF

SEQ ID NO: 709739 - protein, 16 aa, Homo sapiens
  CDR3 for alpha chain variable domain of TCR clone 354870 (TRAV12-2, TRAJ56)
CAVRRVDTGTNSKLTF

SEQ ID NO: 709740 - protein, 11 aa, Homo sapiens
  CDR3 for beta chain variable domain of TCR clone 354870 (TRBV3-1, TRBJ2-7)
CASSQVREQYF

SEQ ID NO: 709741 - protein, 17 aa, Homo sapiens
  CDR3 for alpha chain variable domain of TCR clone 354871 (TRAV8-6, TRAJ58)
CAVSSWVGETSGSRLPF

SEQ ID NO: 709742 - protein, 15 aa, Homo sapiens
  CDR3 for beta chain variable domain of TCR clone 354871 (TRBV20-1, TRBJ2-7)
CSARDRVSGMDEQYF

SEQ ID NO: 709743 - protein, 13 aa, Homo sapiens
  CDR3 for alpha chain variable domain of TCR clone 354872 (TRAV9-2, TRAJ7)
CALSDGGNNRLAF

SEQ ID NO: 709744 - protein, 13 aa, Homo sapiens
  CDR3 for beta chain variable domain of TCR clone 354872 (TRBV10-3, TRBJ2-7)
CASKLAVNYEQYF

SEQ ID NO: 709745 - protein, 14 aa, Homo sapiens
  CDR3 for alpha chain variable domain of TCR clone 354873 (TRAV1-2, TRAJ8)
CAVREDTGFQKLVF

SEQ ID NO: 709746 - protein, 14 aa, Homo sapiens
  CDR3 for beta chain variable domain of TCR clone 354873 (TRBV20-1, TRBJ2-7)
CSARYGTTYYEQYF

SEQ ID NO: 709747 - protein, 17 aa, Homo sapiens
  CDR3 for alpha chain variable domain of TCR clone 354874 (TRAV26-1, TRAJ27)
CIVSTPWINTNAGKSTF

SEQ ID NO: 709748 - protein, 16 aa, Homo sapiens
  CDR3 for beta chain variable domain of TCR clone 354874 (TRBV7-9, TRBJ2-1)
CASSLEPGLAIDEQFF

SEQ ID NO: 709749 - protein, 16 aa, Homo sapiens
  CDR3 for alpha chain variable domain of TCR clone 354875 (TRAV12-2, TRAJ13)
CAVKKTGVNRKLPLEL

SEQ ID NO: 709750 - protein, 15 aa, Homo sapiens
  CDR3 for beta chain variable domain of TCR clone 354875 (TRBV27, TRBJ2-1)
CASSNGGGSSNEQFF

SEQ ID NO: 709751 - protein, 14 aa, Homo sapiens
  CDR3 for alpha chain variable domain of TCR clone 354876 (TRAV4, TRAJ17)
CLVGGKAAGNKLTF

SEQ ID NO: 709752 - protein, 14 aa, Homo sapiens
  CDR3 for beta chain variable domain of TCR clone 354876 (TRBV12-5, TRBJ2-5)
CASGSRTHQETQYF

SEQ ID NO: 709753 - protein, 13 aa, Homo sapiens
  CDR3 for alpha chain variable domain of TCR clone 354877 (TRAV17, TRAJ34)
CATDLYHTDKLIF

SEQ ID NO: 709754 - protein, 15 aa, Homo sapiens
  CDR3 for beta chain variable domain of TCR clone 354877 (TRBV20-1, TRBJ2-3)
CSATGTSGFTDTQYF

SEQ ID NO: 709755 - protein, 18 aa, Homo sapiens
  CDR3 for alpha chain variable domain of TCR clone 354878 (TRAV12-2, )
CAVEDIQNPDPAVYKLRD

SEQ ID NO: 709756 - protein, 14 aa, Homo sapiens
  CDR3 for beta chain variable domain of TCR clone 354878 (TRBV4-1, TRBJ2-2)
CASSQAVNTGELFF

SEQ ID NO: 709757 - protein, 15 aa, Homo sapiens
  CDR3 for alpha chain variable domain of TCR clone 354879 (TRAV8-6, TRAJ48)
CAVSTANFGNEKLTF

SEQ ID NO: 709758 - protein, 14 aa, Homo sapiens
  CDR3 for beta chain variable domain of TCR clone 354879 (TRBV20-1, TRBJ2-1)
CSASLLDGYNEQFF

SEQ ID NO: 709759 - protein, 13 aa, Homo sapiens
  CDR3 for alpha chain variable domain of TCR clone 354880 (TRAV8-2, TRAJ13)
CVVSDLRYQKVTF

SEQ ID NO: 709760 - protein, 13 aa, Homo sapiens
  CDR3 for beta chain variable domain of TCR clone 354880 (TRBV7-9, TRBJ1-2)
CASSLKQNYGYTF

SEQ ID NO: 709761 - protein, 15 aa, Homo sapiens
  CDR3 for alpha chain variable domain of TCR clone 354881 (TRAV21, TRAJ45)
CAVSYSGGGADGLTF

SEQ ID NO: 709762 - protein, 15 aa, Homo sapiens
  CDR3 for beta chain variable domain of TCR clone 354881 (TRBV20-1, TRBJ2-7)
CSARKGLAESYEQYF

SEQ ID NO: 709763 - protein, 11 aa, Homo sapiens
  CDR3 for alpha chain variable domain of TCR clone 354882 (TRAV2, TRAJ13)
CASGGYQTVTF

SEQ ID NO: 709764 - protein, 13 aa, Homo sapiens
  CDR3 for beta chain variable domain of TCR clone 354882 (TRBV27, TRBJ1-4)
CASSLMGDEKLFF

SEQ ID NO: 709765 - protein, 13 aa, Homo sapiens
  CDR3 for alpha chain variable domain of TCR clone 354883 (TRAV1-1, TRAJ23)
CAVVANQGGKLIF

SEQ ID NO: 709766 - protein, 14 aa, Homo sapiens
  CDR3 for beta chain variable domain of TCR clone 354883 (TRBV7-9, TRBJ2-7)
CASSIGQGAGEQYF

SEQ ID NO: 709767 - protein, 15 aa, Homo sapiens
  CDR3 for alpha chain variable domain of TCR clone 354884 (TRAV19, TRAJ9)
CSLSLPDTGGFKTIF

SEQ ID NO: 709768 - protein, 15 aa, Homo sapiens
  CDR3 for beta chain variable domain of TCR clone 354884 (TRBV9, TRBJ2-1)
CASSLAGSSYNEQFF

SEQ ID NO: 709769 - protein, 10 aa, Homo sapiens
  CDR3 for alpha chain variable domain of TCR clone 354885 (TRAV36/DV7, TRAJ48)
CAVGNEKLTF

SEQ ID NO: 709770 - protein, 15 aa, Homo sapiens
  CDR3 for beta chain variable domain of TCR clone 354885 (TRBV7-3, TRBJ2-1)
CASSPTGGGEVEQFF

SEQ ID NO: 709771 - protein, 14 aa, Homo sapiens
  CDR3 for alpha chain variable domain of TCR clone 354886 (TRAV17, TRAJ6)
CATNPAGGSYIPTF

SEQ ID NO: 709772 - protein, 15 aa, Homo sapiens
  CDR3 for beta chain variable domain of TCR clone 354886 (TRBV2, TRBJ2-5)
CASSGTVAAVETQYF

SEQ ID NO: 709773 - protein, 13 aa, Homo sapiens
  CDR3 for alpha chain variable domain of TCR clone 354887 (TRAV8-3, TRAJ4)
WVFYSGGYNKLFF

SEQ ID NO: 709774 - protein, 14 aa, Homo sapiens
  CDR3 for beta chain variable domain of TCR clone 354887 (TRBV7-9, TRBJ2-2)
CASSGLADTGELFF

SEQ ID NO: 709775 - protein, 15 aa, Homo sapiens
  CDR3 for alpha chain variable domain of TCR clone 354888 (TRAV12-1, TRAJ5)
CVGNMLETGRRALTF

SEQ ID NO: 709776 - protein, 12 aa, Homo sapiens
  CDR3 for beta chain variable domain of TCR clone 354888 (TRBV11-2, TRBJ2-2)
CASSLGGGELFF

SEQ ID NO: 709777 - protein, 15 aa, Homo sapiens
  CDR3 for alpha chain variable domain of TCR clone 354889 (TRAV12-1, TRAJ38)
CVVNLHAGNNRKLIW

SEQ ID NO: 709778 - protein, 14 aa, Homo sapiens
  CDR3 for beta chain variable domain of TCR clone 354889 (TRBV7-3, TRBJ2-3)
CASSLTGGTDTQYF

SEQ ID NO: 709779 - protein, 14 aa, Homo sapiens
  CDR3 for alpha chain variable domain of TCR clone 354890 (TRAV3, TRAJ22)
CAVRDYSSARQLTF

SEQ ID NO: 709780 - protein, 13 aa, Homo sapiens
  CDR3 for beta chain variable domain of TCR clone 354890 (TRBV11-2, TRBJ2-5)
CASGHGAKETQYF

SEQ ID NO: 709781 - protein, 13 aa, Homo sapiens
  CDR3 for alpha chain variable domain of TCR clone 354891 (TRAV1-2, TRAJ9)
CAALNTGGFKTIF

SEQ ID NO: 709782 - protein, 16 aa, Homo sapiens
  CDR3 for beta chain variable domain of TCR clone 354891 (TRBV28, TRBJ2-2)
FASSLEGGSNTGELFF

SEQ ID NO: 709783 - protein, 15 aa, Homo sapiens
  CDR3 for alpha chain variable domain of TCR clone 354892 (TRAV35, TRAJ23)
CAGPLGTNQGGKLIF

SEQ ID NO: 709784 - protein, 14 aa, Homo sapiens
  CDR3 for beta chain variable domain of TCR clone 354892 (TRBV7-9, TRBJ1-1)
CASTPLQSYTEAFF

SEQ ID NO: 709785 - protein, 15 aa, Homo sapiens
  CDR3 for alpha chain variable domain of TCR clone 354893 (TRAV3, TRAJ22)
CAVRDRGGSARQLTF

SEQ ID NO: 709786 - protein, 15 aa, Homo sapiens
  CDR3 for beta chain variable domain of TCR clone 354893 (TRBV11-3, TRBJ2-3)
CASSAGTVVTNTQYF

SEQ ID NO: 709787 - protein, 15 aa, Homo sapiens
  CDR3 for alpha chain variable domain of TCR clone 354894 (TRAV26-1, TRAJ29)
CIVRVEGSGDTPLVF

SEQ ID NO: 709788 - protein, 14 aa, Homo sapiens
  CDR3 for beta chain variable domain of TCR clone 354894 (TRBV6-1, TRBJ1-3)
CASVQGGGGNTIYF

SEQ ID NO: 709789 - protein, 12 aa, Homo sapiens
  CDR3 for alpha chain variable domain of TCR clone 354895 (TRAV13-1, TRAJ27)
CAAHTNAGKSNF

SEQ ID NO: 709790 - protein, 15 aa, Homo sapiens
  CDR3 for beta chain variable domain of TCR clone 354895 (TRBV7-9, TRBJ1-6)
CASSSPGRGNSPLHF

SEQ ID NO: 709791 - protein, 14 aa, Homo sapiens
  CDR3 for alpha chain variable domain of TCR clone 354896 (TRAV12-1, TRAJ17)
CVENFKAAGNKLTF

SEQ ID NO: 709792 - protein, 17 aa, Homo sapiens
  CDR3 for beta chain variable domain of TCR clone 354896 (TRBV20-1, TRBJ2-1)
CSASASGLAGSYNEQFF

SEQ ID NO: 709793 - protein, 12 aa, Homo sapiens
  CDR3 for alpha chain variable domain of TCR clone 354897 (TRAV2, TRAJ5)
CALDTGRRALTF

SEQ ID NO: 709794 - protein, 17 aa, Homo sapiens
  CDR3 for beta chain variable domain of TCR clone 354897 (TRBV28, TRBJ2-5)
CASSTPEGDALQETQYF

SEQ ID NO: 709795 - protein, 14 aa, Homo sapiens
  CDR3 for alpha chain variable domain of TCR clone 354898 (TRAV8-6, TRAJ53)
CAALVLGSNYKLPF

SEQ ID NO: 709796 - protein, 15 aa, Homo sapiens
  CDR3 for beta chain variable domain of TCR clone 354898 (TRBV20-1, TRBJ2-3)
CSAEPLAGHGDTQYF

SEQ ID NO: 709797 - protein, 16 aa, Homo sapiens
  CDR3 for alpha chain variable domain of TCR clone 354899 (TRAV3, TRAJ37)
CAVRPHGSGNTGKLIF

SEQ ID NO: 709798 - protein, 15 aa, Homo sapiens
  CDR3 for beta chain variable domain of TCR clone 354899 (TRBV19, TRBJ2-3)
CASSMSTTSTDTQYF

SEQ ID NO: 709799 - protein, 13 aa, Homo sapiens
  CDR3 for alpha chain variable domain of TCR clone 354900 (TRAV13-1, TRAJ39)
CAASIWPGNMLTF

SEQ ID NO: 709800 - protein, 13 aa, Homo sapiens
  CDR3 for beta chain variable domain of TCR clone 354900 (TRBV11-2, TRBJ1-3)
CASSLEPVNTIYF

SEQ ID NO: 709801 - protein, 16 aa, Homo sapiens
  CDR3 for alpha chain variable domain of TCR clone 354901 (TRAV12-2, TRAJ32)
CAVNLGQGGATNKLIF

SEQ ID NO: 709802 - protein, 15 aa, Homo sapiens
  CDR3 for beta chain variable domain of TCR clone 354901 (TRBV27, TRBJ1-6)
CASSFDRGLGSPLHF

SEQ ID NO: 709803 - protein, 13 aa, Homo sapiens
  CDR3 for alpha chain variable domain of TCR clone 354902 (TRAV3, TRAJ21)
CAVREPDFNKFYF

SEQ ID NO: 709804 - protein, 13 aa, Homo sapiens
  CDR3 for beta chain variable domain of TCR clone 354902 (TRBV7-9, TRBJ2-3)
CASSPGSTDTQYF

SEQ ID NO: 709805 - protein, 12 aa, Homo sapiens
  CDR3 for alpha chain variable domain of TCR clone 354903 (TRAV12-3, TRAJ17)
CAMTLTGNKLTF

SEQ ID NO: 709806 - protein, 14 aa, Homo sapiens
  CDR3 for beta chain variable domain of TCR clone 354903 (TRBV13, TRBJ2-5)
CASSLGPRGETQYF

SEQ ID NO: 709807 - protein, 15 aa, Homo sapiens
  CDR3 for alpha chain variable domain of TCR clone 354904 (TRAV8-3, TRAJ11)
CAVGLLNSGYSTLTF

SEQ ID NO: 709808 - protein, 16 aa, Homo sapiens
  CDR3 for beta chain variable domain of TCR clone 354904 (TRBV20-1, TRBJ1-2)
CSASMGQGVANYGYTF

SEQ ID NO: 709809 - protein, 14 aa, Homo sapiens
  CDR3 for alpha chain variable domain of TCR clone 354905 (TRAV12-2, TRAJ40)
CAVKISSGTYKYIF

SEQ ID NO: 709810 - protein, 17 aa, Homo sapiens
  CDR3 for beta chain variable domain of TCR clone 354905 (TRBV11-2, TRBJ2-1)
CASSLYPPGVEYNEQFF

SEQ ID NO: 709811 - protein, 14 aa, Homo sapiens
  CDR3 for alpha chain variable domain of TCR clone 354906 (TRAV2, TRAJ9)
CAVEDRSGGFKTIY

SEQ ID NO: 709812 - protein, 11 aa, Homo sapiens
  CDR3 for beta chain variable domain of TCR clone 354906 (TRBV29-1, TRBJ2-5)
CSEDRTGTQYF

SEQ ID NO: 709813 - protein, 16 aa, Homo sapiens
  CDR3 for alpha chain variable domain of TCR clone 354907 (TRAV3, TRAJ10)
CAVRDMRAGGGNKLTF

SEQ ID NO: 709814 - protein, 16 aa, Homo sapiens
  CDR3 for beta chain variable domain of TCR clone 354907 (TRBV20-1, TRBJ1-4)
CSSPGQGLLTNEKLFF

SEQ ID NO: 709815 - protein, 12 aa, Homo sapiens
  CDR3 for alpha chain variable domain of TCR clone 354908 (TRAV12-3, TRAJ17)
CAMTLTCNKLTF

SEQ ID NO: 709816 - protein, 13 aa, Homo sapiens
  CDR3 for beta chain variable domain of TCR clone 354908 (TRBV2, TRBJ2-1)
CASSGTSGGEQFF

SEQ ID NO: 709817 - protein, 16 aa, Homo sapiens
  CDR3 for alpha chain variable domain of TCR clone 354909 (TRAV8-3, TRAJ18)
CAVGARRGSTLGRLYF

SEQ ID NO: 709818 - protein, 14 aa, Homo sapiens
  CDR3 for beta chain variable domain of TCR clone 354909 (TRBV5-4, TRBJ1-3)
CASSSQSAGDTIYF

SEQ ID NO: 709819 - protein, 15 aa, Homo sapiens
  CDR3 for alpha chain variable domain of TCR clone 354910 (TRAV12-2, TRAJ53)
CAVNGGGGSNYKLAF

SEQ ID NO: 709820 - protein, 17 aa, Homo sapiens
  CDR3 for beta chain variable domain of TCR clone 354910 (TRBV7-3, TRBJ2-3)
RASSLMKRMRGADTQYF

SEQ ID NO: 709821 - protein, 14 aa, Homo sapiens
  CDR3 for alpha chain variable domain of TCR clone 354911 (TRAV17, TRAJ23)
CATASYNQGGKLIF

SEQ ID NO: 709822 - protein, 16 aa, Homo sapiens
  CDR3 for beta chain variable domain of TCR clone 354911 (TRBV12-4, TRBJ1-5)
CASSRPVGGYNQPQHF

SEQ ID NO: 709823 - protein, 13 aa, Homo sapiens
  CDR3 for alpha chain variable domain of TCR clone 354912 (TRAV35, TRAJ43)
FAGYPYNNNDMRF

SEQ ID NO: 709824 - protein, 15 aa, Homo sapiens
  CDR3 for beta chain variable domain of TCR clone 354912 (TRBV25-1, TRBJ1-4)
CASSKRIATNEKLFF

SEQ ID NO: 709825 - protein, 14 aa, Homo sapiens
  CDR3 for alpha chain variable domain of TCR clone 354913 (TRAV38-1, TRAJ29)
CAFITPSGNTPLVF

SEQ ID NO: 709826 - protein, 15 aa, Homo sapiens
  CDR3 for beta chain variable domain of TCR clone 354913 (TRBV11-2, TRBJ2-2)
CASSSDRVNAGELFF

SEQ ID NO: 709827 - protein, 14 aa, Homo sapiens
  CDR3 for alpha chain variable domain of TCR clone 354914 (TRAV8-3, TRAJ4)
CAVGAAGGDNKLIF

SEQ ID NO: 709828 - protein, 15 aa, Homo sapiens
  CDR3 for beta chain variable domain of TCR clone 354914 (TRBV20-1, TRBJ2-5)
CSAPPRTGFGENQYF

SEQ ID NO: 709829 - protein, 15 aa, Homo sapiens
  CDR3 for alpha chain variable domain of TCR clone 354915 (TRAV26-1, TRAJ29)
CIVRVEGSGNTPLVF

SEQ ID NO: 709830 - protein, 14 aa, Homo sapiens
  CDR3 for beta chain variable domain of TCR clone 354915 (TRBV19, TRBJ2-7)
CASSIGPNSYEQYF

SEQ ID NO: 709831 - protein, 14 aa, Homo sapiens
  CDR3 for alpha chain variable domain of TCR clone 354916 (TRAV12-2, TRAJ44)
CAVNPAGTASKLTF

SEQ ID NO: 709832 - protein, 14 aa, Homo sapiens
  CDR3 for beta chain variable domain of TCR clone 354916 (TRBV7-2, TRBJ1-3)
CASSRLRSGNTLYF

SEQ ID NO: 709833 - protein, 13 aa, Homo sapiens
  CDR3 for alpha chain variable domain of TCR clone 354917 (TRAV3, TRAJ43)
CAVKASNNNDMRF

SEQ ID NO: 709834 - protein, 16 aa, Homo sapiens
  CDR3 for beta chain variable domain of TCR clone 354917 (TRBV7-9, TRBJ2-3)
CASSFSVAGGTDTQYF

SEQ ID NO: 709835 - protein, 14 aa, Homo sapiens
  CDR3 for alpha chain variable domain of TCR clone 354918 (TRAV1-2, TRAJ16)
CAVNRFSDGQKLLF

SEQ ID NO: 709836 - protein, 16 aa, Homo sapiens
  CDR3 for beta chain variable domain of TCR clone 354918 (TRBV19, TRBJ2-1)
CASSKAGPSSYNEQFL

SEQ ID NO: 709837 - protein, 14 aa, Homo sapiens
  CDR3 for alpha chain variable domain of TCR clone 354919 (TRAV1-2, TRAJ16)
CAVNRFSDCQKLLF

SEQ ID NO: 709838 - protein, 17 aa, Homo sapiens
  CDR3 for beta chain variable domain of TCR clone 354919 (TRBV28, TRBJ2-5)
CASSTPEGDALQETQYF

SEQ ID NO: 709839 - protein, 13 aa, Homo sapiens
  CDR3 for alpha chain variable domain of TCR clone 354920 (TRAV8-3, TRAJ48)
CAVVPFGNEKLTF

SEQ ID NO: 709840 - protein, 15 aa, Homo sapiens
  CDR3 for beta chain variable domain of TCR clone 354920 (TRBV11-2, TRBJ2-1)
CASSSPSTRYNEQCF

SEQ ID NO: 709841 - protein, 14 aa, Homo sapiens
  CDR3 for alpha chain variable domain of TCR clone 354921 (TRAV38-1, TRAJ45)
CAYYSGGGADGLTF

SEQ ID NO: 709842 - protein, 13 aa, Homo sapiens
  CDR3 for beta chain variable domain of TCR clone 354921 (TRBV28, TRBJ1-2)
CAGRDRGNYGYTF

SEQ ID NO: 709843 - protein, 11 aa, Homo sapiens
  CDR3 for alpha chain variable domain of TCR clone 354922 (TRAV1-1, TRAJ23)
CDVRQGGKLIF

SEQ ID NO: 709844 - protein, 20 aa, Homo sapiens
  CDR3 for beta chain variable domain of TCR clone 354922 (TRBV7-8, TRBJ2-2)
CASSYLFPGPTIHITGELFF

SEQ ID NO: 709845 - protein, 18 aa, Homo sapiens
  CDR3 for alpha chain variable domain of TCR clone 354923 (TRAV21, TRAJ52)
CAERPSPAGGTSYGKLTF

SEQ ID NO: 709846 - protein, 17 aa, Homo sapiens
  CDR3 for beta chain variable domain of TCR clone 354923 (TRBV13, TRBJ2-3)
CASSLSRGAGGRNTQYF

SEQ ID NO: 709847 - protein, 16 aa, Homo sapiens
  CDR3 for alpha chain variable domain of TCR clone 354924 (TRAV26-1, TRAJ23)
CIVRPAIYNQGGKLIF

SEQ ID NO: 709848 - protein, 14 aa, Homo sapiens
  CDR3 for beta chain variable domain of TCR clone 354924 (TRBV7-2, TRBJ2-3)
CASRRGLAADTQYF

SEQ ID NO: 709849 - protein, 13 aa, Homo sapiens
  CDR3 for alpha chain variable domain of TCR clone 354925 (TRAV30, TRAJ24)
CGTVTDSWGKLQF

SEQ ID NO: 709850 - protein, 13 aa, Homo sapiens
  CDR3 for beta chain variable domain of TCR clone 354925 (TRBV9, TRBJ2-7)
CASSVAEYYEQYF

SEQ ID NO: 709851 - protein, 15 aa, Homo sapiens
  CDR3 for alpha chain variable domain of TCR clone 354926 (TRAV8-6, TRAJ6)
CAVSGESGGSYIPTF

SEQ ID NO: 709852 - protein, 14 aa, Homo sapiens
  CDR3 for beta chain variable domain of TCR clone 354926 (TRBV7-9, TRBJ2-1)
CASSSMVGFGEQVF

SEQ ID NO: 709853 - protein, 11 aa, Homo sapiens
  CDR3 for alpha chain variable domain of TCR clone 354927 (TRAV13-1, TRAJ15)
CAATPGTALIF

SEQ ID NO: 709854 - protein, 13 aa, Homo sapiens
  CDR3 for beta chain variable domain of TCR clone 354927 (TRBV7-2, TRBJ2-1)
CASSLGVDNEQFF

SEQ ID NO: 709855 - protein, 13 aa, Homo sapiens
  CDR3 for alpha chain variable domain of TCR clone 354928 (TRAV8-4, TRAJ34)
CAVTLYNPDKLIF

SEQ ID NO: 709856 - protein, 17 aa, Homo sapiens
  CDR3 for beta chain variable domain of TCR clone 354928 (TRBV7-2, TRBJ2-2)
CASSPSWRGGGTGELFF

SEQ ID NO: 709857 - protein, 16 aa, Homo sapiens
  CDR3 for alpha chain variable domain of TCR clone 354929 (TRAV30, TRAJ24)
CGTEIVDADSWGKFKF

SEQ ID NO: 709858 - protein, 11 aa, Homo sapiens
  CDR3 for beta chain variable domain of TCR clone 354929 (TRBV19, TRBJ1-1)
CASSIGSEAFF

SEQ ID NO: 709859 - protein, 14 aa, Homo sapiens
  CDR3 for alpha chain variable domain of TCR clone 354930 (TRAV14/DV4, TRAJ54)
CAMREAPGAQKLVF

SEQ ID NO: 709860 - protein, 15 aa, Homo sapiens
  CDR3 for beta chain variable domain of TCR clone 354930 (TRBV5-1, TRBJ2-7)
CSSSLNGGPAREQYF

SEQ ID NO: 709861 - protein, 17 aa, Homo sapiens
  CDR3 for alpha chain variable domain of TCR clone 354931 (TRAV3, TRAJ6)
CAVRDGPRAGGNYLPTF

SEQ ID NO: 709862 - protein, 14 aa, Homo sapiens
  CDR3 for beta chain variable domain of TCR clone 354931 (TRBV7-2, TRBJ2-7)
CASSPKTSFYEQYF

SEQ ID NO: 709863 - protein, 16 aa, Homo sapiens
  CDR3 for alpha chain variable domain of TCR clone 354932 (TRAV21, TRAJ17)
CAVRPGEEAAGNKLAF

SEQ ID NO: 709864 - protein, 16 aa, Homo sapiens
  CDR3 for beta chain variable domain of TCR clone 354932 (TRBV2, TRBJ2-7)
CASSEPWTGPSYEQYF

SEQ ID NO: 709865 - protein, 16 aa, Homo sapiens
  CDR3 for alpha chain variable domain of TCR clone 354933 (TRAV3, TRAJ37)
CAVRGKGSGNTGKLIF

SEQ ID NO: 709866 - protein, 13 aa, Homo sapiens
  CDR3 for beta chain variable domain of TCR clone 354933 (TRBV15, TRBJ1-6)
CATSGGLNSPLHF

SEQ ID NO: 709867 - protein, 15 aa, Homo sapiens
  CDR3 for alpha chain variable domain of TCR clone 354934 (TRAV12-3, TRAJ49)
CAMAVTPNTGNQFYF

SEQ ID NO: 709868 - protein, 16 aa, Homo sapiens
  CDR3 for beta chain variable domain of TCR clone 354934 (TRBV20-1, TRBJ1-4)
CSAPGQGLLTNEKLFF

SEQ ID NO: 709869 - protein, 16 aa, Homo sapiens
  CDR3 for alpha chain variable domain of TCR clone 354935 (TRAV3, TRAJ32)
CAVRDMGGGSTNKLIF

SEQ ID NO: 709870 - protein, 11 aa, Homo sapiens
  CDR3 for beta chain variable domain of TCR clone 354935 (TRBV12-4, TRBJ2-1)
CASSRLNEQFF

SEQ ID NO: 709871 - protein, 13 aa, Homo sapiens
  CDR3 for alpha chain variable domain of TCR clone 354936 (TRAV8-2, TRAJ13)
CVVSYLRYQKVTF

SEQ ID NO: 709872 - protein, 14 aa, Homo sapiens
  CDR3 for beta chain variable domain of TCR clone 354936 (TRBV25-1, TRBJ1-1)
CASTHPGGNTEAFF

SEQ ID NO: 709873 - protein, 10 aa, Homo sapiens
  CDR3 for alpha chain variable domain of TCR clone 354937 (TRAV2, TRAJ15)
RGQAGTALIF

SEQ ID NO: 709874 - protein, 12 aa, Homo sapiens
  CDR3 for beta chain variable domain of TCR clone 354937 (TRBV11-2, TRBJ2-2)
CASSLGGGELSF

SEQ ID NO: 709875 - protein, 16 aa, Homo sapiens
  CDR3 for alpha chain variable domain of TCR clone 354938 (TRAV4, TRAJ22)
CLVGDLYSGSARQLTF

SEQ ID NO: 709876 - protein, 11 aa, Homo sapiens
  CDR3 for beta chain variable domain of TCR clone 354938 (TRBV11-2, TRBJ2-2)
CASSLPGELFF

SEQ ID NO: 709877 - protein, 15 aa, Homo sapiens
  CDR3 for alpha chain variable domain of TCR clone 354939 (TRAV17, TRAJ40)
CATVSSTSGTYKYIF

SEQ ID NO: 709878 - protein, 16 aa, Homo sapiens
  CDR3 for beta chain variable domain of TCR clone 354939 (TRBV4-1, TRBJ1-5)
CASSQGGHTTNQPQHF

SEQ ID NO: 709879 - protein, 13 aa, Homo sapiens
  CDR3 for alpha chain variable domain of TCR clone 354940 (TRAV3, TRAJ21)
CAVREPDFNKFYF

SEQ ID NO: 709880 - protein, 15 aa, Homo sapiens
  CDR3 for beta chain variable domain of TCR clone 354940 (TRBV6-5, TRBJ2-5)
CASSPTRQGGQTQYF

SEQ ID NO: 709881 - protein, 12 aa, Homo sapiens
  CDR3 for alpha chain variable domain of TCR clone 354941 (TRAV12-3, TRAJ17)
CAMTLTGNTLTF

SEQ ID NO: 709882 - protein, 13 aa, Homo sapiens
  CDR3 for beta chain variable domain of TCR clone 354941 (TRBV7-3, TRBJ1-1)
CASSQDWGAEAFF

SEQ ID NO: 709883 - protein, 13 aa, Homo sapiens
  CDR3 for alpha chain variable domain of TCR clone 354942 (TRAV24, TRAJ42)
CAFSTGSQGNRIF

SEQ ID NO: 709884 - protein, 11 aa, Homo sapiens
  CDR3 for beta chain variable domain of TCR clone 354942 (TRBV29-1, TRBJ2-5)
CSEDRTGTQYF

SEQ ID NO: 709885 - protein, 15 aa, Homo sapiens
  CDR3 for alpha chain variable domain of TCR clone 354943 (TRAV12-1, TRAJ45)
CVVLSGGGGADGLTF

SEQ ID NO: 709886 - protein, 14 aa, Homo sapiens
  CDR3 for beta chain variable domain of TCR clone 354943 (TRBV7-2, TRBJ2-7)
CASSFKTGATEQYF

SEQ ID NO: 709887 - protein, 17 aa, Homo sapiens
  CDR3 for alpha chain variable domain of TCR clone 354944 (TRAV1-1, TRAJ32)
CAVRVDELWWCYKQAHL

SEQ ID NO: 709888 - protein, 15 aa, Homo sapiens
  CDR3 for beta chain variable domain of TCR clone 354944 (TRBV11-2, TRBJ2-1)
CASSKNRGLIYEQFF

SEQ ID NO: 709889 - protein, 14 aa, Homo sapiens
  CDR3 for alpha chain variable domain of TCR clone 354945 (TRAV12-3, TRAJ10)
SHLPLTGGGNKLTF

SEQ ID NO: 709890 - protein, 15 aa, Homo sapiens
  CDR3 for beta chain variable domain of TCR clone 354945 (TRBV11-2, TRBJ1-3)
CPSSLDGTVGNTIYF

SEQ ID NO: 709891 - protein, 14 aa, Homo sapiens
  CDR3 for alpha chain variable domain of TCR clone 354946 (TRAV12-2, TRAJ45)
CALPERGGADGLTF

SEQ ID NO: 709892 - protein, 17 aa, Homo sapiens
  CDR3 for beta chain variable domain of TCR clone 354946 (TRBV7-2, TRBJ2-3)
CASSPQGRARVQDTQYF

SEQ ID NO: 709893 - protein, 16 aa, Homo sapiens
  CDR3 for alpha chain variable domain of TCR clone 354947 (TRAV30, TRAJ24)
CGTEIVDADSWGKFQF

SEQ ID NO: 709894 - protein, 15 aa, Homo sapiens
  CDR3 for beta chain variable domain of TCR clone 354947 (TRBV7-9, TRBJ1-4)
CASSARTGGNDNLFF

SEQ ID NO: 709895 - protein, 13 aa, Homo sapiens
  CDR3 for alpha chain variable domain of TCR clone 354948 (TRAV21, TRAJ27)
CAARPGNAGNSTF

SEQ ID NO: 709896 - protein, 16 aa, Homo sapiens
  CDR3 for beta chain variable domain of TCR clone 354948 (TRBV20-1, TRBJ1-2)
CSASMGQGVANYGYTF

SEQ ID NO: 709897 - protein, 14 aa, Homo sapiens
  CDR3 for alpha chain variable domain of TCR clone 354949 (TRAV2, TRAJ9)
CAVEDRSGGFKTIF

SEQ ID NO: 709898 - protein, 16 aa, Homo sapiens
  CDR3 for beta chain variable domain of TCR clone 354949 (TRBV7-3, TRBJ2-1)
CASSLEGYRSYYEQFF

SEQ ID NO: 709899 - protein, 13 aa, Homo sapiens
  CDR3 for alpha chain variable domain of TCR clone 354950 (TRAV1-2, TRAJ20)
CAVRDGNDYKLSF

SEQ ID NO: 709900 - protein, 19 aa, Homo sapiens
  CDR3 for beta chain variable domain of TCR clone 354950 (TRBV7-2, TRBJ2-3)
GRVSRGQQLRGGGRDTQYF

SEQ ID NO: 709901 - protein, 15 aa, Homo sapiens
  CDR3 for alpha chain variable domain of TCR clone 354951 (TRAV12-3, TRAJ27)
CAMRACNTNAGKSTL

SEQ ID NO: 709902 - protein, 13 aa, Homo sapiens
  CDR3 for beta chain variable domain of TCR clone 354951 (TRBV11-2, TRBJ2-5)
CASSRGPSETQYF

SEQ ID NO: 709903 - protein, 12 aa, Homo sapiens
  CDR3 for alpha chain variable domain of TCR clone 354952 (TRAV12-3, TRAJ3)
CSIDSSASKIIF

SEQ ID NO: 709904 - protein, 17 aa, Homo sapiens
  CDR3 for beta chain variable domain of TCR clone 354952 (TRBV7-9, TRBJ2-3)
CASSLEEAGAYPDTQYF

SEQ ID NO: 709905 - protein, 14 aa, Homo sapiens
  CDR3 for alpha chain variable domain of TCR clone 354953 (TRAV35, TRAJ44)
CAGRPSRTASKLTF

SEQ ID NO: 709906 - protein, 13 aa, Homo sapiens
  CDR3 for beta chain variable domain of TCR clone 354953 (TRBV7-3, TRBJ1-1)
CASSQDWGAEAFF

SEQ ID NO: 709907 - protein, 12 aa, Homo sapiens
  CDR3 for alpha chain variable domain of TCR clone 354954 (TRAV36/DV7, TRAJ54)
CAVVRGAQKLVF

SEQ ID NO: 709908 - protein, 15 aa, Homo sapiens
  CDR3 for beta chain variable domain of TCR clone 354954 (TRBV7-9, TRBJ1-4)
CASSARTGGNEKLFF

SEQ ID NO: 709909 - protein, 16 aa, Homo sapiens
  CDR3 for alpha chain variable domain of TCR clone 354955 (TRAV4, TRAJ22)
CLVGDLYSGSARQLTF

SEQ ID NO: 709910 - protein, 14 aa, Homo sapiens
  CDR3 for beta chain variable domain of TCR clone 354955 (TRBV28, TRBJ2-3)
CASSWRGRADTHYF

SEQ ID NO: 709911 - protein, 16 aa, Homo sapiens
  CDR3 for alpha chain variable domain of TCR clone 354956 (TRAV30, TRAJ24)
CGTEIVDAHSWGKFQF

SEQ ID NO: 709912 - protein, 15 aa, Homo sapiens
  CDR3 for beta chain variable domain of TCR clone 354956 (TRBV20-1, TRBJ2-7)
CSARDRVSGMDEQYF

SEQ ID NO: 709913 - protein, 14 aa, Homo sapiens
  CDR3 for alpha chain variable domain of TCR clone 354957 (TRAV14/DV4, TRAJ47)
CAMREGRGGNKLVF

SEQ ID NO: 709914 - protein, 14 aa, Homo sapiens
  CDR3 for beta chain variable domain of TCR clone 354957 (TRBV7-2, TRBJ2-7)
CASSPKTSFYEQYF

SEQ ID NO: 709915 - protein, 14 aa, Homo sapiens
  CDR3 for alpha chain variable domain of TCR clone 354958 (TRAV12-2, TRAJ44)
CAVNQAGTASKLTF

SEQ ID NO: 709916 - protein, 16 aa, Homo sapiens
  CDR3 for beta chain variable domain of TCR clone 354958 (TRBV2, TRBJ2-1)
CASSVGGSLSYNEQFF

SEQ ID NO: 709917 - protein, 14 aa, Homo sapiens
  CDR3 for alpha chain variable domain of TCR clone 354959 (TRAV13-1, TRAJ35)
CAASKGGFGNGLHC

SEQ ID NO: 709918 - protein, 16 aa, Homo sapiens
  CDR3 for beta chain variable domain of TCR clone 354959 (TRBV5-1, TRBJ2-2)
CASSSRTGGRTGELFF

SEQ ID NO: 709919 - protein, 17 aa, Homo sapiens
  CDR3 for alpha chain variable domain of TCR clone 354960 (TRAV8-3, TRAJ28)
CAVREAYSGAGSYQLTF

SEQ ID NO: 709920 - protein, 18 aa, Homo sapiens
  CDR3 for beta chain variable domain of TCR clone 354960 (TRBV27, TRBJ2-1)
CASGNRAVGVGSKNEQFF

SEQ ID NO: 709921 - protein, 12 aa, Homo sapiens
  CDR3 for alpha chain variable domain of TCR clone 354961 (TRAV1-1, TRAJ8)
CAEGTGFQQLVF

SEQ ID NO: 709922 - protein, 14 aa, Homo sapiens
  CDR3 for beta chain variable domain of TCR clone 354961 (TRBV12-5, TRBJ2-5)
CASGSRTHQETQYF

SEQ ID NO: 709923 - protein, 13 aa, Homo sapiens
  CDR3 for alpha chain variable domain of TCR clone 354962 (TRAV27, TRAJ56)
CAGKPGANSRLAF

SEQ ID NO: 709924 - protein, 18 aa, Homo sapiens
  CDR3 for beta chain variable domain of TCR clone 354962 (TRBV11-2, TRBJ2-3)
CASSLGGASRGAPNTQYF

SEQ ID NO: 709925 - protein, 18 aa, Homo sapiens
  CDR3 for alpha chain variable domain of TCR clone 354963 (TRAV13-1, TRAJ10)
FAASKGRAVTGGGNKLTF

SEQ ID NO: 709926 - protein, 14 aa, Homo sapiens
  CDR3 for beta chain variable domain of TCR clone 354963 (TRBV18, TRBJ2-7)
CASSPRGGAYEQYF

SEQ ID NO: 709927 - protein, 15 aa, Homo sapiens
  CDR3 for alpha chain variable domain of TCR clone 354964 (TRAV21, TRAJ24)
CAARSSTDSWGKLQF

SEQ ID NO: 709928 - protein, 14 aa, Homo sapiens
  CDR3 for beta chain variable domain of TCR clone 354964 (TRBV7-2, TRBJ2-7)
CASSLYPGRYEQYF

SEQ ID NO: 709929 - protein, 13 aa, Homo sapiens
  CDR3 for alpha chain variable domain of TCR clone 354965 (TRAV12-3, TRAJ13)
CAMTSGGYQKVTF

SEQ ID NO: 709930 - protein, 13 aa, Homo sapiens
  CDR3 for beta chain variable domain of TCR clone 354965 (TRBV20-1, TRBJ2-2)
CSALSGGAGQLFF

SEQ ID NO: 709931 - protein, 14 aa, Homo sapiens
  CDR3 for alpha chain variable domain of TCR clone 354966 (TRAV12-3, TRAJ10)
CAMTLTGGGNKLTF

SEQ ID NO: 709932 - protein, 14 aa, Homo sapiens
  CDR3 for beta chain variable domain of TCR clone 354966 (TRBV5-1, TRBJ2-7)
CASSRGESLYEQYF

SEQ ID NO: 709933 - protein, 16 aa, Homo sapiens
  CDR3 for alpha chain variable domain of TCR clone 354967 (TRAV3, TRAJ10)
CAVRDMRAGGGKKLTF

SEQ ID NO: 709934 - protein, 13 aa, Homo sapiens
  CDR3 for beta chain variable domain of TCR clone 354967 (TRBV20-1, TRBJ2-7)
CSARWGYNYEQYF

SEQ ID NO: 709935 - protein, 14 aa, Homo sapiens
  CDR3 for alpha chain variable domain of TCR clone 354968 (TRAV17, TRAJ45)
CATDGRGGADGLTF

SEQ ID NO: 709936 - protein, 14 aa, Homo sapiens
  CDR3 for beta chain variable domain of TCR clone 354968 (TRBV7-2, TRBJ1-1)
CASSFLTGTTEAFF

SEQ ID NO: 709937 - protein, 23 aa, Homo sapiens
  CDR3 for alpha chain variable domain of TCR clone 354969 (TRAV30, TRAJ43)
CTLRPPSSVTQEPTSAALSDMRF

SEQ ID NO: 709938 - protein, 13 aa, Homo sapiens
  CDR3 for beta chain variable domain of TCR clone 354969 (TRBV12-4, TRBJ2-2)
CASSITGYGELFF

SEQ ID NO: 709939 - protein, 19 aa, Homo sapiens
  CDR3 for alpha chain variable domain of TCR clone 354970 (TRAV3, TRAJ6)
CAVRDRNPSRSGGSYIPTF

SEQ ID NO: 709940 - protein, 15 aa, Homo sapiens
  CDR3 for beta chain variable domain of TCR clone 354970 (TRBV18, TRBJ2-7)
CASSPTVMDSYEQYL

SEQ ID NO: 709941 - protein, 16 aa, Homo sapiens
  CDR3 for alpha chain variable domain of TCR clone 354971 (TRAV30, TRAJ24)
CGTEIVDADSWGKFQF

SEQ ID NO: 709942 - protein, 14 aa, Homo sapiens
  CDR3 for beta chain variable domain of TCR clone 354971 (TRBV7-9, TRBJ2-4)
CASGLAMGGNIQYF

SEQ ID NO: 709943 - protein, 15 aa, Homo sapiens
  CDR3 for alpha chain variable domain of TCR clone 354972 (TRAV8-3, TRAJ37)
CAVGARASNTGKLIF

SEQ ID NO: 709944 - protein, 12 aa, Homo sapiens
  CDR3 for beta chain variable domain of TCR clone 354972 (TRBV7-3, TRBJ1-3)
CASSLGGNTMYF

SEQ ID NO: 709945 - protein, 19 aa, Homo sapiens
  CDR3 for alpha chain variable domain of TCR clone 354973 (TRAV26-1, TRAJ28)
CIVRVAHAYSGAGRYQLTF

SEQ ID NO: 709946 - protein, 15 aa, Homo sapiens
  CDR3 for beta chain variable domain of TCR clone 354973 (TRBV5-1, TRBJ1-3)
CASSSKAGAGNTIYF

SEQ ID NO: 709947 - protein, 18 aa, Homo sapiens
  CDR3 for alpha chain variable domain of TCR clone 354974 (TRAV21, TRAJ52)
CAVRPSPAGGTSYGKLTF

SEQ ID NO: 709948 - protein, 16 aa, Homo sapiens
  CDR3 for beta chain variable domain of TCR clone 354974 (TRBV13, TRBJ2-3)
CQQPLQGSGGSNTQYF

SEQ ID NO: 709949 - protein, 13 aa, Homo sapiens
  CDR3 for alpha chain variable domain of TCR clone 354975 (TRAV35, TRAJ32)
CAGVGGATNKLIF

SEQ ID NO: 709950 - protein, 17 aa, Homo sapiens
  CDR3 for beta chain variable domain of TCR clone 354975 (TRBV4-3, TRBJ2-1)
CASSQYSSGRASGEQFF

SEQ ID NO: 709951 - protein, 12 aa, Homo sapiens
  CDR3 for alpha chain variable domain of TCR clone 354976 (TRAV26-1, TRAJ33)
CIVKDSNYQLIW

SEQ ID NO: 709952 - protein, 14 aa, Homo sapiens
  CDR3 for beta chain variable domain of TCR clone 354976 (TRBV29-1, TRBJ1-1)
CSATGTVVFTEAFF

SEQ ID NO: 709953 - protein, 14 aa, Homo sapiens
  CDR3 for alpha chain variable domain of TCR clone 354977 (TRAV8-2, TRAJ4)
CVVSPSGGYNKLIF

SEQ ID NO: 709954 - protein, 15 aa, Homo sapiens
  CDR3 for beta chain variable domain of TCR clone 354977 (TRBV2, TRBJ2-7)
CASSPYGTGASEQYF

SEQ ID NO: 709955 - protein, 12 aa, Homo sapiens
  CDR3 for alpha chain variable domain of TCR clone 354978 (TRAV38-1, TRAJ34)
CAFMTLNRQAHL

SEQ ID NO: 709956 - protein, 14 aa, Homo sapiens
  CDR3 for beta chain variable domain of TCR clone 354978 (TRBV7-3, TRBJ2-1)
CASSLAGGTNEQFF

SEQ ID NO: 709957 - protein, 15 aa, Homo sapiens
  CDR3 for alpha chain variable domain of TCR clone 354979 (TRAV8-4, TRAJ3)
CAVTGENLVQQCFHD

SEQ ID NO: 709958 - protein, 16 aa, Homo sapiens
  CDR3 for beta chain variable domain of TCR clone 354979 (TRBV4-2, TRBJ1-1)
CASSQAGFGMNTEAFF

SEQ ID NO: 709959 - protein, 15 aa, Homo sapiens
  CDR3 for alpha chain variable domain of TCR clone 354980 (TRAV12-3, TRAJ6)
CAMSATTEGSYIPTF

SEQ ID NO: 709960 - protein, 15 aa, Homo sapiens
  CDR3 for beta chain variable domain of TCR clone 354980 (TRBV7-2, TRBJ2-5)
CASSGILAGAETQYF

SEQ ID NO: 709961 - protein, 16 aa, Homo sapiens
  CDR3 for alpha chain variable domain of TCR clone 354981 (TRAV13-1, TRAJ18)
CAASKMRGSTLGRLYF

SEQ ID NO: 709962 - protein, 16 aa, Homo sapiens
  CDR3 for beta chain variable domain of TCR clone 354981 (TRBV27, TRBJ1-1)
CASSSRGRTGYTEAFF

SEQ ID NO: 709963 - protein, 18 aa, Homo sapiens
  CDR3 for alpha chain variable domain of TCR clone 354982 (TRAV1-1, TRAJ12)
CLLLLRCERGDSSYKLIF

SEQ ID NO: 709964 - protein, 15 aa, Homo sapiens
  CDR3 for beta chain variable domain of TCR clone 354982 (TRBV18, TRBJ2-5)
CASTDRGPRQKTQYF

SEQ ID NO: 709965 - protein, 18 aa, Homo sapiens
  CDR3 for alpha chain variable domain of TCR clone 354983 (TRAV26-1, TRAJ5)
CIIRVVPPRDTGRRALTF

SEQ ID NO: 709966 - protein, 15 aa, Homo sapiens
  CDR3 for beta chain variable domain of TCR clone 354983 (TRBV7-9, TRBJ2-7)
CASSLPMGQANEQYF

SEQ ID NO: 709967 - protein, 14 aa, Homo sapiens
  CDR3 for alpha chain variable domain of TCR clone 354984 (TRAV8-3, TRAJ35)
CAVVPQCFGNVLHC

SEQ ID NO: 709968 - protein, 15 aa, Homo sapiens
  CDR3 for beta chain variable domain of TCR clone 354984 (TRBV27, TRBJ2-1)
CASSNGGGSSNEQFF

SEQ ID NO: 709969 - protein, 11 aa, Homo sapiens
  CDR3 for alpha chain variable domain of TCR clone 354985 (TRAV1-1, TRAJ23)
CAVRQGGKLIF

SEQ ID NO: 709970 - protein, 13 aa, Homo sapiens
  CDR3 for beta chain variable domain of TCR clone 354985 (TRBV20-1, TRBJ1-1)
CSAPLGGGTEAFF

SEQ ID NO: 709971 - protein, 13 aa, Homo sapiens
  CDR3 for alpha chain variable domain of TCR clone 354986 (TRAV17, TRAJ5)
FALRGTGRRALTF

SEQ ID NO: 709972 - protein, 13 aa, Homo sapiens
  CDR3 for beta chain variable domain of TCR clone 354986 (TRBV4-2, TRBJ1-1)
CASSQAGNTEAFF

SEQ ID NO: 709973 - protein, 11 aa, Homo sapiens
  CDR3 for alpha chain variable domain of TCR clone 354987 (TRAV12-2, TRAJ49)
CAVRSGNQFYF

SEQ ID NO: 709974 - protein, 18 aa, Homo sapiens
  CDR3 for beta chain variable domain of TCR clone 354987 (TRBV11-2, TRBJ2-3)
CASSLGGASRGAPNTQYF

SEQ ID NO: 709975 - protein, 13 aa, Homo sapiens
  CDR3 for alpha chain variable domain of TCR clone 354988 (TRAV21, TRAJ27)
CAARPGNAGKSTF

SEQ ID NO: 709976 - protein, 13 aa, Homo sapiens
  CDR3 for beta chain variable domain of TCR clone 354988 (TRBV20-1, TRBJ1-1)
CSAWGGGNTEAFF

SEQ ID NO: 709977 - protein, 14 aa, Homo sapiens
  CDR3 for alpha chain variable domain of TCR clone 354989 (TRAV12-2, TRAJ45)
CAVYSGGGADGLTF

SEQ ID NO: 709978 - protein, 13 aa, Homo sapiens
  CDR3 for beta chain variable domain of TCR clone 354989 (TRBV7-7, TRBJ2-3)
CASILSRADTQYC

SEQ ID NO: 709979 - protein, 18 aa, Homo sapiens
  CDR3 for alpha chain variable domain of TCR clone 354990 (TRAV26-1, TRAJ22)
CIVRVALISSGSARQLTS

SEQ ID NO: 709980 - protein, 13 aa, Homo sapiens
  CDR3 for beta chain variable domain of TCR clone 354990 (TRBV13, TRBJ2-5)
CASSPEVGDTQYF

SEQ ID NO: 709981 - protein, 12 aa, Homo sapiens
  CDR3 for alpha chain variable domain of TCR clone 354991 (TRAV3, TRAJ20)
CAVRDGDYKLSF

SEQ ID NO: 709982 - protein, 13 aa, Homo sapiens
  CDR3 for beta chain variable domain of TCR clone 354991 (TRBV9, TRBJ2-1)
CASSVAQGGEQFF

SEQ ID NO: 709983 - protein, 14 aa, Homo sapiens
  CDR3 for alpha chain variable domain of TCR clone 354992 (TRAV14/DV4, TRAJ34)
CAMREGRPHRQAHL

SEQ ID NO: 709984 - protein, 13 aa, Homo sapiens
  CDR3 for beta chain variable domain of TCR clone 354992 (TRBV4-2, TRBJ1-1)
CASSQAGNTEAFF

SEQ ID NO: 709985 - protein, 15 aa, Homo sapiens
  CDR3 for alpha chain variable domain of TCR clone 354993 (TRAV3, TRAJ17)
CAVSPKEAAGNKLTF

SEQ ID NO: 709986 - protein, 16 aa, Homo sapiens
  CDR3 for beta chain variable domain of TCR clone 354993 (TRBV7-3, TRBJ2-2)
CASSLKRGTLSGELFF

SEQ ID NO: 709987 - protein, 14 aa, Homo sapiens
  CDR3 for alpha chain variable domain of TCR clone 354994 (TRAV12-2, TRAJ36)
CAVKIPTGANNLFF

SEQ ID NO: 709988 - protein, 14 aa, Homo sapiens
  CDR3 for beta chain variable domain of TCR clone 354994 (TRBV25-1, TRBJ1-2)
CASSDTTGVVGYTF

SEQ ID NO: 709989 - protein, 11 aa, Homo sapiens
  CDR3 for alpha chain variable domain of TCR clone 354995 (TRAV2, TRAJ13)
CASGGYQKVTF

SEQ ID NO: 709990 - protein, 12 aa, Homo sapiens
  CDR3 for beta chain variable domain of TCR clone 354995 (TRBV12-4, TRBJ1-2)
CASSFIWLHLRF

SEQ ID NO: 709991 - protein, 12 aa, Homo sapiens
  CDR3 for alpha chain variable domain of TCR clone 354996 (TRAV12-1, TRAJ8)
CVVNKGFQKLVF

SEQ ID NO: 709992 - protein, 13 aa, Homo sapiens
  CDR3 for beta chain variable domain of TCR clone 354996 (TRBV7-9, TRBJ1-2)
CASSLKQNYGYTF

SEQ ID NO: 709993 - protein, 14 aa, Homo sapiens
  CDR3 for alpha chain variable domain of TCR clone 354997 (TRAV17, TRAJ42)
CATDAPGSQGNLIC

SEQ ID NO: 709994 - protein, 13 aa, Homo sapiens
  CDR3 for beta chain variable domain of TCR clone 354997 (TRBV7-7, TRBJ1-5)
CASSPGKNQPQHF

SEQ ID NO: 709995 - protein, 15 aa, Homo sapiens
  CDR3 for alpha chain variable domain of TCR clone 354998 (TRAV21, TRAJ57)
CAVIITQGGSQKLIF

SEQ ID NO: 709996 - protein, 14 aa, Homo sapiens
  CDR3 for beta chain variable domain of TCR clone 354998 (TRBV5-1, TRBJ2-2)
CASSLIWIPGELFF

SEQ ID NO: 709997 - protein, 16 aa, Homo sapiens
  CDR3 for alpha chain variable domain of TCR clone 354999 (TRAV12-3, TRAJ53)
CAMSPGSGGSNYKLTF

SEQ ID NO: 709998 - protein, 20 aa, Homo sapiens
  CDR3 for beta chain variable domain of TCR clone 354999 (TRBV7-8, TRBJ2-2)
CASSHSFPGPTVHITGELFF

SEQ ID NO: 709999 - protein, 15 aa, Homo sapiens
  CDR3 for alpha chain variable domain of TCR clone 355000 (TRAV12-2, TRAJ53)
SAVNGGGGSNYKLTF

SEQ ID NO: 710000 - protein, 14 aa, Homo sapiens
  CDR3 for beta chain variable domain of TCR clone 355000 (TRBV19, TRBJ2-2)
CASSTLHRSGELFF

SEQ ID NO: 710001 - protein, 16 aa, Homo sapiens
  CDR3 for alpha chain variable domain of TCR clone 355001 (TRAV27, TRAJ13)
CAGAKSDSGGYQKVTF

SEQ ID NO: 710002 - protein, 15 aa, Homo sapiens
  CDR3 for beta chain variable domain of TCR clone 355001 (TRBV29-1, TRBJ2-1)
CSVGKHALFYNEQFF

SEQ ID NO: 710003 - protein, 14 aa, Homo sapiens
  CDR3 for alpha chain variable domain of TCR clone 355002 (TRAV41, TRAJ48)
CAVRPHFGNEKLTF

SEQ ID NO: 710004 - protein, 16 aa, Homo sapiens
  CDR3 for beta chain variable domain of TCR clone 355002 (TRBV11-2, TRBJ2-7)
CASSPTTGGVSYEQYF

SEQ ID NO: 710005 - protein, 10 aa, Homo sapiens
  CDR3 for alpha chain variable domain of TCR clone 355003 (TRAV30, TRAJ16)
CGTGGQKLLF

SEQ ID NO: 710006 - protein, 15 aa, Homo sapiens
  CDR3 for beta chain variable domain of TCR clone 355003 (TRBV7-2, TRBJ2-1)
CASSSGLAGGNEQFF

SEQ ID NO: 710007 - protein, 14 aa, Homo sapiens
  CDR3 for alpha chain variable domain of TCR clone 355004 (TRAV2, TRAJ21)
CAVEDHNNFNKFYF

SEQ ID NO: 710008 - protein, 11 aa, Homo sapiens
  CDR3 for beta chain variable domain of TCR clone 355004 (TRBV10-3, TRBJ2-1)
CAISDRGLQFF

SEQ ID NO: 710009 - protein, 15 aa, Homo sapiens
  CDR3 for alpha chain variable domain of TCR clone 355005 (TRAV13-1, TRAJ44)
CAASRGGGTASKLTF

SEQ ID NO: 710010 - protein, 14 aa, Homo sapiens
  CDR3 for beta chain variable domain of TCR clone 355005 (TRBV11-2, TRBJ1-2)
CASSSGQAGDGYTF

SEQ ID NO: 710011 - protein, 16 aa, Homo sapiens
  CDR3 for alpha chain variable domain of TCR clone 355006 (TRAV26-1, TRAJ23)
CIVRVHPYNQGGKLIF

SEQ ID NO: 710012 - protein, 13 aa, Homo sapiens
  CDR3 for beta chain variable domain of TCR clone 355006 (TRBV7-8, TRBJ2-7)
RRVRLTEMGEQYF

SEQ ID NO: 710013 - protein, 15 aa, Homo sapiens
  CDR3 for alpha chain variable domain of TCR clone 355007 (TRAV20, TRAJ4)
CAVEGSSCGYNKLIF

SEQ ID NO: 710014 - protein, 14 aa, Homo sapiens
  CDR3 for beta chain variable domain of TCR clone 355007 (TRBV7-8, TRBJ2-7)
CASTLGGALGEQYF

SEQ ID NO: 710015 - protein, 13 aa, Homo sapiens
  CDR3 for alpha chain variable domain of TCR clone 355008 (TRAV12-2, TRAJ33)
CRERARSNYQLIW

SEQ ID NO: 710016 - protein, 12 aa, Homo sapiens
  CDR3 for beta chain variable domain of TCR clone 355008 (TRBV24-1, TRBJ2-3)
CATSDSTDTQYF

SEQ ID NO: 710017 - protein, 13 aa, Homo sapiens
  CDR3 for alpha chain variable domain of TCR clone 355009 (TRAV20, TRAJ54)
CALTFEGAQKLVF

SEQ ID NO: 710018 - protein, 13 aa, Homo sapiens
  CDR3 for beta chain variable domain of TCR clone 355009 (TRBV2, TRBJ1-1)
CASRWTVNTEAFF

SEQ ID NO: 710019 - protein, 13 aa, Homo sapiens
  CDR3 for alpha chain variable domain of TCR clone 355010 (TRAV8-6, TRAJ49)
CAVITNTGNQFYF

SEQ ID NO: 710020 - protein, 14 aa, Homo sapiens
  CDR3 for beta chain variable domain of TCR clone 355010 (TRBV7-9, TRBJ2-3)
CASSLEQGTNTQYF

SEQ ID NO: 710021 - protein, 16 aa, Homo sapiens
  CDR3 for alpha chain variable domain of TCR clone 355011 (TRAV27, TRAJ13)
CAGAKSDSGGYQKVTF

SEQ ID NO: 710022 - protein, 15 aa, Homo sapiens
  CDR3 for beta chain variable domain of TCR clone 355011 (TRBV29-1, TRBJ2-1)
CSVGRHALFYNEQLF

SEQ ID NO: 710023 - protein, 14 aa, Homo sapiens
  CDR3 for alpha chain variable domain of TCR clone 355012 (TRAV12-2, TRAJ13)
CAVKKTGGYQKVTF

SEQ ID NO: 710024 - protein, 15 aa, Homo sapiens
  CDR3 for beta chain variable domain of TCR clone 355012 (TRBV6-3, TRBJ2-7)
CASSSPGTVFFEQYF

SEQ ID NO: 710025 - protein, 10 aa, Homo sapiens
  CDR3 for alpha chain variable domain of TCR clone 355013 (TRAV1-2, TRAJ31)
FVSEDARLMF

SEQ ID NO: 710026 - protein, 14 aa, Homo sapiens
  CDR3 for beta chain variable domain of TCR clone 355013 (TRBV19, TRBJ2-1)
CASPTFVLSGEQFF

SEQ ID NO: 710027 - protein, 15 aa, Homo sapiens
  CDR3 for alpha chain variable domain of TCR clone 355014 (TRAV12-3, TRAJ6)
CAMSASTGGSYIPTF

SEQ ID NO: 710028 - protein, 16 aa, Homo sapiens
  CDR3 for beta chain variable domain of TCR clone 355014 (TRBV20-1, TRBJ1-2)
CSASMGQGVANYGYAF

SEQ ID NO: 710029 - protein, 14 aa, Homo sapiens
  CDR3 for alpha chain variable domain of TCR clone 355015 (TRAV13-1, TRAJ3)
CAAIKSGSASKIIF

SEQ ID NO: 710030 - protein, 13 aa, Homo sapiens
  CDR3 for beta chain variable domain of TCR clone 355015 (TRBV25-1, TRBJ2-5)
CASSESGRETQYF

SEQ ID NO: 710031 - protein, 18 aa, Homo sapiens
  CDR3 for alpha chain variable domain of TCR clone 355016 (TRAV6, TRAJ30)
CALEMTRSSLEKGHDFIF

SEQ ID NO: 710032 - protein, 18 aa, Homo sapiens
  CDR3 for beta chain variable domain of TCR clone 355016 (TRBV7-8, TRBJ2-3)
CASSSLPPSGRVFYTQYF

SEQ ID NO: 710033 - protein, 18 aa, Homo sapiens
  CDR3 for alpha chain variable domain of TCR clone 355017 (TRAV13-1, TRAJ52)
CAATNPNAGGTSYGKLTF

SEQ ID NO: 710034 - protein, 15 aa, Homo sapiens
  CDR3 for beta chain variable domain of TCR clone 355017 (TRBV11-3, TRBJ2-3)
CASLKDGREGDTQYF

SEQ ID NO: 710035 - protein, 14 aa, Homo sapiens
  CDR3 for alpha chain variable domain of TCR clone 355018 (TRAV8-4, TRAJ37)
CAVSESSNTGKLIF

SEQ ID NO: 710036 - protein, 16 aa, Homo sapiens
  CDR3 for beta chain variable domain of TCR clone 355018 (TRBV3-1, TRBJ1-2)
CASSQGQGVQRDGYTF

SEQ ID NO: 710037 - protein, 14 aa, Homo sapiens
  CDR3 for alpha chain variable domain of TCR clone 355019 (TRAV17, TRAJ34)
CATDNLEGTDKLIF

SEQ ID NO: 710038 - protein, 13 aa, Homo sapiens
  CDR3 for beta chain variable domain of TCR clone 355019 (TRBV11-2, TRBJ2-7)
CASSGTRPYEQYF

SEQ ID NO: 710039 - protein, 14 aa, Homo sapiens
  CDR3 for alpha chain variable domain of TCR clone 355020 (TRAV26-1, TRAJ38)
CIADNAGKNRKLIL

SEQ ID NO: 710040 - protein, 13 aa, Homo sapiens
  CDR3 for beta chain variable domain of TCR clone 355020 (TRBV20-1, TRBJ1-1)
CSARGGGNTEAFF

SEQ ID NO: 710041 - protein, 14 aa, Homo sapiens
  CDR3 for alpha chain variable domain of TCR clone 355021 (TRAV12-1, TRAJ26)
CVVKGSNYGQNFVF

SEQ ID NO: 710042 - protein, 12 aa, Homo sapiens
  CDR3 for beta chain variable domain of TCR clone 355021 (TRBV19, TRBJ2-1)
CASSRQGAEQFF

SEQ ID NO: 710043 - protein, 16 aa, Homo sapiens
  CDR3 for alpha chain variable domain of TCR clone 355022 (TRAV23/DV6, TRAJ9)
CAASIGGNTGGFKTIF

SEQ ID NO: 710044 - protein, 16 aa, Homo sapiens
  CDR3 for beta chain variable domain of TCR clone 355022 (TRBV5-4, TRBJ2-3)
CASQQPGAGGADTQYF

SEQ ID NO: 710045 - protein, 14 aa, Homo sapiens
  CDR3 for alpha chain variable domain of TCR clone 355023 (TRAV17, TRAJ22)
CPTVLSGSARQLTF

SEQ ID NO: 710046 - protein, 14 aa, Homo sapiens
  CDR3 for beta chain variable domain of TCR clone 355023 (TRBV19, TRBJ2-1)
CASPTFVLSGEQFF

SEQ ID NO: 710047 - protein, 14 aa, Homo sapiens
  CDR3 for alpha chain variable domain of TCR clone 355024 (TRAV27, TRAJ22)
CAGLPSVSARQLTF

SEQ ID NO: 710048 - protein, 16 aa, Homo sapiens
  CDR3 for beta chain variable domain of TCR clone 355024 (TRBV7-3, TRBJ2-2)
CASSLKRGTLSGELFF

SEQ ID NO: 710049 - protein, 16 aa, Homo sapiens
  CDR3 for alpha chain variable domain of TCR clone 355025 (TRAV8-4, TRAJ5)
CAVSPLTDTGRRALTF

SEQ ID NO: 710050 - protein, 14 aa, Homo sapiens
  CDR3 for beta chain variable domain of TCR clone 355025 (TRBV19, TRBJ1-6)
CASSTDGWNSPLHV

SEQ ID NO: 710051 - protein, 12 aa, Homo sapiens
  CDR3 for alpha chain variable domain of TCR clone 355026 (TRAV30, TRAJ43)
CGTEERGNDMRL

SEQ ID NO: 710052 - protein, 13 aa, Homo sapiens
  CDR3 for beta chain variable domain of TCR clone 355026 (TRBV11-1, TRBJ2-7)
CASSFSQGYEQYF

SEQ ID NO: 710053 - protein, 12 aa, Homo sapiens
  CDR3 for alpha chain variable domain of TCR clone 355027 (TRAV8-3, TRAJ26)
CAGDRYGQNFVF

SEQ ID NO: 710054 - protein, 13 aa, Homo sapiens
  CDR3 for beta chain variable domain of TCR clone 355027 (TRBV15, TRBJ1-6)
CATSGGLNSPLHF

SEQ ID NO: 710055 - protein, 14 aa, Homo sapiens
  CDR3 for alpha chain variable domain of TCR clone 355028 (TRAV12-3, TRAJ10)
SHLPLTGGGNKLTF

SEQ ID NO: 710056 - protein, 12 aa, Homo sapiens
  CDR3 for beta chain variable domain of TCR clone 355028 (TRBV28, TRBJ2-7)
CASSGRPYEQYF

SEQ ID NO: 710057 - protein, 15 aa, Homo sapiens
  CDR3 for alpha chain variable domain of TCR clone 355029 (TRAV2, TRAJ9)
CAVAAVNTGGFKTIF

SEQ ID NO: 710058 - protein, 17 aa, Homo sapiens
  CDR3 for beta chain variable domain of TCR clone 355029 (TRBV11-2, TRBJ2-1)
CASSLYPPGVEYNEQFF

SEQ ID NO: 710059 - protein, 13 aa, Homo sapiens
  CDR3 for alpha chain variable domain of TCR clone 355030 (TRAV12-3, TRAJ33)
CSMSVNSNYQLIW

SEQ ID NO: 710060 - protein, 15 aa, Homo sapiens
  CDR3 for beta chain variable domain of TCR clone 355030 (TRBV20-1, TRBJ2-7)
CSARDRVSGMDEQYF

SEQ ID NO: 710061 - protein, 14 aa, Homo sapiens
  CDR3 for alpha chain variable domain of TCR clone 355031 (TRAV1-1, TRAJ23)
CAVSIYNQGGKLIF

SEQ ID NO: 710062 - protein, 15 aa, Homo sapiens
  CDR3 for beta chain variable domain of TCR clone 355031 (TRBV2, TRBJ1-6)
CASRIMAGENSPLHF

SEQ ID NO: 710063 - protein, 13 aa, Homo sapiens
  CDR3 for alpha chain variable domain of TCR clone 355032 (TRAV36/DV7, TRAJ29)
CAVEPPGNTPLVF

SEQ ID NO: 710064 - protein, 15 aa, Homo sapiens
  CDR3 for beta chain variable domain of TCR clone 355032 (TRBV27, TRBJ1-6)
CASSFDRGLGSPLHF

SEQ ID NO: 710065 - protein, 12 aa, Homo sapiens
  CDR3 for alpha chain variable domain of TCR clone 355033 (TRAV29/DV5, TRAJ49)
CAASAIGNQFSF

SEQ ID NO: 710066 - protein, 17 aa, Homo sapiens
  CDR3 for beta chain variable domain of TCR clone 355033 (TRBV5-1, TRBJ2-2)
CASSRTSGRFSTEELFF

SEQ ID NO: 710067 - protein, 12 aa, Homo sapiens
  CDR3 for alpha chain variable domain of TCR clone 355034 (TRAV3, TRAJ20)
CAVRDPDYKLSF

SEQ ID NO: 710068 - protein, 15 aa, Homo sapiens
  CDR3 for beta chain variable domain of TCR clone 355034 (TRBV10-3, TRBJ2-5)
CAISESRDRGETQYF

SEQ ID NO: 710069 - protein, 12 aa, Homo sapiens
  CDR3 for alpha chain variable domain of TCR clone 355035 (TRAV17, TRAJ30)
CATDARDDKIIF

SEQ ID NO: 710070 - protein, 15 aa, Homo sapiens
  CDR3 for beta chain variable domain of TCR clone 355035 (TRBV4-1, TRBJ2-1)
CASSPGGELYNEQFF

SEQ ID NO: 710071 - protein, 13 aa, Homo sapiens
  CDR3 for alpha chain variable domain of TCR clone 355036 (TRAV17, TRAJ5)
CAPMDTGRRALTF

SEQ ID NO: 710072 - protein, 14 aa, Homo sapiens
  CDR3 for beta chain variable domain of TCR clone 355036 (TRBV19, TRBJ2-1)
CASSPGLAPNEHFF

SEQ ID NO: 710073 - protein, 16 aa, Homo sapiens
  CDR3 for alpha chain variable domain of TCR clone 355037 (TRAV12-2, TRAJ40)
YAVIRGGTSGTYKYIF

SEQ ID NO: 710074 - protein, 15 aa, Homo sapiens
  CDR3 for beta chain variable domain of TCR clone 355037 (TRBV29-1, TRBJ2-1)
CSGRDRKSSYNEQFF

SEQ ID NO: 710075 - protein, 12 aa, Homo sapiens
  CDR3 for alpha chain variable domain of TCR clone 355038 (TRAV12-3, TRAJ5)
CAMDTGRRALTF

SEQ ID NO: 710076 - protein, 13 aa, Homo sapiens
  CDR3 for beta chain variable domain of TCR clone 355038 (TRBV7-7, TRBJ2-2)
CASSLTSAWELFF

SEQ ID NO: 710077 - protein, 15 aa, Homo sapiens
  CDR3 for alpha chain variable domain of TCR clone 355039 (TRAV26-1, TRAJ21)
CIVRVPNYNFTKFYF

SEQ ID NO: 710078 - protein, 16 aa, Homo sapiens
  CDR3 for beta chain variable domain of TCR clone 355039 (TRBV7-9, TRBJ2-3)
CASSLQGNPGTDTQYF

SEQ ID NO: 710079 - protein, 15 aa, Homo sapiens
  CDR3 for alpha chain variable domain of TCR clone 355040 (TRAV26-1, TRAJ42)
CIVRVKGGSQGNLIF

SEQ ID NO: 710080 - protein, 15 aa, Homo sapiens
  CDR3 for beta chain variable domain of TCR clone 355040 (TRBV20-1, TRBJ2-5)
CSAEGTGGLQETQYF

SEQ ID NO: 710081 - protein, 14 aa, Homo sapiens
  CDR3 for alpha chain variable domain of TCR clone 355041 (TRAV12-3, TRAJ10)
SHLPLTGGGNKLIF

SEQ ID NO: 710082 - protein, 16 aa, Homo sapiens
  CDR3 for beta chain variable domain of TCR clone 355041 (TRBV19, TRBJ1-1)
CASRFGGPVTGTEAFF

SEQ ID NO: 710083 - protein, 14 aa, Homo sapiens
  CDR3 for alpha chain variable domain of TCR clone 355042 (TRAV12-1, TRAJ12)
CVVTRMDSSYKLIF

SEQ ID NO: 710084 - protein, 13 aa, Homo sapiens
  CDR3 for beta chain variable domain of TCR clone 355042 (TRBV20-1, TRBJ1-1)
YSARGGGNTEAFF

SEQ ID NO: 710085 - protein, 13 aa, Homo sapiens
  CDR3 for alpha chain variable domain of TCR clone 355043 (TRAV12-1, TRAJ33)
CGDAPNSNYQLIW

SEQ ID NO: 710086 - protein, 15 aa, Homo sapiens
  CDR3 for beta chain variable domain of TCR clone 355043 (TRBV27, TRBJ2-1)
CASSNGGGSSNEQFF

SEQ ID NO: 710087 - protein, 13 aa, Homo sapiens
  CDR3 for alpha chain variable domain of TCR clone 355044 (TRAV26-1, TRAJ34)
CIVRGHKTDKLIF

SEQ ID NO: 710088 - protein, 15 aa, Homo sapiens
  CDR3 for beta chain variable domain of TCR clone 355044 (TRBV4-1, TRBJ2-7)
CASSQEWGPSYEQYF

SEQ ID NO: 710089 - protein, 15 aa, Homo sapiens
  CDR3 for alpha chain variable domain of TCR clone 355045 (TRAV26-1, TRAJ48)
CIARWSWFGNEKLTF

SEQ ID NO: 710090 - protein, 12 aa, Homo sapiens
  CDR3 for beta chain variable domain of TCR clone 355045 (TRBV19, TRBJ2-5)
CASSMSEETQYF

SEQ ID NO: 710091 - protein, 12 aa, Homo sapiens
  CDR3 for alpha chain variable domain of TCR clone 355046 (TRAV12-1, TRAJ34)
CVVTFNTDKLIF

SEQ ID NO: 710092 - protein, 14 aa, Homo sapiens
  CDR3 for beta chain variable domain of TCR clone 355046 (TRBV19, TRBJ1-1)
CASLRTRLNTEAFF

SEQ ID NO: 710093 - protein, 11 aa, Homo sapiens
  CDR3 for alpha chain variable domain of TCR clone 355047 (TRAV1-1, TRAJ20)
CAVFTDYKLSF

SEQ ID NO: 710094 - protein, 14 aa, Homo sapiens
  CDR3 for beta chain variable domain of TCR clone 355047 (TRBV19, TRBJ2-1)
CASSKDRGQDEQFF

SEQ ID NO: 710095 - protein, 13 aa, Homo sapiens
  CDR3 for alpha chain variable domain of TCR clone 355048 (TRAV20, TRAJ31)
CAVQAIGGARLMF

SEQ ID NO: 710096 - protein, 13 aa, Homo sapiens
  CDR3 for beta chain variable domain of TCR clone 355048 (TRBV12-5, TRBJ2-3)
CASGDRQSDTQYF

SEQ ID NO: 710097 - protein, 13 aa, Homo sapiens
  CDR3 for alpha chain variable domain of TCR clone 355049 (TRAV9-2, TRAJ39)
CALQNNAGNMLTF

SEQ ID NO: 710098 - protein, 14 aa, Homo sapiens
  CDR3 for beta chain variable domain of TCR clone 355049 (TRBV12-5, TRBJ2-5)
CASGSRTHQETQYF

SEQ ID NO: 710099 - protein, 14 aa, Homo sapiens
  CDR3 for alpha chain variable domain of TCR clone 355050 (TRAV8-4, TRAJ8)
CAVSEDTGFQKLVF

SEQ ID NO: 710100 - protein, 16 aa, Homo sapiens
  CDR3 for beta chain variable domain of TCR clone 355050 (TRBV7-3, TRBJ2-1)
CASSKPLAGGYDEQFF

SEQ ID NO: 710101 - protein, 12 aa, Homo sapiens
  CDR3 for alpha chain variable domain of TCR clone 355051 (TRAV14/DV4, TRAJ31)
CAVNTPDARLMF

SEQ ID NO: 710102 - protein, 12 aa, Homo sapiens
  CDR3 for beta chain variable domain of TCR clone 355051 (TRBV12-4, TRBJ2-7)
CASSLGGYEQYF

SEQ ID NO: 710103 - protein, 13 aa, Homo sapiens
  CDR3 for alpha chain variable domain of TCR clone 355052 (TRAV1-1, TRAJ33)
CASHMDSNYQLIW

SEQ ID NO: 710104 - protein, 18 aa, Homo sapiens
  CDR3 for beta chain variable domain of TCR clone 355052 (TRBV20-1, TRBJ2-2)
SSARVQTARPSGTGELFF

SEQ ID NO: 710105 - protein, 17 aa, Homo sapiens
  CDR3 for alpha chain variable domain of TCR clone 355053 (TRAV3, TRAJ6)
RAVRDGPRAGGSYIPTI

SEQ ID NO: 710106 - protein, 20 aa, Homo sapiens
  CDR3 for beta chain variable domain of TCR clone 355053 (TRBV28, TRBJ2-1)
CASTPIGRSPGLAGGNEQFF

SEQ ID NO: 710107 - protein, 12 aa, Homo sapiens
  CDR3 for alpha chain variable domain of TCR clone 355054 (TRAV13-1, TRAJ26)
QVQDNYGQNFVF

SEQ ID NO: 710108 - protein, 13 aa, Homo sapiens
  CDR3 for beta chain variable domain of TCR clone 355054 (TRBV7-9, TRBJ2-7)
CASSAGLKYEQYF

SEQ ID NO: 710109 - protein, 13 aa, Homo sapiens
  CDR3 for alpha chain variable domain of TCR clone 355055 (TRAV8-6, TRAJ49)
CAVITNTGNQFYF

SEQ ID NO: 710110 - protein, 16 aa, Homo sapiens
  CDR3 for beta chain variable domain of TCR clone 355055 (TRBV4-1, TRBJ1-2)
CASSQCAGQVLYGYTF

SEQ ID NO: 710111 - protein, 14 aa, Homo sapiens
  CDR3 for alpha chain variable domain of TCR clone 355056 (TRAV12-2, TRAJ13)
CAVKKTGGYKKVTF

SEQ ID NO: 710112 - protein, 14 aa, Homo sapiens
  CDR3 for beta chain variable domain of TCR clone 355056 (TRBV6-1, TRBJ1-3)
CASVQGGGGNTIYF

SEQ ID NO: 710113 - protein, 14 aa, Homo sapiens
  CDR3 for alpha chain variable domain of TCR clone 355057 (TRAV1-2, TRAJ16)
CAVNRFSDGQKLLF

SEQ ID NO: 710114 - protein, 17 aa, Homo sapiens
  CDR3 for beta chain variable domain of TCR clone 355057 (TRBV9, TRBJ1-6)
CASSVAGTGDSPLHLGT

SEQ ID NO: 710115 - protein, 15 aa, Homo sapiens
  CDR3 for alpha chain variable domain of TCR clone 355058 (TRAV17, TRAJ16)
CATALRFSDGQKLLF

SEQ ID NO: 710116 - protein, 19 aa, Homo sapiens
  CDR3 for beta chain variable domain of TCR clone 355058 (TRBV25-1, TRBJ2-2)
CAILVYRVGRGRKTGELFF

SEQ ID NO: 710117 - protein, 14 aa, Homo sapiens
  CDR3 for alpha chain variable domain of TCR clone 355059 (TRAV17, TRAJ49)
CATDARDTGNQFYF

SEQ ID NO: 710118 - protein, 16 aa, Homo sapiens
  CDR3 for beta chain variable domain of TCR clone 355059 (TRBV4-3, TRBJ2-1)
CASSPALDRGVNEQFF

SEQ ID NO: 710119 - protein, 12 aa, Homo sapiens
  CDR3 for alpha chain variable domain of TCR clone 355060 (TRAV12-1, TRAJ34)
CVVAGATDKLIF

SEQ ID NO: 710120 - protein, 13 aa, Homo sapiens
  CDR3 for beta chain variable domain of TCR clone 355060 (TRBV7-9, TRBJ2-1)
CASSSSNFNEQFF

SEQ ID NO: 710121 - protein, 11 aa, Homo sapiens
  CDR3 for alpha chain variable domain of TCR clone 355061 (TRAV12-2, TRAJ49)
CALQGGNQSYF

SEQ ID NO: 710122 - protein, 13 aa, Homo sapiens
  CDR3 for beta chain variable domain of TCR clone 355061 (TRBV4-1, TRBJ1-1)
CASSQLGTGEAFF

SEQ ID NO: 710123 - protein, 14 aa, Homo sapiens
  CDR3 for alpha chain variable domain of TCR clone 355062 (TRAV12-3, TRAJ10)
SHLPLTGGGNKLTF

SEQ ID NO: 710124 - protein, 15 aa, Homo sapiens
  CDR3 for beta chain variable domain of TCR clone 355062 (TRBV5-5, TRBJ2-2)
CASSRQASGAGELFF

SEQ ID NO: 710125 - protein, 14 aa, Homo sapiens
  CDR3 for alpha chain variable domain of TCR clone 355063 (TRAV13-2, TRAJ26)
CAENLGNYGQNLVF

SEQ ID NO: 710126 - protein, 14 aa, Homo sapiens
  CDR3 for beta chain variable domain of TCR clone 355063 (TRBV19, TRBJ1-3)
CASNRGNSGNTIYF

SEQ ID NO: 710127 - protein, 14 aa, Homo sapiens
  CDR3 for alpha chain variable domain of TCR clone 355064 (TRAV8-1, TRAJ34)
CAVNPSYNTDKLIF

SEQ ID NO: 710128 - protein, 13 aa, Homo sapiens
  CDR3 for beta chain variable domain of TCR clone 355064 (TRBV7-9, TRBJ1-2)
CASSLKQNYGYTF

SEQ ID NO: 710129 - protein, 13 aa, Homo sapiens
  CDR3 for alpha chain variable domain of TCR clone 355065 (TRAV1-1, TRAJ33)
CASHMDSNYQLIW

SEQ ID NO: 710130 - protein, 16 aa, Homo sapiens
  CDR3 for beta chain variable domain of TCR clone 355065 (TRBV7-3, TRBJ2-2)
CASSLKRGTLSGELFF

SEQ ID NO: 710131 - protein, 13 aa, Homo sapiens
  CDR3 for alpha chain variable domain of TCR clone 355066 (TRAV20, TRAJ48)
CAVQGVGNEKLTC

SEQ ID NO: 710132 - protein, 14 aa, Homo sapiens
  CDR3 for beta chain variable domain of TCR clone 355066 (TRBV27, TRBJ2-7)
CASSFRDGPYEQYF

SEQ ID NO: 710133 - protein, 14 aa, Homo sapiens
  CDR3 for alpha chain variable domain of TCR clone 355067 (TRAV17, TRAJ54)
CATDANQGAQKLVF

SEQ ID NO: 710134 - protein, 13 aa, Homo sapiens
  CDR3 for beta chain variable domain of TCR clone 355067 (TRBV27, TRBJ1-4)
CASSLMGDEKLFF

SEQ ID NO: 710135 - protein, 17 aa, Homo sapiens
  CDR3 for alpha chain variable domain of TCR clone 355068 (TRAV3, TRAJ12)
CAARDGGRMDSSYKLIL

SEQ ID NO: 710136 - protein, 14 aa, Homo sapiens
  CDR3 for beta chain variable domain of TCR clone 355068 (TRBV7-9, TRBJ1-2)
CASSRQGANYGYTF

SEQ ID NO: 710137 - protein, 14 aa, Homo sapiens
  CDR3 for alpha chain variable domain of TCR clone 355069 (TRAV12-3, TRAJ42)
CAMNYGGSQGNLIF

SEQ ID NO: 710138 - protein, 15 aa, Homo sapiens
  CDR3 for beta chain variable domain of TCR clone 355069 (TRBV7-9, TRBJ2-5)
CASSDTGRGRETQYF

SEQ ID NO: 710139 - protein, 12 aa, Homo sapiens
  CDR3 for alpha chain variable domain of TCR clone 355070 (TRAV13-1, TRAJ53)
AASGGSNYKLTF

SEQ ID NO: 710140 - protein, 15 aa, Homo sapiens
  CDR3 for beta chain variable domain of TCR clone 355070 (TRBV5-1, TRBJ2-1)
CASSPPRAPYSEQFF

SEQ ID NO: 710141 - protein, 13 aa, Homo sapiens
  CDR3 for alpha chain variable domain of TCR clone 355071 (TRAV2, TRAJ15)
CAVASQAGTALIF

SEQ ID NO: 710142 - protein, 14 aa, Homo sapiens
  CDR3 for beta chain variable domain of TCR clone 355071 (TRBV4-1, TRBJ1-1)
CASSRSGQSFEAFF

SEQ ID NO: 710143 - protein, 16 aa, Homo sapiens
  CDR3 for alpha chain variable domain of TCR clone 355072 (TRAV35, TRAJ28)
CAGQKYYGAGSYQLTF

SEQ ID NO: 710144 - protein, 13 aa, Homo sapiens
  CDR3 for beta chain variable domain of TCR clone 355072 (TRBV20-1, TRBJ2-7)
CSAQTGLSYEQYF

SEQ ID NO: 710145 - protein, 12 aa, Homo sapiens
  CDR3 for alpha chain variable domain of TCR clone 355073 (TRAV17, TRAJ57)
CATDGGSEKLVF

SEQ ID NO: 710146 - protein, 13 aa, Homo sapiens
  CDR3 for beta chain variable domain of TCR clone 355073 (TRBV7-9, TRBJ2-7)
CASSFAGAYEKYF

SEQ ID NO: 710147 - protein, 15 aa, Homo sapiens
  CDR3 for alpha chain variable domain of TCR clone 355074 (TRAV8-4, TRAJ47)
CAVSDPEEYGNKLVF

SEQ ID NO: 710148 - protein, 15 aa, Homo sapiens
  CDR3 for beta chain variable domain of TCR clone 355074 (TRBV11-2, TRBJ2-1)
CVSSLGPDSYNEQFF

SEQ ID NO: 710149 - protein, 13 aa, Homo sapiens
  CDR3 for alpha chain variable domain of TCR clone 355075 (TRAV1-2, TRAJ9)
CAALNTGGFKTIF

SEQ ID NO: 710150 - protein, 13 aa, Homo sapiens
  CDR3 for beta chain variable domain of TCR clone 355075 (TRBV7-9, TRBJ2-5)
CASLPSGRETQYF

SEQ ID NO: 710151 - protein, 14 aa, Homo sapiens
  CDR3 for alpha chain variable domain of TCR clone 355076 (TRAV35, TRAJ39)
CAGQLGNAGNMLTF

SEQ ID NO: 710152 - protein, 13 aa, Homo sapiens
  CDR3 for beta chain variable domain of TCR clone 355076 (TRBV7-2, TRBJ2-5)
CASSQTSVETQYF

SEQ ID NO: 710153 - protein, 10 aa, Homo sapiens
  CDR3 for alpha chain variable domain of TCR clone 355077 (TRAV16, TRAJ22)
SAMYLPQLTF

SEQ ID NO: 710154 - protein, 15 aa, Homo sapiens
  CDR3 for beta chain variable domain of TCR clone 355077 (TRBV7-9, TRBJ1-6)
CASSSPGRGNSPLHF

SEQ ID NO: 710155 - protein, 14 aa, Homo sapiens
  CDR3 for alpha chain variable domain of TCR clone 355078 (TRAV17, TRAJ35)
CATDRPGFGNELHC

SEQ ID NO: 710156 - protein, 19 aa, Homo sapiens
  CDR3 for beta chain variable domain of TCR clone 355078 (TRBV11-3, TRBJ2-2)
CASSTRPGAKTTNTGELFF

SEQ ID NO: 710157 - protein, 21 aa, Homo sapiens
  CDR3 for alpha chain variable domain of TCR clone 355079 (TRAV1-1, TRAJ20)
CAVRDRTTSSALEPEPQSLYE

SEQ ID NO: 710158 - protein, 18 aa, Homo sapiens
  CDR3 for beta chain variable domain of TCR clone 355079 (TRBV20-1, TRBJ2-6)
CSDETTPTHGSEANVLTF

SEQ ID NO: 710159 - protein, 14 aa, Homo sapiens
  CDR3 for alpha chain variable domain of TCR clone 355080 (TRAV13-2, TRAJ4)
CAEKGPKGYNKLMF

SEQ ID NO: 710160 - protein, 13 aa, Homo sapiens
  CDR3 for beta chain variable domain of TCR clone 355080 (TRBV18, TRBJ2-5)
CASSPPGKETQYF

SEQ ID NO: 710161 - protein, 14 aa, Homo sapiens
  CDR3 for alpha chain variable domain of TCR clone 355081 (TRAV12-1, TRAJ43)
CVVNGRSNNNDMRF

SEQ ID NO: 710162 - protein, 13 aa, Homo sapiens
  CDR3 for beta chain variable domain of TCR clone 355081 (TRBV27, TRBJ1-1)
CASSVSIGAEAFF

SEQ ID NO: 710163 - protein, 11 aa, Homo sapiens
  CDR3 for alpha chain variable domain of TCR clone 355082 (TRAV21, TRAJ11)
CAVNGYSTLTF

SEQ ID NO: 710164 - protein, 13 aa, Homo sapiens
  CDR3 for beta chain variable domain of TCR clone 355082 (TRBV7-3, TRBJ1-2)
CASSLNAGGFHTF

SEQ ID NO: 710165 - protein, 13 aa, Homo sapiens
  CDR3 for alpha chain variable domain of TCR clone 355083 (TRAV26-1, TRAJ48)
CIVLRVRNEKLTF

SEQ ID NO: 710166 - protein, 14 aa, Homo sapiens
  CDR3 for beta chain variable domain of TCR clone 355083 (TRBV7-2, TRBJ2-7)
CASRSQGAAYEQYF

SEQ ID NO: 710167 - protein, 14 aa, Homo sapiens
  CDR3 for alpha chain variable domain of TCR clone 355084 (TRAV35, TRAJ39)
CAGQLGNAGNMLTF

SEQ ID NO: 710168 - protein, 15 aa, Homo sapiens
  CDR3 for beta chain variable domain of TCR clone 355084 (TRBV20-1, TRBJ2-7)
CSARDRVSGMDEQYF

SEQ ID NO: 710169 - protein, 14 aa, Homo sapiens
  CDR3 for alpha chain variable domain of TCR clone 355085 (TRAV9-2, TRAJ24)
CALNPRGSWGKLQF

SEQ ID NO: 710170 - protein, 16 aa, Homo sapiens
  CDR3 for beta chain variable domain of TCR clone 355085 (TRBV12-4, TRBJ1-5)
CASSRPVGGSNQPQHF

SEQ ID NO: 710171 - protein, 16 aa, Homo sapiens
  CDR3 for alpha chain variable domain of TCR clone 355086 (TRAV12-3, TRAJ53)
CAMSPGSGGSNYKLIF

SEQ ID NO: 710172 - protein, 15 aa, Homo sapiens
  CDR3 for beta chain variable domain of TCR clone 355086 (TRBV18, TRBJ2-7)
CASSPSSTGNYEQYF

SEQ ID NO: 710173 - protein, 11 aa, Homo sapiens
  CDR3 for alpha chain variable domain of TCR clone 355087 (TRAV1-2, TRAJ20)
CAASNDYKLSF

SEQ ID NO: 710174 - protein, 13 aa, Homo sapiens
  CDR3 for beta chain variable domain of TCR clone 355087 (TRBV7-9, TRBJ1-2)
CASSLKQNYGYTF

SEQ ID NO: 710175 - protein, 14 aa, Homo sapiens
  CDR3 for alpha chain variable domain of TCR clone 355088 (TRAV1-2, TRAJ6)
CAVTLSGGSYIPTF

SEQ ID NO: 710176 - protein, 15 aa, Homo sapiens
  CDR3 for beta chain variable domain of TCR clone 355088 (TRBV28, TRBJ2-7)
CASSPGGRGFYEQYF

SEQ ID NO: 710177 - protein, 14 aa, Homo sapiens
  CDR3 for alpha chain variable domain of TCR clone 355089 (TRAV8-3, TRAJ15)
CAVGGHQAGTALIF

SEQ ID NO: 710178 - protein, 13 aa, Homo sapiens
  CDR3 for beta chain variable domain of TCR clone 355089 (TRBV9, TRBJ2-7)
CASSASDSYEQYF

SEQ ID NO: 710179 - protein, 17 aa, Homo sapiens
  CDR3 for alpha chain variable domain of TCR clone 355090 (TRAV14/DV4, TRAJ4)
CAMREASGRGGYNKLIF

SEQ ID NO: 710180 - protein, 14 aa, Homo sapiens
  CDR3 for beta chain variable domain of TCR clone 355090 (TRBV19, TRBJ2-7)
CTSSMGQGAIEQYF

SEQ ID NO: 710181 - protein, 14 aa, Homo sapiens
  CDR3 for alpha chain variable domain of TCR clone 355091 (TRAV13-1, TRAJ48)
CAASRSFGNEKLTF

SEQ ID NO: 710182 - protein, 16 aa, Homo sapiens
  CDR3 for beta chain variable domain of TCR clone 355091 (TRBV7-9, TRBJ2-1)
CASSDVAGGSYNEQFF

SEQ ID NO: 710183 - protein, 15 aa, Homo sapiens
  CDR3 for alpha chain variable domain of TCR clone 355092 (TRAV21, TRAJ38)
CAVRQDAGNNRKLIW

SEQ ID NO: 710184 - protein, 14 aa, Homo sapiens
  CDR3 for beta chain variable domain of TCR clone 355092 (TRBV12-5, TRBJ2-5)
CASGSRTHQETQYF

SEQ ID NO: 710185 - protein, 13 aa, Homo sapiens
  CDR3 for alpha chain variable domain of TCR clone 355093 (TRAV27, TRAJ27)
CAGGITNACKSTF

SEQ ID NO: 710186 - protein, 13 aa, Homo sapiens
  CDR3 for beta chain variable domain of TCR clone 355093 (TRBV20-1, TRBJ1-2)
CSASLGVGYGYTF

SEQ ID NO: 710187 - protein, 11 aa, Homo sapiens
  CDR3 for alpha chain variable domain of TCR clone 355094 (TRAV16, TRAJ33)
CALHSNYQLIW

SEQ ID NO: 710188 - protein, 13 aa, Homo sapiens
  CDR3 for beta chain variable domain of TCR clone 355094 (TRBV28, TRBJ2-7)
CASSVTWDREMYF

SEQ ID NO: 710189 - protein, 12 aa, Homo sapiens
  CDR3 for alpha chain variable domain of TCR clone 355095 (TRAV13-1, TRAJ11)
CAASKGYSTLTF

SEQ ID NO: 710190 - protein, 11 aa, Homo sapiens
  CDR3 for beta chain variable domain of TCR clone 355095 (TRBV7-6, TRBJ2-5)
CASSSQETQYF

SEQ ID NO: 710191 - protein, 11 aa, Homo sapiens
  CDR3 for alpha chain variable domain of TCR clone 355096 (TRAV2, TRAJ21)
CAVFNFNKFYF

SEQ ID NO: 710192 - protein, 15 aa, Homo sapiens
  CDR3 for beta chain variable domain of TCR clone 355096 (TRBV7-9, TRBJ1-6)
CASSSPGRGNSPLHF

SEQ ID NO: 710193 - protein, 16 aa, Homo sapiens
  CDR3 for alpha chain variable domain of TCR clone 355097 (TRAV13-1, TRAJ10)
CAASSHFTGGGNKLTF

SEQ ID NO: 710194 - protein, 15 aa, Homo sapiens
  CDR3 for beta chain variable domain of TCR clone 355097 (TRBV7-9, TRBJ1-6)
CASSAPGRGNSPLHF

SEQ ID NO: 710195 - protein, 13 aa, Homo sapiens
  CDR3 for alpha chain variable domain of TCR clone 355098 (TRAV36/DV7, TRAJ54)
CAVDIQGAQKLVF

SEQ ID NO: 710196 - protein, 16 aa, Homo sapiens
  CDR3 for beta chain variable domain of TCR clone 355098 (TRBV12-5, TRBJ2-5)
CASGPRTSGNQETQYF

SEQ ID NO: 710197 - protein, 15 aa, Homo sapiens
  CDR3 for alpha chain variable domain of TCR clone 355099 (TRAV13-1, TRAJ42)
CAASIAGGSQGNLIF

SEQ ID NO: 710198 - protein, 15 aa, Homo sapiens
  CDR3 for beta chain variable domain of TCR clone 355099 (TRBV19, TRBJ2-1)
CASSIVRGEGREKFF

SEQ ID NO: 710199 - protein, 17 aa, Homo sapiens
  CDR3 for alpha chain variable domain of TCR clone 355100 (TRAV3, TRAJ6)
CAVRDGPRAGGSYIPTF

SEQ ID NO: 710200 - protein, 18 aa, Homo sapiens
  CDR3 for beta chain variable domain of TCR clone 355100 (TRBV7-2, TRBJ2-7)
CASSLKTSFYEVLRAGHQ

SEQ ID NO: 710201 - protein, 15 aa, Homo sapiens
  CDR3 for alpha chain variable domain of TCR clone 355101 (TRAV26-2, TRAJ28)
CILVESGAGSYQLTF

SEQ ID NO: 710202 - protein, 16 aa, Homo sapiens
  CDR3 for beta chain variable domain of TCR clone 355101 (TRBV4-2, TRBJ1-2)
CASSKEIGGASYGYTF

SEQ ID NO: 710203 - protein, 15 aa, Homo sapiens
  CDR3 for alpha chain variable domain of TCR clone 355102 (TRAV21, TRAJ53)
CATLNSGGSNYKLTF

SEQ ID NO: 710204 - protein, 13 aa, Homo sapiens
  CDR3 for beta chain variable domain of TCR clone 355102 (TRBV28, TRBJ2-5)
CASSFAGGETQYF

SEQ ID NO: 710205 - protein, 16 aa, Homo sapiens
  CDR3 for alpha chain variable domain of TCR clone 355103 (TRAV25, TRAJ24)
CAQRRGTTDSWGKLQF

SEQ ID NO: 710206 - protein, 14 aa, Homo sapiens
  CDR3 for beta chain variable domain of TCR clone 355103 (TRBV7-3, TRBJ2-1)
CASSLAGGTNEQFF

SEQ ID NO: 710207 - protein, 11 aa, Homo sapiens
  CDR3 for alpha chain variable domain of TCR clone 355104 (TRAV12-2, TRAJ23)
CARGRGGKLIF

SEQ ID NO: 710208 - protein, 14 aa, Homo sapiens
  CDR3 for beta chain variable domain of TCR clone 355104 (TRBV28, TRBJ2-5)
CASGLGDRAETQYF

SEQ ID NO: 710209 - protein, 13 aa, Homo sapiens
  CDR3 for alpha chain variable domain of TCR clone 355105 (TRAV36/DV7, TRAJ37)
CAVFSSNTGKLIF

SEQ ID NO: 710210 - protein, 12 aa, Homo sapiens
  CDR3 for beta chain variable domain of TCR clone 355105 (TRBV20-1, TRBJ2-1)
CSAQYTYNEQFF

SEQ ID NO: 710211 - protein, 12 aa, Homo sapiens
  CDR3 for alpha chain variable domain of TCR clone 355106 (TRAV12-3, TRAJ17)
CAMTLTSNKLTF

SEQ ID NO: 710212 - protein, 13 aa, Homo sapiens
  CDR3 for beta chain variable domain of TCR clone 355106 (TRBV7-9, TRBJ1-2)
CASSLKQNYGYTF

SEQ ID NO: 710213 - protein, 14 aa, Homo sapiens
  CDR3 for alpha chain variable domain of TCR clone 355107 (TRAV1-2, TRAJ16)
CAVNRFSDGQKLLF

SEQ ID NO: 710214 - protein, 14 aa, Homo sapiens
  CDR3 for beta chain variable domain of TCR clone 355107 (TRBV7-2, TRBJ2-3)
CASSLVGRSRYAVF

SEQ ID NO: 710215 - protein, 22 aa, Homo sapiens
  CDR3 for alpha chain variable domain of TCR clone 355108 (TRAV8-2, TRAJ45)
HLTKPSAHMSDAAEYSADGLTF

SEQ ID NO: 710216 - protein, 15 aa, Homo sapiens
  CDR3 for beta chain variable domain of TCR clone 355108 (TRBV20-1, TRBJ2-7)
CSARDRVSGMDEQYF

SEQ ID NO: 710217 - protein, 13 aa, Homo sapiens
  CDR3 for alpha chain variable domain of TCR clone 355109 (TRAV16, TRAJ58)
CALSIPSGSRLTF

SEQ ID NO: 710218 - protein, 15 aa, Homo sapiens
  CDR3 for beta chain variable domain of TCR clone 355109 (TRBV28, TRBJ2-5)
CASSPPWSYQETQYF

SEQ ID NO: 710219 - protein, 13 aa, Homo sapiens
  CDR3 for alpha chain variable domain of TCR clone 355110 (TRAV23/DV6, TRAJ27)
CAASKPMQANQPL

SEQ ID NO: 710220 - protein, 14 aa, Homo sapiens
  CDR3 for beta chain variable domain of TCR clone 355110 (TRBV5-4, TRBJ1-1)
CASSVDRRRDEAFF

SEQ ID NO: 710221 - protein, 12 aa, Homo sapiens
  CDR3 for alpha chain variable domain of TCR clone 355111 (TRAV8-3, TRAJ26)
CAGDNYGQHFVF

SEQ ID NO: 710222 - protein, 16 aa, Homo sapiens
  CDR3 for beta chain variable domain of TCR clone 355111 (TRBV20-1, TRBJ1-4)
CSAPGQGLLTNEKLFF

SEQ ID NO: 710223 - protein, 14 aa, Homo sapiens
  CDR3 for alpha chain variable domain of TCR clone 355112 (TRAV26-1, TRAJ38)
CIADNAGNNRKLIW

SEQ ID NO: 710224 - protein, 20 aa, Homo sapiens
  CDR3 for beta chain variable domain of TCR clone 355112 (TRBV11-1, TRBJ2-6)
CASSAEFQPGMSSGANVLTF

SEQ ID NO: 710225 - protein, 14 aa, Homo sapiens
  CDR3 for alpha chain variable domain of TCR clone 355113 (TRAV13-1, TRAJ39)
CAASEGNAGNMLTF

SEQ ID NO: 710226 - protein, 14 aa, Homo sapiens
  CDR3 for beta chain variable domain of TCR clone 355113 (TRBV7-2, TRBJ2-7)
CASSLRWEVNEQYF

SEQ ID NO: 710227 - protein, 13 aa, Homo sapiens
  CDR3 for alpha chain variable domain of TCR clone 355114 (TRAV12-1, TRAJ6)
CVVYPGGSYIPTF

SEQ ID NO: 710228 - protein, 13 aa, Homo sapiens
  CDR3 for beta chain variable domain of TCR clone 355114 (TRBV4-2, TRBJ1-1)
CASSQAWNTEAFF

SEQ ID NO: 710229 - protein, 13 aa, Homo sapiens
  CDR3 for alpha chain variable domain of TCR clone 355115 (TRAV12-2, TRAJ20)
CAVYPSNDYNLSF

SEQ ID NO: 710230 - protein, 15 aa, Homo sapiens
  CDR3 for beta chain variable domain of TCR clone 355115 (TRBV27, TRBJ2-5)
CASSLYPRGGENQYF

SEQ ID NO: 710231 - protein, 17 aa, Homo sapiens
  CDR3 for alpha chain variable domain of TCR clone 355116 (TRAV23/DV6, TRAJ12)
CAAIDLGAMDSSYKLIF

SEQ ID NO: 710232 - protein, 15 aa, Homo sapiens
  CDR3 for beta chain variable domain of TCR clone 355116 (TRBV12-4, TRBJ2-5)
CASTLDSGRGETQYF

SEQ ID NO: 710233 - protein, 16 aa, Homo sapiens
  CDR3 for alpha chain variable domain of TCR clone 355117 (TRAV1-2, TRAJ16)
CAVNRFQMARSCSLQG

SEQ ID NO: 710234 - protein, 14 aa, Homo sapiens
  CDR3 for beta chain variable domain of TCR clone 355117 (TRBV4-1, TRBJ2-2)
CASSQAVNTGELFF

SEQ ID NO: 710235 - protein, 11 aa, Homo sapiens
  CDR3 for alpha chain variable domain of TCR clone 355118 (TRAV20, TRAJ23)
CACNQGGKLIF

SEQ ID NO: 710236 - protein, 17 aa, Homo sapiens
  CDR3 for beta chain variable domain of TCR clone 355118 (TRBV25-1, TRBJ2-7)
CASSDARVVFSSYEQYF

SEQ ID NO: 710237 - protein, 18 aa, Homo sapiens
  CDR3 for alpha chain variable domain of TCR clone 355119 (TRAV21, TRAJ52)
CAVRPSPAGGTSYGTLTF

SEQ ID NO: 710238 - protein, 19 aa, Homo sapiens
  CDR3 for beta chain variable domain of TCR clone 355119 (TRBV7-2, TRBJ2-3)
CASSFLSRNWGGGTDTQYF

SEQ ID NO: 710239 - protein, 16 aa, Homo sapiens
  CDR3 for alpha chain variable domain of TCR clone 355120 (TRAV38-1, TRAJ56)
CAFMKRQTGANSKLTF

SEQ ID NO: 710240 - protein, 18 aa, Homo sapiens
  CDR3 for beta chain variable domain of TCR clone 355120 (TRBV4-1, TRBJ1-5)
CASSQDPRGQGLNQPQHF

SEQ ID NO: 710241 - protein, 17 aa, Homo sapiens
  CDR3 for alpha chain variable domain of TCR clone 355121 (TRAV8-6, TRAJ58)
CAVSSWVGETSGSRLTF

SEQ ID NO: 710242 - protein, 14 aa, Homo sapiens
  CDR3 for beta chain variable domain of TCR clone 355121 (TRBV4-3, TRBJ2-1)
YASGLDRAYNDQFF

SEQ ID NO: 710243 - protein, 13 aa, Homo sapiens
  CDR3 for alpha chain variable domain of TCR clone 355122 (TRAV17, TRAJ8)
CATGPVGFQKLVF

SEQ ID NO: 710244 - protein, 14 aa, Homo sapiens
  CDR3 for beta chain variable domain of TCR clone 355122 (TRBV5-5, TRBJ1-5)
CASSGQGVDQPQHF

SEQ ID NO: 710245 - protein, 14 aa, Homo sapiens
  CDR3 for alpha chain variable domain of TCR clone 355123 (TRAV21, TRAJ24)
RAARSSDSWGKLQF

SEQ ID NO: 710246 - protein, 13 aa, Homo sapiens
  CDR3 for beta chain variable domain of TCR clone 355123 (TRBV11-2, TRBJ2-5)
CASSSTGEETQYF

SEQ ID NO: 710247 - protein, 16 aa, Homo sapiens
  CDR3 for alpha chain variable domain of TCR clone 355124 (TRAV3, TRAJ37)
CAVRGKGSGNTGKLIF

SEQ ID NO: 710248 - protein, 13 aa, Homo sapiens
  CDR3 for beta chain variable domain of TCR clone 355124 (TRBV10-3, TRBJ1-2)
CAISDRDSYGYTF

SEQ ID NO: 710249 - protein, 14 aa, Homo sapiens
  CDR3 for alpha chain variable domain of TCR clone 355125 (TRAV14/DV4, TRAJ57)
CAMREEGGSEKLCF

SEQ ID NO: 710250 - protein, 13 aa, Homo sapiens
  CDR3 for beta chain variable domain of TCR clone 355125 (TRBV15, TRBJ1-6)
CATSGGLNSPLHF

SEQ ID NO: 710251 - protein, 16 aa, Homo sapiens
  CDR3 for alpha chain variable domain of TCR clone 355126 (TRAV16, TRAJ37)
CSKWPDGSRNTGKLIF

SEQ ID NO: 710252 - protein, 13 aa, Homo sapiens
  CDR3 for beta chain variable domain of TCR clone 355126 (TRBV7-2, TRBJ2-2)
CASSLAVTGELFF

SEQ ID NO: 710253 - protein, 18 aa, Homo sapiens
  CDR3 for alpha chain variable domain of TCR clone 355127 (TRAV29/DV5, TRAJ52)
CAAGFRGAGGTGYGKLTF

SEQ ID NO: 710254 - protein, 16 aa, Homo sapiens
  CDR3 for beta chain variable domain of TCR clone 355127 (TRBV5-1, TRBJ1-1)
CASSSGGNSLNTEAFF

SEQ ID NO: 710255 - protein, 14 aa, Homo sapiens
  CDR3 for alpha chain variable domain of TCR clone 355128 (TRAV12-1, TRAJ33)
CVVAPGGSNYQLIW

SEQ ID NO: 710256 - protein, 13 aa, Homo sapiens
  CDR3 for beta chain variable domain of TCR clone 355128 (TRBV13, TRBJ2-5)
CASSLVGEETQYF

SEQ ID NO: 710257 - protein, 15 aa, Homo sapiens
  CDR3 for alpha chain variable domain of TCR clone 355129 (TRAV2, TRAJ28)
CAVPYSGAGSYQLTV

SEQ ID NO: 710258 - protein, 15 aa, Homo sapiens
  CDR3 for beta chain variable domain of TCR clone 355129 (TRBV5-1, TRBJ2-3)
CASSVTSGSTDTQYF

SEQ ID NO: 710259 - protein, 15 aa, Homo sapiens
  CDR3 for alpha chain variable domain of TCR clone 355130 (TRAV13-2, TRAJ5)
CAENPHWTGRRALTF

SEQ ID NO: 710260 - protein, 14 aa, Homo sapiens
  CDR3 for beta chain variable domain of TCR clone 355130 (TRBV5-7, TRBJ2-7)
CATSFKGATGEQYF

SEQ ID NO: 710261 - protein, 12 aa, Homo sapiens
  CDR3 for alpha chain variable domain of TCR clone 355131 (TRAV21, TRAJ31)
CAVSPARGRLMF

SEQ ID NO: 710262 - protein, 13 aa, Homo sapiens
  CDR3 for beta chain variable domain of TCR clone 355131 (TRBV12-4, TRBJ2-7)
CASSPTETYEQYF

SEQ ID NO: 710263 - protein, 14 aa, Homo sapiens
  CDR3 for alpha chain variable domain of TCR clone 355132 (TRAV1-2, TRAJ8)
CAVREDTDFQKLVF

SEQ ID NO: 710264 - protein, 12 aa, Homo sapiens
  CDR3 for beta chain variable domain of TCR clone 355132 (TRBV7-8, TRBJ2-7)
CASSLGDREQYF

SEQ ID NO: 710265 - protein, 14 aa, Homo sapiens
  CDR3 for alpha chain variable domain of TCR clone 355133 (TRAV8-3, TRAJ9)
CAVVYNTGGFKTIF

SEQ ID NO: 710266 - protein, 10 aa, Homo sapiens
  CDR3 for beta chain variable domain of TCR clone 355133 (TRBV2, TRBJ2-4)
CASRGSIQYF

SEQ ID NO: 710267 - protein, 13 aa, Homo sapiens
  CDR3 for alpha chain variable domain of TCR clone 355134 (TRAV21, TRAJ27)
CAARPGNAGKSTF

SEQ ID NO: 710268 - protein, 15 aa, Homo sapiens
  CDR3 for beta chain variable domain of TCR clone 355134 (TRBV6-1, TRBJ2-1)
CASSEAAYSYNEQFF

SEQ ID NO: 710269 - protein, 15 aa, Homo sapiens
  CDR3 for alpha chain variable domain of TCR clone 355135 (TRAV26-2, TRAJ13)
CILRDLSGGYQKVTF

SEQ ID NO: 710270 - protein, 12 aa, Homo sapiens
  CDR3 for beta chain variable domain of TCR clone 355135 (TRBV11-2, TRBJ2-2)
CASSLGGGELFF

SEQ ID NO: 710271 - protein, 12 aa, Homo sapiens
  CDR3 for alpha chain variable domain of TCR clone 355136 (TRAV3, TRAJ26)
CAVRDYGQNFVF

SEQ ID NO: 710272 - protein, 16 aa, Homo sapiens
  CDR3 for beta chain variable domain of TCR clone 355136 (TRBV11-2, TRBJ1-2)
CASIPSGREANYGYTF

SEQ ID NO: 710273 - protein, 18 aa, Homo sapiens
  CDR3 for alpha chain variable domain of TCR clone 355137 (TRAV26-1, TRAJ23)
CIVRVGLEVWNQGGKLIF

SEQ ID NO: 710274 - protein, 18 aa, Homo sapiens
  CDR3 for beta chain variable domain of TCR clone 355137 (TRBV7-9, TRBJ2-7)
CASSLTTSGSRTWYEQYF

SEQ ID NO: 710275 - protein, 14 aa, Homo sapiens
  CDR3 for alpha chain variable domain of TCR clone 355138 (TRAV1-2, TRAJ16)
CAVNRFSDGQKLLF

SEQ ID NO: 710276 - protein, 15 aa, Homo sapiens
  CDR3 for beta chain variable domain of TCR clone 355138 (TRBV9, TRBJ2-3)
CASSLEGGLTHTQYF

SEQ ID NO: 710277 - protein, 15 aa, Homo sapiens
  CDR3 for alpha chain variable domain of TCR clone 355139 (TRAV16, TRAJ4)
CALEDPSGGYNKLIF

SEQ ID NO: 710278 - protein, 15 aa, Homo sapiens
  CDR3 for beta chain variable domain of TCR clone 355139 (TRBV7-9, TRBJ2-2)
CASSFGQLNTGELFF

SEQ ID NO: 710279 - protein, 16 aa, Homo sapiens
  CDR3 for alpha chain variable domain of TCR clone 355140 (TRAV30, TRAJ24)
CGSEIVDADSWGKFQF

SEQ ID NO: 710280 - protein, 12 aa, Homo sapiens
  CDR3 for beta chain variable domain of TCR clone 355140 (TRBV12-4, TRBJ2-3)
CASSSTTDTQYF

SEQ ID NO: 710281 - protein, 12 aa, Homo sapiens
  CDR3 for alpha chain variable domain of TCR clone 355141 (TRAV12-1, TRAJ40)
CVVYSVTYKYIF

SEQ ID NO: 710282 - protein, 18 aa, Homo sapiens
  CDR3 for beta chain variable domain of TCR clone 355141 (TRBV11-2, TRBJ2-3)
CSSSLGGASRGAPNTQYF

SEQ ID NO: 710283 - protein, 14 aa, Homo sapiens
  CDR3 for alpha chain variable domain of TCR clone 355142 (TRAV1-1, TRAJ5)
CAVRDGAGRRALTF

SEQ ID NO: 710284 - protein, 14 aa, Homo sapiens
  CDR3 for beta chain variable domain of TCR clone 355142 (TRBV28, TRBJ2-1)
CAGSYYTAYNEQFF

SEQ ID NO: 710285 - protein, 14 aa, Homo sapiens
  CDR3 for alpha chain variable domain of TCR clone 355143 (TRAV26-1, TRAJ16)
CIAVPFSDGQKLLF

SEQ ID NO: 710286 - protein, 16 aa, Homo sapiens
  CDR3 for beta chain variable domain of TCR clone 355143 (TRBV29-1, TRBJ2-6)
CSVEDITYSGANVLTF

SEQ ID NO: 710287 - protein, 14 aa, Homo sapiens
  CDR3 for alpha chain variable domain of TCR clone 355144 (TRAV12-2, TRAJ17)
CAVLFKAAGNRLTF

SEQ ID NO: 710288 - protein, 13 aa, Homo sapiens
  CDR3 for beta chain variable domain of TCR clone 355144 (TRBV19, TRBJ1-2)
CASSVPGQDGYTF

SEQ ID NO: 710289 - protein, 15 aa, Homo sapiens
  CDR3 for alpha chain variable domain of TCR clone 355145 (TRAV12-1, TRAJ44)
CVVFINTGTASKLTF

SEQ ID NO: 710290 - protein, 16 aa, Homo sapiens
  CDR3 for beta chain variable domain of TCR clone 355145 (TRBV20-1, TRBJ2-5)
CSPGGTSGGYMETQYF

SEQ ID NO: 710291 - protein, 11 aa, Homo sapiens
  CDR3 for alpha chain variable domain of TCR clone 355146 (TRAV13-1, TRAJ39)
CASIAGNMLTF

SEQ ID NO: 710292 - protein, 14 aa, Homo sapiens
  CDR3 for beta chain variable domain of TCR clone 355146 (TRBV7-2, TRBJ2-7)
CASSSISGFSEQYF

SEQ ID NO: 710293 - protein, 14 aa, Homo sapiens
  CDR3 for alpha chain variable domain of TCR clone 355147 (TRAV2, TRAJ37)
CAVDFTSNTGKLIF

SEQ ID NO: 710294 - protein, 15 aa, Homo sapiens
  CDR3 for beta chain variable domain of TCR clone 355147 (TRBV20-1, TRBJ1-1)
CSASRGVTGSTEAFV

SEQ ID NO: 710295 - protein, 14 aa, Homo sapiens
  CDR3 for alpha chain variable domain of TCR clone 355148 (TRAV12-2, TRAJ13)
CAVKKNGGYKKVNF

SEQ ID NO: 710296 - protein, 15 aa, Homo sapiens
  CDR3 for beta chain variable domain of TCR clone 355148 (TRBV27, TRBJ2-1)
CASSNGGGSSNEQFF

SEQ ID NO: 710297 - protein, 17 aa, Homo sapiens
  CDR3 for alpha chain variable domain of TCR clone 355149 (TRAV8-6, TRAJ58)
CAVSSWVGETSGSSLTF

SEQ ID NO: 710298 - protein, 14 aa, Homo sapiens
  CDR3 for beta chain variable domain of TCR clone 355149 (TRBV19, TRBJ2-1)
CASPTFVLSGEQFF

SEQ ID NO: 710299 - protein, 17 aa, Homo sapiens
  CDR3 for alpha chain variable domain of TCR clone 355150 (TRAV26-2, TRAJ42)
CILRDVGSGGSQGNPIF

SEQ ID NO: 710300 - protein, 16 aa, Homo sapiens
  CDR3 for beta chain variable domain of TCR clone 355150 (TRBV12-4, TRBJ2-7)
CASSLIGGTGTYEQYF

SEQ ID NO: 710301 - protein, 14 aa, Homo sapiens
  CDR3 for alpha chain variable domain of TCR clone 355151 (TRAV2, TRAJ9)
CAVEDRSGGFKTIF

SEQ ID NO: 710302 - protein, 13 aa, Homo sapiens
  CDR3 for beta chain variable domain of TCR clone 355151 (TRBV7-8, TRBJ2-7)
CASSFAGLYEQYF

SEQ ID NO: 710303 - protein, 14 aa, Homo sapiens
  CDR3 for alpha chain variable domain of TCR clone 355152 (TRAV26-1, TRAJ34)
CIVRVAYNTVKLIF

SEQ ID NO: 710304 - protein, 15 aa, Homo sapiens
  CDR3 for beta chain variable domain of TCR clone 355152 (TRBV20-1, TRBJ2-7)
CSARVPAAYFYEQYF

SEQ ID NO: 710305 - protein, 15 aa, Homo sapiens
  CDR3 for alpha chain variable domain of TCR clone 355153 (TRAV27, TRAJ45)
CAGAGSGGGADGLTF

SEQ ID NO: 710306 - protein, 13 aa, Homo sapiens
  CDR3 for beta chain variable domain of TCR clone 355153 (TRBV10-2, TRBJ2-7)
CASGASGGYEQYF

SEQ ID NO: 710307 - protein, 13 aa, Homo sapiens
  CDR3 for alpha chain variable domain of TCR clone 355154 (TRAV27, TRAJ8)
CAGGPTGFQKLVF

SEQ ID NO: 710308 - protein, 14 aa, Homo sapiens
  CDR3 for beta chain variable domain of TCR clone 355154 (TRBV19, TRBJ2-1)
CASPTFVLSGEQFF

SEQ ID NO: 710309 - protein, 13 aa, Homo sapiens
  CDR3 for alpha chain variable domain of TCR clone 355155 (TRAV1-1, TRAJ15)
CAVVDQAGTALIF

SEQ ID NO: 710310 - protein, 16 aa, Homo sapiens
  CDR3 for beta chain variable domain of TCR clone 355155 (TRBV10-3, TRBJ2-1)
CAISGVGDGGGGEQFF

SEQ ID NO: 710311 - protein, 10 aa, Homo sapiens
  CDR3 for alpha chain variable domain of TCR clone 355156 (TRAV12-2, TRAJ20)
CAVYLYKLSF

SEQ ID NO: 710312 - protein, 14 aa, Homo sapiens
  CDR3 for beta chain variable domain of TCR clone 355156 (TRBV5-1, TRBJ2-2)
CASSLIKGAGELFF

SEQ ID NO: 710313 - protein, 13 aa, Homo sapiens
  CDR3 for alpha chain variable domain of TCR clone 355157 (TRAV27, TRAJ6)
CAGGTRGSYIPTF

SEQ ID NO: 710314 - protein, 14 aa, Homo sapiens
  CDR3 for beta chain variable domain of TCR clone 355157 (TRBV6-3, TRBJ1-1)
CARSYQRRDTEAFF

SEQ ID NO: 710315 - protein, 14 aa, Homo sapiens
  CDR3 for alpha chain variable domain of TCR clone 355158 (TRAV26-2, TRAJ27)
CILRDISDAGKLTF

SEQ ID NO: 710316 - protein, 15 aa, Homo sapiens
  CDR3 for beta chain variable domain of TCR clone 355158 (TRBV10-3, TRBJ2-7)
CATREQGLRSYEQYF

SEQ ID NO: 710317 - protein, 13 aa, Homo sapiens
  CDR3 for alpha chain variable domain of TCR clone 355159 (TRAV2, TRAJ40)
CAVVTSGTYKYIF

SEQ ID NO: 710318 - protein, 14 aa, Homo sapiens
  CDR3 for beta chain variable domain of TCR clone 355159 (TRBV7-9, TRBJ2-1)
CASRPTGLRNEQFF

SEQ ID NO: 710319 - protein, 14 aa, Homo sapiens
  CDR3 for alpha chain variable domain of TCR clone 355160 (TRAV12-2, TRAJ17)
CAALFKAAGNKLTF

SEQ ID NO: 710320 - protein, 17 aa, Homo sapiens
  CDR3 for beta chain variable domain of TCR clone 355160 (TRBV28, TRBJ2-5)
CASSRQGGLAGAETQYF

SEQ ID NO: 710321 - protein, 13 aa, Homo sapiens
  CDR3 for alpha chain variable domain of TCR clone 355161 (TRAV30, TRAJ49)
CGTESQPVTSSIL

SEQ ID NO: 710322 - protein, 14 aa, Homo sapiens
  CDR3 for beta chain variable domain of TCR clone 355161 (TRBV19, TRBJ2-2)
CATTGHANTGELFF

SEQ ID NO: 710323 - protein, 15 aa, Homo sapiens
  CDR3 for alpha chain variable domain of TCR clone 355162 (TRAV3, TRAJ5)
CAVIDLDTGRRALTF

SEQ ID NO: 710324 - protein, 13 aa, Homo sapiens
  CDR3 for beta chain variable domain of TCR clone 355162 (TRBV12-4, TRBJ2-7)
CASSPTETHEQYF

SEQ ID NO: 710325 - protein, 14 aa, Homo sapiens
  CDR3 for alpha chain variable domain of TCR clone 355163 (TRAV38-1, TRAJ43)
CAFMKHTNNNDMRF

SEQ ID NO: 710326 - protein, 15 aa, Homo sapiens
  CDR3 for beta chain variable domain of TCR clone 355163 (TRBV9, TRBJ1-6)
CASSVAGTGDSPLHF

SEQ ID NO: 710327 - protein, 16 aa, Homo sapiens
  CDR3 for alpha chain variable domain of TCR clone 355164 (TRAV12-3, TRAJ53)
CAMSVGSGGSNYKLTC

SEQ ID NO: 710328 - protein, 11 aa, Homo sapiens
  CDR3 for beta chain variable domain of TCR clone 355164 (TRBV29-1, TRBJ2-5)
CSVASGETQYF

SEQ ID NO: 710329 - protein, 13 aa, Homo sapiens
  CDR3 for alpha chain variable domain of TCR clone 355165 (TRAV12-2, TRAJ52)
CAVSGTSYGKLTF

SEQ ID NO: 710330 - protein, 17 aa, Homo sapiens
  CDR3 for beta chain variable domain of TCR clone 355165 (TRBV11-2, TRBJ2-1)
CASSFYPPGVEYNEQFF

SEQ ID NO: 710331 - protein, 13 aa, Homo sapiens
  CDR3 for alpha chain variable domain of TCR clone 355166 (TRAV17, TRAJ39)
CAISTNAGNMLTF

SEQ ID NO: 710332 - protein, 15 aa, Homo sapiens
  CDR3 for beta chain variable domain of TCR clone 355166 (TRBV4-1, TRBJ1-2)
CASSQGQGAAYGYTF

SEQ ID NO: 710333 - protein, 15 aa, Homo sapiens
  CDR3 for alpha chain variable domain of TCR clone 355167 (TRAV8-3, TRAJ6)
CAVGPLGGGSSIPTF

SEQ ID NO: 710334 - protein, 14 aa, Homo sapiens
  CDR3 for beta chain variable domain of TCR clone 355167 (TRBV19, TRBJ2-2)
CASSTGQGAGELFF

SEQ ID NO: 710335 - protein, 14 aa, Homo sapiens
  CDR3 for alpha chain variable domain of TCR clone 355168 (TRAV13-2, TRAJ15)
CAENPNQAGTALIF

SEQ ID NO: 710336 - protein, 16 aa, Homo sapiens
  CDR3 for beta chain variable domain of TCR clone 355168 (TRBV12-4, TRBJ1-2)
CASSPTATGKTRGYNF

SEQ ID NO: 710337 - protein, 15 aa, Homo sapiens
  CDR3 for alpha chain variable domain of TCR clone 355169 (TRAV3, TRAJ20)
CAVRDIKLSDYKLSV

SEQ ID NO: 710338 - protein, 15 aa, Homo sapiens
  CDR3 for beta chain variable domain of TCR clone 355169 (TRBV7-9, TRBJ1-6)
CASSSPGRGNSPLLF

SEQ ID NO: 710339 - protein, 15 aa, Homo sapiens
  CDR3 for alpha chain variable domain of TCR clone 355170 (TRAV13-1, TRAJ5)
CAASPRGHVQESTYF

SEQ ID NO: 710340 - protein, 15 aa, Homo sapiens
  CDR3 for beta chain variable domain of TCR clone 355170 (TRBV6-1, TRBJ2-3)
CASSERGGITDTQYF

SEQ ID NO: 710341 - protein, 16 aa, Homo sapiens
  CDR3 for alpha chain variable domain of TCR clone 355171 (TRAV30, TRAJ24)
CGTEIVDADSWGKFQF

SEQ ID NO: 710342 - protein, 16 aa, Homo sapiens
  CDR3 for beta chain variable domain of TCR clone 355171 (TRBV7-3, TRBJ2-1)
CASSLSSGGGAKEQFF

SEQ ID NO: 710343 - protein, 17 aa, Homo sapiens
  CDR3 for alpha chain variable domain of TCR clone 355172 (TRAV3, TRAJ42)
CAVRDRDYGGRQGNLIF

SEQ ID NO: 710344 - protein, 14 aa, Homo sapiens
  CDR3 for beta chain variable domain of TCR clone 355172 (TRBV12-5, TRBJ2-5)
CASGSRTHQETQYF

SEQ ID NO: 710345 - protein, 16 aa, Homo sapiens
  CDR3 for alpha chain variable domain of TCR clone 355173 (TRAV30, TRAJ24)
CGTEIVDADSWGKFQF

SEQ ID NO: 710346 - protein, 12 aa, Homo sapiens
  CDR3 for beta chain variable domain of TCR clone 355173 (TRBV13, TRBJ2-1)
CASSLGAQEQFF

SEQ ID NO: 710347 - protein, 23 aa, Homo sapiens
  CDR3 for alpha chain variable domain of TCR clone 355174 (TRAV12-2, TRAJ36)
SLLIRDSQPSDSATLERANNLFF

SEQ ID NO: 710348 - protein, 12 aa, Homo sapiens
  CDR3 for beta chain variable domain of TCR clone 355174 (TRBV7-2, TRBJ2-5)
CASSLYGETQYF

SEQ ID NO: 710349 - protein, 16 aa, Homo sapiens
  CDR3 for alpha chain variable domain of TCR clone 355175 (TRAV20, TRAJ22)
CAVQAPSSGSTRQLTF

SEQ ID NO: 710350 - protein, 13 aa, Homo sapiens
  CDR3 for beta chain variable domain of TCR clone 355175 (TRBV7-2, TRBJ2-5)
CASSQTSVETQYF

SEQ ID NO: 710351 - protein, 14 aa, Homo sapiens
  CDR3 for alpha chain variable domain of TCR clone 355176 (TRAV26-1, TRAJ52)
CIVKGGTSYGKLTF

SEQ ID NO: 710352 - protein, 14 aa, Homo sapiens
  CDR3 for beta chain variable domain of TCR clone 355176 (TRBV28, TRBJ2-7)
CASILLRISYEQYF

SEQ ID NO: 710353 - protein, 16 aa, Homo sapiens
  CDR3 for alpha chain variable domain of TCR clone 355177 (TRAV3, TRAJ10)
CAVRDMRVGGGNKLTF

SEQ ID NO: 710354 - protein, 15 aa, Homo sapiens
  CDR3 for beta chain variable domain of TCR clone 355177 (TRBV6-3, TRBJ2-7)
CASSSPGTVFYEQYF

SEQ ID NO: 710355 - protein, 14 aa, Homo sapiens
  CDR3 for alpha chain variable domain of TCR clone 355178 (TRAV12-1, TRAJ30)
CVPTGTNRDDKIIF

SEQ ID NO: 710356 - protein, 11 aa, Homo sapiens
  CDR3 for beta chain variable domain of TCR clone 355178 (TRBV4-1, TRBJ2-2)
CASEHAGELFF

SEQ ID NO: 710357 - protein, 13 aa, Homo sapiens
  CDR3 for alpha chain variable domain of TCR clone 355179 (TRAV16, TRAJ28)
CALTGAGSYQLTF

SEQ ID NO: 710358 - protein, 17 aa, Homo sapiens
  CDR3 for beta chain variable domain of TCR clone 355179 (TRBV11-2, TRBJ2-1)
CASSLYPPGVEYNEQFF

SEQ ID NO: 710359 - protein, 19 aa, Homo sapiens
  CDR3 for alpha chain variable domain of TCR clone 355180 (TRAV2, TRAJ20)
ILQVREADAAVYRDCKLSF

SEQ ID NO: 710360 - protein, 18 aa, Homo sapiens
  CDR3 for beta chain variable domain of TCR clone 355180 (TRBV5-1, TRBJ2-7)
CASSLGPLGTTSSYEQYF

SEQ ID NO: 710361 - protein, 13 aa, Homo sapiens
  CDR3 for alpha chain variable domain of TCR clone 355181 (TRAV20, TRAJ54)
CAVQAGGAQKLVF

SEQ ID NO: 710362 - protein, 15 aa, Homo sapiens
  CDR3 for beta chain variable domain of TCR clone 355181 (TRBV15, TRBJ2-3)
CATSGAGFGTDTQYF

SEQ ID NO: 710363 - protein, 16 aa, Homo sapiens
  CDR3 for alpha chain variable domain of TCR clone 355182 (TRAV4, TRAJ22)
CLVGDLYSGSARQLTF

SEQ ID NO: 710364 - protein, 16 aa, Homo sapiens
  CDR3 for beta chain variable domain of TCR clone 355182 (TRBV5-5, TRBJ2-2)
CASSGRREGATGELFF

SEQ ID NO: 710365 - protein, 12 aa, Homo sapiens
  CDR3 for alpha chain variable domain of TCR clone 355183 (TRAV17, TRAJ20)
CATDRHDYKLSF

SEQ ID NO: 710366 - protein, 14 aa, Homo sapiens
  CDR3 for beta chain variable domain of TCR clone 355183 (TRBV19, TRBJ2-1)
CASPTFVLSGEQFF

SEQ ID NO: 710367 - protein, 12 aa, Homo sapiens
  CDR3 for alpha chain variable domain of TCR clone 355184 (TRAV17, TRAJ31)
CATEQGNARLIF

SEQ ID NO: 710368 - protein, 14 aa, Homo sapiens
  CDR3 for beta chain variable domain of TCR clone 355184 (TRBV28, TRBJ2-7)
CASTTDRDGFVQYF

SEQ ID NO: 710369 - protein, 13 aa, Homo sapiens
  CDR3 for alpha chain variable domain of TCR clone 355185 (TRAV12-1, TRAJ31)
FVVVPNNNARLMF

SEQ ID NO: 710370 - protein, 15 aa, Homo sapiens
  CDR3 for beta chain variable domain of TCR clone 355185 (TRBV19, TRBJ1-2)
CASNLGGETPYGYTF

SEQ ID NO: 710371 - protein, 12 aa, Homo sapiens
  CDR3 for alpha chain variable domain of TCR clone 355186 (TRAV38-1, TRAJ34)
CAFMKETDTLIF

SEQ ID NO: 710372 - protein, 17 aa, Homo sapiens
  CDR3 for beta chain variable domain of TCR clone 355186 (TRBV7-8, TRBJ2-6)
CASSAGTGGAGANILTF

SEQ ID NO: 710373 - protein, 16 aa, Homo sapiens
  CDR3 for alpha chain variable domain of TCR clone 355187 (TRAV30, TRAJ24)
CGTEIVDADSWGKFQF

SEQ ID NO: 710374 - protein, 13 aa, Homo sapiens
  CDR3 for beta chain variable domain of TCR clone 355187 (TRBV12-5, TRBJ2-5)
CAGSRTHQETQYF

SEQ ID NO: 710375 - protein, 17 aa, Homo sapiens
  CDR3 for alpha chain variable domain of TCR clone 355188 (TRAV3, TRAJ12)
CAVSDGGRMDSSYKLIL

SEQ ID NO: 710376 - protein, 14 aa, Homo sapiens
  CDR3 for beta chain variable domain of TCR clone 355188 (TRBV7-9, TRBJ1-2)
CASSRQGANYGYTF

SEQ ID NO: 710377 - protein, 15 aa, Homo sapiens
  CDR3 for alpha chain variable domain of TCR clone 355189 (TRAV8-3, TRAJ23)
CAVGPLYNQGGKLIF

SEQ ID NO: 710378 - protein, 13 aa, Homo sapiens
  CDR3 for beta chain variable domain of TCR clone 355189 (TRBV10-3, TRBJ2-7)
CASKLAVNYEQYF

SEQ ID NO: 710379 - protein, 13 aa, Homo sapiens
  CDR3 for alpha chain variable domain of TCR clone 355190 (TRAV17, TRAJ9)
CATDYTGGFKNIF

SEQ ID NO: 710380 - protein, 14 aa, Homo sapiens
  CDR3 for beta chain variable domain of TCR clone 355190 (TRBV19, TRBJ2-5)
CASSMKGQQETQYF

SEQ ID NO: 710381 - protein, 18 aa, Homo sapiens
  CDR3 for alpha chain variable domain of TCR clone 355191 (TRAV13-1, TRAJ52)
CAAKNPNAGGTNYGKLTF

SEQ ID NO: 710382 - protein, 12 aa, Homo sapiens
  CDR3 for beta chain variable domain of TCR clone 355191 (TRBV2, TRBJ2-1)
CAYGPPGNEQFF

SEQ ID NO: 710383 - protein, 12 aa, Homo sapiens
  CDR3 for alpha chain variable domain of TCR clone 355192 (TRAV13-1, TRAJ49)
SAASPMGNQFYF

SEQ ID NO: 710384 - protein, 13 aa, Homo sapiens
  CDR3 for beta chain variable domain of TCR clone 355192 (TRBV20-1, TRBJ2-2)
CSASAAGTRELFF

SEQ ID NO: 710385 - protein, 14 aa, Homo sapiens
  CDR3 for alpha chain variable domain of TCR clone 355193 (TRAV1-2, TRAJ16)
CAVNRFSDGQQLLF

SEQ ID NO: 710386 - protein, 12 aa, Homo sapiens
  CDR3 for beta chain variable domain of TCR clone 355193 (TRBV7-9, TRBJ1-6)
CASSLMTSPLHF

SEQ ID NO: 710387 - protein, 14 aa, Homo sapiens
  CDR3 for alpha chain variable domain of TCR clone 355194 (TRAV16, TRAJ31)
CALSGRNNNAGLMF

SEQ ID NO: 710388 - protein, 12 aa, Homo sapiens
  CDR3 for beta chain variable domain of TCR clone 355194 (TRBV11-2, TRBJ1-2)
CASSREGDGYTF

SEQ ID NO: 710389 - protein, 14 aa, Homo sapiens
  CDR3 for alpha chain variable domain of TCR clone 355195 (TRAV35, TRAJ56)
CAGQLTGANSKLTV

SEQ ID NO: 710390 - protein, 13 aa, Homo sapiens
  CDR3 for beta chain variable domain of TCR clone 355195 (TRBV27, TRBJ1-1)
CASSLSIGAEAFF

SEQ ID NO: 710391 - protein, 13 aa, Homo sapiens
  CDR3 for alpha chain variable domain of TCR clone 355196 (TRAV2, TRAJ24)
CAVPTDSWGKLQF

SEQ ID NO: 710392 - protein, 17 aa, Homo sapiens
  CDR3 for beta chain variable domain of TCR clone 355196 (TRBV4-2, TRBJ1-1)
CASTQFGGGSGNTEAFF

SEQ ID NO: 710393 - protein, 17 aa, Homo sapiens
  CDR3 for alpha chain variable domain of TCR clone 355197 (TRAV3, TRAJ6)
CAVRDGPRAGGSYIPTF

SEQ ID NO: 710394 - protein, 16 aa, Homo sapiens
  CDR3 for beta chain variable domain of TCR clone 355197 (TRBV9, TRBJ2-3)
CASSGTSGKDTDTRYF

SEQ ID NO: 710395 - protein, 12 aa, Homo sapiens
  CDR3 for alpha chain variable domain of TCR clone 355198 (TRAV2, TRAJ31)
CAVEEGNARLIF

SEQ ID NO: 710396 - protein, 18 aa, Homo sapiens
  CDR3 for beta chain variable domain of TCR clone 355198 (TRBV7-9, TRBJ2-3)
CASSLDLAGLATPDTQYF

SEQ ID NO: 710397 - protein, 15 aa, Homo sapiens
  CDR3 for alpha chain variable domain of TCR clone 355199 (TRAV17, TRAJ16)
CATALRFSDGQKLLL

SEQ ID NO: 710398 - protein, 15 aa, Homo sapiens
  CDR3 for beta chain variable domain of TCR clone 355199 (TRBV20-1, TRBJ1-1)
CSDSRGVTGNTEAFF

SEQ ID NO: 710399 - protein, 17 aa, Homo sapiens
  CDR3 for alpha chain variable domain of TCR clone 355200 (TRAV3, TRAJ6)
CAVRDGPRTGGSYIPTF

SEQ ID NO: 710400 - protein, 14 aa, Homo sapiens
  CDR3 for beta chain variable domain of TCR clone 355200 (TRBV7-2, TRBJ2-7)
CAGSPKTSFYEQYF

SEQ ID NO: 710401 - protein, 16 aa, Homo sapiens
  CDR3 for alpha chain variable domain of TCR clone 355201 (TRAV12-2, TRAJ37)
CAVKEKGSSNTGKLLF

SEQ ID NO: 710402 - protein, 12 aa, Homo sapiens
  CDR3 for beta chain variable domain of TCR clone 355201 (TRBV10-1, TRBJ1-5)
CASSDSNQPQHF

SEQ ID NO: 710403 - protein, 14 aa, Homo sapiens
  CDR3 for alpha chain variable domain of TCR clone 355202 (TRAV20, TRAJ56)
CAVQFGGANSKLTF

SEQ ID NO: 710404 - protein, 13 aa, Homo sapiens
  CDR3 for beta chain variable domain of TCR clone 355202 (TRBV20-1, TRBJ2-5)
CSARGDYQETQYF

SEQ ID NO: 710405 - protein, 15 aa, Homo sapiens
  CDR3 for alpha chain variable domain of TCR clone 355203 (TRAV29/DV5, TRAJ40)
CAASAQGYGTYKYIF

SEQ ID NO: 710406 - protein, 15 aa, Homo sapiens
  CDR3 for beta chain variable domain of TCR clone 355203 (TRBV7-2, TRBJ2-3)
CASSLAGAFIDTQYF

SEQ ID NO: 710407 - protein, 14 aa, Homo sapiens
  CDR3 for alpha chain variable domain of TCR clone 355204 (TRAV12-1, TRAJ42)
CVVIYGGSQGNLIF

SEQ ID NO: 710408 - protein, 17 aa, Homo sapiens
  CDR3 for beta chain variable domain of TCR clone 355204 (TRBV3-1, TRBJ2-6)
CASSPTTGPAGANVLTF

SEQ ID NO: 710409 - protein, 15 aa, Homo sapiens
  CDR3 for alpha chain variable domain of TCR clone 355205 (TRAV4, TRAJ28)
CLVEGSGAGGYQLTF

SEQ ID NO: 710410 - protein, 15 aa, Homo sapiens
  CDR3 for beta chain variable domain of TCR clone 355205 (TRBV9, TRBJ2-3)
CASSVRGLAVDTQYF

SEQ ID NO: 710411 - protein, 12 aa, Homo sapiens
  CDR3 for alpha chain variable domain of TCR clone 355206 (TRAV13-1, TRAJ49)
CAASPMGNQFYF

SEQ ID NO: 710412 - protein, 17 aa, Homo sapiens
  CDR3 for beta chain variable domain of TCR clone 355206 (TRBV4-1, TRBJ2-3)
CASSQGYVSGGTDTQYF

SEQ ID NO: 710413 - protein, 14 aa, Homo sapiens
  CDR3 for alpha chain variable domain of TCR clone 355207 (TRAV20, TRAJ13)
YAVQISGGYQKVTF

SEQ ID NO: 710414 - protein, 14 aa, Homo sapiens
  CDR3 for beta chain variable domain of TCR clone 355207 (TRBV7-9, TRBJ2-4)
CASSLAMGGNIQYF

SEQ ID NO: 710415 - protein, 14 aa, Homo sapiens
  CDR3 for alpha chain variable domain of TCR clone 355208 (TRAV13-1, TRAJ44)
CAAKATGTASKLTF

SEQ ID NO: 710416 - protein, 14 aa, Homo sapiens
  CDR3 for beta chain variable domain of TCR clone 355208 (TRBV19, TRBJ2-1)
CASSKGFAENEQFF

SEQ ID NO: 710417 - protein, 11 aa, Homo sapiens
  CDR3 for alpha chain variable domain of TCR clone 355209 (TRAV2, TRAJ13)
CASVGYQKVTF

SEQ ID NO: 710418 - protein, 17 aa, Homo sapiens
  CDR3 for beta chain variable domain of TCR clone 355209 (TRBV20-1, TRBJ2-2)
CSASGSGQGGLTGGLFF

SEQ ID NO: 710419 - protein, 14 aa, Homo sapiens
  CDR3 for alpha chain variable domain of TCR clone 355210 (TRAV1-2, TRAJ8)
CAGREDTGFQKLVF

SEQ ID NO: 710420 - protein, 17 aa, Homo sapiens
  CDR3 for beta chain variable domain of TCR clone 355210 (TRBV11-3, TRBJ2-1)
CASSLYPPGVEYNEQFF

SEQ ID NO: 710421 - protein, 16 aa, Homo sapiens
  CDR3 for alpha chain variable domain of TCR clone 355211 (TRAV30, TRAJ24)
CGTENVDADSWGKFQF

SEQ ID NO: 710422 - protein, 13 aa, Homo sapiens
  CDR3 for beta chain variable domain of TCR clone 355211 (TRBV20-1, TRBJ1-1)
CSARGGGNTEAFF

SEQ ID NO: 710423 - protein, 14 aa, Homo sapiens
  CDR3 for alpha chain variable domain of TCR clone 355212 (TRAV8-1, TRAJ24)
CAVNAADSCGKLQF

SEQ ID NO: 710424 - protein, 16 aa, Homo sapiens
  CDR3 for beta chain variable domain of TCR clone 355212 (TRBV4-3, TRBJ2-1)
CASSPALDRGVNEQLF

SEQ ID NO: 710425 - protein, 17 aa, Homo sapiens
  CDR3 for alpha chain variable domain of TCR clone 355213 (TRAV4, TRAJ42)
CLVGVLNYGGSQGNLIF

SEQ ID NO: 710426 - protein, 12 aa, Homo sapiens
  CDR3 for beta chain variable domain of TCR clone 355213 (TRBV20-1, TRBJ2-1)
CSAQYTYNEQCF

SEQ ID NO: 710427 - protein, 15 aa, Homo sapiens
  CDR3 for alpha chain variable domain of TCR clone 355214 (TRAV2, TRAJ9)
CAVEDRGTVGFTTIF

SEQ ID NO: 710428 - protein, 16 aa, Homo sapiens
  CDR3 for beta chain variable domain of TCR clone 355214 (TRBV24-1, TRBJ2-3)
CATSDPGTGATDTQYF

SEQ ID NO: 710429 - protein, 14 aa, Homo sapiens
  CDR3 for alpha chain variable domain of TCR clone 355215 (TRAV17, TRAJ15)
CATGTNQAGTALIF

SEQ ID NO: 710430 - protein, 15 aa, Homo sapiens
  CDR3 for beta chain variable domain of TCR clone 355215 (TRBV11-2, TRBJ2-2)
CASSSDRVNAGELFF

SEQ ID NO: 710431 - protein, 15 aa, Homo sapiens
  CDR3 for alpha chain variable domain of TCR clone 355216 (TRAV3, TRAJ22)
CAVRDRGGSARQLTF

SEQ ID NO: 710432 - protein, 15 aa, Homo sapiens
  CDR3 for beta chain variable domain of TCR clone 355216 (TRBV20-1, TRBJ1-1)
CSASRGVTGNTEAFF

SEQ ID NO: 710433 - protein, 13 aa, Homo sapiens
  CDR3 for alpha chain variable domain of TCR clone 355217 (TRAV2, TRAJ29)
CASGNSGKHTSCR

SEQ ID NO: 710434 - protein, 15 aa, Homo sapiens
  CDR3 for beta chain variable domain of TCR clone 355217 (TRBV6-3, TRBJ2-7)
CASSSPGTVFYEQYF

SEQ ID NO: 710435 - protein, 12 aa, Homo sapiens
  CDR3 for alpha chain variable domain of TCR clone 355218 (TRAV12-1, TRAJ34)
CVVAGATDKLIF

SEQ ID NO: 710436 - protein, 14 aa, Homo sapiens
  CDR3 for beta chain variable domain of TCR clone 355218 (TRBV11-2, TRBJ2-7)
CASSSTGEGYEQYF

SEQ ID NO: 710437 - protein, 15 aa, Homo sapiens
  CDR3 for alpha chain variable domain of TCR clone 355219 (TRAV26-1, TRAJ44)
CIVRANTGTASKLTF

SEQ ID NO: 710438 - protein, 17 aa, Homo sapiens
  CDR3 for beta chain variable domain of TCR clone 355219 (TRBV3-1, TRBJ2-2)
CASSQFRDKVDTGELFF

SEQ ID NO: 710439 - protein, 12 aa, Homo sapiens
  CDR3 for alpha chain variable domain of TCR clone 355220 (TRAV12-3, TRAJ29)
CAAREGNTPLVF

SEQ ID NO: 710440 - protein, 17 aa, Homo sapiens
  CDR3 for beta chain variable domain of TCR clone 355220 (TRBV18, TRBJ2-1)
CASSPFAAGAGDKEQFF

SEQ ID NO: 710441 - protein, 13 aa, Homo sapiens
  CDR3 for alpha chain variable domain of TCR clone 355221 (TRAV12-2, TRAJ39)
CAVNNNAGNMLTF

SEQ ID NO: 710442 - protein, 13 aa, Homo sapiens
  CDR3 for beta chain variable domain of TCR clone 355221 (TRBV2, TRBJ1-5)
CANAGPGNQPQHF

SEQ ID NO: 710443 - protein, 13 aa, Homo sapiens
  CDR3 for alpha chain variable domain of TCR clone 355222 (TRAV21, TRAJ11)
CAVPNSGYSTLTF

SEQ ID NO: 710444 - protein, 17 aa, Homo sapiens
  CDR3 for beta chain variable domain of TCR clone 355222 (TRBV7-3, TRBJ2-3)
CASSLMKRIRGADTQYF

SEQ ID NO: 710445 - protein, 12 aa, Homo sapiens
  CDR3 for alpha chain variable domain of TCR clone 355223 (TRAV21, TRAJ58)
CAAGTSGSRLTF

SEQ ID NO: 710446 - protein, 15 aa, Homo sapiens
  CDR3 for beta chain variable domain of TCR clone 355223 (TRBV20-1, TRBJ2-7)
CSARDPVKGEGEQYF

SEQ ID NO: 710447 - protein, 13 aa, Homo sapiens
  CDR3 for alpha chain variable domain of TCR clone 355224 (TRAV23/DV6, TRAJ9)
CAASTTGGFKTIF

SEQ ID NO: 710448 - protein, 14 aa, Homo sapiens
  CDR3 for beta chain variable domain of TCR clone 355224 (TRBV2, TRBJ2-1)
CASSEELAVNRQFF

SEQ ID NO: 710449 - protein, 13 aa, Homo sapiens
  CDR3 for alpha chain variable domain of TCR clone 355225 (TRAV12-3, TRAJ43)
CAMIRPNNNDMRF

SEQ ID NO: 710450 - protein, 12 aa, Homo sapiens
  CDR3 for beta chain variable domain of TCR clone 355225 (TRBV11-2, TRBJ2-5)
CASSLGQETQYS

SEQ ID NO: 710451 - protein, 14 aa, Homo sapiens
  CDR3 for alpha chain variable domain of TCR clone 355226 (TRAV35, TRAJ22)
CAGLRPGSARQLTF

SEQ ID NO: 710452 - protein, 15 aa, Homo sapiens
  CDR3 for beta chain variable domain of TCR clone 355226 (TRBV7-2, TRBJ1-2)
CASSLVSGGDYGYTF

SEQ ID NO: 710453 - protein, 14 aa, Homo sapiens
  CDR3 for alpha chain variable domain of TCR clone 355227 (TRAV13-1, TRAJ44)
CAAKATGTASKLTF

SEQ ID NO: 710454 - protein, 15 aa, Homo sapiens
  CDR3 for beta chain variable domain of TCR clone 355227 (TRBV4-3, TRBJ1-1)
CASSQELRRGTEAFF

SEQ ID NO: 710455 - protein, 22 aa, Homo sapiens
  CDR3 for alpha chain variable domain of TCR clone 355228 (TRAV13-1, TRAJ35)
CAASKGGFGNVLHCGSCAQVIV

SEQ ID NO: 710456 - protein, 13 aa, Homo sapiens
  CDR3 for beta chain variable domain of TCR clone 355228 (TRBV7-3, TRBJ1-1)
CASSQDWGAEAFF

SEQ ID NO: 710457 - protein, 14 aa, Homo sapiens
  CDR3 for alpha chain variable domain of TCR clone 355229 (TRAV21, TRAJ37)
CAVQGSSNTGKLIF

SEQ ID NO: 710458 - protein, 14 aa, Homo sapiens
  CDR3 for beta chain variable domain of TCR clone 355229 (TRBV7-2, TRBJ2-1)
CASSRGGARNEQFF

SEQ ID NO: 710459 - protein, 17 aa, Homo sapiens
  CDR3 for alpha chain variable domain of TCR clone 355230 (TRAV3, TRAJ38)
CAVRDCLNAGNNRMLIW

SEQ ID NO: 710460 - protein, 14 aa, Homo sapiens
  CDR3 for beta chain variable domain of TCR clone 355230 (TRBV5-5, TRBJ1-5)
CASSGQGVDQPQHF

SEQ ID NO: 710461 - protein, 13 aa, Homo sapiens
  CDR3 for alpha chain variable domain of TCR clone 355231 (TRAV13-2, TRAJ40)
CAEKTSGTYKYIF

SEQ ID NO: 710462 - protein, 16 aa, Homo sapiens
  CDR3 for beta chain variable domain of TCR clone 355231 (TRBV5-1, TRBJ2-3)
CASSLTSGTSGGTQYF

SEQ ID NO: 710463 - protein, 14 aa, Homo sapiens
  CDR3 for alpha chain variable domain of TCR clone 355232 (TRAV1-1, TRAJ27)
CAVIYNTNAGKSTF

SEQ ID NO: 710464 - protein, 13 aa, Homo sapiens
  CDR3 for beta chain variable domain of TCR clone 355232 (TRBV7-9, TRBJ1-2)
CASSLKRNYGYTF

SEQ ID NO: 710465 - protein, 14 aa, Homo sapiens
  CDR3 for alpha chain variable domain of TCR clone 355233 (TRAV4, TRAJ10)
CLVGDTGGGNKLTF

SEQ ID NO: 710466 - protein, 16 aa, Homo sapiens
  CDR3 for beta chain variable domain of TCR clone 355233 (TRBV4-1, TRBJ2-3)
CASSQRAGGLTDTQYF

SEQ ID NO: 710467 - protein, 13 aa, Homo sapiens
  CDR3 for alpha chain variable domain of TCR clone 355234 (TRAV27, TRAJ58)
CAGAETSGSRLTC

SEQ ID NO: 710468 - protein, 13 aa, Homo sapiens
  CDR3 for beta chain variable domain of TCR clone 355234 (TRBV7-2, TRBJ2-1)
CASNRDRWNEQFF

SEQ ID NO: 710469 - protein, 14 aa, Homo sapiens
  CDR3 for alpha chain variable domain of TCR clone 355235 (TRAV1-1, TRAJ22)
CLGGFCKATDLLIW

SEQ ID NO: 710470 - protein, 14 aa, Homo sapiens
  CDR3 for beta chain variable domain of TCR clone 355235 (TRBV27, TRBJ2-7)
CASSLAGLSYEQYF

SEQ ID NO: 710471 - protein, 14 aa, Homo sapiens
  CDR3 for alpha chain variable domain of TCR clone 355236 (TRAV35, TRAJ34)
CAGRGTPTSSSLGL

SEQ ID NO: 710472 - protein, 13 aa, Homo sapiens
  CDR3 for beta chain variable domain of TCR clone 355236 (TRBV19, TRBJ2-7)
CASSIDRTYEQYF

SEQ ID NO: 710473 - protein, 13 aa, Homo sapiens
  CDR3 for alpha chain variable domain of TCR clone 355237 (TRAV3, TRAJ20)
CAVRPLNDYKRSF

SEQ ID NO: 710474 - protein, 12 aa, Homo sapiens
  CDR3 for beta chain variable domain of TCR clone 355237 (TRBV6-1, TRBJ2-1)
CATYGLNNEQFF

SEQ ID NO: 710475 - protein, 12 aa, Homo sapiens
  CDR3 for alpha chain variable domain of TCR clone 355238 (TRAV4, TRAJ26)
CLVGDYGQNFVF

SEQ ID NO: 710476 - protein, 14 aa, Homo sapiens
  CDR3 for beta chain variable domain of TCR clone 355238 (TRBV4-1, TRBJ2-2)
CASSQAVNTGELFF

SEQ ID NO: 710477 - protein, 14 aa, Homo sapiens
  CDR3 for alpha chain variable domain of TCR clone 355239 (TRAV12-3, TRAJ4)
CAMSATGGYNKLIF

SEQ ID NO: 710478 - protein, 16 aa, Homo sapiens
  CDR3 for beta chain variable domain of TCR clone 355239 (TRBV12-5, TRBJ2-5)
CASGPRTSGNQETQYF

SEQ ID NO: 710479 - protein, 15 aa, Homo sapiens
  CDR3 for alpha chain variable domain of TCR clone 355240 (TRAV8-3, TRAJ11)
CAVGLLNSGYSTLTF

SEQ ID NO: 710480 - protein, 15 aa, Homo sapiens
  CDR3 for beta chain variable domain of TCR clone 355240 (TRBV7-2, TRBJ2-5)
CASSLLSGAYETQYF

SEQ ID NO: 710481 - protein, 13 aa, Homo sapiens
  CDR3 for alpha chain variable domain of TCR clone 355241 (TRAV35, TRAJ36)
CAGPRIGANNIFF

SEQ ID NO: 710482 - protein, 15 aa, Homo sapiens
  CDR3 for beta chain variable domain of TCR clone 355241 (TRBV28, TRBJ2-5)
CASSPPWSYQETQYF

SEQ ID NO: 710483 - protein, 14 aa, Homo sapiens
  CDR3 for alpha chain variable domain of TCR clone 355242 (TRAV2, TRAJ37)
CAVDFTSNTGKLIF

SEQ ID NO: 710484 - protein, 15 aa, Homo sapiens
  CDR3 for beta chain variable domain of TCR clone 355242 (TRBV20-1, TRBJ1-1)
FSASRGVTGNTEAFF

SEQ ID NO: 710485 - protein, 14 aa, Homo sapiens
  CDR3 for alpha chain variable domain of TCR clone 355243 (TRAV1-2, TRAJ16)
CAGNRFSDGLKLLF

SEQ ID NO: 710486 - protein, 11 aa, Homo sapiens
  CDR3 for beta chain variable domain of TCR clone 355243 (TRBV7-9, TRBJ2-3)
CASSPTDTQYF

SEQ ID NO: 710487 - protein, 15 aa, Homo sapiens
  CDR3 for alpha chain variable domain of TCR clone 355244 (TRAV8-3, TRAJ45)
CTSSYSGGGADGLTF

SEQ ID NO: 710488 - protein, 13 aa, Homo sapiens
  CDR3 for beta chain variable domain of TCR clone 355244 (TRBV10-3, TRBJ2-7)
CASKRAVNYEQYF

SEQ ID NO: 710489 - protein, 12 aa, Homo sapiens
  CDR3 for alpha chain variable domain of TCR clone 355245 (TRAV16, TRAJ9)
CALSSGGFKTIF

SEQ ID NO: 710490 - protein, 15 aa, Homo sapiens
  CDR3 for beta chain variable domain of TCR clone 355245 (TRBV10-2, TRBJ2-7)
CASWNRGQATYEQYF

SEQ ID NO: 710491 - protein, 14 aa, Homo sapiens
  CDR3 for alpha chain variable domain of TCR clone 355246 (TRAV12-2, TRAJ13)
RAVKKTGGYQEVTF

SEQ ID NO: 710492 - protein, 15 aa, Homo sapiens
  CDR3 for beta chain variable domain of TCR clone 355246 (TRBV28, TRBJ2-5)
CASSPPWSYQETQYF

SEQ ID NO: 710493 - protein, 14 aa, Homo sapiens
  CDR3 for alpha chain variable domain of TCR clone 355247 (TRAV8-3, TRAJ39)
CAVGANNAGNMLTF

SEQ ID NO: 710494 - protein, 14 aa, Homo sapiens
  CDR3 for beta chain variable domain of TCR clone 355247 (TRBV6-1, TRBJ1-6)
CASSGTAYNSPLNF

SEQ ID NO: 710495 - protein, 12 aa, Homo sapiens
  CDR3 for alpha chain variable domain of TCR clone 355248 (TRAV13-2, TRAJ23)
CAERHRGGKLIF

SEQ ID NO: 710496 - protein, 16 aa, Homo sapiens
  CDR3 for beta chain variable domain of TCR clone 355248 (TRBV2, TRBJ2-7)
CASRKGSLGPVYEQYF

SEQ ID NO: 710497 - protein, 14 aa, Homo sapiens
  CDR3 for alpha chain variable domain of TCR clone 355249 (TRAV17, TRAJ40)
CATALTSGTYKYIF

SEQ ID NO: 710498 - protein, 17 aa, Homo sapiens
  CDR3 for beta chain variable domain of TCR clone 355249 (TRBV5-1, TRBJ2-5)
CASSLLGLAANQETQYF

SEQ ID NO: 710499 - protein, 14 aa, Homo sapiens
  CDR3 for alpha chain variable domain of TCR clone 355250 (TRAV12-2, TRAJ17)
CAVLFKAAGNKLTF

SEQ ID NO: 710500 - protein, 11 aa, Homo sapiens
  CDR3 for beta chain variable domain of TCR clone 355250 (TRBV27, TRBJ2-3)
CASSLGDTQYF

SEQ ID NO: 710501 - protein, 12 aa, Homo sapiens
  CDR3 for alpha chain variable domain of TCR clone 355251 (TRAV2, TRAJ33)
CDVEDSNYQLIW

SEQ ID NO: 710502 - protein, 14 aa, Homo sapiens
  CDR3 for beta chain variable domain of TCR clone 355251 (TRBV19, TRBJ1-4)
CASSINRGGEKLFF

SEQ ID NO: 710503 - protein, 15 aa, Homo sapiens
  CDR3 for alpha chain variable domain of TCR clone 355252 (TRAV4, TRAJ32)
CLVGEDGGATNKLIF

SEQ ID NO: 710504 - protein, 16 aa, Homo sapiens
  CDR3 for beta chain variable domain of TCR clone 355252 (TRBV13, TRBJ2-2)
CASSPRTGEHPGELFF

SEQ ID NO: 710505 - protein, 15 aa, Homo sapiens
  CDR3 for alpha chain variable domain of TCR clone 355253 (TRAV8-6, TRAJ6)
CAVRDASGGSYIPTF

SEQ ID NO: 710506 - protein, 15 aa, Homo sapiens
  CDR3 for beta chain variable domain of TCR clone 355253 (TRBV2, TRBJ2-1)
CASSRTSGRFNEQFF

SEQ ID NO: 710507 - protein, 23 aa, Homo sapiens
  CDR3 for alpha chain variable domain of TCR clone 355254 (TRAV26-1, TRAJ38)
CIADNAGNNHIQNPDPAVYQLRD

SEQ ID NO: 710508 - protein, 15 aa, Homo sapiens
  CDR3 for beta chain variable domain of TCR clone 355254 (TRBV18, TRBJ2-3)
CASSPLAGETDTQYF

SEQ ID NO: 710509 - protein, 18 aa, Homo sapiens
  CDR3 for alpha chain variable domain of TCR clone 355255 (TRAV26-2, TRAJ32)
CILKAPLNYGGATNKLIF

SEQ ID NO: 710510 - protein, 13 aa, Homo sapiens
  CDR3 for beta chain variable domain of TCR clone 355255 (TRBV7-3, TRBJ2-1)
CASSLWPYIEQFF

SEQ ID NO: 710511 - protein, 13 aa, Homo sapiens
  CDR3 for alpha chain variable domain of TCR clone 355256 (TRAV27, TRAJ39)
RAGDTPAGNMLTF

SEQ ID NO: 710512 - protein, 13 aa, Homo sapiens
  CDR3 for beta chain variable domain of TCR clone 355256 (TRBV4-1, TRBJ2-4)
CASSQVGIDIQYF

SEQ ID NO: 710513 - protein, 14 aa, Homo sapiens
  CDR3 for alpha chain variable domain of TCR clone 355257 (TRAV38-2/DV8, TRAJ30)
CAYMNGLGGDKIIF

SEQ ID NO: 710514 - protein, 15 aa, Homo sapiens
  CDR3 for beta chain variable domain of TCR clone 355257 (TRBV7-9, TRBJ2-2)
CASRPADRDTGELFF

SEQ ID NO: 710515 - protein, 15 aa, Homo sapiens
  CDR3 for alpha chain variable domain of TCR clone 355258 (TRAV2, TRAJ15)
CAVEDRGQAGTALFF

SEQ ID NO: 710516 - protein, 12 aa, Homo sapiens
  CDR3 for beta chain variable domain of TCR clone 355258 (TRBV2, TRBJ2-1)
CAKREGYNEQFF

SEQ ID NO: 710517 - protein, 14 aa, Homo sapiens
  CDR3 for alpha chain variable domain of TCR clone 355259 (TRAV12-2, TRAJ3)
CAVSLYSSASKIIF

SEQ ID NO: 710518 - protein, 14 aa, Homo sapiens
  CDR3 for beta chain variable domain of TCR clone 355259 (TRBV27, TRBJ2-1)
CAGSIAEPYNEQFF

SEQ ID NO: 710519 - protein, 14 aa, Homo sapiens
  CDR3 for alpha chain variable domain of TCR clone 355260 (TRAV13-2, TRAJ10)
CAETFTGGGDKPTF

SEQ ID NO: 710520 - protein, 16 aa, Homo sapiens
  CDR3 for beta chain variable domain of TCR clone 355260 (TRBV18, TRBJ2-7)
CASSPRSQGISYEQYF

SEQ ID NO: 710521 - protein, 17 aa, Homo sapiens
  CDR3 for alpha chain variable domain of TCR clone 355261 (TRAV23/DV6, TRAJ58)
CAARLLRGETSGSSLTF

SEQ ID NO: 710522 - protein, 14 aa, Homo sapiens
  CDR3 for beta chain variable domain of TCR clone 355261 (TRBV2, TRBJ2-7)
CASSLTSGGYEQYF

SEQ ID NO: 710523 - protein, 13 aa, Homo sapiens
  CDR3 for alpha chain variable domain of TCR clone 355262 (TRAV21, TRAJ27)
CAARSGNAGKSTF

SEQ ID NO: 710524 - protein, 14 aa, Homo sapiens
  CDR3 for beta chain variable domain of TCR clone 355262 (TRBV11-2, TRBJ2-7)
CASSLGAGAYEQYF

SEQ ID NO: 710525 - protein, 16 aa, Homo sapiens
  CDR3 for alpha chain variable domain of TCR clone 355263 (TRAV12-3, TRAJ53)
CAMTPGSGGSNYKLTF

SEQ ID NO: 710526 - protein, 15 aa, Homo sapiens
  CDR3 for beta chain variable domain of TCR clone 355263 (TRBV18, TRBJ2-7)
CASSPSSTGNYEQYF

SEQ ID NO: 710527 - protein, 14 aa, Homo sapiens
  CDR3 for alpha chain variable domain of TCR clone 355264 (TRAV8-2, TRAJ47)
CVVSDLGYGNKLVF

SEQ ID NO: 710528 - protein, 14 aa, Homo sapiens
  CDR3 for beta chain variable domain of TCR clone 355264 (TRBV7-2, TRBJ1-2)
CASSQTGSTYGYTF

SEQ ID NO: 710529 - protein, 11 aa, Homo sapiens
  CDR3 for alpha chain variable domain of TCR clone 355265 (TRAV2, TRAJ20)
CAVLNDYKLSF

SEQ ID NO: 710530 - protein, 16 aa, Homo sapiens
  CDR3 for beta chain variable domain of TCR clone 355265 (TRBV11-1, TRBJ2-2)
CASSAEGLKNTGELFS

SEQ ID NO: 710531 - protein, 13 aa, Homo sapiens
  CDR3 for alpha chain variable domain of TCR clone 355266 (TRAV8-6, TRAJ50)
CAVIKTSYDKVIF

SEQ ID NO: 710532 - protein, 16 aa, Homo sapiens
  CDR3 for beta chain variable domain of TCR clone 355266 (TRBV2, TRBJ2-3)
CASSTSVEGVTDTQYF

SEQ ID NO: 710533 - protein, 17 aa, Homo sapiens
  CDR3 for alpha chain variable domain of TCR clone 355267 (TRAV3, TRAJ38)
CAVRDCLNAGNNRKLIW

SEQ ID NO: 710534 - protein, 17 aa, Homo sapiens
  CDR3 for beta chain variable domain of TCR clone 355267 (TRBV6-5, TRBJ2-3)
CASSYGTSLYKSDTQYF

SEQ ID NO: 710535 - protein, 16 aa, Homo sapiens
  CDR3 for alpha chain variable domain of TCR clone 355268 (TRAV30, TRAJ24)
CGTENVDAGSWGKFQF

SEQ ID NO: 710536 - protein, 15 aa, Homo sapiens
  CDR3 for beta chain variable domain of TCR clone 355268 (TRBV6-3, TRBJ2-7)
CASSSPGTVLYEQYF

SEQ ID NO: 710537 - protein, 16 aa, Homo sapiens
  CDR3 for alpha chain variable domain of TCR clone 355269 (TRAV26-1, TRAJ31)
CIVRPPVLNNNARLMF

SEQ ID NO: 710538 - protein, 20 aa, Homo sapiens
  CDR3 for beta chain variable domain of TCR clone 355269 (TRBV19, TRBJ2-7)
CASTQVAPESLRAVLRAGHQ

SEQ ID NO: 710539 - protein, 18 aa, Homo sapiens
  CDR3 for alpha chain variable domain of TCR clone 355270 (TRAV36/DV7, TRAJ52)
CAVRPSPAGGTSYGKLTF

SEQ ID NO: 710540 - protein, 17 aa, Homo sapiens
  CDR3 for beta chain variable domain of TCR clone 355270 (TRBV13, TRBJ2-3)
CASSLSRVAGGRNTQYF

SEQ ID NO: 710541 - protein, 15 aa, Homo sapiens
  CDR3 for alpha chain variable domain of TCR clone 355271 (TRAV12-2, TRAJ8)
CAVREENTGFQKLVF

SEQ ID NO: 710542 - protein, 15 aa, Homo sapiens
  CDR3 for beta chain variable domain of TCR clone 355271 (TRBV28, TRBJ2-4)
CAAGCGTVLMGMQYF

SEQ ID NO: 710543 - protein, 14 aa, Homo sapiens
  CDR3 for alpha chain variable domain of TCR clone 355272 (TRAV21, TRAJ48)
CAVRSNFGNEKLTF

SEQ ID NO: 710544 - protein, 17 aa, Homo sapiens
  CDR3 for beta chain variable domain of TCR clone 355272 (TRBV28, TRBJ2-5)
CASSTPEGDALQETQYF

SEQ ID NO: 710545 - protein, 17 aa, Homo sapiens
  CDR3 for alpha chain variable domain of TCR clone 355273 (TRAV4, TRAJ13)
CLVGVQGSSGGYQKVTF

SEQ ID NO: 710546 - protein, 13 aa, Homo sapiens
  CDR3 for beta chain variable domain of TCR clone 355273 (TRBV19, TRBJ1-5)
CASSIGGNQPQHF

SEQ ID NO: 710547 - protein, 13 aa, Homo sapiens
  CDR3 for alpha chain variable domain of TCR clone 355274 (TRAV25, TRAJ30)
CAGRVDRDDKIIF

SEQ ID NO: 710548 - protein, 16 aa, Homo sapiens
  CDR3 for beta chain variable domain of TCR clone 355274 (TRBV7-8, TRBJ2-4)
CASSAERTLAKNIQYF

SEQ ID NO: 710549 - protein, 15 aa, Homo sapiens
  CDR3 for alpha chain variable domain of TCR clone 355275 (TRAV8-2, TRAJ40)
CVLLGTTSGTYKYIF

SEQ ID NO: 710550 - protein, 16 aa, Homo sapiens
  CDR3 for beta chain variable domain of TCR clone 355275 (TRBV7-3, TRBJ2-1)
CASSVEGYRSYNEQFF

SEQ ID NO: 710551 - protein, 14 aa, Homo sapiens
  CDR3 for alpha chain variable domain of TCR clone 355276 (TRAV8-3, TRAJ21)
CAVDARVNFNKFYF

SEQ ID NO: 710552 - protein, 16 aa, Homo sapiens
  CDR3 for beta chain variable domain of TCR clone 355276 (TRBV20-1, TRBJ2-1)
CSARDLAGHSYNEQFF

SEQ ID NO: 710553 - protein, 14 aa, Homo sapiens
  CDR3 for alpha chain variable domain of TCR clone 355277 (TRAV23/DV6, TRAJ4)
CAANLSGCYNKLIF

SEQ ID NO: 710554 - protein, 17 aa, Homo sapiens
  CDR3 for beta chain variable domain of TCR clone 355277 (TRBV4-1, TRBJ1-3)
CASSPQRGIRFGNTIYF

SEQ ID NO: 710555 - protein, 14 aa, Homo sapiens
  CDR3 for alpha chain variable domain of TCR clone 355278 (TRAV13-2, TRAJ29)
CAENIEPGNTPLVF

SEQ ID NO: 710556 - protein, 13 aa, Homo sapiens
  CDR3 for beta chain variable domain of TCR clone 355278 (TRBV19, TRBJ2-2)
CHHGTCEHRGAVF

SEQ ID NO: 710557 - protein, 12 aa, Homo sapiens
  CDR3 for alpha chain variable domain of TCR clone 355279 (TRAV29/DV5, TRAJ49)
CAETDTGNQFYF

SEQ ID NO: 710558 - protein, 19 aa, Homo sapiens
  CDR3 for beta chain variable domain of TCR clone 355279 (TRBV25-1, TRBJ2-2)
CAILVYRVDRGRKTGELFF

SEQ ID NO: 710559 - protein, 14 aa, Homo sapiens
  CDR3 for alpha chain variable domain of TCR clone 355280 (TRAV1-2, TRAJ16)
CAVNRFSDGQQLLF

SEQ ID NO: 710560 - protein, 15 aa, Homo sapiens
  CDR3 for beta chain variable domain of TCR clone 355280 (TRBV29-1, TRBJ2-7)
CSVEFFDRGSYEQYF

SEQ ID NO: 710561 - protein, 15 aa, Homo sapiens
  CDR3 for alpha chain variable domain of TCR clone 355281 (TRAV14/DV4, TRAJ48)
CAMREGNAGNEKLTF

SEQ ID NO: 710562 - protein, 17 aa, Homo sapiens
  CDR3 for beta chain variable domain of TCR clone 355281 (TRBV13, TRBJ2-3)
CASSLSRVAGGRNTQYF

SEQ ID NO: 710563 - protein, 16 aa, Homo sapiens
  CDR3 for alpha chain variable domain of TCR clone 355282 (TRAV26-1, TRAJ45)
CIVEKYSGGGADGLTF

SEQ ID NO: 710564 - protein, 17 aa, Homo sapiens
  CDR3 for beta chain variable domain of TCR clone 355282 (TRBV20-1, TRBJ2-2)
CSASGSGQGGLTGELFF

SEQ ID NO: 710565 - protein, 16 aa, Homo sapiens
  CDR3 for alpha chain variable domain of TCR clone 355283 (TRAV3, TRAJ4)
CAVRPSPSGGYNKLIF

SEQ ID NO: 710566 - protein, 12 aa, Homo sapiens
  CDR3 for beta chain variable domain of TCR clone 355283 (TRBV7-9, TRBJ2-7)
CASSQGVYEQYL

SEQ ID NO: 710567 - protein, 11 aa, Homo sapiens
  CDR3 for alpha chain variable domain of TCR clone 355284 (TRAV26-1, TRAJ37)
CIVRVGRKLIF

SEQ ID NO: 710568 - protein, 13 aa, Homo sapiens
  CDR3 for beta chain variable domain of TCR clone 355284 (TRBV7-6, TRBJ2-7)
CASSLDHTHEQYF

SEQ ID NO: 710569 - protein, 12 aa, Homo sapiens
  CDR3 for alpha chain variable domain of TCR clone 355285 (TRAV21, TRAJ31)
CAVWGNNARLMF

SEQ ID NO: 710570 - protein, 16 aa, Homo sapiens
  CDR3 for beta chain variable domain of TCR clone 355285 (TRBV27, TRBJ2-5)
CSSSYGPGGQKETQYF

SEQ ID NO: 710571 - protein, 14 aa, Homo sapiens
  CDR3 for alpha chain variable domain of TCR clone 355286 (TRAV16, TRAJ17)
CALGGRAAGNKLTF

SEQ ID NO: 710572 - protein, 17 aa, Homo sapiens
  CDR3 for beta chain variable domain of TCR clone 355286 (TRBV18, TRBJ2-6)
CASSPRQGAVGANDLTF

SEQ ID NO: 710573 - protein, 12 aa, Homo sapiens
  CDR3 for alpha chain variable domain of TCR clone 355287 (TRAV12-2, TRAJ42)
CAVGGSQGNLIF

SEQ ID NO: 710574 - protein, 17 aa, Homo sapiens
  CDR3 for beta chain variable domain of TCR clone 355287 (TRBV7-3, TRBJ2-3)
CASSLMKRMRGADTQYF

SEQ ID NO: 710575 - protein, 10 aa, Homo sapiens
  CDR3 for alpha chain variable domain of TCR clone 355288 (TRAV5, TRAJ34)
CAEDTDKLIF

SEQ ID NO: 710576 - protein, 13 aa, Homo sapiens
  CDR3 for beta chain variable domain of TCR clone 355288 (TRBV4-1, TRBJ2-1)
CASSQAGGDEQFF

SEQ ID NO: 710577 - protein, 13 aa, Homo sapiens
  CDR3 for alpha chain variable domain of TCR clone 355289 (TRAV34, TRAJ22)
CGAGAGSARQLTF

SEQ ID NO: 710578 - protein, 16 aa, Homo sapiens
  CDR3 for beta chain variable domain of TCR clone 355289 (TRBV7-3, TRBJ2-1)
CASSLEGYRSYNEQFF

SEQ ID NO: 710579 - protein, 14 aa, Homo sapiens
  CDR3 for alpha chain variable domain of TCR clone 355290 (TRAV17, TRAJ54)
CATDANQGPQKLVF

SEQ ID NO: 710580 - protein, 15 aa, Homo sapiens
  CDR3 for beta chain variable domain of TCR clone 355290 (TRBV9, TRBJ2-1)
CASSLAGSSYNEQFF

SEQ ID NO: 710581 - protein, 14 aa, Homo sapiens
  CDR3 for alpha chain variable domain of TCR clone 355291 (TRAV16, TRAJ15)
CALSFNQAGTALIF

SEQ ID NO: 710582 - protein, 14 aa, Homo sapiens
  CDR3 for beta chain variable domain of TCR clone 355291 (TRBV18, TRBJ2-5)
CASSPPGHQETQYF

SEQ ID NO: 710583 - protein, 15 aa, Homo sapiens
  CDR3 for alpha chain variable domain of TCR clone 355292 (TRAV26-1, TRAJ29)
CIVRVEGSGDTPLVF

SEQ ID NO: 710584 - protein, 15 aa, Homo sapiens
  CDR3 for beta chain variable domain of TCR clone 355292 (TRBV7-2, TRBJ1-2)
CASSPRAGWNYGYTF

SEQ ID NO: 710585 - protein, 14 aa, Homo sapiens
  CDR3 for alpha chain variable domain of TCR clone 355293 (TRAV17, TRAJ12)
CATDREDSSYKLIF

SEQ ID NO: 710586 - protein, 14 aa, Homo sapiens
  CDR3 for beta chain variable domain of TCR clone 355293 (TRBV4-1, TRBJ2-7)
CASSQGRDSSEQYF

SEQ ID NO: 710587 - protein, 19 aa, Homo sapiens
  CDR3 for alpha chain variable domain of TCR clone 355294 (TRAV17, TRAJ17)
CATDGRPGGIKVAGNKLTF

SEQ ID NO: 710588 - protein, 17 aa, Homo sapiens
  CDR3 for beta chain variable domain of TCR clone 355294 (TRBV12-4, TRBJ1-1)
CASSLSGFRTMNTEAFF

SEQ ID NO: 710589 - protein, 14 aa, Homo sapiens
  CDR3 for alpha chain variable domain of TCR clone 355295 (TRAV26-1, TRAJ39)
CIVRGSRAGNMRTC

SEQ ID NO: 710590 - protein, 15 aa, Homo sapiens
  CDR3 for beta chain variable domain of TCR clone 355295 (TRBV7-9, TRBJ1-5)
CASSQGHQPNQPQHF

SEQ ID NO: 710591 - protein, 13 aa, Homo sapiens
  CDR3 for alpha chain variable domain of TCR clone 355296 (TRAV23/DV6, TRAJ13)
CSNVLWGYQKVTF

SEQ ID NO: 710592 - protein, 14 aa, Homo sapiens
  CDR3 for beta chain variable domain of TCR clone 355296 (TRBV7-9, TRBJ2-1)
CASNPRDSLYEQFF

SEQ ID NO: 710593 - protein, 13 aa, Homo sapiens
  CDR3 for alpha chain variable domain of TCR clone 355297 (TRAV3, TRAJ21)
CAVREPAFNKFYL

SEQ ID NO: 710594 - protein, 13 aa, Homo sapiens
  CDR3 for beta chain variable domain of TCR clone 355297 (TRBV9, TRBJ2-1)
CASSPSGGNEQFF

SEQ ID NO: 710595 - protein, 14 aa, Homo sapiens
  CDR3 for alpha chain variable domain of TCR clone 355298 (TRAV8-3, TRAJ11)
CAVGSNSGYSTLTF

SEQ ID NO: 710596 - protein, 15 aa, Homo sapiens
  CDR3 for beta chain variable domain of TCR clone 355298 (TRBV20-1, TRBJ2-7)
CSARDRVSGMDEQYF

SEQ ID NO: 710597 - protein, 12 aa, Homo sapiens
  CDR3 for alpha chain variable domain of TCR clone 355299 (TRAV12-1, TRAJ40)
CVVPSGTYNDIF

SEQ ID NO: 710598 - protein, 15 aa, Homo sapiens
  CDR3 for beta chain variable domain of TCR clone 355299 (TRBV12-4, TRBJ2-1)
CASSPLSGRNSEQFF

SEQ ID NO: 710599 - protein, 13 aa, Homo sapiens
  CDR3 for alpha chain variable domain of TCR clone 355300 (TRAV1-2, TRAJ13)
CAVNSGGYRKVTF

SEQ ID NO: 710600 - protein, 14 aa, Homo sapiens
  CDR3 for beta chain variable domain of TCR clone 355300 (TRBV4-1, TRBJ1-5)
CASSPKGDNQPQHF

SEQ ID NO: 710601 - protein, 15 aa, Homo sapiens
  CDR3 for alpha chain variable domain of TCR clone 355301 (TRAV21, TRAJ40)
CAVRPQTSGTYKYIF

SEQ ID NO: 710602 - protein, 16 aa, Homo sapiens
  CDR3 for beta chain variable domain of TCR clone 355301 (TRBV13, TRBJ2-2)
CASSPRTGEHTGELFF

SEQ ID NO: 710603 - protein, 16 aa, Homo sapiens
  CDR3 for alpha chain variable domain of TCR clone 355302 (TRAV30, TRAJ24)
CGTEIVDADSWGKFQV

SEQ ID NO: 710604 - protein, 11 aa, Homo sapiens
  CDR3 for beta chain variable domain of TCR clone 355302 (TRBV19, TRBJ1-1)
CASSIGSEAFF

SEQ ID NO: 710605 - protein, 14 aa, Homo sapiens
  CDR3 for alpha chain variable domain of TCR clone 355303 (TRAV26-1, TRAJ38)
CIADNAGNNRKLIG

SEQ ID NO: 710606 - protein, 11 aa, Homo sapiens
  CDR3 for beta chain variable domain of TCR clone 355303 (TRBV2, TRBJ1-1)
CASREGTEAFF

SEQ ID NO: 710607 - protein, 15 aa, Homo sapiens
  CDR3 for alpha chain variable domain of TCR clone 355304 (TRAV12-1, TRAJ45)
CVVLSGRGGADGLTF

SEQ ID NO: 710608 - protein, 14 aa, Homo sapiens
  CDR3 for beta chain variable domain of TCR clone 355304 (TRBV6-3, TRBJ2-2)
CASTYTPDTGELFF

SEQ ID NO: 710609 - protein, 12 aa, Homo sapiens
  CDR3 for alpha chain variable domain of TCR clone 355305 (TRAV2, TRAJ10)
CASTGGGNKLTF

SEQ ID NO: 710610 - protein, 13 aa, Homo sapiens
  CDR3 for beta chain variable domain of TCR clone 355305 (TRBV10-3, TRBJ2-7)
CAIKKIQGHEQYF

SEQ ID NO: 710611 - protein, 16 aa, Homo sapiens
  CDR3 for alpha chain variable domain of TCR clone 355306 (TRAV12-3, TRAJ53)
CAMSPGSGGSNYKLTF

SEQ ID NO: 710612 - protein, 17 aa, Homo sapiens
  CDR3 for beta chain variable domain of TCR clone 355306 (TRBV28, TRBJ2-5)
CAISTPEGDALQETQYF

SEQ ID NO: 710613 - protein, 14 aa, Homo sapiens
  CDR3 for alpha chain variable domain of TCR clone 355307 (TRAV2, TRAJ37)
CAVEGSSNTGKLIF

SEQ ID NO: 710614 - protein, 14 aa, Homo sapiens
  CDR3 for beta chain variable domain of TCR clone 355307 (TRBV5-1, TRBJ2-7)
CASRWDWQFHEQYF

SEQ ID NO: 710615 - protein, 14 aa, Homo sapiens
  CDR3 for alpha chain variable domain of TCR clone 355308 (TRAV26-1, TRAJ45)
CIEVTCGGADGLTF

SEQ ID NO: 710616 - protein, 13 aa, Homo sapiens
  CDR3 for beta chain variable domain of TCR clone 355308 (TRBV7-6, TRBJ1-2)
CASSLVADYGYTF

SEQ ID NO: 710617 - protein, 15 aa, Homo sapiens
  CDR3 for alpha chain variable domain of TCR clone 355309 (TRAV12-3, TRAJ11)
CAMSEENSGYSTLTF

SEQ ID NO: 710618 - protein, 17 aa, Homo sapiens
  CDR3 for beta chain variable domain of TCR clone 355309 (TRBV4-1, TRBJ2-5)
CASSQDLTGGPIETQYF

SEQ ID NO: 710619 - protein, 16 aa, Homo sapiens
  CDR3 for alpha chain variable domain of TCR clone 355310 (TRAV21, TRAJ22)
CAVKKVSSGSARQLTF

SEQ ID NO: 710620 - protein, 15 aa, Homo sapiens
  CDR3 for beta chain variable domain of TCR clone 355310 (TRBV25-1, TRBJ1-4)
CASSPGDSTNEKLFF

SEQ ID NO: 710621 - protein, 15 aa, Homo sapiens
  CDR3 for alpha chain variable domain of TCR clone 355311 (TRAV34, TRAJ38)
CGADFTPGNNRKLIW

SEQ ID NO: 710622 - protein, 18 aa, Homo sapiens
  CDR3 for beta chain variable domain of TCR clone 355311 (TRBV11-2, TRBJ2-3)
CASSLGGASPGAPNTQYF

SEQ ID NO: 710623 - protein, 17 aa, Homo sapiens
  CDR3 for alpha chain variable domain of TCR clone 355312 (TRAV3, TRAJ6)
CAVRDGPRAGGSYLPTF

SEQ ID NO: 710624 - protein, 15 aa, Homo sapiens
  CDR3 for beta chain variable domain of TCR clone 355312 (TRBV7-9, TRBJ1-6)
CASSSPGRGNSPLHF

SEQ ID NO: 710625 - protein, 12 aa, Homo sapiens
  CDR3 for alpha chain variable domain of TCR clone 355313 (TRAV21, TRAJ13)
PGPSGGYQKVTF

SEQ ID NO: 710626 - protein, 15 aa, Homo sapiens
  CDR3 for beta chain variable domain of TCR clone 355313 (TRBV27, TRBJ2-5)
CASSVYPRGGETQYF

SEQ ID NO: 710627 - protein, 15 aa, Homo sapiens
  CDR3 for alpha chain variable domain of TCR clone 355314 (TRAV3, TRAJ4)
CAVRDGTGGYNKLIF

SEQ ID NO: 710628 - protein, 15 aa, Homo sapiens
  CDR3 for beta chain variable domain of TCR clone 355314 (TRBV16, TRBJ1-5)
CASSQSGTADQPQHF

SEQ ID NO: 710629 - protein, 12 aa, Homo sapiens
  CDR3 for alpha chain variable domain of TCR clone 355315 (TRAV13-2, TRAJ23)
CAERHRGGKLIF

SEQ ID NO: 710630 - protein, 13 aa, Homo sapiens
  CDR3 for beta chain variable domain of TCR clone 355315 (TRBV12-4, TRBJ1-2)
CASSSGLTVISTF

SEQ ID NO: 710631 - protein, 13 aa, Homo sapiens
  CDR3 for alpha chain variable domain of TCR clone 355316 (TRAV21, TRAJ27)
CAARPGNAGKSTF

SEQ ID NO: 710632 - protein, 20 aa, Homo sapiens
  CDR3 for beta chain variable domain of TCR clone 355316 (TRBV7-9, TRBJ2-1)
CASSSPRAPRTRSSYNEQFF

SEQ ID NO: 710633 - protein, 14 aa, Homo sapiens
  CDR3 for alpha chain variable domain of TCR clone 355317 (TRAV21, TRAJ35)
CAVMPIGLGNALHC

SEQ ID NO: 710634 - protein, 12 aa, Homo sapiens
  CDR3 for beta chain variable domain of TCR clone 355317 (TRBV7-9, TRBJ2-7)
CASSIKREEQYF

SEQ ID NO: 710635 - protein, 13 aa, Homo sapiens
  CDR3 for alpha chain variable domain of TCR clone 355318 (TRAV12-1, TRAJ20)
CVVNRETDYKPSF

SEQ ID NO: 710636 - protein, 15 aa, Homo sapiens
  CDR3 for beta chain variable domain of TCR clone 355318 (TRBV5-1, TRBJ2-2)
CASSSRGGNTGELFF

SEQ ID NO: 710637 - protein, 13 aa, Homo sapiens
  CDR3 for alpha chain variable domain of TCR clone 355319 (TRAV21, TRAJ57)
CAVTQGGSEKLVF

SEQ ID NO: 710638 - protein, 16 aa, Homo sapiens
  CDR3 for beta chain variable domain of TCR clone 355319 (TRBV29-1, TRBJ2-7)
CSVEDAEDGTSYEQYC

SEQ ID NO: 710639 - protein, 14 aa, Homo sapiens
  CDR3 for alpha chain variable domain of TCR clone 355320 (TRAV35, TRAJ41)
CAGQASVRRNALNF

SEQ ID NO: 710640 - protein, 14 aa, Homo sapiens
  CDR3 for beta chain variable domain of TCR clone 355320 (TRBV20-1, TRBJ1-2)
CSASEQGAVDGYTF

SEQ ID NO: 710641 - protein, 18 aa, Homo sapiens
  CDR3 for alpha chain variable domain of TCR clone 355321 (TRAV36/DV7, TRAJ28)
CAVDTNSGLWGWELPTHF

SEQ ID NO: 710642 - protein, 17 aa, Homo sapiens
  CDR3 for beta chain variable domain of TCR clone 355321 (TRBV5-4, TRBJ2-1)
CASSSAGGRGPYNEQFF

SEQ ID NO: 710643 - protein, 16 aa, Homo sapiens
  CDR3 for alpha chain variable domain of TCR clone 355322 (TRAV13-1, TRAJ42)
CAASMNYGGSQGNLIF

SEQ ID NO: 710644 - protein, 18 aa, Homo sapiens
  CDR3 for beta chain variable domain of TCR clone 355322 (TRBV20-1, TRBJ2-3)
CSASGLAGGPGTTDTQYF

SEQ ID NO: 710645 - protein, 12 aa, Homo sapiens
  CDR3 for alpha chain variable domain of TCR clone 355323 (TRAV13-2, TRAJ23)
CAERHRGGKLIF

SEQ ID NO: 710646 - protein, 15 aa, Homo sapiens
  CDR3 for beta chain variable domain of TCR clone 355323 (TRBV2, TRBJ1-3)
CASSISPRSGNTIYF

SEQ ID NO: 710647 - protein, 13 aa, Homo sapiens
  CDR3 for alpha chain variable domain of TCR clone 355324 (TRAV36/DV7, TRAJ53)
CALSGGGNYKLTF

SEQ ID NO: 710648 - protein, 13 aa, Homo sapiens
  CDR3 for beta chain variable domain of TCR clone 355324 (TRBV28, TRBJ2-7)
CASSLPSRYEQYF

SEQ ID NO: 710649 - protein, 17 aa, Homo sapiens
  CDR3 for alpha chain variable domain of TCR clone 355325 (TRAV26-1, TRAJ53)
CIVRVDDSGGSNYRLTF

SEQ ID NO: 710650 - protein, 15 aa, Homo sapiens
  CDR3 for beta chain variable domain of TCR clone 355325 (TRBV7-9, TRBJ1-4)
CASSRTGGFNEKLFF

SEQ ID NO: 710651 - protein, 16 aa, Homo sapiens
  CDR3 for alpha chain variable domain of TCR clone 355326 (TRAV26-2, TRAJ45)
CTTASPIGGGADGLTF

SEQ ID NO: 710652 - protein, 16 aa, Homo sapiens
  CDR3 for beta chain variable domain of TCR clone 355326 (TRBV15, TRBJ1-4)
CATSRDSPPGREKLFF

SEQ ID NO: 710653 - protein, 17 aa, Homo sapiens
  CDR3 for alpha chain variable domain of TCR clone 355327 (TRAV3, TRAJ6)
CAVRDGPWAGGSYIPTF

SEQ ID NO: 710654 - protein, 14 aa, Homo sapiens
  CDR3 for beta chain variable domain of TCR clone 355327 (TRBV7-2, TRBJ2-7)
CASSPKTSFFEQYF

SEQ ID NO: 710655 - protein, 14 aa, Homo sapiens
  CDR3 for alpha chain variable domain of TCR clone 355328 (TRAV12-3, TRAJ10)
SHLPLTGGGNKLTF

SEQ ID NO: 710656 - protein, 15 aa, Homo sapiens
  CDR3 for beta chain variable domain of TCR clone 355328 (TRBV11-2, TRBJ1-3)
CASSLDVAVGNTIYF

SEQ ID NO: 710657 - protein, 11 aa, Homo sapiens
  CDR3 for alpha chain variable domain of TCR clone 355329 (TRAV12-1, TRAJ21)
CVVNNFNKFYF

SEQ ID NO: 710658 - protein, 17 aa, Homo sapiens
  CDR3 for beta chain variable domain of TCR clone 355329 (TRBV11-2, TRBJ2-1)
CASSLYPPGVEYNEQFF

SEQ ID NO: 710659 - protein, 17 aa, Homo sapiens
  CDR3 for alpha chain variable domain of TCR clone 355330 (TRAV8-3, TRAJ34)
CAIPGRLIFGTWTRLQV

SEQ ID NO: 710660 - protein, 15 aa, Homo sapiens
  CDR3 for beta chain variable domain of TCR clone 355330 (TRBV5-7, TRBJ2-1)
CASSRRLAGDNEQFF

SEQ ID NO: 710661 - protein, 12 aa, Homo sapiens
  CDR3 for alpha chain variable domain of TCR clone 355331 (TRAV17, TRAJ12)
CATLRSNYKLIF

SEQ ID NO: 710662 - protein, 17 aa, Homo sapiens
  CDR3 for beta chain variable domain of TCR clone 355331 (TRBV7-6, TRBJ2-5)
CASSPGLADPWGETQYF

SEQ ID NO: 710663 - protein, 13 aa, Homo sapiens
  CDR3 for alpha chain variable domain of TCR clone 355332 (TRAV21, TRAJ36)
CAVIETGANNLFF

SEQ ID NO: 710664 - protein, 13 aa, Homo sapiens
  CDR3 for beta chain variable domain of TCR clone 355332 (TRBV20-1, TRBJ1-1)
CSAPLGGGTEAFF

SEQ ID NO: 710665 - protein, 17 aa, Homo sapiens
  CDR3 for alpha chain variable domain of TCR clone 355333 (TRAV23/DV6, TRAJ57)
CAASSTLSQGGSEKLVF

SEQ ID NO: 710666 - protein, 17 aa, Homo sapiens
  CDR3 for beta chain variable domain of TCR clone 355333 (TRBV28, TRBJ2-5)
CASSTPEGDALQETQYF

SEQ ID NO: 710667 - protein, 15 aa, Homo sapiens
  CDR3 for alpha chain variable domain of TCR clone 355334 (TRAV12-2, TRAJ53)
CAVNGGGGSNYKLTF

SEQ ID NO: 710668 - protein, 12 aa, Homo sapiens
  CDR3 for beta chain variable domain of TCR clone 355334 (TRBV18, TRBJ1-1)
CTSSPGQLQAFF

SEQ ID NO: 710669 - protein, 15 aa, Homo sapiens
  CDR3 for alpha chain variable domain of TCR clone 355335 (TRAV38-2/DV8, TRAJ45)
CAYWDSGGGADGLTF

SEQ ID NO: 710670 - protein, 15 aa, Homo sapiens
  CDR3 for beta chain variable domain of TCR clone 355335 (TRBV19, TRBJ2-4)
CASRGPRRGESIQYF

SEQ ID NO: 710671 - protein, 15 aa, Homo sapiens
  CDR3 for alpha chain variable domain of TCR clone 355336 (TRAV13-1, TRAJ10)
CAATILTGVGNKLTF

SEQ ID NO: 710672 - protein, 15 aa, Homo sapiens
  CDR3 for beta chain variable domain of TCR clone 355336 (TRBV2, TRBJ2-7)
CASTLLGSGATEQYF

SEQ ID NO: 710673 - protein, 13 aa, Homo sapiens
  CDR3 for alpha chain variable domain of TCR clone 355337 (TRAV21, TRAJ57)
CAVTQGGSEKLVF

SEQ ID NO: 710674 - protein, 16 aa, Homo sapiens
  CDR3 for beta chain variable domain of TCR clone 355337 (TRBV29-1, TRBJ2-7)
CSVENAEDGTAYEQYF

SEQ ID NO: 710675 - protein, 18 aa, Homo sapiens
  CDR3 for alpha chain variable domain of TCR clone 355338 (TRAV8-4, TRAJ52)
CAVTRANAGGTSYGKLTF

SEQ ID NO: 710676 - protein, 16 aa, Homo sapiens
  CDR3 for beta chain variable domain of TCR clone 355338 (TRBV12-5, TRBJ2-5)
CASGPRTSGNQETQYF

SEQ ID NO: 710677 - protein, 18 aa, Homo sapiens
  CDR3 for alpha chain variable domain of TCR clone 355339 (TRAV1-2, TRAJ18)
CAVRDMGDRGSTLGRLYF

SEQ ID NO: 710678 - protein, 14 aa, Homo sapiens
  CDR3 for beta chain variable domain of TCR clone 355339 (TRBV7-3, TRBJ2-1)
CASSLAGGTNEQFF

SEQ ID NO: 710679 - protein, 14 aa, Homo sapiens
  CDR3 for alpha chain variable domain of TCR clone 355340 (TRAV1-2, TRAJ8)
CAVRDDTGFQKLVF

SEQ ID NO: 710680 - protein, 17 aa, Homo sapiens
  CDR3 for beta chain variable domain of TCR clone 355340 (TRBV11-2, TRBJ2-1)
CASSLYPPGVECNEQFF

SEQ ID NO: 710681 - protein, 12 aa, Homo sapiens
  CDR3 for alpha chain variable domain of TCR clone 355341 (TRAV12-3, TRAJ17)
CAMTLTGNKLTF

SEQ ID NO: 710682 - protein, 15 aa, Homo sapiens
  CDR3 for beta chain variable domain of TCR clone 355341 (TRBV20-1, TRBJ2-6)
CSARDRVSGMDEQYF

SEQ ID NO: 710683 - protein, 13 aa, Homo sapiens
  CDR3 for alpha chain variable domain of TCR clone 355342 (TRAV3, TRAJ21)
CAVREPDFNKFYF

SEQ ID NO: 710684 - protein, 13 aa, Homo sapiens
  CDR3 for beta chain variable domain of TCR clone 355342 (TRBV2, TRBJ1-1)
CARNPTGGFHAFF

SEQ ID NO: 710685 - protein, 14 aa, Homo sapiens
  CDR3 for alpha chain variable domain of TCR clone 355343 (TRAV12-3, TRAJ33)
CAMSEEDSNYQLIW

SEQ ID NO: 710686 - protein, 13 aa, Homo sapiens
  CDR3 for beta chain variable domain of TCR clone 355343 (TRBV2, TRBJ2-7)
CASSVGGSGEQYF

SEQ ID NO: 710687 - protein, 15 aa, Homo sapiens
  CDR3 for alpha chain variable domain of TCR clone 355344 (TRAV8-3, TRAJ15)
CAVGAPNQAGTALIF

SEQ ID NO: 710688 - protein, 15 aa, Homo sapiens
  CDR3 for beta chain variable domain of TCR clone 355344 (TRBV28, TRBJ2-7)
CASSPGGRGFYEQYF

SEQ ID NO: 710689 - protein, 16 aa, Homo sapiens
  CDR3 for alpha chain variable domain of TCR clone 355345 (TRAV16, TRAJ4)
CALSRMFSGGYNKLIF

SEQ ID NO: 710690 - protein, 17 aa, Homo sapiens
  CDR3 for beta chain variable domain of TCR clone 355345 (TRBV20-1, TRBJ2-1)
CSASSSGLAGSYNEQFF

SEQ ID NO: 710691 - protein, 15 aa, Homo sapiens
  CDR3 for alpha chain variable domain of TCR clone 355346 (TRAV12-3, TRAJ6)
CAMSAASEGSYIPTF

SEQ ID NO: 710692 - protein, 13 aa, Homo sapiens
  CDR3 for beta chain variable domain of TCR clone 355346 (TRBV20-1, TRBJ1-2)
CSASTERIYGYTF

SEQ ID NO: 710693 - protein, 13 aa, Homo sapiens
  CDR3 for alpha chain variable domain of TCR clone 355347 (TRAV27, TRAJ41)
CAGEGNSGYALNI

SEQ ID NO: 710694 - protein, 14 aa, Homo sapiens
  CDR3 for beta chain variable domain of TCR clone 355347 (TRBV7-2, TRBJ1-1)
CASSFLTGTTEAFF

SEQ ID NO: 710695 - protein, 13 aa, Homo sapiens
  CDR3 for alpha chain variable domain of TCR clone 355348 (TRAV8-3, TRAJ20)
CAVGRPNDYKRSF

SEQ ID NO: 710696 - protein, 14 aa, Homo sapiens
  CDR3 for beta chain variable domain of TCR clone 355348 (TRBV12-5, TRBJ2-5)
CASGSRTHQETQYF

SEQ ID NO: 710697 - protein, 17 aa, Homo sapiens
  CDR3 for alpha chain variable domain of TCR clone 355349 (TRAV4, TRAJ13)
CLVGVQGSCGGYQKVTF

SEQ ID NO: 710698 - protein, 16 aa, Homo sapiens
  CDR3 for beta chain variable domain of TCR clone 355349 (TRBV28, TRBJ2-7)
CASSLFFETGGPEQYF

SEQ ID NO: 710699 - protein, 10 aa, Homo sapiens
  CDR3 for alpha chain variable domain of TCR clone 355350 (TRAV12-2, TRAJ22)
CAVNETQLTF

SEQ ID NO: 710700 - protein, 13 aa, Homo sapiens
  CDR3 for beta chain variable domain of TCR clone 355350 (TRBV7-9, TRBJ1-2)
CASSLKQNYGYAF

SEQ ID NO: 710701 - protein, 12 aa, Homo sapiens
  CDR3 for alpha chain variable domain of TCR clone 355351 (TRAV12-2, TRAJ21)
CAVRYNFNKFYF

SEQ ID NO: 710702 - protein, 16 aa, Homo sapiens
  CDR3 for beta chain variable domain of TCR clone 355351 (TRBV5-4, TRBJ2-1)
CASSRTAPPPGTRLTV

SEQ ID NO: 710703 - protein, 14 aa, Homo sapiens
  CDR3 for alpha chain variable domain of TCR clone 355352 (TRAV1-2, TRAJ29)
CAVRTDLGNTPIVF

SEQ ID NO: 710704 - protein, 14 aa, Homo sapiens
  CDR3 for beta chain variable domain of TCR clone 355352 (TRBV7-2, TRBJ2-7)
CASSPKTSFYEQYF

SEQ ID NO: 710705 - protein, 17 aa, Homo sapiens
  CDR3 for alpha chain variable domain of TCR clone 355353 (TRAV13-1, TRAJ52)
CAASSGAGGTSYGKLTF

SEQ ID NO: 710706 - protein, 12 aa, Homo sapiens
  CDR3 for beta chain variable domain of TCR clone 355353 (TRBV20-1, TRBJ2-5)
CSAPRSQETQYF

SEQ ID NO: 710707 - protein, 11 aa, Homo sapiens
  CDR3 for alpha chain variable domain of TCR clone 355354 (TRAV21, TRAJ11)
CAVNGYSTPTF

SEQ ID NO: 710708 - protein, 15 aa, Homo sapiens
  CDR3 for beta chain variable domain of TCR clone 355354 (TRBV5-1, TRBJ2-7)
CASSLDLTSSYEQYF

SEQ ID NO: 710709 - protein, 11 aa, Homo sapiens
  CDR3 for alpha chain variable domain of TCR clone 355355 (TRAV1-1, TRAJ23)
CAVRQGGKLIF

SEQ ID NO: 710710 - protein, 15 aa, Homo sapiens
  CDR3 for beta chain variable domain of TCR clone 355355 (TRBV7-2, TRBJ2-3)
CASSLAGAFIDTQYF

SEQ ID NO: 710711 - protein, 12 aa, Homo sapiens
  CDR3 for alpha chain variable domain of TCR clone 355356 (TRAV13-1, TRAJ12)
SKYMGSSYKLIF

SEQ ID NO: 710712 - protein, 14 aa, Homo sapiens
  CDR3 for beta chain variable domain of TCR clone 355356 (TRBV29-1, TRBJ2-3)
CSARAGAGTDTQYF

SEQ ID NO: 710713 - protein, 13 aa, Homo sapiens
  CDR3 for alpha chain variable domain of TCR clone 355357 (TRAV35, TRAJ53)
CAGQESSNYKLTF

SEQ ID NO: 710714 - protein, 11 aa, Homo sapiens
  CDR3 for beta chain variable domain of TCR clone 355357 (TRBV29-1, TRBJ2-5)
CSEHRTGTQYF

SEQ ID NO: 710715 - protein, 14 aa, Homo sapiens
  CDR3 for alpha chain variable domain of TCR clone 355358 (TRAV12-3, TRAJ33)
CAMSVPGSNYQLIL

SEQ ID NO: 710716 - protein, 12 aa, Homo sapiens
  CDR3 for beta chain variable domain of TCR clone 355358 (TRBV7-8, TRBJ2-7)
CASSLGDREQFF

SEQ ID NO: 710717 - protein, 13 aa, Homo sapiens
  CDR3 for alpha chain variable domain of TCR clone 355359 (TRAV3, TRAJ17)
VLPRGAAGNKLTF

SEQ ID NO: 710718 - protein, 12 aa, Homo sapiens
  CDR3 for beta chain variable domain of TCR clone 355359 (TRBV11-2, TRBJ2-2)
CASSLGGGELFF

SEQ ID NO: 710719 - protein, 12 aa, Homo sapiens
  CDR3 for alpha chain variable domain of TCR clone 355360 (TRAV2, TRAJ10)
CASTGGGNKLTF

SEQ ID NO: 710720 - protein, 13 aa, Homo sapiens
  CDR3 for beta chain variable domain of TCR clone 355360 (TRBV4-2, TRBJ1-1)
CASSQAGNTEAFF

SEQ ID NO: 710721 - protein, 13 aa, Homo sapiens
  CDR3 for alpha chain variable domain of TCR clone 355361 (TRAV13-1, TRAJ21)
CAASIYNFNKFYF

SEQ ID NO: 710722 - protein, 12 aa, Homo sapiens
  CDR3 for beta chain variable domain of TCR clone 355361 (TRBV7-8, TRBJ2-5)
CASSPRVETQYF

SEQ ID NO: 710723 - protein, 11 aa, Homo sapiens
  CDR3 for alpha chain variable domain of TCR clone 355362 (TRAV17, TRAJ9)
CATTGGFKTIF

SEQ ID NO: 710724 - protein, 14 aa, Homo sapiens
  CDR3 for beta chain variable domain of TCR clone 355362 (TRBV7-9, TRBJ2-2)
FASSGLADTGELFF

SEQ ID NO: 710725 - protein, 12 aa, Homo sapiens
  CDR3 for alpha chain variable domain of TCR clone 355363 (TRAV12-3, TRAJ17)
WSMTLTGNKLTF

SEQ ID NO: 710726 - protein, 15 aa, Homo sapiens
  CDR3 for beta chain variable domain of TCR clone 355363 (TRBV12-4, TRBJ2-5)
CASSPPTGLQETQYF

SEQ ID NO: 710727 - protein, 15 aa, Homo sapiens
  CDR3 for alpha chain variable domain of TCR clone 355364 (TRAV3, TRAJ22)
CAVRDRGGSARQLAF

SEQ ID NO: 710728 - protein, 20 aa, Homo sapiens
  CDR3 for beta chain variable domain of TCR clone 355364 (TRBV11-2, TRBJ1-6)
CASSLVFATGGSVHPSTLGT

SEQ ID NO: 710729 - protein, 14 aa, Homo sapiens
  CDR3 for alpha chain variable domain of TCR clone 355365 (TRAV20, TRAJ17)
CAMRREAAGNKLTF

SEQ ID NO: 710730 - protein, 13 aa, Homo sapiens
  CDR3 for beta chain variable domain of TCR clone 355365 (TRBV23-1, TRBJ2-1)
CASNRGTYNEQFF

SEQ ID NO: 710731 - protein, 12 aa, Homo sapiens
  CDR3 for alpha chain variable domain of TCR clone 355366 (TRAV35, TRAJ31)
CAAASNHARLMF

SEQ ID NO: 710732 - protein, 14 aa, Homo sapiens
  CDR3 for beta chain variable domain of TCR clone 355366 (TRBV2, TRBJ2-2)
CASSLFGGNGELFF

SEQ ID NO: 710733 - protein, 12 aa, Homo sapiens
  CDR3 for alpha chain variable domain of TCR clone 355367 (TRAV21, TRAJ49)
CAVNDGGNQFYF

SEQ ID NO: 710734 - protein, 14 aa, Homo sapiens
  CDR3 for beta chain variable domain of TCR clone 355367 (TRBV18, TRBJ2-7)
CASSPRGGSHEQYF

SEQ ID NO: 710735 - protein, 14 aa, Homo sapiens
  CDR3 for alpha chain variable domain of TCR clone 355368 (TRAV12-2, TRAJ13)
CAVKKSGGYQKVTF

SEQ ID NO: 710736 - protein, 13 aa, Homo sapiens
  CDR3 for beta chain variable domain of TCR clone 355368 (TRBV7-3, TRBJ1-1)
CASSQDWGAEAFF

SEQ ID NO: 710737 - protein, 13 aa, Homo sapiens
  CDR3 for alpha chain variable domain of TCR clone 355369 (TRAV13-1, TRAJ49)
CAAMLYTGNQFYF

SEQ ID NO: 710738 - protein, 14 aa, Homo sapiens
  CDR3 for beta chain variable domain of TCR clone 355369 (TRBV25-1, TRBJ1-1)
CASTHLGGNTEAFF

SEQ ID NO: 710739 - protein, 13 aa, Homo sapiens
  CDR3 for alpha chain variable domain of TCR clone 355370 (TRAV3, TRAJ16)
CAVRDRNGQKLLF

SEQ ID NO: 710740 - protein, 15 aa, Homo sapiens
  CDR3 for beta chain variable domain of TCR clone 355370 (TRBV5-1, TRBJ2-1)
CASSPLRAPYNEQFF

SEQ ID NO: 710741 - protein, 15 aa, Homo sapiens
  CDR3 for alpha chain variable domain of TCR clone 355371 (TRAV2, TRAJ24)
CAVVRLKNSWGKLQF

SEQ ID NO: 710742 - protein, 15 aa, Homo sapiens
  CDR3 for beta chain variable domain of TCR clone 355371 (TRBV9, TRBJ1-2)
CASSVVGQANYGYTF

SEQ ID NO: 710743 - protein, 14 aa, Homo sapiens
  CDR3 for alpha chain variable domain of TCR clone 355372 (TRAV8-4, TRAJ9)
CAVRINTGGFKTIF

SEQ ID NO: 710744 - protein, 15 aa, Homo sapiens
  CDR3 for beta chain variable domain of TCR clone 355372 (TRBV29-1, TRBJ2-1)
CSVGRHALFYNEQFF

SEQ ID NO: 710745 - protein, 14 aa, Homo sapiens
  CDR3 for alpha chain variable domain of TCR clone 355373 (TRAV9-2, TRAJ39)
CALYIYNAGNMLTF

SEQ ID NO: 710746 - protein, 14 aa, Homo sapiens
  CDR3 for beta chain variable domain of TCR clone 355373 (TRBV13, TRBJ2-3)
CASSSGSPTDTQYF

SEQ ID NO: 710747 - protein, 18 aa, Homo sapiens
  CDR3 for alpha chain variable domain of TCR clone 355374 (TRAV21, TRAJ52)
CAFRPSPAGGTSYGKLTF

SEQ ID NO: 710748 - protein, 17 aa, Homo sapiens
  CDR3 for beta chain variable domain of TCR clone 355374 (TRBV13, TRBJ2-3)
CASSLSRVAGGRNTQYF

SEQ ID NO: 710749 - protein, 14 aa, Homo sapiens
  CDR3 for alpha chain variable domain of TCR clone 355375 (TRAV12-3, TRAJ58)
CAMSTETSGSRLTF

SEQ ID NO: 710750 - protein, 13 aa, Homo sapiens
  CDR3 for beta chain variable domain of TCR clone 355375 (TRBV27, TRBJ2-3)
CASSWSRTDTQYF

SEQ ID NO: 710751 - protein, 13 aa, Homo sapiens
  CDR3 for alpha chain variable domain of TCR clone 355376 (TRAV21, TRAJ20)
CAVGLRVDYKLSF

SEQ ID NO: 710752 - protein, 15 aa, Homo sapiens
  CDR3 for beta chain variable domain of TCR clone 355376 (TRBV5-1, TRBJ2-3)
RASSVTSGSTDTQYF

SEQ ID NO: 710753 - protein, 16 aa, Homo sapiens
  CDR3 for alpha chain variable domain of TCR clone 355377 (TRAV23/DV6, TRAJ9)
CAASIGGNTVGFKTIF

SEQ ID NO: 710754 - protein, 17 aa, Homo sapiens
  CDR3 for beta chain variable domain of TCR clone 355377 (TRBV13, TRBJ2-3)
CASSLSRVAGGRNTQYF

SEQ ID NO: 710755 - protein, 14 aa, Homo sapiens
  CDR3 for alpha chain variable domain of TCR clone 355378 (TRAV1-2, TRAJ16)
CAVNRFSDGQKLLV

SEQ ID NO: 710756 - protein, 16 aa, Homo sapiens
  CDR3 for beta chain variable domain of TCR clone 355378 (TRBV13, TRBJ2-2)
CASSPRTGEHTGELFF

SEQ ID NO: 710757 - protein, 15 aa, Homo sapiens
  CDR3 for alpha chain variable domain of TCR clone 355379 (TRAV17, TRAJ57)
CATGPSQGGPEKLVF

SEQ ID NO: 710758 - protein, 15 aa, Homo sapiens
  CDR3 for beta chain variable domain of TCR clone 355379 (TRBV19, TRBJ2-4)
CASRGPRRGENIQYF

SEQ ID NO: 710759 - protein, 14 aa, Homo sapiens
  CDR3 for alpha chain variable domain of TCR clone 355380 (TRAV2, TRAJ9)
CAVEDRSGGFKTIF

SEQ ID NO: 710760 - protein, 17 aa, Homo sapiens
  CDR3 for beta chain variable domain of TCR clone 355380 (TRBV5-1, TRBJ2-5)
CASAVTRQFGNKETQYF

SEQ ID NO: 710761 - protein, 14 aa, Homo sapiens
  CDR3 for alpha chain variable domain of TCR clone 355381 (TRAV13-2, TRAJ17)
CAENSKAAGNKLTF

SEQ ID NO: 710762 - protein, 12 aa, Homo sapiens
  CDR3 for beta chain variable domain of TCR clone 355381 (TRBV14, TRBJ2-7)
CASSSLKGEQYV

SEQ ID NO: 710763 - protein, 13 aa, Homo sapiens
  CDR3 for alpha chain variable domain of TCR clone 355382 (TRAV20, TRAJ37)
CAGCSSNTGKLIF

SEQ ID NO: 710764 - protein, 11 aa, Homo sapiens
  CDR3 for beta chain variable domain of TCR clone 355382 (TRBV12-4, TRBJ2-3)
CASTATDPQYF

SEQ ID NO: 710765 - protein, 18 aa, Homo sapiens
  CDR3 for alpha chain variable domain of TCR clone 355383 (TRAV21, TRAJ52)
CAVRPSPAGGTSYGKLTF

SEQ ID NO: 710766 - protein, 17 aa, Homo sapiens
  CDR3 for beta chain variable domain of TCR clone 355383 (TRBV25-1, TRBJ2-1)
CASSVYGQGRGVYEQFF

SEQ ID NO: 710767 - protein, 15 aa, Homo sapiens
  CDR3 for alpha chain variable domain of TCR clone 355384 (TRAV1-2, TRAJ30)
CAVRPHGNRDDKIIF

SEQ ID NO: 710768 - protein, 13 aa, Homo sapiens
  CDR3 for beta chain variable domain of TCR clone 355384 (TRBV7-2, TRBJ2-7)
CASSSPSGSEQYF

SEQ ID NO: 710769 - protein, 16 aa, Homo sapiens
  CDR3 for alpha chain variable domain of TCR clone 355385 (TRAV12-3, TRAJ53)
CAMSPGSGGSNYKLTF

SEQ ID NO: 710770 - protein, 18 aa, Homo sapiens
  CDR3 for beta chain variable domain of TCR clone 355385 (TRBV7-2, TRBJ2-3)
CASSLKREGSGITDTQYF

SEQ ID NO: 710771 - protein, 15 aa, Homo sapiens
  CDR3 for alpha chain variable domain of TCR clone 355386 (TRAV13-1, TRAJ45)
CAASGAGGGADGLTF

SEQ ID NO: 710772 - protein, 14 aa, Homo sapiens
  CDR3 for beta chain variable domain of TCR clone 355386 (TRBV12-4, TRBJ1-2)
CASSFVGTAYGYTF

SEQ ID NO: 710773 - protein, 12 aa, Homo sapiens
  CDR3 for alpha chain variable domain of TCR clone 355387 (TRAV12-2, TRAJ31)
CAVNTPDARLMF

SEQ ID NO: 710774 - protein, 17 aa, Homo sapiens
  CDR3 for beta chain variable domain of TCR clone 355387 (TRBV13, TRBJ2-3)
CASSLSRVAGGRNTQYF

SEQ ID NO: 710775 - protein, 13 aa, Homo sapiens
  CDR3 for alpha chain variable domain of TCR clone 355388 (TRAV27, TRAJ56)
CAGKPEANSKLTF

SEQ ID NO: 710776 - protein, 18 aa, Homo sapiens
  CDR3 for beta chain variable domain of TCR clone 355388 (TRBV11-2, TRBJ2-3)
CASSLGGASRGAPNTQYF

SEQ ID NO: 710777 - protein, 13 aa, Homo sapiens
  CDR3 for alpha chain variable domain of TCR clone 355389 (TRAV3, TRAJ43)
SAVKARNNNDMRF

SEQ ID NO: 710778 - protein, 16 aa, Homo sapiens
  CDR3 for beta chain variable domain of TCR clone 355389 (TRBV7-9, TRBJ2-3)
CASSFSVAGGTDTQYF

SEQ ID NO: 710779 - protein, 16 aa, Homo sapiens
  CDR3 for alpha chain variable domain of TCR clone 355390 (TRAV3, TRAJ37)
CAVRGKGSANTGKLIF

SEQ ID NO: 710780 - protein, 15 aa, Homo sapiens
  CDR3 for beta chain variable domain of TCR clone 355390 (TRBV9, TRBJ1-6)
CASSVAGTGDSPLHF

SEQ ID NO: 710781 - protein, 15 aa, Homo sapiens
  CDR3 for alpha chain variable domain of TCR clone 355391 (TRAV23/DV6, TRAJ12)
CAAIDLGAMDSSYKL

SEQ ID NO: 710782 - protein, 12 aa, Homo sapiens
  CDR3 for beta chain variable domain of TCR clone 355391 (TRBV10-3, TRBJ2-2)
CAIKENTGELFF

SEQ ID NO: 710783 - protein, 13 aa, Homo sapiens
  CDR3 for alpha chain variable domain of TCR clone 355392 (TRAV2, TRAJ12)
CAVGADSSYKLIF

SEQ ID NO: 710784 - protein, 20 aa, Homo sapiens
  CDR3 for beta chain variable domain of TCR clone 355392 (TRBV4-1, TRBJ2-2)
CASSQASPPGLASNTGELFF

SEQ ID NO: 710785 - protein, 13 aa, Homo sapiens
  CDR3 for alpha chain variable domain of TCR clone 355393 (TRAV1-2, TRAJ36)
CAVDQTGANNLSF

SEQ ID NO: 710786 - protein, 14 aa, Homo sapiens
  CDR3 for beta chain variable domain of TCR clone 355393 (TRBV20-1, TRBJ2-5)
CSAREMTKQETQYF

SEQ ID NO: 710787 - protein, 12 aa, Homo sapiens
  CDR3 for alpha chain variable domain of TCR clone 355394 (TRAV2, TRAJ9)
CAVGAGGFKTIF

SEQ ID NO: 710788 - protein, 15 aa, Homo sapiens
  CDR3 for beta chain variable domain of TCR clone 355394 (TRBV19, TRBJ2-1)
CASSMGSSSYNEQFF

SEQ ID NO: 710789 - protein, 14 aa, Homo sapiens
  CDR3 for alpha chain variable domain of TCR clone 355395 (TRAV1-2, TRAJ16)
CAVNRFSDGQKLLF

SEQ ID NO: 710790 - protein, 14 aa, Homo sapiens
  CDR3 for beta chain variable domain of TCR clone 355395 (TRBV7-2, TRBJ2-5)
CASGPLGQSETQYF

SEQ ID NO: 710791 - protein, 11 aa, Homo sapiens
  CDR3 for alpha chain variable domain of TCR clone 355396 (TRAV2, TRAJ13)
CASGGYQKVIF

SEQ ID NO: 710792 - protein, 13 aa, Homo sapiens
  CDR3 for beta chain variable domain of TCR clone 355396 (TRBV5-4, TRBJ1-1)
CASSVDLGTEAFF

SEQ ID NO: 710793 - protein, 13 aa, Homo sapiens
  CDR3 for alpha chain variable domain of TCR clone 355397 (TRAV3, TRAJ15)
CAVRDQAGTALIF

SEQ ID NO: 710794 - protein, 11 aa, Homo sapiens
  CDR3 for beta chain variable domain of TCR clone 355397 (TRBV6-3, TRBJ2-3)
CATGQADTQYF

SEQ ID NO: 710795 - protein, 16 aa, Homo sapiens
  CDR3 for alpha chain variable domain of TCR clone 355398 (TRAV21, TRAJ37)
CAVRTAGSSSTGKLIF

SEQ ID NO: 710796 - protein, 14 aa, Homo sapiens
  CDR3 for beta chain variable domain of TCR clone 355398 (TRBV25-1, TRBJ1-1)
CASTHLGGNTEAFF

SEQ ID NO: 710797 - protein, 19 aa, Homo sapiens
  CDR3 for alpha chain variable domain of TCR clone 355399 (TRAV2, TRAJ32)
TTVLSTPPSQGGATNNLIF

SEQ ID NO: 710798 - protein, 12 aa, Homo sapiens
  CDR3 for beta chain variable domain of TCR clone 355399 (TRBV20-1, TRBJ2-7)
CSAITPTKEQYF

SEQ ID NO: 710799 - protein, 17 aa, Homo sapiens
  CDR3 for alpha chain variable domain of TCR clone 355400 (TRAV3, TRAJ12)
CAVRDVGRMDSSYKLIF

SEQ ID NO: 710800 - protein, 16 aa, Homo sapiens
  CDR3 for beta chain variable domain of TCR clone 355400 (TRBV12-5, TRBJ2-5)
CASGPRTSGNQETQYF

SEQ ID NO: 710801 - protein, 13 aa, Homo sapiens
  CDR3 for alpha chain variable domain of TCR clone 355401 (TRAV2, TRAJ40)
CAVVTSGSYKYIF

SEQ ID NO: 710802 - protein, 15 aa, Homo sapiens
  CDR3 for beta chain variable domain of TCR clone 355401 (TRBV18, TRBJ2-1)
CASSPPSASYNEQFF

SEQ ID NO: 710803 - protein, 12 aa, Homo sapiens
  CDR3 for alpha chain variable domain of TCR clone 355402 (TRAV12-3, TRAJ20)
CAMVRGDYKLSF

SEQ ID NO: 710804 - protein, 15 aa, Homo sapiens
  CDR3 for beta chain variable domain of TCR clone 355402 (TRBV7-2, TRBJ2-7)
CASSTPGLTRGEQYF

SEQ ID NO: 710805 - protein, 12 aa, Homo sapiens
  CDR3 for alpha chain variable domain of TCR clone 355403 (TRAV21, TRAJ33)
CAKMDSNYQLIW

SEQ ID NO: 710806 - protein, 16 aa, Homo sapiens
  CDR3 for beta chain variable domain of TCR clone 355403 (TRBV7-2, TRBJ2-5)
CASSPFPTGGEETQYF

SEQ ID NO: 710807 - protein, 10 aa, Homo sapiens
  CDR3 for alpha chain variable domain of TCR clone 355404 (TRAV8-1, TRAJ21)
CAVNGTKFYF

SEQ ID NO: 710808 - protein, 15 aa, Homo sapiens
  CDR3 for beta chain variable domain of TCR clone 355404 (TRBV6-3, TRBJ2-7)
CASSSPGTVFYEQYF

SEQ ID NO: 710809 - protein, 12 aa, Homo sapiens
  CDR3 for alpha chain variable domain of TCR clone 355405 (TRAV10, TRAJ31)
CMVSANNARLMF

SEQ ID NO: 710810 - protein, 11 aa, Homo sapiens
  CDR3 for beta chain variable domain of TCR clone 355405 (TRBV29-1, TRBJ1-1)
CSVEILTEAFF

SEQ ID NO: 710811 - protein, 15 aa, Homo sapiens
  CDR3 for alpha chain variable domain of TCR clone 355406 (TRAV25, TRAJ52)
CAGTSGGTSYGKLTF

SEQ ID NO: 710812 - protein, 13 aa, Homo sapiens
  CDR3 for beta chain variable domain of TCR clone 355406 (TRBV6-5, TRBJ2-5)
CASGPQGGETQYF

SEQ ID NO: 710813 - protein, 17 aa, Homo sapiens
  CDR3 for alpha chain variable domain of TCR clone 355407 (TRAV17, TRAJ7)
CATLGRLAFGKGNQVVV

SEQ ID NO: 710814 - protein, 11 aa, Homo sapiens
  CDR3 for beta chain variable domain of TCR clone 355407 (TRBV19, TRBJ1-1)
CASSIGSEAFF

SEQ ID NO: 710815 - protein, 14 aa, Homo sapiens
  CDR3 for alpha chain variable domain of TCR clone 355408 (TRAV17, TRAJ36)
CATDALSGANNLFF

SEQ ID NO: 710816 - protein, 13 aa, Homo sapiens
  CDR3 for beta chain variable domain of TCR clone 355408 (TRBV7-7, TRBJ2-2)
CASSLTSAGELFF

SEQ ID NO: 710817 - protein, 14 aa, Homo sapiens
  CDR3 for alpha chain variable domain of TCR clone 355409 (TRAV12-1, TRAJ36)
CVVNYWGKQPLLWD

SEQ ID NO: 710818 - protein, 13 aa, Homo sapiens
  CDR3 for beta chain variable domain of TCR clone 355409 (TRBV19, TRBJ1-2)
CASSVPGQGGYTF

SEQ ID NO: 710819 - protein, 14 aa, Homo sapiens
  CDR3 for alpha chain variable domain of TCR clone 355410 (TRAV17, TRAJ57)
CATDPQGVSEKLVF

SEQ ID NO: 710820 - protein, 13 aa, Homo sapiens
  CDR3 for beta chain variable domain of TCR clone 355410 (TRBV19, TRBJ2-7)
CASSPRQSYEQYF

SEQ ID NO: 710821 - protein, 14 aa, Homo sapiens
  CDR3 for alpha chain variable domain of TCR clone 355411 (TRAV23/DV6, TRAJ8)
CAASKATGFQKLVF

SEQ ID NO: 710822 - protein, 15 aa, Homo sapiens
  CDR3 for beta chain variable domain of TCR clone 355411 (TRBV28, TRBJ2-3)
CASSPDRQGANTQYV

SEQ ID NO: 710823 - protein, 14 aa, Homo sapiens
  CDR3 for alpha chain variable domain of TCR clone 355412 (TRAV12-2, TRAJ13)
CAVKKTGGYQKVTF

SEQ ID NO: 710824 - protein, 12 aa, Homo sapiens
  CDR3 for beta chain variable domain of TCR clone 355412 (TRBV11-2, TRBJ2-5)
CASSLVGETQYF

SEQ ID NO: 710825 - protein, 12 aa, Homo sapiens
  CDR3 for alpha chain variable domain of TCR clone 355413 (TRAV8-1, TRAJ26)
CAVNNCGQNFVF

SEQ ID NO: 710826 - protein, 15 aa, Homo sapiens
  CDR3 for beta chain variable domain of TCR clone 355413 (TRBV20-1, TRBJ1-1)
CSASWDRFLNTEAFF

SEQ ID NO: 710827 - protein, 13 aa, Homo sapiens
  CDR3 for alpha chain variable domain of TCR clone 355414 (TRAV30, TRAJ18)
CGTEASTLGRLYF

SEQ ID NO: 710828 - protein, 13 aa, Homo sapiens
  CDR3 for beta chain variable domain of TCR clone 355414 (TRBV18, TRBJ2-5)
CASSLQGQETQYF

SEQ ID NO: 710829 - protein, 14 aa, Homo sapiens
  CDR3 for alpha chain variable domain of TCR clone 355415 (TRAV1-2, TRAJ8)
CAVREDTGFQKLVF

SEQ ID NO: 710830 - protein, 15 aa, Homo sapiens
  CDR3 for beta chain variable domain of TCR clone 355415 (TRBV12-4, TRBJ2-5)
CASSPPTGGQETQYF

SEQ ID NO: 710831 - protein, 14 aa, Homo sapiens
  CDR3 for alpha chain variable domain of TCR clone 355416 (TRAV17, TRAJ34)
CATDSLEGTDKLIF

SEQ ID NO: 710832 - protein, 13 aa, Homo sapiens
  CDR3 for beta chain variable domain of TCR clone 355416 (TRBV11-2, TRBJ2-7)
CASSGTRPYELYF

SEQ ID NO: 710833 - protein, 10 aa, Homo sapiens
  CDR3 for alpha chain variable domain of TCR clone 355417 (TRAV1-2, TRAJ31)
CAFFDARLMF

SEQ ID NO: 710834 - protein, 14 aa, Homo sapiens
  CDR3 for beta chain variable domain of TCR clone 355417 (TRBV7-8, TRBJ2-3)
CASSLEAGTDTQYF

SEQ ID NO: 710835 - protein, 16 aa, Homo sapiens
  CDR3 for alpha chain variable domain of TCR clone 355418 (TRAV26-1, TRAJ31)
CIVGPPVLNNNARLMF

SEQ ID NO: 710836 - protein, 17 aa, Homo sapiens
  CDR3 for beta chain variable domain of TCR clone 355418 (TRBV5-1, TRBJ1-5)
CASSLVGREEGNQPQHF

SEQ ID NO: 710837 - protein, 10 aa, Homo sapiens
  CDR3 for alpha chain variable domain of TCR clone 355419 (TRAV1-2, TRAJ31)
CAFFDARLMF

SEQ ID NO: 710838 - protein, 15 aa, Homo sapiens
  CDR3 for beta chain variable domain of TCR clone 355419 (TRBV4-1, TRBJ1-4)
CASSDTGGTNEKLFC

SEQ ID NO: 710839 - protein, 13 aa, Homo sapiens
  CDR3 for alpha chain variable domain of TCR clone 355420 (TRAV13-2, TRAJ48)
CAEMDFGNEKLTF

SEQ ID NO: 710840 - protein, 15 aa, Homo sapiens
  CDR3 for beta chain variable domain of TCR clone 355420 (TRBV7-3, TRBJ2-1)
CASSQRGGAPIEQFF

SEQ ID NO: 710841 - protein, 14 aa, Homo sapiens
  CDR3 for alpha chain variable domain of TCR clone 355421 (TRAV3, TRAJ21)
CAVESQANVNKFYF

SEQ ID NO: 710842 - protein, 18 aa, Homo sapiens
  CDR3 for beta chain variable domain of TCR clone 355421 (TRBV7-9, TRBJ2-1)
CASSLAVSGTSGRNEQFF

SEQ ID NO: 710843 - protein, 12 aa, Homo sapiens
  CDR3 for alpha chain variable domain of TCR clone 355422 (TRAV13-2, TRAJ23)
CAERHRGGKLIF

SEQ ID NO: 710844 - protein, 14 aa, Homo sapiens
  CDR3 for beta chain variable domain of TCR clone 355422 (TRBV7-9, TRBJ2-7)
CASSLGQGSYEQYF

SEQ ID NO: 710845 - protein, 13 aa, Homo sapiens
  CDR3 for alpha chain variable domain of TCR clone 355423 (TRAV12-1, TRAJ29)
CVVDTSGNTPLVF

SEQ ID NO: 710846 - protein, 16 aa, Homo sapiens
  CDR3 for beta chain variable domain of TCR clone 355423 (TRBV12-4, TRBJ2-5)
CASSFFVRGRKETQYF

SEQ ID NO: 710847 - protein, 14 aa, Homo sapiens
  CDR3 for alpha chain variable domain of TCR clone 355424 (TRAV3, TRAJ21)
CAVRDWDNFNKFYF

SEQ ID NO: 710848 - protein, 17 aa, Homo sapiens
  CDR3 for beta chain variable domain of TCR clone 355424 (TRBV20-1, TRBJ1-4)
CSAIQGIDFSTNEKLFF

SEQ ID NO: 710849 - protein, 12 aa, Homo sapiens
  CDR3 for alpha chain variable domain of TCR clone 355425 (TRAV17, TRAJ39)
CATGAAGNMLTF

SEQ ID NO: 710850 - protein, 14 aa, Homo sapiens
  CDR3 for beta chain variable domain of TCR clone 355425 (TRBV5-4, TRBJ1-1)
CASSLDSRRDEAFF

SEQ ID NO: 710851 - protein, 14 aa, Homo sapiens
  CDR3 for alpha chain variable domain of TCR clone 355426 (TRAV8-3, TRAJ4)
CAVGASGGYIKLIF

SEQ ID NO: 710852 - protein, 17 aa, Homo sapiens
  CDR3 for beta chain variable domain of TCR clone 355426 (TRBV11-2, TRBJ2-1)
CASSLYPPGVEYNEQFF

SEQ ID NO: 710853 - protein, 13 aa, Homo sapiens
  CDR3 for alpha chain variable domain of TCR clone 355427 (TRAV21, TRAJ27)
CAARPGNAGKSTF

SEQ ID NO: 710854 - protein, 15 aa, Homo sapiens
  CDR3 for beta chain variable domain of TCR clone 355427 (TRBV25-1, TRBJ1-4)
CASSKRIATNEKLFF

SEQ ID NO: 710855 - protein, 13 aa, Homo sapiens
  CDR3 for alpha chain variable domain of TCR clone 355428 (TRAV2, TRAJ15)
CAVASQAGTALIF

SEQ ID NO: 710856 - protein, 14 aa, Homo sapiens
  CDR3 for beta chain variable domain of TCR clone 355428 (TRBV20-1, TRBJ1-1)
CSAQTRIGGAEAFF

SEQ ID NO: 710857 - protein, 12 aa, Homo sapiens
  CDR3 for alpha chain variable domain of TCR clone 355429 (TRAV1-2, TRAJ29)
CSVPSGNTPLVF

SEQ ID NO: 710858 - protein, 13 aa, Homo sapiens
  CDR3 for beta chain variable domain of TCR clone 355429 (TRBV5-4, TRBJ1-1)
CASSVDLGTEAFF

SEQ ID NO: 710859 - protein, 14 aa, Homo sapiens
  CDR3 for alpha chain variable domain of TCR clone 355430 (TRAV12-2, TRAJ40)
CAVKIPSGTYKYVF

SEQ ID NO: 710860 - protein, 12 aa, Homo sapiens
  CDR3 for beta chain variable domain of TCR clone 355430 (TRBV11-2, TRBJ2-1)
CASSPGNNEQFF

SEQ ID NO: 710861 - protein, 13 aa, Homo sapiens
  CDR3 for alpha chain variable domain of TCR clone 355431 (TRAV12-1, TRAJ49)
CVVTRNTGNQFYF

SEQ ID NO: 710862 - protein, 11 aa, Homo sapiens
  CDR3 for beta chain variable domain of TCR clone 355431 (TRBV7-8, TRBJ2-7)
CASSLSLEQYF

SEQ ID NO: 710863 - protein, 13 aa, Homo sapiens
  CDR3 for alpha chain variable domain of TCR clone 355432 (TRAV13-1, TRAJ39)
CSKYSNAGNMLTF

SEQ ID NO: 710864 - protein, 14 aa, Homo sapiens
  CDR3 for beta chain variable domain of TCR clone 355432 (TRBV15, TRBJ2-4)
CATEGGQGANIQYF

SEQ ID NO: 710865 - protein, 13 aa, Homo sapiens
  CDR3 for alpha chain variable domain of TCR clone 355433 (TRAV8-3, TRAJ44)
CAVVPGTASKLTF

SEQ ID NO: 710866 - protein, 14 aa, Homo sapiens
  CDR3 for beta chain variable domain of TCR clone 355433 (TRBV11-2, TRBJ2-3)
CASSRLARTDTQHS

SEQ ID NO: 710867 - protein, 12 aa, Homo sapiens
  CDR3 for alpha chain variable domain of TCR clone 355434 (TRAV8-3, TRAJ26)
CAGDNYGQNFVF

SEQ ID NO: 710868 - protein, 12 aa, Homo sapiens
  CDR3 for beta chain variable domain of TCR clone 355434 (TRBV11-2, TRBJ2-2)
CASSLRGGELLF

SEQ ID NO: 710869 - protein, 13 aa, Homo sapiens
  CDR3 for alpha chain variable domain of TCR clone 355435 (TRAV13-1, TRAJ39)
SAASIWAGNMLTF

SEQ ID NO: 710870 - protein, 15 aa, Homo sapiens
  CDR3 for beta chain variable domain of TCR clone 355435 (TRBV7-9, TRBJ1-1)
CASSLLEQGSTEAFF

SEQ ID NO: 710871 - protein, 15 aa, Homo sapiens
  CDR3 for alpha chain variable domain of TCR clone 355436 (TRAV8-3, TRAJ45)
CASSYSGGGADGLTF

SEQ ID NO: 710872 - protein, 15 aa, Homo sapiens
  CDR3 for beta chain variable domain of TCR clone 355436 (TRBV2, TRBJ2-1)
CATQARLVMIGEQFF

SEQ ID NO: 710873 - protein, 13 aa, Homo sapiens
  CDR3 for alpha chain variable domain of TCR clone 355437 (TRAV21, TRAJ57)
FAVTQGGSEKLVF

SEQ ID NO: 710874 - protein, 17 aa, Homo sapiens
  CDR3 for beta chain variable domain of TCR clone 355437 (TRBV20-1, TRBJ2-2)
CSASGSGQGGLTGELFF

SEQ ID NO: 710875 - protein, 13 aa, Homo sapiens
  CDR3 for alpha chain variable domain of TCR clone 355438 (TRAV8-3, TRAJ28)
CAVGAVGSYQLTF

SEQ ID NO: 710876 - protein, 13 aa, Homo sapiens
  CDR3 for beta chain variable domain of TCR clone 355438 (TRBV19, TRBJ1-2)
CASSVPGQDGYAF

SEQ ID NO: 710877 - protein, 12 aa, Homo sapiens
  CDR3 for alpha chain variable domain of TCR clone 355439 (TRAV3, TRAJ26)
CPVRDYGQNFVF

SEQ ID NO: 710878 - protein, 16 aa, Homo sapiens
  CDR3 for beta chain variable domain of TCR clone 355439 (TRBV11-2, TRBJ1-2)
CASSPSGREANYGYTF

SEQ ID NO: 710879 - protein, 15 aa, Homo sapiens
  CDR3 for alpha chain variable domain of TCR clone 355440 (TRAV17, TRAJ37)
CASDHGSSNTGKLIF

SEQ ID NO: 710880 - protein, 14 aa, Homo sapiens
  CDR3 for beta chain variable domain of TCR clone 355440 (TRBV7-2, TRBJ2-3)
CASSRTSGADTQYF

SEQ ID NO: 710881 - protein, 14 aa, Homo sapiens
  CDR3 for alpha chain variable domain of TCR clone 355441 (TRAV12-3, TRAJ10)
SHLPLTGGGNKLTF

SEQ ID NO: 710882 - protein, 12 aa, Homo sapiens
  CDR3 for beta chain variable domain of TCR clone 355441 (TRBV28, TRBJ2-6)
CAIPAGANVLTF

SEQ ID NO: 710883 - protein, 13 aa, Homo sapiens
  CDR3 for alpha chain variable domain of TCR clone 355442 (TRAV29/DV5, TRAJ29)
CAASAAGNTPLVF

SEQ ID NO: 710884 - protein, 14 aa, Homo sapiens
  CDR3 for beta chain variable domain of TCR clone 355442 (TRBV19, TRBJ2-3)
CASSAPRGTETQYF

SEQ ID NO: 710885 - protein, 15 aa, Homo sapiens
  CDR3 for alpha chain variable domain of TCR clone 355443 (TRAV8-4, TRAJ29)
CAVSEDFRGNTPLGF

SEQ ID NO: 710886 - protein, 18 aa, Homo sapiens
  CDR3 for beta chain variable domain of TCR clone 355443 (TRBV20-1, TRBJ2-6)
CSARTLAGGPSGANVLTF

SEQ ID NO: 710887 - protein, 13 aa, Homo sapiens
  CDR3 for alpha chain variable domain of TCR clone 355444 (TRAV35, TRAJ44)
CAGLSGPASKLTF

SEQ ID NO: 710888 - protein, 17 aa, Homo sapiens
  CDR3 for beta chain variable domain of TCR clone 355444 (TRBV7-8, TRBJ1-2)
CASSLRPLQGHLYGYTF

SEQ ID NO: 710889 - protein, 14 aa, Homo sapiens
  CDR3 for alpha chain variable domain of TCR clone 355445 (TRAV17, TRAJ39)
CATDPVRAGNTLTF

SEQ ID NO: 710890 - protein, 15 aa, Homo sapiens
  CDR3 for beta chain variable domain of TCR clone 355445 (TRBV13, TRBJ1-5)
CASSFGQGGVQPQHC

SEQ ID NO: 710891 - protein, 18 aa, Homo sapiens
  CDR3 for alpha chain variable domain of TCR clone 355446 (TRAV21, TRAJ52)
CAVRPSPAGGTSYGKLTF

SEQ ID NO: 710892 - protein, 16 aa, Homo sapiens
  CDR3 for beta chain variable domain of TCR clone 355446 (TRBV13, TRBJ2-3)
RASSLSRVAGEEYAVF

SEQ ID NO: 710893 - protein, 12 aa, Homo sapiens
  CDR3 for alpha chain variable domain of TCR clone 355447 (TRAV12-1, TRAJ34)
CVVAGATYKLIF

SEQ ID NO: 710894 - protein, 12 aa, Homo sapiens
  CDR3 for beta chain variable domain of TCR clone 355447 (TRBV7-9, TRBJ1-1)
CASSLVRGEAFF

SEQ ID NO: 710895 - protein, 14 aa, Homo sapiens
  CDR3 for alpha chain variable domain of TCR clone 355448 (TRAV1-2, TRAJ8)
CAVREDTCFQKLVF

SEQ ID NO: 710896 - protein, 14 aa, Homo sapiens
  CDR3 for beta chain variable domain of TCR clone 355448 (TRBV12-5, TRBJ2-5)
CASGSRTHQETQYF

SEQ ID NO: 710897 - protein, 14 aa, Homo sapiens
  CDR3 for alpha chain variable domain of TCR clone 355449 (TRAV17, TRAJ49)
CATDARETGNQFYF

SEQ ID NO: 710898 - protein, 14 aa, Homo sapiens
  CDR3 for beta chain variable domain of TCR clone 355449 (TRBV5-5, TRBJ1-2)
CASSFGQINYGYTF

SEQ ID NO: 710899 - protein, 13 aa, Homo sapiens
  CDR3 for alpha chain variable domain of TCR clone 355450 (TRAV21, TRAJ57)
CAVTQGGSEKLVF

SEQ ID NO: 710900 - protein, 16 aa, Homo sapiens
  CDR3 for beta chain variable domain of TCR clone 355450 (TRBV7-7, TRBJ2-3)
CASSPGTSGSTDTQYF

SEQ ID NO: 710901 - protein, 16 aa, Homo sapiens
  CDR3 for alpha chain variable domain of TCR clone 355451 (TRAV2, TRAJ4)
CAVEDRFSGGYNKLIF

SEQ ID NO: 710902 - protein, 13 aa, Homo sapiens
  CDR3 for beta chain variable domain of TCR clone 355451 (TRBV7-7, TRBJ2-5)
CVSSRSGQETQYF

SEQ ID NO: 710903 - protein, 15 aa, Homo sapiens
  CDR3 for alpha chain variable domain of TCR clone 355452 (TRAV26-2, TRAJ39)
CILRGNNNAGNMLTF

SEQ ID NO: 710904 - protein, 15 aa, Homo sapiens
  CDR3 for beta chain variable domain of TCR clone 355452 (TRBV5-4, TRBJ1-1)
CASSSLGWANTDAFF

SEQ ID NO: 710905 - protein, 15 aa, Homo sapiens
  CDR3 for alpha chain variable domain of TCR clone 355453 (TRAV3, TRAJ5)
CAVRDLDTGRRALTF

SEQ ID NO: 710906 - protein, 16 aa, Homo sapiens
  CDR3 for beta chain variable domain of TCR clone 355453 (TRBV4-3, TRBJ2-7)
CASSPRTSGRSYEQYF

SEQ ID NO: 710907 - protein, 14 aa, Homo sapiens
  CDR3 for alpha chain variable domain of TCR clone 355454 (TRAV38-1, TRAJ45)
CASHSGGGADGLTF

SEQ ID NO: 710908 - protein, 16 aa, Homo sapiens
  CDR3 for beta chain variable domain of TCR clone 355454 (TRBV27, TRBJ2-2)
CASSCRGLVRTGELFF

SEQ ID NO: 710909 - protein, 12 aa, Homo sapiens
  CDR3 for alpha chain variable domain of TCR clone 355455 (TRAV29/DV5, TRAJ31)
CAASSHNARLMF

SEQ ID NO: 710910 - protein, 17 aa, Homo sapiens
  CDR3 for beta chain variable domain of TCR clone 355455 (TRBV18, TRBJ2-6)
CASSPRKGAVGANVLTF

SEQ ID NO: 710911 - protein, 13 aa, Homo sapiens
  CDR3 for alpha chain variable domain of TCR clone 355456 (TRAV8-3, TRAJ48)
CCGCNFGNEKLTF

SEQ ID NO: 710912 - protein, 12 aa, Homo sapiens
  CDR3 for beta chain variable domain of TCR clone 355456 (TRBV7-8, TRBJ2-7)
CASSLGDREQYF

SEQ ID NO: 710913 - protein, 12 aa, Homo sapiens
  CDR3 for alpha chain variable domain of TCR clone 355457 (TRAV1-2, TRAJ26)
CAVSPYGPNFVF

SEQ ID NO: 710914 - protein, 13 aa, Homo sapiens
  CDR3 for beta chain variable domain of TCR clone 355457 (TRBV29-1, TRBJ2-7)
GSVKRGGNYEQYF

SEQ ID NO: 710915 - protein, 12 aa, Homo sapiens
  CDR3 for alpha chain variable domain of TCR clone 355458 (TRAV1-2, TRAJ33)
CAVLDSNYRLIW

SEQ ID NO: 710916 - protein, 17 aa, Homo sapiens
  CDR3 for beta chain variable domain of TCR clone 355458 (TRBV25-1, TRBJ1-2)
CASSEFGSATTNYGYTF

SEQ ID NO: 710917 - protein, 15 aa, Homo sapiens
  CDR3 for alpha chain variable domain of TCR clone 355459 (TRAV8-3, TRAJ40)
CAAPSLGSGTYKYIF

SEQ ID NO: 710918 - protein, 16 aa, Homo sapiens
  CDR3 for beta chain variable domain of TCR clone 355459 (TRBV7-3, TRBJ2-3)
CASSSSGDRPEDTQYF

SEQ ID NO: 710919 - protein, 16 aa, Homo sapiens
  CDR3 for alpha chain variable domain of TCR clone 355460 (TRAV12-1, TRAJ13)
CVVNLEVSGGCQKVTF

SEQ ID NO: 710920 - protein, 13 aa, Homo sapiens
  CDR3 for beta chain variable domain of TCR clone 355460 (TRBV10-3, TRBJ2-7)
CASKLAVNYEQYF

SEQ ID NO: 710921 - protein, 13 aa, Homo sapiens
  CDR3 for alpha chain variable domain of TCR clone 355461 (TRAV27, TRAJ41)
CAGEGNSGYALNF

SEQ ID NO: 710922 - protein, 13 aa, Homo sapiens
  CDR3 for beta chain variable domain of TCR clone 355461 (TRBV10-3, TRBJ1-2)
CAISERDSYGYTF

SEQ ID NO: 710923 - protein, 12 aa, Homo sapiens
  CDR3 for alpha chain variable domain of TCR clone 355462 (TRAV8-3, TRAJ20)
CAVGGGDYKRSF

SEQ ID NO: 710924 - protein, 12 aa, Homo sapiens
  CDR3 for beta chain variable domain of TCR clone 355462 (TRBV3-1, TRBJ2-7)
CASSQVRYEQYF

SEQ ID NO: 710925 - protein, 14 aa, Homo sapiens
  CDR3 for alpha chain variable domain of TCR clone 355463 (TRAV12-3, TRAJ10)
SHLPLPGGGNKLTF

SEQ ID NO: 710926 - protein, 13 aa, Homo sapiens
  CDR3 for beta chain variable domain of TCR clone 355463 (TRBV7-3, TRBJ1-1)
CASSQDWGAEAFF

SEQ ID NO: 710927 - protein, 16 aa, Homo sapiens
  CDR3 for alpha chain variable domain of TCR clone 355464 (TRAV3, TRAJ21)
CAVRDIERGNFNKFYF

SEQ ID NO: 710928 - protein, 16 aa, Homo sapiens
  CDR3 for beta chain variable domain of TCR clone 355464 (TRBV12-4, TRBJ1-5)
CASSRPGGGSNQPQHS

SEQ ID NO: 710929 - protein, 12 aa, Homo sapiens
  CDR3 for alpha chain variable domain of TCR clone 355465 (TRAV12-3, TRAJ40)
CAMSSGTYKYIF

SEQ ID NO: 710930 - protein, 15 aa, Homo sapiens
  CDR3 for beta chain variable domain of TCR clone 355465 (TRBV7-3, TRBJ2-2)
CASSETGQGSGELFF

SEQ ID NO: 710931 - protein, 14 aa, Homo sapiens
  CDR3 for alpha chain variable domain of TCR clone 355466 (TRAV1-2, TRAJ16)
CAVNRFSDGQKLLF

SEQ ID NO: 710932 - protein, 18 aa, Homo sapiens
  CDR3 for beta chain variable domain of TCR clone 355466 (TRBV20-1, TRBJ2-6)
CSADTTPTHGSGANVLTF

SEQ ID NO: 710933 - protein, 12 aa, Homo sapiens
  CDR3 for alpha chain variable domain of TCR clone 355467 (TRAV1-2, TRAJ24)
CAVGGSWGKFQF

SEQ ID NO: 710934 - protein, 14 aa, Homo sapiens
  CDR3 for beta chain variable domain of TCR clone 355467 (TRBV4-2, TRBJ1-4)
CASSPSSGNEKLFF

SEQ ID NO: 710935 - protein, 11 aa, Homo sapiens
  CDR3 for alpha chain variable domain of TCR clone 355468 (TRAV3, TRAJ21)
CAVGNFNKFYF

SEQ ID NO: 710936 - protein, 14 aa, Homo sapiens
  CDR3 for beta chain variable domain of TCR clone 355468 (TRBV11-2, TRBJ2-3)
CASSLGGGANTQYF

SEQ ID NO: 710937 - protein, 15 aa, Homo sapiens
  CDR3 for alpha chain variable domain of TCR clone 355469 (TRAV3, TRAJ24)
CAVRDKVTAGGNCSL

SEQ ID NO: 710938 - protein, 14 aa, Homo sapiens
  CDR3 for beta chain variable domain of TCR clone 355469 (TRBV7-2, TRBJ2-3)
CASSQTGSSYTQYF

SEQ ID NO: 710939 - protein, 15 aa, Homo sapiens
  CDR3 for alpha chain variable domain of TCR clone 355470 (TRAV1-2, TRAJ16)
CAVRARFSDGQKLLF

SEQ ID NO: 710940 - protein, 19 aa, Homo sapiens
  CDR3 for beta chain variable domain of TCR clone 355470 (TRBV11-3, TRBJ2-3)
CAGGFGTSGGPRGGGTQYF

SEQ ID NO: 710941 - protein, 14 aa, Homo sapiens
  CDR3 for alpha chain variable domain of TCR clone 355471 (TRAV1-1, TRAJ27)
CAVIYNTNAGKSTL

SEQ ID NO: 710942 - protein, 17 aa, Homo sapiens
  CDR3 for beta chain variable domain of TCR clone 355471 (TRBV7-8, TRBJ2-6)
CASSAGTGGAGANVLTF

SEQ ID NO: 710943 - protein, 15 aa, Homo sapiens
  CDR3 for alpha chain variable domain of TCR clone 355472 (TRAV1-2, TRAJ18)
CAVRGEAQPWGGYTL

SEQ ID NO: 710944 - protein, 14 aa, Homo sapiens
  CDR3 for beta chain variable domain of TCR clone 355472 (TRBV12-5, TRBJ2-5)
CASGSRTHQETQYF

SEQ ID NO: 710945 - protein, 16 aa, Homo sapiens
  CDR3 for alpha chain variable domain of TCR clone 355473 (TRAV3, TRAJ37)
CAVRPHGSSNTGKLIF

SEQ ID NO: 710946 - protein, 14 aa, Homo sapiens
  CDR3 for beta chain variable domain of TCR clone 355473 (TRBV25-1, TRBJ1-1)
CASTHLGGNTEAFF

SEQ ID NO: 710947 - protein, 13 aa, Homo sapiens
  CDR3 for alpha chain variable domain of TCR clone 355474 (TRAV2, TRAJ40)
CAVVTSGPYQYIF

SEQ ID NO: 710948 - protein, 14 aa, Homo sapiens
  CDR3 for beta chain variable domain of TCR clone 355474 (TRBV19, TRBJ2-1)
CASPTFVLSGEQFF

SEQ ID NO: 710949 - protein, 13 aa, Homo sapiens
  CDR3 for alpha chain variable domain of TCR clone 355475 (TRAV21, TRAJ27)
CAARPGNAGKSTF

SEQ ID NO: 710950 - protein, 16 aa, Homo sapiens
  CDR3 for beta chain variable domain of TCR clone 355475 (TRBV7-6, TRBJ2-1)
CIAGPAAWGGADEQFF

SEQ ID NO: 710951 - protein, 17 aa, Homo sapiens
  CDR3 for alpha chain variable domain of TCR clone 355476 (TRAV8-6, TRAJ58)
CAVSSWVGETSGSRLTF

SEQ ID NO: 710952 - protein, 13 aa, Homo sapiens
  CDR3 for beta chain variable domain of TCR clone 355476 (TRBV7-9, TRBJ2-3)
CASSPGSTDTQYF

SEQ ID NO: 710953 - protein, 13 aa, Homo sapiens
  CDR3 for alpha chain variable domain of TCR clone 355477 (TRAV12-3, TRAJ39)
CAMRSNAGNMLTF

SEQ ID NO: 710954 - protein, 14 aa, Homo sapiens
  CDR3 for beta chain variable domain of TCR clone 355477 (TRBV4-1, TRBJ2-2)
CASSQAVNTGELFF

SEQ ID NO: 710955 - protein, 17 aa, Homo sapiens
  CDR3 for alpha chain variable domain of TCR clone 355478 (TRAV3, TRAJ38)
CAVRDCLNAGNNRKLIW

SEQ ID NO: 710956 - protein, 16 aa, Homo sapiens
  CDR3 for beta chain variable domain of TCR clone 355478 (TRBV11-1, TRBJ2-7)
CASSAQTGTLSYEQYF

SEQ ID NO: 710957 - protein, 12 aa, Homo sapiens
  CDR3 for alpha chain variable domain of TCR clone 355479 (TRAV12-3, TRAJ17)
CAMTLTGNKLTF

SEQ ID NO: 710958 - protein, 15 aa, Homo sapiens
  CDR3 for beta chain variable domain of TCR clone 355479 (TRBV20-1, TRBJ2-7)
CSARDLGSGMDEQYF

SEQ ID NO: 710959 - protein, 14 aa, Homo sapiens
  CDR3 for alpha chain variable domain of TCR clone 355480 (TRAV12-2, TRAJ29)
CAVRRNSGNTPLVF

SEQ ID NO: 710960 - protein, 13 aa, Homo sapiens
  CDR3 for beta chain variable domain of TCR clone 355480 (TRBV2, TRBJ2-7)
CASSVGGSGEQYF

SEQ ID NO: 710961 - protein, 15 aa, Homo sapiens
  CDR3 for alpha chain variable domain of TCR clone 355481 (TRAV27, TRAJ38)
CAARCNAGNNRKLIW

SEQ ID NO: 710962 - protein, 13 aa, Homo sapiens
  CDR3 for beta chain variable domain of TCR clone 355481 (TRBV20-1, TRBJ1-1)
CSARAGGNTEAFF

SEQ ID NO: 710963 - protein, 15 aa, Homo sapiens
  CDR3 for alpha chain variable domain of TCR clone 355482 (TRAV3, TRAJ29)
CAVRDLYSGNTPLVF

SEQ ID NO: 710964 - protein, 17 aa, Homo sapiens
  CDR3 for beta chain variable domain of TCR clone 355482 (TRBV20-1, TRBJ2-1)
CSARDPLAGVWNNEQFF

SEQ ID NO: 710965 - protein, 13 aa, Homo sapiens
  CDR3 for alpha chain variable domain of TCR clone 355483 (TRAV17, )
CATDPTPGITMIS

SEQ ID NO: 710966 - protein, 14 aa, Homo sapiens
  CDR3 for beta chain variable domain of TCR clone 355483 (TRBV2, TRBJ2-7)
CASSRDRSSYEQYF

SEQ ID NO: 710967 - protein, 12 aa, Homo sapiens
  CDR3 for alpha chain variable domain of TCR clone 355484 (TRAV1-1, TRAJ20)
CAVREDDYKTSF

SEQ ID NO: 710968 - protein, 15 aa, Homo sapiens
  CDR3 for beta chain variable domain of TCR clone 355484 (TRBV5-7, TRBJ2-7)
CASSLPGQVFYEQYF

SEQ ID NO: 710969 - protein, 17 aa, Homo sapiens
  CDR3 for alpha chain variable domain of TCR clone 355485 (TRAV3, TRAJ42)
CAVRDRDYGGRQGNLIF

SEQ ID NO: 710970 - protein, 14 aa, Homo sapiens
  CDR3 for beta chain variable domain of TCR clone 355485 (TRBV25-1, TRBJ1-1)
CASTHLGGNTEAFF

SEQ ID NO: 710971 - protein, 14 aa, Homo sapiens
  CDR3 for alpha chain variable domain of TCR clone 355486 (TRAV1-2, TRAJ16)
CAVRSASDGQKLIF

SEQ ID NO: 710972 - protein, 13 aa, Homo sapiens
  CDR3 for beta chain variable domain of TCR clone 355486 (TRBV6-3, TRBJ1-4)
CASSPGPGEKLFF

SEQ ID NO: 710973 - protein, 14 aa, Homo sapiens
  CDR3 for alpha chain variable domain of TCR clone 355487 (TRAV1-2, TRAJ8)
CAVREYTGFQKLVF

SEQ ID NO: 710974 - protein, 18 aa, Homo sapiens
  CDR3 for beta chain variable domain of TCR clone 355487 (TRBV10-2, TRBJ2-2)
CISAPAVHRQADAGELFF

SEQ ID NO: 710975 - protein, 15 aa, Homo sapiens
  CDR3 for alpha chain variable domain of TCR clone 355488 (TRAV21, TRAJ24)
CAARSSTDSWGKLQF

SEQ ID NO: 710976 - protein, 15 aa, Homo sapiens
  CDR3 for beta chain variable domain of TCR clone 355488 (TRBV19, TRBJ2-2)
CASRQTGADTGELFF

SEQ ID NO: 710977 - protein, 15 aa, Homo sapiens
  CDR3 for alpha chain variable domain of TCR clone 355489 (TRAV26-1, TRAJ44)
CLVRANNGTASKLTF

SEQ ID NO: 710978 - protein, 16 aa, Homo sapiens
  CDR3 for beta chain variable domain of TCR clone 355489 (TRBV7-7, TRBJ2-1)
CASSLASGTSYNEQFF

SEQ ID NO: 710979 - protein, 16 aa, Homo sapiens
  CDR3 for alpha chain variable domain of TCR clone 355490 (TRAV20, TRAJ10)
CAVLRGLTVGGNKLTF

SEQ ID NO: 710980 - protein, 17 aa, Homo sapiens
  CDR3 for beta chain variable domain of TCR clone 355490 (TRBV7-3, TRBJ2-3)
CASSLMKRMRGADTQYF

SEQ ID NO: 710981 - protein, 14 aa, Homo sapiens
  CDR3 for alpha chain variable domain of TCR clone 355491 (TRAV12-3, TRAJ10)
SHLPLTGGGNKLTF

SEQ ID NO: 710982 - protein, 12 aa, Homo sapiens
  CDR3 for beta chain variable domain of TCR clone 355491 (TRBV7-9, TRBJ2-7)
CASSIKREEHYF

SEQ ID NO: 710983 - protein, 16 aa, Homo sapiens
  CDR3 for alpha chain variable domain of TCR clone 355492 (TRAV30, TRAJ24)
CGTEIVDADSWGKFQF

SEQ ID NO: 710984 - protein, 16 aa, Homo sapiens
  CDR3 for beta chain variable domain of TCR clone 355492 (TRBV7-2, TRBJ1-5)
CASSPWGPEGNQPQHF

SEQ ID NO: 710985 - protein, 12 aa, Homo sapiens
  CDR3 for alpha chain variable domain of TCR clone 355493 (TRAV12-2, TRAJ8)
CAVNTGFQKLVF

SEQ ID NO: 710986 - protein, 15 aa, Homo sapiens
  CDR3 for beta chain variable domain of TCR clone 355493 (TRBV7-8, TRBJ1-5)
CAISLERRGLEPQHF

SEQ ID NO: 710987 - protein, 11 aa, Homo sapiens
  CDR3 for alpha chain variable domain of TCR clone 355494 (TRAV13-1, TRAJ8)
CASGGFQKLVF

SEQ ID NO: 710988 - protein, 16 aa, Homo sapiens
  CDR3 for beta chain variable domain of TCR clone 355494 (TRBV7-3, TRBJ2-2)
CATSLKRGTLSGELFF

SEQ ID NO: 710989 - protein, 15 aa, Homo sapiens
  CDR3 for alpha chain variable domain of TCR clone 355495 (TRAV12-3, TRAJ6)
CAMSASTGGSYIPTF

SEQ ID NO: 710990 - protein, 16 aa, Homo sapiens
  CDR3 for beta chain variable domain of TCR clone 355495 (TRBV20-1, TRBJ1-2)
CSASMGKGVANYGYTF

SEQ ID NO: 710991 - protein, 14 aa, Homo sapiens
  CDR3 for alpha chain variable domain of TCR clone 355496 (TRAV1-2, TRAJ8)
CAVREDTGFQTLVF

SEQ ID NO: 710992 - protein, 15 aa, Homo sapiens
  CDR3 for beta chain variable domain of TCR clone 355496 (TRBV7-9, TRBJ1-4)
CASSARTGGNEKLFF

SEQ ID NO: 710993 - protein, 10 aa, Homo sapiens
  CDR3 for alpha chain variable domain of TCR clone 355497 (TRAV23/DV6, TRAJ57)
CAASPTLSQG

SEQ ID NO: 710994 - protein, 12 aa, Homo sapiens
  CDR3 for beta chain variable domain of TCR clone 355497 (TRBV2, TRBJ2-1)
CASRPGPREQFF

SEQ ID NO: 710995 - protein, 12 aa, Homo sapiens
  CDR3 for alpha chain variable domain of TCR clone 355498 (TRAV8-3, TRAJ41)
CAVALSGYALNF

SEQ ID NO: 710996 - protein, 17 aa, Homo sapiens
  CDR3 for beta chain variable domain of TCR clone 355498 (TRBV7-3, TRBJ2-2)
CASSLAGTSGGTGELFF

SEQ ID NO: 710997 - protein, 13 aa, Homo sapiens
  CDR3 for alpha chain variable domain of TCR clone 355499 (TRAV2, TRAJ40)
CAVVTSGTYKYIF

SEQ ID NO: 710998 - protein, 18 aa, Homo sapiens
  CDR3 for beta chain variable domain of TCR clone 355499 (TRBV7-2, TRBJ2-3)
CASSLETSRGRKADTQYF

SEQ ID NO: 710999 - protein, 14 aa, Homo sapiens
  CDR3 for alpha chain variable domain of TCR clone 355500 (TRAV38-1, TRAJ27)
CAFIHNTNAGKSAF

SEQ ID NO: 711000 - protein, 12 aa, Homo sapiens
  CDR3 for beta chain variable domain of TCR clone 355500 (TRBV7-8, TRBJ2-7)
CASSLGDREQYF

SEQ ID NO: 711001 - protein, 14 aa, Homo sapiens
  CDR3 for alpha chain variable domain of TCR clone 355501 (TRAV26-1, TRAJ21)
CIVRVGYNFNKFYF

SEQ ID NO: 711002 - protein, 13 aa, Homo sapiens
  CDR3 for beta chain variable domain of TCR clone 355501 (TRBV24-1, TRBJ2-1)
CATSAGPYNEQFF

SEQ ID NO: 711003 - protein, 14 aa, Homo sapiens
  CDR3 for alpha chain variable domain of TCR clone 355502 (TRAV16, TRAJ33)
FALSAMDSNYQLIW

SEQ ID NO: 711004 - protein, 17 aa, Homo sapiens
  CDR3 for beta chain variable domain of TCR clone 355502 (TRBV5-4, TRBJ1-1)
CASFPPKGRLQNTEAFF

SEQ ID NO: 711005 - protein, 14 aa, Homo sapiens
  CDR3 for alpha chain variable domain of TCR clone 355503 (TRAV12-2, TRAJ13)
CAVKKTGGYQKVSF

SEQ ID NO: 711006 - protein, 12 aa, Homo sapiens
  CDR3 for beta chain variable domain of TCR clone 355503 (TRBV6-3, TRBJ2-7)
CASSLTPYEQYF

SEQ ID NO: 711007 - protein, 13 aa, Homo sapiens
  CDR3 for alpha chain variable domain of TCR clone 355504 (TRAV1-2, TRAJ9)
CAALNTGGFKTIF

SEQ ID NO: 711008 - protein, 14 aa, Homo sapiens
  CDR3 for beta chain variable domain of TCR clone 355504 (TRBV5-1, TRBJ2-2)
CASSLGGGSGELFF

SEQ ID NO: 711009 - protein, 17 aa, Homo sapiens
  CDR3 for alpha chain variable domain of TCR clone 355505 (TRAV3, TRAJ6)
CAVRDGPRAGGIYIPTF

SEQ ID NO: 711010 - protein, 14 aa, Homo sapiens
  CDR3 for beta chain variable domain of TCR clone 355505 (TRBV7-2, TRBJ2-7)
CASSPKTRFYEQYF

SEQ ID NO: 711011 - protein, 11 aa, Homo sapiens
  CDR3 for alpha chain variable domain of TCR clone 355506 (TRAV12-1, TRAJ21)
CVVNNFNKFYF

SEQ ID NO: 711012 - protein, 11 aa, Homo sapiens
  CDR3 for beta chain variable domain of TCR clone 355506 (TRBV10-3, TRBJ2-7)
CAISGGLEQYF

SEQ ID NO: 711013 - protein, 15 aa, Homo sapiens
  CDR3 for alpha chain variable domain of TCR clone 355507 (TRAV35, TRAJ40)
CAGQLGISGTYKYIF

SEQ ID NO: 711014 - protein, 14 aa, Homo sapiens
  CDR3 for beta chain variable domain of TCR clone 355507 (TRBV7-3, TRBJ2-1)
WASSLEGGTNEQFF

SEQ ID NO: 711015 - protein, 17 aa, Homo sapiens
  CDR3 for alpha chain variable domain of TCR clone 355508 (TRAV14/DV4, TRAJ22)
CAMREGFSSGSARQLTF

SEQ ID NO: 711016 - protein, 12 aa, Homo sapiens
  CDR3 for beta chain variable domain of TCR clone 355508 (TRBV7-9, TRBJ2-7)
CASSIKREEQYF

SEQ ID NO: 711017 - protein, 12 aa, Homo sapiens
  CDR3 for alpha chain variable domain of TCR clone 355509 (TRAV2, TRAJ31)
CAVEDNNARLMF

SEQ ID NO: 711018 - protein, 15 aa, Homo sapiens
  CDR3 for beta chain variable domain of TCR clone 355509 (TRBV11-3, TRBJ2-7)
CASSPGPASSYEQYF

SEQ ID NO: 711019 - protein, 14 aa, Homo sapiens
  CDR3 for alpha chain variable domain of TCR clone 355510 (TRAV1-2, TRAJ16)
CAVNRFSDGPKLLF

SEQ ID NO: 711020 - protein, 17 aa, Homo sapiens
  CDR3 for beta chain variable domain of TCR clone 355510 (TRBV4-2, TRBJ1-1)
CASTQFGGGSGNTEAFF

SEQ ID NO: 711021 - protein, 13 aa, Homo sapiens
  CDR3 for alpha chain variable domain of TCR clone 355511 (TRAV21, TRAJ27)
CAARPGNAGKSTF

SEQ ID NO: 711022 - protein, 13 aa, Homo sapiens
  CDR3 for beta chain variable domain of TCR clone 355511 (TRBV5-1, TRBJ2-3)
CASSSEITDMQYF

SEQ ID NO: 711023 - protein, 13 aa, Homo sapiens
  CDR3 for alpha chain variable domain of TCR clone 355512 (TRAV13-2, TRAJ48)
CAEMDFGNEKLTF

SEQ ID NO: 711024 - protein, 10 aa, Homo sapiens
  CDR3 for beta chain variable domain of TCR clone 355512 (TRBV13, TRBJ2-3)
VAGGRNTQYF

SEQ ID NO: 711025 - protein, 13 aa, Homo sapiens
  CDR3 for alpha chain variable domain of TCR clone 355513 (TRAV20, TRAJ49)
CAVRARTGNQFYF

SEQ ID NO: 711026 - protein, 17 aa, Homo sapiens
  CDR3 for beta chain variable domain of TCR clone 355513 (TRBV20-1, TRBJ2-2)
CSASGSGQGGLTGELFF

SEQ ID NO: 711027 - protein, 12 aa, Homo sapiens
  CDR3 for alpha chain variable domain of TCR clone 355514 (TRAV2, TRAJ31)
CAVEDNNARLMF

SEQ ID NO: 711028 - protein, 14 aa, Homo sapiens
  CDR3 for beta chain variable domain of TCR clone 355514 (TRBV20-1, TRBJ2-7)
CSAKRGRSSYEQYF

SEQ ID NO: 711029 - protein, 13 aa, Homo sapiens
  CDR3 for alpha chain variable domain of TCR clone 355515 (TRAV35, TRAJ42)
CAGFPGSQGNLIF

SEQ ID NO: 711030 - protein, 16 aa, Homo sapiens
  CDR3 for beta chain variable domain of TCR clone 355515 (TRBV20-1, TRBJ1-4)
CSAPGQGLLTNEKLFF

SEQ ID NO: 711031 - protein, 15 aa, Homo sapiens
  CDR3 for alpha chain variable domain of TCR clone 355516 (TRAV30, TRAJ57)
CGTAIPQGGSEKLVF

SEQ ID NO: 711032 - protein, 13 aa, Homo sapiens
  CDR3 for beta chain variable domain of TCR clone 355516 (TRBV7-9, TRBJ1-2)
CASSPSNCWGYTF

SEQ ID NO: 711033 - protein, 15 aa, Homo sapiens
  CDR3 for alpha chain variable domain of TCR clone 355517 (TRAV8-3, TRAJ32)
CAVGPYGGATNKLIF

SEQ ID NO: 711034 - protein, 14 aa, Homo sapiens
  CDR3 for beta chain variable domain of TCR clone 355517 (TRBV29-1, TRBJ2-2)
CSPLAETNTGELFF

SEQ ID NO: 711035 - protein, 10 aa, Homo sapiens
  CDR3 for alpha chain variable domain of TCR clone 355518 (TRAV21, TRAJ31)
CAVDNARLMF

SEQ ID NO: 711036 - protein, 18 aa, Homo sapiens
  CDR3 for beta chain variable domain of TCR clone 355518 (TRBV18, TRBJ1-3)
CASSPRGGAGPSGNTIYF

SEQ ID NO: 711037 - protein, 12 aa, Homo sapiens
  CDR3 for alpha chain variable domain of TCR clone 355519 (TRAV26-2, TRAJ48)
CILRKGNEKLTF

SEQ ID NO: 711038 - protein, 12 aa, Homo sapiens
  CDR3 for beta chain variable domain of TCR clone 355519 (TRBV29-1, TRBJ2-3)
CSVTGGADTQYF

SEQ ID NO: 711039 - protein, 13 aa, Homo sapiens
  CDR3 for alpha chain variable domain of TCR clone 355520 (TRAV23/DV6, TRAJ16)
CAASISDGQKPLF

SEQ ID NO: 711040 - protein, 15 aa, Homo sapiens
  CDR3 for beta chain variable domain of TCR clone 355520 (TRBV2, TRBJ2-2)
CASSRETVGTGELFF

SEQ ID NO: 711041 - protein, 15 aa, Homo sapiens
  CDR3 for alpha chain variable domain of TCR clone 355521 (TRAV12-3, TRAJ6)
CAMSASTGVSYIPTF

SEQ ID NO: 711042 - protein, 16 aa, Homo sapiens
  CDR3 for beta chain variable domain of TCR clone 355521 (TRBV20-1, TRBJ1-2)
CSASTGQGVANYGYTF

SEQ ID NO: 711043 - protein, 11 aa, Homo sapiens
  CDR3 for alpha chain variable domain of TCR clone 355522 (TRAV12-1, TRAJ34)
CVVNKGRELIF

SEQ ID NO: 711044 - protein, 15 aa, Homo sapiens
  CDR3 for beta chain variable domain of TCR clone 355522 (TRBV10-3, TRBJ2-1)
CASRNGTSGHNEQFF

SEQ ID NO: 711045 - protein, 15 aa, Homo sapiens
  CDR3 for alpha chain variable domain of TCR clone 355523 (TRAV12-3, TRAJ6)
CAMSATSGGSYIPTF

SEQ ID NO: 711046 - protein, 19 aa, Homo sapiens
  CDR3 for beta chain variable domain of TCR clone 355523 (TRBV19, TRBJ2-5)
CASSIGQVTDFFLGETQYF

SEQ ID NO: 711047 - protein, 14 aa, Homo sapiens
  CDR3 for alpha chain variable domain of TCR clone 355524 (TRAV12-1, TRAJ17)
CVVNYKAAGNKLTF

SEQ ID NO: 711048 - protein, 17 aa, Homo sapiens
  CDR3 for beta chain variable domain of TCR clone 355524 (TRBV20-1, TRBJ2-2)
CSASGSGQGGLTGELFL

SEQ ID NO: 711049 - protein, 14 aa, Homo sapiens
  CDR3 for alpha chain variable domain of TCR clone 355525 (TRAV1-2, TRAJ16)
CAVNRFSDGHKLLF

SEQ ID NO: 711050 - protein, 14 aa, Homo sapiens
  CDR3 for beta chain variable domain of TCR clone 355525 (TRBV20-1, TRBJ2-7)
CSAKRGRSSYEQYF

SEQ ID NO: 711051 - protein, 14 aa, Homo sapiens
  CDR3 for alpha chain variable domain of TCR clone 355526 (TRAV26-1, TRAJ38)
CIADNAGNDRKLIW

SEQ ID NO: 711052 - protein, 14 aa, Homo sapiens
  CDR3 for beta chain variable domain of TCR clone 355526 (TRBV4-1, TRBJ2-2)
CASSRAVNTGELFF

SEQ ID NO: 711053 - protein, 15 aa, Homo sapiens
  CDR3 for alpha chain variable domain of TCR clone 355527 (TRAV12-3, TRAJ6)
CAMSATTGGSYIPTF

SEQ ID NO: 711054 - protein, 14 aa, Homo sapiens
  CDR3 for beta chain variable domain of TCR clone 355527 (TRBV19, TRBJ2-1)
CASPAFVLSGEQFF

SEQ ID NO: 711055 - protein, 12 aa, Homo sapiens
  CDR3 for alpha chain variable domain of TCR clone 355528 (TRAV1-1, TRAJ24)
CAVRGSWGKFQF

SEQ ID NO: 711056 - protein, 15 aa, Homo sapiens
  CDR3 for beta chain variable domain of TCR clone 355528 (TRBV6-3, TRBJ2-7)
GASSSPGTVFYEQYF

SEQ ID NO: 711057 - protein, 11 aa, Homo sapiens
  CDR3 for alpha chain variable domain of TCR clone 355529 (TRAV17, TRAJ9)
CGFTGGFKTIF

SEQ ID NO: 711058 - protein, 14 aa, Homo sapiens
  CDR3 for beta chain variable domain of TCR clone 355529 (TRBV11-2, TRBJ2-5)
CASSRSGGIETQYF

SEQ ID NO: 711059 - protein, 16 aa, Homo sapiens
  CDR3 for alpha chain variable domain of TCR clone 355530 (TRAV3, TRAJ3)
CAVGDRAKSSASKIIF

SEQ ID NO: 711060 - protein, 16 aa, Homo sapiens
  CDR3 for beta chain variable domain of TCR clone 355530 (TRBV20-1, TRBJ1-4)
CSAPGQGLLTNEKLFF

SEQ ID NO: 711061 - protein, 14 aa, Homo sapiens
  CDR3 for alpha chain variable domain of TCR clone 355531 (TRAV38-1, TRAJ40)
CALRPTSGTYKYIF

SEQ ID NO: 711062 - protein, 14 aa, Homo sapiens
  CDR3 for beta chain variable domain of TCR clone 355531 (TRBV19, TRBJ2-1)
CASPTFVLSGEQYF

SEQ ID NO: 711063 - protein, 13 aa, Homo sapiens
  CDR3 for alpha chain variable domain of TCR clone 355532 (TRAV2, TRAJ13)
CAVESGGYQKVTF

SEQ ID NO: 711064 - protein, 12 aa, Homo sapiens
  CDR3 for beta chain variable domain of TCR clone 355532 (TRBV19, TRBJ1-5)
CASSIAQQPQHF

SEQ ID NO: 711065 - protein, 15 aa, Homo sapiens
  CDR3 for alpha chain variable domain of TCR clone 355533 (TRAV17, TRAJ57)
CATGPSQGGSEKLVF

SEQ ID NO: 711066 - protein, 18 aa, Homo sapiens
  CDR3 for beta chain variable domain of TCR clone 355533 (TRBV4-3, TRBJ2-6)
CASSQDIQGGPGANVLTF

SEQ ID NO: 711067 - protein, 14 aa, Homo sapiens
  CDR3 for alpha chain variable domain of TCR clone 355534 (TRAV13-1, TRAJ10)
CAAKEPRGGNKLTF

SEQ ID NO: 711068 - protein, 14 aa, Homo sapiens
  CDR3 for beta chain variable domain of TCR clone 355534 (TRBV20-1, TRBJ1-1)
CSAQTRIGGTEAFF

SEQ ID NO: 711069 - protein, 14 aa, Homo sapiens
  CDR3 for alpha chain variable domain of TCR clone 355535 (TRAV1-2, TRAJ16)
CAVNRFSNGQKLLF

SEQ ID NO: 711070 - protein, 15 aa, Homo sapiens
  CDR3 for beta chain variable domain of TCR clone 355535 (TRBV28, TRBJ2-5)
CASSSGRTIQETQYF

SEQ ID NO: 711071 - protein, 12 aa, Homo sapiens
  CDR3 for alpha chain variable domain of TCR clone 355536 (TRAV3, TRAJ43)
CAVRGTNNDMRF

SEQ ID NO: 711072 - protein, 15 aa, Homo sapiens
  CDR3 for beta chain variable domain of TCR clone 355536 (TRBV27, TRBJ1-5)
CASSLGTGFDQPQHF

SEQ ID NO: 711073 - protein, 16 aa, Homo sapiens
  CDR3 for alpha chain variable domain of TCR clone 355537 (TRAV12-2, TRAJ6)
CAAPLAGSGGSYIPTS

SEQ ID NO: 711074 - protein, 13 aa, Homo sapiens
  CDR3 for beta chain variable domain of TCR clone 355537 (TRBV6-9, TRBJ2-5)
CASKGDGRRTQYF

SEQ ID NO: 711075 - protein, 14 aa, Homo sapiens
  CDR3 for alpha chain variable domain of TCR clone 355538 (TRAV12-3, TRAJ10)
SHLPLTGGGNKLTF

SEQ ID NO: 711076 - protein, 15 aa, Homo sapiens
  CDR3 for beta chain variable domain of TCR clone 355538 (TRBV10-2, TRBJ2-6)
CASSEQGTGANVPTF

SEQ ID NO: 711077 - protein, 16 aa, Homo sapiens
  CDR3 for alpha chain variable domain of TCR clone 355539 (TRAV1-2, TRAJ6)
FAVRDQGTGGSYIPTF

SEQ ID NO: 711078 - protein, 13 aa, Homo sapiens
  CDR3 for beta chain variable domain of TCR clone 355539 (TRBV12-4, TRBJ1-2)
CASSLRQGKGYTF

SEQ ID NO: 711079 - protein, 14 aa, Homo sapiens
  CDR3 for alpha chain variable domain of TCR clone 355540 (TRAV3, TRAJ7)
CAVREEEREQQTRF

SEQ ID NO: 711080 - protein, 15 aa, Homo sapiens
  CDR3 for beta chain variable domain of TCR clone 355540 (TRBV20-1, TRBJ2-7)
CSARDRASGMDEQYF

SEQ ID NO: 711081 - protein, 12 aa, Homo sapiens
  CDR3 for alpha chain variable domain of TCR clone 355541 (TRAV27, TRAJ36)
CAGMTGANNFFF

SEQ ID NO: 711082 - protein, 14 aa, Homo sapiens
  CDR3 for beta chain variable domain of TCR clone 355541 (TRBV12-4, TRBJ2-3)
CASSLVPSTDTQYF

SEQ ID NO: 711083 - protein, 12 aa, Homo sapiens
  CDR3 for alpha chain variable domain of TCR clone 355542 (TRAV16, TRAJ21)
CALLGNFNKFYF

SEQ ID NO: 711084 - protein, 16 aa, Homo sapiens
  CDR3 for beta chain variable domain of TCR clone 355542 (TRBV2, TRBJ2-5)
CASSARGLRGRETQYF

SEQ ID NO: 711085 - protein, 15 aa, Homo sapiens
  CDR3 for alpha chain variable domain of TCR clone 355543 (TRAV8-3, TRAJ21)
CAVGALPPRGYKFYF

SEQ ID NO: 711086 - protein, 15 aa, Homo sapiens
  CDR3 for beta chain variable domain of TCR clone 355543 (TRBV7-8, TRBJ1-5)
CASSLERRGLEPQHF

SEQ ID NO: 711087 - protein, 14 aa, Homo sapiens
  CDR3 for alpha chain variable domain of TCR clone 355544 (TRAV12-2, TRAJ13)
CAVKKTGGYHKVTF

SEQ ID NO: 711088 - protein, 13 aa, Homo sapiens
  CDR3 for beta chain variable domain of TCR clone 355544 (TRBV12-5, TRBJ2-3)
CASGDRQSDTQYF

SEQ ID NO: 711089 - protein, 12 aa, Homo sapiens
  CDR3 for alpha chain variable domain of TCR clone 355545 (TRAV12-2, TRAJ10)
WWVTGGGNKLTF

SEQ ID NO: 711090 - protein, 14 aa, Homo sapiens
  CDR3 for beta chain variable domain of TCR clone 355545 (TRBV19, TRBJ2-3)
CASSAPRGTDTQYF

SEQ ID NO: 711091 - protein, 13 aa, Homo sapiens
  CDR3 for alpha chain variable domain of TCR clone 355546 (TRAV12-2, TRAJ20)
CAVYPSNDYKPSF

SEQ ID NO: 711092 - protein, 15 aa, Homo sapiens
  CDR3 for beta chain variable domain of TCR clone 355546 (TRBV5-7, TRBJ1-5)
CASSYGKLWDQPQHF

SEQ ID NO: 711093 - protein, 16 aa, Homo sapiens
  CDR3 for alpha chain variable domain of TCR clone 355547 (TRAV16, TRAJ42)
CARKMNYGGSQGNRIF

SEQ ID NO: 711094 - protein, 13 aa, Homo sapiens
  CDR3 for beta chain variable domain of TCR clone 355547 (TRBV20-1, TRBJ2-7)
CSASPPSSYEQYF

SEQ ID NO: 711095 - protein, 11 aa, Homo sapiens
  CDR3 for alpha chain variable domain of TCR clone 355548 (TRAV8-4, TRAJ20)
CAVTNVLTTTS

SEQ ID NO: 711096 - protein, 11 aa, Homo sapiens
  CDR3 for beta chain variable domain of TCR clone 355548 (TRBV12-4, TRBJ2-3)
CASTATDTQYF

SEQ ID NO: 711097 - protein, 15 aa, Homo sapiens
  CDR3 for alpha chain variable domain of TCR clone 355549 (TRAV26-2, TRAJ54)
CILRDEGQGAQKLVF

SEQ ID NO: 711098 - protein, 13 aa, Homo sapiens
  CDR3 for beta chain variable domain of TCR clone 355549 (TRBV7-9, TRBJ1-1)
CASSLAGVTEAFF

SEQ ID NO: 711099 - protein, 13 aa, Homo sapiens
  CDR3 for alpha chain variable domain of TCR clone 355550 (TRAV27, TRAJ45)
CRSSGGGADGLTF

SEQ ID NO: 711100 - protein, 15 aa, Homo sapiens
  CDR3 for beta chain variable domain of TCR clone 355550 (TRBV7-2, TRBJ2-3)
CASSPQSLITDTQYF

SEQ ID NO: 711101 - protein, 14 aa, Homo sapiens
  CDR3 for alpha chain variable domain of TCR clone 355551 (TRAV8-2, TRAJ4)
CVVSPSVGYNRLIF

SEQ ID NO: 711102 - protein, 15 aa, Homo sapiens
  CDR3 for beta chain variable domain of TCR clone 355551 (TRBV4-1, TRBJ1-4)
CASSDTGGTNEKLFF

SEQ ID NO: 711103 - protein, 13 aa, Homo sapiens
  CDR3 for alpha chain variable domain of TCR clone 355552 (TRAV13-1, TRAJ5)
CAAEHTGRRALTF

SEQ ID NO: 711104 - protein, 17 aa, Homo sapiens
  CDR3 for beta chain variable domain of TCR clone 355552 (TRBV11-2, TRBJ2-1)
CASSLYPPGVEYNEQFF

SEQ ID NO: 711105 - protein, 17 aa, Homo sapiens
  CDR3 for alpha chain variable domain of TCR clone 355553 (TRAV12-3, TRAJ6)
CAMSARGGAGGSYIPTF

SEQ ID NO: 711106 - protein, 18 aa, Homo sapiens
  CDR3 for beta chain variable domain of TCR clone 355553 (TRBV7-4, TRBJ2-3)
CARSPRGTSGTGTDTQYF

SEQ ID NO: 711107 - protein, 15 aa, Homo sapiens
  CDR3 for alpha chain variable domain of TCR clone 355554 (TRAV3, TRAJ22)
CAVRDRGCSARQLTF

SEQ ID NO: 711108 - protein, 15 aa, Homo sapiens
  CDR3 for beta chain variable domain of TCR clone 355554 (TRBV27, TRBJ2-1)
CASSNGGGSSNEQFF

SEQ ID NO: 711109 - protein, 13 aa, Homo sapiens
  CDR3 for alpha chain variable domain of TCR clone 355555 (TRAV13-1, TRAJ43)
CAASLSNNNDMRF

SEQ ID NO: 711110 - protein, 21 aa, Homo sapiens
  CDR3 for beta chain variable domain of TCR clone 355555 (TRBV5-1, TRBJ2-5)
RGSGCSVSAGCWGAGEKTQYF

SEQ ID NO: 711111 - protein, 13 aa, Homo sapiens
  CDR3 for alpha chain variable domain of TCR clone 355556 (TRAV13-2, TRAJ49)
CAENTNTGNQFYF

SEQ ID NO: 711112 - protein, 14 aa, Homo sapiens
  CDR3 for beta chain variable domain of TCR clone 355556 (TRBV2, TRBJ2-1)
CASRTGSSYNEQFF

SEQ ID NO: 711113 - protein, 13 aa, Homo sapiens
  CDR3 for alpha chain variable domain of TCR clone 355557 (TRAV3, TRAJ27)
CAVRPLGAGQSTF

SEQ ID NO: 711114 - protein, 13 aa, Homo sapiens
  CDR3 for beta chain variable domain of TCR clone 355557 (TRBV7-9, TRBJ2-3)
GASSPGSTDTQYF

SEQ ID NO: 711115 - protein, 12 aa, Homo sapiens
  CDR3 for alpha chain variable domain of TCR clone 355558 (TRAV2, TRAJ36)
CAELTGANNLFF

SEQ ID NO: 711116 - protein, 13 aa, Homo sapiens
  CDR3 for beta chain variable domain of TCR clone 355558 (TRBV18, TRBJ2-7)
CQLTERGSYEQYF

SEQ ID NO: 711117 - protein, 14 aa, Homo sapiens
  CDR3 for alpha chain variable domain of TCR clone 355559 (TRAV9-2, TRAJ39)
CALYIYNAGNMLTF

SEQ ID NO: 711118 - protein, 14 aa, Homo sapiens
  CDR3 for beta chain variable domain of TCR clone 355559 (TRBV12-5, TRBJ2-5)
CASGSRTHRETQYF

SEQ ID NO: 711119 - protein, 14 aa, Homo sapiens
  CDR3 for alpha chain variable domain of TCR clone 355560 (TRAV17, TRAJ4)
CATAPLGGYNKLMF

SEQ ID NO: 711120 - protein, 13 aa, Homo sapiens
  CDR3 for beta chain variable domain of TCR clone 355560 (TRBV12-4, TRBJ1-3)
CASSLASGNTIYF

SEQ ID NO: 711121 - protein, 14 aa, Homo sapiens
  CDR3 for alpha chain variable domain of TCR clone 355561 (TRAV16, TRAJ37)
CSLDGSSNTGKLIF

SEQ ID NO: 711122 - protein, 12 aa, Homo sapiens
  CDR3 for beta chain variable domain of TCR clone 355561 (TRBV16, TRBJ2-2)
CASSQSVGELFF

SEQ ID NO: 711123 - protein, 18 aa, Homo sapiens
  CDR3 for alpha chain variable domain of TCR clone 355562 (TRAV21, TRAJ52)
CAVRPSPAGGTSYGKLTF

SEQ ID NO: 711124 - protein, 16 aa, Homo sapiens
  CDR3 for beta chain variable domain of TCR clone 355562 (TRBV12-4, TRBJ2-5)
CASSCFVRGRQETQYF

SEQ ID NO: 711125 - protein, 14 aa, Homo sapiens
  CDR3 for alpha chain variable domain of TCR clone 355563 (TRAV1-2, TRAJ16)
CAVNRFSDGQKLLF

SEQ ID NO: 711126 - protein, 12 aa, Homo sapiens
  CDR3 for beta chain variable domain of TCR clone 355563 (TRBV11-2, TRBJ2-2)
CASSLGGGVLFF

SEQ ID NO: 711127 - protein, 11 aa, Homo sapiens
  CDR3 for alpha chain variable domain of TCR clone 355564 (TRAV12-1, TRAJ21)
CVVYNFNKFYF

SEQ ID NO: 711128 - protein, 13 aa, Homo sapiens
  CDR3 for beta chain variable domain of TCR clone 355564 (TRBV4-1, TRBJ2-5)
CASSQEVQETQYF

SEQ ID NO: 711129 - protein, 14 aa, Homo sapiens
  CDR3 for alpha chain variable domain of TCR clone 355565 (TRAV1-2, TRAJ16)
CAVNGFSDGQKLLF

SEQ ID NO: 711130 - protein, 16 aa, Homo sapiens
  CDR3 for beta chain variable domain of TCR clone 355565 (TRBV12-4, TRBJ2-5)
CASSFFVRGRQEIQYF

SEQ ID NO: 711131 - protein, 17 aa, Homo sapiens
  CDR3 for alpha chain variable domain of TCR clone 355566 (TRAV8-4, TRAJ11)
CAVSDRGENSGYSTLTF

SEQ ID NO: 711132 - protein, 14 aa, Homo sapiens
  CDR3 for beta chain variable domain of TCR clone 355566 (TRBV20-1, TRBJ2-1)
CSPTDEASYNEQFF

SEQ ID NO: 711133 - protein, 14 aa, Homo sapiens
  CDR3 for alpha chain variable domain of TCR clone 355567 (TRAV21, TRAJ22)
CAVFFSGSARQLAF

SEQ ID NO: 711134 - protein, 14 aa, Homo sapiens
  CDR3 for beta chain variable domain of TCR clone 355567 (TRBV19, TRBJ1-1)
CASSIREMNTEAFF

SEQ ID NO: 711135 - protein, 14 aa, Homo sapiens
  CDR3 for alpha chain variable domain of TCR clone 355568 (TRAV26-1, TRAJ38)
CIAANAGNNRKLIW

SEQ ID NO: 711136 - protein, 13 aa, Homo sapiens
  CDR3 for beta chain variable domain of TCR clone 355568 (TRBV20-1, TRBJ1-1)
CSARGEGNTEAFF

SEQ ID NO: 711137 - protein, 18 aa, Homo sapiens
  CDR3 for alpha chain variable domain of TCR clone 355569 (TRAV9-2, TRAJ52)
CALSRHNAGGTSYGKLTF

SEQ ID NO: 711138 - protein, 17 aa, Homo sapiens
  CDR3 for beta chain variable domain of TCR clone 355569 (TRBV24-1, TRBJ2-4)
CATSDAEARGVRNIQYF

SEQ ID NO: 711139 - protein, 17 aa, Homo sapiens
  CDR3 for alpha chain variable domain of TCR clone 355570 (TRAV3, TRAJ42)
CAVGDRDYGGSQGNLIF

SEQ ID NO: 711140 - protein, 14 aa, Homo sapiens
  CDR3 for beta chain variable domain of TCR clone 355570 (TRBV19, TRBJ2-5)
CASSMTGQQETQYF

SEQ ID NO: 711141 - protein, 14 aa, Homo sapiens
  CDR3 for alpha chain variable domain of TCR clone 355571 (TRAV12-1, TRAJ42)
CVVIYGGSQGNLIF

SEQ ID NO: 711142 - protein, 18 aa, Homo sapiens
  CDR3 for beta chain variable domain of TCR clone 355571 (TRBV18, TRBJ2-7)
CSSFLCQLTERGAYEQYF

SEQ ID NO: 711143 - protein, 15 aa, Homo sapiens
  CDR3 for alpha chain variable domain of TCR clone 355572 (TRAV3, TRAJ20)
CAVRDIKLSDYKPSL

SEQ ID NO: 711144 - protein, 15 aa, Homo sapiens
  CDR3 for beta chain variable domain of TCR clone 355572 (TRBV7-9, TRBJ1-6)
CASSSPGRGNSPLHF

SEQ ID NO: 711145 - protein, 15 aa, Homo sapiens
  CDR3 for alpha chain variable domain of TCR clone 355573 (TRAV25, TRAJ53)
CPTSNSGGSNCKLTF

SEQ ID NO: 711146 - protein, 14 aa, Homo sapiens
  CDR3 for beta chain variable domain of TCR clone 355573 (TRBV19, TRBJ2-1)
CASPTFVLSGEQFF

SEQ ID NO: 711147 - protein, 15 aa, Homo sapiens
  CDR3 for alpha chain variable domain of TCR clone 355574 (TRAV12-2, TRAJ53)
CAVNGGGGSNYKLTV

SEQ ID NO: 711148 - protein, 14 aa, Homo sapiens
  CDR3 for beta chain variable domain of TCR clone 355574 (TRBV18, TRBJ2-7)
CASSPRGGAYEQYF

SEQ ID NO: 711149 - protein, 20 aa, Homo sapiens
  CDR3 for alpha chain variable domain of TCR clone 355575 (TRAV1-1, TRAJ4)
CLLLLRCEGFLSGGYNKLIF

SEQ ID NO: 711150 - protein, 16 aa, Homo sapiens
  CDR3 for beta chain variable domain of TCR clone 355575 (TRBV28, TRBJ1-4)
CASSPPDRGRSEKLFF

SEQ ID NO: 711151 - protein, 14 aa, Homo sapiens
  CDR3 for alpha chain variable domain of TCR clone 355576 (TRAV12-2, TRAJ13)
CAVKKTGGYQKVTF

SEQ ID NO: 711152 - protein, 10 aa, Homo sapiens
  CDR3 for beta chain variable domain of TCR clone 355576 (TRBV28, TRBJ1-2)
CASSSDRAVF

SEQ ID NO: 711153 - protein, 13 aa, Homo sapiens
  CDR3 for alpha chain variable domain of TCR clone 355577 (TRAV3, TRAJ30)
CAVRDRGDDKIIV

SEQ ID NO: 711154 - protein, 16 aa, Homo sapiens
  CDR3 for beta chain variable domain of TCR clone 355577 (TRBV7-3, TRBJ2-2)
CASSLKRGTLSGELFF

SEQ ID NO: 711155 - protein, 15 aa, Homo sapiens
  CDR3 for alpha chain variable domain of TCR clone 355578 (TRAV2, TRAJ42)
CAVEGYGGGQGNLIF

SEQ ID NO: 711156 - protein, 15 aa, Homo sapiens
  CDR3 for beta chain variable domain of TCR clone 355578 (TRBV7-3, TRBJ2-3)
CASSLGLTLGDTQYF

SEQ ID NO: 711157 - protein, 14 aa, Homo sapiens
  CDR3 for alpha chain variable domain of TCR clone 355579 (TRAV8-2, TRAJ23)
CVVSDDNQGGKLIF

SEQ ID NO: 711158 - protein, 14 aa, Homo sapiens
  CDR3 for beta chain variable domain of TCR clone 355579 (TRBV7-2, TRBJ2-7)
CASSPKTSFYEQYF

SEQ ID NO: 711159 - protein, 13 aa, Homo sapiens
  CDR3 for alpha chain variable domain of TCR clone 355580 (TRAV13-1, TRAJ39)
CAASIWAGNMLTF

SEQ ID NO: 711160 - protein, 15 aa, Homo sapiens
  CDR3 for beta chain variable domain of TCR clone 355580 (TRBV7-9, TRBJ1-1)
CASSLLEQGGTEAFV

SEQ ID NO: 711161 - protein, 12 aa, Homo sapiens
  CDR3 for alpha chain variable domain of TCR clone 355581 (TRAV12-1, TRAJ20)
CVVNPDDYKLSF

SEQ ID NO: 711162 - protein, 12 aa, Homo sapiens
  CDR3 for beta chain variable domain of TCR clone 355581 (TRBV11-2, TRBJ2-2)
CASSLGGGELFL

SEQ ID NO: 711163 - protein, 15 aa, Homo sapiens
  CDR3 for alpha chain variable domain of TCR clone 355582 (TRAV26-1, TRAJ27)
CIVRVLKPMQANQPL

SEQ ID NO: 711164 - protein, 13 aa, Homo sapiens
  CDR3 for beta chain variable domain of TCR clone 355582 (TRBV20-1, TRBJ2-7)
CSATHTSGYEQYF

SEQ ID NO: 711165 - protein, 13 aa, Homo sapiens
  CDR3 for alpha chain variable domain of TCR clone 355583 (TRAV36/DV7, TRAJ57)
CAVVLGGSEKLVF

SEQ ID NO: 711166 - protein, 14 aa, Homo sapiens
  CDR3 for beta chain variable domain of TCR clone 355583 (TRBV4-1, TRBJ1-2)
CASSQDGQVRGFTF

SEQ ID NO: 711167 - protein, 14 aa, Homo sapiens
  CDR3 for alpha chain variable domain of TCR clone 355584 (TRAV2, TRAJ9)
CAVEDRGGGFKTIF

SEQ ID NO: 711168 - protein, 17 aa, Homo sapiens
  CDR3 for beta chain variable domain of TCR clone 355584 (TRBV13, TRBJ2-3)
CASSLSRVAGGRNTQYF

SEQ ID NO: 711169 - protein, 12 aa, Homo sapiens
  CDR3 for alpha chain variable domain of TCR clone 355585 (TRAV1-2, TRAJ29)
CAVPSGNTPLVF

SEQ ID NO: 711170 - protein, 13 aa, Homo sapiens
  CDR3 for beta chain variable domain of TCR clone 355585 (TRBV5-4, TRBJ1-1)
CASSVDLVTEAFF

SEQ ID NO: 711171 - protein, 14 aa, Homo sapiens
  CDR3 for alpha chain variable domain of TCR clone 355586 (TRAV1-2, TRAJ16)
CAVNRFSDGQKLLF

SEQ ID NO: 711172 - protein, 19 aa, Homo sapiens
  CDR3 for beta chain variable domain of TCR clone 355586 (TRBV6-3, TRBJ1-2)
CASSYSKGWTGPPNYGYTF

SEQ ID NO: 711173 - protein, 15 aa, Homo sapiens
  CDR3 for alpha chain variable domain of TCR clone 355587 (TRAV2, TRAJ9)
CAVEDRGTGGFKTIF

SEQ ID NO: 711174 - protein, 13 aa, Homo sapiens
  CDR3 for beta chain variable domain of TCR clone 355587 (TRBV12-5, TRBJ2-3)
CASGDRQSDTQYF

SEQ ID NO: 711175 - protein, 12 aa, Homo sapiens
  CDR3 for alpha chain variable domain of TCR clone 355588 (TRAV2, TRAJ31)
CAVEDNNARLMF

SEQ ID NO: 711176 - protein, 13 aa, Homo sapiens
  CDR3 for beta chain variable domain of TCR clone 355588 (TRBV10-2, TRBJ2-7)
CASGASGGYEQYF

SEQ ID NO: 711177 - protein, 15 aa, Homo sapiens
  CDR3 for alpha chain variable domain of TCR clone 355589 (TRAV3, TRAJ30)
CAVRDEYGRDDKINF

SEQ ID NO: 711178 - protein, 16 aa, Homo sapiens
  CDR3 for beta chain variable domain of TCR clone 355589 (TRBV5-1, TRBJ2-5)
CASSLANHRGRETQYF

SEQ ID NO: 711179 - protein, 14 aa, Homo sapiens
  CDR3 for alpha chain variable domain of TCR clone 355590 (TRAV13-2, TRAJ6)
CAERGSGGSYIPTF

SEQ ID NO: 711180 - protein, 14 aa, Homo sapiens
  CDR3 for beta chain variable domain of TCR clone 355590 (TRBV12-5, TRBJ2-5)
CASGSRTHQETQYF

SEQ ID NO: 711181 - protein, 15 aa, Homo sapiens
  CDR3 for alpha chain variable domain of TCR clone 355591 (TRAV35, TRAJ58)
CAGQRQETSGSRLTF

SEQ ID NO: 711182 - protein, 11 aa, Homo sapiens
  CDR3 for beta chain variable domain of TCR clone 355591 (TRBV11-2, TRBJ1-1)
CASSINTEAFF

SEQ ID NO: 711183 - protein, 12 aa, Homo sapiens
  CDR3 for alpha chain variable domain of TCR clone 355592 (TRAV25, TRAJ17)
CAGEAAGNKLTF

SEQ ID NO: 711184 - protein, 12 aa, Homo sapiens
  CDR3 for beta chain variable domain of TCR clone 355592 (TRBV6-5, TRBJ2-5)
CASSEGSETQYF

SEQ ID NO: 711185 - protein, 14 aa, Homo sapiens
  CDR3 for alpha chain variable domain of TCR clone 355593 (TRAV8-4, TRAJ57)
CAVSTQGGSEKLVF

SEQ ID NO: 711186 - protein, 17 aa, Homo sapiens
  CDR3 for beta chain variable domain of TCR clone 355593 (TRBV5-1, TRBJ1-1)
CASSFMTGGKRDTEAFF

SEQ ID NO: 711187 - protein, 16 aa, Homo sapiens
  CDR3 for alpha chain variable domain of TCR clone 355594 (TRAV12-3, TRAJ53)
CAMSVGNGGSNYKLTF

SEQ ID NO: 711188 - protein, 11 aa, Homo sapiens
  CDR3 for beta chain variable domain of TCR clone 355594 (TRBV29-1, TRBJ2-5)
CSVASGETQYF

SEQ ID NO: 711189 - protein, 13 aa, Homo sapiens
  CDR3 for alpha chain variable domain of TCR clone 355595 (TRAV27, TRAJ45)
CRSSGGGADGLTF

SEQ ID NO: 711190 - protein, 17 aa, Homo sapiens
  CDR3 for beta chain variable domain of TCR clone 355595 (TRBV10-3, TRBJ2-4)
CTSVPSVNKGSKNIEYF

SEQ ID NO: 711191 - protein, 11 aa, Homo sapiens
  CDR3 for alpha chain variable domain of TCR clone 355596 (TRAV2, TRAJ13)
CASGGYQRVTF

SEQ ID NO: 711192 - protein, 14 aa, Homo sapiens
  CDR3 for beta chain variable domain of TCR clone 355596 (TRBV7-2, TRBJ1-2)
CASSQTGSTYGYTF

SEQ ID NO: 711193 - protein, 13 aa, Homo sapiens
  CDR3 for alpha chain variable domain of TCR clone 355597 (TRAV8-6, TRAJ40)
CAVSVTGTYKYIF

SEQ ID NO: 711194 - protein, 13 aa, Homo sapiens
  CDR3 for beta chain variable domain of TCR clone 355597 (TRBV10-3, TRBJ2-7)
CASKLAVNYEQYF

SEQ ID NO: 711195 - protein, 14 aa, Homo sapiens
  CDR3 for alpha chain variable domain of TCR clone 355598 (TRAV1-2, TRAJ8)
CAAREDTGFQKLVF

SEQ ID NO: 711196 - protein, 13 aa, Homo sapiens
  CDR3 for beta chain variable domain of TCR clone 355598 (TRBV7-9, TRBJ2-3)
CASSPGSTDTQYF

SEQ ID NO: 711197 - protein, 14 aa, Homo sapiens
  CDR3 for alpha chain variable domain of TCR clone 355599 (TRAV4, TRAJ30)
CLVGDMNRDDKIIF

SEQ ID NO: 711198 - protein, 15 aa, Homo sapiens
  CDR3 for beta chain variable domain of TCR clone 355599 (TRBV12-4, TRBJ2-5)
CASSPPTGLQETQYF

SEQ ID NO: 711199 - protein, 15 aa, Homo sapiens
  CDR3 for alpha chain variable domain of TCR clone 355600 (TRAV13-1, TRAJ57)
CAASNTQGGSEKLVF

SEQ ID NO: 711200 - protein, 14 aa, Homo sapiens
  CDR3 for beta chain variable domain of TCR clone 355600 (TRBV6-5, TRBJ1-2)
CASSYTRDRGRYTF

SEQ ID NO: 711201 - protein, 14 aa, Homo sapiens
  CDR3 for alpha chain variable domain of TCR clone 355601 (TRAV12-3, TRAJ54)
CAMRIIQVAQKLVF

SEQ ID NO: 711202 - protein, 16 aa, Homo sapiens
  CDR3 for beta chain variable domain of TCR clone 355601 (TRBV28, TRBJ2-1)
CASRVPASGRIGEQFF

SEQ ID NO: 711203 - protein, 15 aa, Homo sapiens
  CDR3 for alpha chain variable domain of TCR clone 355602 (TRAV25, TRAJ52)
CAGTSGGTSYGKLTF

SEQ ID NO: 711204 - protein, 13 aa, Homo sapiens
  CDR3 for beta chain variable domain of TCR clone 355602 (TRBV6-5, TRBJ2-5)
CASSPQGGETQYY

SEQ ID NO: 711205 - protein, 14 aa, Homo sapiens
  CDR3 for alpha chain variable domain of TCR clone 355603 (TRAV12-1, TRAJ12)
CVVTRMASSYNLIF

SEQ ID NO: 711206 - protein, 13 aa, Homo sapiens
  CDR3 for beta chain variable domain of TCR clone 355603 (TRBV20-1, TRBJ1-1)
CSARGGGNTETFF

SEQ ID NO: 711207 - protein, 14 aa, Homo sapiens
  CDR3 for alpha chain variable domain of TCR clone 355604 (TRAV26-1, TRAJ38)
CIADNAGNNRKLIW

SEQ ID NO: 711208 - protein, 14 aa, Homo sapiens
  CDR3 for beta chain variable domain of TCR clone 355604 (TRBV29-1, TRBJ2-3)
CSARAGAGTDTQYF

SEQ ID NO: 711209 - protein, 15 aa, Homo sapiens
  CDR3 for alpha chain variable domain of TCR clone 355605 (TRAV8-3, TRAJ40)
CAAPSLGSGTSKYIF

SEQ ID NO: 711210 - protein, 12 aa, Homo sapiens
  CDR3 for beta chain variable domain of TCR clone 355605 (TRBV11-2, TRBJ2-2)
CASSLGGGELFF

SEQ ID NO: 711211 - protein, 18 aa, Homo sapiens
  CDR3 for alpha chain variable domain of TCR clone 355606 (TRAV21, TRAJ52)
CAVRPSPAGGTSYGKLTF

SEQ ID NO: 711212 - protein, 16 aa, Homo sapiens
  CDR3 for beta chain variable domain of TCR clone 355606 (TRBV7-8, TRBJ2-6)
CASRVGDSSGANVLTF

SEQ ID NO: 711213 - protein, 16 aa, Homo sapiens
  CDR3 for alpha chain variable domain of TCR clone 355607 (TRAV1-2, TRAJ10)
CAVRGVLTGGGNKLTF

SEQ ID NO: 711214 - protein, 17 aa, Homo sapiens
  CDR3 for beta chain variable domain of TCR clone 355607 (TRBV19, TRBJ2-2)
CASSRSPGGFGTGELFF

SEQ ID NO: 711215 - protein, 12 aa, Homo sapiens
  CDR3 for alpha chain variable domain of TCR clone 355608 (TRAV2, TRAJ10)
CASTGGGNKLTF

SEQ ID NO: 711216 - protein, 15 aa, Homo sapiens
  CDR3 for beta chain variable domain of TCR clone 355608 (TRBV6-6, TRBJ2-7)
CASSYSYGGSYEQYF

SEQ ID NO: 711217 - protein, 16 aa, Homo sapiens
  CDR3 for alpha chain variable domain of TCR clone 355609 (TRAV30, TRAJ24)
CGTEIVDADSWGKFQF

SEQ ID NO: 711218 - protein, 12 aa, Homo sapiens
  CDR3 for beta chain variable domain of TCR clone 355609 (TRBV11-2, TRBJ2-2)
CASSLPNGELFF

SEQ ID NO: 711219 - protein, 17 aa, Homo sapiens
  CDR3 for alpha chain variable domain of TCR clone 355610 (TRAV3, TRAJ42)
CAVRDRDYGGSQGNLIF

SEQ ID NO: 711220 - protein, 15 aa, Homo sapiens
  CDR3 for beta chain variable domain of TCR clone 355610 (TRBV3-1, TRBJ2-1)
CASSQVVDDGDEQFF

SEQ ID NO: 711221 - protein, 11 aa, Homo sapiens
  CDR3 for alpha chain variable domain of TCR clone 355611 (TRAV13-1, TRAJ40)
CAVSGTYKYII

SEQ ID NO: 711222 - protein, 16 aa, Homo sapiens
  CDR3 for beta chain variable domain of TCR clone 355611 (TRBV10-3, TRBJ2-1)
CAISGVGDGGGGEQFF

SEQ ID NO: 711223 - protein, 15 aa, Homo sapiens
  CDR3 for alpha chain variable domain of TCR clone 355612 (TRAV1-2, TRAJ28)
CAVQYSGAGSYQLSF

SEQ ID NO: 711224 - protein, 13 aa, Homo sapiens
  CDR3 for beta chain variable domain of TCR clone 355612 (TRBV4-2, TRBJ1-1)
CASSQAGNTEAFF

SEQ ID NO: 711225 - protein, 14 aa, Homo sapiens
  CDR3 for alpha chain variable domain of TCR clone 355613 (TRAV23/DV6, TRAJ6)
CAAIPPGGSYIPTF

SEQ ID NO: 711226 - protein, 17 aa, Homo sapiens
  CDR3 for beta chain variable domain of TCR clone 355613 (TRBV7-2, TRBJ2-3)
CASSLGGRAAWRDTQYF

SEQ ID NO: 711227 - protein, 13 aa, Homo sapiens
  CDR3 for alpha chain variable domain of TCR clone 355614 (TRAV12-1, TRAJ16)
CVVNGPDGQKLLF

SEQ ID NO: 711228 - protein, 14 aa, Homo sapiens
  CDR3 for beta chain variable domain of TCR clone 355614 (TRBV11-2, TRBJ2-7)
CASSLGAGAYEQYF

SEQ ID NO: 711229 - protein, 15 aa, Homo sapiens
  CDR3 for alpha chain variable domain of TCR clone 355615 (TRAV3, TRAJ20)
CAVRVIKLSDYKLSF

SEQ ID NO: 711230 - protein, 13 aa, Homo sapiens
  CDR3 for beta chain variable domain of TCR clone 355615 (TRBV20-1, TRBJ1-1)
CSARVGGNTEAFF

SEQ ID NO: 711231 - protein, 14 aa, Homo sapiens
  CDR3 for alpha chain variable domain of TCR clone 355616 (TRAV12-1, TRAJ17)
CVVNYKAAGNKLTF

SEQ ID NO: 711232 - protein, 12 aa, Homo sapiens
  CDR3 for beta chain variable domain of TCR clone 355616 (TRBV2, TRBJ2-1)
CAYGPPGNEQFF

SEQ ID NO: 711233 - protein, 14 aa, Homo sapiens
  CDR3 for alpha chain variable domain of TCR clone 355617 (TRAV1-2, TRAJ16)
CAVNRFSDGHKLLF

SEQ ID NO: 711234 - protein, 13 aa, Homo sapiens
  CDR3 for beta chain variable domain of TCR clone 355617 (TRBV7-9, TRBJ1-2)
CASSLKQNYGYTF

SEQ ID NO: 711235 - protein, 13 aa, Homo sapiens
  CDR3 for alpha chain variable domain of TCR clone 355618 (TRAV27, TRAJ6)
CAGGTRGSYIPTF

SEQ ID NO: 711236 - protein, 15 aa, Homo sapiens
  CDR3 for beta chain variable domain of TCR clone 355618 (TRBV5-7, TRBJ2-7)
CASSVGPGRGHEQYF

SEQ ID NO: 711237 - protein, 15 aa, Homo sapiens
  CDR3 for alpha chain variable domain of TCR clone 355619 (TRAV26-1, TRAJ16)
CIVSFRFSDGQKLLF

SEQ ID NO: 711238 - protein, 14 aa, Homo sapiens
  CDR3 for beta chain variable domain of TCR clone 355619 (TRBV7-6, TRBJ2-3)
CASSLGTVTDTQYF

SEQ ID NO: 711239 - protein, 14 aa, Homo sapiens
  CDR3 for alpha chain variable domain of TCR clone 355620 (TRAV21, TRAJ30)
CVVNIGGRDDKIIL

SEQ ID NO: 711240 - protein, 13 aa, Homo sapiens
  CDR3 for beta chain variable domain of TCR clone 355620 (TRBV12-5, TRBJ2-1)
CASGLGRGNEQFF

SEQ ID NO: 711241 - protein, 12 aa, Homo sapiens
  CDR3 for alpha chain variable domain of TCR clone 355621 (TRAV3, TRAJ31)
CAVRPRGPRLMF

SEQ ID NO: 711242 - protein, 17 aa, Homo sapiens
  CDR3 for beta chain variable domain of TCR clone 355621 (TRBV7-9, TRBJ1-5)
WASRASQGGYSNQPQHF

SEQ ID NO: 711243 - protein, 13 aa, Homo sapiens
  CDR3 for alpha chain variable domain of TCR clone 355622 (TRAV9-2, TRAJ9)
CALSDTGGFKTIF

SEQ ID NO: 711244 - protein, 15 aa, Homo sapiens
  CDR3 for beta chain variable domain of TCR clone 355622 (TRBV7-2, TRBJ2-5)
CASSFLRGGEETQYF

SEQ ID NO: 711245 - protein, 13 aa, Homo sapiens
  CDR3 for alpha chain variable domain of TCR clone 355623 (TRAV21, TRAJ15)
CAVRNQAGTALIS

SEQ ID NO: 711246 - protein, 16 aa, Homo sapiens
  CDR3 for beta chain variable domain of TCR clone 355623 (TRBV20-1, TRBJ2-5)
CSPGGTSGGYMETQYF

SEQ ID NO: 711247 - protein, 13 aa, Homo sapiens
  CDR3 for alpha chain variable domain of TCR clone 355624 (TRAV13-2, TRAJ15)
CAERPQAGTALIF

SEQ ID NO: 711248 - protein, 15 aa, Homo sapiens
  CDR3 for beta chain variable domain of TCR clone 355624 (TRBV11-2, TRBJ2-7)
CASIFPGTGGYEQYF

SEQ ID NO: 711249 - protein, 15 aa, Homo sapiens
  CDR3 for alpha chain variable domain of TCR clone 355625 (TRAV8-2, TRAJ24)
FVVSDRTDSWGKLQF

SEQ ID NO: 711250 - protein, 13 aa, Homo sapiens
  CDR3 for beta chain variable domain of TCR clone 355625 (TRBV7-9, TRBJ1-2)
CASSLKQNYGYTF

SEQ ID NO: 711251 - protein, 14 aa, Homo sapiens
  CDR3 for alpha chain variable domain of TCR clone 355626 (TRAV9-2, TRAJ39)
CALYIYNTGNMLTF

SEQ ID NO: 711252 - protein, 13 aa, Homo sapiens
  CDR3 for beta chain variable domain of TCR clone 355626 (TRBV7-2, TRBJ2-2)
CASSLAVTGELFF

SEQ ID NO: 711253 - protein, 16 aa, Homo sapiens
  CDR3 for alpha chain variable domain of TCR clone 355627 (TRAV16, TRAJ52)
CSLSAAGGTSYGKLTF

SEQ ID NO: 711254 - protein, 13 aa, Homo sapiens
  CDR3 for beta chain variable domain of TCR clone 355627 (TRBV3-1, TRBJ1-5)
CASSQFGDQPQHF

SEQ ID NO: 711255 - protein, 18 aa, Homo sapiens
  CDR3 for alpha chain variable domain of TCR clone 355628 (TRAV12-3, TRAJ52)
CAMSRTNAGGTSYGKLTF

SEQ ID NO: 711256 - protein, 12 aa, Homo sapiens
  CDR3 for beta chain variable domain of TCR clone 355628 (TRBV5-4, TRBJ2-7)
CASSLEAYEQYF

SEQ ID NO: 711257 - protein, 15 aa, Homo sapiens
  CDR3 for alpha chain variable domain of TCR clone 355629 (TRAV26-1, TRAJ29)
CILRVEGSGNTPLVF

SEQ ID NO: 711258 - protein, 15 aa, Homo sapiens
  CDR3 for beta chain variable domain of TCR clone 355629 (TRBV7-9, TRBJ1-5)
CASSQGHQPNQPQHL

SEQ ID NO: 711259 - protein, 13 aa, Homo sapiens
  CDR3 for alpha chain variable domain of TCR clone 355630 (TRAV12-2, TRAJ6)
CAVNGSRKLHTYI

SEQ ID NO: 711260 - protein, 19 aa, Homo sapiens
  CDR3 for beta chain variable domain of TCR clone 355630 (TRBV25-1, TRBJ2-2)
CAILVYRVDRGRKTGELFF

SEQ ID NO: 711261 - protein, 15 aa, Homo sapiens
  CDR3 for alpha chain variable domain of TCR clone 355631 (TRAV8-3, TRAJ45)
CASSYSGGGADGLTF

SEQ ID NO: 711262 - protein, 13 aa, Homo sapiens
  CDR3 for beta chain variable domain of TCR clone 355631 (TRBV10-3, TRBJ2-7)
CASKLAMNYEQYY

SEQ ID NO: 711263 - protein, 13 aa, Homo sapiens
  CDR3 for alpha chain variable domain of TCR clone 355632 (TRAV26-2, TRAJ54)
CIPRVGGAQKLVF

SEQ ID NO: 711264 - protein, 16 aa, Homo sapiens
  CDR3 for beta chain variable domain of TCR clone 355632 (TRBV4-1, TRBJ1-1)
CTSSSMSERPNTEAFF

SEQ ID NO: 711265 - protein, 17 aa, Homo sapiens
  CDR3 for alpha chain variable domain of TCR clone 355633 (TRAV3, TRAJ22)
CAVRDPPLEGFCKATDL

SEQ ID NO: 711266 - protein, 13 aa, Homo sapiens
  CDR3 for beta chain variable domain of TCR clone 355633 (TRBV3-1, TRBJ1-1)
CASSPGVITEAFF

SEQ ID NO: 711267 - protein, 14 aa, Homo sapiens
  CDR3 for alpha chain variable domain of TCR clone 355634 (TRAV12-1, TRAJ30)
CVVNIGWRDDKIIF

SEQ ID NO: 711268 - protein, 13 aa, Homo sapiens
  CDR3 for beta chain variable domain of TCR clone 355634 (TRBV12-5, TRBJ2-1)
CASGLGRGNEQFF

SEQ ID NO: 711269 - protein, 10 aa, Homo sapiens
  CDR3 for alpha chain variable domain of TCR clone 355635 (TRAV8-1, TRAJ21)
CAVNGTKFYF

SEQ ID NO: 711270 - protein, 16 aa, Homo sapiens
  CDR3 for beta chain variable domain of TCR clone 355635 (TRBV7-2, TRBJ2-5)
CASSSKWLSGQETQYF

SEQ ID NO: 711271 - protein, 14 aa, Homo sapiens
  CDR3 for alpha chain variable domain of TCR clone 355636 (TRAV1-2, TRAJ8)
CAVREDTGFQKLLF

SEQ ID NO: 711272 - protein, 13 aa, Homo sapiens
  CDR3 for beta chain variable domain of TCR clone 355636 (TRBV7-6, TRBJ1-2)
CASSLVADYGYTF

SEQ ID NO: 711273 - protein, 14 aa, Homo sapiens
  CDR3 for alpha chain variable domain of TCR clone 355637 (TRAV12-2, TRAJ17)
CAVLFKAAGNTLTF

SEQ ID NO: 711274 - protein, 14 aa, Homo sapiens
  CDR3 for beta chain variable domain of TCR clone 355637 (TRBV29-1, TRBJ2-1)
CSVGAVAGGNEQFF

SEQ ID NO: 711275 - protein, 14 aa, Homo sapiens
  CDR3 for alpha chain variable domain of TCR clone 355638 (TRAV8-3, TRAJ35)
CAVVPQGFGNVLHC

SEQ ID NO: 711276 - protein, 15 aa, Homo sapiens
  CDR3 for beta chain variable domain of TCR clone 355638 (TRBV20-1, TRBJ1-1)
CSASRGVTGNTEAFF

SEQ ID NO: 711277 - protein, 17 aa, Homo sapiens
  CDR3 for alpha chain variable domain of TCR clone 355639 (TRAV3, TRAJ6)
CAVRDGPRAGGSYIPAF

SEQ ID NO: 711278 - protein, 14 aa, Homo sapiens
  CDR3 for beta chain variable domain of TCR clone 355639 (TRBV7-2, TRBJ2-7)
CTSSPKTSFYEQYF

SEQ ID NO: 711279 - protein, 14 aa, Homo sapiens
  CDR3 for alpha chain variable domain of TCR clone 355640 (TRAV20, TRAJ22)
CAVQVSGSARQLTF

SEQ ID NO: 711280 - protein, 15 aa, Homo sapiens
  CDR3 for beta chain variable domain of TCR clone 355640 (TRBV20-1, TRBJ2-7)
CSARDRVSGMDEQYF

SEQ ID NO: 711281 - protein, 12 aa, Homo sapiens
  CDR3 for alpha chain variable domain of TCR clone 355641 (TRAV20, TRAJ4)
CSASGGYNKLIF

SEQ ID NO: 711282 - protein, 12 aa, Homo sapiens
  CDR3 for beta chain variable domain of TCR clone 355641 (TRBV11-2, TRBJ2-2)
CASSLPTGELFF

SEQ ID NO: 711283 - protein, 15 aa, Homo sapiens
  CDR3 for alpha chain variable domain of TCR clone 355642 (TRAV3, TRAJ47)
CAVRDIGEYGNKLVF

SEQ ID NO: 711284 - protein, 14 aa, Homo sapiens
  CDR3 for beta chain variable domain of TCR clone 355642 (TRBV7-2, TRBJ2-7)
CASSLKTSFYEQYF

SEQ ID NO: 711285 - protein, 16 aa, Homo sapiens
  CDR3 for alpha chain variable domain of TCR clone 355643 (TRAV3, TRAJ37)
CAVRGKGSGNTGKLIF

SEQ ID NO: 711286 - protein, 16 aa, Homo sapiens
  CDR3 for beta chain variable domain of TCR clone 355643 (TRBV28, TRBJ2-5)
CASSFSPAGGWETQYF

SEQ ID NO: 711287 - protein, 14 aa, Homo sapiens
  CDR3 for alpha chain variable domain of TCR clone 355644 (TRAV35, TRAJ58)
CWRRQETSGSRLTF

SEQ ID NO: 711288 - protein, 16 aa, Homo sapiens
  CDR3 for beta chain variable domain of TCR clone 355644 (TRBV2, TRBJ2-1)
CASSVGGSLSYNEQFF

SEQ ID NO: 711289 - protein, 13 aa, Homo sapiens
  CDR3 for alpha chain variable domain of TCR clone 355645 (TRAV25, TRAJ40)
CAGSASGTYKYTF

SEQ ID NO: 711290 - protein, 14 aa, Homo sapiens
  CDR3 for beta chain variable domain of TCR clone 355645 (TRBV7-2, TRBJ2-7)
CASRSQGAAYEQYF

SEQ ID NO: 711291 - protein, 13 aa, Homo sapiens
  CDR3 for alpha chain variable domain of TCR clone 355646 (TRAV2, TRAJ40)
CAVVTSGTYKYIF

SEQ ID NO: 711292 - protein, 13 aa, Homo sapiens
  CDR3 for beta chain variable domain of TCR clone 355646 (TRBV20-1, TRBJ2-5)
CSAREAFQETQYF

SEQ ID NO: 711293 - protein, 11 aa, Homo sapiens
  CDR3 for alpha chain variable domain of TCR clone 355647 (TRAV1-1, TRAJ23)
FAVRQGGKLIF

SEQ ID NO: 711294 - protein, 16 aa, Homo sapiens
  CDR3 for beta chain variable domain of TCR clone 355647 (TRBV20-1, TRBJ1-4)
CSAPGQGLLTNEKLFF

SEQ ID NO: 711295 - protein, 14 aa, Homo sapiens
  CDR3 for alpha chain variable domain of TCR clone 355648 (TRAV2, TRAJ23)
CAVGLRNQGGKLIF

SEQ ID NO: 711296 - protein, 13 aa, Homo sapiens
  CDR3 for beta chain variable domain of TCR clone 355648 (TRBV12-4, TRBJ2-5)
CATSPGTEETQYF

SEQ ID NO: 711297 - protein, 15 aa, Homo sapiens
  CDR3 for alpha chain variable domain of TCR clone 355649 (TRAV21, TRAJ53)
CATLNSGGSNYKLTF

SEQ ID NO: 711298 - protein, 16 aa, Homo sapiens
  CDR3 for beta chain variable domain of TCR clone 355649 (TRBV9, TRBJ2-1)
CASSVGGGGNYNESSS

SEQ ID NO: 711299 - protein, 21 aa, Homo sapiens
  CDR3 for alpha chain variable domain of TCR clone 355650 (TRAV12-1, TRAJ37)
CVVNGGLWQHRQTNLWARDNF

SEQ ID NO: 711300 - protein, 12 aa, Homo sapiens
  CDR3 for beta chain variable domain of TCR clone 355650 (TRBV20-1, TRBJ1-2)
CSSPGFNYGYTF

SEQ ID NO: 711301 - protein, 13 aa, Homo sapiens
  CDR3 for alpha chain variable domain of TCR clone 355651 (TRAV8-3, TRAJ28)
CAVGAVGSYQLTF

SEQ ID NO: 711302 - protein, 12 aa, Homo sapiens
  CDR3 for beta chain variable domain of TCR clone 355651 (TRBV7-2, TRBJ1-6)
CASSLSSSPLHF

SEQ ID NO: 711303 - protein, 14 aa, Homo sapiens
  CDR3 for alpha chain variable domain of TCR clone 355652 (TRAV13-1, TRAJ12)
CAASYMDSSSKLIF

SEQ ID NO: 711304 - protein, 13 aa, Homo sapiens
  CDR3 for beta chain variable domain of TCR clone 355652 (TRBV2, TRBJ2-5)
CASSDGIQETQYF

SEQ ID NO: 711305 - protein, 16 aa, Homo sapiens
  CDR3 for alpha chain variable domain of TCR clone 355653 (TRAV3, TRAJ37)
CAVRPHGSGNTGNLIF

SEQ ID NO: 711306 - protein, 15 aa, Homo sapiens
  CDR3 for beta chain variable domain of TCR clone 355653 (TRBV10-3, TRBJ2-3)
CAISLTSGGTDTQYF

SEQ ID NO: 711307 - protein, 14 aa, Homo sapiens
  CDR3 for alpha chain variable domain of TCR clone 355654 (TRAV3, TRAJ36)
CAVRDGTGANNLFF

SEQ ID NO: 711308 - protein, 16 aa, Homo sapiens
  CDR3 for beta chain variable domain of TCR clone 355654 (TRBV7-3, TRBJ2-5)
CASIPPGGSVQETQYF

SEQ ID NO: 711309 - protein, 12 aa, Homo sapiens
  CDR3 for alpha chain variable domain of TCR clone 355655 (TRAV8-2, TRAJ13)
CVESGGYQKVTF

SEQ ID NO: 711310 - protein, 15 aa, Homo sapiens
  CDR3 for beta chain variable domain of TCR clone 355655 (TRBV27, TRBJ2-1)
CASSGGGPSYNEQFF

SEQ ID NO: 711311 - protein, 13 aa, Homo sapiens
  CDR3 for alpha chain variable domain of TCR clone 355656 (TRAV13-1, TRAJ39)
CATSIVIQATCSP

SEQ ID NO: 711312 - protein, 16 aa, Homo sapiens
  CDR3 for beta chain variable domain of TCR clone 355656 (TRBV20-1, TRBJ1-4)
CSAPGQGLLTNEKLFF

SEQ ID NO: 711313 - protein, 15 aa, Homo sapiens
  CDR3 for alpha chain variable domain of TCR clone 355657 (TRAV3, TRAJ17)
CAVRDTGAAGNKLTF

SEQ ID NO: 711314 - protein, 19 aa, Homo sapiens
  CDR3 for beta chain variable domain of TCR clone 355657 (TRBV4-1, TRBJ2-4)
CASSQDLGQGAGAKNIQYF

SEQ ID NO: 711315 - protein, 16 aa, Homo sapiens
  CDR3 for alpha chain variable domain of TCR clone 355658 (TRAV14/DV4, TRAJ39)
CAMREAYNNAVNMLTF

SEQ ID NO: 711316 - protein, 14 aa, Homo sapiens
  CDR3 for beta chain variable domain of TCR clone 355658 (TRBV7-9, TRBJ2-5)
CASSPAQDQETQYF

SEQ ID NO: 711317 - protein, 18 aa, Homo sapiens
  CDR3 for alpha chain variable domain of TCR clone 355659 (TRAV21, TRAJ52)
CAVRPSPAGGTSYGKLTF

SEQ ID NO: 711318 - protein, 13 aa, Homo sapiens
  CDR3 for beta chain variable domain of TCR clone 355659 (TRBV10-3, TRBJ2-1)
CAISEFGGREQFF

SEQ ID NO: 711319 - protein, 14 aa, Homo sapiens
  CDR3 for alpha chain variable domain of TCR clone 355660 (TRAV12-2, TRAJ33)
CSVKRARSNYQLIW

SEQ ID NO: 711320 - protein, 15 aa, Homo sapiens
  CDR3 for beta chain variable domain of TCR clone 355660 (TRBV20-1, TRBJ2-7)
CSARDRVSGMDEQYF

SEQ ID NO: 711321 - protein, 14 aa, Homo sapiens
  CDR3 for alpha chain variable domain of TCR clone 355661 (TRAV13-1, TRAJ52)
CAALDGTSYGKLTF

SEQ ID NO: 711322 - protein, 13 aa, Homo sapiens
  CDR3 for beta chain variable domain of TCR clone 355661 (TRBV7-9, TRBJ1-2)
CASSLKQNYGYTF

SEQ ID NO: 711323 - protein, 12 aa, Homo sapiens
  CDR3 for alpha chain variable domain of TCR clone 355662 (TRAV35, TRAJ39)
LAPNNAGNMLTF

SEQ ID NO: 711324 - protein, 14 aa, Homo sapiens
  CDR3 for beta chain variable domain of TCR clone 355662 (TRBV2, TRBJ2-5)
CASKKATGLETQYF

SEQ ID NO: 711325 - protein, 18 aa, Homo sapiens
  CDR3 for alpha chain variable domain of TCR clone 355663 (TRAV12-3, TRAJ52)
CAMSVGVAGGTSYGKLTF

SEQ ID NO: 711326 - protein, 16 aa, Homo sapiens
  CDR3 for beta chain variable domain of TCR clone 355663 (TRBV29-1, TRBJ2-7)
CRVEVVGTSGSYEQYF

SEQ ID NO: 711327 - protein, 15 aa, Homo sapiens
  CDR3 for alpha chain variable domain of TCR clone 355664 (TRAV8-4, TRAJ36)
CAVRKSWTGAHNLFF

SEQ ID NO: 711328 - protein, 17 aa, Homo sapiens
  CDR3 for beta chain variable domain of TCR clone 355664 (TRBV3-1, TRBJ2-2)
CASSQDSQGPNTGELFF

SEQ ID NO: 711329 - protein, 13 aa, Homo sapiens
  CDR3 for alpha chain variable domain of TCR clone 355665 (TRAV21, TRAJ27)
CAARPGNAGKSTF

SEQ ID NO: 711330 - protein, 15 aa, Homo sapiens
  CDR3 for beta chain variable domain of TCR clone 355665 (TRBV2, TRBJ2-7)
CTSSELERGGVEQYF

SEQ ID NO: 711331 - protein, 11 aa, Homo sapiens
  CDR3 for alpha chain variable domain of TCR clone 355666 (TRAV17, TRAJ9)
CGFTGGFKTIF

SEQ ID NO: 711332 - protein, 14 aa, Homo sapiens
  CDR3 for beta chain variable domain of TCR clone 355666 (TRBV7-9, TRBJ2-2)
CASSLVQDTGEPFF

SEQ ID NO: 711333 - protein, 12 aa, Homo sapiens
  CDR3 for alpha chain variable domain of TCR clone 355667 (TRAV17, TRAJ57)
CATDGGSEKLVF

SEQ ID NO: 711334 - protein, 13 aa, Homo sapiens
  CDR3 for beta chain variable domain of TCR clone 355667 (TRBV7-9, TRBJ2-7)
CASSFAGAYEQDF

SEQ ID NO: 711335 - protein, 16 aa, Homo sapiens
  CDR3 for alpha chain variable domain of TCR clone 355668 (TRAV3, TRAJ37)
CAVRGKGSGNTGKLIF

SEQ ID NO: 711336 - protein, 15 aa, Homo sapiens
  CDR3 for beta chain variable domain of TCR clone 355668 (TRBV20-1, TRBJ2-1)
CRARGGTRYYNEQFF

SEQ ID NO: 711337 - protein, 10 aa, Homo sapiens
  CDR3 for alpha chain variable domain of TCR clone 355669 (TRAV1-2, TRAJ31)
CAFFDARLMF

SEQ ID NO: 711338 - protein, 16 aa, Homo sapiens
  CDR3 for beta chain variable domain of TCR clone 355669 (TRBV7-3, TRBJ2-2)
CASSLKRGTLSGELFV

SEQ ID NO: 711339 - protein, 13 aa, Homo sapiens
  CDR3 for alpha chain variable domain of TCR clone 355670 (TRAV8-3, TRAJ48)
CAVVPFGNEKLTF

SEQ ID NO: 711340 - protein, 16 aa, Homo sapiens
  CDR3 for beta chain variable domain of TCR clone 355670 (TRBV9, TRBJ1-2)
CASSVEEKVSPYGYTF

SEQ ID NO: 711341 - protein, 14 aa, Homo sapiens
  CDR3 for alpha chain variable domain of TCR clone 355671 (TRAV35, TRAJ38)
CAGSNAGNNRKLIW

SEQ ID NO: 711342 - protein, 12 aa, Homo sapiens
  CDR3 for beta chain variable domain of TCR clone 355671 (TRBV7-2, TRBJ1-6)
CASSLSSSPLHF

SEQ ID NO: 711343 - protein, 14 aa, Homo sapiens
  CDR3 for alpha chain variable domain of TCR clone 355672 (TRAV1-2, TRAJ16)
CAVNRFSDGQKLLF

SEQ ID NO: 711344 - protein, 14 aa, Homo sapiens
  CDR3 for beta chain variable domain of TCR clone 355672 (TRBV12-5, TRBJ2-5)
CASGSRTHQEAQYF

SEQ ID NO: 711345 - protein, 14 aa, Homo sapiens
  CDR3 for alpha chain variable domain of TCR clone 355673 (TRAV12-1, TRAJ10)
CVVNLAGGGNKLTF

SEQ ID NO: 711346 - protein, 14 aa, Homo sapiens
  CDR3 for beta chain variable domain of TCR clone 355673 (TRBV7-9, TRBJ2-7)
CASSLDRPTDEQYF

SEQ ID NO: 711347 - protein, 15 aa, Homo sapiens
  CDR3 for alpha chain variable domain of TCR clone 355674 (TRAV12-1, TRAJ45)
CVVLSGGGGADGLTF

SEQ ID NO: 711348 - protein, 14 aa, Homo sapiens
  CDR3 for beta chain variable domain of TCR clone 355674 (TRBV11-2, TRBJ2-5)
CASSRRGGIETQYF

SEQ ID NO: 711349 - protein, 14 aa, Homo sapiens
  CDR3 for alpha chain variable domain of TCR clone 355675 (TRAV13-1, TRAJ44)
CAAKATGTASKLTF

SEQ ID NO: 711350 - protein, 14 aa, Homo sapiens
  CDR3 for beta chain variable domain of TCR clone 355675 (TRBV7-9, TRBJ2-2)
CASSLGHRTGELFF

SEQ ID NO: 711351 - protein, 14 aa, Homo sapiens
  CDR3 for alpha chain variable domain of TCR clone 355676 (TRAV26-1, TRAJ44)
CIVRPTGTASKLTF

SEQ ID NO: 711352 - protein, 12 aa, Homo sapiens
  CDR3 for beta chain variable domain of TCR clone 355676 (TRBV11-3, TRBJ1-1)
CASSLLDSEAFF

SEQ ID NO: 711353 - protein, 17 aa, Homo sapiens
  CDR3 for alpha chain variable domain of TCR clone 355677 (TRAV3, TRAJ42)
CAVRDRDYGGSQGNLIF

SEQ ID NO: 711354 - protein, 13 aa, Homo sapiens
  CDR3 for beta chain variable domain of TCR clone 355677 (TRBV6-1, TRBJ1-1)
CASSRQGNTEAFF

SEQ ID NO: 711355 - protein, 14 aa, Homo sapiens
  CDR3 for alpha chain variable domain of TCR clone 355678 (TRAV1-2, TRAJ8)
CAVREDTGFQKLVF

SEQ ID NO: 711356 - protein, 17 aa, Homo sapiens
  CDR3 for beta chain variable domain of TCR clone 355678 (TRBV13, TRBJ2-3)
CASSSLGTSGLTDTQYF

SEQ ID NO: 711357 - protein, 13 aa, Homo sapiens
  CDR3 for alpha chain variable domain of TCR clone 355679 (TRAV1-1, TRAJ9)
CAAKNTGGFKSIF

SEQ ID NO: 711358 - protein, 14 aa, Homo sapiens
  CDR3 for beta chain variable domain of TCR clone 355679 (TRBV20-1, TRBJ2-1)
CSAQIGGSANEQFL

SEQ ID NO: 711359 - protein, 16 aa, Homo sapiens
  CDR3 for alpha chain variable domain of TCR clone 355680 (TRAV26-1, TRAJ53)
CIVRVAMGGSNYKLTF

SEQ ID NO: 711360 - protein, 16 aa, Homo sapiens
  CDR3 for beta chain variable domain of TCR clone 355680 (TRBV6-1, TRBJ1-3)
CASVQGGVETPYILER

SEQ ID NO: 711361 - protein, 18 aa, Homo sapiens
  CDR3 for alpha chain variable domain of TCR clone 355681 (TRAV12-3, TRAJ52)
CAMSRTNAGGTSDGKRTF

SEQ ID NO: 711362 - protein, 17 aa, Homo sapiens
  CDR3 for beta chain variable domain of TCR clone 355681 (TRBV7-3, TRBJ2-3)
CASSLMKRMRGADTQYF

SEQ ID NO: 711363 - protein, 14 aa, Homo sapiens
  CDR3 for alpha chain variable domain of TCR clone 355682 (TRAV13-1, TRAJ40)
CAASMTSGTYKYIF

SEQ ID NO: 711364 - protein, 17 aa, Homo sapiens
  CDR3 for beta chain variable domain of TCR clone 355682 (TRBV15, TRBJ1-2)
CATSGREIVVVNYGYTF

SEQ ID NO: 711365 - protein, 16 aa, Homo sapiens
  CDR3 for alpha chain variable domain of TCR clone 355683 (TRAV3, TRAJ10)
CAVRDMRAGGGNKLTF

SEQ ID NO: 711366 - protein, 16 aa, Homo sapiens
  CDR3 for beta chain variable domain of TCR clone 355683 (TRBV7-3, TRBJ2-1)
CASSKPLAGGYNEQFF

SEQ ID NO: 711367 - protein, 16 aa, Homo sapiens
  CDR3 for alpha chain variable domain of TCR clone 355684 (TRAV12-2, TRAJ10)
CAVNRVLTGGGNKRTF

SEQ ID NO: 711368 - protein, 15 aa, Homo sapiens
  CDR3 for beta chain variable domain of TCR clone 355684 (TRBV4-1, TRBJ2-7)
CASSQQGQGFDEQYF

SEQ ID NO: 711369 - protein, 14 aa, Homo sapiens
  CDR3 for alpha chain variable domain of TCR clone 355685 (TRAV14/DV4, TRAJ9)
CAMRESTGGFKTLF

SEQ ID NO: 711370 - protein, 19 aa, Homo sapiens
  CDR3 for beta chain variable domain of TCR clone 355685 (TRBV19, TRBJ2-2)
CASTRPGLAGGRVTGELFF

SEQ ID NO: 711371 - protein, 13 aa, Homo sapiens
  CDR3 for alpha chain variable domain of TCR clone 355686 (TRAV8-3, TRAJ43)
CAVGPDNNNDMRF

SEQ ID NO: 711372 - protein, 17 aa, Homo sapiens
  CDR3 for beta chain variable domain of TCR clone 355686 (TRBV11-1, TRBJ2-7)
CASSLTGSFGLDYEQYF

SEQ ID NO: 711373 - protein, 14 aa, Homo sapiens
  CDR3 for alpha chain variable domain of TCR clone 355687 (TRAV1-2, TRAJ16)
CAVNRLSDGQKLLF

SEQ ID NO: 711374 - protein, 13 aa, Homo sapiens
  CDR3 for beta chain variable domain of TCR clone 355687 (TRBV7-9, TRBJ1-2)
CASSLKQNYGYTL

SEQ ID NO: 711375 - protein, 15 aa, Homo sapiens
  CDR3 for alpha chain variable domain of TCR clone 355688 (TRAV12-3, TRAJ6)
CAISATTGGSYIPTF

SEQ ID NO: 711376 - protein, 13 aa, Homo sapiens
  CDR3 for beta chain variable domain of TCR clone 355688 (TRBV7-9, TRBJ1-2)
CASSLKQNYGYTF

SEQ ID NO: 711377 - protein, 15 aa, Homo sapiens
  CDR3 for alpha chain variable domain of TCR clone 355689 (TRAV13-1, TRAJ10)
CAATILTGGGNKITF

SEQ ID NO: 711378 - protein, 15 aa, Homo sapiens
  CDR3 for beta chain variable domain of TCR clone 355689 (TRBV2, TRBJ2-7)
CASTLLGSGATEQYF

SEQ ID NO: 711379 - protein, 16 aa, Homo sapiens
  CDR3 for alpha chain variable domain of TCR clone 355690 (TRAV12-3, TRAJ53)
CAMSPGSGRSNYKLTF

SEQ ID NO: 711380 - protein, 16 aa, Homo sapiens
  CDR3 for beta chain variable domain of TCR clone 355690 (TRBV4-2, TRBJ1-1)
CASSQAGFGMNTEAFF

SEQ ID NO: 711381 - protein, 11 aa, Homo sapiens
  CDR3 for alpha chain variable domain of TCR clone 355691 (TRAV13-1, TRAJ47)
CAAAPRNKLVF

SEQ ID NO: 711382 - protein, 15 aa, Homo sapiens
  CDR3 for beta chain variable domain of TCR clone 355691 (TRBV27, TRBJ2-1)
CASSNGGGSSNEQFF

SEQ ID NO: 711383 - protein, 15 aa, Homo sapiens
  CDR3 for alpha chain variable domain of TCR clone 355692 (TRAV35, TRAJ34)
CAGTSIVRNTDKLIF

SEQ ID NO: 711384 - protein, 16 aa, Homo sapiens
  CDR3 for beta chain variable domain of TCR clone 355692 (TRBV19, TRBJ2-1)
CASSKAGPSSYNEQFF

SEQ ID NO: 711385 - protein, 13 aa, Homo sapiens
  CDR3 for alpha chain variable domain of TCR clone 355693 (TRAV3, TRAJ36)
CAVRDTVANNLFF

SEQ ID NO: 711386 - protein, 15 aa, Homo sapiens
  CDR3 for beta chain variable domain of TCR clone 355693 (TRBV24-1, TRBJ2-1)
CATSGSGGFYNEQFF

SEQ ID NO: 711387 - protein, 15 aa, Homo sapiens
  CDR3 for alpha chain variable domain of TCR clone 355694 (TRAV12-3, TRAJ6)
CAMSATTGGSYIPTF

SEQ ID NO: 711388 - protein, 16 aa, Homo sapiens
  CDR3 for beta chain variable domain of TCR clone 355694 (TRBV20-1, TRBJ1-2)
CSAAMGQGVANYDYTF

SEQ ID NO: 711389 - protein, 17 aa, Homo sapiens
  CDR3 for alpha chain variable domain of TCR clone 355695 (TRAV12-2, TRAJ48)
CASNEKLTFGTGTRLTI

SEQ ID NO: 711390 - protein, 16 aa, Homo sapiens
  CDR3 for beta chain variable domain of TCR clone 355695 (TRBV7-3, TRBJ2-2)
CASSLKRGTLSEELFF

SEQ ID NO: 711391 - protein, 17 aa, Homo sapiens
  CDR3 for alpha chain variable domain of TCR clone 355696 (TRAV8-6, TRAJ58)
CAVSSWVGETSGSRLTC

SEQ ID NO: 711392 - protein, 14 aa, Homo sapiens
  CDR3 for beta chain variable domain of TCR clone 355696 (TRBV11-3, TRBJ2-7)
CASSFRQGSYEQYF

SEQ ID NO: 711393 - protein, 12 aa, Homo sapiens
  CDR3 for alpha chain variable domain of TCR clone 355697 (TRAV3, TRAJ39)
CAVMEWSNMLTF

SEQ ID NO: 711394 - protein, 14 aa, Homo sapiens
  CDR3 for beta chain variable domain of TCR clone 355697 (TRBV7-8, TRBJ2-3)
CASGFPDGQDTQYF

SEQ ID NO: 711395 - protein, 12 aa, Homo sapiens
  CDR3 for alpha chain variable domain of TCR clone 355698 (TRAV1-1, TRAJ8)
CAVGTGFQKLVF

SEQ ID NO: 711396 - protein, 13 aa, Homo sapiens
  CDR3 for beta chain variable domain of TCR clone 355698 (TRBV4-1, TRBJ2-2)
CASSQENTGELFF

SEQ ID NO: 711397 - protein, 14 aa, Homo sapiens
  CDR3 for alpha chain variable domain of TCR clone 355699 (TRAV12-1, TRAJ23)
CVVMIYNQGGKLIF

SEQ ID NO: 711398 - protein, 23 aa, Homo sapiens
  CDR3 for beta chain variable domain of TCR clone 355699 (TRBV7-3, TRBJ1-6)
CASSLTSRDEASDPSSYNSPLYF

SEQ ID NO: 711399 - protein, 18 aa, Homo sapiens
  CDR3 for alpha chain variable domain of TCR clone 355700 (TRAV21, TRAJ52)
CAVRPSPAGGTSYGKLTF

SEQ ID NO: 711400 - protein, 15 aa, Homo sapiens
  CDR3 for beta chain variable domain of TCR clone 355700 (TRBV4-3, TRBJ1-1)
CASSQELGRGTEAFF

SEQ ID NO: 711401 - protein, 14 aa, Homo sapiens
  CDR3 for alpha chain variable domain of TCR clone 355701 (TRAV1-2, TRAJ16)
CAVNRFSDGQKLLF

SEQ ID NO: 711402 - protein, 13 aa, Homo sapiens
  CDR3 for beta chain variable domain of TCR clone 355701 (TRBV20-1, TRBJ1-1)
CSARGGGDTEAFF

SEQ ID NO: 711403 - protein, 17 aa, Homo sapiens
  CDR3 for alpha chain variable domain of TCR clone 355702 (TRAV3, TRAJ42)
CAVRDRDYGGSKGNLIF

SEQ ID NO: 711404 - protein, 14 aa, Homo sapiens
  CDR3 for beta chain variable domain of TCR clone 355702 (TRBV19, TRBJ2-7)
CASSDRAGPYEQYF

SEQ ID NO: 711405 - protein, 13 aa, Homo sapiens
  CDR3 for alpha chain variable domain of TCR clone 355703 (TRAV27, TRAJ45)
CRSSGGGADGLTF

SEQ ID NO: 711406 - protein, 15 aa, Homo sapiens
  CDR3 for beta chain variable domain of TCR clone 355703 (TRBV7-3, TRBJ2-2)
CASSETGQGTGELFF

SEQ ID NO: 711407 - protein, 13 aa, Homo sapiens
  CDR3 for alpha chain variable domain of TCR clone 355704 (TRAV27, TRAJ45)
CRSSGGGADGLTF

SEQ ID NO: 711408 - protein, 15 aa, Homo sapiens
  CDR3 for beta chain variable domain of TCR clone 355704 (TRBV20-1, TRBJ2-7)
CSSRDRVSGMDEQYF

SEQ ID NO: 711409 - protein, 13 aa, Homo sapiens
  CDR3 for alpha chain variable domain of TCR clone 355705 (TRAV27, TRAJ45)
CRSSGGGADGLTF

SEQ ID NO: 711410 - protein, 13 aa, Homo sapiens
  CDR3 for beta chain variable domain of TCR clone 355705 (TRBV7-7, TRBJ2-5)
CASSRIGQETQYF

SEQ ID NO: 711411 - protein, 14 aa, Homo sapiens
  CDR3 for alpha chain variable domain of TCR clone 355706 (TRAV13-2, TRAJ29)
CAEGTFETNTPLVF

SEQ ID NO: 711412 - protein, 13 aa, Homo sapiens
  CDR3 for beta chain variable domain of TCR clone 355706 (TRBV2, TRBJ1-1)
CASNLSRNTEAFF

SEQ ID NO: 711413 - protein, 12 aa, Homo sapiens
  CDR3 for alpha chain variable domain of TCR clone 355707 (TRAV12-3, TRAJ17)
CAMTLTGNKLTF

SEQ ID NO: 711414 - protein, 14 aa, Homo sapiens
  CDR3 for beta chain variable domain of TCR clone 355707 (TRBV7-9, TRBJ2-3)
CQKRLNSSADTQYF

SEQ ID NO: 711415 - protein, 13 aa, Homo sapiens
  CDR3 for alpha chain variable domain of TCR clone 355708 (TRAV1-2, TRAJ9)
CAALNPGGFKTIF

SEQ ID NO: 711416 - protein, 15 aa, Homo sapiens
  CDR3 for beta chain variable domain of TCR clone 355708 (TRBV19, TRBJ1-1)
CASTSGQIQNTEAFF

SEQ ID NO: 711417 - protein, 12 aa, Homo sapiens
  CDR3 for alpha chain variable domain of TCR clone 355709 (TRAV16, TRAJ9)
CALRAGVFKTIF

SEQ ID NO: 711418 - protein, 13 aa, Homo sapiens
  CDR3 for beta chain variable domain of TCR clone 355709 (TRBV4-3, TRBJ1-1)
CASSQVEGSMAFF

SEQ ID NO: 711419 - protein, 14 aa, Homo sapiens
  CDR3 for alpha chain variable domain of TCR clone 355710 (TRAV12-3, TRAJ10)
SHLPLTRGGNKLTF

SEQ ID NO: 711420 - protein, 16 aa, Homo sapiens
  CDR3 for beta chain variable domain of TCR clone 355710 (TRBV10-3, TRBJ2-1)
CAISGVGDGGGGEQFF

SEQ ID NO: 711421 - protein, 10 aa, Homo sapiens
  CDR3 for alpha chain variable domain of TCR clone 355711 (TRAV8-4, TRAJ39)
CAVSGNMLTF

SEQ ID NO: 711422 - protein, 16 aa, Homo sapiens
  CDR3 for beta chain variable domain of TCR clone 355711 (TRBV7-9, TRBJ2-1)
CASSPRDSGAYNEQFF

SEQ ID NO: 711423 - protein, 14 aa, Homo sapiens
  CDR3 for alpha chain variable domain of TCR clone 355712 (TRAV1-2, TRAJ8)
CAVREDTGFQELVF

SEQ ID NO: 711424 - protein, 15 aa, Homo sapiens
  CDR3 for beta chain variable domain of TCR clone 355712 (TRBV11-3, TRBJ2-3)
CASLKDGREGDTQYF

SEQ ID NO: 711425 - protein, 12 aa, Homo sapiens
  CDR3 for alpha chain variable domain of TCR clone 355713 (TRAV21, TRAJ11)
CAATSGYSTLTF

SEQ ID NO: 711426 - protein, 13 aa, Homo sapiens
  CDR3 for beta chain variable domain of TCR clone 355713 (TRBV15, TRBJ1-6)
CATSGGLNSPLHF

SEQ ID NO: 711427 - protein, 12 aa, Homo sapiens
  CDR3 for alpha chain variable domain of TCR clone 355714 (TRAV29/DV5, TRAJ34)
CAASGNTDKLIF

SEQ ID NO: 711428 - protein, 15 aa, Homo sapiens
  CDR3 for beta chain variable domain of TCR clone 355714 (TRBV7-2, TRBJ2-1)
CASSSGLAGGNEQFF

SEQ ID NO: 711429 - protein, 14 aa, Homo sapiens
  CDR3 for alpha chain variable domain of TCR clone 355715 (TRAV17, TRAJ22)
CATSPSGSARQLTF

SEQ ID NO: 711430 - protein, 13 aa, Homo sapiens
  CDR3 for beta chain variable domain of TCR clone 355715 (TRBV12-4, TRBJ1-2)
CASSLRQGKGYTV

SEQ ID NO: 711431 - protein, 13 aa, Homo sapiens
  CDR3 for alpha chain variable domain of TCR clone 355716 (TRAV12-2, TRAJ4)
CAVRSGGYDKLIF

SEQ ID NO: 711432 - protein, 15 aa, Homo sapiens
  CDR3 for beta chain variable domain of TCR clone 355716 (TRBV10-3, TRBJ2-1)
CAISDVQDRAYEQFF

SEQ ID NO: 711433 - protein, 13 aa, Homo sapiens
  CDR3 for alpha chain variable domain of TCR clone 355717 (TRAV8-3, TRAJ43)
CAVVPYNNNAMRF

SEQ ID NO: 711434 - protein, 17 aa, Homo sapiens
  CDR3 for beta chain variable domain of TCR clone 355717 (TRBV7-7, TRBJ1-1)
CASIGDRPNLGVTEAFF

SEQ ID NO: 711435 - protein, 14 aa, Homo sapiens
  CDR3 for alpha chain variable domain of TCR clone 355718 (TRAV1-2, TRAJ27)
CAVRSGTNAGKSTF

SEQ ID NO: 711436 - protein, 15 aa, Homo sapiens
  CDR3 for beta chain variable domain of TCR clone 355718 (TRBV18, TRBJ2-7)
CASSPLQGRTYEQYF

SEQ ID NO: 711437 - protein, 17 aa, Homo sapiens
  CDR3 for alpha chain variable domain of TCR clone 355719 (TRAV26-1, TRAJ11)
CIVRVGQSNSGYSTLTF

SEQ ID NO: 711438 - protein, 15 aa, Homo sapiens
  CDR3 for beta chain variable domain of TCR clone 355719 (TRBV27, TRBJ2-5)
CASSLITSGGETQYF

SEQ ID NO: 711439 - protein, 15 aa, Homo sapiens
  CDR3 for alpha chain variable domain of TCR clone 355720 (TRAV17, TRAJ3)
CATDGPHSSAPKIIF

SEQ ID NO: 711440 - protein, 14 aa, Homo sapiens
  CDR3 for beta chain variable domain of TCR clone 355720 (TRBV4-3, TRBJ1-4)
CASSQQPVGEKLFF

SEQ ID NO: 711441 - protein, 17 aa, Homo sapiens
  CDR3 for alpha chain variable domain of TCR clone 355721 (TRAV26-1, TRAJ22)
CIVRVPSHSGSARQLTF

SEQ ID NO: 711442 - protein, 16 aa, Homo sapiens
  CDR3 for beta chain variable domain of TCR clone 355721 (TRBV28, TRBJ2-1)
CASRRSGRVVGDEQFF

SEQ ID NO: 711443 - protein, 12 aa, Homo sapiens
  CDR3 for alpha chain variable domain of TCR clone 355722 (TRAV17, TRAJ4)
CATRGGYNKLIF

SEQ ID NO: 711444 - protein, 15 aa, Homo sapiens
  CDR3 for beta chain variable domain of TCR clone 355722 (TRBV9, TRBJ1-6)
CASSVAGTGDSPLHF

SEQ ID NO: 711445 - protein, 14 aa, Homo sapiens
  CDR3 for alpha chain variable domain of TCR clone 355723 (TRAV2, TRAJ9)
CAVEDRSGGYKTIF

SEQ ID NO: 711446 - protein, 14 aa, Homo sapiens
  CDR3 for beta chain variable domain of TCR clone 355723 (TRBV28, TRBJ1-5)
CASSRTGLNQPQHF

SEQ ID NO: 711447 - protein, 18 aa, Homo sapiens
  CDR3 for alpha chain variable domain of TCR clone 355724 (TRAV21, TRAJ52)
CAVRPSPAGGTSYGKLTF

SEQ ID NO: 711448 - protein, 16 aa, Homo sapiens
  CDR3 for beta chain variable domain of TCR clone 355724 (TRBV13, TRBJ2-3)
CQQPLQGSGGRKTQYF

SEQ ID NO: 711449 - protein, 13 aa, Homo sapiens
  CDR3 for alpha chain variable domain of TCR clone 355725 (TRAV12-3, TRAJ41)
CVIAPNSGYALNF

SEQ ID NO: 711450 - protein, 14 aa, Homo sapiens
  CDR3 for beta chain variable domain of TCR clone 355725 (TRBV7-2, TRBJ1-3)
CASSLGTAGNTIYF

SEQ ID NO: 711451 - protein, 16 aa, Homo sapiens
  CDR3 for alpha chain variable domain of TCR clone 355726 (TRAV30, TRAJ24)
CGTEIVDADSWGKFQF

SEQ ID NO: 711452 - protein, 14 aa, Homo sapiens
  CDR3 for beta chain variable domain of TCR clone 355726 (TRBV10-3, TRBJ1-3)
CAIRGQRAGNTIYF

SEQ ID NO: 711453 - protein, 17 aa, Homo sapiens
  CDR3 for alpha chain variable domain of TCR clone 355727 (TRAV3, TRAJ38)
CAARDCLNAGNNRKLIW

SEQ ID NO: 711454 - protein, 14 aa, Homo sapiens
  CDR3 for beta chain variable domain of TCR clone 355727 (TRBV5-5, TRBJ1-5)
CASSGQGVDQPQHF

SEQ ID NO: 711455 - protein, 16 aa, Homo sapiens
  CDR3 for alpha chain variable domain of TCR clone 355728 (TRAV3, TRAJ10)
CAVRDMRAGGGNKLTF

SEQ ID NO: 711456 - protein, 16 aa, Homo sapiens
  CDR3 for beta chain variable domain of TCR clone 355728 (TRBV5-1, TRBJ2-5)
CASSFQGLADQETQYF

SEQ ID NO: 711457 - protein, 13 aa, Homo sapiens
  CDR3 for alpha chain variable domain of TCR clone 355729 (TRAV1-1, TRAJ9)
CAAKNTGCFETIF

SEQ ID NO: 711458 - protein, 14 aa, Homo sapiens
  CDR3 for beta chain variable domain of TCR clone 355729 (TRBV20-1, TRBJ2-1)
CSAQIGGSANEQFF

SEQ ID NO: 711459 - protein, 16 aa, Homo sapiens
  CDR3 for alpha chain variable domain of TCR clone 355730 (TRAV12-2, TRAJ28)
CAVTPSSGAGSYQLTF

SEQ ID NO: 711460 - protein, 13 aa, Homo sapiens
  CDR3 for beta chain variable domain of TCR clone 355730 (TRBV4-1, TRBJ2-2)
CASSQENTGELFF

SEQ ID NO: 711461 - protein, 15 aa, Homo sapiens
  CDR3 for alpha chain variable domain of TCR clone 355731 (TRAV9-2, TRAJ23)
CALSDLYNQGGKLIF

SEQ ID NO: 711462 - protein, 15 aa, Homo sapiens
  CDR3 for beta chain variable domain of TCR clone 355731 (TRBV12-4, TRBJ2-5)
CASSPPTGLQETQYF

SEQ ID NO: 711463 - protein, 12 aa, Homo sapiens
  CDR3 for alpha chain variable domain of TCR clone 355732 (TRAV35, TRAJ31)
CASASNSARLMF

SEQ ID NO: 711464 - protein, 14 aa, Homo sapiens
  CDR3 for beta chain variable domain of TCR clone 355732 (TRBV2, TRBJ2-2)
CASSLFGGNGELFF

SEQ ID NO: 711465 - protein, 23 aa, Homo sapiens
  CDR3 for alpha chain variable domain of TCR clone 355733 (TRAV12-2, TRAJ36)
SLLIRDSQPSDSATLERANNLFF

SEQ ID NO: 711466 - protein, 14 aa, Homo sapiens
  CDR3 for beta chain variable domain of TCR clone 355733 (TRBV18, TRBJ2-7)
CASSPRGGAYEQYF

SEQ ID NO: 711467 - protein, 14 aa, Homo sapiens
  CDR3 for alpha chain variable domain of TCR clone 355734 (TRAV13-2, TRAJ57)
CAENFQGGSEKLVF

SEQ ID NO: 711468 - protein, 15 aa, Homo sapiens
  CDR3 for beta chain variable domain of TCR clone 355734 (TRBV11-1, TRBJ2-1)
CASSNGGGSSNEQFF

SEQ ID NO: 711469 - protein, 14 aa, Homo sapiens
  CDR3 for alpha chain variable domain of TCR clone 355735 (TRAV12-3, TRAJ42)
CAMNYGGSQGNLIF

SEQ ID NO: 711470 - protein, 15 aa, Homo sapiens
  CDR3 for beta chain variable domain of TCR clone 355735 (TRBV5-7, TRBJ1-5)
CASSYGKLWDQPKHF

SEQ ID NO: 711471 - protein, 12 aa, Homo sapiens
  CDR3 for alpha chain variable domain of TCR clone 355736 (TRAV13-1, TRAJ5)
CAAKAGRRALTF

SEQ ID NO: 711472 - protein, 11 aa, Homo sapiens
  CDR3 for beta chain variable domain of TCR clone 355736 (TRBV7-2, TRBJ2-7)
CASSSGLWQYF

SEQ ID NO: 711473 - protein, 12 aa, Homo sapiens
  CDR3 for alpha chain variable domain of TCR clone 355737 (TRAV3, TRAJ31)
CAAQRAYARLMF

SEQ ID NO: 711474 - protein, 16 aa, Homo sapiens
  CDR3 for beta chain variable domain of TCR clone 355737 (TRBV4-2, TRBJ1-1)
CASSPSPGRAAPEAFF

SEQ ID NO: 711475 - protein, 14 aa, Homo sapiens
  CDR3 for alpha chain variable domain of TCR clone 355738 (TRAV20, TRAJ20)
CAVRRGYNDYKLSF

SEQ ID NO: 711476 - protein, 14 aa, Homo sapiens
  CDR3 for beta chain variable domain of TCR clone 355738 (TRBV11-2, TRBJ1-2)
CASSLGTANYGYTF

SEQ ID NO: 711477 - protein, 13 aa, Homo sapiens
  CDR3 for alpha chain variable domain of TCR clone 355739 (TRAV8-6, TRAJ34)
CAVSDQGTDKLIF

SEQ ID NO: 711478 - protein, 16 aa, Homo sapiens
  CDR3 for beta chain variable domain of TCR clone 355739 (TRBV5-1, TRBJ2-2)
CASSSRTGGRTGELFF

SEQ ID NO: 711479 - protein, 16 aa, Homo sapiens
  CDR3 for alpha chain variable domain of TCR clone 355740 (TRAV21, TRAJ52)
CAVTNAGGTSYGKLTF

SEQ ID NO: 711480 - protein, 17 aa, Homo sapiens
  CDR3 for beta chain variable domain of TCR clone 355740 (TRBV28, TRBJ2-5)
CASSRQEGLAGAETQYF

SEQ ID NO: 711481 - protein, 13 aa, Homo sapiens
  CDR3 for alpha chain variable domain of TCR clone 355741 (TRAV27, TRAJ6)
CAGATRGSYIPTS

SEQ ID NO: 711482 - protein, 14 aa, Homo sapiens
  CDR3 for beta chain variable domain of TCR clone 355741 (TRBV6-3, TRBJ1-1)
CASSYQRRDTEAFF

SEQ ID NO: 711483 - protein, 15 aa, Homo sapiens
  CDR3 for alpha chain variable domain of TCR clone 355742 (TRAV21, TRAJ53)
CATLNSGGSNYKLTF

SEQ ID NO: 711484 - protein, 14 aa, Homo sapiens
  CDR3 for beta chain variable domain of TCR clone 355742 (TRBV9, TRBJ2-7)
CASSVGVGSYEQYF

SEQ ID NO: 711485 - protein, 16 aa, Homo sapiens
  CDR3 for alpha chain variable domain of TCR clone 355743 (TRAV14/DV4, TRAJ45)
CAMREGERGGADGLTF

SEQ ID NO: 711486 - protein, 16 aa, Homo sapiens
  CDR3 for beta chain variable domain of TCR clone 355743 (TRBV6-6, TRBJ2-4)
CASSNAGQGAENIQYF

SEQ ID NO: 711487 - protein, 12 aa, Homo sapiens
  CDR3 for alpha chain variable domain of TCR clone 355744 (TRAV17, TRAJ20)
CATDSNDYKLSF

SEQ ID NO: 711488 - protein, 16 aa, Homo sapiens
  CDR3 for beta chain variable domain of TCR clone 355744 (TRBV7-2, TRBJ1-2)
CASSSNQVRRGHGYTF

SEQ ID NO: 711489 - protein, 18 aa, Homo sapiens
  CDR3 for alpha chain variable domain of TCR clone 355745 (TRAV12-3, TRAJ52)
CAMSAGGAGGASYGKLTF

SEQ ID NO: 711490 - protein, 15 aa, Homo sapiens
  CDR3 for beta chain variable domain of TCR clone 355745 (TRBV27, TRBJ1-6)
CASSFDRGLGSPLHF

SEQ ID NO: 711491 - protein, 14 aa, Homo sapiens
  CDR3 for alpha chain variable domain of TCR clone 355746 (TRAV38-1, TRAJ45)
CASHSGGGADGLTF

SEQ ID NO: 711492 - protein, 13 aa, Homo sapiens
  CDR3 for beta chain variable domain of TCR clone 355746 (TRBV10-3, TRBJ1-2)
CAISERDSYGYNF

SEQ ID NO: 711493 - protein, 15 aa, Homo sapiens
  CDR3 for alpha chain variable domain of TCR clone 355747 (TRAV12-1, TRAJ37)
CVVNLPTSNTGKLIF

SEQ ID NO: 711494 - protein, 14 aa, Homo sapiens
  CDR3 for beta chain variable domain of TCR clone 355747 (TRBV7-2, TRBJ2-7)
CASRSQGAAYEQYF

SEQ ID NO: 711495 - protein, 17 aa, Homo sapiens
  CDR3 for alpha chain variable domain of TCR clone 355748 (TRAV13-1, TRAJ23)
CAASKRFHRLRKAYLRT

SEQ ID NO: 711496 - protein, 14 aa, Homo sapiens
  CDR3 for beta chain variable domain of TCR clone 355748 (TRBV19, TRBJ2-1)
CASPTFVLSGEQFF

SEQ ID NO: 711497 - protein, 15 aa, Homo sapiens
  CDR3 for alpha chain variable domain of TCR clone 355749 (TRAV2, TRAJ24)
CAVVRLKNSWGKLQF

SEQ ID NO: 711498 - protein, 16 aa, Homo sapiens
  CDR3 for beta chain variable domain of TCR clone 355749 (TRBV7-7, TRBJ2-3)
CASSTGASGSTDTQYF

SEQ ID NO: 711499 - protein, 17 aa, Homo sapiens
  CDR3 for alpha chain variable domain of TCR clone 355750 (TRAV26-1, TRAJ37)
CIVRVITVSSDTGKLIF

SEQ ID NO: 711500 - protein, 13 aa, Homo sapiens
  CDR3 for beta chain variable domain of TCR clone 355750 (TRBV2, TRBJ1-4)
CASSERAGEKLFF

SEQ ID NO: 711501 - protein, 15 aa, Homo sapiens
  CDR3 for alpha chain variable domain of TCR clone 355751 (TRAV29/DV5, TRAJ28)
CAAGYSGAGSYQLTF

SEQ ID NO: 711502 - protein, 13 aa, Homo sapiens
  CDR3 for beta chain variable domain of TCR clone 355751 (TRBV4-1, TRBJ2-1)
CASSQEVQYEQFF

SEQ ID NO: 711503 - protein, 12 aa, Homo sapiens
  CDR3 for alpha chain variable domain of TCR clone 355752 (TRAV35, TRAJ49)
CAGWNTGNQFYF

SEQ ID NO: 711504 - protein, 15 aa, Homo sapiens
  CDR3 for beta chain variable domain of TCR clone 355752 (TRBV11-2, TRBJ1-2)
CASSLEGVQRNGYTF

SEQ ID NO: 711505 - protein, 15 aa, Homo sapiens
  CDR3 for alpha chain variable domain of TCR clone 355753 (TRAV12-1, TRAJ45)
CVVLSGGGGADGLTF

SEQ ID NO: 711506 - protein, 15 aa, Homo sapiens
  CDR3 for beta chain variable domain of TCR clone 355753 (TRBV7-2, TRBJ1-4)
CASSLLGQSNEKLFF

SEQ ID NO: 711507 - protein, 12 aa, Homo sapiens
  CDR3 for alpha chain variable domain of TCR clone 355754 (TRAV2, TRAJ10)
CASPGGGNKLTF

SEQ ID NO: 711508 - protein, 14 aa, Homo sapiens
  CDR3 for beta chain variable domain of TCR clone 355754 (TRBV19, TRBJ2-5)
CASSMTGQQETQYF

SEQ ID NO: 711509 - protein, 16 aa, Homo sapiens
  CDR3 for alpha chain variable domain of TCR clone 355755 (TRAV8-3, TRAJ13)
CAVGAYPSGGYQKVTF

SEQ ID NO: 711510 - protein, 14 aa, Homo sapiens
  CDR3 for beta chain variable domain of TCR clone 355755 (TRBV18, TRBJ2-5)
CASSPRASSETQYY

SEQ ID NO: 711511 - protein, 21 aa, Homo sapiens
  CDR3 for alpha chain variable domain of TCR clone 355756 (TRAV1-1, TRAJ6)
CLLLLRRERLERTGGSYIPTF

SEQ ID NO: 711512 - protein, 13 aa, Homo sapiens
  CDR3 for beta chain variable domain of TCR clone 355756 (TRBV10-2, TRBJ2-7)
CASGASGGYEQYF

SEQ ID NO: 711513 - protein, 16 aa, Homo sapiens
  CDR3 for alpha chain variable domain of TCR clone 355757 (TRAV12-1, TRAJ42)
CVVTPYYGGSQGNLIF

SEQ ID NO: 711514 - protein, 15 aa, Homo sapiens
  CDR3 for beta chain variable domain of TCR clone 355757 (TRBV4-3, TRBJ2-7)
CASSHGGRGIYEQYF

SEQ ID NO: 711515 - protein, 14 aa, Homo sapiens
  CDR3 for alpha chain variable domain of TCR clone 355758 (TRAV8-2, TRAJ37)
CVVSISGNTGTLIF

SEQ ID NO: 711516 - protein, 11 aa, Homo sapiens
  CDR3 for beta chain variable domain of TCR clone 355758 (TRBV18, TRBJ2-5)
CASSPRETQYF

SEQ ID NO: 711517 - protein, 13 aa, Homo sapiens
  CDR3 for alpha chain variable domain of TCR clone 355759 (TRAV30, TRAJ24)
CGTVTDSWGKLQF

SEQ ID NO: 711518 - protein, 15 aa, Homo sapiens
  CDR3 for beta chain variable domain of TCR clone 355759 (TRBV25-1, TRBJ1-4)
CASSPGDSTNEKLSF

SEQ ID NO: 711519 - protein, 14 aa, Homo sapiens
  CDR3 for alpha chain variable domain of TCR clone 355760 (TRAV2, TRAJ22)
CAVGRGGSAKQLTF

SEQ ID NO: 711520 - protein, 12 aa, Homo sapiens
  CDR3 for beta chain variable domain of TCR clone 355760 (TRBV19, TRBJ2-1)
CASSMQDTEQFF

SEQ ID NO: 711521 - protein, 14 aa, Homo sapiens
  CDR3 for alpha chain variable domain of TCR clone 355761 (TRAV16, TRAJ31)
CALSGRNNNASLMF

SEQ ID NO: 711522 - protein, 12 aa, Homo sapiens
  CDR3 for beta chain variable domain of TCR clone 355761 (TRBV11-2, TRBJ1-2)
CASSREGDGYTF

SEQ ID NO: 711523 - protein, 12 aa, Homo sapiens
  CDR3 for alpha chain variable domain of TCR clone 355762 (TRAV17, TRAJ28)
WDSGAGSYQLTF

SEQ ID NO: 711524 - protein, 13 aa, Homo sapiens
  CDR3 for beta chain variable domain of TCR clone 355762 (TRBV11-3, TRBJ1-1)
CASSRQHNTEAFF

SEQ ID NO: 711525 - protein, 13 aa, Homo sapiens
  CDR3 for alpha chain variable domain of TCR clone 355763 (TRAV8-3, TRAJ28)
CAVGAVGSYQLTF

SEQ ID NO: 711526 - protein, 14 aa, Homo sapiens
  CDR3 for beta chain variable domain of TCR clone 355763 (TRBV4-2, TRBJ2-1)
CASGLDRAYNEQFF

SEQ ID NO: 711527 - protein, 12 aa, Homo sapiens
  CDR3 for alpha chain variable domain of TCR clone 355764 (TRAV13-2, TRAJ23)
CAERHRGGKLIF

SEQ ID NO: 711528 - protein, 16 aa, Homo sapiens
  CDR3 for beta chain variable domain of TCR clone 355764 (TRBV20-1, TRBJ1-4)
GSAPGQDLLTNEKLFF

SEQ ID NO: 711529 - protein, 13 aa, Homo sapiens
  CDR3 for alpha chain variable domain of TCR clone 355765 (TRAV12-2, TRAJ30)
RAVNLNRDDKIIF

SEQ ID NO: 711530 - protein, 14 aa, Homo sapiens
  CDR3 for beta chain variable domain of TCR clone 355765 (TRBV7-2, TRBJ1-2)
CASSAQGAHYGYTF

SEQ ID NO: 711531 - protein, 11 aa, Homo sapiens
  CDR3 for alpha chain variable domain of TCR clone 355766 (TRAV3, TRAJ21)
CAVGNFNKFYF

SEQ ID NO: 711532 - protein, 11 aa, Homo sapiens
  CDR3 for beta chain variable domain of TCR clone 355766 (TRBV7-9, TRBJ2-3)
CASSGPDTQYF

SEQ ID NO: 711533 - protein, 12 aa, Homo sapiens
  CDR3 for alpha chain variable domain of TCR clone 355767 (TRAV12-3, TRAJ17)
CAMTLTGSKLTF

SEQ ID NO: 711534 - protein, 15 aa, Homo sapiens
  CDR3 for beta chain variable domain of TCR clone 355767 (TRBV20-1, TRBJ2-7)
CSARDRVSGKDEQYF

SEQ ID NO: 711535 - protein, 12 aa, Homo sapiens
  CDR3 for alpha chain variable domain of TCR clone 355768 (TRAV8-3, TRAJ26)
CAGDNYGQNFVF

SEQ ID NO: 711536 - protein, 13 aa, Homo sapiens
  CDR3 for beta chain variable domain of TCR clone 355768 (TRBV2, TRBJ1-1)
CASRWTVNTEAFF

SEQ ID NO: 711537 - protein, 15 aa, Homo sapiens
  CDR3 for alpha chain variable domain of TCR clone 355769 (TRAV8-3, TRAJ27)
CAVGPSTANAGKSTF

SEQ ID NO: 711538 - protein, 15 aa, Homo sapiens
  CDR3 for beta chain variable domain of TCR clone 355769 (TRBV7-2, TRBJ2-1)
CASSSGLAGGNEQFF

SEQ ID NO: 711539 - protein, 17 aa, Homo sapiens
  CDR3 for alpha chain variable domain of TCR clone 355770 (TRAV3, TRAJ12)
CAVRDGGRMDSSYKLIF

SEQ ID NO: 711540 - protein, 13 aa, Homo sapiens
  CDR3 for beta chain variable domain of TCR clone 355770 (TRBV27, TRBJ2-1)
CASTPLAAGEQFF

SEQ ID NO: 711541 - protein, 13 aa, Homo sapiens
  CDR3 for alpha chain variable domain of TCR clone 355771 (TRAV8-2, TRAJ34)
CVVSDRRTDKLIF

SEQ ID NO: 711542 - protein, 15 aa, Homo sapiens
  CDR3 for beta chain variable domain of TCR clone 355771 (TRBV20-1, TRBJ2-3)
GSARVVGGSTDTQYF

SEQ ID NO: 711543 - protein, 10 aa, Homo sapiens
  CDR3 for alpha chain variable domain of TCR clone 355772 (TRAV12-2, TRAJ10)
CAAWTGVETH

SEQ ID NO: 711544 - protein, 13 aa, Homo sapiens
  CDR3 for beta chain variable domain of TCR clone 355772 (TRBV9, TRBJ2-1)
CASSPSGGSEQFF

SEQ ID NO: 711545 - protein, 13 aa, Homo sapiens
  CDR3 for alpha chain variable domain of TCR clone 355773 (TRAV1-1, TRAJ23)
CAVVANQGGKLIF

SEQ ID NO: 711546 - protein, 16 aa, Homo sapiens
  CDR3 for beta chain variable domain of TCR clone 355773 (TRBV5-5, TRBJ1-2)
CASSPTCGRGLYGYTF

SEQ ID NO: 711547 - protein, 15 aa, Homo sapiens
  CDR3 for alpha chain variable domain of TCR clone 355774 (TRAV8-3, TRAJ44)
CAVGAGAGTASKLTF

SEQ ID NO: 711548 - protein, 14 aa, Homo sapiens
  CDR3 for beta chain variable domain of TCR clone 355774 (TRBV7-8, TRBJ2-4)
CASSLGETFSTSAP

SEQ ID NO: 711549 - protein, 11 aa, Homo sapiens
  CDR3 for alpha chain variable domain of TCR clone 355775 (TRAV3, TRAJ21)
CAVGNFNKFYF

SEQ ID NO: 711550 - protein, 14 aa, Homo sapiens
  CDR3 for beta chain variable domain of TCR clone 355775 (TRBV19, TRBJ1-2)
CASSSLFARDVYTF

SEQ ID NO: 711551 - protein, 13 aa, Homo sapiens
  CDR3 for alpha chain variable domain of TCR clone 355776 (TRAV35, TRAJ48)
CAGHEFGNAKLTF

SEQ ID NO: 711552 - protein, 13 aa, Homo sapiens
  CDR3 for beta chain variable domain of TCR clone 355776 (TRBV7-2, TRBJ1-6)
CASSLVGSSPLHF

SEQ ID NO: 711553 - protein, 13 aa, Homo sapiens
  CDR3 for alpha chain variable domain of TCR clone 355777 (TRAV12-1, TRAJ5)
CGFTDTGRRALTF

SEQ ID NO: 711554 - protein, 16 aa, Homo sapiens
  CDR3 for beta chain variable domain of TCR clone 355777 (TRBV19, TRBJ2-2)
CASSFPGQGLAGELFF

SEQ ID NO: 711555 - protein, 14 aa, Homo sapiens
  CDR3 for alpha chain variable domain of TCR clone 355778 (TRAV8-4, TRAJ9)
CAVSDRTGGFKTIF

SEQ ID NO: 711556 - protein, 13 aa, Homo sapiens
  CDR3 for beta chain variable domain of TCR clone 355778 (TRBV11-2, TRBJ2-7)
CASSLGDYYEQYF

SEQ ID NO: 711557 - protein, 13 aa, Homo sapiens
  CDR3 for alpha chain variable domain of TCR clone 355779 (TRAV12-1, TRAJ37)
WVVNAGNTGKLIF

SEQ ID NO: 711558 - protein, 14 aa, Homo sapiens
  CDR3 for beta chain variable domain of TCR clone 355779 (TRBV7-2, TRBJ2-3)
CASRRGLAADTQYF

SEQ ID NO: 711559 - protein, 15 aa, Homo sapiens
  CDR3 for alpha chain variable domain of TCR clone 355780 (TRAV27, TRAJ38)
CAARRNAGNNRKLIW

SEQ ID NO: 711560 - protein, 13 aa, Homo sapiens
  CDR3 for beta chain variable domain of TCR clone 355780 (TRBV13, TRBJ2-5)
CASSLGGEETQYF

SEQ ID NO: 711561 - protein, 16 aa, Homo sapiens
  CDR3 for alpha chain variable domain of TCR clone 355781 (TRAV3, TRAJ21)
CAVRDIERGHFNKFYF

SEQ ID NO: 711562 - protein, 11 aa, Homo sapiens
  CDR3 for beta chain variable domain of TCR clone 355781 (TRBV11-2, TRBJ2-2)
CASSLPGELFF

SEQ ID NO: 711563 - protein, 12 aa, Homo sapiens
  CDR3 for alpha chain variable domain of TCR clone 355782 (TRAV2, TRAJ26)
CAGSPGRLWSEF

SEQ ID NO: 711564 - protein, 13 aa, Homo sapiens
  CDR3 for beta chain variable domain of TCR clone 355782 (TRBV7-9, TRBJ1-2)
CGSSLKQNYGYTF

SEQ ID NO: 711565 - protein, 13 aa, Homo sapiens
  CDR3 for alpha chain variable domain of TCR clone 355783 (TRAV36/DV7, TRAJ37)
CAVFSSNTGKLIF

SEQ ID NO: 711566 - protein, 15 aa, Homo sapiens
  CDR3 for beta chain variable domain of TCR clone 355783 (TRBV12-4, TRBJ2-5)
CQQFFVRGGKETQYF

SEQ ID NO: 711567 - protein, 14 aa, Homo sapiens
  CDR3 for alpha chain variable domain of TCR clone 355784 (TRAV1-2, TRAJ16)
SAVNRFSDGQKLLF

SEQ ID NO: 711568 - protein, 15 aa, Homo sapiens
  CDR3 for beta chain variable domain of TCR clone 355784 (TRBV7-9, TRBJ2-2)
CASGPLDTFPGELFF

SEQ ID NO: 711569 - protein, 16 aa, Homo sapiens
  CDR3 for alpha chain variable domain of TCR clone 355785 (TRAV30, TRAJ24)
CGTEIVDADIWGKFQF

SEQ ID NO: 711570 - protein, 15 aa, Homo sapiens
  CDR3 for beta chain variable domain of TCR clone 355785 (TRBV7-9, TRBJ1-4)
CASSARTGGNEKLFF

SEQ ID NO: 711571 - protein, 13 aa, Homo sapiens
  CDR3 for alpha chain variable domain of TCR clone 355786 (TRAV27, TRAJ45)
CWSSGGGADGLTF

SEQ ID NO: 711572 - protein, 15 aa, Homo sapiens
  CDR3 for beta chain variable domain of TCR clone 355786 (TRBV7-3, TRBJ2-2)
CASSETGQGTGELFF

SEQ ID NO: 711573 - protein, 16 aa, Homo sapiens
  CDR3 for alpha chain variable domain of TCR clone 355787 (TRAV12-2, TRAJ13)
CAVDSAGAGGYQKVTF

SEQ ID NO: 711574 - protein, 13 aa, Homo sapiens
  CDR3 for beta chain variable domain of TCR clone 355787 (TRBV4-2, TRBJ1-1)
CASSQAGNTEAFF

SEQ ID NO: 711575 - protein, 11 aa, Homo sapiens
  CDR3 for alpha chain variable domain of TCR clone 355788 (TRAV12-3, TRAJ49)
CAMSSGNQFCF

SEQ ID NO: 711576 - protein, 17 aa, Homo sapiens
  CDR3 for beta chain variable domain of TCR clone 355788 (TRBV5-7, TRBJ2-7)
CASSLWRVLAGSYEQYF

SEQ ID NO: 711577 - protein, 15 aa, Homo sapiens
  CDR3 for alpha chain variable domain of TCR clone 355789 (TRAV8-3, TRAJ45)
CASSYSGGGADGLTF

SEQ ID NO: 711578 - protein, 12 aa, Homo sapiens
  CDR3 for beta chain variable domain of TCR clone 355789 (TRBV12-4, TRBJ1-1)
CASSFLSGEAFF

SEQ ID NO: 711579 - protein, 16 aa, Homo sapiens
  CDR3 for alpha chain variable domain of TCR clone 355790 (TRAV29/DV5, TRAJ36)
CAASAGVETGAHNLFF

SEQ ID NO: 711580 - protein, 16 aa, Homo sapiens
  CDR3 for beta chain variable domain of TCR clone 355790 (TRBV5-1, TRBJ2-3)
CASSLGLAVYTDTQYF

SEQ ID NO: 711581 - protein, 14 aa, Homo sapiens
  CDR3 for alpha chain variable domain of TCR clone 355791 (TRAV12-2, TRAJ11)
CAVSRESGYSTLPF

SEQ ID NO: 711582 - protein, 10 aa, Homo sapiens
  CDR3 for beta chain variable domain of TCR clone 355791 (TRBV20-1, TRBJ2-5)
CSARFETQYF

SEQ ID NO: 711583 - protein, 16 aa, Homo sapiens
  CDR3 for alpha chain variable domain of TCR clone 355792 (TRAV38-1, TRAJ56)
CAFMKRQNGANSKLTF

SEQ ID NO: 711584 - protein, 15 aa, Homo sapiens
  CDR3 for beta chain variable domain of TCR clone 355792 (TRBV5-1, TRBJ2-2)
CASSSQGGNTGELFF

SEQ ID NO: 711585 - protein, 14 aa, Homo sapiens
  CDR3 for alpha chain variable domain of TCR clone 355793 (TRAV30, TRAJ33)
CDTVAPRSNYQLIW

SEQ ID NO: 711586 - protein, 16 aa, Homo sapiens
  CDR3 for beta chain variable domain of TCR clone 355793 (TRBV3-1, TRBJ2-5)
CASSPGQFNGFGTQYF

SEQ ID NO: 711587 - protein, 14 aa, Homo sapiens
  CDR3 for alpha chain variable domain of TCR clone 355794 (TRAV1-2, TRAJ16)
CAVNRFSDGQKLLF

SEQ ID NO: 711588 - protein, 15 aa, Homo sapiens
  CDR3 for beta chain variable domain of TCR clone 355794 (TRBV7-9, TRBJ2-7)
CASSSSGLAVYEQYF

SEQ ID NO: 711589 - protein, 12 aa, Homo sapiens
  CDR3 for alpha chain variable domain of TCR clone 355795 (TRAV12-3, TRAJ17)
CAMTPPGNKLTF

SEQ ID NO: 711590 - protein, 15 aa, Homo sapiens
  CDR3 for beta chain variable domain of TCR clone 355795 (TRBV20-1, TRBJ2-7)
CSARDRVSGMDEQYF

SEQ ID NO: 711591 - protein, 15 aa, Homo sapiens
  CDR3 for alpha chain variable domain of TCR clone 355796 (TRAV8-3, TRAJ27)
CALGPSKTNAGKSTL

SEQ ID NO: 711592 - protein, 15 aa, Homo sapiens
  CDR3 for beta chain variable domain of TCR clone 355796 (TRBV7-2, TRBJ2-1)
CASSSGLAGGNEQFF

SEQ ID NO: 711593 - protein, 12 aa, Homo sapiens
  CDR3 for alpha chain variable domain of TCR clone 355797 (TRAV21, TRAJ33)
CAKMDSNYQLIW

SEQ ID NO: 711594 - protein, 15 aa, Homo sapiens
  CDR3 for beta chain variable domain of TCR clone 355797 (TRBV4-1, TRBJ2-7)
CASSQNTGRLYEQYF

SEQ ID NO: 711595 - protein, 16 aa, Homo sapiens
  CDR3 for alpha chain variable domain of TCR clone 355798 (TRAV3, TRAJ10)
CAVRDMRAGGGTKLTF

SEQ ID NO: 711596 - protein, 14 aa, Homo sapiens
  CDR3 for beta chain variable domain of TCR clone 355798 (TRBV7-2, TRBJ1-1)
CASSFLTGTTEAFF

SEQ ID NO: 711597 - protein, 13 aa, Homo sapiens
  CDR3 for alpha chain variable domain of TCR clone 355799 (TRAV30, TRAJ24)
CGTVTDSWGKLQF

SEQ ID NO: 711598 - protein, 13 aa, Homo sapiens
  CDR3 for beta chain variable domain of TCR clone 355799 (TRBV29-1, TRBJ2-1)
CSVEGGRVNEQFF

SEQ ID NO: 711599 - protein, 13 aa, Homo sapiens
  CDR3 for alpha chain variable domain of TCR clone 355800 (TRAV1-2, TRAJ11)
CAARDSGYSTLTF

SEQ ID NO: 711600 - protein, 16 aa, Homo sapiens
  CDR3 for beta chain variable domain of TCR clone 355800 (TRBV5-1, TRBJ2-7)
CASSWGTGGRAWEQYF

SEQ ID NO: 711601 - protein, 13 aa, Homo sapiens
  CDR3 for alpha chain variable domain of TCR clone 355801 (TRAV12-3, TRAJ4)
CNEQAGGYHKLIF

SEQ ID NO: 711602 - protein, 15 aa, Homo sapiens
  CDR3 for beta chain variable domain of TCR clone 355801 (TRBV5-1, TRBJ1-1)
CASSLSDLGGTEAFF

SEQ ID NO: 711603 - protein, 14 aa, Homo sapiens
  CDR3 for alpha chain variable domain of TCR clone 355802 (TRAV1-2, TRAJ16)
CAVNRFSDGQKLLF

SEQ ID NO: 711604 - protein, 14 aa, Homo sapiens
  CDR3 for beta chain variable domain of TCR clone 355802 (TRBV7-8, TRBJ2-3)
CASSFPDGQDMQYF

SEQ ID NO: 711605 - protein, 13 aa, Homo sapiens
  CDR3 for alpha chain variable domain of TCR clone 355803 (TRAV13-1, TRAJ49)
CAASVLRGNQFYF

SEQ ID NO: 711606 - protein, 17 aa, Homo sapiens
  CDR3 for beta chain variable domain of TCR clone 355803 (TRBV7-3, TRBJ2-3)
CASSLMKRMRGADTQYF

SEQ ID NO: 711607 - protein, 16 aa, Homo sapiens
  CDR3 for alpha chain variable domain of TCR clone 355804 (TRAV3, TRAJ5)
CAVRNLMDTGRRALTF

SEQ ID NO: 711608 - protein, 14 aa, Homo sapiens
  CDR3 for beta chain variable domain of TCR clone 355804 (TRBV18, TRBJ2-7)
CASSPRGGAYEQYF

SEQ ID NO: 711609 - protein, 16 aa, Homo sapiens
  CDR3 for alpha chain variable domain of TCR clone 355805 (TRAV23/DV6, TRAJ57)
CAASSTLSQGGSEKLF

SEQ ID NO: 711610 - protein, 16 aa, Homo sapiens
  CDR3 for beta chain variable domain of TCR clone 355805 (TRBV25-1, TRBJ1-1)
CASTHLGGTLKLSLDK

SEQ ID NO: 711611 - protein, 14 aa, Homo sapiens
  CDR3 for alpha chain variable domain of TCR clone 355806 (TRAV8-6, TRAJ49)
CAVSVRYTCNQFYF

SEQ ID NO: 711612 - protein, 19 aa, Homo sapiens
  CDR3 for beta chain variable domain of TCR clone 355806 (TRBV28, TRBJ2-1)
CASSFSIRGSGRTRYEQFF

SEQ ID NO: 711613 - protein, 13 aa, Homo sapiens
  CDR3 for alpha chain variable domain of TCR clone 355807 (TRAV17, TRAJ9)
CATDYTGGFKTIF

SEQ ID NO: 711614 - protein, 12 aa, Homo sapiens
  CDR3 for beta chain variable domain of TCR clone 355807 (TRBV4-1, TRBJ2-3)
CASSQGTDTQYF

SEQ ID NO: 711615 - protein, 12 aa, Homo sapiens
  CDR3 for alpha chain variable domain of TCR clone 355808 (TRAV29/DV5, TRAJ49)
CAATDTGNQFYF

SEQ ID NO: 711616 - protein, 19 aa, Homo sapiens
  CDR3 for beta chain variable domain of TCR clone 355808 (TRBV25-1, TRBJ2-2)
RAILVYRVDRGRKTGELFF

SEQ ID NO: 711617 - protein, 23 aa, Homo sapiens
  CDR3 for alpha chain variable domain of TCR clone 355809 (TRAV12-2, TRAJ36)
SLLIRDSQPSDSATLERANNLFF

SEQ ID NO: 711618 - protein, 15 aa, Homo sapiens
  CDR3 for beta chain variable domain of TCR clone 355809 (TRBV11-2, TRBJ1-3)
CASSLDGTVGNTIYF

SEQ ID NO: 711619 - protein, 15 aa, Homo sapiens
  CDR3 for alpha chain variable domain of TCR clone 355810 (TRAV12-3, TRAJ6)
CAMSATTGGSYIPTF

SEQ ID NO: 711620 - protein, 15 aa, Homo sapiens
  CDR3 for beta chain variable domain of TCR clone 355810 (TRBV28, TRBJ2-5)
CASSPPWSYQETHYF

SEQ ID NO: 711621 - protein, 14 aa, Homo sapiens
  CDR3 for alpha chain variable domain of TCR clone 355811 (TRAV3, TRAJ9)
CAVRGNTGGFKTIF

SEQ ID NO: 711622 - protein, 14 aa, Homo sapiens
  CDR3 for beta chain variable domain of TCR clone 355811 (TRBV15, TRBJ2-1)
CATSGVEDYNEQCF

SEQ ID NO: 711623 - protein, 16 aa, Homo sapiens
  CDR3 for alpha chain variable domain of TCR clone 355812 (TRAV27, TRAJ13)
CAGAKSDSGGYQKVSC

SEQ ID NO: 711624 - protein, 17 aa, Homo sapiens
  CDR3 for beta chain variable domain of TCR clone 355812 (TRBV20-1, TRBJ2-1)
CSASSSGLAGSYNEQFF

SEQ ID NO: 711625 - protein, 16 aa, Homo sapiens
  CDR3 for alpha chain variable domain of TCR clone 355813 (TRAV4, TRAJ22)
CLVGDLYSGSARQLTF

SEQ ID NO: 711626 - protein, 16 aa, Homo sapiens
  CDR3 for beta chain variable domain of TCR clone 355813 (TRBV6-6, TRBJ1-5)
CASSYSTLVGNQPQHF

SEQ ID NO: 711627 - protein, 12 aa, Homo sapiens
  CDR3 for alpha chain variable domain of TCR clone 355814 (TRAV13-1, TRAJ49)
CAASTMGNQFYF

SEQ ID NO: 711628 - protein, 10 aa, Homo sapiens
  CDR3 for beta chain variable domain of TCR clone 355814 (TRBV15, TRBJ2-7)
AETGGYEQYF

SEQ ID NO: 711629 - protein, 13 aa, Homo sapiens
  CDR3 for alpha chain variable domain of TCR clone 355815 (TRAV8-3, TRAJ36)
CAVGATGANNLFF

SEQ ID NO: 711630 - protein, 15 aa, Homo sapiens
  CDR3 for beta chain variable domain of TCR clone 355815 (TRBV5-1, TRBJ2-7)
CASSLGDFTTYEQYF

SEQ ID NO: 711631 - protein, 15 aa, Homo sapiens
  CDR3 for alpha chain variable domain of TCR clone 355816 (TRAV12-2, TRAJ53)
CAVNGGGGSNYKLTF

SEQ ID NO: 711632 - protein, 14 aa, Homo sapiens
  CDR3 for beta chain variable domain of TCR clone 355816 (TRBV7-9, TRBJ2-7)
CASSLDRPTDEQYF

SEQ ID NO: 711633 - protein, 10 aa, Homo sapiens
  CDR3 for alpha chain variable domain of TCR clone 355817 (TRAV36/DV7, TRAJ48)
CAVGNEKLTF

SEQ ID NO: 711634 - protein, 15 aa, Homo sapiens
  CDR3 for beta chain variable domain of TCR clone 355817 (TRBV15, TRBJ2-3)
CHQTIRREGPDTQYF

SEQ ID NO: 711635 - protein, 14 aa, Homo sapiens
  CDR3 for alpha chain variable domain of TCR clone 355818 (TRAV8-2, TRAJ45)
CVVSAGGGAAGLTF

SEQ ID NO: 711636 - protein, 12 aa, Homo sapiens
  CDR3 for beta chain variable domain of TCR clone 355818 (TRBV12-4, TRBJ2-1)
CASSLVRVERFF

SEQ ID NO: 711637 - protein, 11 aa, Homo sapiens
  CDR3 for alpha chain variable domain of TCR clone 355819 (TRAV21, TRAJ48)
CAVDGNEKLTF

SEQ ID NO: 711638 - protein, 16 aa, Homo sapiens
  CDR3 for beta chain variable domain of TCR clone 355819 (TRBV12-4, TRBJ1-5)
CASSSGPRGSNQTQQF

SEQ ID NO: 711639 - protein, 15 aa, Homo sapiens
  CDR3 for alpha chain variable domain of TCR clone 355820 (TRAV2, TRAJ15)
CAVEDRGQAGTALFF

SEQ ID NO: 711640 - protein, 15 aa, Homo sapiens
  CDR3 for beta chain variable domain of TCR clone 355820 (TRBV20-1, TRBJ1-5)
CSATSDRGLGQPQHF

SEQ ID NO: 711641 - protein, 14 aa, Homo sapiens
  CDR3 for alpha chain variable domain of TCR clone 355821 (TRAV12-2, TRAJ11)
CAVNRESGYSTLTL

SEQ ID NO: 711642 - protein, 10 aa, Homo sapiens
  CDR3 for beta chain variable domain of TCR clone 355821 (TRBV20-1, TRBJ2-5)
CGARFETQYF

SEQ ID NO: 711643 - protein, 13 aa, Homo sapiens
  CDR3 for alpha chain variable domain of TCR clone 355822 (TRAV17, TRAJ29)
CATDAFRKHTSCL

SEQ ID NO: 711644 - protein, 13 aa, Homo sapiens
  CDR3 for beta chain variable domain of TCR clone 355822 (TRBV5-7, TRBJ2-6)
CTSTSSGANVLTF

SEQ ID NO: 711645 - protein, 13 aa, Homo sapiens
  CDR3 for alpha chain variable domain of TCR clone 355823 (TRAV8-2, TRAJ43)
CVVCDQGDNDMRF

SEQ ID NO: 711646 - protein, 12 aa, Homo sapiens
  CDR3 for beta chain variable domain of TCR clone 355823 (TRBV7-9, TRBJ2-7)
CASRTGFDEQYF

SEQ ID NO: 711647 - protein, 15 aa, Homo sapiens
  CDR3 for alpha chain variable domain of TCR clone 355824 (TRAV17, TRAJ54)
CATEKLGQGAQKLVL

SEQ ID NO: 711648 - protein, 14 aa, Homo sapiens
  CDR3 for beta chain variable domain of TCR clone 355824 (TRBV7-3, TRBJ1-1)
CQQLRGQMNTEAFF

SEQ ID NO: 711649 - protein, 15 aa, Homo sapiens
  CDR3 for alpha chain variable domain of TCR clone 355825 (TRAV4, TRAJ39)
CLVGPNNNAGNMITF

SEQ ID NO: 711650 - protein, 16 aa, Homo sapiens
  CDR3 for beta chain variable domain of TCR clone 355825 (TRBV5-1, TRBJ2-7)
CASSLEGLAGLYEQYF

SEQ ID NO: 711651 - protein, 18 aa, Homo sapiens
  CDR3 for alpha chain variable domain of TCR clone 355826 (TRAV13-1, TRAJ52)
CAASKRSAGGTSYGKLTF

SEQ ID NO: 711652 - protein, 15 aa, Homo sapiens
  CDR3 for beta chain variable domain of TCR clone 355826 (TRBV7-8, TRBJ2-1)
CASSLADRLYKEQFF

SEQ ID NO: 711653 - protein, 17 aa, Homo sapiens
  CDR3 for alpha chain variable domain of TCR clone 355827 (TRAV3, TRAJ6)
CAVRDGPRAGGSYMPTF

SEQ ID NO: 711654 - protein, 20 aa, Homo sapiens
  CDR3 for beta chain variable domain of TCR clone 355827 (TRBV28, TRBJ2-1)
CASTPIGRSPGLAGGNEQFF

SEQ ID NO: 711655 - protein, 14 aa, Homo sapiens
  CDR3 for alpha chain variable domain of TCR clone 355828 (TRAV17, TRAJ15)
CATGPNQAGTALIF

SEQ ID NO: 711656 - protein, 15 aa, Homo sapiens
  CDR3 for beta chain variable domain of TCR clone 355828 (TRBV11-2, TRBJ2-2)
CASSSDRVNAGELFS

SEQ ID NO: 711657 - protein, 13 aa, Homo sapiens
  CDR3 for alpha chain variable domain of TCR clone 355829 (TRAV29/DV5, TRAJ31)
CAASRNNNARLMF

SEQ ID NO: 711658 - protein, 12 aa, Homo sapiens
  CDR3 for beta chain variable domain of TCR clone 355829 (TRBV7-9, TRBJ1-1)
CASSLVRGEAFF

SEQ ID NO: 711659 - protein, 12 aa, Homo sapiens
  CDR3 for alpha chain variable domain of TCR clone 355830 (TRAV12-1, TRAJ40)
CVVTSGTYKYIF

SEQ ID NO: 711660 - protein, 15 aa, Homo sapiens
  CDR3 for beta chain variable domain of TCR clone 355830 (TRBV12-4, TRBJ2-1)
CAGSPLSGRNSEQFF

SEQ ID NO: 711661 - protein, 17 aa, Homo sapiens
  CDR3 for alpha chain variable domain of TCR clone 355831 (TRAV3, TRAJ12)
CAVRDGGRMVSSYKLIF

SEQ ID NO: 711662 - protein, 12 aa, Homo sapiens
  CDR3 for beta chain variable domain of TCR clone 355831 (TRBV11-2, TRBJ2-2)
CASSLGGGELFF

SEQ ID NO: 711663 - protein, 12 aa, Homo sapiens
  CDR3 for alpha chain variable domain of TCR clone 355832 (TRAV24, TRAJ32)
CLYGGATNKLIF

SEQ ID NO: 711664 - protein, 14 aa, Homo sapiens
  CDR3 for beta chain variable domain of TCR clone 355832 (TRBV7-2, TRBJ1-5)
CASSTQGAGQHQHF

SEQ ID NO: 711665 - protein, 12 aa, Homo sapiens
  CDR3 for alpha chain variable domain of TCR clone 355833 (TRAV8-3, TRAJ20)
CAVDFNDYKLSF

SEQ ID NO: 711666 - protein, 16 aa, Homo sapiens
  CDR3 for beta chain variable domain of TCR clone 355833 (TRBV12-5, TRBJ2-5)
CASGPRTSGNQETQYF

SEQ ID NO: 711667 - protein, 14 aa, Homo sapiens
  CDR3 for alpha chain variable domain of TCR clone 355834 (TRAV17, TRAJ22)
CATSPPGSARQLTF

SEQ ID NO: 711668 - protein, 18 aa, Homo sapiens
  CDR3 for beta chain variable domain of TCR clone 355834 (TRBV7-9, TRBJ2-7)
CASSLTTSGSRTWYEQYF

SEQ ID NO: 711669 - protein, 13 aa, Homo sapiens
  CDR3 for alpha chain variable domain of TCR clone 355835 (TRAV36/DV7, TRAJ29)
CAVEPSGNTPLVF

SEQ ID NO: 711670 - protein, 13 aa, Homo sapiens
  CDR3 for beta chain variable domain of TCR clone 355835 (TRBV12-4, TRBJ1-5)
CASSPRQYQPQHF

SEQ ID NO: 711671 - protein, 14 aa, Homo sapiens
  CDR3 for alpha chain variable domain of TCR clone 355836 (TRAV1-2, TRAJ8)
CAVREDTGFQKLVF

SEQ ID NO: 711672 - protein, 15 aa, Homo sapiens
  CDR3 for beta chain variable domain of TCR clone 355836 (TRBV7-3, TRBJ2-2)
CASSLTGQGTGELFF

SEQ ID NO: 711673 - protein, 13 aa, Homo sapiens
  CDR3 for alpha chain variable domain of TCR clone 355837 (TRAV21, TRAJ11)
CAVPNSGYSTLTF

SEQ ID NO: 711674 - protein, 14 aa, Homo sapiens
  CDR3 for beta chain variable domain of TCR clone 355837 (TRBV11-2, TRBJ2-7)
CASSLGAGAYEQYF

SEQ ID NO: 711675 - protein, 15 aa, Homo sapiens
  CDR3 for alpha chain variable domain of TCR clone 355838 (TRAV12-3, TRAJ6)
CAMSAASGGSYMPTF

SEQ ID NO: 711676 - protein, 13 aa, Homo sapiens
  CDR3 for beta chain variable domain of TCR clone 355838 (TRBV20-1, TRBJ1-2)
CSASTERIYGYTF

SEQ ID NO: 711677 - protein, 14 aa, Homo sapiens
  CDR3 for alpha chain variable domain of TCR clone 355839 (TRAV12-2, TRAJ45)
CAVNKGVGADGLTF

SEQ ID NO: 711678 - protein, 14 aa, Homo sapiens
  CDR3 for beta chain variable domain of TCR clone 355839 (TRBV20-1, TRBJ1-1)
CSAMGGTANTEAFF

SEQ ID NO: 711679 - protein, 15 aa, Homo sapiens
  CDR3 for alpha chain variable domain of TCR clone 355840 (TRAV17, TRAJ4)
CATGTWSGGYNKLIF

SEQ ID NO: 711680 - protein, 16 aa, Homo sapiens
  CDR3 for beta chain variable domain of TCR clone 355840 (TRBV20-1, TRBJ1-4)
CSAPGQGLLTKEKLFF

SEQ ID NO: 711681 - protein, 16 aa, Homo sapiens
  CDR3 for alpha chain variable domain of TCR clone 355841 (TRAV3, TRAJ10)
CAMRDMRAGGGNKLTF

SEQ ID NO: 711682 - protein, 19 aa, Homo sapiens
  CDR3 for beta chain variable domain of TCR clone 355841 (TRBV6-3, TRBJ1-2)
CASSYSKGRTGPPNYGYTF

SEQ ID NO: 711683 - protein, 15 aa, Homo sapiens
  CDR3 for alpha chain variable domain of TCR clone 355842 (TRAV3, TRAJ22)
CAVRDRGGSARQLTL

SEQ ID NO: 711684 - protein, 16 aa, Homo sapiens
  CDR3 for beta chain variable domain of TCR clone 355842 (TRBV5-4, TRBJ2-3)
CASQQPGAGGADTQYF

SEQ ID NO: 711685 - protein, 17 aa, Homo sapiens
  CDR3 for alpha chain variable domain of TCR clone 355843 (TRAV3, TRAJ6)
CAVRADPRAGGSYIPTF

SEQ ID NO: 711686 - protein, 14 aa, Homo sapiens
  CDR3 for beta chain variable domain of TCR clone 355843 (TRBV7-2, TRBJ2-7)
CASSPKTSFYEQYF

SEQ ID NO: 711687 - protein, 16 aa, Homo sapiens
  CDR3 for alpha chain variable domain of TCR clone 355844 (TRAV30, TRAJ24)
CGTEIVDADSWGKFQF

SEQ ID NO: 711688 - protein, 14 aa, Homo sapiens
  CDR3 for beta chain variable domain of TCR clone 355844 (TRBV6-1, TRBJ2-7)
CASTRTGDYYEQYF

SEQ ID NO: 711689 - protein, 14 aa, Homo sapiens
  CDR3 for alpha chain variable domain of TCR clone 355845 (TRAV17, TRAJ56)
CATEDTGANSKLTF

SEQ ID NO: 711690 - protein, 16 aa, Homo sapiens
  CDR3 for beta chain variable domain of TCR clone 355845 (TRBV19, TRBJ2-1)
CASSIKPAGSYNEQFF

SEQ ID NO: 711691 - protein, 14 aa, Homo sapiens
  CDR3 for alpha chain variable domain of TCR clone 355846 (TRAV12-2, TRAJ53)
RAVKGGGSNYKLTF

SEQ ID NO: 711692 - protein, 14 aa, Homo sapiens
  CDR3 for beta chain variable domain of TCR clone 355846 (TRBV7-7, TRBJ2-2)
CATRQDSDTGELFF

SEQ ID NO: 711693 - protein, 14 aa, Homo sapiens
  CDR3 for alpha chain variable domain of TCR clone 355847 (TRAV26-1, TRAJ38)
CIADNAGNNRKLIW

SEQ ID NO: 711694 - protein, 15 aa, Homo sapiens
  CDR3 for beta chain variable domain of TCR clone 355847 (TRBV11-2, TRBJ2-2)
CASSLDTGNTGELFF

SEQ ID NO: 711695 - protein, 17 aa, Homo sapiens
  CDR3 for alpha chain variable domain of TCR clone 355848 (TRAV19, TRAJ28)
CALSEASSGAGVTNSLS

SEQ ID NO: 711696 - protein, 13 aa, Homo sapiens
  CDR3 for beta chain variable domain of TCR clone 355848 (TRBV3-1, TRBJ1-1)
CASSPGVITEAFF

SEQ ID NO: 711697 - protein, 14 aa, Homo sapiens
  CDR3 for alpha chain variable domain of TCR clone 355849 (TRAV9-2, TRAJ39)
CALYIYNAGNMLTF

SEQ ID NO: 711698 - protein, 15 aa, Homo sapiens
  CDR3 for beta chain variable domain of TCR clone 355849 (TRBV27, TRBJ2-1)
CASSNGGRSSNEQFF

SEQ ID NO: 711699 - protein, 16 aa, Homo sapiens
  CDR3 for alpha chain variable domain of TCR clone 355850 (TRAV17, TRAJ35)
CATAEGGIGFGNVLHC

SEQ ID NO: 711700 - protein, 16 aa, Homo sapiens
  CDR3 for beta chain variable domain of TCR clone 355850 (TRBV6-5, TRBJ2-7)
SASSSDPTSGFYEQYF

SEQ ID NO: 711701 - protein, 15 aa, Homo sapiens
  CDR3 for alpha chain variable domain of TCR clone 355851 (TRAV2, TRAJ15)
CAVEDRGQAGTALIF

SEQ ID NO: 711702 - protein, 13 aa, Homo sapiens
  CDR3 for beta chain variable domain of TCR clone 355851 (TRBV4-1, TRBJ1-1)
CASSQLGTGEAFF

SEQ ID NO: 711703 - protein, 15 aa, Homo sapiens
  CDR3 for alpha chain variable domain of TCR clone 355852 (TRAV8-3, TRAJ7)
CAVGSISYGNNRLAF

SEQ ID NO: 711704 - protein, 14 aa, Homo sapiens
  CDR3 for beta chain variable domain of TCR clone 355852 (TRBV13, TRBJ1-1)
CASTVITVNTEAFF

SEQ ID NO: 711705 - protein, 16 aa, Homo sapiens
  CDR3 for alpha chain variable domain of TCR clone 355853 (TRAV12-3, TRAJ53)
CAMSPGSGGSNHKLTL

SEQ ID NO: 711706 - protein, 11 aa, Homo sapiens
  CDR3 for beta chain variable domain of TCR clone 355853 (TRBV29-1, TRBJ2-5)
CSEDRTGTQYF

SEQ ID NO: 711707 - protein, 18 aa, Homo sapiens
  CDR3 for alpha chain variable domain of TCR clone 355854 (TRAV2, TRAJ20)
LQVREADAAVYRDCKLSF

SEQ ID NO: 711708 - protein, 13 aa, Homo sapiens
  CDR3 for beta chain variable domain of TCR clone 355854 (TRBV7-9, TRBJ1-2)
CASSLKQNYGYTF

SEQ ID NO: 711709 - protein, 16 aa, Homo sapiens
  CDR3 for alpha chain variable domain of TCR clone 355855 (TRAV25, TRAJ24)
CAQQRGTTDSWGKLQF

SEQ ID NO: 711710 - protein, 14 aa, Homo sapiens
  CDR3 for beta chain variable domain of TCR clone 355855 (TRBV6-6, TRBJ1-5)
CASSYGPANQPQHF

SEQ ID NO: 711711 - protein, 15 aa, Homo sapiens
  CDR3 for alpha chain variable domain of TCR clone 355856 (TRAV12-2, TRAJ52)
CAVTSGGTSYGKLTF

SEQ ID NO: 711712 - protein, 14 aa, Homo sapiens
  CDR3 for beta chain variable domain of TCR clone 355856 (TRBV7-6, TRBJ2-3)
CASSLGTVTDTQYF

SEQ ID NO: 711713 - protein, 17 aa, Homo sapiens
  CDR3 for alpha chain variable domain of TCR clone 355857 (TRAV8-1, TRAJ42)
CAVKWGNYVGSQGNLIF

SEQ ID NO: 711714 - protein, 15 aa, Homo sapiens
  CDR3 for beta chain variable domain of TCR clone 355857 (TRBV9, TRBJ1-6)
CASSVAGTGDSPLHF

SEQ ID NO: 711715 - protein, 13 aa, Homo sapiens
  CDR3 for alpha chain variable domain of TCR clone 355858 (TRAV12-2, TRAJ20)
CAVYPSNDYKLSF

SEQ ID NO: 711716 - protein, 15 aa, Homo sapiens
  CDR3 for beta chain variable domain of TCR clone 355858 (TRBV18, TRBJ1-2)
CASSSGNGLGYGYTF

SEQ ID NO: 711717 - protein, 13 aa, Homo sapiens
  CDR3 for alpha chain variable domain of TCR clone 355859 (TRAV20, TRAJ15)
CSTINQAGTALIF

SEQ ID NO: 711718 - protein, 13 aa, Homo sapiens
  CDR3 for beta chain variable domain of TCR clone 355859 (TRBV12-4, TRBJ2-1)
CASRQPSNNEQFF

SEQ ID NO: 711719 - protein, 12 aa, Homo sapiens
  CDR3 for alpha chain variable domain of TCR clone 355860 (TRAV13-2, TRAJ32)
RVYGGATNKLIF

SEQ ID NO: 711720 - protein, 15 aa, Homo sapiens
  CDR3 for beta chain variable domain of TCR clone 355860 (TRBV27, TRBJ1-6)
CASSFDRGLGTPLHF

SEQ ID NO: 711721 - protein, 13 aa, Homo sapiens
  CDR3 for alpha chain variable domain of TCR clone 355861 (TRAV21, TRAJ10)
CAVRPGGGNKLTF

SEQ ID NO: 711722 - protein, 15 aa, Homo sapiens
  CDR3 for beta chain variable domain of TCR clone 355861 (TRBV11-3, TRBJ2-3)
CASLKDGREGDTQYF

SEQ ID NO: 711723 - protein, 13 aa, Homo sapiens
  CDR3 for alpha chain variable domain of TCR clone 355862 (TRAV12-3, TRAJ7)
CAMTPYGNNRLAF

SEQ ID NO: 711724 - protein, 15 aa, Homo sapiens
  CDR3 for beta chain variable domain of TCR clone 355862 (TRBV11-3, TRBJ2-3)
CASNLSGQGPNTQYF

SEQ ID NO: 711725 - protein, 17 aa, Homo sapiens
  CDR3 for alpha chain variable domain of TCR clone 355863 (TRAV3, TRAJ38)
CAVRDCLNAGNNRTLIW

SEQ ID NO: 711726 - protein, 14 aa, Homo sapiens
  CDR3 for beta chain variable domain of TCR clone 355863 (TRBV7-3, TRBJ2-1)
CASSLAGGTNEQFF

SEQ ID NO: 711727 - protein, 18 aa, Homo sapiens
  CDR3 for alpha chain variable domain of TCR clone 355864 (TRAV3, TRAJ17)
CAVRARRGGRSCRQQANF

SEQ ID NO: 711728 - protein, 14 aa, Homo sapiens
  CDR3 for beta chain variable domain of TCR clone 355864 (TRBV4-1, TRBJ2-2)
CASSQAVNTGELFL

SEQ ID NO: 711729 - protein, 12 aa, Homo sapiens
  CDR3 for alpha chain variable domain of TCR clone 355865 (TRAV13-1, TRAJ53)
AASGGSNYKLTF

SEQ ID NO: 711730 - protein, 16 aa, Homo sapiens
  CDR3 for beta chain variable domain of TCR clone 355865 (TRBV7-9, TRBJ2-5)
CASRLEIGTRKETQYF

SEQ ID NO: 711731 - protein, 16 aa, Homo sapiens
  CDR3 for alpha chain variable domain of TCR clone 355866 (TRAV1-2, TRAJ10)
CAVRGVLTGGGHKLTF

SEQ ID NO: 711732 - protein, 12 aa, Homo sapiens
  CDR3 for beta chain variable domain of TCR clone 355866 (TRBV7-8, TRBJ2-7)
CASSLGDREQCF

SEQ ID NO: 711733 - protein, 13 aa, Homo sapiens
  CDR3 for alpha chain variable domain of TCR clone 355867 (TRAV20, TRAJ37)
CAGCSSNTGKLIF

SEQ ID NO: 711734 - protein, 15 aa, Homo sapiens
  CDR3 for beta chain variable domain of TCR clone 355867 (TRBV3-1, TRBJ1-1)
CASSRLNPPNTEAFF

SEQ ID NO: 711735 - protein, 14 aa, Homo sapiens
  CDR3 for alpha chain variable domain of TCR clone 355868 (TRAV9-2, TRAJ39)
CALYIYNAGNMLTF

SEQ ID NO: 711736 - protein, 20 aa, Homo sapiens
  CDR3 for beta chain variable domain of TCR clone 355868 (TRBV7-8, TRBJ2-2)
RASSHLFPGPTIHITGELFF

SEQ ID NO: 711737 - protein, 10 aa, Homo sapiens
  CDR3 for alpha chain variable domain of TCR clone 355869 (TRAV23/DV6, TRAJ57)
CAASSTLSQG

SEQ ID NO: 711738 - protein, 12 aa, Homo sapiens
  CDR3 for beta chain variable domain of TCR clone 355869 (TRBV7-6, TRBJ2-7)
RASSLADSEQYF

SEQ ID NO: 711739 - protein, 13 aa, Homo sapiens
  CDR3 for alpha chain variable domain of TCR clone 355870 (TRAV20, TRAJ40)
CAVVTSGTYKYIF

SEQ ID NO: 711740 - protein, 15 aa, Homo sapiens
  CDR3 for beta chain variable domain of TCR clone 355870 (TRBV11-3, TRBJ2-3)
CASLKDGREGDTQYF

SEQ ID NO: 711741 - protein, 15 aa, Homo sapiens
  CDR3 for alpha chain variable domain of TCR clone 355871 (TRAV26-1, TRAJ29)
CIGRVEGSGNTPLVF

SEQ ID NO: 711742 - protein, 14 aa, Homo sapiens
  CDR3 for beta chain variable domain of TCR clone 355871 (TRBV18, TRBJ2-5)
CASSPGVSHETQYF

SEQ ID NO: 711743 - protein, 23 aa, Homo sapiens
  CDR3 for alpha chain variable domain of TCR clone 355872 (TRAV26-1, TRAJ38)
CIADNAGNNHIQNPDPAVYQLRD

SEQ ID NO: 711744 - protein, 13 aa, Homo sapiens
  CDR3 for beta chain variable domain of TCR clone 355872 (TRBV20-1, TRBJ1-1)
SAVLGVGNTEAFF

SEQ ID NO: 711745 - protein, 12 aa, Homo sapiens
  CDR3 for alpha chain variable domain of TCR clone 355873 (TRAV27, TRAJ36)
CAGMTGANNLFF

SEQ ID NO: 711746 - protein, 14 aa, Homo sapiens
  CDR3 for beta chain variable domain of TCR clone 355873 (TRBV12-4, TRBJ2-3)
CASSLVPSTDTQYL

SEQ ID NO: 711747 - protein, 18 aa, Homo sapiens
  CDR3 for alpha chain variable domain of TCR clone 355874 (TRAV21, TRAJ52)
CAVRPSPAGGTSYGKLTF

SEQ ID NO: 711748 - protein, 13 aa, Homo sapiens
  CDR3 for beta chain variable domain of TCR clone 355874 (TRBV12-5, TRBJ2-5)
ASGSRTHQETQYF

SEQ ID NO: 711749 - protein, 15 aa, Homo sapiens
  CDR3 for alpha chain variable domain of TCR clone 355875 (TRAV8-6, TRAJ10)
CAVRDQAGGGNKLTF

SEQ ID NO: 711750 - protein, 15 aa, Homo sapiens
  CDR3 for beta chain variable domain of TCR clone 355875 (TRBV3-1, TRBJ2-5)
CASSANLGGPETQYF

SEQ ID NO: 711751 - protein, 17 aa, Homo sapiens
  CDR3 for alpha chain variable domain of TCR clone 355876 (TRAV8-6, TRAJ58)
CAVSSWVGETSGPRLTF

SEQ ID NO: 711752 - protein, 12 aa, Homo sapiens
  CDR3 for beta chain variable domain of TCR clone 355876 (TRBV28, TRBJ2-3)
CASSLYRDTQYF

SEQ ID NO: 711753 - protein, 14 aa, Homo sapiens
  CDR3 for alpha chain variable domain of TCR clone 355877 (TRAV1-2, TRAJ16)
CAVNRFSDGQKLLF

SEQ ID NO: 711754 - protein, 16 aa, Homo sapiens
  CDR3 for beta chain variable domain of TCR clone 355877 (TRBV7-8, TRBJ2-1)
CASSLVGGGPYNEQFF

SEQ ID NO: 711755 - protein, 13 aa, Homo sapiens
  CDR3 for alpha chain variable domain of TCR clone 355878 (TRAV21, TRAJ27)
CAARPGNAGKSTF

SEQ ID NO: 711756 - protein, 15 aa, Homo sapiens
  CDR3 for beta chain variable domain of TCR clone 355878 (TRBV27, TRBJ2-3)
CASSSLAGVIDTQYF

SEQ ID NO: 711757 - protein, 14 aa, Homo sapiens
  CDR3 for alpha chain variable domain of TCR clone 355879 (TRAV17, TRAJ4)
CATAPLCGYNKLIF

SEQ ID NO: 711758 - protein, 13 aa, Homo sapiens
  CDR3 for beta chain variable domain of TCR clone 355879 (TRBV12-4, TRBJ1-3)
CASSLASGNTMYF

SEQ ID NO: 711759 - protein, 16 aa, Homo sapiens
  CDR3 for alpha chain variable domain of TCR clone 355880 (TRAV3, TRAJ10)
CAVRDMNAGGGNKLTF

SEQ ID NO: 711760 - protein, 15 aa, Homo sapiens
  CDR3 for beta chain variable domain of TCR clone 355880 (TRBV5-1, TRBJ1-2)
CANSLGSVTNYGYTF

SEQ ID NO: 711761 - protein, 14 aa, Homo sapiens
  CDR3 for alpha chain variable domain of TCR clone 355881 (TRAV12-3, TRAJ57)
CAMSAWGGSEKLVF

SEQ ID NO: 711762 - protein, 15 aa, Homo sapiens
  CDR3 for beta chain variable domain of TCR clone 355881 (TRBV19, TRBJ2-4)
CASRGPRRGENIQYF

SEQ ID NO: 711763 - protein, 11 aa, Homo sapiens
  CDR3 for alpha chain variable domain of TCR clone 355882 (TRAV12-2, TRAJ43)
CASPIGNDARF

SEQ ID NO: 711764 - protein, 13 aa, Homo sapiens
  CDR3 for beta chain variable domain of TCR clone 355882 (TRBV7-3, TRBJ1-2)
CASSLKRGYGYTF

SEQ ID NO: 711765 - protein, 14 aa, Homo sapiens
  CDR3 for alpha chain variable domain of TCR clone 355883 (TRAV13-1, TRAJ35)
CAASKGGFGKVLHC

SEQ ID NO: 711766 - protein, 12 aa, Homo sapiens
  CDR3 for beta chain variable domain of TCR clone 355883 (TRBV11-2, TRBJ2-2)
CASSLGGGELFF

SEQ ID NO: 711767 - protein, 14 aa, Homo sapiens
  CDR3 for alpha chain variable domain of TCR clone 355884 (TRAV4, TRAJ17)
CLVGDPLVGNKLTS

SEQ ID NO: 711768 - protein, 20 aa, Homo sapiens
  CDR3 for beta chain variable domain of TCR clone 355884 (TRBV20-1, TRBJ2-1)
CSARPYSVAGGPSYYNEQFF

SEQ ID NO: 711769 - protein, 14 aa, Homo sapiens
  CDR3 for alpha chain variable domain of TCR clone 355885 (TRAV1-2, TRAJ16)
CAVNRFSDGQKLLF

SEQ ID NO: 711770 - protein, 14 aa, Homo sapiens
  CDR3 for beta chain variable domain of TCR clone 355885 (TRBV20-1, TRBJ2-1)
YSARGGSSYNEQFF

SEQ ID NO: 711771 - protein, 11 aa, Homo sapiens
  CDR3 for alpha chain variable domain of TCR clone 355886 (TRAV3, TRAJ21)
CAVGNFNKFYF

SEQ ID NO: 711772 - protein, 17 aa, Homo sapiens
  CDR3 for beta chain variable domain of TCR clone 355886 (TRBV20-1, TRBJ2-1)
CSASSSGLAGSYNEQCF

SEQ ID NO: 711773 - protein, 14 aa, Homo sapiens
  CDR3 for alpha chain variable domain of TCR clone 355887 (TRAV6, TRAJ6)
CALPTSGGSYIPTF

SEQ ID NO: 711774 - protein, 16 aa, Homo sapiens
  CDR3 for beta chain variable domain of TCR clone 355887 (TRBV6-1, TRBJ2-5)
CASSETLDRGAETQYF

SEQ ID NO: 711775 - protein, 15 aa, Homo sapiens
  CDR3 for alpha chain variable domain of TCR clone 355888 (TRAV21, TRAJ52)
CAVRGGGTSYGKLTF

SEQ ID NO: 711776 - protein, 15 aa, Homo sapiens
  CDR3 for beta chain variable domain of TCR clone 355888 (TRBV18, TRBJ1-5)
CASSPADRSNQPQHF

SEQ ID NO: 711777 - protein, 13 aa, Homo sapiens
  CDR3 for alpha chain variable domain of TCR clone 355889 (TRAV12-3, TRAJ13)
CAMSSGGYQKVTF

SEQ ID NO: 711778 - protein, 16 aa, Homo sapiens
  CDR3 for beta chain variable domain of TCR clone 355889 (TRBV4-1, TRBJ2-7)
CASSRGDILNSYEQCF

SEQ ID NO: 711779 - protein, 15 aa, Homo sapiens
  CDR3 for alpha chain variable domain of TCR clone 355890 (TRAV3, TRAJ42)
CAVRGGTGSQGTLIF

SEQ ID NO: 711780 - protein, 14 aa, Homo sapiens
  CDR3 for beta chain variable domain of TCR clone 355890 (TRBV19, TRBJ1-2)
CASSSLFARDVYTF

SEQ ID NO: 711781 - protein, 12 aa, Homo sapiens
  CDR3 for alpha chain variable domain of TCR clone 355891 (TRAV13-1, TRAJ47)
CAASEGGNKLVF

SEQ ID NO: 711782 - protein, 15 aa, Homo sapiens
  CDR3 for beta chain variable domain of TCR clone 355891 (TRBV13, TRBJ1-5)
CASSFGQGGVQPQHF

SEQ ID NO: 711783 - protein, 12 aa, Homo sapiens
  CDR3 for alpha chain variable domain of TCR clone 355892 (TRAV21, TRAJ33)
CAKMDSNYQLIW

SEQ ID NO: 711784 - protein, 14 aa, Homo sapiens
  CDR3 for beta chain variable domain of TCR clone 355892 (TRBV2, TRBJ1-2)
CASNEGTGPYGYTF

SEQ ID NO: 711785 - protein, 13 aa, Homo sapiens
  CDR3 for alpha chain variable domain of TCR clone 355893 (TRAV29/DV5, TRAJ31)
CAASRNNNARRMF

SEQ ID NO: 711786 - protein, 14 aa, Homo sapiens
  CDR3 for beta chain variable domain of TCR clone 355893 (TRBV7-9, TRBJ2-2)
CASSLVQDTGELFF

SEQ ID NO: 711787 - protein, 12 aa, Homo sapiens
  CDR3 for alpha chain variable domain of TCR clone 355894 (TRAV36/DV7, TRAJ54)
CAVVRGAQKLVF

SEQ ID NO: 711788 - protein, 13 aa, Homo sapiens
  CDR3 for beta chain variable domain of TCR clone 355894 (TRBV7-3, TRBJ1-1)
CHQLKGGNTEAFF

SEQ ID NO: 711789 - protein, 11 aa, Homo sapiens
  CDR3 for alpha chain variable domain of TCR clone 355895 (TRAV2, TRAJ33)
CAVDSNYQLIW

SEQ ID NO: 711790 - protein, 17 aa, Homo sapiens
  CDR3 for beta chain variable domain of TCR clone 355895 (TRBV7-3, TRBJ2-2)
CASSLSGTSGGTGELFF

SEQ ID NO: 711791 - protein, 17 aa, Homo sapiens
  CDR3 for alpha chain variable domain of TCR clone 355896 (TRAV3, TRAJ6)
CAVRDGPRAGGSYIPTF

SEQ ID NO: 711792 - protein, 16 aa, Homo sapiens
  CDR3 for beta chain variable domain of TCR clone 355896 (TRBV3-1, TRBJ1-2)
CASSQGQGVQRDGYTF

SEQ ID NO: 711793 - protein, 11 aa, Homo sapiens
  CDR3 for alpha chain variable domain of TCR clone 355897 (TRAV16, TRAJ31)
CALFNNARLMF

SEQ ID NO: 711794 - protein, 14 aa, Homo sapiens
  CDR3 for beta chain variable domain of TCR clone 355897 (TRBV15, TRBJ1-1)
CATSREGGNTEAFF

SEQ ID NO: 711795 - protein, 13 aa, Homo sapiens
  CDR3 for alpha chain variable domain of TCR clone 355898 (TRAV21, TRAJ57)
CAVTQGGSEELVF

SEQ ID NO: 711796 - protein, 15 aa, Homo sapiens
  CDR3 for beta chain variable domain of TCR clone 355898 (TRBV7-2, TRBJ2-1)
CASSLVAGRYNEQFF

SEQ ID NO: 711797 - protein, 14 aa, Homo sapiens
  CDR3 for alpha chain variable domain of TCR clone 355899 (TRAV12-2, TRAJ13)
CAVKKTGGYKKVTF

SEQ ID NO: 711798 - protein, 15 aa, Homo sapiens
  CDR3 for beta chain variable domain of TCR clone 355899 (TRBV27, TRBJ2-1)
FASSNGGGSSNEQFF

SEQ ID NO: 711799 - protein, 14 aa, Homo sapiens
  CDR3 for alpha chain variable domain of TCR clone 355900 (TRAV38-1, TRAJ45)
CAYYSGGGADGLTF

SEQ ID NO: 711800 - protein, 16 aa, Homo sapiens
  CDR3 for beta chain variable domain of TCR clone 355900 (TRBV28, TRBJ2-7)
CASSLFFETGGHEQYF

SEQ ID NO: 711801 - protein, 16 aa, Homo sapiens
  CDR3 for alpha chain variable domain of TCR clone 355901 (TRAV3, TRAJ37)
CAVRPYGSGNTGKLIF

SEQ ID NO: 711802 - protein, 17 aa, Homo sapiens
  CDR3 for beta chain variable domain of TCR clone 355901 (TRBV5-1, TRBJ2-5)
CASSPVALGQNQETQYF

SEQ ID NO: 711803 - protein, 13 aa, Homo sapiens
  CDR3 for alpha chain variable domain of TCR clone 355902 (TRAV6, TRAJ45)
SPFSGGGADGLTF

SEQ ID NO: 711804 - protein, 15 aa, Homo sapiens
  CDR3 for beta chain variable domain of TCR clone 355902 (TRBV9, TRBJ1-6)
CASSVAGTGDSPLHF

SEQ ID NO: 711805 - protein, 14 aa, Homo sapiens
  CDR3 for alpha chain variable domain of TCR clone 355903 (TRAV8-3, TRAJ36)
CAVGPITGANNLFF

SEQ ID NO: 711806 - protein, 15 aa, Homo sapiens
  CDR3 for beta chain variable domain of TCR clone 355903 (TRBV4-1, TRBJ2-1)
CASSEDPGNYNEQFF

SEQ ID NO: 711807 - protein, 14 aa, Homo sapiens
  CDR3 for alpha chain variable domain of TCR clone 355904 (TRAV12-1, TRAJ17)
CVVNFKDAGNKLTF

SEQ ID NO: 711808 - protein, 17 aa, Homo sapiens
  CDR3 for beta chain variable domain of TCR clone 355904 (TRBV20-1, TRBJ2-1)
CSASASGLAGSYNEQFF

SEQ ID NO: 711809 - protein, 14 aa, Homo sapiens
  CDR3 for alpha chain variable domain of TCR clone 355905 (TRAV35, TRAJ22)
CAGLRPGSARQQTF

SEQ ID NO: 711810 - protein, 15 aa, Homo sapiens
  CDR3 for beta chain variable domain of TCR clone 355905 (TRBV12-4, TRBJ2-5)
RASSPPTGLQETQYF

SEQ ID NO: 711811 - protein, 13 aa, Homo sapiens
  CDR3 for alpha chain variable domain of TCR clone 355906 (TRAV36/DV7, TRAJ49)
CAGDSNTGNQFYF

SEQ ID NO: 711812 - protein, 14 aa, Homo sapiens
  CDR3 for beta chain variable domain of TCR clone 355906 (TRBV4-1, TRBJ2-2)
CASSQAVNTGELFF

SEQ ID NO: 711813 - protein, 15 aa, Homo sapiens
  CDR3 for alpha chain variable domain of TCR clone 355907 (TRAV27, TRAJ53)
CRAINSGGSNYKLTF

SEQ ID NO: 711814 - protein, 13 aa, Homo sapiens
  CDR3 for beta chain variable domain of TCR clone 355907 (TRBV7-3, TRBJ1-1)
CASNLKGAKVAFF

SEQ ID NO: 711815 - protein, 14 aa, Homo sapiens
  CDR3 for alpha chain variable domain of TCR clone 355908 (TRAV13-1, TRAJ35)
CAASKGGFGNVLNC

SEQ ID NO: 711816 - protein, 13 aa, Homo sapiens
  CDR3 for beta chain variable domain of TCR clone 355908 (TRBV7-3, TRBJ1-1)
CASSQDWGAKAFF

SEQ ID NO: 711817 - protein, 14 aa, Homo sapiens
  CDR3 for alpha chain variable domain of TCR clone 355909 (TRAV26-1, TRAJ38)
CIADNAGNNRKLIW

SEQ ID NO: 711818 - protein, 17 aa, Homo sapiens
  CDR3 for beta chain variable domain of TCR clone 355909 (TRBV13, TRBJ2-3)
CASSHSRVAGGRNTQYF

SEQ ID NO: 711819 - protein, 14 aa, Homo sapiens
  CDR3 for alpha chain variable domain of TCR clone 355910 (TRAV1-2, TRAJ16)
CAVNRFSGGQKLLF

SEQ ID NO: 711820 - protein, 15 aa, Homo sapiens
  CDR3 for beta chain variable domain of TCR clone 355910 (TRBV9, TRBJ1-6)
YASSVAGTGDSPLHC

SEQ ID NO: 711821 - protein, 12 aa, Homo sapiens
  CDR3 for alpha chain variable domain of TCR clone 355911 (TRAV2, TRAJ33)
CAFMDSNYQLIW

SEQ ID NO: 711822 - protein, 22 aa, Homo sapiens
  CDR3 for beta chain variable domain of TCR clone 355911 (TRBV7-2, TRBJ1-4)
CASSFVPYSKTVFWQWNPALCL

SEQ ID NO: 711823 - protein, 12 aa, Homo sapiens
  CDR3 for alpha chain variable domain of TCR clone 355912 (TRAV13-1, TRAJ49)
CAAPNTGNQFYF

SEQ ID NO: 711824 - protein, 17 aa, Homo sapiens
  CDR3 for beta chain variable domain of TCR clone 355912 (TRBV25-1, TRBJ2-7)
CASSGARVVVSSYEQYF

SEQ ID NO: 711825 - protein, 15 aa, Homo sapiens
  CDR3 for alpha chain variable domain of TCR clone 355913 (TRAV21, TRAJ53)
CATLNSGVSNYKLTF

SEQ ID NO: 711826 - protein, 16 aa, Homo sapiens
  CDR3 for beta chain variable domain of TCR clone 355913 (TRBV12-4, TRBJ1-5)
CASSRPVGGSNQPQHF

SEQ ID NO: 711827 - protein, 15 aa, Homo sapiens
  CDR3 for alpha chain variable domain of TCR clone 355914 (TRAV2, TRAJ15)
CAVEDRGQAGTALIF

SEQ ID NO: 711828 - protein, 13 aa, Homo sapiens
  CDR3 for beta chain variable domain of TCR clone 355914 (TRBV10-2, TRBJ2-7)
CAIGASGGYEQYF

SEQ ID NO: 711829 - protein, 12 aa, Homo sapiens
  CDR3 for alpha chain variable domain of TCR clone 355915 (TRAV12-3, TRAJ20)
CAMVRGDYKLSF

SEQ ID NO: 711830 - protein, 12 aa, Homo sapiens
  CDR3 for beta chain variable domain of TCR clone 355915 (TRBV6-1, TRBJ2-7)
CVSSDYSYEQYF

SEQ ID NO: 711831 - protein, 14 aa, Homo sapiens
  CDR3 for alpha chain variable domain of TCR clone 355916 (TRAV13-1, TRAJ31)
CAASSRPNNARLMF

SEQ ID NO: 711832 - protein, 15 aa, Homo sapiens
  CDR3 for beta chain variable domain of TCR clone 355916 (TRBV4-2, TRBJ2-4)
CASSPLGAAKNRQYF

SEQ ID NO: 711833 - protein, 15 aa, Homo sapiens
  CDR3 for alpha chain variable domain of TCR clone 355917 (TRAV23/DV6, TRAJ33)
CAASNSGGGNDQLIW

SEQ ID NO: 711834 - protein, 14 aa, Homo sapiens
  CDR3 for beta chain variable domain of TCR clone 355917 (TRBV7-2, TRBJ2-7)
CASSLYPGRYEQYF

SEQ ID NO: 711835 - protein, 12 aa, Homo sapiens
  CDR3 for alpha chain variable domain of TCR clone 355918 (TRAV2, TRAJ9)
CAVGAGGFKTIF

SEQ ID NO: 711836 - protein, 17 aa, Homo sapiens
  CDR3 for beta chain variable domain of TCR clone 355918 (TRBV2, TRBJ1-6)
CASSLRSGGLMTSPLHF

SEQ ID NO: 711837 - protein, 13 aa, Homo sapiens
  CDR3 for alpha chain variable domain of TCR clone 355919 (TRAV8-6, TRAJ49)
CAVITNTGNQFYF

SEQ ID NO: 711838 - protein, 14 aa, Homo sapiens
  CDR3 for beta chain variable domain of TCR clone 355919 (TRBV5-1, TRBJ2-7)
CASSRAESLYEQYF

SEQ ID NO: 711839 - protein, 18 aa, Homo sapiens
  CDR3 for alpha chain variable domain of TCR clone 355920 (TRAV8-3, TRAJ4)
WVRDPTSNDPGGYNKLIF

SEQ ID NO: 711840 - protein, 13 aa, Homo sapiens
  CDR3 for beta chain variable domain of TCR clone 355920 (TRBV20-1, TRBJ1-2)
SSATGIQGSGYTF

SEQ ID NO: 711841 - protein, 13 aa, Homo sapiens
  CDR3 for alpha chain variable domain of TCR clone 355921 (TRAV12-2, TRAJ40)
CREDPLRNLKYIF

SEQ ID NO: 711842 - protein, 11 aa, Homo sapiens
  CDR3 for beta chain variable domain of TCR clone 355921 (TRBV29-1, TRBJ2-5)
CSEDRTGTQYF

SEQ ID NO: 711843 - protein, 14 aa, Homo sapiens
  CDR3 for alpha chain variable domain of TCR clone 355922 (TRAV13-1, TRAJ44)
CAAKATGTTSKLTF

SEQ ID NO: 711844 - protein, 15 aa, Homo sapiens
  CDR3 for beta chain variable domain of TCR clone 355922 (TRBV10-3, TRBJ2-1)
CAISDVQDRAYEQFF

SEQ ID NO: 711845 - protein, 16 aa, Homo sapiens
  CDR3 for alpha chain variable domain of TCR clone 355923 (TRAV3, TRAJ21)
CAVRDIERGNFNKFYF

SEQ ID NO: 711846 - protein, 14 aa, Homo sapiens
  CDR3 for beta chain variable domain of TCR clone 355923 (TRBV7-2, TRBJ2-7)
CASSPKTSFYEQYF

SEQ ID NO: 711847 - protein, 11 aa, Homo sapiens
  CDR3 for alpha chain variable domain of TCR clone 355924 (TRAV2, TRAJ13)
CASGGYQKVTF

SEQ ID NO: 711848 - protein, 18 aa, Homo sapiens
  CDR3 for beta chain variable domain of TCR clone 355924 (TRBV27, TRBJ2-4)
CTSVPAVDRGQAKNIQYF

SEQ ID NO: 711849 - protein, 13 aa, Homo sapiens
  CDR3 for alpha chain variable domain of TCR clone 355925 (TRAV4, TRAJ42)
CLVGGGSQGNLIF

SEQ ID NO: 711850 - protein, 14 aa, Homo sapiens
  CDR3 for beta chain variable domain of TCR clone 355925 (TRBV7-3, TRBJ2-2)
CASSSGGYTGELFF

SEQ ID NO: 711851 - protein, 15 aa, Homo sapiens
  CDR3 for alpha chain variable domain of TCR clone 355926 (TRAV14/DV4, TRAJ36)
FAMREPQTGANNLFF

SEQ ID NO: 711852 - protein, 15 aa, Homo sapiens
  CDR3 for beta chain variable domain of TCR clone 355926 (TRBV3-1, TRBJ2-7)
CASSQGVGVKVEQYF

SEQ ID NO: 711853 - protein, 15 aa, Homo sapiens
  CDR3 for alpha chain variable domain of TCR clone 355927 (TRAV26-1, TRAJ29)
CIVRVEGSGNTPLVF

SEQ ID NO: 711854 - protein, 14 aa, Homo sapiens
  CDR3 for beta chain variable domain of TCR clone 355927 (TRBV18, TRBJ2-5)
CASSPGVSQETKYL

SEQ ID NO: 711855 - protein, 18 aa, Homo sapiens
  CDR3 for alpha chain variable domain of TCR clone 355928 (TRAV26-2, TRAJ45)
CILKVDKYSGGGADGLTF

SEQ ID NO: 711856 - protein, 14 aa, Homo sapiens
  CDR3 for beta chain variable domain of TCR clone 355928 (TRBV7-2, TRBJ2-7)
CASRAQGAAYEQYF

SEQ ID NO: 711857 - protein, 14 aa, Homo sapiens
  CDR3 for alpha chain variable domain of TCR clone 355929 (TRAV12-1, TRAJ17)
CVVNYKAAGNKLTL

SEQ ID NO: 711858 - protein, 15 aa, Homo sapiens
  CDR3 for beta chain variable domain of TCR clone 355929 (TRBV18, TRBJ2-1)
CASSPPSTSYNEQFF

SEQ ID NO: 711859 - protein, 15 aa, Homo sapiens
  CDR3 for alpha chain variable domain of TCR clone 355930 (TRAV3, TRAJ36)
CAVRASQTGANNLFF

SEQ ID NO: 711860 - protein, 15 aa, Homo sapiens
  CDR3 for beta chain variable domain of TCR clone 355930 (TRBV19, TRBJ2-1)
CASSSPGVPLDEQFF

SEQ ID NO: 711861 - protein, 14 aa, Homo sapiens
  CDR3 for alpha chain variable domain of TCR clone 355931 (TRAV12-3, TRAJ10)
GHLPLTGGGNKLTF

SEQ ID NO: 711862 - protein, 13 aa, Homo sapiens
  CDR3 for beta chain variable domain of TCR clone 355931 (TRBV5-1, TRBJ1-1)
CASSLTRESDAFF

SEQ ID NO: 711863 - protein, 11 aa, Homo sapiens
  CDR3 for alpha chain variable domain of TCR clone 355932 (TRAV21, TRAJ31)
CAVRNNARLMF

SEQ ID NO: 711864 - protein, 13 aa, Homo sapiens
  CDR3 for beta chain variable domain of TCR clone 355932 (TRBV7-7, TRBJ2-5)
CASSRSGQETQYF

SEQ ID NO: 711865 - protein, 14 aa, Homo sapiens
  CDR3 for alpha chain variable domain of TCR clone 355933 (TRAV1-2, TRAJ8)
CAVREDTGFQKLVF

SEQ ID NO: 711866 - protein, 14 aa, Homo sapiens
  CDR3 for beta chain variable domain of TCR clone 355933 (TRBV29-1, TRBJ1-4)
CSVNGTGGNEKLFF

SEQ ID NO: 711867 - protein, 13 aa, Homo sapiens
  CDR3 for alpha chain variable domain of TCR clone 355934 (TRAV21, TRAJ26)
CAVLDNYGRNFVF

SEQ ID NO: 711868 - protein, 16 aa, Homo sapiens
  CDR3 for beta chain variable domain of TCR clone 355934 (TRBV29-1, TRBJ2-2)
CSVETRASGNTGELFF

SEQ ID NO: 711869 - protein, 14 aa, Homo sapiens
  CDR3 for alpha chain variable domain of TCR clone 355935 (TRAV17, TRAJ22)
CATSPSGSARQLTL

SEQ ID NO: 711870 - protein, 15 aa, Homo sapiens
  CDR3 for beta chain variable domain of TCR clone 355935 (TRBV4-1, TRBJ2-5)
CASSQWDLYQETQYV

SEQ ID NO: 711871 - protein, 14 aa, Homo sapiens
  CDR3 for alpha chain variable domain of TCR clone 355936 (TRAV23/DV6, TRAJ17)
FAARGRAAGNKLTF

SEQ ID NO: 711872 - protein, 12 aa, Homo sapiens
  CDR3 for beta chain variable domain of TCR clone 355936 (TRBV7-9, TRBJ2-3)
CASSFITDTQYF

SEQ ID NO: 711873 - protein, 13 aa, Homo sapiens
  CDR3 for alpha chain variable domain of TCR clone 355937 (TRAV20, TRAJ34)
CAVQDYNTDKLIF

SEQ ID NO: 711874 - protein, 13 aa, Homo sapiens
  CDR3 for beta chain variable domain of TCR clone 355937 (TRBV2, TRBJ2-3)
CASILAGGQGQYF

SEQ ID NO: 711875 - protein, 13 aa, Homo sapiens
  CDR3 for alpha chain variable domain of TCR clone 355938 (TRAV35, TRAJ20)
CAGPLSNDYKLSF

SEQ ID NO: 711876 - protein, 17 aa, Homo sapiens
  CDR3 for beta chain variable domain of TCR clone 355938 (TRBV20-1, TRBJ2-1)
CSASSSGLAGSYNEQFF

SEQ ID NO: 711877 - protein, 12 aa, Homo sapiens
  CDR3 for alpha chain variable domain of TCR clone 355939 (TRAV1-1, TRAJ30)
CAVKGRDDKIIF

SEQ ID NO: 711878 - protein, 11 aa, Homo sapiens
  CDR3 for beta chain variable domain of TCR clone 355939 (TRBV12-4, TRBJ2-3)
CASTATDTQYF

SEQ ID NO: 711879 - protein, 14 aa, Homo sapiens
  CDR3 for alpha chain variable domain of TCR clone 355940 (TRAV8-3, TRAJ39)
CAVGANNAGNMRTF

SEQ ID NO: 711880 - protein, 15 aa, Homo sapiens
  CDR3 for beta chain variable domain of TCR clone 355940 (TRBV4-3, TRBJ1-1)
CASSQELGRGTEAFF

SEQ ID NO: 711881 - protein, 21 aa, Homo sapiens
  CDR3 for alpha chain variable domain of TCR clone 355941 (TRAV1-1, TRAJ6)
CAVRREEATYLHLEEEPALLF

SEQ ID NO: 711882 - protein, 13 aa, Homo sapiens
  CDR3 for beta chain variable domain of TCR clone 355941 (TRBV19, TRBJ2-7)
CASSRDRSYEQYF

SEQ ID NO: 711883 - protein, 14 aa, Homo sapiens
  CDR3 for alpha chain variable domain of TCR clone 355942 (TRAV8-2, TRAJ4)
CVVSPSGVYNNLIF

SEQ ID NO: 711884 - protein, 15 aa, Homo sapiens
  CDR3 for beta chain variable domain of TCR clone 355942 (TRBV2, TRBJ2-1)
CASSELAGSYNEQFF

SEQ ID NO: 711885 - protein, 14 aa, Homo sapiens
  CDR3 for alpha chain variable domain of TCR clone 355943 (TRAV35, TRAJ33)
CAGSSQDSHYQLIW

SEQ ID NO: 711886 - protein, 14 aa, Homo sapiens
  CDR3 for beta chain variable domain of TCR clone 355943 (TRBV18, TRBJ2-7)
CASSPRGGAYEQYF

SEQ ID NO: 711887 - protein, 14 aa, Homo sapiens
  CDR3 for alpha chain variable domain of TCR clone 355944 (TRAV12-2, TRAJ45)
CALPERGGADGLTF

SEQ ID NO: 711888 - protein, 17 aa, Homo sapiens
  CDR3 for beta chain variable domain of TCR clone 355944 (TRBV20-1, TRBJ2-1)
CSASSSGLAGSYNEQFF

SEQ ID NO: 711889 - protein, 16 aa, Homo sapiens
  CDR3 for alpha chain variable domain of TCR clone 355945 (TRAV30, TRAJ24)
CGTEIVDADSWGKFQC

SEQ ID NO: 711890 - protein, 13 aa, Homo sapiens
  CDR3 for beta chain variable domain of TCR clone 355945 (TRBV7-9, TRBJ2-1)
CASSLDVGNEQFF

SEQ ID NO: 711891 - protein, 16 aa, Homo sapiens
  CDR3 for alpha chain variable domain of TCR clone 355946 (TRAV35, TRAJ28)
CAGQKYSGAASYQLTF

SEQ ID NO: 711892 - protein, 13 aa, Homo sapiens
  CDR3 for beta chain variable domain of TCR clone 355946 (TRBV19, TRBJ1-2)
CASSQGQVYGYTF

SEQ ID NO: 711893 - protein, 11 aa, Homo sapiens
  CDR3 for alpha chain variable domain of TCR clone 355947 (TRAV2, TRAJ13)
CASGGYQKVTF

SEQ ID NO: 711894 - protein, 20 aa, Homo sapiens
  CDR3 for beta chain variable domain of TCR clone 355947 (TRBV11-2, TRBJ2-2)
LRTRPCISVPAALEAGSCFF

SEQ ID NO: 711895 - protein, 13 aa, Homo sapiens
  CDR3 for alpha chain variable domain of TCR clone 355948 (TRAV13-1, TRAJ5)
CAARVTGRRALTS

SEQ ID NO: 711896 - protein, 15 aa, Homo sapiens
  CDR3 for beta chain variable domain of TCR clone 355948 (TRBV7-9, TRBJ2-7)
CASSPGGGLPYEQYF

SEQ ID NO: 711897 - protein, 16 aa, Homo sapiens
  CDR3 for alpha chain variable domain of TCR clone 355949 (TRAV17, TRAJ17)
CATALQEEAAGNKLTF

SEQ ID NO: 711898 - protein, 15 aa, Homo sapiens
  CDR3 for beta chain variable domain of TCR clone 355949 (TRBV7-8, TRBJ2-3)
CASSLSADSGGAQYF

SEQ ID NO: 711899 - protein, 14 aa, Homo sapiens
  CDR3 for alpha chain variable domain of TCR clone 355950 (TRAV12-2, TRAJ12)
CAAINRDSSYKLIF

SEQ ID NO: 711900 - protein, 15 aa, Homo sapiens
  CDR3 for beta chain variable domain of TCR clone 355950 (TRBV28, TRBJ2-1)
CDSSLDTSSYNEQFF

SEQ ID NO: 711901 - protein, 12 aa, Homo sapiens
  CDR3 for alpha chain variable domain of TCR clone 355951 (TRAV27, TRAJ35)
CAGADFGNVLHC

SEQ ID NO: 711902 - protein, 20 aa, Homo sapiens
  CDR3 for beta chain variable domain of TCR clone 355951 (TRBV7-8, TRBJ2-2)
CASSHLFPGLTIHITGELFF

SEQ ID NO: 711903 - protein, 15 aa, Homo sapiens
  CDR3 for alpha chain variable domain of TCR clone 355952 (TRAV35, TRAJ58)
CAGRRQETSGSRLTF

SEQ ID NO: 711904 - protein, 15 aa, Homo sapiens
  CDR3 for beta chain variable domain of TCR clone 355952 (TRBV7-6, TRBJ2-1)
CASSSLAGEGNEQFF

SEQ ID NO: 711905 - protein, 13 aa, Homo sapiens
  CDR3 for alpha chain variable domain of TCR clone 355953 (TRAV3, TRAJ31)
CAVREGNNARLMF

SEQ ID NO: 711906 - protein, 15 aa, Homo sapiens
  CDR3 for beta chain variable domain of TCR clone 355953 (TRBV19, TRBJ2-7)
CASSFNSGGVWEQYF

SEQ ID NO: 711907 - protein, 10 aa, Homo sapiens
  CDR3 for alpha chain variable domain of TCR clone 355954 (TRAV30, TRAJ48)
CGIGNEKLTF

SEQ ID NO: 711908 - protein, 16 aa, Homo sapiens
  CDR3 for beta chain variable domain of TCR clone 355954 (TRBV20-1, TRBJ2-5)
CSPGGTSGGYMETQYF

SEQ ID NO: 711909 - protein, 13 aa, Homo sapiens
  CDR3 for alpha chain variable domain of TCR clone 355955 (TRAV20, TRAJ21)
CAVEGYNFNKFYF

SEQ ID NO: 711910 - protein, 14 aa, Homo sapiens
  CDR3 for beta chain variable domain of TCR clone 355955 (TRBV19, TRBJ1-5)
CASSFTGSNQPQHF

SEQ ID NO: 711911 - protein, 16 aa, Homo sapiens
  CDR3 for alpha chain variable domain of TCR clone 355956 (TRAV8-3, TRAJ10)
CAVGPILTGGGNKLTF

SEQ ID NO: 711912 - protein, 11 aa, Homo sapiens
  CDR3 for beta chain variable domain of TCR clone 355956 (TRBV6-3, TRBJ2-3)
CATGQADTQYF

SEQ ID NO: 711913 - protein, 13 aa, Homo sapiens
  CDR3 for alpha chain variable domain of TCR clone 355957 (TRAV16, TRAJ37)
CALRGSNTGKLIF

SEQ ID NO: 711914 - protein, 16 aa, Homo sapiens
  CDR3 for beta chain variable domain of TCR clone 355957 (TRBV12-4, TRBJ2-5)
CASSPQSPQGGETQYF

SEQ ID NO: 711915 - protein, 13 aa, Homo sapiens
  CDR3 for alpha chain variable domain of TCR clone 355958 (TRAV27, TRAJ17)
CAGAATAGNKLTF

SEQ ID NO: 711916 - protein, 15 aa, Homo sapiens
  CDR3 for beta chain variable domain of TCR clone 355958 (TRBV5-1, TRBJ2-3)
CASRNQAGSSDTQYF

SEQ ID NO: 711917 - protein, 11 aa, Homo sapiens
  CDR3 for alpha chain variable domain of TCR clone 355959 (TRAV12-3, TRAJ27)
CAMANAGKSTF

SEQ ID NO: 711918 - protein, 13 aa, Homo sapiens
  CDR3 for beta chain variable domain of TCR clone 355959 (TRBV15, TRBJ1-6)
CATSGGLNSPLHF

SEQ ID NO: 711919 - protein, 14 aa, Homo sapiens
  CDR3 for alpha chain variable domain of TCR clone 355960 (TRAV1-2, TRAJ16)
CAVNRFSDGQKLLF

SEQ ID NO: 711920 - protein, 16 aa, Homo sapiens
  CDR3 for beta chain variable domain of TCR clone 355960 (TRBV19, TRBJ2-1)
CASSEILAGDGNEQFL

SEQ ID NO: 711921 - protein, 11 aa, Homo sapiens
  CDR3 for alpha chain variable domain of TCR clone 355961 (TRAV3, TRAJ20)
CCERHDYKLSF

SEQ ID NO: 711922 - protein, 13 aa, Homo sapiens
  CDR3 for beta chain variable domain of TCR clone 355961 (TRBV9, TRBJ2-7)
CASSVGQGGEQYF

SEQ ID NO: 711923 - protein, 11 aa, Homo sapiens
  CDR3 for alpha chain variable domain of TCR clone 355962 (TRAV35, TRAJ30)
CAGERDDKIIF

SEQ ID NO: 711924 - protein, 14 aa, Homo sapiens
  CDR3 for beta chain variable domain of TCR clone 355962 (TRBV15, TRBJ2-5)
CATSGDRGKETQYF

SEQ ID NO: 711925 - protein, 15 aa, Homo sapiens
  CDR3 for alpha chain variable domain of TCR clone 355963 (TRAV12-2, TRAJ53)
CAVNGGGGSNYKLTF

SEQ ID NO: 711926 - protein, 14 aa, Homo sapiens
  CDR3 for beta chain variable domain of TCR clone 355963 (TRBV13, TRBJ2-7)
CASSLKGASYEQYF

SEQ ID NO: 711927 - protein, 13 aa, Homo sapiens
  CDR3 for alpha chain variable domain of TCR clone 355964 (TRAV2, TRAJ12)
CAVGADSSYKLFF

SEQ ID NO: 711928 - protein, 13 aa, Homo sapiens
  CDR3 for beta chain variable domain of TCR clone 355964 (TRBV20-1, TRBJ2-1)
CSARSSPRDEQFF

SEQ ID NO: 711929 - protein, 13 aa, Homo sapiens
  CDR3 for alpha chain variable domain of TCR clone 355965 (TRAV38-2/DV8, TRAJ34)
CAYTNYNTDKLIF

SEQ ID NO: 711930 - protein, 15 aa, Homo sapiens
  CDR3 for beta chain variable domain of TCR clone 355965 (TRBV20-1, TRBJ2-5)
CSAEGTGGLQETQYF

SEQ ID NO: 711931 - protein, 15 aa, Homo sapiens
  CDR3 for alpha chain variable domain of TCR clone 355966 (TRAV12-1, TRAJ41)
CVVNGASNSGYALNF

SEQ ID NO: 711932 - protein, 15 aa, Homo sapiens
  CDR3 for beta chain variable domain of TCR clone 355966 (TRBV7-2, TRBJ1-5)
CDSGSTGVDNQPQHF

SEQ ID NO: 711933 - protein, 15 aa, Homo sapiens
  CDR3 for alpha chain variable domain of TCR clone 355967 (TRAV1-1, TRAJ4)
CAVRAFSGGYNRLIF

SEQ ID NO: 711934 - protein, 18 aa, Homo sapiens
  CDR3 for beta chain variable domain of TCR clone 355967 (TRBV12-4, TRBJ2-2)
CASSLVAGTRGRTGELFF

SEQ ID NO: 711935 - protein, 13 aa, Homo sapiens
  CDR3 for alpha chain variable domain of TCR clone 355968 (TRAV2, TRAJ40)
CAVVTSGTYKYIF

SEQ ID NO: 711936 - protein, 15 aa, Homo sapiens
  CDR3 for beta chain variable domain of TCR clone 355968 (TRBV11-2, TRBJ2-2)
CASSLDTGNTGELFF

SEQ ID NO: 711937 - protein, 11 aa, Homo sapiens
  CDR3 for alpha chain variable domain of TCR clone 355969 (TRAV3, TRAJ17)
CAEAAGNKLTF

SEQ ID NO: 711938 - protein, 15 aa, Homo sapiens
  CDR3 for beta chain variable domain of TCR clone 355969 (TRBV12-4, TRBJ2-7)
CACSLGSGGPYEQYF

SEQ ID NO: 711939 - protein, 15 aa, Homo sapiens
  CDR3 for alpha chain variable domain of TCR clone 355970 (TRAV3, TRAJ5)
CAVRDLDTGRRALTV

SEQ ID NO: 711940 - protein, 14 aa, Homo sapiens
  CDR3 for beta chain variable domain of TCR clone 355970 (TRBV25-1, TRBJ1-4)
CASSGGGQPEKLFF

SEQ ID NO: 711941 - protein, 15 aa, Homo sapiens
  CDR3 for alpha chain variable domain of TCR clone 355971 (TRAV3, TRAJ20)
CAVRDSRSNDYKLSF

SEQ ID NO: 711942 - protein, 14 aa, Homo sapiens
  CDR3 for beta chain variable domain of TCR clone 355971 (TRBV20-1, TRBJ2-7)
CSARRRNGIYEQYF

SEQ ID NO: 711943 - protein, 15 aa, Homo sapiens
  CDR3 for alpha chain variable domain of TCR clone 355972 (TRAV2, TRAJ24)
CAVEVLTDSWGKFQF

SEQ ID NO: 711944 - protein, 17 aa, Homo sapiens
  CDR3 for beta chain variable domain of TCR clone 355972 (TRBV12-4, TRBJ1-1)
CASSLWGRGIQNTEAFF

SEQ ID NO: 711945 - protein, 12 aa, Homo sapiens
  CDR3 for alpha chain variable domain of TCR clone 355973 (TRAV12-2, TRAJ20)
CAVNRNDYKLSF

SEQ ID NO: 711946 - protein, 14 aa, Homo sapiens
  CDR3 for beta chain variable domain of TCR clone 355973 (TRBV7-3, TRBJ2-1)
CASSLSGGTNEQFF

SEQ ID NO: 711947 - protein, 15 aa, Homo sapiens
  CDR3 for alpha chain variable domain of TCR clone 355974 (TRAV12-3, TRAJ13)
CAMSARSGGYQKVTF

SEQ ID NO: 711948 - protein, 17 aa, Homo sapiens
  CDR3 for beta chain variable domain of TCR clone 355974 (TRBV28, TRBJ2-5)
CASSRQGGLAGAETQYF

SEQ ID NO: 711949 - protein, 16 aa, Homo sapiens
  CDR3 for alpha chain variable domain of TCR clone 355975 (TRAV3, TRAJ37)
CAVRPHGSGNTGKLIF

SEQ ID NO: 711950 - protein, 18 aa, Homo sapiens
  CDR3 for beta chain variable domain of TCR clone 355975 (TRBV18, TRBJ2-3)
CASSYTSGAAGDTDTQYF

SEQ ID NO: 711951 - protein, 18 aa, Homo sapiens
  CDR3 for alpha chain variable domain of TCR clone 355976 (TRAV12-3, TRAJ52)
CAMSVGGAGGTSYGKLTF

SEQ ID NO: 711952 - protein, 14 aa, Homo sapiens
  CDR3 for beta chain variable domain of TCR clone 355976 (TRBV7-2, TRBJ2-7)
CASRSQGAADEQYF

SEQ ID NO: 711953 - protein, 14 aa, Homo sapiens
  CDR3 for alpha chain variable domain of TCR clone 355977 (TRAV12-3, TRAJ10)
SHLPLTGGGSKLTF

SEQ ID NO: 711954 - protein, 15 aa, Homo sapiens
  CDR3 for beta chain variable domain of TCR clone 355977 (TRBV6-6, TRBJ2-1)
CATRQGVSSYNEQFF

SEQ ID NO: 711955 - protein, 13 aa, Homo sapiens
  CDR3 for alpha chain variable domain of TCR clone 355978 (TRAV1-2, TRAJ9)
CAALNTGGFKTIF

SEQ ID NO: 711956 - protein, 16 aa, Homo sapiens
  CDR3 for beta chain variable domain of TCR clone 355978 (TRBV19, TRBJ2-1)
CAGSKAGPSSYNEQFF

SEQ ID NO: 711957 - protein, 14 aa, Homo sapiens
  CDR3 for alpha chain variable domain of TCR clone 355979 (TRAV21, TRAJ47)
CAVGVGLYGNKLVF

SEQ ID NO: 711958 - protein, 15 aa, Homo sapiens
  CDR3 for beta chain variable domain of TCR clone 355979 (TRBV7-9, TRBJ1-5)
CASSQGHQPNQPQHF

SEQ ID NO: 711959 - protein, 11 aa, Homo sapiens
  CDR3 for alpha chain variable domain of TCR clone 355980 (TRAV3, TRAJ21)
CAVGNFNKCYF

SEQ ID NO: 711960 - protein, 16 aa, Homo sapiens
  CDR3 for beta chain variable domain of TCR clone 355980 (TRBV19, TRBJ2-1)
FASSKAGPSSYNEQFF

SEQ ID NO: 711961 - protein, 13 aa, Homo sapiens
  CDR3 for alpha chain variable domain of TCR clone 355981 (TRAV12-2, TRAJ20)
CAVYPSNDYKLSF

SEQ ID NO: 711962 - protein, 13 aa, Homo sapiens
  CDR3 for beta chain variable domain of TCR clone 355981 (TRBV10-3, TRBJ1-2)
CAISERDSYGYTF

SEQ ID NO: 711963 - protein, 21 aa, Homo sapiens
  CDR3 for alpha chain variable domain of TCR clone 355982 (TRAV13-1, TRAJ37)
RAATPKEIKHRQTNLWARDNF

SEQ ID NO: 711964 - protein, 13 aa, Homo sapiens
  CDR3 for beta chain variable domain of TCR clone 355982 (TRBV20-1, TRBJ2-7)
CSATSEDSYEQYF

SEQ ID NO: 711965 - protein, 12 aa, Homo sapiens
  CDR3 for alpha chain variable domain of TCR clone 355983 (TRAV6, TRAJ9)
CALHTGCLKTIF

SEQ ID NO: 711966 - protein, 14 aa, Homo sapiens
  CDR3 for beta chain variable domain of TCR clone 355983 (TRBV7-9, TRBJ2-1)
CASSQGQAEAERFF

SEQ ID NO: 711967 - protein, 21 aa, Homo sapiens
  CDR3 for alpha chain variable domain of TCR clone 355984 (TRAV8-3, TRAJ6)
CAVGGEEATYLHLDEEPALLF

SEQ ID NO: 711968 - protein, 17 aa, Homo sapiens
  CDR3 for beta chain variable domain of TCR clone 355984 (TRBV7-2, TRBJ2-3)
CASSLAGGLAGTAGQYF

SEQ ID NO: 711969 - protein, 13 aa, Homo sapiens
  CDR3 for alpha chain variable domain of TCR clone 355985 (TRAV8-4, TRAJ48)
CAVSLFGIEKLTF

SEQ ID NO: 711970 - protein, 15 aa, Homo sapiens
  CDR3 for beta chain variable domain of TCR clone 355985 (TRBV20-1, TRBJ2-7)
CSARKGLAESYEQYF

SEQ ID NO: 711971 - protein, 13 aa, Homo sapiens
  CDR3 for alpha chain variable domain of TCR clone 355986 (TRAV27, TRAJ45)
CRSSGGGADGLTF

SEQ ID NO: 711972 - protein, 12 aa, Homo sapiens
  CDR3 for beta chain variable domain of TCR clone 355986 (TRBV12-4, TRBJ1-3)
CASSFSGNTIYF

SEQ ID NO: 711973 - protein, 14 aa, Homo sapiens
  CDR3 for alpha chain variable domain of TCR clone 355987 (TRAV2, TRAJ9)
CAVEDRSGGFKTIF

SEQ ID NO: 711974 - protein, 15 aa, Homo sapiens
  CDR3 for beta chain variable domain of TCR clone 355987 (TRBV11-2, TRBJ2-1)
CASSKNRGLIYEQFF

SEQ ID NO: 711975 - protein, 14 aa, Homo sapiens
  CDR3 for alpha chain variable domain of TCR clone 355988 (TRAV26-1, TRAJ44)
CIVSNTGTASKLTF

SEQ ID NO: 711976 - protein, 11 aa, Homo sapiens
  CDR3 for beta chain variable domain of TCR clone 355988 (TRBV19, TRBJ2-7)
CARSILGEQYF

SEQ ID NO: 711977 - protein, 15 aa, Homo sapiens
  CDR3 for alpha chain variable domain of TCR clone 355989 (TRAV8-3, TRAJ45)
CASSYSGGGADGLTF

SEQ ID NO: 711978 - protein, 11 aa, Homo sapiens
  CDR3 for beta chain variable domain of TCR clone 355989 (TRBV12-4, TRBJ2-1)
CASSKFNEQFF

SEQ ID NO: 711979 - protein, 13 aa, Homo sapiens
  CDR3 for alpha chain variable domain of TCR clone 355990 (TRAV2, TRAJ40)
CAVVTSGTYEYIF

SEQ ID NO: 711980 - protein, 14 aa, Homo sapiens
  CDR3 for beta chain variable domain of TCR clone 355990 (TRBV19, TRBJ2-1)
CASPTFVLGGEQFF

SEQ ID NO: 711981 - protein, 16 aa, Homo sapiens
  CDR3 for alpha chain variable domain of TCR clone 355991 (TRAV1-2, TRAJ10)
CAVRGVLTGGGNKLTF

SEQ ID NO: 711982 - protein, 13 aa, Homo sapiens
  CDR3 for beta chain variable domain of TCR clone 355991 (TRBV5-4, TRBJ2-5)
CASSRQEGETQYF

SEQ ID NO: 711983 - protein, 13 aa, Homo sapiens
  CDR3 for alpha chain variable domain of TCR clone 355992 (TRAV12-1, TRAJ34)
CVVTGYNTEKIIF

SEQ ID NO: 711984 - protein, 13 aa, Homo sapiens
  CDR3 for beta chain variable domain of TCR clone 355992 (TRBV28, TRBJ2-7)
CASKAGGVYEQYF

SEQ ID NO: 711985 - protein, 12 aa, Homo sapiens
  CDR3 for alpha chain variable domain of TCR clone 355993 (TRAV21, TRAJ42)
CAVGGSQGNLIF

SEQ ID NO: 711986 - protein, 13 aa, Homo sapiens
  CDR3 for beta chain variable domain of TCR clone 355993 (TRBV12-4, TRBJ2-7)
CASSPTETYEQYF

SEQ ID NO: 711987 - protein, 16 aa, Homo sapiens
  CDR3 for alpha chain variable domain of TCR clone 355994 (TRAV17, TRAJ53)
CATDALSGGRNSKLTF

SEQ ID NO: 711988 - protein, 12 aa, Homo sapiens
  CDR3 for beta chain variable domain of TCR clone 355994 (TRBV5-1, TRBJ2-7)
CASSFRGYEQYF

SEQ ID NO: 711989 - protein, 16 aa, Homo sapiens
  CDR3 for alpha chain variable domain of TCR clone 355995 (TRAV12-2, TRAJ32)
FAVNLGQGGATNKLIF

SEQ ID NO: 711990 - protein, 16 aa, Homo sapiens
  CDR3 for beta chain variable domain of TCR clone 355995 (TRBV6-4, TRBJ1-4)
CASSETGQDPNEKLFF

SEQ ID NO: 711991 - protein, 14 aa, Homo sapiens
  CDR3 for alpha chain variable domain of TCR clone 355996 (TRAV12-2, TRAJ15)
CAPHTGQAGTALIF

SEQ ID NO: 711992 - protein, 15 aa, Homo sapiens
  CDR3 for beta chain variable domain of TCR clone 355996 (TRBV7-2, TRBJ2-1)
CASSSGLAGGNEQFF

SEQ ID NO: 711993 - protein, 18 aa, Homo sapiens
  CDR3 for alpha chain variable domain of TCR clone 355997 (TRAV26-1, TRAJ52)
CIVRGEGAGGTSYGKLTF

SEQ ID NO: 711994 - protein, 13 aa, Homo sapiens
  CDR3 for beta chain variable domain of TCR clone 355997 (TRBV7-3, TRBJ1-2)
CASSVKRGYGYTF

SEQ ID NO: 711995 - protein, 15 aa, Homo sapiens
  CDR3 for alpha chain variable domain of TCR clone 355998 (TRAV40, TRAJ45)
CLLGDLGGGADGLTF

SEQ ID NO: 711996 - protein, 17 aa, Homo sapiens
  CDR3 for beta chain variable domain of TCR clone 355998 (TRBV18, TRBJ1-5)
CASSPTMGQGTNQPQYF

SEQ ID NO: 711997 - protein, 13 aa, Homo sapiens
  CDR3 for alpha chain variable domain of TCR clone 355999 (TRAV21, TRAJ27)
CAARPGNAGKSTF

SEQ ID NO: 711998 - protein, 20 aa, Homo sapiens
  CDR3 for beta chain variable domain of TCR clone 355999 (TRBV7-8, TRBJ2-2)
CASSHLFPGPTIHITVELFF

SEQ ID NO: 711999 - protein, 15 aa, Homo sapiens
  CDR3 for alpha chain variable domain of TCR clone 356000 (TRAV3, TRAJ20)
CAVRDIKLSDYKLSS

SEQ ID NO: 712000 - protein, 18 aa, Homo sapiens
  CDR3 for beta chain variable domain of TCR clone 356000 (TRBV20-1, TRBJ2-5)
CSQTGDSGRLGGKETQYF

SEQ ID NO: 712001 - protein, 14 aa, Homo sapiens
  CDR3 for alpha chain variable domain of TCR clone 356001 (TRAV21, TRAJ58)
CAVRRGRSGPRLTF

SEQ ID NO: 712002 - protein, 13 aa, Homo sapiens
  CDR3 for beta chain variable domain of TCR clone 356001 (TRBV7-2, TRBJ1-6)
CASSLKFDSTLHF

SEQ ID NO: 712003 - protein, 14 aa, Homo sapiens
  CDR3 for alpha chain variable domain of TCR clone 356002 (TRAV1-2, TRAJ16)
VAVNRFSDGQKLLF

SEQ ID NO: 712004 - protein, 13 aa, Homo sapiens
  CDR3 for beta chain variable domain of TCR clone 356002 (TRBV20-1, TRBJ1-6)
CSAPTGLGSPLHF

SEQ ID NO: 712005 - protein, 14 aa, Homo sapiens
  CDR3 for alpha chain variable domain of TCR clone 356003 (TRAV17, TRAJ37)
CATDGSSNTGKLIF

SEQ ID NO: 712006 - protein, 16 aa, Homo sapiens
  CDR3 for beta chain variable domain of TCR clone 356003 (TRBV3-1, TRBJ1-2)
CASSQGQGVQRDGYTF

SEQ ID NO: 712007 - protein, 14 aa, Homo sapiens
  CDR3 for alpha chain variable domain of TCR clone 356004 (TRAV16, TRAJ15)
CALSFNQAGTALIF

SEQ ID NO: 712008 - protein, 16 aa, Homo sapiens
  CDR3 for beta chain variable domain of TCR clone 356004 (TRBV9, TRBJ2-7)
CASSAGPDRYPYEQYF

SEQ ID NO: 712009 - protein, 11 aa, Homo sapiens
  CDR3 for alpha chain variable domain of TCR clone 356005 (TRAV12-3, TRAJ27)
CALANAGKSTF

SEQ ID NO: 712010 - protein, 15 aa, Homo sapiens
  CDR3 for beta chain variable domain of TCR clone 356005 (TRBV25-1, TRBJ2-4)
CASSETESAKNIQYF

SEQ ID NO: 712011 - protein, 16 aa, Homo sapiens
  CDR3 for alpha chain variable domain of TCR clone 356006 (TRAV12-3, TRAJ53)
CAVSPGSGGSNYKMTF

SEQ ID NO: 712012 - protein, 11 aa, Homo sapiens
  CDR3 for beta chain variable domain of TCR clone 356006 (TRBV29-1, TRBJ2-5)
CSEDRTGTQYF

SEQ ID NO: 712013 - protein, 16 aa, Homo sapiens
  CDR3 for alpha chain variable domain of TCR clone 356007 (TRAV3, TRAJ21)
CAVRDIDRGNFNNFYF

SEQ ID NO: 712014 - protein, 13 aa, Homo sapiens
  CDR3 for beta chain variable domain of TCR clone 356007 (TRBV27, TRBJ2-7)
CASSLTTGYEQYF

SEQ ID NO: 712015 - protein, 15 aa, Homo sapiens
  CDR3 for alpha chain variable domain of TCR clone 356008 (TRAV14/DV4, TRAJ10)
CAMRELTGGGNKLTF

SEQ ID NO: 712016 - protein, 15 aa, Homo sapiens
  CDR3 for beta chain variable domain of TCR clone 356008 (TRBV20-1, TRBJ2-7)
CSARDRVSGMDEQYF

SEQ ID NO: 712017 - protein, 17 aa, Homo sapiens
  CDR3 for alpha chain variable domain of TCR clone 356009 (TRAV13-1, TRAJ52)
CAAGRNAGGTSYGKLKF

SEQ ID NO: 712018 - protein, 12 aa, Homo sapiens
  CDR3 for beta chain variable domain of TCR clone 356009 (TRBV29-1, TRBJ1-3)
CSTRDSGNTIYF

SEQ ID NO: 712019 - protein, 17 aa, Homo sapiens
  CDR3 for alpha chain variable domain of TCR clone 356010 (TRAV3, TRAJ38)
CAVRDCLDAGNNRKLIW

SEQ ID NO: 712020 - protein, 22 aa, Homo sapiens
  CDR3 for beta chain variable domain of TCR clone 356010 (TRBV6-1, TRBJ1-3)
CASVQGGGWKHHIFWRGKLAHC

SEQ ID NO: 712021 - protein, 13 aa, Homo sapiens
  CDR3 for alpha chain variable domain of TCR clone 356011 (TRAV26-1, TRAJ48)
CIVRVVGDEKLTF

SEQ ID NO: 712022 - protein, 19 aa, Homo sapiens
  CDR3 for beta chain variable domain of TCR clone 356011 (TRBV11-3, TRBJ2-2)
CASSTCPGAKTTNTGELFF

SEQ ID NO: 712023 - protein, 14 aa, Homo sapiens
  CDR3 for alpha chain variable domain of TCR clone 356012 (TRAV8-4, TRAJ43)
CAVSDPRNNNDMRF

SEQ ID NO: 712024 - protein, 12 aa, Homo sapiens
  CDR3 for beta chain variable domain of TCR clone 356012 (TRBV11-2, TRBJ2-2)
CASSLGGGELFF

SEQ ID NO: 712025 - protein, 16 aa, Homo sapiens
  CDR3 for alpha chain variable domain of TCR clone 356013 (TRAV14/DV4, TRAJ20)
CAMREGRSRADYKLSF

SEQ ID NO: 712026 - protein, 17 aa, Homo sapiens
  CDR3 for beta chain variable domain of TCR clone 356013 (TRBV13, TRBJ2-3)
CASSLSRVAGGRNTQYF

SEQ ID NO: 712027 - protein, 11 aa, Homo sapiens
  CDR3 for alpha chain variable domain of TCR clone 356014 (TRAV1-2, TRAJ20)
CAVANDYKLSF

SEQ ID NO: 712028 - protein, 14 aa, Homo sapiens
  CDR3 for beta chain variable domain of TCR clone 356014 (TRBV27, TRBJ1-2)
CASSPGQSNYGYTF

SEQ ID NO: 712029 - protein, 17 aa, Homo sapiens
  CDR3 for alpha chain variable domain of TCR clone 356015 (TRAV13-1, TRAJ52)
CAAGRNAGGTSYGKLTF

SEQ ID NO: 712030 - protein, 12 aa, Homo sapiens
  CDR3 for beta chain variable domain of TCR clone 356015 (TRBV7-9, TRBJ2-7)
CASSLEGYEQYF

SEQ ID NO: 712031 - protein, 14 aa, Homo sapiens
  CDR3 for alpha chain variable domain of TCR clone 356016 (TRAV17, TRAJ22)
CATSPSGSARQLTF

SEQ ID NO: 712032 - protein, 17 aa, Homo sapiens
  CDR3 for beta chain variable domain of TCR clone 356016 (TRBV7-6, TRBJ2-2)
CASSFTSGADNTGELFF

SEQ ID NO: 712033 - protein, 15 aa, Homo sapiens
  CDR3 for alpha chain variable domain of TCR clone 356017 (TRAV8-4, TRAJ12)
CAVSDRMDSSYKLIF

SEQ ID NO: 712034 - protein, 15 aa, Homo sapiens
  CDR3 for beta chain variable domain of TCR clone 356017 (TRBV11-3, TRBJ2-1)
CASSLAGQTYNEQFF

SEQ ID NO: 712035 - protein, 14 aa, Homo sapiens
  CDR3 for alpha chain variable domain of TCR clone 356018 (TRAV35, TRAJ22)
CAGLRPGSARQLTL

SEQ ID NO: 712036 - protein, 14 aa, Homo sapiens
  CDR3 for beta chain variable domain of TCR clone 356018 (TRBV12-4, TRBJ1-1)
CASSLGTGGTEAFF

SEQ ID NO: 712037 - protein, 12 aa, Homo sapiens
  CDR3 for alpha chain variable domain of TCR clone 356019 (TRAV2, TRAJ10)
CASTGGGNKLTF

SEQ ID NO: 712038 - protein, 13 aa, Homo sapiens
  CDR3 for beta chain variable domain of TCR clone 356019 (TRBV4-1, TRBJ2-5)
CASSLTRGETQYF

SEQ ID NO: 712039 - protein, 15 aa, Homo sapiens
  CDR3 for alpha chain variable domain of TCR clone 356020 (TRAV12-1, TRAJ45)
CVVLSGGGGADGLTF

SEQ ID NO: 712040 - protein, 15 aa, Homo sapiens
  CDR3 for beta chain variable domain of TCR clone 356020 (TRBV11-2, TRBJ2-1)
CASSSPSTRYNEQFF

SEQ ID NO: 712041 - protein, 16 aa, Homo sapiens
  CDR3 for alpha chain variable domain of TCR clone 356021 (TRAV38-2/DV8, TRAJ57)
CAYRSVGQGGSEKLVF

SEQ ID NO: 712042 - protein, 16 aa, Homo sapiens
  CDR3 for beta chain variable domain of TCR clone 356021 (TRBV12-5, TRBJ2-5)
CASGPRTSGNQETQYF

SEQ ID NO: 712043 - protein, 16 aa, Homo sapiens
  CDR3 for alpha chain variable domain of TCR clone 356022 (TRAV4, TRAJ5)
CLVGPDHGHGQESTYF

SEQ ID NO: 712044 - protein, 14 aa, Homo sapiens
  CDR3 for beta chain variable domain of TCR clone 356022 (TRBV19, TRBJ2-1)
CASGKSTQYNEQFF

SEQ ID NO: 712045 - protein, 16 aa, Homo sapiens
  CDR3 for alpha chain variable domain of TCR clone 356023 (TRAV16, TRAJ52)
CALSAAGGTSYGKLTF

SEQ ID NO: 712046 - protein, 12 aa, Homo sapiens
  CDR3 for beta chain variable domain of TCR clone 356023 (TRBV12-4, TRBJ1-3)
CARSFSGNTIYF

SEQ ID NO: 712047 - protein, 16 aa, Homo sapiens
  CDR3 for alpha chain variable domain of TCR clone 356024 (TRAV30, TRAJ24)
CGTGIVDADSWGKFQF

SEQ ID NO: 712048 - protein, 17 aa, Homo sapiens
  CDR3 for beta chain variable domain of TCR clone 356024 (TRBV7-8, TRBJ2-6)
CASSAGTGGAGANVLTF

SEQ ID NO: 712049 - protein, 14 aa, Homo sapiens
  CDR3 for alpha chain variable domain of TCR clone 356025 (TRAV1-2, TRAJ16)
CAVNRFSDGQKLLL

SEQ ID NO: 712050 - protein, 14 aa, Homo sapiens
  CDR3 for beta chain variable domain of TCR clone 356025 (TRBV20-1, TRBJ1-5)
CSAPGTGVGQPQHF

SEQ ID NO: 712051 - protein, 13 aa, Homo sapiens
  CDR3 for alpha chain variable domain of TCR clone 356026 (TRAV8-3, TRAJ48)
CAVLPFGNEKLTF

SEQ ID NO: 712052 - protein, 14 aa, Homo sapiens
  CDR3 for beta chain variable domain of TCR clone 356026 (TRBV18, TRBJ2-7)
CASSPRGGAYEQYF

SEQ ID NO: 712053 - protein, 17 aa, Homo sapiens
  CDR3 for alpha chain variable domain of TCR clone 356027 (TRAV3, TRAJ6)
CSVRDGPRAGGSYIPTF

SEQ ID NO: 712054 - protein, 14 aa, Homo sapiens
  CDR3 for beta chain variable domain of TCR clone 356027 (TRBV7-2, TRBJ2-7)
CASSPKTSFYEQYF

SEQ ID NO: 712055 - protein, 15 aa, Homo sapiens
  CDR3 for alpha chain variable domain of TCR clone 356028 (TRAV27, TRAJ38)
CAARRNAGHNRKLIW

SEQ ID NO: 712056 - protein, 13 aa, Homo sapiens
  CDR3 for beta chain variable domain of TCR clone 356028 (TRBV12-5, TRBJ2-3)
CASGDRQSDTQYF

SEQ ID NO: 712057 - protein, 15 aa, Homo sapiens
  CDR3 for alpha chain variable domain of TCR clone 356029 (TRAV29/DV5, TRAJ42)
RAAKTDGGSQGNLIF

SEQ ID NO: 712058 - protein, 15 aa, Homo sapiens
  CDR3 for beta chain variable domain of TCR clone 356029 (TRBV5-1, TRBJ2-2)
CASSSQGGNTGELFF

SEQ ID NO: 712059 - protein, 14 aa, Homo sapiens
  CDR3 for alpha chain variable domain of TCR clone 356030 (TRAV12-1, TRAJ42)
CVVIYGGSQGNLIF

SEQ ID NO: 712060 - protein, 13 aa, Homo sapiens
  CDR3 for beta chain variable domain of TCR clone 356030 (TRBV18, TRBJ2-5)
SASSPPGKETQYF

SEQ ID NO: 712061 - protein, 12 aa, Homo sapiens
  CDR3 for alpha chain variable domain of TCR clone 356031 (TRAV27, TRAJ37)
CADSGSTRKLIF

SEQ ID NO: 712062 - protein, 18 aa, Homo sapiens
  CDR3 for beta chain variable domain of TCR clone 356031 (TRBV7-9, TRBJ1-1)
CASSKPWDTMGMNTEAFF

SEQ ID NO: 712063 - protein, 13 aa, Homo sapiens
  CDR3 for alpha chain variable domain of TCR clone 356032 (TRAV12-3, TRAJ13)
CAMGTGGYQKVTF

SEQ ID NO: 712064 - protein, 13 aa, Homo sapiens
  CDR3 for beta chain variable domain of TCR clone 356032 (TRBV13, TRBJ2-1)
CASTPGSYNEQFF

SEQ ID NO: 712065 - protein, 11 aa, Homo sapiens
  CDR3 for alpha chain variable domain of TCR clone 356033 (TRAV13-1, TRAJ39)
CASHAGNMLTI

SEQ ID NO: 712066 - protein, 14 aa, Homo sapiens
  CDR3 for beta chain variable domain of TCR clone 356033 (TRBV11-2, TRBJ1-5)
CASSLDRGRQPQHF

SEQ ID NO: 712067 - protein, 15 aa, Homo sapiens
  CDR3 for alpha chain variable domain of TCR clone 356034 (TRAV21, TRAJ24)
CAARSSTDSWGKLQF

SEQ ID NO: 712068 - protein, 15 aa, Homo sapiens
  CDR3 for beta chain variable domain of TCR clone 356034 (TRBV7-6, TRBJ2-7)
CASSSGGAEPYEQYF

SEQ ID NO: 712069 - protein, 13 aa, Homo sapiens
  CDR3 for alpha chain variable domain of TCR clone 356035 (TRAV8-3, TRAJ44)
CAVVPGTASKLTF

SEQ ID NO: 712070 - protein, 14 aa, Homo sapiens
  CDR3 for beta chain variable domain of TCR clone 356035 (TRBV11-2, TRBJ2-3)
SASSRLARTDTQYF

SEQ ID NO: 712071 - protein, 14 aa, Homo sapiens
  CDR3 for alpha chain variable domain of TCR clone 356036 (TRAV20, TRAJ56)
CAVQFGGANSKLTF

SEQ ID NO: 712072 - protein, 15 aa, Homo sapiens
  CDR3 for beta chain variable domain of TCR clone 356036 (TRBV5-1, TRBJ2-7)
CASSLMTSGSNEQYF

SEQ ID NO: 712073 - protein, 14 aa, Homo sapiens
  CDR3 for alpha chain variable domain of TCR clone 356037 (TRAV12-2, TRAJ13)
CAVKKTGGYQKVTF

SEQ ID NO: 712074 - protein, 12 aa, Homo sapiens
  CDR3 for beta chain variable domain of TCR clone 356037 (TRBV3-1, TRBJ2-1)
FASSQGSSGQFF

SEQ ID NO: 712075 - protein, 12 aa, Homo sapiens
  CDR3 for alpha chain variable domain of TCR clone 356038 (TRAV13-1, TRAJ21)
CAAKEGLNKFYF

SEQ ID NO: 712076 - protein, 14 aa, Homo sapiens
  CDR3 for beta chain variable domain of TCR clone 356038 (TRBV7-2, TRBJ2-5)
CASSLSGGGETQYF

SEQ ID NO: 712077 - protein, 14 aa, Homo sapiens
  CDR3 for alpha chain variable domain of TCR clone 356039 (TRAV1-2, TRAJ16)
CAVNRFSDGQKLLF

SEQ ID NO: 712078 - protein, 12 aa, Homo sapiens
  CDR3 for beta chain variable domain of TCR clone 356039 (TRBV19, TRBJ1-5)
CASKDGEQPQHF

SEQ ID NO: 712079 - protein, 18 aa, Homo sapiens
  CDR3 for alpha chain variable domain of TCR clone 356040 (TRAV21, TRAJ52)
CAVRPSPAGGTSYVKLTF

SEQ ID NO: 712080 - protein, 14 aa, Homo sapiens
  CDR3 for beta chain variable domain of TCR clone 356040 (TRBV5-4, TRBJ1-1)
CASSLDSRRDEAFF

SEQ ID NO: 712081 - protein, 16 aa, Homo sapiens
  CDR3 for alpha chain variable domain of TCR clone 356041 (TRAV4, TRAJ22)
CLVGDLYSGSARPLTF

SEQ ID NO: 712082 - protein, 14 aa, Homo sapiens
  CDR3 for beta chain variable domain of TCR clone 356041 (TRBV28, TRBJ2-3)
CASSWRGRADTQYF

SEQ ID NO: 712083 - protein, 13 aa, Homo sapiens
  CDR3 for alpha chain variable domain of TCR clone 356042 (TRAV12-1, TRAJ6)
CVVFPGGSYIPTF

SEQ ID NO: 712084 - protein, 12 aa, Homo sapiens
  CDR3 for beta chain variable domain of TCR clone 356042 (TRBV7-8, TRBJ2-7)
CASEGGPHGQYF

SEQ ID NO: 712085 - protein, 15 aa, Homo sapiens
  CDR3 for alpha chain variable domain of TCR clone 356043 (TRAV27, TRAJ17)
CRSTRIKAAGNKLTF

SEQ ID NO: 712086 - protein, 13 aa, Homo sapiens
  CDR3 for beta chain variable domain of TCR clone 356043 (TRBV18, TRBJ2-7)
CASQSGGGYEQYF

SEQ ID NO: 712087 - protein, 14 aa, Homo sapiens
  CDR3 for alpha chain variable domain of TCR clone 356044 (TRAV21, TRAJ45)
CAVSSGGGADGLTF

SEQ ID NO: 712088 - protein, 15 aa, Homo sapiens
  CDR3 for beta chain variable domain of TCR clone 356044 (TRBV4-1, TRBJ1-1)
CASSQAPGGTAEAFF

SEQ ID NO: 712089 - protein, 15 aa, Homo sapiens
  CDR3 for alpha chain variable domain of TCR clone 356045 (TRAV12-3, TRAJ54)
CAMSPPFQGAQKLVF

SEQ ID NO: 712090 - protein, 15 aa, Homo sapiens
  CDR3 for beta chain variable domain of TCR clone 356045 (TRBV20-1, TRBJ2-7)
CSAGDRVSGMDEQYF

SEQ ID NO: 712091 - protein, 15 aa, Homo sapiens
  CDR3 for alpha chain variable domain of TCR clone 356046 (TRAV17, TRAJ37)
CATDHGSSHTGKLIF

SEQ ID NO: 712092 - protein, 14 aa, Homo sapiens
  CDR3 for beta chain variable domain of TCR clone 356046 (TRBV7-2, TRBJ2-3)
CASSRTSGADTQYF

SEQ ID NO: 712093 - protein, 15 aa, Homo sapiens
  CDR3 for alpha chain variable domain of TCR clone 356047 (TRAV13-2, TRAJ35)
CAESPNIGFGNGLHC

SEQ ID NO: 712094 - protein, 13 aa, Homo sapiens
  CDR3 for beta chain variable domain of TCR clone 356047 (TRBV10-2, TRBJ2-5)
CASSTLARETQYF

SEQ ID NO: 712095 - protein, 17 aa, Homo sapiens
  CDR3 for alpha chain variable domain of TCR clone 356048 (TRAV3, TRAJ6)
CAVSRRTDTGGSYIPTF

SEQ ID NO: 712096 - protein, 18 aa, Homo sapiens
  CDR3 for beta chain variable domain of TCR clone 356048 (TRBV12-4, TRBJ2-2)
CAGSLVAGTRGRTGELFF

SEQ ID NO: 712097 - protein, 17 aa, Homo sapiens
  CDR3 for alpha chain variable domain of TCR clone 356049 (TRAV29/DV5, TRAJ42)
CAASAGNYGGSQGNLIF

SEQ ID NO: 712098 - protein, 13 aa, Homo sapiens
  CDR3 for beta chain variable domain of TCR clone 356049 (TRBV7-7, TRBJ2-2)
CASSLTSAGELFF

SEQ ID NO: 712099 - protein, 17 aa, Homo sapiens
  CDR3 for alpha chain variable domain of TCR clone 356050 (TRAV3, TRAJ38)
CAVRDCLNAGNNRKLIW

SEQ ID NO: 712100 - protein, 14 aa, Homo sapiens
  CDR3 for beta chain variable domain of TCR clone 356050 (TRBV5-4, TRBJ1-2)
CASTRQTDNYGYTF

SEQ ID NO: 712101 - protein, 10 aa, Homo sapiens
  CDR3 for alpha chain variable domain of TCR clone 356051 (TRAV25, TRAJ20)
CAGNDYKLSF

SEQ ID NO: 712102 - protein, 14 aa, Homo sapiens
  CDR3 for beta chain variable domain of TCR clone 356051 (TRBV7-2, TRBJ2-3)
CASSQTGSSYTQYF

SEQ ID NO: 712103 - protein, 19 aa, Homo sapiens
  CDR3 for alpha chain variable domain of TCR clone 356052 (TRAV38-1, TRAJ53)
CAFMKHGLESGGSSYKLTV

SEQ ID NO: 712104 - protein, 13 aa, Homo sapiens
  CDR3 for beta chain variable domain of TCR clone 356052 (TRBV19, TRBJ2-7)
CASSPRQSYEQYF

SEQ ID NO: 712105 - protein, 15 aa, Homo sapiens
  CDR3 for alpha chain variable domain of TCR clone 356053 (TRAV21, TRAJ53)
CATLNRGGSNYKLTF

SEQ ID NO: 712106 - protein, 15 aa, Homo sapiens
  CDR3 for beta chain variable domain of TCR clone 356053 (TRBV11-3, TRBJ2-3)
CASLKDGREGDTQYF

SEQ ID NO: 712107 - protein, 14 aa, Homo sapiens
  CDR3 for alpha chain variable domain of TCR clone 356054 (TRAV17, TRAJ57)
CATDPQGGYEKLVF

SEQ ID NO: 712108 - protein, 15 aa, Homo sapiens
  CDR3 for beta chain variable domain of TCR clone 356054 (TRBV5-1, TRBJ2-7)
CASSLDLTSSYEQYF

SEQ ID NO: 712109 - protein, 13 aa, Homo sapiens
  CDR3 for alpha chain variable domain of TCR clone 356055 (TRAV2, TRAJ15)
CAVASQAGTALIF

SEQ ID NO: 712110 - protein, 16 aa, Homo sapiens
  CDR3 for beta chain variable domain of TCR clone 356055 (TRBV2, TRBJ2-3)
CASSTSVDGVTDTQYF

SEQ ID NO: 712111 - protein, 22 aa, Homo sapiens
  CDR3 for alpha chain variable domain of TCR clone 356056 (TRAV26-1, TRAJ46)
CIVRVGKEKQRRQADFWDRASF

SEQ ID NO: 712112 - protein, 13 aa, Homo sapiens
  CDR3 for beta chain variable domain of TCR clone 356056 (TRBV12-5, TRBJ2-3)
CASGDRQSDTQYF

SEQ ID NO: 712113 - protein, 11 aa, Homo sapiens
  CDR3 for alpha chain variable domain of TCR clone 356057 (TRAV8-3, TRAJ15)
CAVGPGTALIF

SEQ ID NO: 712114 - protein, 18 aa, Homo sapiens
  CDR3 for beta chain variable domain of TCR clone 356057 (TRBV18, TRBJ2-3)
CASSYTSGAAAGTDTQYF

SEQ ID NO: 712115 - protein, 15 aa, Homo sapiens
  CDR3 for alpha chain variable domain of TCR clone 356058 (TRAV20, TRAJ50)
CAVRQMKTSYDKVIF

SEQ ID NO: 712116 - protein, 14 aa, Homo sapiens
  CDR3 for beta chain variable domain of TCR clone 356058 (TRBV25-1, TRBJ1-1)
CASTHLGGNTEAFF

SEQ ID NO: 712117 - protein, 14 aa, Homo sapiens
  CDR3 for alpha chain variable domain of TCR clone 356059 (TRAV38-1, TRAJ45)
CASHSGGGADGLTF

SEQ ID NO: 712118 - protein, 14 aa, Homo sapiens
  CDR3 for beta chain variable domain of TCR clone 356059 (TRBV20-1, TRBJ1-1)
CSAKTRIGGTEAFF

SEQ ID NO: 712119 - protein, 13 aa, Homo sapiens
  CDR3 for alpha chain variable domain of TCR clone 356060 (TRAV30, TRAJ34)
CGTVGDNTDKLIF

SEQ ID NO: 712120 - protein, 16 aa, Homo sapiens
  CDR3 for beta chain variable domain of TCR clone 356060 (TRBV7-9, TRBJ1-2)
CASSLGFSSGEDGDTF

SEQ ID NO: 712121 - protein, 15 aa, Homo sapiens
  CDR3 for alpha chain variable domain of TCR clone 356061 (TRAV12-1, TRAJ44)
CVVFVNTGTASKLTF

SEQ ID NO: 712122 - protein, 10 aa, Homo sapiens
  CDR3 for beta chain variable domain of TCR clone 356061 (TRBV7-8, TRBJ2-2)
CASSAGELFF

SEQ ID NO: 712123 - protein, 12 aa, Homo sapiens
  CDR3 for alpha chain variable domain of TCR clone 356062 (TRAV12-3, TRAJ17)
CATTLTGNKLTF

SEQ ID NO: 712124 - protein, 15 aa, Homo sapiens
  CDR3 for beta chain variable domain of TCR clone 356062 (TRBV20-1, TRBJ2-7)
YSARDRVSGMDEQYF

SEQ ID NO: 712125 - protein, 14 aa, Homo sapiens
  CDR3 for alpha chain variable domain of TCR clone 356063 (TRAV29/DV5, TRAJ36)
CAARRKTGANNLFF

SEQ ID NO: 712126 - protein, 11 aa, Homo sapiens
  CDR3 for beta chain variable domain of TCR clone 356063 (TRBV19, TRBJ1-1)
CTSSIGSEAFF

SEQ ID NO: 712127 - protein, 13 aa, Homo sapiens
  CDR3 for alpha chain variable domain of TCR clone 356064 (TRAV8-1, TRAJ9)
CAVNSVGGVKTIF

SEQ ID NO: 712128 - protein, 15 aa, Homo sapiens
  CDR3 for beta chain variable domain of TCR clone 356064 (TRBV11-2, TRBJ2-3)
CASSGRDGLTDTQYF

SEQ ID NO: 712129 - protein, 12 aa, Homo sapiens
  CDR3 for alpha chain variable domain of TCR clone 356065 (TRAV30, TRAJ43)
CGTEERGNDMRF

SEQ ID NO: 712130 - protein, 14 aa, Homo sapiens
  CDR3 for beta chain variable domain of TCR clone 356065 (TRBV7-2, TRBJ2-5)
CASSPRGSSETQYF

SEQ ID NO: 712131 - protein, 14 aa, Homo sapiens
  CDR3 for alpha chain variable domain of TCR clone 356066 (TRAV13-1, TRAJ9)
CAASALTGGFKTIF

SEQ ID NO: 712132 - protein, 14 aa, Homo sapiens
  CDR3 for beta chain variable domain of TCR clone 356066 (TRBV18, TRBJ2-7)
CASSPRGGAYEQYF

SEQ ID NO: 712133 - protein, 13 aa, Homo sapiens
  CDR3 for alpha chain variable domain of TCR clone 356067 (TRAV2, TRAJ40)
CAVVTSGIYKYIF

SEQ ID NO: 712134 - protein, 16 aa, Homo sapiens
  CDR3 for beta chain variable domain of TCR clone 356067 (TRBV7-9, TRBJ1-3)
CASSLGAVSSGNTIYF

SEQ ID NO: 712135 - protein, 12 aa, Homo sapiens
  CDR3 for alpha chain variable domain of TCR clone 356068 (TRAV17, TRAJ39)
CATGAAGNMLTF

SEQ ID NO: 712136 - protein, 12 aa, Homo sapiens
  CDR3 for beta chain variable domain of TCR clone 356068 (TRBV19, TRBJ1-4)
CASKDWPGGLFF

SEQ ID NO: 712137 - protein, 13 aa, Homo sapiens
  CDR3 for alpha chain variable domain of TCR clone 356069 (TRAV21, TRAJ57)
CAVTQGGSEKLVF

SEQ ID NO: 712138 - protein, 13 aa, Homo sapiens
  CDR3 for beta chain variable domain of TCR clone 356069 (TRBV4-1, TRBJ2-1)
CASSQEVQYEQFF

SEQ ID NO: 712139 - protein, 17 aa, Homo sapiens
  CDR3 for alpha chain variable domain of TCR clone 356070 (TRAV3, TRAJ6)
CAARDGPRAGGSYIPTF

SEQ ID NO: 712140 - protein, 15 aa, Homo sapiens
  CDR3 for beta chain variable domain of TCR clone 356070 (TRBV11-2, TRBJ2-2)
CASSSDRVNAGELFF

SEQ ID NO: 712141 - protein, 11 aa, Homo sapiens
  CDR3 for alpha chain variable domain of TCR clone 356071 (TRAV39, TRAJ49)
CAVDISTQFYF

SEQ ID NO: 712142 - protein, 14 aa, Homo sapiens
  CDR3 for beta chain variable domain of TCR clone 356071 (TRBV19, TRBJ2-1)
CASPTFVLSGEQFF

SEQ ID NO: 712143 - protein, 14 aa, Homo sapiens
  CDR3 for alpha chain variable domain of TCR clone 356072 (TRAV21, TRAJ4)
CAAPGVGGYNKLIF

SEQ ID NO: 712144 - protein, 13 aa, Homo sapiens
  CDR3 for beta chain variable domain of TCR clone 356072 (TRBV12-5, TRBJ2-3)
CASGDRQSDTQYF

SEQ ID NO: 712145 - protein, 18 aa, Homo sapiens
  CDR3 for alpha chain variable domain of TCR clone 356073 (TRAV2, TRAJ32)
CCLLLCFHYGGATNKLIF

SEQ ID NO: 712146 - protein, 16 aa, Homo sapiens
  CDR3 for beta chain variable domain of TCR clone 356073 (TRBV7-9, TRBJ2-7)
CASSYHDREGGYEQYF

SEQ ID NO: 712147 - protein, 13 aa, Homo sapiens
  CDR3 for alpha chain variable domain of TCR clone 356074 (TRAV1-2, TRAJ9)
CAALNTGGFKTIF

SEQ ID NO: 712148 - protein, 12 aa, Homo sapiens
  CDR3 for beta chain variable domain of TCR clone 356074 (TRBV12-4, TRBJ2-3)
CASSTLPDTQYF

SEQ ID NO: 712149 - protein, 14 aa, Homo sapiens
  CDR3 for alpha chain variable domain of TCR clone 356075 (TRAV2, TRAJ37)
CAVDFTSNTGKLIF

SEQ ID NO: 712150 - protein, 14 aa, Homo sapiens
  CDR3 for beta chain variable domain of TCR clone 356075 (TRBV7-9, TRBJ2-2)
CASSLVQDTGELFF

SEQ ID NO: 712151 - protein, 17 aa, Homo sapiens
  CDR3 for alpha chain variable domain of TCR clone 356076 (TRAV17, TRAJ52)
CATERPSGGTSDGKLTF

SEQ ID NO: 712152 - protein, 15 aa, Homo sapiens
  CDR3 for beta chain variable domain of TCR clone 356076 (TRBV5-1, TRBJ2-1)
CASSLVANSYNEQFF

SEQ ID NO: 712153 - protein, 14 aa, Homo sapiens
  CDR3 for alpha chain variable domain of TCR clone 356077 (TRAV3, TRAJ9)
CAVRLITGGFKTTF

SEQ ID NO: 712154 - protein, 15 aa, Homo sapiens
  CDR3 for beta chain variable domain of TCR clone 356077 (TRBV7-2, TRBJ2-1)
CASSLASGRVNEQFF

SEQ ID NO: 712155 - protein, 14 aa, Homo sapiens
  CDR3 for alpha chain variable domain of TCR clone 356078 (TRAV16, TRAJ22)
CALRGQGSARQLTF

SEQ ID NO: 712156 - protein, 15 aa, Homo sapiens
  CDR3 for beta chain variable domain of TCR clone 356078 (TRBV7-3, TRBJ2-1)
CASSPTGGGEVEQFF

SEQ ID NO: 712157 - protein, 13 aa, Homo sapiens
  CDR3 for alpha chain variable domain of TCR clone 356079 (TRAV13-1, TRAJ39)
CAASIWAGNMLTF

SEQ ID NO: 712158 - protein, 13 aa, Homo sapiens
  CDR3 for beta chain variable domain of TCR clone 356079 (TRBV7-9, TRBJ2-4)
CATEGLAGNIQYF

SEQ ID NO: 712159 - protein, 14 aa, Homo sapiens
  CDR3 for alpha chain variable domain of TCR clone 356080 (TRAV20, TRAJ18)
CAVGRGSTLGRLYF

SEQ ID NO: 712160 - protein, 14 aa, Homo sapiens
  CDR3 for beta chain variable domain of TCR clone 356080 (TRBV28, TRBJ2-4)
CARTQVTGVNIQYF

SEQ ID NO: 712161 - protein, 17 aa, Homo sapiens
  CDR3 for alpha chain variable domain of TCR clone 356081 (TRAV14/DV4, TRAJ12)
CAMRELPWMDSSYKLIF

SEQ ID NO: 712162 - protein, 14 aa, Homo sapiens
  CDR3 for beta chain variable domain of TCR clone 356081 (TRBV20-1, TRBJ2-7)
CSARRSGSSYEQYI

SEQ ID NO: 712163 - protein, 14 aa, Homo sapiens
  CDR3 for alpha chain variable domain of TCR clone 356082 (TRAV3, TRAJ37)
CAVKESGNTGKLIF

SEQ ID NO: 712164 - protein, 14 aa, Homo sapiens
  CDR3 for beta chain variable domain of TCR clone 356082 (TRBV7-3, TRBJ2-1)
CASSLGTSANEQFF

SEQ ID NO: 712165 - protein, 18 aa, Homo sapiens
  CDR3 for alpha chain variable domain of TCR clone 356083 (TRAV21, TRAJ52)
CAVRPSPAGGTSYGKLTF

SEQ ID NO: 712166 - protein, 18 aa, Homo sapiens
  CDR3 for beta chain variable domain of TCR clone 356083 (TRBV28, TRBJ2-1)
CASSSPSGLAGAIYEQFF

SEQ ID NO: 712167 - protein, 12 aa, Homo sapiens
  CDR3 for alpha chain variable domain of TCR clone 356084 (TRAV21, TRAJ10)
WTARGGGNKLTF

SEQ ID NO: 712168 - protein, 14 aa, Homo sapiens
  CDR3 for beta chain variable domain of TCR clone 356084 (TRBV12-5, TRBJ2-5)
CASGSRTHQETQYF

SEQ ID NO: 712169 - protein, 11 aa, Homo sapiens
  CDR3 for alpha chain variable domain of TCR clone 356085 (TRAV12-2, TRAJ33)
CAVGSNYQLIW

SEQ ID NO: 712170 - protein, 14 aa, Homo sapiens
  CDR3 for beta chain variable domain of TCR clone 356085 (TRBV6-1, TRBJ2-2)
CASVEHIESGKLFF

SEQ ID NO: 712171 - protein, 15 aa, Homo sapiens
  CDR3 for alpha chain variable domain of TCR clone 356086 (TRAV29/DV5, TRAJ24)
CAASGATDSWGKFQF

SEQ ID NO: 712172 - protein, 12 aa, Homo sapiens
  CDR3 for beta chain variable domain of TCR clone 356086 (TRBV11-2, TRBJ2-2)
CDSRLPTGELFF

SEQ ID NO: 712173 - protein, 17 aa, Homo sapiens
  CDR3 for alpha chain variable domain of TCR clone 356087 (TRAV3, TRAJ6)
CAVRDGPRAGGSYIPTF

SEQ ID NO: 712174 - protein, 12 aa, Homo sapiens
  CDR3 for beta chain variable domain of TCR clone 356087 (TRBV12-4, TRBJ2-1)
CASTYVLNEQFF

SEQ ID NO: 712175 - protein, 18 aa, Homo sapiens
  CDR3 for alpha chain variable domain of TCR clone 356088 (TRAV23/DV6, TRAJ3)
CAATTFALGGAVLPRYSL

SEQ ID NO: 712176 - protein, 15 aa, Homo sapiens
  CDR3 for beta chain variable domain of TCR clone 356088 (TRBV19, TRBJ1-6)
CASSTQGAVGSPLHF

SEQ ID NO: 712177 - protein, 14 aa, Homo sapiens
  CDR3 for alpha chain variable domain of TCR clone 356089 (TRAV12-2, TRAJ13)
CAVNPSGGYQKVTL

SEQ ID NO: 712178 - protein, 14 aa, Homo sapiens
  CDR3 for beta chain variable domain of TCR clone 356089 (TRBV12-4, TRBJ1-1)
CASSLGTGGTEAFF

SEQ ID NO: 712179 - protein, 11 aa, Homo sapiens
  CDR3 for alpha chain variable domain of TCR clone 356090 (TRAV12-2, TRAJ6)
CEAGGSYIPTF

SEQ ID NO: 712180 - protein, 15 aa, Homo sapiens
  CDR3 for beta chain variable domain of TCR clone 356090 (TRBV6-6, TRBJ2-1)
CATRQGVSSYNEQFF

SEQ ID NO: 712181 - protein, 14 aa, Homo sapiens
  CDR3 for alpha chain variable domain of TCR clone 356091 (TRAV16, TRAJ33)
CALSAMDSNYQLIW

SEQ ID NO: 712182 - protein, 16 aa, Homo sapiens
  CDR3 for beta chain variable domain of TCR clone 356091 (TRBV12-4, TRBJ2-3)
CASSFPANTNTDTQYF

SEQ ID NO: 712183 - protein, 14 aa, Homo sapiens
  CDR3 for alpha chain variable domain of TCR clone 356092 (TRAV38-1, TRAJ40)
GALRPTSGTYKYIF

SEQ ID NO: 712184 - protein, 14 aa, Homo sapiens
  CDR3 for beta chain variable domain of TCR clone 356092 (TRBV25-1, TRBJ1-1)
CASTHLGVNTEAFF

SEQ ID NO: 712185 - protein, 19 aa, Homo sapiens
  CDR3 for alpha chain variable domain of TCR clone 356093 (TRAV39, TRAJ43)
PCMTSLPPTTVPWANDMRF

SEQ ID NO: 712186 - protein, 15 aa, Homo sapiens
  CDR3 for beta chain variable domain of TCR clone 356093 (TRBV12-4, TRBJ2-5)
CASSPPTGLQETQYF

SEQ ID NO: 712187 - protein, 13 aa, Homo sapiens
  CDR3 for alpha chain variable domain of TCR clone 356094 (TRAV8-3, TRAJ43)
CAVVPYNNNDMRF

SEQ ID NO: 712188 - protein, 14 aa, Homo sapiens
  CDR3 for beta chain variable domain of TCR clone 356094 (TRBV25-1, TRBJ1-1)
CAITHLGGNTEAFF

SEQ ID NO: 712189 - protein, 15 aa, Homo sapiens
  CDR3 for alpha chain variable domain of TCR clone 356095 (TRAV8-3, TRAJ7)
FAVGSISYGNNRLAF

SEQ ID NO: 712190 - protein, 15 aa, Homo sapiens
  CDR3 for beta chain variable domain of TCR clone 356095 (TRBV4-2, TRBJ1-1)
CASSQEDLPRTEAFF

SEQ ID NO: 712191 - protein, 14 aa, Homo sapiens
  CDR3 for alpha chain variable domain of TCR clone 356096 (TRAV8-1, TRAJ3)
CAVRSGSSASKIIF

SEQ ID NO: 712192 - protein, 13 aa, Homo sapiens
  CDR3 for beta chain variable domain of TCR clone 356096 (TRBV12-4, TRBJ2-2)
CASSITGSGELFF

SEQ ID NO: 712193 - protein, 13 aa, Homo sapiens
  CDR3 for alpha chain variable domain of TCR clone 356097 (TRAV12-3, TRAJ9)
CAMRNTGGFKTIF

SEQ ID NO: 712194 - protein, 13 aa, Homo sapiens
  CDR3 for beta chain variable domain of TCR clone 356097 (TRBV27, TRBJ2-1)
CARRTLGVGEQFF

SEQ ID NO: 712195 - protein, 16 aa, Homo sapiens
  CDR3 for alpha chain variable domain of TCR clone 356098 (TRAV26-1, TRAJ31)
CIVRPPVLNNNARLMF

SEQ ID NO: 712196 - protein, 14 aa, Homo sapiens
  CDR3 for beta chain variable domain of TCR clone 356098 (TRBV7-2, TRBJ2-7)
CASRSQGAAYEQYF

SEQ ID NO: 712197 - protein, 10 aa, Homo sapiens
  CDR3 for alpha chain variable domain of TCR clone 356099 (TRAV26-1, TRAJ22)
RSGSARQLTF

SEQ ID NO: 712198 - protein, 16 aa, Homo sapiens
  CDR3 for beta chain variable domain of TCR clone 356099 (TRBV7-9, TRBJ1-2)
CASSLGFSSGEDGYTF

SEQ ID NO: 712199 - protein, 19 aa, Homo sapiens
  CDR3 for alpha chain variable domain of TCR clone 356100 (TRAV27, TRAJ53)
ASTSVQSRTSGGSNYKLTF

SEQ ID NO: 712200 - protein, 14 aa, Homo sapiens
  CDR3 for beta chain variable domain of TCR clone 356100 (TRBV7-3, TRBJ2-3)
CASSSTGVADTQYF

SEQ ID NO: 712201 - protein, 15 aa, Homo sapiens
  CDR3 for alpha chain variable domain of TCR clone 356101 (TRAV8-6, TRAJ10)
CAVSDQAGGGNKLTF

SEQ ID NO: 712202 - protein, 11 aa, Homo sapiens
  CDR3 for beta chain variable domain of TCR clone 356101 (TRBV13, TRBJ2-3)
CASGNADTQYF

SEQ ID NO: 712203 - protein, 19 aa, Homo sapiens
  CDR3 for alpha chain variable domain of TCR clone 356102 (TRAV1-2, TRAJ26)
CLLPLCCERPDNYGQNFFF

SEQ ID NO: 712204 - protein, 16 aa, Homo sapiens
  CDR3 for beta chain variable domain of TCR clone 356102 (TRBV7-2, TRBJ1-4)
CASSPVGRFDREKLFF

SEQ ID NO: 712205 - protein, 13 aa, Homo sapiens
  CDR3 for alpha chain variable domain of TCR clone 356103 (TRAV2, TRAJ40)
CAVATSGTYKYIF

SEQ ID NO: 712206 - protein, 14 aa, Homo sapiens
  CDR3 for beta chain variable domain of TCR clone 356103 (TRBV19, TRBJ2-1)
CASPTCVLSGEQFF

SEQ ID NO: 712207 - protein, 15 aa, Homo sapiens
  CDR3 for alpha chain variable domain of TCR clone 356104 (TRAV17, TRAJ22)
CAAVAPSGSARQLTF

SEQ ID NO: 712208 - protein, 15 aa, Homo sapiens
  CDR3 for beta chain variable domain of TCR clone 356104 (TRBV11-3, TRBJ2-3)
CASLKDGREGDTQYF

SEQ ID NO: 712209 - protein, 12 aa, Homo sapiens
  CDR3 for alpha chain variable domain of TCR clone 356105 (TRAV12-3, TRAJ17)
CAMTLTGNKPTF

SEQ ID NO: 712210 - protein, 15 aa, Homo sapiens
  CDR3 for beta chain variable domain of TCR clone 356105 (TRBV20-1, TRBJ2-7)
CSARDRVSGMDDQYF

SEQ ID NO: 712211 - protein, 14 aa, Homo sapiens
  CDR3 for alpha chain variable domain of TCR clone 356106 (TRAV1-1, TRAJ27)
CAVSYNTNAGKSTF

SEQ ID NO: 712212 - protein, 18 aa, Homo sapiens
  CDR3 for beta chain variable domain of TCR clone 356106 (TRBV7-3, TRBJ2-1)
CASSLTLASGRAMVSSSS

SEQ ID NO: 712213 - protein, 18 aa, Homo sapiens
  CDR3 for alpha chain variable domain of TCR clone 356107 (TRAV13-1, TRAJ52)
CEAKNPNACGTSYGKLTF

SEQ ID NO: 712214 - protein, 14 aa, Homo sapiens
  CDR3 for beta chain variable domain of TCR clone 356107 (TRBV7-3, TRBJ2-1)
CASSLAGGTNEQFF

SEQ ID NO: 712215 - protein, 11 aa, Homo sapiens
  CDR3 for alpha chain variable domain of TCR clone 356108 (TRAV12-3, TRAJ43)
CAMSVCNDMRF

SEQ ID NO: 712216 - protein, 13 aa, Homo sapiens
  CDR3 for beta chain variable domain of TCR clone 356108 (TRBV20-1, TRBJ1-1)
CSAPLGGGTEAFF

SEQ ID NO: 712217 - protein, 12 aa, Homo sapiens
  CDR3 for alpha chain variable domain of TCR clone 356109 (TRAV36/DV7, TRAJ40)
CAVASGTYKYIF

SEQ ID NO: 712218 - protein, 13 aa, Homo sapiens
  CDR3 for beta chain variable domain of TCR clone 356109 (TRBV7-9, TRBJ2-7)
CASSLGLVGEQYF

SEQ ID NO: 712219 - protein, 14 aa, Homo sapiens
  CDR3 for alpha chain variable domain of TCR clone 356110 (TRAV12-2, TRAJ24)
CAVTPADSWGKLRF

SEQ ID NO: 712220 - protein, 13 aa, Homo sapiens
  CDR3 for beta chain variable domain of TCR clone 356110 (TRBV7-9, TRBJ2-5)
CASSRGTKETQYF

SEQ ID NO: 712221 - protein, 13 aa, Homo sapiens
  CDR3 for alpha chain variable domain of TCR clone 356111 (TRAV21, TRAJ57)
CAVTQGGSEKLVF

SEQ ID NO: 712222 - protein, 14 aa, Homo sapiens
  CDR3 for beta chain variable domain of TCR clone 356111 (TRBV18, TRBJ1-2)
RVAIFLCANYGYTF

SEQ ID NO: 712223 - protein, 10 aa, Homo sapiens
  CDR3 for alpha chain variable domain of TCR clone 356112 (TRAV12-1, TRAJ20)
CAIYFQRLQA

SEQ ID NO: 712224 - protein, 15 aa, Homo sapiens
  CDR3 for beta chain variable domain of TCR clone 356112 (TRBV12-4, TRBJ2-7)
CASSLGSGGPYEQYF

SEQ ID NO: 712225 - protein, 11 aa, Homo sapiens
  CDR3 for alpha chain variable domain of TCR clone 356113 (TRAV1-1, TRAJ23)
CAVRQGGKLIF

SEQ ID NO: 712226 - protein, 14 aa, Homo sapiens
  CDR3 for beta chain variable domain of TCR clone 356113 (TRBV6-1, TRBJ1-3)
CASVQGGGGNTMYF

SEQ ID NO: 712227 - protein, 15 aa, Homo sapiens
  CDR3 for alpha chain variable domain of TCR clone 356114 (TRAV26-1, TRAJ29)
CIVRVEGSGNTPLVF

SEQ ID NO: 712228 - protein, 13 aa, Homo sapiens
  CDR3 for beta chain variable domain of TCR clone 356114 (TRBV18, TRBJ2-5)
CQLTWGVPETQYF

SEQ ID NO: 712229 - protein, 15 aa, Homo sapiens
  CDR3 for alpha chain variable domain of TCR clone 356115 (TRAV3, TRAJ7)
CAVRDKDNGNNRLAF

SEQ ID NO: 712230 - protein, 19 aa, Homo sapiens
  CDR3 for beta chain variable domain of TCR clone 356115 (TRBV5-8, TRBJ2-3)
CGSSFLGTSGSHRTDTQYF

SEQ ID NO: 712231 - protein, 10 aa, Homo sapiens
  CDR3 for alpha chain variable domain of TCR clone 356116 (TRAV26-1, TRAJ22)
CIVSLNFFWF

SEQ ID NO: 712232 - protein, 13 aa, Homo sapiens
  CDR3 for beta chain variable domain of TCR clone 356116 (TRBV7-3, TRBJ1-2)
CASSLKRGYGYTF

SEQ ID NO: 712233 - protein, 16 aa, Homo sapiens
  CDR3 for alpha chain variable domain of TCR clone 356117 (TRAV30, TRAJ24)
CGTEIVDADSWCKFQF

SEQ ID NO: 712234 - protein, 13 aa, Homo sapiens
  CDR3 for beta chain variable domain of TCR clone 356117 (TRBV7-3, TRBJ1-1)
CASSQDWGAEAFF

SEQ ID NO: 712235 - protein, 15 aa, Homo sapiens
  CDR3 for alpha chain variable domain of TCR clone 356118 (TRAV3, TRAJ11)
CAVRDRGSGYSTLTF

SEQ ID NO: 712236 - protein, 14 aa, Homo sapiens
  CDR3 for beta chain variable domain of TCR clone 356118 (TRBV7-2, TRBJ2-7)
CASSPKTSFYEQYF

SEQ ID NO: 712237 - protein, 21 aa, Homo sapiens
  CDR3 for alpha chain variable domain of TCR clone 356119 (TRAV1-2, TRAJ37)
CLLPLCCERFHRSGNTGKLIF

SEQ ID NO: 712238 - protein, 14 aa, Homo sapiens
  CDR3 for beta chain variable domain of TCR clone 356119 (TRBV2, TRBJ2-5)
CASSEVLAQETQYF

SEQ ID NO: 712239 - protein, 13 aa, Homo sapiens
  CDR3 for alpha chain variable domain of TCR clone 356120 (TRAV21, TRAJ37)
CAVVAGNTGKLIF

SEQ ID NO: 712240 - protein, 15 aa, Homo sapiens
  CDR3 for beta chain variable domain of TCR clone 356120 (TRBV28, TRBJ2-7)
CASSLISGGSYEQYF

SEQ ID NO: 712241 - protein, 12 aa, Homo sapiens
  CDR3 for alpha chain variable domain of TCR clone 356121 (TRAV35, TRAJ39)
LAPNNAGNMLTF

SEQ ID NO: 712242 - protein, 13 aa, Homo sapiens
  CDR3 for beta chain variable domain of TCR clone 356121 (TRBV20-1, TRBJ2-7)
CSATHTSGYEQYF

SEQ ID NO: 712243 - protein, 13 aa, Homo sapiens
  CDR3 for alpha chain variable domain of TCR clone 356122 (TRAV9-2, TRAJ53)
CALSGGSNYKLTF

SEQ ID NO: 712244 - protein, 15 aa, Homo sapiens
  CDR3 for beta chain variable domain of TCR clone 356122 (TRBV2, TRBJ2-2)
CASSRETVGTGELFF

SEQ ID NO: 712245 - protein, 12 aa, Homo sapiens
  CDR3 for alpha chain variable domain of TCR clone 356123 (TRAV2, TRAJ33)
CAVPDSNYRLIW

SEQ ID NO: 712246 - protein, 15 aa, Homo sapiens
  CDR3 for beta chain variable domain of TCR clone 356123 (TRBV15, TRBJ1-5)
CATSRDPVSNQPQHF

SEQ ID NO: 712247 - protein, 15 aa, Homo sapiens
  CDR3 for alpha chain variable domain of TCR clone 356124 (TRAV23/DV6, TRAJ28)
CAALLAYSGAGSYQL

SEQ ID NO: 712248 - protein, 16 aa, Homo sapiens
  CDR3 for beta chain variable domain of TCR clone 356124 (TRBV2, TRBJ1-4)
CASNLLQGATNEKLFF

SEQ ID NO: 712249 - protein, 16 aa, Homo sapiens
  CDR3 for alpha chain variable domain of TCR clone 356125 (TRAV12-1, TRAJ48)
CVVNMVSNFGNEKLTF

SEQ ID NO: 712250 - protein, 18 aa, Homo sapiens
  CDR3 for beta chain variable domain of TCR clone 356125 (TRBV11-2, TRBJ2-6)
CASSLNTFLGPGANVLTF

SEQ ID NO: 712251 - protein, 16 aa, Homo sapiens
  CDR3 for alpha chain variable domain of TCR clone 356126 (TRAV12-2, TRAJ45)
CAVIFLSGGGADGLTF

SEQ ID NO: 712252 - protein, 19 aa, Homo sapiens
  CDR3 for beta chain variable domain of TCR clone 356126 (TRBV28, TRBJ2-4)
CASSFQPGGPANSKNIQYF

SEQ ID NO: 712253 - protein, 12 aa, Homo sapiens
  CDR3 for alpha chain variable domain of TCR clone 356127 (TRAV20, TRAJ39)
CAVGNAGNMLTF

SEQ ID NO: 712254 - protein, 13 aa, Homo sapiens
  CDR3 for beta chain variable domain of TCR clone 356127 (TRBV27, TRBJ2-1)
CASRTLGVGEQFF

SEQ ID NO: 712255 - protein, 13 aa, Homo sapiens
  CDR3 for alpha chain variable domain of TCR clone 356128 (TRAV8-6, TRAJ9)
CAVSDTGGFKTIF

SEQ ID NO: 712256 - protein, 14 aa, Homo sapiens
  CDR3 for beta chain variable domain of TCR clone 356128 (TRBV7-6, TRBJ2-3)
CASSLGTVTDTQYF

SEQ ID NO: 712257 - protein, 13 aa, Homo sapiens
  CDR3 for alpha chain variable domain of TCR clone 356129 (TRAV22, TRAJ29)
CAVGGSGNTPLVF

SEQ ID NO: 712258 - protein, 13 aa, Homo sapiens
  CDR3 for beta chain variable domain of TCR clone 356129 (TRBV19, TRBJ2-7)
CASRKAGVSEQYF

SEQ ID NO: 712259 - protein, 13 aa, Homo sapiens
  CDR3 for alpha chain variable domain of TCR clone 356130 (TRAV3, TRAJ21)
CAVREPDFNKFYF

SEQ ID NO: 712260 - protein, 17 aa, Homo sapiens
  CDR3 for beta chain variable domain of TCR clone 356130 (TRBV7-8, TRBJ2-6)
CAISAGTGGAGANVLTF

SEQ ID NO: 712261 - protein, 14 aa, Homo sapiens
  CDR3 for alpha chain variable domain of TCR clone 356131 (TRAV1-2, TRAJ16)
CAVNRFSDGLKLLF

SEQ ID NO: 712262 - protein, 15 aa, Homo sapiens
  CDR3 for beta chain variable domain of TCR clone 356131 (TRBV5-8, TRBJ2-2)
CASSLDRGATGELFF

SEQ ID NO: 712263 - protein, 13 aa, Homo sapiens
  CDR3 for alpha chain variable domain of TCR clone 356132 (TRAV2, TRAJ29)
CAAVNSGNTPLVF

SEQ ID NO: 712264 - protein, 16 aa, Homo sapiens
  CDR3 for beta chain variable domain of TCR clone 356132 (TRBV7-9, TRBJ1-2)
CASSAGGGAINYGYTF

SEQ ID NO: 712265 - protein, 11 aa, Homo sapiens
  CDR3 for alpha chain variable domain of TCR clone 356133 (TRAV1-1, TRAJ23)
CAVRQGGKLIF

SEQ ID NO: 712266 - protein, 20 aa, Homo sapiens
  CDR3 for beta chain variable domain of TCR clone 356133 (TRBV7-8, TRBJ2-2)
CASSHLFPGPTMHITGELFF

SEQ ID NO: 712267 - protein, 13 aa, Homo sapiens
  CDR3 for alpha chain variable domain of TCR clone 356134 (TRAV35, TRAJ43)
CAGYPYNNNDMRF

SEQ ID NO: 712268 - protein, 15 aa, Homo sapiens
  CDR3 for beta chain variable domain of TCR clone 356134 (TRBV11-2, TRBJ1-6)
CASTLRGTGNSPLHF

SEQ ID NO: 712269 - protein, 17 aa, Homo sapiens
  CDR3 for alpha chain variable domain of TCR clone 356135 (TRAV26-1, TRAJ37)
CIVRVITVSSDTGKLIF

SEQ ID NO: 712270 - protein, 13 aa, Homo sapiens
  CDR3 for beta chain variable domain of TCR clone 356135 (TRBV27, TRBJ1-1)
CASSLSIGAEAFF

SEQ ID NO: 712271 - protein, 11 aa, Homo sapiens
  CDR3 for alpha chain variable domain of TCR clone 356136 (TRAV12-3, TRAJ27)
CEMANAGKSTF

SEQ ID NO: 712272 - protein, 15 aa, Homo sapiens
  CDR3 for beta chain variable domain of TCR clone 356136 (TRBV27, TRBJ2-5)
CASSLYPRGGETQYF

SEQ ID NO: 712273 - protein, 15 aa, Homo sapiens
  CDR3 for alpha chain variable domain of TCR clone 356137 (TRAV26-1, TRAJ17)
CIVSSFKAAGNKLTF

SEQ ID NO: 712274 - protein, 13 aa, Homo sapiens
  CDR3 for beta chain variable domain of TCR clone 356137 (TRBV10-3, TRBJ2-7)
CASKLAVNYEQYF

SEQ ID NO: 712275 - protein, 13 aa, Homo sapiens
  CDR3 for alpha chain variable domain of TCR clone 356138 (TRAV16, TRAJ34)
FALSPYNTDKLIF

SEQ ID NO: 712276 - protein, 15 aa, Homo sapiens
  CDR3 for beta chain variable domain of TCR clone 356138 (TRBV12-4, TRBJ2-5)
CASSPPTGLQETQYF

SEQ ID NO: 712277 - protein, 13 aa, Homo sapiens
  CDR3 for alpha chain variable domain of TCR clone 356139 (TRAV21, TRAJ20)
CAVGLRVDYKLSF

SEQ ID NO: 712278 - protein, 16 aa, Homo sapiens
  CDR3 for beta chain variable domain of TCR clone 356139 (TRBV9, TRBJ2-2)
CASSARGKGNTGELFF

SEQ ID NO: 712279 - protein, 15 aa, Homo sapiens
  CDR3 for alpha chain variable domain of TCR clone 356140 (TRAV21, TRAJ53)
CTTLNSGGSNYKLTF

SEQ ID NO: 712280 - protein, 13 aa, Homo sapiens
  CDR3 for beta chain variable domain of TCR clone 356140 (TRBV13, TRBJ2-5)
CASSLGGEETQYF

SEQ ID NO: 712281 - protein, 15 aa, Homo sapiens
  CDR3 for alpha chain variable domain of TCR clone 356141 (TRAV30, TRAJ57)
CGTAIPQGGSEKLVF

SEQ ID NO: 712282 - protein, 12 aa, Homo sapiens
  CDR3 for beta chain variable domain of TCR clone 356141 (TRBV11-2, TRBJ2-2)
CASGLGGGELFF

SEQ ID NO: 712283 - protein, 15 aa, Homo sapiens
  CDR3 for alpha chain variable domain of TCR clone 356142 (TRAV3, TRAJ3)
CAVRDRDSSASKIIF

SEQ ID NO: 712284 - protein, 15 aa, Homo sapiens
  CDR3 for beta chain variable domain of TCR clone 356142 (TRBV19, TRBJ2-1)
CASSSPGVPRDEQFF

SEQ ID NO: 712285 - protein, 15 aa, Homo sapiens
  CDR3 for alpha chain variable domain of TCR clone 356143 (TRAV34, TRAJ38)
CGADFTPGNNRKLIW

SEQ ID NO: 712286 - protein, 12 aa, Homo sapiens
  CDR3 for beta chain variable domain of TCR clone 356143 (TRBV7-9, TRBJ2-7)
CATRTDAYAQYF

SEQ ID NO: 712287 - protein, 13 aa, Homo sapiens
  CDR3 for alpha chain variable domain of TCR clone 356144 (TRAV1-1, TRAJ38)
CASNAGNNRKLIW

SEQ ID NO: 712288 - protein, 16 aa, Homo sapiens
  CDR3 for beta chain variable domain of TCR clone 356144 (TRBV7-3, TRBJ2-1)
CASSKPLAGGYNEQSF

SEQ ID NO: 712289 - protein, 14 aa, Homo sapiens
  CDR3 for alpha chain variable domain of TCR clone 356145 (TRAV21, TRAJ3)
CAVRRGSSASKIIF

SEQ ID NO: 712290 - protein, 14 aa, Homo sapiens
  CDR3 for beta chain variable domain of TCR clone 356145 (TRBV7-3, TRBJ1-1)
CASSLKGGNTEAFF

SEQ ID NO: 712291 - protein, 15 aa, Homo sapiens
  CDR3 for alpha chain variable domain of TCR clone 356146 (TRAV12-2, TRAJ43)
CAFDMRFGAGTSLTV

SEQ ID NO: 712292 - protein, 11 aa, Homo sapiens
  CDR3 for beta chain variable domain of TCR clone 356146 (TRBV11-2, TRBJ2-2)
CASSLPGELFF

SEQ ID NO: 712293 - protein, 15 aa, Homo sapiens
  CDR3 for alpha chain variable domain of TCR clone 356147 (TRAV20, TRAJ41)
CAVQANSNSGYALNF

SEQ ID NO: 712294 - protein, 18 aa, Homo sapiens
  CDR3 for beta chain variable domain of TCR clone 356147 (TRBV7-9, TRBJ2-7)
CASSLTTSGSRIWYEQYF

SEQ ID NO: 712295 - protein, 13 aa, Homo sapiens
  CDR3 for alpha chain variable domain of TCR clone 356148 (TRAV20, TRAJ21)
CAVEGYNFNKFYF

SEQ ID NO: 712296 - protein, 14 aa, Homo sapiens
  CDR3 for beta chain variable domain of TCR clone 356148 (TRBV3-1, TRBJ2-5)
CASSPGPDQETQYF

SEQ ID NO: 712297 - protein, 15 aa, Homo sapiens
  CDR3 for alpha chain variable domain of TCR clone 356149 (TRAV8-3, TRAJ20)
CAVEVKGSNDYKLSF

SEQ ID NO: 712298 - protein, 12 aa, Homo sapiens
  CDR3 for beta chain variable domain of TCR clone 356149 (TRBV7-2, TRBJ1-2)
CASRDSIYGYTF

SEQ ID NO: 712299 - protein, 14 aa, Homo sapiens
  CDR3 for alpha chain variable domain of TCR clone 356150 (TRAV1-2, TRAJ16)
CAVNRFSDGQKLLF

SEQ ID NO: 712300 - protein, 16 aa, Homo sapiens
  CDR3 for beta chain variable domain of TCR clone 356150 (TRBV20-1, TRBJ2-7)
CSARDWAGGPSSTSGR

SEQ ID NO: 712301 - protein, 14 aa, Homo sapiens
  CDR3 for alpha chain variable domain of TCR clone 356151 (TRAV1-2, TRAJ6)
CTVRSSGGSYIPTF

SEQ ID NO: 712302 - protein, 14 aa, Homo sapiens
  CDR3 for beta chain variable domain of TCR clone 356151 (TRBV19, TRBJ2-7)
CASSMGQGAIEQYF

SEQ ID NO: 712303 - protein, 14 aa, Homo sapiens
  CDR3 for alpha chain variable domain of TCR clone 356152 (TRAV16, TRAJ31)
CSKLLRGDNARLMF

SEQ ID NO: 712304 - protein, 16 aa, Homo sapiens
  CDR3 for beta chain variable domain of TCR clone 356152 (TRBV28, TRBJ2-7)
CASSLFFETGGPEQYF

SEQ ID NO: 712305 - protein, 17 aa, Homo sapiens
  CDR3 for alpha chain variable domain of TCR clone 356153 (TRAV3, TRAJ6)
CAVRDGARAGGSSIPTF

SEQ ID NO: 712306 - protein, 14 aa, Homo sapiens
  CDR3 for beta chain variable domain of TCR clone 356153 (TRBV7-2, TRBJ2-7)
CASSPKTSFYEQYF

SEQ ID NO: 712307 - protein, 15 aa, Homo sapiens
  CDR3 for alpha chain variable domain of TCR clone 356154 (TRAV21, TRAJ40)
CAVRPQTSGTYKYIS

SEQ ID NO: 712308 - protein, 13 aa, Homo sapiens
  CDR3 for beta chain variable domain of TCR clone 356154 (TRBV7-2, TRBJ2-2)
CASSSVRAGELFF

SEQ ID NO: 712309 - protein, 14 aa, Homo sapiens
  CDR3 for alpha chain variable domain of TCR clone 356155 (TRAV8-4, TRAJ8)
CAVSPNTGFQKLVF

SEQ ID NO: 712310 - protein, 13 aa, Homo sapiens
  CDR3 for beta chain variable domain of TCR clone 356155 (TRBV7-9, TRBJ2-3)
CASSPGSTDTQYF

SEQ ID NO: 712311 - protein, 12 aa, Homo sapiens
  CDR3 for alpha chain variable domain of TCR clone 356156 (TRAV17, TRAJ39)
CATGAAGNMLTF

SEQ ID NO: 712312 - protein, 12 aa, Homo sapiens
  CDR3 for beta chain variable domain of TCR clone 356156 (TRBV20-1, TRBJ2-3)
CSADGAGDTQYF

SEQ ID NO: 712313 - protein, 14 aa, Homo sapiens
  CDR3 for alpha chain variable domain of TCR clone 356157 (TRAV1-2, TRAJ8)
YAAREDTGFQKLVF

SEQ ID NO: 712314 - protein, 13 aa, Homo sapiens
  CDR3 for beta chain variable domain of TCR clone 356157 (TRBV19, TRBJ1-2)
CAISVPGQDGYTF

SEQ ID NO: 712315 - protein, 11 aa, Homo sapiens
  CDR3 for alpha chain variable domain of TCR clone 356158 (TRAV2, TRAJ33)
CAVDSNYQLIW

SEQ ID NO: 712316 - protein, 13 aa, Homo sapiens
  CDR3 for beta chain variable domain of TCR clone 356158 (TRBV11-2, TRBJ1-6)
CASSLAGTSPLHF

SEQ ID NO: 712317 - protein, 18 aa, Homo sapiens
  CDR3 for alpha chain variable domain of TCR clone 356159 (TRAV26-1, TRAJ30)
CCVLLHRQSTNRDDKIIF

SEQ ID NO: 712318 - protein, 18 aa, Homo sapiens
  CDR3 for beta chain variable domain of TCR clone 356159 (TRBV4-1, TRBJ1-5)
CASSQDPRVQGLNQPQHF

SEQ ID NO: 712319 - protein, 14 aa, Homo sapiens
  CDR3 for alpha chain variable domain of TCR clone 356160 (TRAV8-1, TRAJ5)
CAVRTGTGSRALTF

SEQ ID NO: 712320 - protein, 14 aa, Homo sapiens
  CDR3 for beta chain variable domain of TCR clone 356160 (TRBV5-5, TRBJ1-2)
CASSLDPYNYGYTF

SEQ ID NO: 712321 - protein, 11 aa, Homo sapiens
  CDR3 for alpha chain variable domain of TCR clone 356161 (TRAV2, TRAJ33)
CAVDSNYQLIW

SEQ ID NO: 712322 - protein, 13 aa, Homo sapiens
  CDR3 for beta chain variable domain of TCR clone 356161 (TRBV28, TRBJ1-5)
CASSDRGNQPQHF

SEQ ID NO: 712323 - protein, 16 aa, Homo sapiens
  CDR3 for alpha chain variable domain of TCR clone 356162 (TRAV13-1, TRAJ52)
CAAIMRGGTSYGKLTF

SEQ ID NO: 712324 - protein, 15 aa, Homo sapiens
  CDR3 for beta chain variable domain of TCR clone 356162 (TRBV3-1, TRBJ2-7)
CASRQVAGAQYGQYF

SEQ ID NO: 712325 - protein, 12 aa, Homo sapiens
  CDR3 for alpha chain variable domain of TCR clone 356163 (TRAV25, TRAJ20)
CAGRSNDYKLSF

SEQ ID NO: 712326 - protein, 15 aa, Homo sapiens
  CDR3 for beta chain variable domain of TCR clone 356163 (TRBV7-6, TRBJ2-7)
CASSGRRETFGEQYF

SEQ ID NO: 712327 - protein, 11 aa, Homo sapiens
  CDR3 for alpha chain variable domain of TCR clone 356164 (TRAV1-2, TRAJ20)
CAVANNYKLSF

SEQ ID NO: 712328 - protein, 13 aa, Homo sapiens
  CDR3 for beta chain variable domain of TCR clone 356164 (TRBV10-3, TRBJ2-7)
CASKLAVNYEQYF

SEQ ID NO: 712329 - protein, 16 aa, Homo sapiens
  CDR3 for alpha chain variable domain of TCR clone 356165 (TRAV30, TRAJ24)
CGTEIVDADSWGKFQF

SEQ ID NO: 712330 - protein, 14 aa, Homo sapiens
  CDR3 for beta chain variable domain of TCR clone 356165 (TRBV12-5, TRBJ2-5)
CASGSRTHKETQYF

SEQ ID NO: 712331 - protein, 14 aa, Homo sapiens
  CDR3 for alpha chain variable domain of TCR clone 356166 (TRAV1-2, TRAJ16)
CAVNRFSDGQKRLF

SEQ ID NO: 712332 - protein, 14 aa, Homo sapiens
  CDR3 for beta chain variable domain of TCR clone 356166 (TRBV7-9, TRBJ2-2)
CASSLGHRTGELFF

SEQ ID NO: 712333 - protein, 14 aa, Homo sapiens
  CDR3 for alpha chain variable domain of TCR clone 356167 (TRAV1-2, TRAJ16)
CAVNRFSDGQKLLF

SEQ ID NO: 712334 - protein, 13 aa, Homo sapiens
  CDR3 for beta chain variable domain of TCR clone 356167 (TRBV15, TRBJ1-6)
CATSGGLNSHLHF

SEQ ID NO: 712335 - protein, 14 aa, Homo sapiens
  CDR3 for alpha chain variable domain of TCR clone 356168 (TRAV26-1, TRAJ39)
CIVRGSRAGNMLTF

SEQ ID NO: 712336 - protein, 15 aa, Homo sapiens
  CDR3 for beta chain variable domain of TCR clone 356168 (TRBV7-9, TRBJ1-5)
CASSQGHQPNKAQHF

SEQ ID NO: 712337 - protein, 12 aa, Homo sapiens
  CDR3 for alpha chain variable domain of TCR clone 356169 (TRAV23/DV6, TRAJ30)
CAASKGDDKIIF

SEQ ID NO: 712338 - protein, 13 aa, Homo sapiens
  CDR3 for beta chain variable domain of TCR clone 356169 (TRBV4-1, TRBJ2-2)
CASSQENTGELFF

SEQ ID NO: 712339 - protein, 15 aa, Homo sapiens
  CDR3 for alpha chain variable domain of TCR clone 356170 (TRAV6, TRAJ4)
CALGGFSGGHNKLIF

SEQ ID NO: 712340 - protein, 13 aa, Homo sapiens
  CDR3 for beta chain variable domain of TCR clone 356170 (TRBV19, TRBJ1-2)
CASSVPGQDGYTF

SEQ ID NO: 712341 - protein, 13 aa, Homo sapiens
  CDR3 for alpha chain variable domain of TCR clone 356171 (TRAV13-1, TRAJ5)
CAASDTGRRALTL

SEQ ID NO: 712342 - protein, 12 aa, Homo sapiens
  CDR3 for beta chain variable domain of TCR clone 356171 (TRBV28, TRBJ2-3)
CASSLYRDTQYF

SEQ ID NO: 712343 - protein, 12 aa, Homo sapiens
  CDR3 for alpha chain variable domain of TCR clone 356172 (TRAV13-1, TRAJ21)
CAAKEGFNKFYF

SEQ ID NO: 712344 - protein, 15 aa, Homo sapiens
  CDR3 for beta chain variable domain of TCR clone 356172 (TRBV2, TRBJ2-1)
CASSELAMSYNEQFF

SEQ ID NO: 712345 - protein, 14 aa, Homo sapiens
  CDR3 for alpha chain variable domain of TCR clone 356173 (TRAV13-1, TRAJ40)
CAARSTSGTYKYIF

SEQ ID NO: 712346 - protein, 15 aa, Homo sapiens
  CDR3 for beta chain variable domain of TCR clone 356173 (TRBV18, TRBJ1-5)
RASSETGGNNQPQHF

SEQ ID NO: 712347 - protein, 14 aa, Homo sapiens
  CDR3 for alpha chain variable domain of TCR clone 356174 (TRAV3, TRAJ7)
CAVREEEREQQTRF

SEQ ID NO: 712348 - protein, 13 aa, Homo sapiens
  CDR3 for beta chain variable domain of TCR clone 356174 (TRBV7-9, TRBJ1-2)
CASSLKQNYGYTF

SEQ ID NO: 712349 - protein, 17 aa, Homo sapiens
  CDR3 for alpha chain variable domain of TCR clone 356175 (TRAV3, TRAJ6)
CAVRDGPRAGGSYIPNF

SEQ ID NO: 712350 - protein, 14 aa, Homo sapiens
  CDR3 for beta chain variable domain of TCR clone 356175 (TRBV7-2, TRBJ2-7)
CASSPKTSLYEQYF

SEQ ID NO: 712351 - protein, 13 aa, Homo sapiens
  CDR3 for alpha chain variable domain of TCR clone 356176 (TRAV26-1, TRAJ48)
CIVLRVRNEKLTF

SEQ ID NO: 712352 - protein, 14 aa, Homo sapiens
  CDR3 for beta chain variable domain of TCR clone 356176 (TRBV20-1, TRBJ1-5)
CSARDISKDQPQHF

SEQ ID NO: 712353 - protein, 18 aa, Homo sapiens
  CDR3 for alpha chain variable domain of TCR clone 356177 (TRAV3, TRAJ17)
CAVRARRGGRSCRQQANF

SEQ ID NO: 712354 - protein, 13 aa, Homo sapiens
  CDR3 for beta chain variable domain of TCR clone 356177 (TRBV4-1, TRBJ1-1)
CASSRKMNTEAFF

SEQ ID NO: 712355 - protein, 15 aa, Homo sapiens
  CDR3 for alpha chain variable domain of TCR clone 356178 (TRAV17, TRAJ57)
CATGPSQGGSEKLVF

SEQ ID NO: 712356 - protein, 14 aa, Homo sapiens
  CDR3 for beta chain variable domain of TCR clone 356178 (TRBV7-2, TRBJ1-1)
CASSFLTGTTEAFF

SEQ ID NO: 712357 - protein, 13 aa, Homo sapiens
  CDR3 for alpha chain variable domain of TCR clone 356179 (TRAV30, TRAJ6)
CGFIEGGSYIPTF

SEQ ID NO: 712358 - protein, 17 aa, Homo sapiens
  CDR3 for beta chain variable domain of TCR clone 356179 (TRBV9, TRBJ2-2)
CASSVGGQGTDTGELFF

SEQ ID NO: 712359 - protein, 15 aa, Homo sapiens
  CDR3 for alpha chain variable domain of TCR clone 356180 (TRAV8-6, TRAJ11)
CAVNFMNSGYSTLTF

SEQ ID NO: 712360 - protein, 17 aa, Homo sapiens
  CDR3 for beta chain variable domain of TCR clone 356180 (TRBV3-1, TRBJ2-5)
CASSNWGGTRGQETQYF

SEQ ID NO: 712361 - protein, 13 aa, Homo sapiens
  CDR3 for alpha chain variable domain of TCR clone 356181 (TRAV27, TRAJ56)
CAGKPGANSKLTF

SEQ ID NO: 712362 - protein, 15 aa, Homo sapiens
  CDR3 for beta chain variable domain of TCR clone 356181 (TRBV4-3, TRBJ2-7)
CASSQGGRGIYEQYF

SEQ ID NO: 712363 - protein, 12 aa, Homo sapiens
  CDR3 for alpha chain variable domain of TCR clone 356182 (TRAV8-6, TRAJ36)
CAVSDWLGQTTS

SEQ ID NO: 712364 - protein, 14 aa, Homo sapiens
  CDR3 for beta chain variable domain of TCR clone 356182 (TRBV7-2, TRBJ1-2)
CASSQTGSAYSYTF

SEQ ID NO: 712365 - protein, 12 aa, Homo sapiens
  CDR3 for alpha chain variable domain of TCR clone 356183 (TRAV2, TRAJ9)
CAVGAGGFKTIF

SEQ ID NO: 712366 - protein, 18 aa, Homo sapiens
  CDR3 for beta chain variable domain of TCR clone 356183 (TRBV5-1, TRBJ1-6)
CASSVGGGYGERNSPLHF

SEQ ID NO: 712367 - protein, 22 aa, Homo sapiens
  CDR3 for alpha chain variable domain of TCR clone 356184 (TRAV8-2, TRAJ45)
HLTKPSAHMSDAAEYSADGLTF

SEQ ID NO: 712368 - protein, 16 aa, Homo sapiens
  CDR3 for beta chain variable domain of TCR clone 356184 (TRBV6-1, TRBJ2-5)
CASSETLDRGAETQYF

SEQ ID NO: 712369 - protein, 14 aa, Homo sapiens
  CDR3 for alpha chain variable domain of TCR clone 356185 (TRAV13-1, TRAJ35)
CAASKGGFGNVLHC

SEQ ID NO: 712370 - protein, 14 aa, Homo sapiens
  CDR3 for beta chain variable domain of TCR clone 356185 (TRBV19, TRBJ2-1)
CAIPTSVLSGEQFF

SEQ ID NO: 712371 - protein, 11 aa, Homo sapiens
  CDR3 for alpha chain variable domain of TCR clone 356186 (TRAV17, TRAJ9)
CATTGGFKTIF

SEQ ID NO: 712372 - protein, 15 aa, Homo sapiens
  CDR3 for beta chain variable domain of TCR clone 356186 (TRBV7-8, TRBJ2-1)
CASSLADSLYNEQFF

SEQ ID NO: 712373 - protein, 11 aa, Homo sapiens
  CDR3 for alpha chain variable domain of TCR clone 356187 (TRAV35, TRAJ30)
CACPGDDNIIF

SEQ ID NO: 712374 - protein, 14 aa, Homo sapiens
  CDR3 for beta chain variable domain of TCR clone 356187 (TRBV7-6, TRBJ1-6)
CASSQAGGGSPLHF

SEQ ID NO: 712375 - protein, 17 aa, Homo sapiens
  CDR3 for alpha chain variable domain of TCR clone 356188 (TRAV3, TRAJ6)
CAVRDGPRAGGSYIPTF

SEQ ID NO: 712376 - protein, 16 aa, Homo sapiens
  CDR3 for beta chain variable domain of TCR clone 356188 (TRBV15, TRBJ1-4)
CATSRDSPPGREKLFF

SEQ ID NO: 712377 - protein, 15 aa, Homo sapiens
  CDR3 for alpha chain variable domain of TCR clone 356189 (TRAV12-2, TRAJ8)
CAVREENTGFQKLLF

SEQ ID NO: 712378 - protein, 16 aa, Homo sapiens
  CDR3 for beta chain variable domain of TCR clone 356189 (TRBV7-3, TRBJ2-2)
CASSLKRGTLSGELFF

SEQ ID NO: 712379 - protein, 13 aa, Homo sapiens
  CDR3 for alpha chain variable domain of TCR clone 356190 (TRAV17, TRAJ30)
CATDADRDGRIIF

SEQ ID NO: 712380 - protein, 16 aa, Homo sapiens
  CDR3 for beta chain variable domain of TCR clone 356190 (TRBV7-3, TRBJ2-3)
CASSRTASLSTDTQYF

SEQ ID NO: 712381 - protein, 14 aa, Homo sapiens
  CDR3 for alpha chain variable domain of TCR clone 356191 (TRAV27, TRAJ36)
CAGPPKRVANNLFF

SEQ ID NO: 712382 - protein, 15 aa, Homo sapiens
  CDR3 for beta chain variable domain of TCR clone 356191 (TRBV18, TRBJ2-7)
CASSPASTPNYEQYF

SEQ ID NO: 712383 - protein, 12 aa, Homo sapiens
  CDR3 for alpha chain variable domain of TCR clone 356192 (TRAV27, TRAJ35)
CAGADFGNVLHC

SEQ ID NO: 712384 - protein, 17 aa, Homo sapiens
  CDR3 for beta chain variable domain of TCR clone 356192 (TRBV4-3, TRBJ1-5)
CASSQWGDGGPNQPQHF

SEQ ID NO: 712385 - protein, 14 aa, Homo sapiens
  CDR3 for alpha chain variable domain of TCR clone 356193 (TRAV1-2, TRAJ16)
CAVNRFSDGQKLLF

SEQ ID NO: 712386 - protein, 14 aa, Homo sapiens
  CDR3 for beta chain variable domain of TCR clone 356193 (TRBV13, TRBJ2-3)
CASSLGGPQRPQYF

SEQ ID NO: 712387 - protein, 22 aa, Homo sapiens
  CDR3 for alpha chain variable domain of TCR clone 356194 (TRAV16, )
CALRTQIPDIQNPDPAVYQLRD

SEQ ID NO: 712388 - protein, 16 aa, Homo sapiens
  CDR3 for beta chain variable domain of TCR clone 356194 (TRBV12-5, TRBJ2-5)
CASGPRTSGNQETQYF

SEQ ID NO: 712389 - protein, 13 aa, Homo sapiens
  CDR3 for alpha chain variable domain of TCR clone 356195 (TRAV12-2, TRAJ40)
CAVKRTGTYKYIF

SEQ ID NO: 712390 - protein, 15 aa, Homo sapiens
  CDR3 for beta chain variable domain of TCR clone 356195 (TRBV3-1, TRBJ2-1)
CASSQQPSGGNEQFF

SEQ ID NO: 712391 - protein, 12 aa, Homo sapiens
  CDR3 for alpha chain variable domain of TCR clone 356196 (TRAV12-1, TRAJ34)
CVVTFNTVKLIF

SEQ ID NO: 712392 - protein, 14 aa, Homo sapiens
  CDR3 for beta chain variable domain of TCR clone 356196 (TRBV19, TRBJ1-1)
CASLRTGLNTEAFF

SEQ ID NO: 712393 - protein, 18 aa, Homo sapiens
  CDR3 for alpha chain variable domain of TCR clone 356197 (TRAV21, TRAJ52)
CAVRPSPAGGTSYGKLPF

SEQ ID NO: 712394 - protein, 17 aa, Homo sapiens
  CDR3 for beta chain variable domain of TCR clone 356197 (TRBV13, TRBJ2-3)
CASSLSRVARGRNTQYF

SEQ ID NO: 712395 - protein, 14 aa, Homo sapiens
  CDR3 for alpha chain variable domain of TCR clone 356198 (TRAV26-1, TRAJ34)
CIVRGAYNTDKLIF

SEQ ID NO: 712396 - protein, 15 aa, Homo sapiens
  CDR3 for beta chain variable domain of TCR clone 356198 (TRBV7-2, TRBJ2-1)
CASSSGLAGGNEQFF

SEQ ID NO: 712397 - protein, 14 aa, Homo sapiens
  CDR3 for alpha chain variable domain of TCR clone 356199 (TRAV17, TRAJ22)
CATSPSGSARQLTF

SEQ ID NO: 712398 - protein, 13 aa, Homo sapiens
  CDR3 for beta chain variable domain of TCR clone 356199 (TRBV19, TRBJ1-2)
CASSQGQVYGDTF

SEQ ID NO: 712399 - protein, 12 aa, Homo sapiens
  CDR3 for alpha chain variable domain of TCR clone 356200 (TRAV16, TRAJ10)
CSRTGGGNKITF

SEQ ID NO: 712400 - protein, 17 aa, Homo sapiens
  CDR3 for beta chain variable domain of TCR clone 356200 (TRBV29-1, TRBJ2-1)
CSVEGPQGKSSYNEQFF

SEQ ID NO: 712401 - protein, 13 aa, Homo sapiens
  CDR3 for alpha chain variable domain of TCR clone 356201 (TRAV12-2, TRAJ10)
CAVPTGGGNKLTF

SEQ ID NO: 712402 - protein, 14 aa, Homo sapiens
  CDR3 for beta chain variable domain of TCR clone 356201 (TRBV7-9, TRBJ2-7)
CASSLVPGRGEQYF

SEQ ID NO: 712403 - protein, 14 aa, Homo sapiens
  CDR3 for alpha chain variable domain of TCR clone 356202 (TRAV13-1, TRAJ35)
CAASKGGFGNVLHC

SEQ ID NO: 712404 - protein, 14 aa, Homo sapiens
  CDR3 for beta chain variable domain of TCR clone 356202 (TRBV19, TRBJ2-1)
CASPTVVLSGEQFF

SEQ ID NO: 712405 - protein, 10 aa, Homo sapiens
  CDR3 for alpha chain variable domain of TCR clone 356203 (TRAV26-1, TRAJ40)
CIAGTYKYIF

SEQ ID NO: 712406 - protein, 15 aa, Homo sapiens
  CDR3 for beta chain variable domain of TCR clone 356203 (TRBV7-9, TRBJ2-6)
CASSHEGTEANVLTF

SEQ ID NO: 712407 - protein, 14 aa, Homo sapiens
  CDR3 for alpha chain variable domain of TCR clone 356204 (TRAV12-1, TRAJ37)
CVVTGSSNTSKLIF

SEQ ID NO: 712408 - protein, 20 aa, Homo sapiens
  CDR3 for beta chain variable domain of TCR clone 356204 (TRBV23-1, TRBJ2-5)
CISAPAVPERVLLIQETQYF

SEQ ID NO: 712409 - protein, 16 aa, Homo sapiens
  CDR3 for alpha chain variable domain of TCR clone 356205 (TRAV17, TRAJ53)
CATDALSGGSNYKLTF

SEQ ID NO: 712410 - protein, 17 aa, Homo sapiens
  CDR3 for beta chain variable domain of TCR clone 356205 (TRBV11-2, TRBJ2-1)
CASSLYPPGVEYNEQFF

SEQ ID NO: 712411 - protein, 11 aa, Homo sapiens
  CDR3 for alpha chain variable domain of TCR clone 356206 (TRAV21, TRAJ34)
CAHYNTNKLIF

SEQ ID NO: 712412 - protein, 15 aa, Homo sapiens
  CDR3 for beta chain variable domain of TCR clone 356206 (TRBV28, TRBJ2-1)
CASSYQSGYYNEQFF

SEQ ID NO: 712413 - protein, 12 aa, Homo sapiens
  CDR3 for alpha chain variable domain of TCR clone 356207 (TRAV25, TRAJ11)
CAGASGYSTLTF

SEQ ID NO: 712414 - protein, 14 aa, Homo sapiens
  CDR3 for beta chain variable domain of TCR clone 356207 (TRBV5-8, TRBJ2-3)
CAGRLGQGTDTQYF

SEQ ID NO: 712415 - protein, 14 aa, Homo sapiens
  CDR3 for alpha chain variable domain of TCR clone 356208 (TRAV13-1, TRAJ20)
CAARPGSNDYTLSF

SEQ ID NO: 712416 - protein, 13 aa, Homo sapiens
  CDR3 for beta chain variable domain of TCR clone 356208 (TRBV6-6, TRBJ2-7)
CASSSSGSYEQYF

SEQ ID NO: 712417 - protein, 13 aa, Homo sapiens
  CDR3 for alpha chain variable domain of TCR clone 356209 (TRAV16, TRAJ28)
CAPTGAGSYQLTF

SEQ ID NO: 712418 - protein, 15 aa, Homo sapiens
  CDR3 for beta chain variable domain of TCR clone 356209 (TRBV7-3, TRBJ2-2)
CASSETGQGTGELFF

SEQ ID NO: 712419 - protein, 14 aa, Homo sapiens
  CDR3 for alpha chain variable domain of TCR clone 356210 (TRAV13-1, TRAJ4)
CAATLPSGYNKLIF

SEQ ID NO: 712420 - protein, 14 aa, Homo sapiens
  CDR3 for beta chain variable domain of TCR clone 356210 (TRBV19, TRBJ2-1)
CTSPTFVLSGEQFF

SEQ ID NO: 712421 - protein, 14 aa, Homo sapiens
  CDR3 for alpha chain variable domain of TCR clone 356211 (TRAV12-3, TRAJ12)
CAMSRMDSSYKLIF

SEQ ID NO: 712422 - protein, 14 aa, Homo sapiens
  CDR3 for beta chain variable domain of TCR clone 356211 (TRBV20-1, TRBJ1-4)
CSARSGQSKEKLFF

SEQ ID NO: 712423 - protein, 14 aa, Homo sapiens
  CDR3 for alpha chain variable domain of TCR clone 356212 (TRAV4, TRAJ9)
CLVGSGTGGFKTIF

SEQ ID NO: 712424 - protein, 14 aa, Homo sapiens
  CDR3 for beta chain variable domain of TCR clone 356212 (TRBV7-9, TRBJ2-4)
CASSLARGGNIQYF

SEQ ID NO: 712425 - protein, 14 aa, Homo sapiens
  CDR3 for alpha chain variable domain of TCR clone 356213 (TRAV1-2, TRAJ16)
CAVNRFSDGRKLLF

SEQ ID NO: 712426 - protein, 13 aa, Homo sapiens
  CDR3 for beta chain variable domain of TCR clone 356213 (TRBV9, TRBJ2-1)
CASSPSGGSEQFF

SEQ ID NO: 712427 - protein, 12 aa, Homo sapiens
  CDR3 for alpha chain variable domain of TCR clone 356214 (TRAV17, TRAJ30)
CATDARDDKIIF

SEQ ID NO: 712428 - protein, 14 aa, Homo sapiens
  CDR3 for beta chain variable domain of TCR clone 356214 (TRBV4-1, TRBJ2-2)
CASSQAVNTGELFF

SEQ ID NO: 712429 - protein, 16 aa, Homo sapiens
  CDR3 for alpha chain variable domain of TCR clone 356215 (TRAV3, TRAJ4)
CAVRPSPSGGYNKLIF

SEQ ID NO: 712430 - protein, 12 aa, Homo sapiens
  CDR3 for beta chain variable domain of TCR clone 356215 (TRBV7-9, TRBJ2-7)
CASSQGVYEQYV

SEQ ID NO: 712431 - protein, 15 aa, Homo sapiens
  CDR3 for alpha chain variable domain of TCR clone 356216 (TRAV12-3, TRAJ11)
CAMSEENSGYSTLTF

SEQ ID NO: 712432 - protein, 14 aa, Homo sapiens
  CDR3 for beta chain variable domain of TCR clone 356216 (TRBV11-2, TRBJ2-3)
CASSSIASTDTQYF

SEQ ID NO: 712433 - protein, 12 aa, Homo sapiens
  CDR3 for alpha chain variable domain of TCR clone 356217 (TRAV27, TRAJ20)
CAENLGDYKLSF

SEQ ID NO: 712434 - protein, 15 aa, Homo sapiens
  CDR3 for beta chain variable domain of TCR clone 356217 (TRBV4-1, TRBJ2-7)
CASSQQGQGFDEQYF

SEQ ID NO: 712435 - protein, 15 aa, Homo sapiens
  CDR3 for alpha chain variable domain of TCR clone 356218 (TRAV3, TRAJ47)
CAARDIGEYGNKLVF

SEQ ID NO: 712436 - protein, 16 aa, Homo sapiens
  CDR3 for beta chain variable domain of TCR clone 356218 (TRBV5-7, TRBJ2-7)
CASSSPGGRTPYEQYF

SEQ ID NO: 712437 - protein, 13 aa, Homo sapiens
  CDR3 for alpha chain variable domain of TCR clone 356219 (TRAV17, TRAJ36)
CAPDQTGANNLFF

SEQ ID NO: 712438 - protein, 15 aa, Homo sapiens
  CDR3 for beta chain variable domain of TCR clone 356219 (TRBV28, TRBJ1-5)
CASSDQVYSNQPQHF

SEQ ID NO: 712439 - protein, 13 aa, Homo sapiens
  CDR3 for alpha chain variable domain of TCR clone 356220 (TRAV12-1, TRAJ40)
CVVPTSGTYKYIF

SEQ ID NO: 712440 - protein, 15 aa, Homo sapiens
  CDR3 for beta chain variable domain of TCR clone 356220 (TRBV5-1, TRBJ2-1)
CASSPPRAPYNEQFF

SEQ ID NO: 712441 - protein, 17 aa, Homo sapiens
  CDR3 for alpha chain variable domain of TCR clone 356221 (TRAV8-6, TRAJ58)
CAVSSWVGETSGSRLTF

SEQ ID NO: 712442 - protein, 19 aa, Homo sapiens
  CDR3 for beta chain variable domain of TCR clone 356221 (TRBV2, TRBJ2-7)
CASRPPGGALRAVLRAGHQ

SEQ ID NO: 712443 - protein, 14 aa, Homo sapiens
  CDR3 for alpha chain variable domain of TCR clone 356222 (TRAV1-2, TRAJ16)
CAVNRFSGGQKLLF

SEQ ID NO: 712444 - protein, 11 aa, Homo sapiens
  CDR3 for beta chain variable domain of TCR clone 356222 (TRBV19, TRBJ2-5)
CASSIKETQYF

SEQ ID NO: 712445 - protein, 15 aa, Homo sapiens
  CDR3 for alpha chain variable domain of TCR clone 356223 (TRAV12-1, TRAJ9)
CVVSFGYTGGFKTIF

SEQ ID NO: 712446 - protein, 12 aa, Homo sapiens
  CDR3 for beta chain variable domain of TCR clone 356223 (TRBV12-4, TRBJ2-7)
CASSLGGYEQYF

SEQ ID NO: 712447 - protein, 16 aa, Homo sapiens
  CDR3 for alpha chain variable domain of TCR clone 356224 (TRAV26-1, TRAJ33)
CIVPFWGEDSNYQLIW

SEQ ID NO: 712448 - protein, 13 aa, Homo sapiens
  CDR3 for beta chain variable domain of TCR clone 356224 (TRBV4-1, TRBJ2-2)
CASSQENTGELFF

SEQ ID NO: 712449 - protein, 13 aa, Homo sapiens
  CDR3 for alpha chain variable domain of TCR clone 356225 (TRAV12-1, TRAJ22)
CVVYSGSARQLTF

SEQ ID NO: 712450 - protein, 13 aa, Homo sapiens
  CDR3 for beta chain variable domain of TCR clone 356225 (TRBV3-1, TRBJ2-2)
CASLARGSGELFF

SEQ ID NO: 712451 - protein, 13 aa, Homo sapiens
  CDR3 for alpha chain variable domain of TCR clone 356226 (TRAV17, TRAJ9)
CATDYTVGFKTIF

SEQ ID NO: 712452 - protein, 17 aa, Homo sapiens
  CDR3 for beta chain variable domain of TCR clone 356226 (TRBV4-3, TRBJ2-2)
CASSQDTSARSPGELFF

SEQ ID NO: 712453 - protein, 14 aa, Homo sapiens
  CDR3 for alpha chain variable domain of TCR clone 356227 (TRAV2, TRAJ37)
CAVDFTSNTGKLIF

SEQ ID NO: 712454 - protein, 11 aa, Homo sapiens
  CDR3 for beta chain variable domain of TCR clone 356227 (TRBV11-2, TRBJ2-2)
CASSLPGELFF

SEQ ID NO: 712455 - protein, 13 aa, Homo sapiens
  CDR3 for alpha chain variable domain of TCR clone 356228 (TRAV24, TRAJ44)
CALLTGTASKLTF

SEQ ID NO: 712456 - protein, 16 aa, Homo sapiens
  CDR3 for beta chain variable domain of TCR clone 356228 (TRBV2, TRBJ2-3)
CASSTSVEGVTDTQYC

SEQ ID NO: 712457 - protein, 18 aa, Homo sapiens
  CDR3 for alpha chain variable domain of TCR clone 356229 (TRAV13-1, TRAJ52)
CAASKRSAGGTSYGKLTF

SEQ ID NO: 712458 - protein, 13 aa, Homo sapiens
  CDR3 for beta chain variable domain of TCR clone 356229 (TRBV2, TRBJ1-6)
CASGRGGISPLHF

SEQ ID NO: 712459 - protein, 15 aa, Homo sapiens
  CDR3 for alpha chain variable domain of TCR clone 356230 (TRAV26-1, TRAJ29)
CIVRVEGSGNTPLDF

SEQ ID NO: 712460 - protein, 13 aa, Homo sapiens
  CDR3 for beta chain variable domain of TCR clone 356230 (TRBV28, TRBJ1-1)
CASSKQGWTEAFF

SEQ ID NO: 712461 - protein, 11 aa, Homo sapiens
  CDR3 for alpha chain variable domain of TCR clone 356231 (TRAV3, TRAJ21)
CAMGNFNKFYF

SEQ ID NO: 712462 - protein, 13 aa, Homo sapiens
  CDR3 for beta chain variable domain of TCR clone 356231 (TRBV7-3, TRBJ1-1)
CASSQDWGAEAFF

SEQ ID NO: 712463 - protein, 14 aa, Homo sapiens
  CDR3 for alpha chain variable domain of TCR clone 356232 (TRAV2, TRAJ9)
CAVEDRIGGFKTIF

SEQ ID NO: 712464 - protein, 12 aa, Homo sapiens
  CDR3 for beta chain variable domain of TCR clone 356232 (TRBV12-4, TRBJ2-4)
CASSSSGNIQYF

SEQ ID NO: 712465 - protein, 14 aa, Homo sapiens
  CDR3 for alpha chain variable domain of TCR clone 356233 (TRAV12-3, TRAJ10)
SHLPLTGGGNKLTF

SEQ ID NO: 712466 - protein, 15 aa, Homo sapiens
  CDR3 for beta chain variable domain of TCR clone 356233 (TRBV6-6, TRBJ1-5)
CARSSIQGTNQPQHF

SEQ ID NO: 712467 - protein, 15 aa, Homo sapiens
  CDR3 for alpha chain variable domain of TCR clone 356234 (TRAV3, TRAJ22)
CAVRDRGGSARPLTF

SEQ ID NO: 712468 - protein, 17 aa, Homo sapiens
  CDR3 for beta chain variable domain of TCR clone 356234 (TRBV11-2, TRBJ2-1)
CASSLYPPGVEYNEQFF

SEQ ID NO: 712469 - protein, 12 aa, Homo sapiens
  CDR3 for alpha chain variable domain of TCR clone 356235 (TRAV3, TRAJ27)
CAVRDKPGKSTF

SEQ ID NO: 712470 - protein, 14 aa, Homo sapiens
  CDR3 for beta chain variable domain of TCR clone 356235 (TRBV5-1, TRBJ1-2)
CASSVDSTNYGYTF

SEQ ID NO: 712471 - protein, 13 aa, Homo sapiens
  CDR3 for alpha chain variable domain of TCR clone 356236 (TRAV2, TRAJ15)
CAVASQAGTALIF

SEQ ID NO: 712472 - protein, 18 aa, Homo sapiens
  CDR3 for beta chain variable domain of TCR clone 356236 (TRBV7-7, TRBJ2-1)
CASSLALTSGRSYNEQFF

SEQ ID NO: 712473 - protein, 14 aa, Homo sapiens
  CDR3 for alpha chain variable domain of TCR clone 356237 (TRAV3, TRAJ34)
CAVRAPGNTDKPNF

SEQ ID NO: 712474 - protein, 17 aa, Homo sapiens
  CDR3 for beta chain variable domain of TCR clone 356237 (TRBV20-1, TRBJ2-7)
CSAVPGLARGISYEQYF

SEQ ID NO: 712475 - protein, 13 aa, Homo sapiens
  CDR3 for alpha chain variable domain of TCR clone 356238 (TRAV27, TRAJ29)
CAGAHSGKTPLVF

SEQ ID NO: 712476 - protein, 14 aa, Homo sapiens
  CDR3 for beta chain variable domain of TCR clone 356238 (TRBV7-9, TRBJ2-7)
CASSIGQGACEQYV

SEQ ID NO: 712477 - protein, 12 aa, Homo sapiens
  CDR3 for alpha chain variable domain of TCR clone 356239 (TRAV12-3, TRAJ17)
CAMTLTGNKLTF

SEQ ID NO: 712478 - protein, 16 aa, Homo sapiens
  CDR3 for beta chain variable domain of TCR clone 356239 (TRBV19, TRBJ2-2)
CASRSPGTGATGGLFF

SEQ ID NO: 712479 - protein, 21 aa, Homo sapiens
  CDR3 for alpha chain variable domain of TCR clone 356240 (TRAV1-1, TRAJ6)
CILLLRCERLERTGGSYIPTF

SEQ ID NO: 712480 - protein, 13 aa, Homo sapiens
  CDR3 for beta chain variable domain of TCR clone 356240 (TRBV10-2, TRBJ2-7)
CASGASGGYEQYF

SEQ ID NO: 712481 - protein, 14 aa, Homo sapiens
  CDR3 for alpha chain variable domain of TCR clone 356241 (TRAV8-2, TRAJ5)
CVVDMDTGRRALTF

SEQ ID NO: 712482 - protein, 15 aa, Homo sapiens
  CDR3 for beta chain variable domain of TCR clone 356241 (TRBV5-7, TRBJ2-1)
CASSYISGRGNEQVF

SEQ ID NO: 712483 - protein, 14 aa, Homo sapiens
  CDR3 for alpha chain variable domain of TCR clone 356242 (TRAV1-2, TRAJ8)
CAVREDTGFQKLVF

SEQ ID NO: 712484 - protein, 15 aa, Homo sapiens
  CDR3 for beta chain variable domain of TCR clone 356242 (TRBV11-2, TRBJ2-5)
CASSLASYSGETQYF

SEQ ID NO: 712485 - protein, 14 aa, Homo sapiens
  CDR3 for alpha chain variable domain of TCR clone 356243 (TRAV12-3, TRAJ10)
SHLPLTGGGNKLTF

SEQ ID NO: 712486 - protein, 15 aa, Homo sapiens
  CDR3 for beta chain variable domain of TCR clone 356243 (TRBV15, TRBJ2-1)
CATSRDLGSYNEQFF

SEQ ID NO: 712487 - protein, 11 aa, Homo sapiens
  CDR3 for alpha chain variable domain of TCR clone 356244 (TRAV35, TRAJ34)
CWARNTDKLIY

SEQ ID NO: 712488 - protein, 13 aa, Homo sapiens
  CDR3 for beta chain variable domain of TCR clone 356244 (TRBV19, TRBJ2-7)
CASSIDRTYEQYF

SEQ ID NO: 712489 - protein, 15 aa, Homo sapiens
  CDR3 for alpha chain variable domain of TCR clone 356245 (TRAV1-2, TRAJ38)
CAVSENAGNNRKLLW

SEQ ID NO: 712490 - protein, 16 aa, Homo sapiens
  CDR3 for beta chain variable domain of TCR clone 356245 (TRBV4-1, TRBJ2-7)
CASSLTAGQATYEQYF

SEQ ID NO: 712491 - protein, 12 aa, Homo sapiens
  CDR3 for alpha chain variable domain of TCR clone 356246 (TRAV17, TRAJ53)
CATEGSNYRLTF

SEQ ID NO: 712492 - protein, 19 aa, Homo sapiens
  CDR3 for beta chain variable domain of TCR clone 356246 (TRBV5-1, TRBJ2-3)
CASSLWTSGGITTPDTQYF

SEQ ID NO: 712493 - protein, 19 aa, Homo sapiens
  CDR3 for alpha chain variable domain of TCR clone 356247 (TRAV1-2, TRAJ26)
CLLPLCCERPDNYGQNVVF

SEQ ID NO: 712494 - protein, 11 aa, Homo sapiens
  CDR3 for beta chain variable domain of TCR clone 356247 (TRBV29-1, TRBJ2-5)
CSEDRTGTQYF

SEQ ID NO: 712495 - protein, 13 aa, Homo sapiens
  CDR3 for alpha chain variable domain of TCR clone 356248 (TRAV3, TRAJ21)
CAVREPDFNKFYF

SEQ ID NO: 712496 - protein, 13 aa, Homo sapiens
  CDR3 for beta chain variable domain of TCR clone 356248 (TRBV9, TRBJ2-1)
CASSPSGGNEQYF

SEQ ID NO: 712497 - protein, 13 aa, Homo sapiens
  CDR3 for alpha chain variable domain of TCR clone 356249 (TRAV26-2, TRAJ43)
CILRAVNNNDMRF

SEQ ID NO: 712498 - protein, 15 aa, Homo sapiens
  CDR3 for beta chain variable domain of TCR clone 356249 (TRBV4-1, TRBJ1-4)
CASSDTGGTNEKLFF

SEQ ID NO: 712499 - protein, 15 aa, Homo sapiens
  CDR3 for alpha chain variable domain of TCR clone 356250 (TRAV8-4, TRAJ3)
CAVSDPYSSASKIIF

SEQ ID NO: 712500 - protein, 14 aa, Homo sapiens
  CDR3 for beta chain variable domain of TCR clone 356250 (TRBV11-2, TRBJ1-5)
CASSLDRGRQPQHF

SEQ ID NO: 712501 - protein, 12 aa, Homo sapiens
  CDR3 for alpha chain variable domain of TCR clone 356251 (TRAV13-2, TRAJ23)
CAERHRGGKLIF

SEQ ID NO: 712502 - protein, 15 aa, Homo sapiens
  CDR3 for beta chain variable domain of TCR clone 356251 (TRBV14, TRBJ2-1)
CASSNGGGSSNEQFF

SEQ ID NO: 712503 - protein, 13 aa, Homo sapiens
  CDR3 for alpha chain variable domain of TCR clone 356252 (TRAV12-1, TRAJ26)
CVVRRNYGQNFVF

SEQ ID NO: 712504 - protein, 14 aa, Homo sapiens
  CDR3 for beta chain variable domain of TCR clone 356252 (TRBV20-1, TRBJ2-7)
CSAKRGRSSYEQYF

SEQ ID NO: 712505 - protein, 16 aa, Homo sapiens
  CDR3 for alpha chain variable domain of TCR clone 356253 (TRAV1-2, TRAJ10)
CAVRGVLTGGGNKLTF

SEQ ID NO: 712506 - protein, 16 aa, Homo sapiens
  CDR3 for beta chain variable domain of TCR clone 356253 (TRBV2, TRBJ1-1)
CASSPTLGGASTEAFF

SEQ ID NO: 712507 - protein, 16 aa, Homo sapiens
  CDR3 for alpha chain variable domain of TCR clone 356254 (TRAV3, TRAJ5)
CAVRNLMDTGRRELTF

SEQ ID NO: 712508 - protein, 16 aa, Homo sapiens
  CDR3 for beta chain variable domain of TCR clone 356254 (TRBV12-5, TRBJ2-5)
CASGPRTNGNQETQYF

SEQ ID NO: 712509 - protein, 16 aa, Homo sapiens
  CDR3 for alpha chain variable domain of TCR clone 356255 (TRAV30, TRAJ57)
CDTGWAPQGGSEKLVF

SEQ ID NO: 712510 - protein, 14 aa, Homo sapiens
  CDR3 for beta chain variable domain of TCR clone 356255 (TRBV18, TRBJ1-1)
CASSPGFQGVEAFF

SEQ ID NO: 712511 - protein, 13 aa, Homo sapiens
  CDR3 for alpha chain variable domain of TCR clone 356256 (TRAV27, TRAJ41)
CAGEGNSGYTLNF

SEQ ID NO: 712512 - protein, 16 aa, Homo sapiens
  CDR3 for beta chain variable domain of TCR clone 356256 (TRBV29-1, TRBJ2-7)
CSVEVVGTSGSYEQYF

SEQ ID NO: 712513 - protein, 14 aa, Homo sapiens
  CDR3 for alpha chain variable domain of TCR clone 356257 (TRAV12-1, TRAJ12)
CVVTRVDSSYKLIF

SEQ ID NO: 712514 - protein, 13 aa, Homo sapiens
  CDR3 for beta chain variable domain of TCR clone 356257 (TRBV20-1, TRBJ1-1)
CSARGGGNTEAFF

SEQ ID NO: 712515 - protein, 18 aa, Homo sapiens
  CDR3 for alpha chain variable domain of TCR clone 356258 (TRAV21, TRAJ13)
CAVPRSFWGLPESYLCNW

SEQ ID NO: 712516 - protein, 15 aa, Homo sapiens
  CDR3 for beta chain variable domain of TCR clone 356258 (TRBV20-1, TRBJ2-7)
CSARDRVSGMDEQYF

SEQ ID NO: 712517 - protein, 12 aa, Homo sapiens
  CDR3 for alpha chain variable domain of TCR clone 356259 (TRAV8-3, TRAJ20)
CAVGANDYKPSF

SEQ ID NO: 712518 - protein, 14 aa, Homo sapiens
  CDR3 for beta chain variable domain of TCR clone 356259 (TRBV7-2, TRBJ2-7)
CASSLDPGPYEQYF

SEQ ID NO: 712519 - protein, 16 aa, Homo sapiens
  CDR3 for alpha chain variable domain of TCR clone 356260 (TRAV30, TRAJ24)
CGTEIVDADSWGNFQF

SEQ ID NO: 712520 - protein, 14 aa, Homo sapiens
  CDR3 for beta chain variable domain of TCR clone 356260 (TRBV7-9, TRBJ2-4)
CASSLAMGGNIQYF

SEQ ID NO: 712521 - protein, 14 aa, Homo sapiens
  CDR3 for alpha chain variable domain of TCR clone 356261 (TRAV8-3, TRAJ4)
CAVGASGGYNKLIF

SEQ ID NO: 712522 - protein, 14 aa, Homo sapiens
  CDR3 for beta chain variable domain of TCR clone 356261 (TRBV19, TRBJ1-4)
CASAIEAEGEKLFF

SEQ ID NO: 712523 - protein, 12 aa, Homo sapiens
  CDR3 for alpha chain variable domain of TCR clone 356262 (TRAV1-1, TRAJ8)
CAGGTGFQKLVF

SEQ ID NO: 712524 - protein, 15 aa, Homo sapiens
  CDR3 for beta chain variable domain of TCR clone 356262 (TRBV7-9, TRBJ1-4)
FACSRTGGFNEKLFF

SEQ ID NO: 712525 - protein, 11 aa, Homo sapiens
  CDR3 for alpha chain variable domain of TCR clone 356263 (TRAV8-6, TRAJ34)
CAVWNTDNLIF

SEQ ID NO: 712526 - protein, 16 aa, Homo sapiens
  CDR3 for beta chain variable domain of TCR clone 356263 (TRBV5-1, TRBJ2-7)
CASSYASTSPGGEQYF

SEQ ID NO: 712527 - protein, 15 aa, Homo sapiens
  CDR3 for alpha chain variable domain of TCR clone 356264 (TRAV12-2, TRAJ53)
CAVNGWGGSNYKLTF

SEQ ID NO: 712528 - protein, 15 aa, Homo sapiens
  CDR3 for beta chain variable domain of TCR clone 356264 (TRBV6-3, TRBJ2-7)
CASSSPGTVFYEQYF

SEQ ID NO: 712529 - protein, 17 aa, Homo sapiens
  CDR3 for alpha chain variable domain of TCR clone 356265 (TRAV3, TRAJ42)
CAVRDRDYGGSQGNLIF

SEQ ID NO: 712530 - protein, 12 aa, Homo sapiens
  CDR3 for beta chain variable domain of TCR clone 356265 (TRBV11-2, TRBJ2-1)
CASSPRNNEQFF

SEQ ID NO: 712531 - protein, 13 aa, Homo sapiens
  CDR3 for alpha chain variable domain of TCR clone 356266 (TRAV1-2, TRAJ36)
CAVDQTGANNLFF

SEQ ID NO: 712532 - protein, 12 aa, Homo sapiens
  CDR3 for beta chain variable domain of TCR clone 356266 (TRBV19, TRBJ1-1)
CASSTTGIEAFF

SEQ ID NO: 712533 - protein, 15 aa, Homo sapiens
  CDR3 for alpha chain variable domain of TCR clone 356267 (TRAV26-1, TRAJ22)
CIVRVSFLFCKATDL

SEQ ID NO: 712534 - protein, 13 aa, Homo sapiens
  CDR3 for beta chain variable domain of TCR clone 356267 (TRBV7-9, TRBJ1-2)
CASSLKQTYGYTF

SEQ ID NO: 712535 - protein, 15 aa, Homo sapiens
  CDR3 for alpha chain variable domain of TCR clone 356268 (TRAV25, TRAJ52)
FAGTSGGTSYGKLTF

SEQ ID NO: 712536 - protein, 13 aa, Homo sapiens
  CDR3 for beta chain variable domain of TCR clone 356268 (TRBV6-5, TRBJ2-5)
CASSPQGGETQYF

SEQ ID NO: 712537 - protein, 11 aa, Homo sapiens
  CDR3 for alpha chain variable domain of TCR clone 356269 (TRAV12-1, TRAJ33)
CVVNMNYQLIW

SEQ ID NO: 712538 - protein, 15 aa, Homo sapiens
  CDR3 for beta chain variable domain of TCR clone 356269 (TRBV6-1, TRBJ2-3)
CASSERGGITDTQYF

SEQ ID NO: 712539 - protein, 12 aa, Homo sapiens
  CDR3 for alpha chain variable domain of TCR clone 356270 (TRAV3, TRAJ26)
CAVRDYGQNFFF

SEQ ID NO: 712540 - protein, 16 aa, Homo sapiens
  CDR3 for beta chain variable domain of TCR clone 356270 (TRBV11-2, TRBJ1-2)
CAGSPSGREANYGYTF

SEQ ID NO: 712541 - protein, 12 aa, Homo sapiens
  CDR3 for alpha chain variable domain of TCR clone 356271 (TRAV12-2, TRAJ31)
CAVNTPDARLMF

SEQ ID NO: 712542 - protein, 15 aa, Homo sapiens
  CDR3 for beta chain variable domain of TCR clone 356271 (TRBV9, TRBJ1-6)
CAGSVAGTGDSPLHF

SEQ ID NO: 712543 - protein, 14 aa, Homo sapiens
  CDR3 for alpha chain variable domain of TCR clone 356272 (TRAV38-1, TRAJ40)
CALRPTSGTYKYIF

SEQ ID NO: 712544 - protein, 14 aa, Homo sapiens
  CDR3 for beta chain variable domain of TCR clone 356272 (TRBV25-1, TRBJ1-1)
CASTHLGGTAEAFF

SEQ ID NO: 712545 - protein, 13 aa, Homo sapiens
  CDR3 for alpha chain variable domain of TCR clone 356273 (TRAV3, TRAJ27)
CAVRPLGAGTSTF

SEQ ID NO: 712546 - protein, 15 aa, Homo sapiens
  CDR3 for beta chain variable domain of TCR clone 356273 (TRBV7-2, TRBJ2-7)
CASSLSSGRTYEQYF

SEQ ID NO: 712547 - protein, 12 aa, Homo sapiens
  CDR3 for alpha chain variable domain of TCR clone 356274 (TRAV12-3, TRAJ17)
CAMTLTGNQLTF

SEQ ID NO: 712548 - protein, 15 aa, Homo sapiens
  CDR3 for beta chain variable domain of TCR clone 356274 (TRBV11-3, TRBJ2-7)
CASSPGPASSYEQYF

SEQ ID NO: 712549 - protein, 14 aa, Homo sapiens
  CDR3 for alpha chain variable domain of TCR clone 356275 (TRAV12-3, TRAJ33)
CAMSEEDSNYQLIW

SEQ ID NO: 712550 - protein, 18 aa, Homo sapiens
  CDR3 for beta chain variable domain of TCR clone 356275 (TRBV24-1, TRBJ2-1)
CATSDLMFLGRGVHEQFF

SEQ ID NO: 712551 - protein, 12 aa, Homo sapiens
  CDR3 for alpha chain variable domain of TCR clone 356276 (TRAV17, TRAJ39)
CATGAAGNMLTF

SEQ ID NO: 712552 - protein, 18 aa, Homo sapiens
  CDR3 for beta chain variable domain of TCR clone 356276 (TRBV19, TRBJ1-5)
CASSKGQVSIHSNQPQHF

SEQ ID NO: 712553 - protein, 23 aa, Homo sapiens
  CDR3 for alpha chain variable domain of TCR clone 356277 (TRAV8-3, TRAJ38)
CAVGASNAGNNHIQNPDPAIYQL

SEQ ID NO: 712554 - protein, 15 aa, Homo sapiens
  CDR3 for beta chain variable domain of TCR clone 356277 (TRBV11-3, TRBJ1-3)
CASSLFGPSGNTIYF

SEQ ID NO: 712555 - protein, 16 aa, Homo sapiens
  CDR3 for alpha chain variable domain of TCR clone 356278 (TRAV12-2, TRAJ52)
CRLANAGGTNYGKLTF

SEQ ID NO: 712556 - protein, 13 aa, Homo sapiens
  CDR3 for beta chain variable domain of TCR clone 356278 (TRBV10-3, TRBJ2-7)
CASKLAVNYEQYF

SEQ ID NO: 712557 - protein, 13 aa, Homo sapiens
  CDR3 for alpha chain variable domain of TCR clone 356279 (TRAV12-1, TRAJ40)
CVVPTSGTYKYIF

SEQ ID NO: 712558 - protein, 19 aa, Homo sapiens
  CDR3 for beta chain variable domain of TCR clone 356279 (TRBV19, TRBJ2-5)
CASSIGQVTDVFLGETQYF

SEQ ID NO: 712559 - protein, 16 aa, Homo sapiens
  CDR3 for alpha chain variable domain of TCR clone 356280 (TRAV35, TRAJ28)
CAGQRYSGAGSYQLTF

SEQ ID NO: 712560 - protein, 14 aa, Homo sapiens
  CDR3 for beta chain variable domain of TCR clone 356280 (TRBV12-5, TRBJ2-5)
CASGSRTHQETQYF

SEQ ID NO: 712561 - protein, 12 aa, Homo sapiens
  CDR3 for alpha chain variable domain of TCR clone 356281 (TRAV8-6, TRAJ43)
CAVSNNNNDMRF

SEQ ID NO: 712562 - protein, 15 aa, Homo sapiens
  CDR3 for beta chain variable domain of TCR clone 356281 (TRBV7-3, TRBJ2-6)
CASSLGGSGVNVLTF

SEQ ID NO: 712563 - protein, 12 aa, Homo sapiens
  CDR3 for alpha chain variable domain of TCR clone 356282 (TRAV12-3, TRAJ17)
CAMTLTGNKLTF

SEQ ID NO: 712564 - protein, 13 aa, Homo sapiens
  CDR3 for beta chain variable domain of TCR clone 356282 (TRBV10-3, TRBJ2-7)
FASKLAVNYEQYF

SEQ ID NO: 712565 - protein, 14 aa, Homo sapiens
  CDR3 for alpha chain variable domain of TCR clone 356283 (TRAV14/DV4, TRAJ34)
CAMREGRPHRQAHL

SEQ ID NO: 712566 - protein, 17 aa, Homo sapiens
  CDR3 for beta chain variable domain of TCR clone 356283 (TRBV11-2, TRBJ2-1)
CASSLYPPGVEYNEQFF

SEQ ID NO: 712567 - protein, 15 aa, Homo sapiens
  CDR3 for alpha chain variable domain of TCR clone 356284 (TRAV3, TRAJ22)
CAVRDRGGSARQLTF

SEQ ID NO: 712568 - protein, 15 aa, Homo sapiens
  CDR3 for beta chain variable domain of TCR clone 356284 (TRBV20-1, TRBJ1-1)
SSASRGVTGNTEAFF

SEQ ID NO: 712569 - protein, 10 aa, Homo sapiens
  CDR3 for alpha chain variable domain of TCR clone 356285 (TRAV17, TRAJ45)
TGGGADGLTF

SEQ ID NO: 712570 - protein, 14 aa, Homo sapiens
  CDR3 for beta chain variable domain of TCR clone 356285 (TRBV7-2, TRBJ2-5)
CASSFTQGQETQYF

SEQ ID NO: 712571 - protein, 12 aa, Homo sapiens
  CDR3 for alpha chain variable domain of TCR clone 356286 (TRAV13-2, TRAJ23)
CAERHRGGTLIF

SEQ ID NO: 712572 - protein, 14 aa, Homo sapiens
  CDR3 for beta chain variable domain of TCR clone 356286 (TRBV6-1, TRBJ1-3)
CASVQGGGGNTIYF

SEQ ID NO: 712573 - protein, 13 aa, Homo sapiens
  CDR3 for alpha chain variable domain of TCR clone 356287 (TRAV2, TRAJ24)
CAVSTDSWGKLQF

SEQ ID NO: 712574 - protein, 14 aa, Homo sapiens
  CDR3 for beta chain variable domain of TCR clone 356287 (TRBV6-1, TRBJ1-3)
CASVQGGGGNTIYF

SEQ ID NO: 712575 - protein, 16 aa, Homo sapiens
  CDR3 for alpha chain variable domain of TCR clone 356288 (TRAV1-2, TRAJ10)
CAVRGVLTGGGNKLTF

SEQ ID NO: 712576 - protein, 13 aa, Homo sapiens
  CDR3 for beta chain variable domain of TCR clone 356288 (TRBV12-4, TRBJ2-3)
CANSSPLGGTQYF

SEQ ID NO: 712577 - protein, 18 aa, Homo sapiens
  CDR3 for alpha chain variable domain of TCR clone 356289 (TRAV12-3, TRAJ52)
FAMCVGGAGGTSYGKLTF

SEQ ID NO: 712578 - protein, 15 aa, Homo sapiens
  CDR3 for beta chain variable domain of TCR clone 356289 (TRBV27, TRBJ1-6)
CASSFDRGLGSPLHF

SEQ ID NO: 712579 - protein, 16 aa, Homo sapiens
  CDR3 for alpha chain variable domain of TCR clone 356290 (TRAV3, TRAJ27)
CAVRDPQGTNAGKSTF

SEQ ID NO: 712580 - protein, 17 aa, Homo sapiens
  CDR3 for beta chain variable domain of TCR clone 356290 (TRBV4-1, TRBJ2-7)
CASSQGRGLQTSYEQCF

SEQ ID NO: 712581 - protein, 11 aa, Homo sapiens
  CDR3 for alpha chain variable domain of TCR clone 356291 (TRAV12-3, TRAJ43)
CAMSVSNDIRF

SEQ ID NO: 712582 - protein, 13 aa, Homo sapiens
  CDR3 for beta chain variable domain of TCR clone 356291 (TRBV20-1, TRBJ1-1)
CSDPLGGGTEAFF

SEQ ID NO: 712583 - protein, 18 aa, Homo sapiens
  CDR3 for alpha chain variable domain of TCR clone 356292 (TRAV13-1, TRAJ52)
CAASKRSAGGTSYGKLTF

SEQ ID NO: 712584 - protein, 15 aa, Homo sapiens
  CDR3 for beta chain variable domain of TCR clone 356292 (TRBV4-3, TRBJ2-2)
CASSQGQGGTGELFF

SEQ ID NO: 712585 - protein, 12 aa, Homo sapiens
  CDR3 for alpha chain variable domain of TCR clone 356293 (TRAV12-2, TRAJ43)
CAVNVNNNDMCF

SEQ ID NO: 712586 - protein, 14 aa, Homo sapiens
  CDR3 for beta chain variable domain of TCR clone 356293 (TRBV12-5, TRBJ2-5)
CASGSRTHQETQYF

SEQ ID NO: 712587 - protein, 15 aa, Homo sapiens
  CDR3 for alpha chain variable domain of TCR clone 356294 (TRAV8-2, TRAJ16)
CVVSDRFSDGQKLLF

SEQ ID NO: 712588 - protein, 14 aa, Homo sapiens
  CDR3 for beta chain variable domain of TCR clone 356294 (TRBV7-3, TRBJ1-1)
CASSLGTGYTEAFF

SEQ ID NO: 712589 - protein, 12 aa, Homo sapiens
  CDR3 for alpha chain variable domain of TCR clone 356295 (TRAV12-2, TRAJ9)
CAVNTGGFKTIF

SEQ ID NO: 712590 - protein, 15 aa, Homo sapiens
  CDR3 for beta chain variable domain of TCR clone 356295 (TRBV27, TRBJ2-1)
CASSNGGGSSNEQFF

SEQ ID NO: 712591 - protein, 14 aa, Homo sapiens
  CDR3 for alpha chain variable domain of TCR clone 356296 (TRAV1-2, TRAJ8)
CAVREDTGFQKLVF

SEQ ID NO: 712592 - protein, 13 aa, Homo sapiens
  CDR3 for beta chain variable domain of TCR clone 356296 (TRBV4-2, TRBJ2-2)
CASEERGTGELFF

SEQ ID NO: 712593 - protein, 12 aa, Homo sapiens
  CDR3 for alpha chain variable domain of TCR clone 356297 (TRAV2, TRAJ31)
CAVEDNNARLMF

SEQ ID NO: 712594 - protein, 16 aa, Homo sapiens
  CDR3 for beta chain variable domain of TCR clone 356297 (TRBV10-3, TRBJ2-1)
CAISGVGGGGGGEQLF

SEQ ID NO: 712595 - protein, 14 aa, Homo sapiens
  CDR3 for alpha chain variable domain of TCR clone 356298 (TRAV12-3, TRAJ15)
CAMIPPQAGPALIF

SEQ ID NO: 712596 - protein, 12 aa, Homo sapiens
  CDR3 for beta chain variable domain of TCR clone 356298 (TRBV11-2, TRBJ2-2)
CASSLGGGELFF

SEQ ID NO: 712597 - protein, 16 aa, Homo sapiens
  CDR3 for alpha chain variable domain of TCR clone 356299 (TRAV30, TRAJ24)
CGTEIVDADSWGNFQF

SEQ ID NO: 712598 - protein, 13 aa, Homo sapiens
  CDR3 for beta chain variable domain of TCR clone 356299 (TRBV20-1, TRBJ1-1)
CSARGGGNTEAFF

SEQ ID NO: 712599 - protein, 16 aa, Homo sapiens
  CDR3 for alpha chain variable domain of TCR clone 356300 (TRAV23/DV6, TRAJ9)
CAASIGGNTGGFKTIF

SEQ ID NO: 712600 - protein, 15 aa, Homo sapiens
  CDR3 for beta chain variable domain of TCR clone 356300 (TRBV5-7, TRBJ2-7)
CASSLPGQVFYEQYF

SEQ ID NO: 712601 - protein, 13 aa, Homo sapiens
  CDR3 for alpha chain variable domain of TCR clone 356301 (TRAV13-1, TRAJ5)
CAARVTGRRALTF

SEQ ID NO: 712602 - protein, 15 aa, Homo sapiens
  CDR3 for beta chain variable domain of TCR clone 356301 (TRBV7-9, TRBJ2-7)
CASSTGGGLTYEQYL

SEQ ID NO: 712603 - protein, 14 aa, Homo sapiens
  CDR3 for alpha chain variable domain of TCR clone 356302 (TRAV14/DV4, TRAJ58)
CAMMKETSGSRLTF

SEQ ID NO: 712604 - protein, 12 aa, Homo sapiens
  CDR3 for beta chain variable domain of TCR clone 356302 (TRBV12-4, TRBJ2-1)
CASTYVLNEQFS

SEQ ID NO: 712605 - protein, 15 aa, Homo sapiens
  CDR3 for alpha chain variable domain of TCR clone 356303 (TRAV3, TRAJ40)
CAVRDGTSGTYKYIF

SEQ ID NO: 712606 - protein, 14 aa, Homo sapiens
  CDR3 for beta chain variable domain of TCR clone 356303 (TRBV12-4, TRBJ1-1)
CASSLGTGGTEAFF

SEQ ID NO: 712607 - protein, 14 aa, Homo sapiens
  CDR3 for alpha chain variable domain of TCR clone 356304 (TRAV13-1, TRAJ35)
CATSKGGFGNVLHF

SEQ ID NO: 712608 - protein, 13 aa, Homo sapiens
  CDR3 for beta chain variable domain of TCR clone 356304 (TRBV7-3, TRBJ1-1)
CASSQDWGAEAFF

SEQ ID NO: 712609 - protein, 16 aa, Homo sapiens
  CDR3 for alpha chain variable domain of TCR clone 356305 (TRAV23/DV6, TRAJ6)
CAAAGQDEATYLHLEE

SEQ ID NO: 712610 - protein, 13 aa, Homo sapiens
  CDR3 for beta chain variable domain of TCR clone 356305 (TRBV4-1, TRBJ1-1)
CASSRKMNTEAFF

SEQ ID NO: 712611 - protein, 15 aa, Homo sapiens
  CDR3 for alpha chain variable domain of TCR clone 356306 (TRAV3, TRAJ15)
CAVRPANQAGTALIF

SEQ ID NO: 712612 - protein, 15 aa, Homo sapiens
  CDR3 for beta chain variable domain of TCR clone 356306 (TRBV24-1, TRBJ1-3)
CATSDHGESGNTIYF

SEQ ID NO: 712613 - protein, 16 aa, Homo sapiens
  CDR3 for alpha chain variable domain of TCR clone 356307 (TRAV1-2, TRAJ10)
CAVRGVLTGGGNKLTF

SEQ ID NO: 712614 - protein, 14 aa, Homo sapiens
  CDR3 for beta chain variable domain of TCR clone 356307 (TRBV5-1, TRBJ2-7)
CASSRGESLYEQCF

SEQ ID NO: 712615 - protein, 14 aa, Homo sapiens
  CDR3 for alpha chain variable domain of TCR clone 356308 (TRAV26-1, TRAJ39)
CIVRGSRAGSMLTF

SEQ ID NO: 712616 - protein, 14 aa, Homo sapiens
  CDR3 for beta chain variable domain of TCR clone 356308 (TRBV25-1, TRBJ1-1)
CASTHLGGNTEAFF

SEQ ID NO: 712617 - protein, 17 aa, Homo sapiens
  CDR3 for alpha chain variable domain of TCR clone 356309 (TRAV8-6, TRAJ58)
CAVSSWVGETSGSRLTF

SEQ ID NO: 712618 - protein, 15 aa, Homo sapiens
  CDR3 for beta chain variable domain of TCR clone 356309 (TRBV28, TRBJ1-3)
CASSMGWASGNTIYF

SEQ ID NO: 712619 - protein, 12 aa, Homo sapiens
  CDR3 for alpha chain variable domain of TCR clone 356310 (TRAV27, TRAJ35)
CAGADFGNVLHC

SEQ ID NO: 712620 - protein, 15 aa, Homo sapiens
  CDR3 for beta chain variable domain of TCR clone 356310 (TRBV18, TRBJ2-1)
CASSPPSASYNEQFF

SEQ ID NO: 712621 - protein, 14 aa, Homo sapiens
  CDR3 for alpha chain variable domain of TCR clone 356311 (TRAV1-2, TRAJ16)
CAVNRFSDGQKLLF

SEQ ID NO: 712622 - protein, 16 aa, Homo sapiens
  CDR3 for beta chain variable domain of TCR clone 356311 (TRBV2, TRBJ2-5)
CASSARGLGGRETQYF

SEQ ID NO: 712623 - protein, 14 aa, Homo sapiens
  CDR3 for alpha chain variable domain of TCR clone 356312 (TRAV17, TRAJ16)
CATADFSDGQKLLF

SEQ ID NO: 712624 - protein, 15 aa, Homo sapiens
  CDR3 for beta chain variable domain of TCR clone 356312 (TRBV18, TRBJ2-1)
CASSPPSASYNDQFF

SEQ ID NO: 712625 - protein, 14 aa, Homo sapiens
  CDR3 for alpha chain variable domain of TCR clone 356313 (TRAV12-3, TRAJ10)
SHLPLTGGGNKLTF

SEQ ID NO: 712626 - protein, 13 aa, Homo sapiens
  CDR3 for beta chain variable domain of TCR clone 356313 (TRBV9, TRBJ2-7)
CASSASDSYEQYF

SEQ ID NO: 712627 - protein, 14 aa, Homo sapiens
  CDR3 for alpha chain variable domain of TCR clone 356314 (TRAV3, TRAJ33)
CAVRDMGSNYQLIW

SEQ ID NO: 712628 - protein, 17 aa, Homo sapiens
  CDR3 for beta chain variable domain of TCR clone 356314 (TRBV19, TRBJ2-1)
CASSIWSAQPTHNGQFF

SEQ ID NO: 712629 - protein, 12 aa, Homo sapiens
  CDR3 for alpha chain variable domain of TCR clone 356315 (TRAV8-3, TRAJ20)
CAVDFNDYKLSF

SEQ ID NO: 712630 - protein, 16 aa, Homo sapiens
  CDR3 for beta chain variable domain of TCR clone 356315 (TRBV11-3, TRBJ2-5)
CASSSVVAGSTETQYF

SEQ ID NO: 712631 - protein, 18 aa, Homo sapiens
  CDR3 for alpha chain variable domain of TCR clone 356316 (TRAV8-3, TRAJ27)
CAVGTMQANQPLGMGLRS

SEQ ID NO: 712632 - protein, 13 aa, Homo sapiens
  CDR3 for beta chain variable domain of TCR clone 356316 (TRBV24-1, TRBJ2-2)
CATSETNTGELFF

SEQ ID NO: 712633 - protein, 13 aa, Homo sapiens
  CDR3 for alpha chain variable domain of TCR clone 356317 (TRAV36/DV7, TRAJ37)
CAVFSSNTGKLIF

SEQ ID NO: 712634 - protein, 12 aa, Homo sapiens
  CDR3 for beta chain variable domain of TCR clone 356317 (TRBV12-5, TRBJ2-5)
CASGQGVETQYF

SEQ ID NO: 712635 - protein, 13 aa, Homo sapiens
  CDR3 for alpha chain variable domain of TCR clone 356318 (TRAV16, TRAJ31)
CALSAHNNARFMF

SEQ ID NO: 712636 - protein, 17 aa, Homo sapiens
  CDR3 for beta chain variable domain of TCR clone 356318 (TRBV12-4, TRBJ2-1)
CASSPGLAGGRINEQFF

SEQ ID NO: 712637 - protein, 15 aa, Homo sapiens
  CDR3 for alpha chain variable domain of TCR clone 356319 (TRAV21, TRAJ52)
CAVRGGGTSYGKLTF

SEQ ID NO: 712638 - protein, 14 aa, Homo sapiens
  CDR3 for beta chain variable domain of TCR clone 356319 (TRBV5-4, TRBJ1-1)
CASSLDSRRDEAFF

SEQ ID NO: 712639 - protein, 15 aa, Homo sapiens
  CDR3 for alpha chain variable domain of TCR clone 356320 (TRAV23/DV6, TRAJ47)
CAASIRNGIWKQTGI

SEQ ID NO: 712640 - protein, 13 aa, Homo sapiens
  CDR3 for beta chain variable domain of TCR clone 356320 (TRBV19, TRBJ1-2)
CASSQGQVYGYTF

SEQ ID NO: 712641 - protein, 14 aa, Homo sapiens
  CDR3 for alpha chain variable domain of TCR clone 356321 (TRAV12-2, TRAJ17)
CAVLFKAAGNKLTF

SEQ ID NO: 712642 - protein, 14 aa, Homo sapiens
  CDR3 for beta chain variable domain of TCR clone 356321 (TRBV20-1, TRBJ1-1)
CSARTRIGGTEAFF

SEQ ID NO: 712643 - protein, 13 aa, Homo sapiens
  CDR3 for alpha chain variable domain of TCR clone 356322 (TRAV12-2, TRAJ42)
CAVKRGSQGNLIF

SEQ ID NO: 712644 - protein, 16 aa, Homo sapiens
  CDR3 for beta chain variable domain of TCR clone 356322 (TRBV12-5, TRBJ2-5)
CASGPRTSGNQETQYF

SEQ ID NO: 712645 - protein, 17 aa, Homo sapiens
  CDR3 for alpha chain variable domain of TCR clone 356323 (TRAV9-2, TRAJ45)
CALSGYYSGGGADGLTF

SEQ ID NO: 712646 - protein, 16 aa, Homo sapiens
  CDR3 for beta chain variable domain of TCR clone 356323 (TRBV15, TRBJ2-6)
CATSVNGGFLANVLTF

SEQ ID NO: 712647 - protein, 17 aa, Homo sapiens
  CDR3 for alpha chain variable domain of TCR clone 356324 (TRAV26-1, TRAJ37)
CIVRVITVSSNTGKLIF

SEQ ID NO: 712648 - protein, 12 aa, Homo sapiens
  CDR3 for beta chain variable domain of TCR clone 356324 (TRBV2, TRBJ2-1)
CAYGPPGNEQFF

SEQ ID NO: 712649 - protein, 14 aa, Homo sapiens
  CDR3 for alpha chain variable domain of TCR clone 356325 (TRAV12-3, TRAJ10)
SHLPLTGGGNKLTF

SEQ ID NO: 712650 - protein, 13 aa, Homo sapiens
  CDR3 for beta chain variable domain of TCR clone 356325 (TRBV7-2, TRBJ2-7)
CASSLGGPYEQYF

SEQ ID NO: 712651 - protein, 13 aa, Homo sapiens
  CDR3 for alpha chain variable domain of TCR clone 356326 (TRAV25, TRAJ23)
CAGVNNQGGKLIF

SEQ ID NO: 712652 - protein, 14 aa, Homo sapiens
  CDR3 for beta chain variable domain of TCR clone 356326 (TRBV19, TRBJ2-1)
CASPTFVLSGEQFF

SEQ ID NO: 712653 - protein, 14 aa, Homo sapiens
  CDR3 for alpha chain variable domain of TCR clone 356327 (TRAV1-2, TRAJ16)
CAANRFSDGQKLLF

SEQ ID NO: 712654 - protein, 15 aa, Homo sapiens
  CDR3 for beta chain variable domain of TCR clone 356327 (TRBV9, TRBJ1-6)
CASSVAGTGDSQLHF

SEQ ID NO: 712655 - protein, 13 aa, Homo sapiens
  CDR3 for alpha chain variable domain of TCR clone 356328 (TRAV27, TRAJ17)
CAGAATAGNELTV

SEQ ID NO: 712656 - protein, 15 aa, Homo sapiens
  CDR3 for beta chain variable domain of TCR clone 356328 (TRBV5-1, TRBJ2-3)
CASRNQAGSTDTQYF

SEQ ID NO: 712657 - protein, 14 aa, Homo sapiens
  CDR3 for alpha chain variable domain of TCR clone 356329 (TRAV13-1, TRAJ35)
CAASKGGFGNVLLC

SEQ ID NO: 712658 - protein, 15 aa, Homo sapiens
  CDR3 for beta chain variable domain of TCR clone 356329 (TRBV28, TRBJ2-1)
CASSGLAEVDNEQFF

SEQ ID NO: 712659 - protein, 17 aa, Homo sapiens
  CDR3 for alpha chain variable domain of TCR clone 356330 (TRAV13-1, TRAJ28)
CAASPPYSGAGSYQLTF

SEQ ID NO: 712660 - protein, 14 aa, Homo sapiens
  CDR3 for beta chain variable domain of TCR clone 356330 (TRBV10-3, TRBJ2-5)
CAISERDYQETQYF

SEQ ID NO: 712661 - protein, 12 aa, Homo sapiens
  CDR3 for alpha chain variable domain of TCR clone 356331 (TRAV13-2, TRAJ23)
CAERHRGGTLIF

SEQ ID NO: 712662 - protein, 12 aa, Homo sapiens
  CDR3 for beta chain variable domain of TCR clone 356331 (TRBV29-1, TRBJ2-3)
CSVTGVADTQYF

SEQ ID NO: 712663 - protein, 11 aa, Homo sapiens
  CDR3 for alpha chain variable domain of TCR clone 356332 (TRAV2, TRAJ13)
CASGGYQKVTF

SEQ ID NO: 712664 - protein, 14 aa, Homo sapiens
  CDR3 for beta chain variable domain of TCR clone 356332 (TRBV4-2, TRBJ1-4)
CASSQGATNEKLFF

SEQ ID NO: 712665 - protein, 16 aa, Homo sapiens
  CDR3 for alpha chain variable domain of TCR clone 356333 (TRAV1-1, TRAJ29)
CAVRSTRNSGNTPLVF

SEQ ID NO: 712666 - protein, 14 aa, Homo sapiens
  CDR3 for beta chain variable domain of TCR clone 356333 (TRBV7-8, TRBJ2-3)
CASSLEAGTDTRYF

SEQ ID NO: 712667 - protein, 16 aa, Homo sapiens
  CDR3 for alpha chain variable domain of TCR clone 356334 (TRAV30, TRAJ24)
CGTEIVDADSWGKFQF

SEQ ID NO: 712668 - protein, 16 aa, Homo sapiens
  CDR3 for beta chain variable domain of TCR clone 356334 (TRBV10-3, TRBJ2-5)
CAISPLGQGEAETQYF

SEQ ID NO: 712669 - protein, 14 aa, Homo sapiens
  CDR3 for alpha chain variable domain of TCR clone 356335 (TRAV12-1, TRAJ30)
CVVNIGGRDDKIIF

SEQ ID NO: 712670 - protein, 13 aa, Homo sapiens
  CDR3 for beta chain variable domain of TCR clone 356335 (TRBV12-5, TRBJ2-1)
CASGLGWGNEQFF

SEQ ID NO: 712671 - protein, 15 aa, Homo sapiens
  CDR3 for alpha chain variable domain of TCR clone 356336 (TRAV8-3, TRAJ44)
CAVGAGASTASKLTF

SEQ ID NO: 712672 - protein, 12 aa, Homo sapiens
  CDR3 for beta chain variable domain of TCR clone 356336 (TRBV7-8, TRBJ2-4)
CASSLGGNSQYF

SEQ ID NO: 712673 - protein, 16 aa, Homo sapiens
  CDR3 for alpha chain variable domain of TCR clone 356337 (TRAV12-3, TRAJ50)
CTMRDPMKTSYDKVIF

SEQ ID NO: 712674 - protein, 13 aa, Homo sapiens
  CDR3 for beta chain variable domain of TCR clone 356337 (TRBV4-1, TRBJ2-3)
CASSLDFTDTQYF

SEQ ID NO: 712675 - protein, 16 aa, Homo sapiens
  CDR3 for alpha chain variable domain of TCR clone 356338 (TRAV1-2, TRAJ10)
CAVRGVLTGGGNKLTF

SEQ ID NO: 712676 - protein, 13 aa, Homo sapiens
  CDR3 for beta chain variable domain of TCR clone 356338 (TRBV12-4, TRBJ2-7)
CASSPTETYERYF

SEQ ID NO: 712677 - protein, 23 aa, Homo sapiens
  CDR3 for alpha chain variable domain of TCR clone 356339 (TRAV26-1, TRAJ38)
CIADNAGNNLIQNPDPAVYQLRD

SEQ ID NO: 712678 - protein, 13 aa, Homo sapiens
  CDR3 for beta chain variable domain of TCR clone 356339 (TRBV20-1, TRBJ1-1)
CSARGRGNTEAFF

SEQ ID NO: 712679 - protein, 14 aa, Homo sapiens
  CDR3 for alpha chain variable domain of TCR clone 356340 (TRAV16, TRAJ37)
CALDISGNTGKLIF

SEQ ID NO: 712680 - protein, 15 aa, Homo sapiens
  CDR3 for beta chain variable domain of TCR clone 356340 (TRBV7-9, TRBJ1-6)
CASSSPGRGNSPLHF

SEQ ID NO: 712681 - protein, 15 aa, Homo sapiens
  CDR3 for alpha chain variable domain of TCR clone 356341 (TRAV3, TRAJ36)
CAVRASQTGANNLFF

SEQ ID NO: 712682 - protein, 17 aa, Homo sapiens
  CDR3 for beta chain variable domain of TCR clone 356341 (TRBV15, TRBJ1-1)
CATSRVGGADGDTEAFF

SEQ ID NO: 712683 - protein, 13 aa, Homo sapiens
  CDR3 for alpha chain variable domain of TCR clone 356342 (TRAV12-3, TRAJ57)
CAMVGAGSEKLVF

SEQ ID NO: 712684 - protein, 15 aa, Homo sapiens
  CDR3 for beta chain variable domain of TCR clone 356342 (TRBV7-2, TRBJ1-3)
CASSCGGITGNTIYF

SEQ ID NO: 712685 - protein, 15 aa, Homo sapiens
  CDR3 for alpha chain variable domain of TCR clone 356343 (TRAV25, TRAJ52)
CAGTSGGTSYGKRTF

SEQ ID NO: 712686 - protein, 16 aa, Homo sapiens
  CDR3 for beta chain variable domain of TCR clone 356343 (TRBV15, TRBJ1-2)
CATSRGPRTGGGGYTF

SEQ ID NO: 712687 - protein, 14 aa, Homo sapiens
  CDR3 for alpha chain variable domain of TCR clone 356344 (TRAV17, TRAJ39)
CATDPVRAGNMLTF

SEQ ID NO: 712688 - protein, 20 aa, Homo sapiens
  CDR3 for beta chain variable domain of TCR clone 356344 (TRBV7-8, TRBJ2-2)
CASSHLFPGPTIHITGELFF

SEQ ID NO: 712689 - protein, 16 aa, Homo sapiens
  CDR3 for alpha chain variable domain of TCR clone 356345 (TRAV3, TRAJ18)
CAVRDGRCSTLGRRYF

SEQ ID NO: 712690 - protein, 15 aa, Homo sapiens
  CDR3 for beta chain variable domain of TCR clone 356345 (TRBV7-9, TRBJ1-6)
CASSSPGRGNSPLHF

SEQ ID NO: 712691 - protein, 15 aa, Homo sapiens
  CDR3 for alpha chain variable domain of TCR clone 356346 (TRAV21, TRAJ24)
CAARSSTDSWGKLQF

SEQ ID NO: 712692 - protein, 16 aa, Homo sapiens
  CDR3 for beta chain variable domain of TCR clone 356346 (TRBV2, TRBJ2-1)
CASRPRSGGPYGEQFF

SEQ ID NO: 712693 - protein, 11 aa, Homo sapiens
  CDR3 for alpha chain variable domain of TCR clone 356347 (TRAV12-1, TRAJ3)
CVVNRQQCFQD

SEQ ID NO: 712694 - protein, 12 aa, Homo sapiens
  CDR3 for beta chain variable domain of TCR clone 356347 (TRBV7-8, TRBJ2-7)
CASSLGDREQYF

SEQ ID NO: 712695 - protein, 18 aa, Homo sapiens
  CDR3 for alpha chain variable domain of TCR clone 356348 (TRAV12-3, TRAJ52)
CAMSVGGAGGTSYGKLTF

SEQ ID NO: 712696 - protein, 14 aa, Homo sapiens
  CDR3 for beta chain variable domain of TCR clone 356348 (TRBV2, TRBJ2-1)
CASRTGSSYNEQFF

SEQ ID NO: 712697 - protein, 14 aa, Homo sapiens
  CDR3 for alpha chain variable domain of TCR clone 356349 (TRAV20, TRAJ29)
CAVQAWVGNTPLVF

SEQ ID NO: 712698 - protein, 13 aa, Homo sapiens
  CDR3 for beta chain variable domain of TCR clone 356349 (TRBV7-9, TRBJ1-2)
CASSLKQNYGYTF

SEQ ID NO: 712699 - protein, 13 aa, Homo sapiens
  CDR3 for alpha chain variable domain of TCR clone 356350 (TRAV27, TRAJ56)
CAGLTGANSKLTF

SEQ ID NO: 712700 - protein, 13 aa, Homo sapiens
  CDR3 for beta chain variable domain of TCR clone 356350 (TRBV7-9, TRBJ1-2)
CASSLKQNYGYTF

SEQ ID NO: 712701 - protein, 14 aa, Homo sapiens
  CDR3 for alpha chain variable domain of TCR clone 356351 (TRAV17, TRAJ12)
CATDEKDSSSKLIF

SEQ ID NO: 712702 - protein, 16 aa, Homo sapiens
  CDR3 for beta chain variable domain of TCR clone 356351 (TRBV11-2, TRBJ2-1)
CASSPRLAGVYNEQFF

SEQ ID NO: 712703 - protein, 16 aa, Homo sapiens
  CDR3 for alpha chain variable domain of TCR clone 356352 (TRAV8-2, TRAJ7)
CVVSEGPYYGNNRLAF

SEQ ID NO: 712704 - protein, 14 aa, Homo sapiens
  CDR3 for beta chain variable domain of TCR clone 356352 (TRBV2, TRBJ2-7)
CASSLTSGGYEQYF

SEQ ID NO: 712705 - protein, 15 aa, Homo sapiens
  CDR3 for alpha chain variable domain of TCR clone 356353 (TRAV26-2, TRAJ8)
CTTASNTGANSKLTF

SEQ ID NO: 712706 - protein, 16 aa, Homo sapiens
  CDR3 for beta chain variable domain of TCR clone 356353 (TRBV7-3, TRBJ2-2)
CASSLKRGTLSGELFF

SEQ ID NO: 712707 - protein, 13 aa, Homo sapiens
  CDR3 for alpha chain variable domain of TCR clone 356354 (TRAV8-3, TRAJ43)
CAVVPYNNNDMRF

SEQ ID NO: 712708 - protein, 14 aa, Homo sapiens
  CDR3 for beta chain variable domain of TCR clone 356354 (TRBV4-2, TRBJ1-2)
CASSQDRREGGYTF

SEQ ID NO: 712709 - protein, 11 aa, Homo sapiens
  CDR3 for alpha chain variable domain of TCR clone 356355 (TRAV3, TRAJ21)
CAVGNFNKFYF

SEQ ID NO: 712710 - protein, 15 aa, Homo sapiens
  CDR3 for beta chain variable domain of TCR clone 356355 (TRBV19, TRBJ2-1)
CRSKAGPSSYNEQFF

SEQ ID NO: 712711 - protein, 16 aa, Homo sapiens
  CDR3 for alpha chain variable domain of TCR clone 356356 (TRAV30, TRAJ24)
CGTEIVDADSWGKFQF

SEQ ID NO: 712712 - protein, 18 aa, Homo sapiens
  CDR3 for beta chain variable domain of TCR clone 356356 (TRBV25-1, TRBJ2-2)
CHPSLPGGQGAQTGELFF

SEQ ID NO: 712713 - protein, 16 aa, Homo sapiens
  CDR3 for alpha chain variable domain of TCR clone 356357 (TRAV30, TRAJ24)
CGTEIVDADSWGKFQF

SEQ ID NO: 712714 - protein, 16 aa, Homo sapiens
  CDR3 for beta chain variable domain of TCR clone 356357 (TRBV12-5, TRBJ2-5)
CASGPRTSGNQEAQYF

SEQ ID NO: 712715 - protein, 14 aa, Homo sapiens
  CDR3 for alpha chain variable domain of TCR clone 356358 (TRAV1-2, TRAJ16)
CAVNRFSDGQKLLF

SEQ ID NO: 712716 - protein, 15 aa, Homo sapiens
  CDR3 for beta chain variable domain of TCR clone 356358 (TRBV27, TRBJ2-1)
CASSKGGGSSNEQFF

SEQ ID NO: 712717 - protein, 12 aa, Homo sapiens
  CDR3 for alpha chain variable domain of TCR clone 356359 (TRAV29/DV5, TRAJ15)
CASKQAGTALIF

SEQ ID NO: 712718 - protein, 15 aa, Homo sapiens
  CDR3 for beta chain variable domain of TCR clone 356359 (TRBV11-2, TRBJ2-2)
CASSSDRVNAGELFF

SEQ ID NO: 712719 - protein, 11 aa, Homo sapiens
  CDR3 for alpha chain variable domain of TCR clone 356360 (TRAV13-1, TRAJ20)
CAASNDYKLSF

SEQ ID NO: 712720 - protein, 14 aa, Homo sapiens
  CDR3 for beta chain variable domain of TCR clone 356360 (TRBV7-2, TRBJ2-7)
CASSPKTSLYEQYF

SEQ ID NO: 712721 - protein, 14 aa, Homo sapiens
  CDR3 for alpha chain variable domain of TCR clone 356361 (TRAV2, TRAJ3)
CAVLPYSSASKIIF

SEQ ID NO: 712722 - protein, 17 aa, Homo sapiens
  CDR3 for beta chain variable domain of TCR clone 356361 (TRBV7-6, TRBJ2-5)
CASSSPQAGDPSETQYV

SEQ ID NO: 712723 - protein, 14 aa, Homo sapiens
  CDR3 for alpha chain variable domain of TCR clone 356362 (TRAV12-2, TRAJ17)
CAVLFKAAGNKLTF

SEQ ID NO: 712724 - protein, 17 aa, Homo sapiens
  CDR3 for beta chain variable domain of TCR clone 356362 (TRBV11-2, TRBJ2-1)
CASILYPPGVEYNEQFF

SEQ ID NO: 712725 - protein, 12 aa, Homo sapiens
  CDR3 for alpha chain variable domain of TCR clone 356363 (TRAV21, TRAJ27)
CCPNTNAGKSTF

SEQ ID NO: 712726 - protein, 16 aa, Homo sapiens
  CDR3 for beta chain variable domain of TCR clone 356363 (TRBV12-5, TRBJ2-5)
CASGPRTSGNQETQYF

SEQ ID NO: 712727 - protein, 15 aa, Homo sapiens
  CDR3 for alpha chain variable domain of TCR clone 356364 (TRAV8-2, TRAJ44)
CVVSPNTGTASKLTF

SEQ ID NO: 712728 - protein, 13 aa, Homo sapiens
  CDR3 for beta chain variable domain of TCR clone 356364 (TRBV7-9, TRBJ1-2)
CASSLKQNYGYTF

SEQ ID NO: 712729 - protein, 17 aa, Homo sapiens
  CDR3 for alpha chain variable domain of TCR clone 356365 (TRAV13-2, TRAJ28)
CAEEPAGSGAGSYQLTF

SEQ ID NO: 712730 - protein, 15 aa, Homo sapiens
  CDR3 for beta chain variable domain of TCR clone 356365 (TRBV2, TRBJ2-1)
CASSELAGGYNEQFF

SEQ ID NO: 712731 - protein, 15 aa, Homo sapiens
  CDR3 for alpha chain variable domain of TCR clone 356366 (TRAV25, TRAJ10)
CAGPLLTGGGNKLTF

SEQ ID NO: 712732 - protein, 14 aa, Homo sapiens
  CDR3 for beta chain variable domain of TCR clone 356366 (TRBV7-9, TRBJ2-7)
CASSLQQGGYEQYF

SEQ ID NO: 712733 - protein, 14 aa, Homo sapiens
  CDR3 for alpha chain variable domain of TCR clone 356367 (TRAV23/DV6, TRAJ8)
CAASKGTGFQKLVF

SEQ ID NO: 712734 - protein, 15 aa, Homo sapiens
  CDR3 for beta chain variable domain of TCR clone 356367 (TRBV28, TRBJ2-3)
CASSPDRQGANTQYF

SEQ ID NO: 712735 - protein, 13 aa, Homo sapiens
  CDR3 for alpha chain variable domain of TCR clone 356368 (TRAV20, TRAJ42)
CAVQGGSQGNLIF

SEQ ID NO: 712736 - protein, 15 aa, Homo sapiens
  CDR3 for beta chain variable domain of TCR clone 356368 (TRBV7-9, TRBJ1-6)
CASSSPGRGNSPLHF

SEQ ID NO: 712737 - protein, 14 aa, Homo sapiens
  CDR3 for alpha chain variable domain of TCR clone 356369 (TRAV21, TRAJ35)
CAVMPIGFGNVLHC

SEQ ID NO: 712738 - protein, 13 aa, Homo sapiens
  CDR3 for beta chain variable domain of TCR clone 356369 (TRBV19, TRBJ1-2)
CASSVPGQGGYTF

SEQ ID NO: 712739 - protein, 11 aa, Homo sapiens
  CDR3 for alpha chain variable domain of TCR clone 356370 (TRAV12-1, TRAJ43)
CVEYDNNDMRF

SEQ ID NO: 712740 - protein, 14 aa, Homo sapiens
  CDR3 for beta chain variable domain of TCR clone 356370 (TRBV7-9, TRBJ2-2)
CASSGLADTGELFF

SEQ ID NO: 712741 - protein, 18 aa, Homo sapiens
  CDR3 for alpha chain variable domain of TCR clone 356371 (TRAV26-1, TRAJ30)
CCVLLHRQSTNRDDKIIF

SEQ ID NO: 712742 - protein, 18 aa, Homo sapiens
  CDR3 for beta chain variable domain of TCR clone 356371 (TRBV4-1, TRBJ1-5)
CASSQDPRGQGLNQPQHC

SEQ ID NO: 712743 - protein, 11 aa, Homo sapiens
  CDR3 for alpha chain variable domain of TCR clone 356372 (TRAV12-1, TRAJ31)
CVVNGDARLMF

SEQ ID NO: 712744 - protein, 17 aa, Homo sapiens
  CDR3 for beta chain variable domain of TCR clone 356372 (TRBV4-3, TRBJ1-5)
CASSQWGDGGPNQHQHF

SEQ ID NO: 712745 - protein, 17 aa, Homo sapiens
  CDR3 for alpha chain variable domain of TCR clone 356373 (TRAV13-1, TRAJ28)
CAASPPYSGAGSYQLTF

SEQ ID NO: 712746 - protein, 16 aa, Homo sapiens
  CDR3 for beta chain variable domain of TCR clone 356373 (TRBV5-1, TRBJ2-3)
CASSLGLAVYTDTQYF

SEQ ID NO: 712747 - protein, 23 aa, Homo sapiens
  CDR3 for alpha chain variable domain of TCR clone 356374 (TRAV3, TRAJ5)
CAVRDLDTGRRALTLGVEQDSKF

SEQ ID NO: 712748 - protein, 13 aa, Homo sapiens
  CDR3 for beta chain variable domain of TCR clone 356374 (TRBV12-4, TRBJ2-7)
CASSPTETYEQYF

SEQ ID NO: 712749 - protein, 15 aa, Homo sapiens
  CDR3 for alpha chain variable domain of TCR clone 356375 (TRAV14/DV4, TRAJ12)
CAMREERDSSYKLIF

SEQ ID NO: 712750 - protein, 11 aa, Homo sapiens
  CDR3 for beta chain variable domain of TCR clone 356375 (TRBV20-1, TRBJ2-5)
CSADRAETQYF

SEQ ID NO: 712751 - protein, 12 aa, Homo sapiens
  CDR3 for alpha chain variable domain of TCR clone 356376 (TRAV8-6, TRAJ43)
CAVSNNNNDMRF

SEQ ID NO: 712752 - protein, 15 aa, Homo sapiens
  CDR3 for beta chain variable domain of TCR clone 356376 (TRBV7-3, TRBJ2-6)
CASSLGGAGANVLTF

SEQ ID NO: 712753 - protein, 14 aa, Homo sapiens
  CDR3 for alpha chain variable domain of TCR clone 356377 (TRAV12-2, TRAJ44)
CAVNKAGTPSKLTF

SEQ ID NO: 712754 - protein, 12 aa, Homo sapiens
  CDR3 for beta chain variable domain of TCR clone 356377 (TRBV19, TRBJ1-4)
CASKDWPGGLFF

SEQ ID NO: 712755 - protein, 13 aa, Homo sapiens
  CDR3 for alpha chain variable domain of TCR clone 356378 (TRAV36/DV7, TRAJ37)
CAVFSSNTGTLIF

SEQ ID NO: 712756 - protein, 18 aa, Homo sapiens
  CDR3 for beta chain variable domain of TCR clone 356378 (TRBV11-2, TRBJ2-3)
CASSLGGASRGAPNTQYF

SEQ ID NO: 712757 - protein, 14 aa, Homo sapiens
  CDR3 for alpha chain variable domain of TCR clone 356379 (TRAV12-2, TRAJ17)
CAVLFKAAGNKLTF

SEQ ID NO: 712758 - protein, 15 aa, Homo sapiens
  CDR3 for beta chain variable domain of TCR clone 356379 (TRBV19, TRBJ1-5)
CASSIVWADNQTQHF

SEQ ID NO: 712759 - protein, 13 aa, Homo sapiens
  CDR3 for alpha chain variable domain of TCR clone 356380 (TRAV12-3, TRAJ13)
CAMSSGGYQKVTF

SEQ ID NO: 712760 - protein, 17 aa, Homo sapiens
  CDR3 for beta chain variable domain of TCR clone 356380 (TRBV4-1, TRBJ1-4)
CASSHEGPRGVEEKLFF

SEQ ID NO: 712761 - protein, 22 aa, Homo sapiens
  CDR3 for alpha chain variable domain of TCR clone 356381 (TRAV36/DV7, TRAJ38)
CVANAGNNHIQNPDPAVYQLRD

SEQ ID NO: 712762 - protein, 14 aa, Homo sapiens
  CDR3 for beta chain variable domain of TCR clone 356381 (TRBV25-1, TRBJ1-1)
RASTHLGGNTEAFF

SEQ ID NO: 712763 - protein, 14 aa, Homo sapiens
  CDR3 for alpha chain variable domain of TCR clone 356382 (TRAV13-1, TRAJ22)
CAAFPLFSARQLTF

SEQ ID NO: 712764 - protein, 16 aa, Homo sapiens
  CDR3 for beta chain variable domain of TCR clone 356382 (TRBV20-1, TRBJ2-5)
CSASPLFAGEQETQYF

SEQ ID NO: 712765 - protein, 11 aa, Homo sapiens
  CDR3 for alpha chain variable domain of TCR clone 356383 (TRAV12-2, TRAJ49)
CAVWAGNQFYF

SEQ ID NO: 712766 - protein, 15 aa, Homo sapiens
  CDR3 for beta chain variable domain of TCR clone 356383 (TRBV7-9, TRBJ1-6)
CASSSPGRGNSPLHF

SEQ ID NO: 712767 - protein, 11 aa, Homo sapiens
  CDR3 for alpha chain variable domain of TCR clone 356384 (TRAV2, TRAJ13)
CASGGYKKVTF

SEQ ID NO: 712768 - protein, 13 aa, Homo sapiens
  CDR3 for beta chain variable domain of TCR clone 356384 (TRBV20-1, TRBJ1-1)
CSARVGGNTEAFF

SEQ ID NO: 712769 - protein, 15 aa, Homo sapiens
  CDR3 for alpha chain variable domain of TCR clone 356385 (TRAV21, TRAJ53)
CATLNSGGSNYNLTL

SEQ ID NO: 712770 - protein, 15 aa, Homo sapiens
  CDR3 for beta chain variable domain of TCR clone 356385 (TRBV20-1, TRBJ2-7)
CSARDRVSGMDEQYF

SEQ ID NO: 712771 - protein, 17 aa, Homo sapiens
  CDR3 for alpha chain variable domain of TCR clone 356386 (TRAV29/DV5, TRAJ42)
CAASSGNYGGSQGNLIF

SEQ ID NO: 712772 - protein, 13 aa, Homo sapiens
  CDR3 for beta chain variable domain of TCR clone 356386 (TRBV7-9, TRBJ1-2)
CASSPRGLSNTMA

SEQ ID NO: 712773 - protein, 14 aa, Homo sapiens
  CDR3 for alpha chain variable domain of TCR clone 356387 (TRAV2, TRAJ9)
CAVEVRSGGFKTIF

SEQ ID NO: 712774 - protein, 12 aa, Homo sapiens
  CDR3 for beta chain variable domain of TCR clone 356387 (TRBV11-2, TRBJ2-1)
CASSPGNNEQFF

SEQ ID NO: 712775 - protein, 15 aa, Homo sapiens
  CDR3 for alpha chain variable domain of TCR clone 356388 (TRAV14/DV4, TRAJ33)
CAMREGRDSNYRLIW

SEQ ID NO: 712776 - protein, 15 aa, Homo sapiens
  CDR3 for beta chain variable domain of TCR clone 356388 (TRBV5-5, TRBJ1-5)
CASSSTPGSSQPQHF

SEQ ID NO: 712777 - protein, 15 aa, Homo sapiens
  CDR3 for alpha chain variable domain of TCR clone 356389 (TRAV8-3, TRAJ6)
CAVGSAGGGSYIPTF

SEQ ID NO: 712778 - protein, 14 aa, Homo sapiens
  CDR3 for beta chain variable domain of TCR clone 356389 (TRBV7-2, TRBJ2-7)
CASRSQGAAYEQYF

SEQ ID NO: 712779 - protein, 11 aa, Homo sapiens
  CDR3 for alpha chain variable domain of TCR clone 356390 (TRAV2, TRAJ33)
CAVESNYQLIW

SEQ ID NO: 712780 - protein, 15 aa, Homo sapiens
  CDR3 for beta chain variable domain of TCR clone 356390 (TRBV19, TRBJ1-1)
CASTSGQIQNAEASF

SEQ ID NO: 712781 - protein, 15 aa, Homo sapiens
  CDR3 for alpha chain variable domain of TCR clone 356391 (TRAV12-1, TRAJ44)
CVVFVNTGTASKLTF

SEQ ID NO: 712782 - protein, 13 aa, Homo sapiens
  CDR3 for beta chain variable domain of TCR clone 356391 (TRBV10-1, TRBJ1-1)
CASQGQTNTEAFF

SEQ ID NO: 712783 - protein, 19 aa, Homo sapiens
  CDR3 for alpha chain variable domain of TCR clone 356392 (TRAV25, TRAJ20)
TATQTTDVGILPHDYKLSF

SEQ ID NO: 712784 - protein, 13 aa, Homo sapiens
  CDR3 for beta chain variable domain of TCR clone 356392 (TRBV3-1, TRBJ2-5)
CASSPGLQETQYF

SEQ ID NO: 712785 - protein, 17 aa, Homo sapiens
  CDR3 for alpha chain variable domain of TCR clone 356393 (TRAV3, TRAJ6)
CAVRDGPRAGGSYIPTF

SEQ ID NO: 712786 - protein, 15 aa, Homo sapiens
  CDR3 for beta chain variable domain of TCR clone 356393 (TRBV6-6, TRBJ1-6)
CASSYTRSGTSPLHF

SEQ ID NO: 712787 - protein, 15 aa, Homo sapiens
  CDR3 for alpha chain variable domain of TCR clone 356394 (TRAV8-4, TRAJ29)
CAVSEDFRGNTHLVF

SEQ ID NO: 712788 - protein, 12 aa, Homo sapiens
  CDR3 for beta chain variable domain of TCR clone 356394 (TRBV14, TRBJ2-7)
CASSSLKGEQYF

SEQ ID NO: 712789 - protein, 14 aa, Homo sapiens
  CDR3 for alpha chain variable domain of TCR clone 356395 (TRAV17, TRAJ57)
CATDPQAGSEKLVF

SEQ ID NO: 712790 - protein, 13 aa, Homo sapiens
  CDR3 for beta chain variable domain of TCR clone 356395 (TRBV24-1, TRBJ2-2)
CATSDWSTGELFF

SEQ ID NO: 712791 - protein, 12 aa, Homo sapiens
  CDR3 for alpha chain variable domain of TCR clone 356396 (TRAV8-3, TRAJ20)
CAVGANDYKLSF

SEQ ID NO: 712792 - protein, 16 aa, Homo sapiens
  CDR3 for beta chain variable domain of TCR clone 356396 (TRBV19, TRBJ2-2)
CASRSPGTGATGALFF

SEQ ID NO: 712793 - protein, 15 aa, Homo sapiens
  CDR3 for alpha chain variable domain of TCR clone 356397 (TRAV35, TRAJ58)
CAGRRQETSGSRLTL

SEQ ID NO: 712794 - protein, 15 aa, Homo sapiens
  CDR3 for beta chain variable domain of TCR clone 356397 (TRBV9, TRBJ1-6)
CASSVAGTGDSPLHF

SEQ ID NO: 712795 - protein, 11 aa, Homo sapiens
  CDR3 for alpha chain variable domain of TCR clone 356398 (TRAV3, TRAJ21)
CAVGNFNKFYF

SEQ ID NO: 712796 - protein, 15 aa, Homo sapiens
  CDR3 for beta chain variable domain of TCR clone 356398 (TRBV19, TRBJ2-1)
SSSKAGPSSYNEQFF

SEQ ID NO: 712797 - protein, 14 aa, Homo sapiens
  CDR3 for alpha chain variable domain of TCR clone 356399 (TRAV10, TRAJ36)
CVVKHEVGANNLFF

SEQ ID NO: 712798 - protein, 16 aa, Homo sapiens
  CDR3 for beta chain variable domain of TCR clone 356399 (TRBV7-3, TRBJ2-2)
CASSLKRGTLSGELFF

SEQ ID NO: 712799 - protein, 12 aa, Homo sapiens
  CDR3 for alpha chain variable domain of TCR clone 356400 (TRAV17, TRAJ39)
CATGAAGNMLTF

SEQ ID NO: 712800 - protein, 14 aa, Homo sapiens
  CDR3 for beta chain variable domain of TCR clone 356400 (TRBV7-9, TRBJ1-2)
CASSRQGAIYGYTF

SEQ ID NO: 712801 - protein, 13 aa, Homo sapiens
  CDR3 for alpha chain variable domain of TCR clone 356401 (TRAV20, TRAJ34)
CAVSSYNTDKLIF

SEQ ID NO: 712802 - protein, 17 aa, Homo sapiens
  CDR3 for beta chain variable domain of TCR clone 356401 (TRBV20-1, TRBJ2-1)
CSASSSGLAGSYNEQFF

SEQ ID NO: 712803 - protein, 16 aa, Homo sapiens
  CDR3 for alpha chain variable domain of TCR clone 356402 (TRAV3, TRAJ4)
CSVRPSPSGVYNKLIF

SEQ ID NO: 712804 - protein, 12 aa, Homo sapiens
  CDR3 for beta chain variable domain of TCR clone 356402 (TRBV7-9, TRBJ2-7)
CASSQGVYEQYF

SEQ ID NO: 712805 - protein, 13 aa, Homo sapiens
  CDR3 for alpha chain variable domain of TCR clone 356403 (TRAV26-2, TRAJ57)
CILSRGGSEKLVF

SEQ ID NO: 712806 - protein, 16 aa, Homo sapiens
  CDR3 for beta chain variable domain of TCR clone 356403 (TRBV18, TRBJ1-5)
CASSPRTGAGNQPQHF

SEQ ID NO: 712807 - protein, 12 aa, Homo sapiens
  CDR3 for alpha chain variable domain of TCR clone 356404 (TRAV12-3, TRAJ17)
CAMTPTGNKLTF

SEQ ID NO: 712808 - protein, 14 aa, Homo sapiens
  CDR3 for beta chain variable domain of TCR clone 356404 (TRBV4-1, TRBJ2-7)
YASSQDREHVEQYF

SEQ ID NO: 712809 - protein, 13 aa, Homo sapiens
  CDR3 for alpha chain variable domain of TCR clone 356405 (TRAV1-1, TRAJ9)
CAAKNTGGFKTIF

SEQ ID NO: 712810 - protein, 13 aa, Homo sapiens
  CDR3 for beta chain variable domain of TCR clone 356405 (TRBV7-9, TRBJ2-5)
CASLPSGRETQYF

SEQ ID NO: 712811 - protein, 14 aa, Homo sapiens
  CDR3 for alpha chain variable domain of TCR clone 356406 (TRAV12-3, TRAJ29)
CAMSPYSGNTPLVF

SEQ ID NO: 712812 - protein, 14 aa, Homo sapiens
  CDR3 for beta chain variable domain of TCR clone 356406 (TRBV12-5, TRBJ2-5)
CASGSRTHQETQYF

SEQ ID NO: 712813 - protein, 15 aa, Homo sapiens
  CDR3 for alpha chain variable domain of TCR clone 356407 (TRAV13-1, TRAJ18)
CAASGGGSTLGRLYF

SEQ ID NO: 712814 - protein, 13 aa, Homo sapiens
  CDR3 for beta chain variable domain of TCR clone 356407 (TRBV18, TRBJ2-1)
CASGLSSNNEQFF

SEQ ID NO: 712815 - protein, 11 aa, Homo sapiens
  CDR3 for alpha chain variable domain of TCR clone 356408 (TRAV1-2, TRAJ31)
CAVNNNARLMF

SEQ ID NO: 712816 - protein, 15 aa, Homo sapiens
  CDR3 for beta chain variable domain of TCR clone 356408 (TRBV2, TRBJ2-1)
CASSELAGSYNEQFF

SEQ ID NO: 712817 - protein, 14 aa, Homo sapiens
  CDR3 for alpha chain variable domain of TCR clone 356409 (TRAV4, TRAJ26)
CLVGPHNYGQKFVF

SEQ ID NO: 712818 - protein, 17 aa, Homo sapiens
  CDR3 for beta chain variable domain of TCR clone 356409 (TRBV20-1, TRBJ2-1)
CSASSSGLAGSYNEQFF

SEQ ID NO: 712819 - protein, 14 aa, Homo sapiens
  CDR3 for alpha chain variable domain of TCR clone 356410 (TRAV8-6, TRAJ34)
CAVSDQGNTDKLIF

SEQ ID NO: 712820 - protein, 15 aa, Homo sapiens
  CDR3 for beta chain variable domain of TCR clone 356410 (TRBV27, TRBJ2-1)
CASSIGGGSSNEQFF

SEQ ID NO: 712821 - protein, 12 aa, Homo sapiens
  CDR3 for alpha chain variable domain of TCR clone 356411 (TRAV12-1, TRAJ13)
CNSQGGYQKVTF

SEQ ID NO: 712822 - protein, 16 aa, Homo sapiens
  CDR3 for beta chain variable domain of TCR clone 356411 (TRBV4-2, TRBJ2-3)
CASSQELAGDTDTQYF

SEQ ID NO: 712823 - protein, 15 aa, Homo sapiens
  CDR3 for alpha chain variable domain of TCR clone 356412 (TRAV26-1, TRAJ44)
CIVRIGTGNASKLTF

SEQ ID NO: 712824 - protein, 15 aa, Homo sapiens
  CDR3 for beta chain variable domain of TCR clone 356412 (TRBV7-6, TRBJ2-1)
CASSSLAGEGNEQFF

SEQ ID NO: 712825 - protein, 18 aa, Homo sapiens
  CDR3 for alpha chain variable domain of TCR clone 356413 (TRAV12-3, TRAJ52)
CAMSVGGAGGTSYGKLTF

SEQ ID NO: 712826 - protein, 15 aa, Homo sapiens
  CDR3 for beta chain variable domain of TCR clone 356413 (TRBV20-1, TRBJ2-7)
CSARDRVSGIDEQYF

SEQ ID NO: 712827 - protein, 15 aa, Homo sapiens
  CDR3 for alpha chain variable domain of TCR clone 356414 (TRAV8-3, TRAJ41)
CAVGSNSNSGYALNF

SEQ ID NO: 712828 - protein, 17 aa, Homo sapiens
  CDR3 for beta chain variable domain of TCR clone 356414 (TRBV25-1, TRBJ2-1)
CASSAYGQGSGVYEQFF

SEQ ID NO: 712829 - protein, 14 aa, Homo sapiens
  CDR3 for alpha chain variable domain of TCR clone 356415 (TRAV1-2, TRAJ16)
CAVNRFSDGQKLLF

SEQ ID NO: 712830 - protein, 11 aa, Homo sapiens
  CDR3 for beta chain variable domain of TCR clone 356415 (TRBV29-1, TRBJ2-5)
CSEDRMGTQYF

SEQ ID NO: 712831 - protein, 17 aa, Homo sapiens
  CDR3 for alpha chain variable domain of TCR clone 356416 (TRAV12-2, TRAJ52)
CAVNPYAGGTSYGKLTF

SEQ ID NO: 712832 - protein, 13 aa, Homo sapiens
  CDR3 for beta chain variable domain of TCR clone 356416 (TRBV10-3, TRBJ2-7)
CASKLAVNYEQYF

SEQ ID NO: 712833 - protein, 13 aa, Homo sapiens
  CDR3 for alpha chain variable domain of TCR clone 356417 (TRAV8-3, TRAJ36)
CAVGATGANNHFL

SEQ ID NO: 712834 - protein, 15 aa, Homo sapiens
  CDR3 for beta chain variable domain of TCR clone 356417 (TRBV7-2, TRBJ1-2)
CASSPRAGWNYGYTF

SEQ ID NO: 712835 - protein, 14 aa, Homo sapiens
  CDR3 for alpha chain variable domain of TCR clone 356418 (TRAV1-2, TRAJ16)
CAVKRFSDGQKLLF

SEQ ID NO: 712836 - protein, 15 aa, Homo sapiens
  CDR3 for beta chain variable domain of TCR clone 356418 (TRBV11-2, TRBJ1-6)
CASSLDPWAVSPLHF

SEQ ID NO: 712837 - protein, 13 aa, Homo sapiens
  CDR3 for alpha chain variable domain of TCR clone 356419 (TRAV1-2, TRAJ9)
CAALNTVGFKTIF

SEQ ID NO: 712838 - protein, 17 aa, Homo sapiens
  CDR3 for beta chain variable domain of TCR clone 356419 (TRBV7-3, TRBJ2-3)
CASSPRGQGYGTDTQYF

SEQ ID NO: 712839 - protein, 15 aa, Homo sapiens
  CDR3 for alpha chain variable domain of TCR clone 356420 (TRAV3, TRAJ9)
CAVRDINTGGFKTIL

SEQ ID NO: 712840 - protein, 13 aa, Homo sapiens
  CDR3 for beta chain variable domain of TCR clone 356420 (TRBV19, TRBJ2-7)
CASSIPSVHEQYF

SEQ ID NO: 712841 - protein, 13 aa, Homo sapiens
  CDR3 for alpha chain variable domain of TCR clone 356421 (TRAV12-2, TRAJ17)
CRPIQAAGNKLTF

SEQ ID NO: 712842 - protein, 16 aa, Homo sapiens
  CDR3 for beta chain variable domain of TCR clone 356421 (TRBV20-1, TRBJ2-2)
CSASASGIPGAGELFF

SEQ ID NO: 712843 - protein, 14 aa, Homo sapiens
  CDR3 for alpha chain variable domain of TCR clone 356422 (TRAV1-2, TRAJ8)
CAVREDTGFQKLVF

SEQ ID NO: 712844 - protein, 12 aa, Homo sapiens
  CDR3 for beta chain variable domain of TCR clone 356422 (TRBV28, TRBJ1-2)
CASLTLAEGYTF

SEQ ID NO: 712845 - protein, 16 aa, Homo sapiens
  CDR3 for alpha chain variable domain of TCR clone 356423 (TRAV3, TRAJ37)
CAVRGKGSGNTGKLIF

SEQ ID NO: 712846 - protein, 17 aa, Homo sapiens
  CDR3 for beta chain variable domain of TCR clone 356423 (TRBV28, TRBJ2-1)
CASSSASQALTYNEQFF

SEQ ID NO: 712847 - protein, 16 aa, Homo sapiens
  CDR3 for alpha chain variable domain of TCR clone 356424 (TRAV23/DV6, TRAJ9)
CAASIGGNSGGFKTIF

SEQ ID NO: 712848 - protein, 13 aa, Homo sapiens
  CDR3 for beta chain variable domain of TCR clone 356424 (TRBV7-9, TRBJ1-2)
CASSLKQNYGYTF

SEQ ID NO: 712849 - protein, 13 aa, Homo sapiens
  CDR3 for alpha chain variable domain of TCR clone 356425 (TRAV12-2, TRAJ15)
CAVFNQAGTALIF

SEQ ID NO: 712850 - protein, 15 aa, Homo sapiens
  CDR3 for beta chain variable domain of TCR clone 356425 (TRBV7-8, TRBJ1-5)
CASSRGGGADRPQHF

SEQ ID NO: 712851 - protein, 11 aa, Homo sapiens
  CDR3 for alpha chain variable domain of TCR clone 356426 (TRAV17, TRAJ9)
CGFTGGFKTIF

SEQ ID NO: 712852 - protein, 12 aa, Homo sapiens
  CDR3 for beta chain variable domain of TCR clone 356426 (TRBV29-1, TRBJ2-3)
CSVTGGADTQYL

SEQ ID NO: 712853 - protein, 17 aa, Homo sapiens
  CDR3 for alpha chain variable domain of TCR clone 356427 (TRAV4, TRAJ18)
CLVGERSVGSTLGGLYF

SEQ ID NO: 712854 - protein, 16 aa, Homo sapiens
  CDR3 for beta chain variable domain of TCR clone 356427 (TRBV4-2, TRBJ1-1)
CASSPPPGRAAPEAFF

SEQ ID NO: 712855 - protein, 17 aa, Homo sapiens
  CDR3 for alpha chain variable domain of TCR clone 356428 (TRAV13-1, TRAJ52)
CAASSGAGGTSCGKLTF

SEQ ID NO: 712856 - protein, 15 aa, Homo sapiens
  CDR3 for beta chain variable domain of TCR clone 356428 (TRBV9, TRBJ1-6)
CASSVSGTGDSPLHF

SEQ ID NO: 712857 - protein, 15 aa, Homo sapiens
  CDR3 for alpha chain variable domain of TCR clone 356429 (TRAV12-2, TRAJ53)
CAVNGGGGSNYKLTF

SEQ ID NO: 712858 - protein, 17 aa, Homo sapiens
  CDR3 for beta chain variable domain of TCR clone 356429 (TRBV6-6, TRBJ2-3)
CASSYSNLAGPRDTQYF

SEQ ID NO: 712859 - protein, 17 aa, Homo sapiens
  CDR3 for alpha chain variable domain of TCR clone 356430 (TRAV3, TRAJ6)
CAVRDGPRAGGSYIPTF

SEQ ID NO: 712860 - protein, 15 aa, Homo sapiens
  CDR3 for beta chain variable domain of TCR clone 356430 (TRBV2, TRBJ2-5)
CASRIAGVGGETQYF

SEQ ID NO: 712861 - protein, 20 aa, Homo sapiens
  CDR3 for alpha chain variable domain of TCR clone 356431 (TRAV12-1, TRAJ42)
SSVIQPPTSVKGGSQGNLIF

SEQ ID NO: 712862 - protein, 11 aa, Homo sapiens
  CDR3 for beta chain variable domain of TCR clone 356431 (TRBV19, TRBJ1-2)
CASSISSGYTF

SEQ ID NO: 712863 - protein, 14 aa, Homo sapiens
  CDR3 for alpha chain variable domain of TCR clone 356432 (TRAV35, TRAJ22)
CAGLRPGSARQLTF

SEQ ID NO: 712864 - protein, 14 aa, Homo sapiens
  CDR3 for beta chain variable domain of TCR clone 356432 (TRBV4-1, TRBJ2-7)
CASSPVAGGDEQFF

SEQ ID NO: 712865 - protein, 13 aa, Homo sapiens
  CDR3 for alpha chain variable domain of TCR clone 356433 (TRAV12-2, TRAJ10)
CAVLTGGGNKLTF

SEQ ID NO: 712866 - protein, 12 aa, Homo sapiens
  CDR3 for beta chain variable domain of TCR clone 356433 (TRBV6-3, TRBJ2-5)
CASEGLQETQYF

SEQ ID NO: 712867 - protein, 15 aa, Homo sapiens
  CDR3 for alpha chain variable domain of TCR clone 356434 (TRAV3, TRAJ5)
CAVRHLDTGRRALTF

SEQ ID NO: 712868 - protein, 13 aa, Homo sapiens
  CDR3 for beta chain variable domain of TCR clone 356434 (TRBV20-1, TRBJ2-5)
CSARDSKQATQYF

SEQ ID NO: 712869 - protein, 16 aa, Homo sapiens
  CDR3 for alpha chain variable domain of TCR clone 356435 (TRAV4, TRAJ22)
CLVGDLYSGSARQLTF

SEQ ID NO: 712870 - protein, 15 aa, Homo sapiens
  CDR3 for beta chain variable domain of TCR clone 356435 (TRBV7-9, TRBJ1-6)
CASSPPGRGNSPLHF

SEQ ID NO: 712871 - protein, 16 aa, Homo sapiens
  CDR3 for alpha chain variable domain of TCR clone 356436 (TRAV30, TRAJ24)
CGTEIVDADSWGKFQF

SEQ ID NO: 712872 - protein, 15 aa, Homo sapiens
  CDR3 for beta chain variable domain of TCR clone 356436 (TRBV7-9, TRBJ1-4)
CSSSARTGGNEKLFF

SEQ ID NO: 712873 - protein, 14 aa, Homo sapiens
  CDR3 for alpha chain variable domain of TCR clone 356437 (TRAV1-2, TRAJ16)
CAVNRFSDGQKLLF

SEQ ID NO: 712874 - protein, 19 aa, Homo sapiens
  CDR3 for beta chain variable domain of TCR clone 356437 (TRBV28, TRBJ2-5)
CASSLYLRLAGELQETQYF

SEQ ID NO: 712875 - protein, 13 aa, Homo sapiens
  CDR3 for alpha chain variable domain of TCR clone 356438 (TRAV12-2, TRAJ40)
CREDPSGTYKYIF

SEQ ID NO: 712876 - protein, 14 aa, Homo sapiens
  CDR3 for beta chain variable domain of TCR clone 356438 (TRBV28, TRBJ1-2)
CASRIQGANYGYTF

SEQ ID NO: 712877 - protein, 18 aa, Homo sapiens
  CDR3 for alpha chain variable domain of TCR clone 356439 (TRAV21, TRAJ52)
CAVRPSPAGGTSNGKLTF

SEQ ID NO: 712878 - protein, 17 aa, Homo sapiens
  CDR3 for beta chain variable domain of TCR clone 356439 (TRBV25-1, TRBJ2-1)
CASSAYGQGRGVYEQFF

SEQ ID NO: 712879 - protein, 15 aa, Homo sapiens
  CDR3 for alpha chain variable domain of TCR clone 356440 (TRAV12-3, TRAJ6)
CAMSPASGGSYIPTL

SEQ ID NO: 712880 - protein, 14 aa, Homo sapiens
  CDR3 for beta chain variable domain of TCR clone 356440 (TRBV6-1, TRBJ2-2)
CASVEHIESGELFF

SEQ ID NO: 712881 - protein, 16 aa, Homo sapiens
  CDR3 for alpha chain variable domain of TCR clone 356441 (TRAV3, TRAJ37)
CAVRPHGSGNTGKLIF

SEQ ID NO: 712882 - protein, 14 aa, Homo sapiens
  CDR3 for beta chain variable domain of TCR clone 356441 (TRBV25-1, TRBJ1-1)
CASTHLGGNTEAFF

SEQ ID NO: 712883 - protein, 13 aa, Homo sapiens
  CDR3 for alpha chain variable domain of TCR clone 356442 (TRAV13-1, TRAJ5)
CAASDMGRRALTF

SEQ ID NO: 712884 - protein, 14 aa, Homo sapiens
  CDR3 for beta chain variable domain of TCR clone 356442 (TRBV7-8, TRBJ1-2)
CASSPDSLSYGYTF

SEQ ID NO: 712885 - protein, 12 aa, Homo sapiens
  CDR3 for alpha chain variable domain of TCR clone 356443 (TRAV3, TRAJ20)
CAVRDPDYKLSF

SEQ ID NO: 712886 - protein, 13 aa, Homo sapiens
  CDR3 for beta chain variable domain of TCR clone 356443 (TRBV9, TRBJ2-1)
CASSVGQGGEKFF

SEQ ID NO: 712887 - protein, 15 aa, Homo sapiens
  CDR3 for alpha chain variable domain of TCR clone 356444 (TRAV17, TRAJ23)
CATDAEDNQGGKLIF

SEQ ID NO: 712888 - protein, 12 aa, Homo sapiens
  CDR3 for beta chain variable domain of TCR clone 356444 (TRBV2, TRBJ2-1)
CAKREGYNAQFF

SEQ ID NO: 712889 - protein, 14 aa, Homo sapiens
  CDR3 for alpha chain variable domain of TCR clone 356445 (TRAV1-2, TRAJ16)
CAVNRFSDGQKLLF

SEQ ID NO: 712890 - protein, 14 aa, Homo sapiens
  CDR3 for beta chain variable domain of TCR clone 356445 (TRBV5-7, TRBJ1-1)
CASSLAGDWTEAFF

SEQ ID NO: 712891 - protein, 10 aa, Homo sapiens
  CDR3 for alpha chain variable domain of TCR clone 356446 (TRAV12-2, TRAJ43)
CAVKVLSMRF

SEQ ID NO: 712892 - protein, 16 aa, Homo sapiens
  CDR3 for beta chain variable domain of TCR clone 356446 (TRBV11-2, TRBJ2-7)
CASSLGTASTSSTSGR

SEQ ID NO: 712893 - protein, 15 aa, Homo sapiens
  CDR3 for alpha chain variable domain of TCR clone 356447 (TRAV21, TRAJ53)
CATLNSGGSNYKLKF

SEQ ID NO: 712894 - protein, 13 aa, Homo sapiens
  CDR3 for beta chain variable domain of TCR clone 356447 (TRBV4-2, TRBJ1-1)
CASSQAGNTEAFF

SEQ ID NO: 712895 - protein, 18 aa, Homo sapiens
  CDR3 for alpha chain variable domain of TCR clone 356448 (TRAV13-1, TRAJ52)
FAASKRSACGTSYGKLTF

SEQ ID NO: 712896 - protein, 13 aa, Homo sapiens
  CDR3 for beta chain variable domain of TCR clone 356448 (TRBV12-4, TRBJ1-2)
CASSLRQGKGYTF

SEQ ID NO: 712897 - protein, 22 aa, Homo sapiens
  CDR3 for alpha chain variable domain of TCR clone 356449 (TRAV12-2, TRAJ53)
SPVIQPPTYVPPILSSNYKLTF

SEQ ID NO: 712898 - protein, 13 aa, Homo sapiens
  CDR3 for beta chain variable domain of TCR clone 356449 (TRBV7-7, TRBJ2-3)
CASSLSRADTQYF

SEQ ID NO: 712899 - protein, 13 aa, Homo sapiens
  CDR3 for alpha chain variable domain of TCR clone 356450 (TRAV17, TRAJ43)
CATDVRYLDDMRF

SEQ ID NO: 712900 - protein, 14 aa, Homo sapiens
  CDR3 for beta chain variable domain of TCR clone 356450 (TRBV7-2, TRBJ2-7)
CASRSQGAAYEQYF

SEQ ID NO: 712901 - protein, 12 aa, Homo sapiens
  CDR3 for alpha chain variable domain of TCR clone 356451 (TRAV30, TRAJ43)
CGTEERGNDMRF

SEQ ID NO: 712902 - protein, 15 aa, Homo sapiens
  CDR3 for beta chain variable domain of TCR clone 356451 (TRBV11-2, TRBJ2-2)
CASSLDTGNTGELFF

SEQ ID NO: 712903 - protein, 12 aa, Homo sapiens
  CDR3 for alpha chain variable domain of TCR clone 356452 (TRAV13-2, TRAJ23)
CAERHRGGKLIF

SEQ ID NO: 712904 - protein, 14 aa, Homo sapiens
  CDR3 for beta chain variable domain of TCR clone 356452 (TRBV6-5, TRBJ2-2)
CASSYSGVTGELFF

SEQ ID NO: 712905 - protein, 16 aa, Homo sapiens
  CDR3 for alpha chain variable domain of TCR clone 356453 (TRAV26-1, TRAJ53)
CIVRVAMGGSKYKLTF

SEQ ID NO: 712906 - protein, 12 aa, Homo sapiens
  CDR3 for beta chain variable domain of TCR clone 356453 (TRBV7-9, TRBJ1-5)
CASSPQGQPQHV

SEQ ID NO: 712907 - protein, 16 aa, Homo sapiens
  CDR3 for alpha chain variable domain of TCR clone 356454 (TRAV3, TRAJ10)
CAVRDMRAGGGNKLTF

SEQ ID NO: 712908 - protein, 13 aa, Homo sapiens
  CDR3 for beta chain variable domain of TCR clone 356454 (TRBV7-2, TRBJ1-1)
CASSLTENTEAFF

SEQ ID NO: 712909 - protein, 15 aa, Homo sapiens
  CDR3 for alpha chain variable domain of TCR clone 356455 (TRAV17, TRAJ57)
CAPGPSQGGSEKLVF

SEQ ID NO: 712910 - protein, 16 aa, Homo sapiens
  CDR3 for beta chain variable domain of TCR clone 356455 (TRBV12-4, TRBJ1-5)
CASSRPVGGSNQPQHF

SEQ ID NO: 712911 - protein, 12 aa, Homo sapiens
  CDR3 for alpha chain variable domain of TCR clone 356456 (TRAV12-3, TRAJ54)
CGADRGAQKLVF

SEQ ID NO: 712912 - protein, 14 aa, Homo sapiens
  CDR3 for beta chain variable domain of TCR clone 356456 (TRBV27, TRBJ2-1)
CQQFSGGPFNEQFF

SEQ ID NO: 712913 - protein, 13 aa, Homo sapiens
  CDR3 for alpha chain variable domain of TCR clone 356457 (TRAV12-1, TRAJ49)
CVVGANTGNQFYF

SEQ ID NO: 712914 - protein, 12 aa, Homo sapiens
  CDR3 for beta chain variable domain of TCR clone 356457 (TRBV29-1, TRBJ2-3)
CSVTGGADTQYF

SEQ ID NO: 712915 - protein, 14 aa, Homo sapiens
  CDR3 for alpha chain variable domain of TCR clone 356458 (TRAV12-2, TRAJ22)
CAVRVSGSARQPPF

SEQ ID NO: 712916 - protein, 13 aa, Homo sapiens
  CDR3 for beta chain variable domain of TCR clone 356458 (TRBV6-1, TRBJ2-1)
CAGAGTGLHEQFF

SEQ ID NO: 712917 - protein, 14 aa, Homo sapiens
  CDR3 for alpha chain variable domain of TCR clone 356459 (TRAV12-2, TRAJ5)
CAVNRSTGRRALTF

SEQ ID NO: 712918 - protein, 12 aa, Homo sapiens
  CDR3 for beta chain variable domain of TCR clone 356459 (TRBV11-2, TRBJ2-2)
CASSLGGGELFF

SEQ ID NO: 712919 - protein, 14 aa, Homo sapiens
  CDR3 for alpha chain variable domain of TCR clone 356460 (TRAV2, TRAJ9)
CAVEDRSGGFKTIL

SEQ ID NO: 712920 - protein, 15 aa, Homo sapiens
  CDR3 for beta chain variable domain of TCR clone 356460 (TRBV11-3, TRBJ2-3)
CASLKDGREGDTQYF

SEQ ID NO: 712921 - protein, 14 aa, Homo sapiens
  CDR3 for alpha chain variable domain of TCR clone 356461 (TRAV21, TRAJ35)
CAVMPIGFGNVLPC

SEQ ID NO: 712922 - protein, 13 aa, Homo sapiens
  CDR3 for beta chain variable domain of TCR clone 356461 (TRBV23-1, TRBJ1-4)
CASRGKFNEKLFF

SEQ ID NO: 712923 - protein, 16 aa, Homo sapiens
  CDR3 for alpha chain variable domain of TCR clone 356462 (TRAV14/DV4, TRAJ34)
CAMREGRPHRQAHLRD

SEQ ID NO: 712924 - protein, 14 aa, Homo sapiens
  CDR3 for beta chain variable domain of TCR clone 356462 (TRBV19, TRBJ2-1)
CASPTFVLSGEQFF

SEQ ID NO: 712925 - protein, 13 aa, Homo sapiens
  CDR3 for alpha chain variable domain of TCR clone 356463 (TRAV39, TRAJ58)
CAGEETSGSRLTF

SEQ ID NO: 712926 - protein, 14 aa, Homo sapiens
  CDR3 for beta chain variable domain of TCR clone 356463 (TRBV12-5, TRBJ2-5)
CASGSRTHQETQYF

SEQ ID NO: 712927 - protein, 14 aa, Homo sapiens
  CDR3 for alpha chain variable domain of TCR clone 356464 (TRAV23/DV6, TRAJ57)
CAASNQGGFEKLVF

SEQ ID NO: 712928 - protein, 13 aa, Homo sapiens
  CDR3 for beta chain variable domain of TCR clone 356464 (TRBV11-2, TRBJ2-7)
CASSSYPSYEQYF

SEQ ID NO: 712929 - protein, 13 aa, Homo sapiens
  CDR3 for alpha chain variable domain of TCR clone 356465 (TRAV2, TRAJ21)
CAVEDLNFTKFYF

SEQ ID NO: 712930 - protein, 15 aa, Homo sapiens
  CDR3 for beta chain variable domain of TCR clone 356465 (TRBV28, TRBJ2-5)
CASSPGQGSIETKYF

SEQ ID NO: 712931 - protein, 14 aa, Homo sapiens
  CDR3 for alpha chain variable domain of TCR clone 356466 (TRAV12-1, TRAJ23)
CVVIVYNQGGKLIF

SEQ ID NO: 712932 - protein, 15 aa, Homo sapiens
  CDR3 for beta chain variable domain of TCR clone 356466 (TRBV20-1, TRBJ1-5)
CSAQPPGQGPQPQHF

SEQ ID NO: 712933 - protein, 14 aa, Homo sapiens
  CDR3 for alpha chain variable domain of TCR clone 356467 (TRAV12-1, TRAJ43)
CVVNGRSNNNDMRF

SEQ ID NO: 712934 - protein, 12 aa, Homo sapiens
  CDR3 for beta chain variable domain of TCR clone 356467 (TRBV27, TRBJ1-1)
CASLSIGAEAFF

SEQ ID NO: 712935 - protein, 16 aa, Homo sapiens
  CDR3 for alpha chain variable domain of TCR clone 356468 (TRAV22, TRAJ45)
CAVGRGKRGGADGRTF

SEQ ID NO: 712936 - protein, 11 aa, Homo sapiens
  CDR3 for beta chain variable domain of TCR clone 356468 (TRBV29-1, TRBJ2-5)
CSEDRTGTQYF

SEQ ID NO: 712937 - protein, 13 aa, Homo sapiens
  CDR3 for alpha chain variable domain of TCR clone 356469 (TRAV8-3, TRAJ43)
CAVVPYHNNDMRF

SEQ ID NO: 712938 - protein, 16 aa, Homo sapiens
  CDR3 for beta chain variable domain of TCR clone 356469 (TRBV7-2, TRBJ2-5)
CASSPFPTGGEETQYF

SEQ ID NO: 712939 - protein, 13 aa, Homo sapiens
  CDR3 for alpha chain variable domain of TCR clone 356470 (TRAV17, TRAJ5)
CALRGTGRRELTF

SEQ ID NO: 712940 - protein, 13 aa, Homo sapiens
  CDR3 for beta chain variable domain of TCR clone 356470 (TRBV4-2, TRBJ1-1)
CASSQAGNTEAFF

SEQ ID NO: 712941 - protein, 14 aa, Homo sapiens
  CDR3 for alpha chain variable domain of TCR clone 356471 (TRAV35, TRAJ22)
FAGLRPGSARQLTF

SEQ ID NO: 712942 - protein, 12 aa, Homo sapiens
  CDR3 for beta chain variable domain of TCR clone 356471 (TRBV14, TRBJ2-5)
CASSQLKETQYF

SEQ ID NO: 712943 - protein, 18 aa, Homo sapiens
  CDR3 for alpha chain variable domain of TCR clone 356472 (TRAV29/DV5, TRAJ52)
CAAGFRGAGGTSYGKLTF

SEQ ID NO: 712944 - protein, 16 aa, Homo sapiens
  CDR3 for beta chain variable domain of TCR clone 356472 (TRBV7-3, TRBJ2-2)
CASSLNRGTLSGELFF

SEQ ID NO: 712945 - protein, 23 aa, Homo sapiens
  CDR3 for alpha chain variable domain of TCR clone 356473 (TRAV26-1, )
CIADNAGNTHIQNPDPAVYHLRD

SEQ ID NO: 712946 - protein, 13 aa, Homo sapiens
  CDR3 for beta chain variable domain of TCR clone 356473 (TRBV20-1, TRBJ1-1)
CSARGGGNTEAFF

SEQ ID NO: 712947 - protein, 23 aa, Homo sapiens
  CDR3 for alpha chain variable domain of TCR clone 356474 (TRAV26-1, TRAJ38)
CIADNAGNNHIQNPDPAVYQLRD

SEQ ID NO: 712948 - protein, 14 aa, Homo sapiens
  CDR3 for beta chain variable domain of TCR clone 356474 (TRBV4-2, TRBJ1-5)
CASSQDSINQPQHF

SEQ ID NO: 712949 - protein, 13 aa, Homo sapiens
  CDR3 for alpha chain variable domain of TCR clone 356475 (TRAV21, TRAJ49)
CAVRQSTGNQFYF

SEQ ID NO: 712950 - protein, 13 aa, Homo sapiens
  CDR3 for beta chain variable domain of TCR clone 356475 (TRBV11-2, TRBJ2-5)
CASSSTGEETQYF

SEQ ID NO: 712951 - protein, 14 aa, Homo sapiens
  CDR3 for alpha chain variable domain of TCR clone 356476 (TRAV35, TRAJ46)
CAGPQKSSGDKLTF

SEQ ID NO: 712952 - protein, 12 aa, Homo sapiens
  CDR3 for beta chain variable domain of TCR clone 356476 (TRBV19, TRBJ2-1)
CASSMQDTEQLF

SEQ ID NO: 712953 - protein, 14 aa, Homo sapiens
  CDR3 for alpha chain variable domain of TCR clone 356477 (TRAV12-2, TRAJ40)
CAVKIPSGTYKYIF

SEQ ID NO: 712954 - protein, 18 aa, Homo sapiens
  CDR3 for beta chain variable domain of TCR clone 356477 (TRBV18, TRBJ1-3)
CASSPRGGAGPSGNTIYF

SEQ ID NO: 712955 - protein, 14 aa, Homo sapiens
  CDR3 for alpha chain variable domain of TCR clone 356478 (TRAV17, TRAJ22)
CATVLSGSARQLTF

SEQ ID NO: 712956 - protein, 12 aa, Homo sapiens
  CDR3 for beta chain variable domain of TCR clone 356478 (TRBV6-3, TRBJ2-7)
CASSLTPYEQYF

SEQ ID NO: 712957 - protein, 16 aa, Homo sapiens
  CDR3 for alpha chain variable domain of TCR clone 356479 (TRAV21, TRAJ52)
CAVTNAGGISYGNLTF

SEQ ID NO: 712958 - protein, 11 aa, Homo sapiens
  CDR3 for beta chain variable domain of TCR clone 356479 (TRBV2, TRBJ1-1)
CASREGTEAFF

SEQ ID NO: 712959 - protein, 15 aa, Homo sapiens
  CDR3 for alpha chain variable domain of TCR clone 356480 (TRAV17, TRAJ56)
CATDANTGANSKLTF

SEQ ID NO: 712960 - protein, 14 aa, Homo sapiens
  CDR3 for beta chain variable domain of TCR clone 356480 (TRBV19, TRBJ1-5)
CASSLGTRGQPQHF

SEQ ID NO: 712961 - protein, 13 aa, Homo sapiens
  CDR3 for alpha chain variable domain of TCR clone 356481 (TRAV21, TRAJ20)
CAVGLRVDYKLSF

SEQ ID NO: 712962 - protein, 16 aa, Homo sapiens
  CDR3 for beta chain variable domain of TCR clone 356481 (TRBV7-9, TRBJ2-1)
CASSDVAGGSYNEQFF

SEQ ID NO: 712963 - protein, 13 aa, Homo sapiens
  CDR3 for alpha chain variable domain of TCR clone 356482 (TRAV21, TRAJ49)
CAVRQSTGNQFYF

SEQ ID NO: 712964 - protein, 12 aa, Homo sapiens
  CDR3 for beta chain variable domain of TCR clone 356482 (TRBV11-2, TRBJ2-2)
CASSLPTGELFF

SEQ ID NO: 712965 - protein, 12 aa, Homo sapiens
  CDR3 for alpha chain variable domain of TCR clone 356483 (TRAV13-1, TRAJ27)
CAAHTNAGKSTF

SEQ ID NO: 712966 - protein, 14 aa, Homo sapiens
  CDR3 for beta chain variable domain of TCR clone 356483 (TRBV19, TRBJ1-5)
CASRAPDSFLSQHF

SEQ ID NO: 712967 - protein, 14 aa, Homo sapiens
  CDR3 for alpha chain variable domain of TCR clone 356484 (TRAV12-2, TRAJ17)
CAVLFKAAGNKLTF

SEQ ID NO: 712968 - protein, 15 aa, Homo sapiens
  CDR3 for beta chain variable domain of TCR clone 356484 (TRBV28, TRBJ2-1)
CASRTGAGVIARQFF

SEQ ID NO: 712969 - protein, 16 aa, Homo sapiens
  CDR3 for alpha chain variable domain of TCR clone 356485 (TRAV30, TRAJ24)
CGTEIVDADSWGKIQF

SEQ ID NO: 712970 - protein, 16 aa, Homo sapiens
  CDR3 for beta chain variable domain of TCR clone 356485 (TRBV7-3, TRBJ2-2)
CASSLKRGTLSGELFF

SEQ ID NO: 712971 - protein, 14 aa, Homo sapiens
  CDR3 for alpha chain variable domain of TCR clone 356486 (TRAV12-2, TRAJ45)
CAVNIGGGADELTF

SEQ ID NO: 712972 - protein, 13 aa, Homo sapiens
  CDR3 for beta chain variable domain of TCR clone 356486 (TRBV19, TRBJ2-2)
CASSIWSTGELFF

SEQ ID NO: 712973 - protein, 16 aa, Homo sapiens
  CDR3 for alpha chain variable domain of TCR clone 356487 (TRAV35, TRAJ28)
CAGYLYSGAGSYQLAF

SEQ ID NO: 712974 - protein, 16 aa, Homo sapiens
  CDR3 for beta chain variable domain of TCR clone 356487 (TRBV5-1, TRBJ2-1)
CASSHGLAGPQNEQFF

SEQ ID NO: 712975 - protein, 15 aa, Homo sapiens
  CDR3 for alpha chain variable domain of TCR clone 356488 (TRAV2, TRAJ33)
CCLLLSVDSNYQLIW

SEQ ID NO: 712976 - protein, 14 aa, Homo sapiens
  CDR3 for beta chain variable domain of TCR clone 356488 (TRBV11-2, TRBJ2-3)
CASSRLARTDTQYF

SEQ ID NO: 712977 - protein, 14 aa, Homo sapiens
  CDR3 for alpha chain variable domain of TCR clone 356489 (TRAV8-2, TRAJ4)
CVVSPSGGYNKLIF

SEQ ID NO: 712978 - protein, 14 aa, Homo sapiens
  CDR3 for beta chain variable domain of TCR clone 356489 (TRBV7-8, TRBJ2-3)
CASSLEAGTDTQYF

SEQ ID NO: 712979 - protein, 14 aa, Homo sapiens
  CDR3 for alpha chain variable domain of TCR clone 356490 (TRAV9-2, TRAJ39)
CALYIYNSGNMLTF

SEQ ID NO: 712980 - protein, 14 aa, Homo sapiens
  CDR3 for beta chain variable domain of TCR clone 356490 (TRBV12-4, TRBJ2-5)
CASSSRQGAETQYF

SEQ ID NO: 712981 - protein, 13 aa, Homo sapiens
  CDR3 for alpha chain variable domain of TCR clone 356491 (TRAV12-1, TRAJ11)
CVVNRAGYSTLTF

SEQ ID NO: 712982 - protein, 13 aa, Homo sapiens
  CDR3 for beta chain variable domain of TCR clone 356491 (TRBV10-3, TRBJ2-7)
CASKLAVNYEQYF

SEQ ID NO: 712983 - protein, 15 aa, Homo sapiens
  CDR3 for alpha chain variable domain of TCR clone 356492 (TRAV26-1, TRAJ29)
CIVRVEGSGNTPLVF

SEQ ID NO: 712984 - protein, 14 aa, Homo sapiens
  CDR3 for beta chain variable domain of TCR clone 356492 (TRBV18, TRBJ2-5)
CASSRGVSQETQYF

SEQ ID NO: 712985 - protein, 13 aa, Homo sapiens
  CDR3 for alpha chain variable domain of TCR clone 356493 (TRAV2, TRAJ40)
CAVVTSGTYNYIF

SEQ ID NO: 712986 - protein, 12 aa, Homo sapiens
  CDR3 for beta chain variable domain of TCR clone 356493 (TRBV11-2, TRBJ2-1)
CASSPGNNEQFF

SEQ ID NO: 712987 - protein, 12 aa, Homo sapiens
  CDR3 for alpha chain variable domain of TCR clone 356494 (TRAV21, TRAJ6)
CAVKGGSYIPTF

SEQ ID NO: 712988 - protein, 13 aa, Homo sapiens
  CDR3 for beta chain variable domain of TCR clone 356494 (TRBV5-7, TRBJ2-6)
CASTSSGANVLTF

SEQ ID NO: 712989 - protein, 12 aa, Homo sapiens
  CDR3 for alpha chain variable domain of TCR clone 356495 (TRAV1-2, TRAJ33)
CAALDSNYQLIW

SEQ ID NO: 712990 - protein, 16 aa, Homo sapiens
  CDR3 for beta chain variable domain of TCR clone 356495 (TRBV6-4, TRBJ1-2)
CASSDAVGDPNYGYTF

SEQ ID NO: 712991 - protein, 13 aa, Homo sapiens
  CDR3 for alpha chain variable domain of TCR clone 356496 (TRAV20, TRAJ42)
CAVQAGSQGNLIF

SEQ ID NO: 712992 - protein, 15 aa, Homo sapiens
  CDR3 for beta chain variable domain of TCR clone 356496 (TRBV10-1, TRBJ2-1)
CASSEWRGTYNEQFF

SEQ ID NO: 712993 - protein, 14 aa, Homo sapiens
  CDR3 for alpha chain variable domain of TCR clone 356497 (TRAV1-2, TRAJ16)
CAVNRFTDGQKLLF

SEQ ID NO: 712994 - protein, 15 aa, Homo sapiens
  CDR3 for beta chain variable domain of TCR clone 356497 (TRBV5-1, TRBJ2-1)
CASSPPRAPYNEQFF

SEQ ID NO: 712995 - protein, 11 aa, Homo sapiens
  CDR3 for alpha chain variable domain of TCR clone 356498 (TRAV21, TRAJ31)
CAVRNNARLMF

SEQ ID NO: 712996 - protein, 14 aa, Homo sapiens
  CDR3 for beta chain variable domain of TCR clone 356498 (TRBV7-3, TRBJ2-3)
CASSPGASRDTQYF

SEQ ID NO: 712997 - protein, 11 aa, Homo sapiens
  CDR3 for alpha chain variable domain of TCR clone 356499 (TRAV35, TRAJ34)
CWARNTDKLIF

SEQ ID NO: 712998 - protein, 14 aa, Homo sapiens
  CDR3 for beta chain variable domain of TCR clone 356499 (TRBV7-2, TRBJ2-7)
CASSLYPGRYEQYF

SEQ ID NO: 712999 - protein, 12 aa, Homo sapiens
  CDR3 for alpha chain variable domain of TCR clone 356500 (TRAV12-3, TRAJ17)
CAMTLTGNNLTF

SEQ ID NO: 713000 - protein, 17 aa, Homo sapiens
  CDR3 for beta chain variable domain of TCR clone 356500 (TRBV7-3, TRBJ2-3)
CAGSLMKRMRGADTQYF

SEQ ID NO: 713001 - protein, 15 aa, Homo sapiens
  CDR3 for alpha chain variable domain of TCR clone 356501 (TRAV12-1, TRAJ4)
CVVNPFSGGYNKLIF

SEQ ID NO: 713002 - protein, 13 aa, Homo sapiens
  CDR3 for beta chain variable domain of TCR clone 356501 (TRBV10-3, TRBJ2-7)
CASKLAVNYEQCF

SEQ ID NO: 713003 - protein, 12 aa, Homo sapiens
  CDR3 for alpha chain variable domain of TCR clone 356502 (TRAV20, TRAJ39)
CAVGNAGNMLTF

SEQ ID NO: 713004 - protein, 14 aa, Homo sapiens
  CDR3 for beta chain variable domain of TCR clone 356502 (TRBV19, TRBJ2-2)
CASSGQGIAGELFF

SEQ ID NO: 713005 - protein, 16 aa, Homo sapiens
  CDR3 for alpha chain variable domain of TCR clone 356503 (TRAV30, TRAJ24)
CGTEIVDADSWGKFQF

SEQ ID NO: 713006 - protein, 15 aa, Homo sapiens
  CDR3 for beta chain variable domain of TCR clone 356503 (TRBV4-3, TRBJ1-1)
CASSQELGRGTEAFF

SEQ ID NO: 713007 - protein, 12 aa, Homo sapiens
  CDR3 for alpha chain variable domain of TCR clone 356504 (TRAV3, TRAJ7)
CAVLEENNRLAF

SEQ ID NO: 713008 - protein, 16 aa, Homo sapiens
  CDR3 for beta chain variable domain of TCR clone 356504 (TRBV4-1, TRBJ1-2)
CASSQDAGQVLYGYTF

SEQ ID NO: 713009 - protein, 16 aa, Homo sapiens
  CDR3 for alpha chain variable domain of TCR clone 356505 (TRAV30, TRAJ24)
CGTEIVDADNWGKFQF

SEQ ID NO: 713010 - protein, 13 aa, Homo sapiens
  CDR3 for beta chain variable domain of TCR clone 356505 (TRBV12-5, TRBJ2-3)
CASGDRQSDTQYF

SEQ ID NO: 713011 - protein, 13 aa, Homo sapiens
  CDR3 for alpha chain variable domain of TCR clone 356506 (TRAV12-3, TRAJ49)
CAMSRNTGNQVYF

SEQ ID NO: 713012 - protein, 14 aa, Homo sapiens
  CDR3 for beta chain variable domain of TCR clone 356506 (TRBV7-2, TRBJ2-7)
CASRSQGAAYEQYF

SEQ ID NO: 713013 - protein, 17 aa, Homo sapiens
  CDR3 for alpha chain variable domain of TCR clone 356507 (TRAV3, TRAJ6)
CAVRDGPRAGGSYIPTF

SEQ ID NO: 713014 - protein, 14 aa, Homo sapiens
  CDR3 for beta chain variable domain of TCR clone 356507 (TRBV7-2, TRBJ2-7)
CASRSQGAAYEQYS

SEQ ID NO: 713015 - protein, 14 aa, Homo sapiens
  CDR3 for alpha chain variable domain of TCR clone 356508 (TRAV12-2, TRAJ17)
CAVLFKAAGNKLTF

SEQ ID NO: 713016 - protein, 13 aa, Homo sapiens
  CDR3 for beta chain variable domain of TCR clone 356508 (TRBV7-9, TRBJ1-2)
CASSLRQNYGYTF

SEQ ID NO: 713017 - protein, 10 aa, Homo sapiens
  CDR3 for alpha chain variable domain of TCR clone 356509 (TRAV23/DV6, TRAJ31)
CARGGARLMF

SEQ ID NO: 713018 - protein, 14 aa, Homo sapiens
  CDR3 for beta chain variable domain of TCR clone 356509 (TRBV7-8, TRBJ1-2)
CASRPDSLSYGYTF

SEQ ID NO: 713019 - protein, 15 aa, Homo sapiens
  CDR3 for alpha chain variable domain of TCR clone 356510 (TRAV25, TRAJ53)
CAATGGGGSNDKLPF

SEQ ID NO: 713020 - protein, 11 aa, Homo sapiens
  CDR3 for beta chain variable domain of TCR clone 356510 (TRBV11-3, TRBJ2-2)
CASSSGGELFF

SEQ ID NO: 713021 - protein, 12 aa, Homo sapiens
  CDR3 for alpha chain variable domain of TCR clone 356511 (TRAV12-2, TRAJ42)
CAVGGSQGNPIF

SEQ ID NO: 713022 - protein, 20 aa, Homo sapiens
  CDR3 for beta chain variable domain of TCR clone 356511 (TRBV28, TRBJ2-1)
CASTPIGRSPGLAGGNEQFF

SEQ ID NO: 713023 - protein, 19 aa, Homo sapiens
  CDR3 for alpha chain variable domain of TCR clone 356512 (TRAV2, TRAJ20)
ILQVREADAAVYRDCKLSF

SEQ ID NO: 713024 - protein, 12 aa, Homo sapiens
  CDR3 for beta chain variable domain of TCR clone 356512 (TRBV11-2, TRBJ2-2)
YASSLGGGELFF

SEQ ID NO: 713025 - protein, 11 aa, Homo sapiens
  CDR3 for alpha chain variable domain of TCR clone 356513 (TRAV1-2, TRAJ21)
CALYNFNKFYF

SEQ ID NO: 713026 - protein, 16 aa, Homo sapiens
  CDR3 for beta chain variable domain of TCR clone 356513 (TRBV7-6, TRBJ2-3)
CASSLWREMGPDTQYF

SEQ ID NO: 713027 - protein, 13 aa, Homo sapiens
  CDR3 for alpha chain variable domain of TCR clone 356514 (TRAV12-2, TRAJ4)
CAVRSGGYNKLIF

SEQ ID NO: 713028 - protein, 15 aa, Homo sapiens
  CDR3 for beta chain variable domain of TCR clone 356514 (TRBV10-3, TRBJ2-1)
CVISDVQDRAYEQFF

SEQ ID NO: 713029 - protein, 16 aa, Homo sapiens
  CDR3 for alpha chain variable domain of TCR clone 356515 (TRAV12-3, TRAJ28)
CAMRANSGAGSYQLTF

SEQ ID NO: 713030 - protein, 14 aa, Homo sapiens
  CDR3 for beta chain variable domain of TCR clone 356515 (TRBV19, TRBJ2-1)
CASPTFVLSGEQFF

SEQ ID NO: 713031 - protein, 12 aa, Homo sapiens
  CDR3 for alpha chain variable domain of TCR clone 356516 (TRAV13-1, TRAJ21)
CAAKEGFNKFYF

SEQ ID NO: 713032 - protein, 15 aa, Homo sapiens
  CDR3 for beta chain variable domain of TCR clone 356516 (TRBV27, TRBJ1-5)
CASSSSGTGNQPQHF

SEQ ID NO: 713033 - protein, 14 aa, Homo sapiens
  CDR3 for alpha chain variable domain of TCR clone 356517 (TRAV12-2, TRAJ53)
CAVKGGGSNYKLTF

SEQ ID NO: 713034 - protein, 14 aa, Homo sapiens
  CDR3 for beta chain variable domain of TCR clone 356517 (TRBV19, TRBJ2-1)
CASQTFVLSGEQFF

SEQ ID NO: 713035 - protein, 12 aa, Homo sapiens
  CDR3 for alpha chain variable domain of TCR clone 356518 (TRAV17, TRAJ57)
CATDGGSEKLVF

SEQ ID NO: 713036 - protein, 13 aa, Homo sapiens
  CDR3 for beta chain variable domain of TCR clone 356518 (TRBV9, TRBJ2-1)
CASSVGQGGEQFF

SEQ ID NO: 713037 - protein, 17 aa, Homo sapiens
  CDR3 for alpha chain variable domain of TCR clone 356519 (TRAV23/DV6, TRAJ28)
CAALLAYPGAGSYQLTF

SEQ ID NO: 713038 - protein, 15 aa, Homo sapiens
  CDR3 for beta chain variable domain of TCR clone 356519 (TRBV7-2, TRBJ2-1)
CASSLVAGRYNEQFF

SEQ ID NO: 713039 - protein, 13 aa, Homo sapiens
  CDR3 for alpha chain variable domain of TCR clone 356520 (TRAV12-2, TRAJ20)
CAVYPSNDYKLSF

SEQ ID NO: 713040 - protein, 15 aa, Homo sapiens
  CDR3 for beta chain variable domain of TCR clone 356520 (TRBV5-1, TRBJ1-1)
CASSLSDLGGTEAFF

SEQ ID NO: 713041 - protein, 12 aa, Homo sapiens
  CDR3 for alpha chain variable domain of TCR clone 356521 (TRAV2, TRAJ10)
CASTGGGNKLTF

SEQ ID NO: 713042 - protein, 16 aa, Homo sapiens
  CDR3 for beta chain variable domain of TCR clone 356521 (TRBV12-4, TRBJ1-5)
CASSRPVGGSNQPQHF

SEQ ID NO: 713043 - protein, 13 aa, Homo sapiens
  CDR3 for alpha chain variable domain of TCR clone 356522 (TRAV12-2, TRAJ40)
CAVKRTGTYKYIV

SEQ ID NO: 713044 - protein, 15 aa, Homo sapiens
  CDR3 for beta chain variable domain of TCR clone 356522 (TRBV12-4, TRBJ1-2)
CASSPIAGGGYGYTF

SEQ ID NO: 713045 - protein, 12 aa, Homo sapiens
  CDR3 for alpha chain variable domain of TCR clone 356523 (TRAV17, TRAJ20)
CATYSNDYKLSF

SEQ ID NO: 713046 - protein, 11 aa, Homo sapiens
  CDR3 for beta chain variable domain of TCR clone 356523 (TRBV4-1, TRBJ2-2)
WASEHTGELFF

SEQ ID NO: 713047 - protein, 14 aa, Homo sapiens
  CDR3 for alpha chain variable domain of TCR clone 356524 (TRAV1-2, TRAJ16)
CAVNRFSDGQKLLF

SEQ ID NO: 713048 - protein, 13 aa, Homo sapiens
  CDR3 for beta chain variable domain of TCR clone 356524 (TRBV7-9, TRBJ2-1)
CASSLGTVNEQFF

SEQ ID NO: 713049 - protein, 12 aa, Homo sapiens
  CDR3 for alpha chain variable domain of TCR clone 356525 (TRAV26-1, TRAJ13)
IASSLGVTKVTF

SEQ ID NO: 713050 - protein, 16 aa, Homo sapiens
  CDR3 for beta chain variable domain of TCR clone 356525 (TRBV27, TRBJ2-1)
CASSLSKGFGLDEQFF

SEQ ID NO: 713051 - protein, 17 aa, Homo sapiens
  CDR3 for alpha chain variable domain of TCR clone 356526 (TRAV13-1, TRAJ28)
CAASPPYSGAGSYQLIF

SEQ ID NO: 713052 - protein, 15 aa, Homo sapiens
  CDR3 for beta chain variable domain of TCR clone 356526 (TRBV6-3, TRBJ2-2)
CASSFLATLTGELFF

SEQ ID NO: 713053 - protein, 17 aa, Homo sapiens
  CDR3 for alpha chain variable domain of TCR clone 356527 (TRAV3, TRAJ6)
CAVRDGPRAGGSSIPTF

SEQ ID NO: 713054 - protein, 13 aa, Homo sapiens
  CDR3 for beta chain variable domain of TCR clone 356527 (TRBV7-9, TRBJ2-7)
CASSFAGAYEQYF

SEQ ID NO: 713055 - protein, 19 aa, Homo sapiens
  CDR3 for alpha chain variable domain of TCR clone 356528 (TRAV3, TRAJ6)
CAVRDRSPSRSGGSYIPPF

SEQ ID NO: 713056 - protein, 15 aa, Homo sapiens
  CDR3 for beta chain variable domain of TCR clone 356528 (TRBV18, TRBJ2-7)
CASSPTFMDSYEQYF

SEQ ID NO: 713057 - protein, 17 aa, Homo sapiens
  CDR3 for alpha chain variable domain of TCR clone 356529 (TRAV38-2/DV8, TRAJ38)
CASRSARGAGNNRKLIW

SEQ ID NO: 713058 - protein, 13 aa, Homo sapiens
  CDR3 for beta chain variable domain of TCR clone 356529 (TRBV6-5, TRBJ2-1)
CASRGRVGNEQFF

SEQ ID NO: 713059 - protein, 14 aa, Homo sapiens
  CDR3 for alpha chain variable domain of TCR clone 356530 (TRAV8-4, TRAJ17)
CAVSEGAAGNKLTF

SEQ ID NO: 713060 - protein, 14 aa, Homo sapiens
  CDR3 for beta chain variable domain of TCR clone 356530 (TRBV12-5, TRBJ2-5)
CASGSRTHQETQYF

SEQ ID NO: 713061 - protein, 13 aa, Homo sapiens
  CDR3 for alpha chain variable domain of TCR clone 356531 (TRAV13-1, TRAJ52)
CAAGGTSYGKLTF

SEQ ID NO: 713062 - protein, 13 aa, Homo sapiens
  CDR3 for beta chain variable domain of TCR clone 356531 (TRBV2, TRBJ1-1)
CASRWTVNTEAFF

SEQ ID NO: 713063 - protein, 14 aa, Homo sapiens
  CDR3 for alpha chain variable domain of TCR clone 356532 (TRAV8-3, TRAJ30)
CAVGDMNRDDKTIV

SEQ ID NO: 713064 - protein, 17 aa, Homo sapiens
  CDR3 for beta chain variable domain of TCR clone 356532 (TRBV19, TRBJ2-2)
CASSRNPGGFGTGELFF

SEQ ID NO: 713065 - protein, 13 aa, Homo sapiens
  CDR3 for alpha chain variable domain of TCR clone 356533 (TRAV23/DV6, TRAJ16)
CAASISDGQKLLI

SEQ ID NO: 713066 - protein, 15 aa, Homo sapiens
  CDR3 for beta chain variable domain of TCR clone 356533 (TRBV2, TRBJ2-2)
CASSRETVGTGELFF

SEQ ID NO: 713067 - protein, 15 aa, Homo sapiens
  CDR3 for alpha chain variable domain of TCR clone 356534 (TRAV12-1, TRAJ36)
CVVNEHQTGANNLFF

SEQ ID NO: 713068 - protein, 12 aa, Homo sapiens
  CDR3 for beta chain variable domain of TCR clone 356534 (TRBV29-1, TRBJ2-3)
CSLTGGADTQYF

SEQ ID NO: 713069 - protein, 14 aa, Homo sapiens
  CDR3 for alpha chain variable domain of TCR clone 356535 (TRAV30, TRAJ33)
CGTVAPRSNYQLIW

SEQ ID NO: 713070 - protein, 18 aa, Homo sapiens
  CDR3 for beta chain variable domain of TCR clone 356535 (TRBV11-2, TRBJ2-3)
CASSLGGASRGTPNTQYF

SEQ ID NO: 713071 - protein, 14 aa, Homo sapiens
  CDR3 for alpha chain variable domain of TCR clone 356536 (TRAV2, TRAJ37)
CAVDFTSNTGKLIF

SEQ ID NO: 713072 - protein, 14 aa, Homo sapiens
  CDR3 for beta chain variable domain of TCR clone 356536 (TRBV19, TRBJ2-2)
CASSMVGLSGELFF

SEQ ID NO: 713073 - protein, 13 aa, Homo sapiens
  CDR3 for alpha chain variable domain of TCR clone 356537 (TRAV1-2, TRAJ36)
CAVDQTGANNLFF

SEQ ID NO: 713074 - protein, 14 aa, Homo sapiens
  CDR3 for beta chain variable domain of TCR clone 356537 (TRBV20-1, TRBJ2-5)
CSASEMTKQETQYF

SEQ ID NO: 713075 - protein, 11 aa, Homo sapiens
  CDR3 for alpha chain variable domain of TCR clone 356538 (TRAV1-2, TRAJ11)
CAVRGYSTHTF

SEQ ID NO: 713076 - protein, 18 aa, Homo sapiens
  CDR3 for beta chain variable domain of TCR clone 356538 (TRBV20-1, TRBJ2-6)
CSAETTPTHGSGANVLTF

SEQ ID NO: 713077 - protein, 14 aa, Homo sapiens
  CDR3 for alpha chain variable domain of TCR clone 356539 (TRAV1-1, TRAJ35)
CAVRSIGFGNVLHC

SEQ ID NO: 713078 - protein, 14 aa, Homo sapiens
  CDR3 for beta chain variable domain of TCR clone 356539 (TRBV25-1, TRBJ1-1)
CASTHLGGNTEAFF

SEQ ID NO: 713079 - protein, 12 aa, Homo sapiens
  CDR3 for alpha chain variable domain of TCR clone 356540 (TRAV13-2, TRAJ23)
CAERHRGRKLIF

SEQ ID NO: 713080 - protein, 13 aa, Homo sapiens
  CDR3 for beta chain variable domain of TCR clone 356540 (TRBV15, TRBJ1-6)
CATSGGLNSPLHF

SEQ ID NO: 713081 - protein, 16 aa, Homo sapiens
  CDR3 for alpha chain variable domain of TCR clone 356541 (TRAV38-1, TRAJ45)
CAFMKGSGGGSDGLTF

SEQ ID NO: 713082 - protein, 15 aa, Homo sapiens
  CDR3 for beta chain variable domain of TCR clone 356541 (TRBV7-2, TRBJ2-3)
CASSSTGLETDTQYF

SEQ ID NO: 713083 - protein, 12 aa, Homo sapiens
  CDR3 for alpha chain variable domain of TCR clone 356542 (TRAV16, TRAJ10)
CSRTGGGNKLTF

SEQ ID NO: 713084 - protein, 13 aa, Homo sapiens
  CDR3 for beta chain variable domain of TCR clone 356542 (TRBV7-3, TRBJ1-1)
CASGQDWGAEAFF

SEQ ID NO: 713085 - protein, 14 aa, Homo sapiens
  CDR3 for alpha chain variable domain of TCR clone 356543 (TRAV29/DV5, TRAJ36)
CAARRKTGANNFFF

SEQ ID NO: 713086 - protein, 14 aa, Homo sapiens
  CDR3 for beta chain variable domain of TCR clone 356543 (TRBV7-2, TRBJ2-7)
CASRSQGAAYEQYF

SEQ ID NO: 713087 - protein, 11 aa, Homo sapiens
  CDR3 for alpha chain variable domain of TCR clone 356544 (TRAV1-2, TRAJ31)
CAVKNNARLMF

SEQ ID NO: 713088 - protein, 11 aa, Homo sapiens
  CDR3 for beta chain variable domain of TCR clone 356544 (TRBV19, TRBJ1-1)
CASSIGSEAFF

SEQ ID NO: 713089 - protein, 16 aa, Homo sapiens
  CDR3 for alpha chain variable domain of TCR clone 356545 (TRAV17, TRAJ35)
CATAEGGIGFGNVLHC

SEQ ID NO: 713090 - protein, 17 aa, Homo sapiens
  CDR3 for beta chain variable domain of TCR clone 356545 (TRBV23-1, TRBJ2-1)
CASSQYTAAGVVMSSSS

SEQ ID NO: 713091 - protein, 14 aa, Homo sapiens
  CDR3 for alpha chain variable domain of TCR clone 356546 (TRAV12-2, TRAJ13)
CAVKKTGGYQKVTF

SEQ ID NO: 713092 - protein, 13 aa, Homo sapiens
  CDR3 for beta chain variable domain of TCR clone 356546 (TRBV12-4, TRBJ1-2)
CNSVPAVSYGYTF

SEQ ID NO: 713093 - protein, 17 aa, Homo sapiens
  CDR3 for alpha chain variable domain of TCR clone 356547 (TRAV3, TRAJ42)
CAVRDRDYGGSQGNLIF

SEQ ID NO: 713094 - protein, 14 aa, Homo sapiens
  CDR3 for beta chain variable domain of TCR clone 356547 (TRBV19, TRBJ1-5)
CASSKMTGPQPQHF

SEQ ID NO: 713095 - protein, 14 aa, Homo sapiens
  CDR3 for alpha chain variable domain of TCR clone 356548 (TRAV38-1, TRAJ40)
CALRPTSGTYKYIF

SEQ ID NO: 713096 - protein, 15 aa, Homo sapiens
  CDR3 for beta chain variable domain of TCR clone 356548 (TRBV3-1, TRBJ2-2)
CASSQDWTRAGELFF

SEQ ID NO: 713097 - protein, 16 aa, Homo sapiens
  CDR3 for alpha chain variable domain of TCR clone 356549 (TRAV3, TRAJ4)
CAVRPSPSGGYNKLIF

SEQ ID NO: 713098 - protein, 14 aa, Homo sapiens
  CDR3 for beta chain variable domain of TCR clone 356549 (TRBV7-2, TRBJ2-7)
CASSPKTSFYEQYF

SEQ ID NO: 713099 - protein, 14 aa, Homo sapiens
  CDR3 for alpha chain variable domain of TCR clone 356550 (TRAV12-3, TRAJ22)
CAMSLFGSARQLTF

SEQ ID NO: 713100 - protein, 13 aa, Homo sapiens
  CDR3 for beta chain variable domain of TCR clone 356550 (TRBV19, TRBJ1-2)
CASSVPGQDGYTF

SEQ ID NO: 713101 - protein, 15 aa, Homo sapiens
  CDR3 for alpha chain variable domain of TCR clone 356551 (TRAV3, TRAJ5)
RAVRDLDTGRRALTF

SEQ ID NO: 713102 - protein, 13 aa, Homo sapiens
  CDR3 for beta chain variable domain of TCR clone 356551 (TRBV12-4, TRBJ2-7)
CASSPTETYEQYV

SEQ ID NO: 713103 - protein, 13 aa, Homo sapiens
  CDR3 for alpha chain variable domain of TCR clone 356552 (TRAV2, TRAJ40)
CAVVTSGTYEYIF

SEQ ID NO: 713104 - protein, 14 aa, Homo sapiens
  CDR3 for beta chain variable domain of TCR clone 356552 (TRBV19, TRBJ2-1)
RASPTFVLSGEQFF

SEQ ID NO: 713105 - protein, 16 aa, Homo sapiens
  CDR3 for alpha chain variable domain of TCR clone 356553 (TRAV12-2, TRAJ56)
CAVRRVDTGANSKLTF

SEQ ID NO: 713106 - protein, 11 aa, Homo sapiens
  CDR3 for beta chain variable domain of TCR clone 356553 (TRBV3-1, TRBJ2-7)
CASSQVGEQYF

SEQ ID NO: 713107 - protein, 16 aa, Homo sapiens
  CDR3 for alpha chain variable domain of TCR clone 356554 (TRAV16, TRAJ42)
CARKINYGGSQGNLIF

SEQ ID NO: 713108 - protein, 13 aa, Homo sapiens
  CDR3 for beta chain variable domain of TCR clone 356554 (TRBV20-1, TRBJ2-7)
CSASPPSSYEQYF

SEQ ID NO: 713109 - protein, 12 aa, Homo sapiens
  CDR3 for alpha chain variable domain of TCR clone 356555 (TRAV17, TRAJ20)
CATDSNDFKLSF

SEQ ID NO: 713110 - protein, 16 aa, Homo sapiens
  CDR3 for beta chain variable domain of TCR clone 356555 (TRBV7-2, TRBJ1-2)
CASSSNQDRRGHGYTF

SEQ ID NO: 713111 - protein, 12 aa, Homo sapiens
  CDR3 for alpha chain variable domain of TCR clone 356556 (TRAV1-1, TRAJ8)
FAGGTGFQKLVF

SEQ ID NO: 713112 - protein, 13 aa, Homo sapiens
  CDR3 for beta chain variable domain of TCR clone 356556 (TRBV7-9, TRBJ1-2)
CASSLKQNYGYTF

SEQ ID NO: 713113 - protein, 17 aa, Homo sapiens
  CDR3 for alpha chain variable domain of TCR clone 356557 (TRAV1-2, TRAJ8)
CAVRDPDENTGFQKLVF

SEQ ID NO: 713114 - protein, 16 aa, Homo sapiens
  CDR3 for beta chain variable domain of TCR clone 356557 (TRBV7-9, TRBJ2-2)
CASSGFGGANTGDLFS

SEQ ID NO: 713115 - protein, 13 aa, Homo sapiens
  CDR3 for alpha chain variable domain of TCR clone 356558 (TRAV13-1, TRAJ11)
CAASIRGYSTLTF

SEQ ID NO: 713116 - protein, 14 aa, Homo sapiens
  CDR3 for beta chain variable domain of TCR clone 356558 (TRBV19, TRBJ2-1)
CARGARSFQWEQFF

SEQ ID NO: 713117 - protein, 14 aa, Homo sapiens
  CDR3 for alpha chain variable domain of TCR clone 356559 (TRAV26-1, TRAJ52)
CIPAGGTSHGKLTF

SEQ ID NO: 713118 - protein, 16 aa, Homo sapiens
  CDR3 for beta chain variable domain of TCR clone 356559 (TRBV19, TRBJ2-2)
CASTSGARAGAGELFF

SEQ ID NO: 713119 - protein, 15 aa, Homo sapiens
  CDR3 for alpha chain variable domain of TCR clone 356560 (TRAV17, TRAJ56)
CATEPFTGGNSKLTF

SEQ ID NO: 713120 - protein, 15 aa, Homo sapiens
  CDR3 for beta chain variable domain of TCR clone 356560 (TRBV28, TRBJ1-5)
GASSRTGGYVQPQHF

SEQ ID NO: 713121 - protein, 16 aa, Homo sapiens
  CDR3 for alpha chain variable domain of TCR clone 356561 (TRAV13-1, TRAJ48)
CAASIFGTFGNEKLTF

SEQ ID NO: 713122 - protein, 16 aa, Homo sapiens
  CDR3 for beta chain variable domain of TCR clone 356561 (TRBV18, TRBJ1-5)
CASSPYRVEGNQPQHF

SEQ ID NO: 713123 - protein, 12 aa, Homo sapiens
  CDR3 for alpha chain variable domain of TCR clone 356562 (TRAV25, TRAJ48)
CAGDFGNEKLTF

SEQ ID NO: 713124 - protein, 12 aa, Homo sapiens
  CDR3 for beta chain variable domain of TCR clone 356562 (TRBV2, TRBJ2-5)
CASKEYGESQYF

SEQ ID NO: 713125 - protein, 14 aa, Homo sapiens
  CDR3 for alpha chain variable domain of TCR clone 356563 (TRAV29/DV5, TRAJ36)
CAARRKTGANNLFF

SEQ ID NO: 713126 - protein, 16 aa, Homo sapiens
  CDR3 for beta chain variable domain of TCR clone 356563 (TRBV6-1, TRBJ2-1)
CASILRQGSSYNEEFF

SEQ ID NO: 713127 - protein, 12 aa, Homo sapiens
  CDR3 for alpha chain variable domain of TCR clone 356564 (TRAV23/DV6, TRAJ3)
CAARAPQQCFQD

SEQ ID NO: 713128 - protein, 14 aa, Homo sapiens
  CDR3 for beta chain variable domain of TCR clone 356564 (TRBV7-2, TRBJ1-2)
CASSQTGSTYGYTF

SEQ ID NO: 713129 - protein, 14 aa, Homo sapiens
  CDR3 for alpha chain variable domain of TCR clone 356565 (TRAV13-2, TRAJ16)
CAENNWEDGQKLLF

SEQ ID NO: 713130 - protein, 16 aa, Homo sapiens
  CDR3 for beta chain variable domain of TCR clone 356565 (TRBV7-3, TRBJ2-2)
CASSLKRGTLSGELFF

SEQ ID NO: 713131 - protein, 16 aa, Homo sapiens
  CDR3 for alpha chain variable domain of TCR clone 356566 (TRAV27, TRAJ52)
CAGAGAGGTSYGKLTF

SEQ ID NO: 713132 - protein, 17 aa, Homo sapiens
  CDR3 for beta chain variable domain of TCR clone 356566 (TRBV24-1, TRBJ2-3)
CATSDLTSGEDTDTQYF

SEQ ID NO: 713133 - protein, 19 aa, Homo sapiens
  CDR3 for alpha chain variable domain of TCR clone 356567 (TRAV3, TRAJ6)
CAVRDRKPSRSGGSYIPTF

SEQ ID NO: 713134 - protein, 15 aa, Homo sapiens
  CDR3 for beta chain variable domain of TCR clone 356567 (TRBV18, TRBJ2-7)
CASSPTFMDSYEQYF

SEQ ID NO: 713135 - protein, 15 aa, Homo sapiens
  CDR3 for alpha chain variable domain of TCR clone 356568 (TRAV12-3, TRAJ23)
CAMILIYNQGGKLIF

SEQ ID NO: 713136 - protein, 15 aa, Homo sapiens
  CDR3 for beta chain variable domain of TCR clone 356568 (TRBV11-2, TRBJ2-2)
CASSSDRVNAGELFF

SEQ ID NO: 713137 - protein, 15 aa, Homo sapiens
  CDR3 for alpha chain variable domain of TCR clone 356569 (TRAV12-2, TRAJ53)
CAVNGGGGSNYKLTF

SEQ ID NO: 713138 - protein, 13 aa, Homo sapiens
  CDR3 for beta chain variable domain of TCR clone 356569 (TRBV3-1, TRBJ1-1)
CASSPGVITEAFY

SEQ ID NO: 713139 - protein, 14 aa, Homo sapiens
  CDR3 for alpha chain variable domain of TCR clone 356570 (TRAV12-2, TRAJ15)
CAPHTGQAGTALIF

SEQ ID NO: 713140 - protein, 11 aa, Homo sapiens
  CDR3 for beta chain variable domain of TCR clone 356570 (TRBV12-4, TRBJ2-3)
CASTATDTQYF

SEQ ID NO: 713141 - protein, 13 aa, Homo sapiens
  CDR3 for alpha chain variable domain of TCR clone 356571 (TRAV21, TRAJ20)
CAVGLRVDYKLSF

SEQ ID NO: 713142 - protein, 13 aa, Homo sapiens
  CDR3 for beta chain variable domain of TCR clone 356571 (TRBV29-1, TRBJ2-1)
CSVEGGMVNEQFF

SEQ ID NO: 713143 - protein, 16 aa, Homo sapiens
  CDR3 for alpha chain variable domain of TCR clone 356572 (TRAV35, TRAJ28)
CAGQRYSGAGSYQLPF

SEQ ID NO: 713144 - protein, 13 aa, Homo sapiens
  CDR3 for beta chain variable domain of TCR clone 356572 (TRBV19, TRBJ1-2)
CASSQGQVYGYTF

SEQ ID NO: 713145 - protein, 13 aa, Homo sapiens
  CDR3 for alpha chain variable domain of TCR clone 356573 (TRAV12-3, TRAJ13)
CAMGTGGYQKVTF

SEQ ID NO: 713146 - protein, 15 aa, Homo sapiens
  CDR3 for beta chain variable domain of TCR clone 356573 (TRBV20-1, TRBJ2-7)
CSARDRVSGMDEQYF

SEQ ID NO: 713147 - protein, 15 aa, Homo sapiens
  CDR3 for alpha chain variable domain of TCR clone 356574 (TRAV17, TRAJ57)
CATGPSQGGSEKLVF

SEQ ID NO: 713148 - protein, 15 aa, Homo sapiens
  CDR3 for beta chain variable domain of TCR clone 356574 (TRBV7-8, TRBJ1-1)
CASSLGDSRNTEAFF

SEQ ID NO: 713149 - protein, 17 aa, Homo sapiens
  CDR3 for alpha chain variable domain of TCR clone 356575 (TRAV23/DV6, TRAJ57)
CAASSTLSQGGSEKLVF

SEQ ID NO: 713150 - protein, 14 aa, Homo sapiens
  CDR3 for beta chain variable domain of TCR clone 356575 (TRBV12-4, TRBJ1-1)
CASSLGTGGTEAFF

SEQ ID NO: 713151 - protein, 14 aa, Homo sapiens
  CDR3 for alpha chain variable domain of TCR clone 356576 (TRAV12-1, TRAJ43)
CVVNGRSNNNDMRF

SEQ ID NO: 713152 - protein, 13 aa, Homo sapiens
  CDR3 for beta chain variable domain of TCR clone 356576 (TRBV2, TRBJ1-4)
CASSELGVEKLFS

SEQ ID NO: 713153 - protein, 15 aa, Homo sapiens
  CDR3 for alpha chain variable domain of TCR clone 356577 (TRAV8-4, TRAJ12)
CAVSDRVDSSYKLIF

SEQ ID NO: 713154 - protein, 13 aa, Homo sapiens
  CDR3 for beta chain variable domain of TCR clone 356577 (TRBV10-3, TRBJ2-7)
CASKLAVNYEQYF

SEQ ID NO: 713155 - protein, 14 aa, Homo sapiens
  CDR3 for alpha chain variable domain of TCR clone 356578 (TRAV1-2, TRAJ16)
CAVNRFSDVQKLLF

SEQ ID NO: 713156 - protein, 16 aa, Homo sapiens
  CDR3 for beta chain variable domain of TCR clone 356578 (TRBV27, TRBJ2-2)
CASSFRGLVRTGELFF

SEQ ID NO: 713157 - protein, 12 aa, Homo sapiens
  CDR3 for alpha chain variable domain of TCR clone 356579 (TRAV29/DV5, TRAJ41)
CAAISSGYALNF

SEQ ID NO: 713158 - protein, 14 aa, Homo sapiens
  CDR3 for beta chain variable domain of TCR clone 356579 (TRBV6-1, TRBJ1-3)
CASVQGGGGNTIYF

SEQ ID NO: 713159 - protein, 16 aa, Homo sapiens
  CDR3 for alpha chain variable domain of TCR clone 356580 (TRAV8-4, TRAJ18)
CAVTANGGSTLGKLYF

SEQ ID NO: 713160 - protein, 14 aa, Homo sapiens
  CDR3 for beta chain variable domain of TCR clone 356580 (TRBV12-4, TRBJ1-2)
CASSSAGHIYGYTF

SEQ ID NO: 713161 - protein, 11 aa, Homo sapiens
  CDR3 for alpha chain variable domain of TCR clone 356581 (TRAV1-1, TRAJ23)
CAVRQGGKLIF

SEQ ID NO: 713162 - protein, 15 aa, Homo sapiens
  CDR3 for beta chain variable domain of TCR clone 356581 (TRBV7-3, TRBJ2-2)
CASSETGQGTGELFF

SEQ ID NO: 713163 - protein, 11 aa, Homo sapiens
  CDR3 for alpha chain variable domain of TCR clone 356582 (TRAV12-2, TRAJ39)
CAVNNMLTFGG

SEQ ID NO: 713164 - protein, 16 aa, Homo sapiens
  CDR3 for beta chain variable domain of TCR clone 356582 (TRBV9, TRBJ2-7)
WASSAGPDRSPYEQYF

SEQ ID NO: 713165 - protein, 15 aa, Homo sapiens
  CDR3 for alpha chain variable domain of TCR clone 356583 (TRAV8-4, TRAJ3)
CAVTGENLVQQCFQD

SEQ ID NO: 713166 - protein, 14 aa, Homo sapiens
  CDR3 for beta chain variable domain of TCR clone 356583 (TRBV2, TRBJ2-7)
CASSLTSGGYEQYF

SEQ ID NO: 713167 - protein, 14 aa, Homo sapiens
  CDR3 for alpha chain variable domain of TCR clone 356584 (TRAV1-2, TRAJ16)
CAVNRFSDGQKLLF

SEQ ID NO: 713168 - protein, 15 aa, Homo sapiens
  CDR3 for beta chain variable domain of TCR clone 356584 (TRBV11-3, TRBJ2-5)
YASSDTSGGIETQYF

SEQ ID NO: 713169 - protein, 17 aa, Homo sapiens
  CDR3 for alpha chain variable domain of TCR clone 356585 (TRAV20, TRAJ28)
CAVQGGYSGAGSYQLTF

SEQ ID NO: 713170 - protein, 12 aa, Homo sapiens
  CDR3 for beta chain variable domain of TCR clone 356585 (TRBV24-1, TRBJ1-1)
RATLYPDTEAFF

SEQ ID NO: 713171 - protein, 14 aa, Homo sapiens
  CDR3 for alpha chain variable domain of TCR clone 356586 (TRAV2, TRAJ9)
CAVEVRSGGFKTIF

SEQ ID NO: 713172 - protein, 19 aa, Homo sapiens
  CDR3 for beta chain variable domain of TCR clone 356586 (TRBV25-1, TRBJ2-2)
CAILVYRVDRGRKTGELFF

SEQ ID NO: 713173 - protein, 12 aa, Homo sapiens
  CDR3 for alpha chain variable domain of TCR clone 356587 (TRAV26-1, TRAJ48)
CIVSGGNEKLTF

SEQ ID NO: 713174 - protein, 13 aa, Homo sapiens
  CDR3 for beta chain variable domain of TCR clone 356587 (TRBV18, TRBJ2-7)
CASCRDSAYEQYF

SEQ ID NO: 713175 - protein, 15 aa, Homo sapiens
  CDR3 for alpha chain variable domain of TCR clone 356588 (TRAV26-1, TRAJ29)
CIVRVEGSGNTPLVF

SEQ ID NO: 713176 - protein, 12 aa, Homo sapiens
  CDR3 for beta chain variable domain of TCR clone 356588 (TRBV4-1, TRBJ2-3)
CASSQGTDTQYF

SEQ ID NO: 713177 - protein, 14 aa, Homo sapiens
  CDR3 for alpha chain variable domain of TCR clone 356589 (TRAV12-3, TRAJ10)
SHLPLTGGGNKLTF

SEQ ID NO: 713178 - protein, 13 aa, Homo sapiens
  CDR3 for beta chain variable domain of TCR clone 356589 (TRBV20-1, TRBJ2-5)
CSARGDYKETQYF

SEQ ID NO: 713179 - protein, 14 aa, Homo sapiens
  CDR3 for alpha chain variable domain of TCR clone 356590 (TRAV29/DV5, TRAJ6)
CAARVSGGSYIPTF

SEQ ID NO: 713180 - protein, 15 aa, Homo sapiens
  CDR3 for beta chain variable domain of TCR clone 356590 (TRBV20-1, TRBJ2-7)
CSARDRVSGMDEQYF

SEQ ID NO: 713181 - protein, 14 aa, Homo sapiens
  CDR3 for alpha chain variable domain of TCR clone 356591 (TRAV30, TRAJ26)
CGTEIVSYGQNFVF

SEQ ID NO: 713182 - protein, 13 aa, Homo sapiens
  CDR3 for beta chain variable domain of TCR clone 356591 (TRBV19, TRBJ1-3)
CASRLSLGNTIFF

SEQ ID NO: 713183 - protein, 14 aa, Homo sapiens
  CDR3 for alpha chain variable domain of TCR clone 356592 (TRAV8-3, TRAJ9)
CAVVYNTGVFKTIF

SEQ ID NO: 713184 - protein, 14 aa, Homo sapiens
  CDR3 for beta chain variable domain of TCR clone 356592 (TRBV7-3, TRBJ2-2)
SASSSGGYTGELFF

SEQ ID NO: 713185 - protein, 14 aa, Homo sapiens
  CDR3 for alpha chain variable domain of TCR clone 356593 (TRAV9-2, TRAJ39)
CALYIYNAGNMLTF

SEQ ID NO: 713186 - protein, 16 aa, Homo sapiens
  CDR3 for beta chain variable domain of TCR clone 356593 (TRBV29-1, TRBJ2-6)
CSVKDITYSGANVLTF

SEQ ID NO: 713187 - protein, 15 aa, Homo sapiens
  CDR3 for alpha chain variable domain of TCR clone 356594 (TRAV8-4, TRAJ42)
CAVSDDRGSQGNRIF

SEQ ID NO: 713188 - protein, 17 aa, Homo sapiens
  CDR3 for beta chain variable domain of TCR clone 356594 (TRBV11-2, TRBJ2-1)
CASSLYPPGVEYNEQFF

SEQ ID NO: 713189 - protein, 12 aa, Homo sapiens
  CDR3 for alpha chain variable domain of TCR clone 356595 (TRAV16, TRAJ10)
CYRTGGGNKLTF

SEQ ID NO: 713190 - protein, 11 aa, Homo sapiens
  CDR3 for beta chain variable domain of TCR clone 356595 (TRBV29-1, TRBJ2-5)
CSEDRTGTQYF

SEQ ID NO: 713191 - protein, 14 aa, Homo sapiens
  CDR3 for alpha chain variable domain of TCR clone 356596 (TRAV2, TRAJ9)
CAVEDRSGGFKTIF

SEQ ID NO: 713192 - protein, 13 aa, Homo sapiens
  CDR3 for beta chain variable domain of TCR clone 356596 (TRBV7-9, TRBJ1-2)
CASSLKQNYRHTF

SEQ ID NO: 713193 - protein, 14 aa, Homo sapiens
  CDR3 for alpha chain variable domain of TCR clone 356597 (TRAV21, TRAJ37)
CAVKGSSNTGKLIF

SEQ ID NO: 713194 - protein, 13 aa, Homo sapiens
  CDR3 for beta chain variable domain of TCR clone 356597 (TRBV7-2, TRBJ2-5)
CASSQTSVDTQYF

SEQ ID NO: 713195 - protein, 11 aa, Homo sapiens
  CDR3 for alpha chain variable domain of TCR clone 356598 (TRAV21, TRAJ9)
CAVPGGFKTIF

SEQ ID NO: 713196 - protein, 17 aa, Homo sapiens
  CDR3 for beta chain variable domain of TCR clone 356598 (TRBV7-9, TRBJ2-5)
CATSGGARDPVRRARRA

SEQ ID NO: 713197 - protein, 14 aa, Homo sapiens
  CDR3 for alpha chain variable domain of TCR clone 356599 (TRAV8-3, TRAJ3)
CAVVPRSSASKIIF

SEQ ID NO: 713198 - protein, 16 aa, Homo sapiens
  CDR3 for beta chain variable domain of TCR clone 356599 (TRBV4-1, TRBJ2-3)
CASSPLTSGGGGYAVF

SEQ ID NO: 713199 - protein, 14 aa, Homo sapiens
  CDR3 for alpha chain variable domain of TCR clone 356600 (TRAV8-6, TRAJ48)
CAVRTNFGNEKLTF

SEQ ID NO: 713200 - protein, 16 aa, Homo sapiens
  CDR3 for beta chain variable domain of TCR clone 356600 (TRBV29-1, TRBJ2-7)
CSVEVVGTSGSYEQYF

SEQ ID NO: 713201 - protein, 12 aa, Homo sapiens
  CDR3 for alpha chain variable domain of TCR clone 356601 (TRAV8-1, TRAJ23)
CAVGNQGGKLIF

SEQ ID NO: 713202 - protein, 16 aa, Homo sapiens
  CDR3 for beta chain variable domain of TCR clone 356601 (TRBV7-3, TRBJ2-2)
CASSLKRGALSGELFF

SEQ ID NO: 713203 - protein, 15 aa, Homo sapiens
  CDR3 for alpha chain variable domain of TCR clone 356602 (TRAV8-3, TRAJ23)
CAVVDRYNQGGKLIF

SEQ ID NO: 713204 - protein, 15 aa, Homo sapiens
  CDR3 for beta chain variable domain of TCR clone 356602 (TRBV29-1, TRBJ2-5)
EASSIYLCSAGTQYF

SEQ ID NO: 713205 - protein, 16 aa, Homo sapiens
  CDR3 for alpha chain variable domain of TCR clone 356603 (TRAV26-2, TRAJ57)
CILRDVGSGGSEKLVF

SEQ ID NO: 713206 - protein, 13 aa, Homo sapiens
  CDR3 for beta chain variable domain of TCR clone 356603 (TRBV18, TRBJ2-3)
CASSPGVTDTRYF

SEQ ID NO: 713207 - protein, 12 aa, Homo sapiens
  CDR3 for alpha chain variable domain of TCR clone 356604 (TRAV13-1, TRAJ20)
CAARQNDYKLSF

SEQ ID NO: 713208 - protein, 17 aa, Homo sapiens
  CDR3 for beta chain variable domain of TCR clone 356604 (TRBV24-1, TRBJ2-1)
CATSDVSTSGTYNEQFF

SEQ ID NO: 713209 - protein, 13 aa, Homo sapiens
  CDR3 for alpha chain variable domain of TCR clone 356605 (TRAV21, TRAJ20)
CAVGLRVDYKLSF

SEQ ID NO: 713210 - protein, 16 aa, Homo sapiens
  CDR3 for beta chain variable domain of TCR clone 356605 (TRBV20-1, TRBJ2-5)
CSARDSSGGLGETQYF

SEQ ID NO: 713211 - protein, 15 aa, Homo sapiens
  CDR3 for alpha chain variable domain of TCR clone 356606 (TRAV25, TRAJ53)
CPTSNSGGSNYKLTF

SEQ ID NO: 713212 - protein, 18 aa, Homo sapiens
  CDR3 for beta chain variable domain of TCR clone 356606 (TRBV6-6, TRBJ1-3)
CASSYSKWDSISGNTIYF

SEQ ID NO: 713213 - protein, 16 aa, Homo sapiens
  CDR3 for alpha chain variable domain of TCR clone 356607 (TRAV35, TRAJ28)
CAGVAYSGAGSYQLTF

SEQ ID NO: 713214 - protein, 14 aa, Homo sapiens
  CDR3 for beta chain variable domain of TCR clone 356607 (TRBV19, TRBJ2-7)
CASSIFAGTYEQYF

SEQ ID NO: 713215 - protein, 16 aa, Homo sapiens
  CDR3 for alpha chain variable domain of TCR clone 356608 (TRAV3, TRAJ37)
CAVRGKGSGNRGKLIF

SEQ ID NO: 713216 - protein, 13 aa, Homo sapiens
  CDR3 for beta chain variable domain of TCR clone 356608 (TRBV14, TRBJ2-7)
CASSQDRRYEQYF

SEQ ID NO: 713217 - protein, 13 aa, Homo sapiens
  CDR3 for alpha chain variable domain of TCR clone 356609 (TRAV12-2, TRAJ10)
CAVPTGGGNKLTF

SEQ ID NO: 713218 - protein, 11 aa, Homo sapiens
  CDR3 for beta chain variable domain of TCR clone 356609 (TRBV12-4, TRBJ2-2)
YASSSAGELFF

SEQ ID NO: 713219 - protein, 14 aa, Homo sapiens
  CDR3 for alpha chain variable domain of TCR clone 356610 (TRAV1-2, TRAJ8)
CAVREDTGFQKLVF

SEQ ID NO: 713220 - protein, 14 aa, Homo sapiens
  CDR3 for beta chain variable domain of TCR clone 356610 (TRBV11-1, TRBJ2-4)
CASSPVIGKNIQYF

SEQ ID NO: 713221 - protein, 10 aa, Homo sapiens
  CDR3 for alpha chain variable domain of TCR clone 356611 (TRAV38-2/DV8, TRAJ40)
CASGTHKYIF

SEQ ID NO: 713222 - protein, 14 aa, Homo sapiens
  CDR3 for beta chain variable domain of TCR clone 356611 (TRBV7-9, TRBJ2-1)
CASSPRDSLYEQFF

SEQ ID NO: 713223 - protein, 15 aa, Homo sapiens
  CDR3 for alpha chain variable domain of TCR clone 356612 (TRAV23/DV6, TRAJ33)
CAASNSGGGNYQLIW

SEQ ID NO: 713224 - protein, 15 aa, Homo sapiens
  CDR3 for beta chain variable domain of TCR clone 356612 (TRBV20-1, TRBJ2-1)
CSARFSAGGLNEQFF

SEQ ID NO: 713225 - protein, 16 aa, Homo sapiens
  CDR3 for alpha chain variable domain of TCR clone 356613 (TRAV3, TRAJ37)
CAVRPHGSGNTGKLIF

SEQ ID NO: 713226 - protein, 17 aa, Homo sapiens
  CDR3 for beta chain variable domain of TCR clone 356613 (TRBV20-1, TRBJ2-1)
CSDGSSGLAGSYNEQFF

SEQ ID NO: 713227 - protein, 14 aa, Homo sapiens
  CDR3 for alpha chain variable domain of TCR clone 356614 (TRAV12-1, TRAJ3)
CGAARYSSASKIIF

SEQ ID NO: 713228 - protein, 15 aa, Homo sapiens
  CDR3 for beta chain variable domain of TCR clone 356614 (TRBV7-2, TRBJ2-6)
CASSREGSGANDLSF

SEQ ID NO: 713229 - protein, 14 aa, Homo sapiens
  CDR3 for alpha chain variable domain of TCR clone 356615 (TRAV12-2, TRAJ5)
LAVNIRVRGRALTF

SEQ ID NO: 713230 - protein, 16 aa, Homo sapiens
  CDR3 for beta chain variable domain of TCR clone 356615 (TRBV5-1, TRBJ1-6)
CASSFTGTGGDSPLHF

SEQ ID NO: 713231 - protein, 12 aa, Homo sapiens
  CDR3 for alpha chain variable domain of TCR clone 356616 (TRAV16, TRAJ56)
CDPTGANSKLTF

SEQ ID NO: 713232 - protein, 17 aa, Homo sapiens
  CDR3 for beta chain variable domain of TCR clone 356616 (TRBV27, TRBJ2-6)
CASSLTGFASGANVLTF

SEQ ID NO: 713233 - protein, 14 aa, Homo sapiens
  CDR3 for alpha chain variable domain of TCR clone 356617 (TRAV8-3, TRAJ4)
CAVGAAGGYNKLIF

SEQ ID NO: 713234 - protein, 14 aa, Homo sapiens
  CDR3 for beta chain variable domain of TCR clone 356617 (TRBV2, TRBJ2-1)
CASRTGSSYNEQFF

SEQ ID NO: 713235 - protein, 14 aa, Homo sapiens
  CDR3 for alpha chain variable domain of TCR clone 356618 (TRAV8-3, TRAJ35)
CAVVPQGFGNVLHC

SEQ ID NO: 713236 - protein, 15 aa, Homo sapiens
  CDR3 for beta chain variable domain of TCR clone 356618 (TRBV6-1, TRBJ2-2)
GASSAGQGYAGELFF

SEQ ID NO: 713237 - protein, 14 aa, Homo sapiens
  CDR3 for alpha chain variable domain of TCR clone 356619 (TRAV3, TRAJ7)
CAVRGEEREPQTRF

SEQ ID NO: 713238 - protein, 12 aa, Homo sapiens
  CDR3 for beta chain variable domain of TCR clone 356619 (TRBV7-8, TRBJ2-7)
CASSLGDREQYF

SEQ ID NO: 713239 - protein, 18 aa, Homo sapiens
  CDR3 for alpha chain variable domain of TCR clone 356620 (TRAV29/DV5, TRAJ52)
CAAGFRGAGGTSYGKLTF

SEQ ID NO: 713240 - protein, 13 aa, Homo sapiens
  CDR3 for beta chain variable domain of TCR clone 356620 (TRBV7-9, TRBJ2-1)
CASSLDVGNEQFF

SEQ ID NO: 713241 - protein, 13 aa, Homo sapiens
  CDR3 for alpha chain variable domain of TCR clone 356621 (TRAV3, TRAJ20)
CAVRSLNDYKLSF

SEQ ID NO: 713242 - protein, 15 aa, Homo sapiens
  CDR3 for beta chain variable domain of TCR clone 356621 (TRBV7-9, TRBJ2-1)
CASSPRQGSYNEQFF

SEQ ID NO: 713243 - protein, 16 aa, Homo sapiens
  CDR3 for alpha chain variable domain of TCR clone 356622 (TRAV3, TRAJ37)
CAVRPHGSCNTGKLIF

SEQ ID NO: 713244 - protein, 15 aa, Homo sapiens
  CDR3 for beta chain variable domain of TCR clone 356622 (TRBV20-1, TRBJ2-7)
CSARDRVAGMDEQYF

SEQ ID NO: 713245 - protein, 11 aa, Homo sapiens
  CDR3 for alpha chain variable domain of TCR clone 356623 (TRAV9-2, TRAJ49)
CALSAGNQFYF

SEQ ID NO: 713246 - protein, 16 aa, Homo sapiens
  CDR3 for beta chain variable domain of TCR clone 356623 (TRBV28, TRBJ2-6)
CASSNRRGSGANVLTL

SEQ ID NO: 713247 - protein, 14 aa, Homo sapiens
  CDR3 for alpha chain variable domain of TCR clone 356624 (TRAV12-2, TRAJ40)
CAVKIPSGTYKYIF

SEQ ID NO: 713248 - protein, 17 aa, Homo sapiens
  CDR3 for beta chain variable domain of TCR clone 356624 (TRBV13, TRBJ2-3)
CASSLSRGAGGRNTQYF

SEQ ID NO: 713249 - protein, 16 aa, Homo sapiens
  CDR3 for alpha chain variable domain of TCR clone 356625 (TRAV26-2, TRAJ57)
CILRDVGSGGSDKPVF

SEQ ID NO: 713250 - protein, 13 aa, Homo sapiens
  CDR3 for beta chain variable domain of TCR clone 356625 (TRBV18, TRBJ2-3)
CASSPGVTDTQYF

SEQ ID NO: 713251 - protein, 11 aa, Homo sapiens
  CDR3 for alpha chain variable domain of TCR clone 356626 (TRAV2, TRAJ13)
CASGGDQKVTF

SEQ ID NO: 713252 - protein, 16 aa, Homo sapiens
  CDR3 for beta chain variable domain of TCR clone 356626 (TRBV11-2, TRBJ2-7)
CASSPLAGGPRYEQYF

SEQ ID NO: 713253 - protein, 16 aa, Homo sapiens
  CDR3 for alpha chain variable domain of TCR clone 356627 (TRAV4, TRAJ22)
CLVGDLFSGSARQLTF

SEQ ID NO: 713254 - protein, 16 aa, Homo sapiens
  CDR3 for beta chain variable domain of TCR clone 356627 (TRBV7-9, TRBJ2-1)
CASSGVAGGSYNEQFF

SEQ ID NO: 713255 - protein, 13 aa, Homo sapiens
  CDR3 for alpha chain variable domain of TCR clone 356628 (TRAV13-1, TRAJ39)
CSKYSNAGNMLTF

SEQ ID NO: 713256 - protein, 14 aa, Homo sapiens
  CDR3 for beta chain variable domain of TCR clone 356628 (TRBV13, TRBJ2-7)
CASSLKGASYEQYF

SEQ ID NO: 713257 - protein, 18 aa, Homo sapiens
  CDR3 for alpha chain variable domain of TCR clone 356629 (TRAV8-4, TRAJ52)
CAVTRANAGGTSYGKLTF

SEQ ID NO: 713258 - protein, 20 aa, Homo sapiens
  CDR3 for beta chain variable domain of TCR clone 356629 (TRBV19, TRBJ2-1)
CASGISRTVTSTRLNNEQFF

SEQ ID NO: 713259 - protein, 15 aa, Homo sapiens
  CDR3 for alpha chain variable domain of TCR clone 356630 (TRAV23/DV6, TRAJ13)
CAAWPGGGGYQKVTF

SEQ ID NO: 713260 - protein, 17 aa, Homo sapiens
  CDR3 for beta chain variable domain of TCR clone 356630 (TRBV19, TRBJ2-7)
CTSSISFYDSYPYEQYF

SEQ ID NO: 713261 - protein, 13 aa, Homo sapiens
  CDR3 for alpha chain variable domain of TCR clone 356631 (TRAV1-2, TRAJ9)
CAVLNTGGFKTIF

SEQ ID NO: 713262 - protein, 14 aa, Homo sapiens
  CDR3 for beta chain variable domain of TCR clone 356631 (TRBV20-1, TRBJ2-3)
CSARGGTSTDTKYF

SEQ ID NO: 713263 - protein, 12 aa, Homo sapiens
  CDR3 for alpha chain variable domain of TCR clone 356632 (TRAV8-3, TRAJ20)
CAVGANDYKLSF

SEQ ID NO: 713264 - protein, 13 aa, Homo sapiens
  CDR3 for beta chain variable domain of TCR clone 356632 (TRBV7-9, TRBJ2-1)
CASSWESYNEQFF

SEQ ID NO: 713265 - protein, 20 aa, Homo sapiens
  CDR3 for alpha chain variable domain of TCR clone 356633 (TRAV21, TRAJ35)
AASQPGDSATYRTRGNVLHC

SEQ ID NO: 713266 - protein, 13 aa, Homo sapiens
  CDR3 for beta chain variable domain of TCR clone 356633 (TRBV28, TRBJ2-7)
CASKAGGVYEQYF

SEQ ID NO: 713267 - protein, 15 aa, Homo sapiens
  CDR3 for alpha chain variable domain of TCR clone 356634 (TRAV21, TRAJ13)
CAVRPTAGGYQKVTF

SEQ ID NO: 713268 - protein, 18 aa, Homo sapiens
  CDR3 for beta chain variable domain of TCR clone 356634 (TRBV11-3, TRBJ2-1)
CASSSYPGGRDSYNEQFF

SEQ ID NO: 713269 - protein, 13 aa, Homo sapiens
  CDR3 for alpha chain variable domain of TCR clone 356635 (TRAV12-2, TRAJ24)
CAVSTDSWGKLQF

SEQ ID NO: 713270 - protein, 12 aa, Homo sapiens
  CDR3 for beta chain variable domain of TCR clone 356635 (TRBV7-6, TRBJ2-7)
CAGSLADSEQYF

SEQ ID NO: 713271 - protein, 12 aa, Homo sapiens
  CDR3 for alpha chain variable domain of TCR clone 356636 (TRAV2, TRAJ3)
CAVRSSASKIIF

SEQ ID NO: 713272 - protein, 13 aa, Homo sapiens
  CDR3 for beta chain variable domain of TCR clone 356636 (TRBV2, TRBJ2-7)
CASSGAAAYEQYF

SEQ ID NO: 713273 - protein, 15 aa, Homo sapiens
  CDR3 for alpha chain variable domain of TCR clone 356637 (TRAV3, TRAJ3)
CAVRDRDSSATKIIF

SEQ ID NO: 713274 - protein, 18 aa, Homo sapiens
  CDR3 for beta chain variable domain of TCR clone 356637 (TRBV25-1, TRBJ1-2)
CASSGLQNGQGLIFGYTF

SEQ ID NO: 713275 - protein, 18 aa, Homo sapiens
  CDR3 for alpha chain variable domain of TCR clone 356638 (TRAV1-2, TRAJ18)
CAVRDMGDRGSTLGRLYF

SEQ ID NO: 713276 - protein, 14 aa, Homo sapiens
  CDR3 for beta chain variable domain of TCR clone 356638 (TRBV4-1, TRBJ2-2)
CASSQAVNTGELFF

SEQ ID NO: 713277 - protein, 12 aa, Homo sapiens
  CDR3 for alpha chain variable domain of TCR clone 356639 (TRAV3, TRAJ26)
CAVRDYGQNFVF

SEQ ID NO: 713278 - protein, 17 aa, Homo sapiens
  CDR3 for beta chain variable domain of TCR clone 356639 (TRBV20-1, TRBJ2-1)
CSASSSGLAGSYNEQFF

SEQ ID NO: 713279 - protein, 11 aa, Homo sapiens
  CDR3 for alpha chain variable domain of TCR clone 356640 (TRAV13-1, TRAJ40)
CAVSGTYKYIF

SEQ ID NO: 713280 - protein, 14 aa, Homo sapiens
  CDR3 for beta chain variable domain of TCR clone 356640 (TRBV19, TRBJ1-4)
CASAIEAEGEKLFF

SEQ ID NO: 713281 - protein, 12 aa, Homo sapiens
  CDR3 for alpha chain variable domain of TCR clone 356641 (TRAV9-2, TRAJ3)
CSEGSSASKIIF

SEQ ID NO: 713282 - protein, 15 aa, Homo sapiens
  CDR3 for beta chain variable domain of TCR clone 356641 (TRBV12-4, TRBJ2-5)
CASSPPTGLQETQYF

SEQ ID NO: 713283 - protein, 12 aa, Homo sapiens
  CDR3 for alpha chain variable domain of TCR clone 356642 (TRAV12-3, TRAJ5)
CAMDTGRRALTF

SEQ ID NO: 713284 - protein, 13 aa, Homo sapiens
  CDR3 for beta chain variable domain of TCR clone 356642 (TRBV7-7, TRBJ2-2)
CDSSLTSAGELFF

SEQ ID NO: 713285 - protein, 12 aa, Homo sapiens
  CDR3 for alpha chain variable domain of TCR clone 356643 (TRAV17, TRAJ49)
CATVTTGNQFYF

SEQ ID NO: 713286 - protein, 16 aa, Homo sapiens
  CDR3 for beta chain variable domain of TCR clone 356643 (TRBV27, TRBJ2-2)
CASSFRGLVRTGELFF

SEQ ID NO: 713287 - protein, 15 aa, Homo sapiens
  CDR3 for alpha chain variable domain of TCR clone 356644 (TRAV29/DV5, TRAJ42)
CAAIGYGGSQGNLIF

SEQ ID NO: 713288 - protein, 15 aa, Homo sapiens
  CDR3 for beta chain variable domain of TCR clone 356644 (TRBV19, TRBJ1-2)
CASSVGQVLNYGYTF

SEQ ID NO: 713289 - protein, 12 aa, Homo sapiens
  CDR3 for alpha chain variable domain of TCR clone 356645 (TRAV8-3, TRAJ40)
CAVISGTYKYIF

SEQ ID NO: 713290 - protein, 14 aa, Homo sapiens
  CDR3 for beta chain variable domain of TCR clone 356645 (TRBV5-4, TRBJ1-1)
CASSLDSRRDEAFF

SEQ ID NO: 713291 - protein, 13 aa, Homo sapiens
  CDR3 for alpha chain variable domain of TCR clone 356646 (TRAV26-1, TRAJ41)
CIVRINSGYELNF

SEQ ID NO: 713292 - protein, 13 aa, Homo sapiens
  CDR3 for beta chain variable domain of TCR clone 356646 (TRBV20-1, TRBJ1-5)
CSATAAGGQPQHF

SEQ ID NO: 713293 - protein, 14 aa, Homo sapiens
  CDR3 for alpha chain variable domain of TCR clone 356647 (TRAV3, TRAJ9)
CAVRLNTGGFKTIF

SEQ ID NO: 713294 - protein, 14 aa, Homo sapiens
  CDR3 for beta chain variable domain of TCR clone 356647 (TRBV13, TRBJ2-3)
CASSLGGPQRPQYF

SEQ ID NO: 713295 - protein, 16 aa, Homo sapiens
  CDR3 for alpha chain variable domain of TCR clone 356648 (TRAV30, TRAJ24)
CGTEIVDADSGGKFQF

SEQ ID NO: 713296 - protein, 17 aa, Homo sapiens
  CDR3 for beta chain variable domain of TCR clone 356648 (TRBV20-1, TRBJ2-1)
CSARDRRRASSYNEQFF

SEQ ID NO: 713297 - protein, 13 aa, Homo sapiens
  CDR3 for alpha chain variable domain of TCR clone 356649 (TRAV8-6, TRAJ21)
CAVSPSSLNKFYF

SEQ ID NO: 713298 - protein, 14 aa, Homo sapiens
  CDR3 for beta chain variable domain of TCR clone 356649 (TRBV7-9, TRBJ2-5)
CASSSDTAQETQYS

SEQ ID NO: 713299 - protein, 11 aa, Homo sapiens
  CDR3 for alpha chain variable domain of TCR clone 356650 (TRAV21, TRAJ11)
CAVNGYSTLTF

SEQ ID NO: 713300 - protein, 10 aa, Homo sapiens
  CDR3 for beta chain variable domain of TCR clone 356650 (TRBV19, TRBJ1-1)
CRSIGSEAFF

SEQ ID NO: 713301 - protein, 13 aa, Homo sapiens
  CDR3 for alpha chain variable domain of TCR clone 356651 (TRAV27, TRAJ43)
CEGAGNNNNDMRF

SEQ ID NO: 713302 - protein, 14 aa, Homo sapiens
  CDR3 for beta chain variable domain of TCR clone 356651 (TRBV7-2, TRBJ2-7)
CASRSQGAAYEQYF

SEQ ID NO: 713303 - protein, 15 aa, Homo sapiens
  CDR3 for alpha chain variable domain of TCR clone 356652 (TRAV12-2, TRAJ43)
CAFDMRFGAGTRLTV

SEQ ID NO: 713304 - protein, 17 aa, Homo sapiens
  CDR3 for beta chain variable domain of TCR clone 356652 (TRBV19, TRBJ2-6)
CASSTGQVFSGANVLTF

SEQ ID NO: 713305 - protein, 14 aa, Homo sapiens
  CDR3 for alpha chain variable domain of TCR clone 356653 (TRAV12-3, TRAJ56)
CAMSVTGANSKLTF

SEQ ID NO: 713306 - protein, 18 aa, Homo sapiens
  CDR3 for beta chain variable domain of TCR clone 356653 (TRBV4-1, TRBJ1-5)
CASSQDPRGQGLNQPQHF

SEQ ID NO: 713307 - protein, 15 aa, Homo sapiens
  CDR3 for alpha chain variable domain of TCR clone 356654 (TRAV25, TRAJ52)
CAGRPGGTSYAKLPF

SEQ ID NO: 713308 - protein, 17 aa, Homo sapiens
  CDR3 for beta chain variable domain of TCR clone 356654 (TRBV7-8, TRBJ2-6)
CASSAGTGGAGANVLTF

SEQ ID NO: 713309 - protein, 20 aa, Homo sapiens
  CDR3 for alpha chain variable domain of TCR clone 356655 (TRAV4, TRAJ29)
CCVLLPRGCVPFSGNTPLIF

SEQ ID NO: 713310 - protein, 17 aa, Homo sapiens
  CDR3 for beta chain variable domain of TCR clone 356655 (TRBV25-1, TRBJ2-7)
CASSDARVVFSSYEQYF

SEQ ID NO: 713311 - protein, 13 aa, Homo sapiens
  CDR3 for alpha chain variable domain of TCR clone 356656 (TRAV1-1, TRAJ23)
CAVVANQGGKLIF

SEQ ID NO: 713312 - protein, 16 aa, Homo sapiens
  CDR3 for beta chain variable domain of TCR clone 356656 (TRBV27, TRBJ2-2)
CASSLRPGGAPGELFF

SEQ ID NO: 713313 - protein, 11 aa, Homo sapiens
  CDR3 for alpha chain variable domain of TCR clone 356657 (TRAV1-2, TRAJ31)
CAVNNNARLMF

SEQ ID NO: 713314 - protein, 15 aa, Homo sapiens
  CDR3 for beta chain variable domain of TCR clone 356657 (TRBV4-3, TRBJ1-1)
CASSQELGRGTEAFF

SEQ ID NO: 713315 - protein, 14 aa, Homo sapiens
  CDR3 for alpha chain variable domain of TCR clone 356658 (TRAV3, TRAJ6)
CAVRDSRGKLHTYI

SEQ ID NO: 713316 - protein, 15 aa, Homo sapiens
  CDR3 for beta chain variable domain of TCR clone 356658 (TRBV18, TRBJ2-7)
CASSPLQGRTYEQYF

SEQ ID NO: 713317 - protein, 18 aa, Homo sapiens
  CDR3 for alpha chain variable domain of TCR clone 356659 (TRAV21, TRAJ52)
CAVSPSPAGGTSSGKLTF

SEQ ID NO: 713318 - protein, 17 aa, Homo sapiens
  CDR3 for beta chain variable domain of TCR clone 356659 (TRBV13, TRBJ2-3)
CASSLSRVAGGRNTQYF

SEQ ID NO: 713319 - protein, 13 aa, Homo sapiens
  CDR3 for alpha chain variable domain of TCR clone 356660 (TRAV12-3, TRAJ49)
CAMSRNTGNQFYF

SEQ ID NO: 713320 - protein, 16 aa, Homo sapiens
  CDR3 for beta chain variable domain of TCR clone 356660 (TRBV5-8, TRBJ2-2)
CASSLRNPGGAGELFF

SEQ ID NO: 713321 - protein, 14 aa, Homo sapiens
  CDR3 for alpha chain variable domain of TCR clone 356661 (TRAV21, TRAJ28)
CTVGSGAGSYQLTF

SEQ ID NO: 713322 - protein, 14 aa, Homo sapiens
  CDR3 for beta chain variable domain of TCR clone 356661 (TRBV18, TRBJ1-4)
CASSTGPNGEKLFF

SEQ ID NO: 713323 - protein, 16 aa, Homo sapiens
  CDR3 for alpha chain variable domain of TCR clone 356662 (TRAV12-3, TRAJ53)
CAMSPGSGGGNYKLTF

SEQ ID NO: 713324 - protein, 11 aa, Homo sapiens
  CDR3 for beta chain variable domain of TCR clone 356662 (TRBV29-1, TRBJ2-5)
RSEDRTGTQYF

SEQ ID NO: 713325 - protein, 13 aa, Homo sapiens
  CDR3 for alpha chain variable domain of TCR clone 356663 (TRAV2, TRAJ40)
CSVVTSGTYKYIF

SEQ ID NO: 713326 - protein, 14 aa, Homo sapiens
  CDR3 for beta chain variable domain of TCR clone 356663 (TRBV19, TRBJ2-1)
CASPTFVLSGERFF

SEQ ID NO: 713327 - protein, 14 aa, Homo sapiens
  CDR3 for alpha chain variable domain of TCR clone 356664 (TRAV19, TRAJ49)
CALSEGNTGNQFYF

SEQ ID NO: 713328 - protein, 14 aa, Homo sapiens
  CDR3 for beta chain variable domain of TCR clone 356664 (TRBV12-4, TRBJ1-1)
CASRPGQGRTEAFF

SEQ ID NO: 713329 - protein, 13 aa, Homo sapiens
  CDR3 for alpha chain variable domain of TCR clone 356665 (TRAV17, TRAJ5)
CAPMDTGRRALTF

SEQ ID NO: 713330 - protein, 15 aa, Homo sapiens
  CDR3 for beta chain variable domain of TCR clone 356665 (TRBV6-6, TRBJ2-5)
CASSPGGGLEETQYC

SEQ ID NO: 713331 - protein, 14 aa, Homo sapiens
  CDR3 for alpha chain variable domain of TCR clone 356666 (TRAV4, TRAJ39)
CLGQAYNAGNMLTF

SEQ ID NO: 713332 - protein, 15 aa, Homo sapiens
  CDR3 for beta chain variable domain of TCR clone 356666 (TRBV20-1, TRBJ2-5)
CSASGTSGGGETQYF

SEQ ID NO: 713333 - protein, 11 aa, Homo sapiens
  CDR3 for alpha chain variable domain of TCR clone 356667 (TRAV12-3, TRAJ22)
CAMTLARQLTL

SEQ ID NO: 713334 - protein, 17 aa, Homo sapiens
  CDR3 for beta chain variable domain of TCR clone 356667 (TRBV11-2, TRBJ2-1)
CASSLYPPGVEYNEQFF

SEQ ID NO: 713335 - protein, 17 aa, Homo sapiens
  CDR3 for alpha chain variable domain of TCR clone 356668 (TRAV3, TRAJ28)
CALRDGYSGAGSYQLTF

SEQ ID NO: 713336 - protein, 14 aa, Homo sapiens
  CDR3 for beta chain variable domain of TCR clone 356668 (TRBV19, TRBJ2-7)
CASRPGTGVNEQYF

SEQ ID NO: 713337 - protein, 12 aa, Homo sapiens
  CDR3 for alpha chain variable domain of TCR clone 356669 (TRAV27, TRAJ21)
CAGVRRLQQILL

SEQ ID NO: 713338 - protein, 14 aa, Homo sapiens
  CDR3 for beta chain variable domain of TCR clone 356669 (TRBV7-9, TRBJ1-4)
CASSLEGQSEKLCF

SEQ ID NO: 713339 - protein, 12 aa, Homo sapiens
  CDR3 for alpha chain variable domain of TCR clone 356670 (TRAV13-1, TRAJ27)
CAAHTNAGKSTF

SEQ ID NO: 713340 - protein, 15 aa, Homo sapiens
  CDR3 for beta chain variable domain of TCR clone 356670 (TRBV7-9, TRBJ1-6)
CASSSRGRGNSPLHF

SEQ ID NO: 713341 - protein, 13 aa, Homo sapiens
  CDR3 for alpha chain variable domain of TCR clone 356671 (TRAV21, TRAJ20)
CAVGLRVDYKLSF

SEQ ID NO: 713342 - protein, 13 aa, Homo sapiens
  CDR3 for beta chain variable domain of TCR clone 356671 (TRBV12-4, TRBJ1-1)
CASSPGTGFEAFF

SEQ ID NO: 713343 - protein, 13 aa, Homo sapiens
  CDR3 for alpha chain variable domain of TCR clone 356672 (TRAV17, TRAJ5)
CATGDTGRRALNF

SEQ ID NO: 713344 - protein, 13 aa, Homo sapiens
  CDR3 for beta chain variable domain of TCR clone 356672 (TRBV19, TRBJ1-5)
CASSIEPVQPQHF

SEQ ID NO: 713345 - protein, 15 aa, Homo sapiens
  CDR3 for alpha chain variable domain of TCR clone 356673 (TRAV2, TRAJ9)
CAVEDRGTGGFKTIF

SEQ ID NO: 713346 - protein, 15 aa, Homo sapiens
  CDR3 for beta chain variable domain of TCR clone 356673 (TRBV20-1, TRBJ2-7)
CSARKGLAESYEQYF

SEQ ID NO: 713347 - protein, 13 aa, Homo sapiens
  CDR3 for alpha chain variable domain of TCR clone 356674 (TRAV35, TRAJ42)
CAGFPGSQGNPIF

SEQ ID NO: 713348 - protein, 12 aa, Homo sapiens
  CDR3 for beta chain variable domain of TCR clone 356674 (TRBV11-2, TRBJ2-2)
CASSLGGGELFF

SEQ ID NO: 713349 - protein, 16 aa, Homo sapiens
  CDR3 for alpha chain variable domain of TCR clone 356675 (TRAV3, TRAJ10)
CAVRDMRAGGGNKLTF

SEQ ID NO: 713350 - protein, 13 aa, Homo sapiens
  CDR3 for beta chain variable domain of TCR clone 356675 (TRBV7-7, TRBJ2-2)
CASSLTSAGELFF

SEQ ID NO: 713351 - protein, 10 aa, Homo sapiens
  CDR3 for alpha chain variable domain of TCR clone 356676 (TRAV38-2/DV8, TRAJ40)
CASGTYKYIF

SEQ ID NO: 713352 - protein, 15 aa, Homo sapiens
  CDR3 for beta chain variable domain of TCR clone 356676 (TRBV7-9, TRBJ2-2)
CASGPLDTFPGELFF

SEQ ID NO: 713353 - protein, 14 aa, Homo sapiens
  CDR3 for alpha chain variable domain of TCR clone 356677 (TRAV8-1, TRAJ5)
CAVRTDTGRRALTF

SEQ ID NO: 713354 - protein, 12 aa, Homo sapiens
  CDR3 for beta chain variable domain of TCR clone 356677 (TRBV11-2, TRBJ2-1)
CASSPGNNDQFF

SEQ ID NO: 713355 - protein, 15 aa, Homo sapiens
  CDR3 for alpha chain variable domain of TCR clone 356678 (TRAV8-4, TRAJ40)
CAVSDDTSGTYKYIF

SEQ ID NO: 713356 - protein, 13 aa, Homo sapiens
  CDR3 for beta chain variable domain of TCR clone 356678 (TRBV7-9, TRBJ1-2)
CASSLKQNYGYTS

SEQ ID NO: 713357 - protein, 13 aa, Homo sapiens
  CDR3 for alpha chain variable domain of TCR clone 356679 (TRAV13-1, TRAJ39)
CSKYSNAGNMLTF

SEQ ID NO: 713358 - protein, 13 aa, Homo sapiens
  CDR3 for beta chain variable domain of TCR clone 356679 (TRBV29-1, TRBJ1-1)
CSVGDSRNTEAFF

SEQ ID NO: 713359 - protein, 15 aa, Homo sapiens
  CDR3 for alpha chain variable domain of TCR clone 356680 (TRAV13-1, TRAJ10)
YAATILTGGGNKLTF

SEQ ID NO: 713360 - protein, 13 aa, Homo sapiens
  CDR3 for beta chain variable domain of TCR clone 356680 (TRBV12-4, TRBJ1-2)
CASSLRQGKGYTF

SEQ ID NO: 713361 - protein, 16 aa, Homo sapiens
  CDR3 for alpha chain variable domain of TCR clone 356681 (TRAV30, TRAJ24)
CGTEIVDADSWGKFQF

SEQ ID NO: 713362 - protein, 15 aa, Homo sapiens
  CDR3 for beta chain variable domain of TCR clone 356681 (TRBV7-9, TRBJ1-4)
CASSARTGGNEKRFF

SEQ ID NO: 713363 - protein, 12 aa, Homo sapiens
  CDR3 for alpha chain variable domain of TCR clone 356682 (TRAV8-3, TRAJ20)
CAVGANDYKLSF

SEQ ID NO: 713364 - protein, 12 aa, Homo sapiens
  CDR3 for beta chain variable domain of TCR clone 356682 (TRBV14, TRBJ2-5)
CASSQLKETQYF

SEQ ID NO: 713365 - protein, 15 aa, Homo sapiens
  CDR3 for alpha chain variable domain of TCR clone 356683 (TRAV17, TRAJ4)
CAAGTWSGGYSKLIF

SEQ ID NO: 713366 - protein, 13 aa, Homo sapiens
  CDR3 for beta chain variable domain of TCR clone 356683 (TRBV6-6, TRBJ2-7)
CASSPKHLAEQYF

SEQ ID NO: 713367 - protein, 15 aa, Homo sapiens
  CDR3 for alpha chain variable domain of TCR clone 356684 (TRAV12-2, TRAJ28)
CRDPHSGAGSYQLTF

SEQ ID NO: 713368 - protein, 15 aa, Homo sapiens
  CDR3 for beta chain variable domain of TCR clone 356684 (TRBV20-1, TRBJ2-1)
CSTRGSGTYCNEQFF

SEQ ID NO: 713369 - protein, 12 aa, Homo sapiens
  CDR3 for alpha chain variable domain of TCR clone 356685 (TRAV13-2, TRAJ39)
CAENNAGDMLTF

SEQ ID NO: 713370 - protein, 12 aa, Homo sapiens
  CDR3 for beta chain variable domain of TCR clone 356685 (TRBV11-2, TRBJ2-2)
CASSLGGGELFF

SEQ ID NO: 713371 - protein, 14 aa, Homo sapiens
  CDR3 for alpha chain variable domain of TCR clone 356686 (TRAV8-6, TRAJ30)
CAVRPVNRDDKIIF

SEQ ID NO: 713372 - protein, 12 aa, Homo sapiens
  CDR3 for beta chain variable domain of TCR clone 356686 (TRBV12-4, TRBJ2-3)
CASSTLPDTQYF

SEQ ID NO: 713373 - protein, 14 aa, Homo sapiens
  CDR3 for alpha chain variable domain of TCR clone 356687 (TRAV13-1, TRAJ8)
CAASEDTSFQKLVF

SEQ ID NO: 713374 - protein, 13 aa, Homo sapiens
  CDR3 for beta chain variable domain of TCR clone 356687 (TRBV19, TRBJ1-5)
CASSTRRDQPQHF

SEQ ID NO: 713375 - protein, 13 aa, Homo sapiens
  CDR3 for alpha chain variable domain of TCR clone 356688 (TRAV19, TRAJ26)
CALTFDYGQKFVF

SEQ ID NO: 713376 - protein, 14 aa, Homo sapiens
  CDR3 for beta chain variable domain of TCR clone 356688 (TRBV7-8, TRBJ2-3)
CASSLEAGTDTQYF

SEQ ID NO: 713377 - protein, 13 aa, Homo sapiens
  CDR3 for alpha chain variable domain of TCR clone 356689 (TRAV8-4, TRAJ30)
CATYKNRDDKTIF

SEQ ID NO: 713378 - protein, 11 aa, Homo sapiens
  CDR3 for beta chain variable domain of TCR clone 356689 (TRBV6-1, TRBJ2-1)
CASRGYNEQFF

SEQ ID NO: 713379 - protein, 16 aa, Homo sapiens
  CDR3 for alpha chain variable domain of TCR clone 356690 (TRAV3, TRAJ37)
CAVRPPGSGNTGKLIF

SEQ ID NO: 713380 - protein, 15 aa, Homo sapiens
  CDR3 for beta chain variable domain of TCR clone 356690 (TRBV6-3, TRBJ2-7)
CASSSPGTVFYEQYF

SEQ ID NO: 713381 - protein, 14 aa, Homo sapiens
  CDR3 for alpha chain variable domain of TCR clone 356691 (TRAV12-2, TRAJ13)
CAVPRSGGYQKVTF

SEQ ID NO: 713382 - protein, 16 aa, Homo sapiens
  CDR3 for beta chain variable domain of TCR clone 356691 (TRBV12-5, TRBJ2-5)
CASGPRTSGNQETQYF

SEQ ID NO: 713383 - protein, 18 aa, Homo sapiens
  CDR3 for alpha chain variable domain of TCR clone 356692 (TRAV21, TRAJ52)
CAVRPSPAGGTSYGKLTF

SEQ ID NO: 713384 - protein, 15 aa, Homo sapiens
  CDR3 for beta chain variable domain of TCR clone 356692 (TRBV20-1, TRBJ2-7)
CSARDRFSGMDEQYF

SEQ ID NO: 713385 - protein, 11 aa, Homo sapiens
  CDR3 for alpha chain variable domain of TCR clone 356693 (TRAV12-2, TRAJ33)
CAVGSNYQLIW

SEQ ID NO: 713386 - protein, 14 aa, Homo sapiens
  CDR3 for beta chain variable domain of TCR clone 356693 (TRBV6-1, TRBJ2-2)
CARVEHIESGELFF

SEQ ID NO: 713387 - protein, 14 aa, Homo sapiens
  CDR3 for alpha chain variable domain of TCR clone 356694 (TRAV29/DV5, TRAJ36)
CAARRKTGANNLFF

SEQ ID NO: 713388 - protein, 16 aa, Homo sapiens
  CDR3 for beta chain variable domain of TCR clone 356694 (TRBV7-2, TRBJ1-4)
CASSPVGRFDREKLFF

SEQ ID NO: 713389 - protein, 15 aa, Homo sapiens
  CDR3 for alpha chain variable domain of TCR clone 356695 (TRAV2, TRAJ9)
CAVEDRGTGGFKTIF

SEQ ID NO: 713390 - protein, 15 aa, Homo sapiens
  CDR3 for beta chain variable domain of TCR clone 356695 (TRBV2, TRBJ2-1)
CASSELAGSYNEQFF

SEQ ID NO: 713391 - protein, 15 aa, Homo sapiens
  CDR3 for alpha chain variable domain of TCR clone 356696 (TRAV8-3, TRAJ45)
CASSYSGGGADGLTF

SEQ ID NO: 713392 - protein, 12 aa, Homo sapiens
  CDR3 for beta chain variable domain of TCR clone 356696 (TRBV10-3, TRBJ2-1)
CAISRGGHEQFF

SEQ ID NO: 713393 - protein, 13 aa, Homo sapiens
  CDR3 for alpha chain variable domain of TCR clone 356697 (TRAV23/DV6, TRAJ49)
CAATLRPGNQFYF

SEQ ID NO: 713394 - protein, 14 aa, Homo sapiens
  CDR3 for beta chain variable domain of TCR clone 356697 (TRBV7-3, TRBJ1-1)
CASSLGTGYTEAFF

SEQ ID NO: 713395 - protein, 16 aa, Homo sapiens
  CDR3 for alpha chain variable domain of TCR clone 356698 (TRAV27, TRAJ45)
CPPRGRRGGGADGLTF

SEQ ID NO: 713396 - protein, 16 aa, Homo sapiens
  CDR3 for beta chain variable domain of TCR clone 356698 (TRBV7-2, TRBJ1-3)
CASSRPEASSGNTIYF

SEQ ID NO: 713397 - protein, 12 aa, Homo sapiens
  CDR3 for alpha chain variable domain of TCR clone 356699 (TRAV16, TRAJ10)
CSRTGGGNKLTF

SEQ ID NO: 713398 - protein, 19 aa, Homo sapiens
  CDR3 for beta chain variable domain of TCR clone 356699 (TRBV28, TRBJ2-1)
YASSFSIRGSGRTRYEQFF

SEQ ID NO: 713399 - protein, 12 aa, Homo sapiens
  CDR3 for alpha chain variable domain of TCR clone 356700 (TRAV12-3, TRAJ17)
CAMTLTGNKLTF

SEQ ID NO: 713400 - protein, 14 aa, Homo sapiens
  CDR3 for beta chain variable domain of TCR clone 356700 (TRBV20-1, TRBJ2-4)
CSARDRGQGGIQYF

SEQ ID NO: 713401 - protein, 13 aa, Homo sapiens
  CDR3 for alpha chain variable domain of TCR clone 356701 (TRAV13-1, TRAJ39)
CAASIWAGNMLTF

SEQ ID NO: 713402 - protein, 14 aa, Homo sapiens
  CDR3 for beta chain variable domain of TCR clone 356701 (TRBV11-2, TRBJ2-5)
CASSRTGGIETQYF

SEQ ID NO: 713403 - protein, 11 aa, Homo sapiens
  CDR3 for alpha chain variable domain of TCR clone 356702 (TRAV12-1, TRAJ34)
CVVNKGRELIF

SEQ ID NO: 713404 - protein, 11 aa, Homo sapiens
  CDR3 for beta chain variable domain of TCR clone 356702 (TRBV2, TRBJ2-1)
SYGPPGNEQFF

SEQ ID NO: 713405 - protein, 17 aa, Homo sapiens
  CDR3 for alpha chain variable domain of TCR clone 356703 (TRAV3, TRAJ6)
CAVRDGPRAGGSYIPPF

SEQ ID NO: 713406 - protein, 13 aa, Homo sapiens
  CDR3 for beta chain variable domain of TCR clone 356703 (TRBV10-3, TRBJ2-7)
CASKLAVNYEQYF

SEQ ID NO: 713407 - protein, 11 aa, Homo sapiens
  CDR3 for alpha chain variable domain of TCR clone 356704 (TRAV12-3, TRAJ27)
CAMANAGKSTF

SEQ ID NO: 713408 - protein, 17 aa, Homo sapiens
  CDR3 for beta chain variable domain of TCR clone 356704 (TRBV15, TRBJ1-5)
CATSRVKGIYSNQPQHF

SEQ ID NO: 713409 - protein, 15 aa, Homo sapiens
  CDR3 for alpha chain variable domain of TCR clone 356705 (TRAV27, TRAJ38)
CAARSNAGNNRKLIW

SEQ ID NO: 713410 - protein, 13 aa, Homo sapiens
  CDR3 for beta chain variable domain of TCR clone 356705 (TRBV12-5, TRBJ2-3)
CASGGRQSDTQYF

SEQ ID NO: 713411 - protein, 17 aa, Homo sapiens
  CDR3 for alpha chain variable domain of TCR clone 356706 (TRAV3, TRAJ42)
CAVRDRDYGGSQGNLIF

SEQ ID NO: 713412 - protein, 15 aa, Homo sapiens
  CDR3 for beta chain variable domain of TCR clone 356706 (TRBV7-9, TRBJ1-2)
CASSLDREPNYGYTF

SEQ ID NO: 713413 - protein, 14 aa, Homo sapiens
  CDR3 for alpha chain variable domain of TCR clone 356707 (TRAV12-1, TRAJ17)
CVVNYKAAGNKLTF

SEQ ID NO: 713414 - protein, 15 aa, Homo sapiens
  CDR3 for beta chain variable domain of TCR clone 356707 (TRBV7-2, TRBJ2-7)
CASSLALGSAYQQYF

SEQ ID NO: 713415 - protein, 17 aa, Homo sapiens
  CDR3 for alpha chain variable domain of TCR clone 356708 (TRAV3, TRAJ6)
CAVRDGPRAGGSYIPTF

SEQ ID NO: 713416 - protein, 14 aa, Homo sapiens
  CDR3 for beta chain variable domain of TCR clone 356708 (TRBV7-2, TRBJ2-7)
CASSPKTSFYEQDC

SEQ ID NO: 713417 - protein, 15 aa, Homo sapiens
  CDR3 for alpha chain variable domain of TCR clone 356709 (TRAV3, TRAJ22)
CAVRDRGGSARQLTV

SEQ ID NO: 713418 - protein, 14 aa, Homo sapiens
  CDR3 for beta chain variable domain of TCR clone 356709 (TRBV12-5, TRBJ2-5)
CASGSRTHQETQYF

SEQ ID NO: 713419 - protein, 17 aa, Homo sapiens
  CDR3 for alpha chain variable domain of TCR clone 356710 (TRAV38-1, TRAJ28)
CAFMKPTSGAGGYQPTF

SEQ ID NO: 713420 - protein, 15 aa, Homo sapiens
  CDR3 for beta chain variable domain of TCR clone 356710 (TRBV5-1, TRBJ2-4)
CASSLGGGGSYIQYF

SEQ ID NO: 713421 - protein, 16 aa, Homo sapiens
  CDR3 for alpha chain variable domain of TCR clone 356711 (TRAV3, TRAJ37)
CAVRVRGSGNTGKIIF

SEQ ID NO: 713422 - protein, 14 aa, Homo sapiens
  CDR3 for beta chain variable domain of TCR clone 356711 (TRBV7-2, TRBJ1-6)
CASSLQGANSPLHF

SEQ ID NO: 713423 - protein, 18 aa, Homo sapiens
  CDR3 for alpha chain variable domain of TCR clone 356712 (TRAV12-3, TRAJ52)
CAMSRTNAGGPSYGKLTF

SEQ ID NO: 713424 - protein, 15 aa, Homo sapiens
  CDR3 for beta chain variable domain of TCR clone 356712 (TRBV19, TRBJ1-2)
CASSVGQVLNYGYTF

SEQ ID NO: 713425 - protein, 18 aa, Homo sapiens
  CDR3 for alpha chain variable domain of TCR clone 356713 (TRAV29/DV5, TRAJ52)
CAAGFRGAGGTSYGKLTF

SEQ ID NO: 713426 - protein, 13 aa, Homo sapiens
  CDR3 for beta chain variable domain of TCR clone 356713 (TRBV7-3, TRBJ2-5)
CASSIGFFETQYF

SEQ ID NO: 713427 - protein, 16 aa, Homo sapiens
  CDR3 for alpha chain variable domain of TCR clone 356714 (TRAV16, TRAJ52)
CALSAAGGTSYVKLTF

SEQ ID NO: 713428 - protein, 16 aa, Homo sapiens
  CDR3 for beta chain variable domain of TCR clone 356714 (TRBV12-4, TRBJ1-5)
CASSRPVGGSNQPQHF

SEQ ID NO: 713429 - protein, 13 aa, Homo sapiens
  CDR3 for alpha chain variable domain of TCR clone 356715 (TRAV38-2/DV8, TRAJ34)
CAYRTWNTAKLIF

SEQ ID NO: 713430 - protein, 14 aa, Homo sapiens
  CDR3 for beta chain variable domain of TCR clone 356715 (TRBV12-5, TRBJ2-5)
CASGSRTHQETQYF

SEQ ID NO: 713431 - protein, 11 aa, Homo sapiens
  CDR3 for alpha chain variable domain of TCR clone 356716 (TRAV3, TRAJ17)
PSGAAGNKLTF

SEQ ID NO: 713432 - protein, 13 aa, Homo sapiens
  CDR3 for beta chain variable domain of TCR clone 356716 (TRBV7-2, TRBJ2-4)
CASSREHANIQYF

SEQ ID NO: 713433 - protein, 16 aa, Homo sapiens
  CDR3 for alpha chain variable domain of TCR clone 356717 (TRAV12-3, TRAJ58)
CAMTDTEETSGSRLTF

SEQ ID NO: 713434 - protein, 22 aa, Homo sapiens
  CDR3 for beta chain variable domain of TCR clone 356717 (TRBV23-1, TRBJ2-7)
CDSSRRLDSGQGYVGGGYEQCF

SEQ ID NO: 713435 - protein, 20 aa, Homo sapiens
  CDR3 for alpha chain variable domain of TCR clone 356718 (TRAV26-1, TRAJ42)
CCVLLHRQTYYGGSQGTLIF

SEQ ID NO: 713436 - protein, 17 aa, Homo sapiens
  CDR3 for beta chain variable domain of TCR clone 356718 (TRBV13, TRBJ2-3)
CASSLSRVAGGRNTQYF

SEQ ID NO: 713437 - protein, 16 aa, Homo sapiens
  CDR3 for alpha chain variable domain of TCR clone 356719 (TRAV23/DV6, TRAJ48)
CAASGVVNFGNEKLIF

SEQ ID NO: 713438 - protein, 15 aa, Homo sapiens
  CDR3 for beta chain variable domain of TCR clone 356719 (TRBV20-1, TRBJ2-5)
CSAGLAGVSQETQYF

SEQ ID NO: 713439 - protein, 15 aa, Homo sapiens
  CDR3 for alpha chain variable domain of TCR clone 356720 (TRAV21, TRAJ10)
CAVPLLTGGGNKLTF

SEQ ID NO: 713440 - protein, 15 aa, Homo sapiens
  CDR3 for beta chain variable domain of TCR clone 356720 (TRBV11-3, TRBJ2-7)
CASSPGPASSYEQYF

SEQ ID NO: 713441 - protein, 18 aa, Homo sapiens
  CDR3 for alpha chain variable domain of TCR clone 356721 (TRAV20, TRAJ4)
CAVQPYYMFYGGYNKLIF

SEQ ID NO: 713442 - protein, 13 aa, Homo sapiens
  CDR3 for beta chain variable domain of TCR clone 356721 (TRBV19, TRBJ2-3)
CATWDKITDTQYF

SEQ ID NO: 713443 - protein, 13 aa, Homo sapiens
  CDR3 for alpha chain variable domain of TCR clone 356722 (TRAV8-6, TRAJ21)
CAVSPSSLNKFYF

SEQ ID NO: 713444 - protein, 14 aa, Homo sapiens
  CDR3 for beta chain variable domain of TCR clone 356722 (TRBV7-9, TRBJ2-5)
CASSLDTAQESQYF

SEQ ID NO: 713445 - protein, 13 aa, Homo sapiens
  CDR3 for alpha chain variable domain of TCR clone 356723 (TRAV12-3, TRAJ33)
CAMSVNSNYQLIW

SEQ ID NO: 713446 - protein, 13 aa, Homo sapiens
  CDR3 for beta chain variable domain of TCR clone 356723 (TRBV9, TRBJ2-1)
CASSPSGGSEQFF

SEQ ID NO: 713447 - protein, 14 aa, Homo sapiens
  CDR3 for alpha chain variable domain of TCR clone 356724 (TRAV12-1, TRAJ22)
CVVTAGWFCKATDL

SEQ ID NO: 713448 - protein, 13 aa, Homo sapiens
  CDR3 for beta chain variable domain of TCR clone 356724 (TRBV7-9, TRBJ2-1)
CASSLDVGNEQFF

SEQ ID NO: 713449 - protein, 15 aa, Homo sapiens
  CDR3 for alpha chain variable domain of TCR clone 356725 (TRAV21, TRAJ24)
CAARSSTGSWGNCRL

SEQ ID NO: 713450 - protein, 13 aa, Homo sapiens
  CDR3 for beta chain variable domain of TCR clone 356725 (TRBV10-3, TRBJ2-7)
CASKLAVNYEQYF

SEQ ID NO: 713451 - protein, 15 aa, Homo sapiens
  CDR3 for alpha chain variable domain of TCR clone 356726 (TRAV40, TRAJ48)
CLLFISNFGNEKLTF

SEQ ID NO: 713452 - protein, 16 aa, Homo sapiens
  CDR3 for beta chain variable domain of TCR clone 356726 (TRBV7-9, TRBJ2-5)
CASRLEIGTRKETQYF

SEQ ID NO: 713453 - protein, 14 aa, Homo sapiens
  CDR3 for alpha chain variable domain of TCR clone 356727 (TRAV21, TRAJ23)
CAIMIYNQGGKLTI

SEQ ID NO: 713454 - protein, 18 aa, Homo sapiens
  CDR3 for beta chain variable domain of TCR clone 356727 (TRBV20-1, TRBJ2-6)
CSAETTPTHGSGANVLTF

SEQ ID NO: 713455 - protein, 14 aa, Homo sapiens
  CDR3 for alpha chain variable domain of TCR clone 356728 (TRAV1-2, TRAJ8)
CAVREDTGFHKLVF

SEQ ID NO: 713456 - protein, 13 aa, Homo sapiens
  CDR3 for beta chain variable domain of TCR clone 356728 (TRBV12-4, TRBJ1-5)
CASSPDRAQPQHF

SEQ ID NO: 713457 - protein, 16 aa, Homo sapiens
  CDR3 for alpha chain variable domain of TCR clone 356729 (TRAV12-3, TRAJ53)
CAMSPGRGGSNYKLTF

SEQ ID NO: 713458 - protein, 11 aa, Homo sapiens
  CDR3 for beta chain variable domain of TCR clone 356729 (TRBV12-4, TRBJ2-3)
CASTATDTQYF

SEQ ID NO: 713459 - protein, 15 aa, Homo sapiens
  CDR3 for alpha chain variable domain of TCR clone 356730 (TRAV8-3, TRAJ11)
CAVGLLNSGYSTLTF

SEQ ID NO: 713460 - protein, 16 aa, Homo sapiens
  CDR3 for beta chain variable domain of TCR clone 356730 (TRBV7-9, TRBJ1-2)
CASSLGVSSGEDGYTF

SEQ ID NO: 713461 - protein, 13 aa, Homo sapiens
  CDR3 for alpha chain variable domain of TCR clone 356731 (TRAV13-1, TRAJ10)
CAALEGGGNKLTS

SEQ ID NO: 713462 - protein, 13 aa, Homo sapiens
  CDR3 for beta chain variable domain of TCR clone 356731 (TRBV7-9, TRBJ1-2)
CASSLKQNYGYTF

SEQ ID NO: 713463 - protein, 15 aa, Homo sapiens
  CDR3 for alpha chain variable domain of TCR clone 356732 (TRAV27, TRAJ38)
CAARRNAGNNRKLIW

SEQ ID NO: 713464 - protein, 15 aa, Homo sapiens
  CDR3 for beta chain variable domain of TCR clone 356732 (TRBV11-2, TRBJ2-1)
CASSRNRGLMYEQFF

SEQ ID NO: 713465 - protein, 11 aa, Homo sapiens
  CDR3 for alpha chain variable domain of TCR clone 356733 (TRAV1-2, TRAJ20)
CAVSNDYKLSF

SEQ ID NO: 713466 - protein, 16 aa, Homo sapiens
  CDR3 for beta chain variable domain of TCR clone 356733 (TRBV29-1, TRBJ2-6)
CSVEAITYSGANVLTF

SEQ ID NO: 713467 - protein, 14 aa, Homo sapiens
  CDR3 for alpha chain variable domain of TCR clone 356734 (TRAV26-1, TRAJ38)
FIADNAGNNRKLIL

SEQ ID NO: 713468 - protein, 13 aa, Homo sapiens
  CDR3 for beta chain variable domain of TCR clone 356734 (TRBV19, TRBJ1-2)
CASSVPGQDGYTF

SEQ ID NO: 713469 - protein, 13 aa, Homo sapiens
  CDR3 for alpha chain variable domain of TCR clone 356735 (TRAV13-1, TRAJ17)
CAAYGAAGNKLTF

SEQ ID NO: 713470 - protein, 14 aa, Homo sapiens
  CDR3 for beta chain variable domain of TCR clone 356735 (TRBV11-2, TRBJ1-3)
CASSLTQGRNTIYF

SEQ ID NO: 713471 - protein, 15 aa, Homo sapiens
  CDR3 for alpha chain variable domain of TCR clone 356736 (TRAV21, TRAJ53)
CATLNSGGSNYKPTF

SEQ ID NO: 713472 - protein, 16 aa, Homo sapiens
  CDR3 for beta chain variable domain of TCR clone 356736 (TRBV9, TRBJ2-1)
CASSVGGGGNYNEQFS

SEQ ID NO: 713473 - protein, 12 aa, Homo sapiens
  CDR3 for alpha chain variable domain of TCR clone 356737 (TRAV5, TRAJ27)
CADITNAGKSTF

SEQ ID NO: 713474 - protein, 15 aa, Homo sapiens
  CDR3 for beta chain variable domain of TCR clone 356737 (TRBV11-2, TRBJ1-2)
CASSLEGVQRNGYTF

SEQ ID NO: 713475 - protein, 17 aa, Homo sapiens
  CDR3 for alpha chain variable domain of TCR clone 356738 (TRAV26-1, TRAJ28)
CIVRVPDSGAGGYQLTF

SEQ ID NO: 713476 - protein, 17 aa, Homo sapiens
  CDR3 for beta chain variable domain of TCR clone 356738 (TRBV28, TRBJ2-7)
CASRPLPAGGKSYEQYF

SEQ ID NO: 713477 - protein, 15 aa, Homo sapiens
  CDR3 for alpha chain variable domain of TCR clone 356739 (TRAV8-2, TRAJ40)
CVVSDRGSGTYKYIF

SEQ ID NO: 713478 - protein, 15 aa, Homo sapiens
  CDR3 for beta chain variable domain of TCR clone 356739 (TRBV15, TRBJ1-3)
CATSRDRGPGNTIYF

SEQ ID NO: 713479 - protein, 20 aa, Homo sapiens
  CDR3 for alpha chain variable domain of TCR clone 356740 (TRAV30, TRAJ54)
SAAQSRSESQVVQGAQKLVF

SEQ ID NO: 713480 - protein, 11 aa, Homo sapiens
  CDR3 for beta chain variable domain of TCR clone 356740 (TRBV25-1, TRBJ2-4)
CQSRDQNIQYF

SEQ ID NO: 713481 - protein, 12 aa, Homo sapiens
  CDR3 for alpha chain variable domain of TCR clone 356741 (TRAV12-2, TRAJ21)
CAVRDNFNKFYF

SEQ ID NO: 713482 - protein, 14 aa, Homo sapiens
  CDR3 for beta chain variable domain of TCR clone 356741 (TRBV28, TRBJ2-1)
CASSYYTAYNEQFF

SEQ ID NO: 713483 - protein, 10 aa, Homo sapiens
  CDR3 for alpha chain variable domain of TCR clone 356742 (TRAV1-2, TRAJ20)
CVPNDYKPSF

SEQ ID NO: 713484 - protein, 14 aa, Homo sapiens
  CDR3 for beta chain variable domain of TCR clone 356742 (TRBV12-5, TRBJ2-5)
CASGSRTHQETQYF

SEQ ID NO: 713485 - protein, 16 aa, Homo sapiens
  CDR3 for alpha chain variable domain of TCR clone 356743 (TRAV3, TRAJ10)
CALRDMRAGGGNKLTL

SEQ ID NO: 713486 - protein, 15 aa, Homo sapiens
  CDR3 for beta chain variable domain of TCR clone 356743 (TRBV11-3, TRBJ2-7)
CASSPGPASSYEQYF

SEQ ID NO: 713487 - protein, 12 aa, Homo sapiens
  CDR3 for alpha chain variable domain of TCR clone 356744 (TRAV12-3, TRAJ17)
CSMTLTGNKLTF

SEQ ID NO: 713488 - protein, 17 aa, Homo sapiens
  CDR3 for beta chain variable domain of TCR clone 356744 (TRBV11-2, TRBJ2-1)
CASSLYPPGVEYNEQFF

SEQ ID NO: 713489 - protein, 19 aa, Homo sapiens
  CDR3 for alpha chain variable domain of TCR clone 356745 (TRAV26-2, TRAJ52)
CILRTGFNAGGTSYGKLTF

SEQ ID NO: 713490 - protein, 12 aa, Homo sapiens
  CDR3 for beta chain variable domain of TCR clone 356745 (TRBV28, TRBJ2-3)
CASSLYRDTQYF

SEQ ID NO: 713491 - protein, 14 aa, Homo sapiens
  CDR3 for alpha chain variable domain of TCR clone 356746 (TRAV38-2/DV8, TRAJ30)
CAYRSADRDDMIIF

SEQ ID NO: 713492 - protein, 16 aa, Homo sapiens
  CDR3 for beta chain variable domain of TCR clone 356746 (TRBV15, TRBJ1-3)
CATSSPIGFSGNTIYF

SEQ ID NO: 713493 - protein, 17 aa, Homo sapiens
  CDR3 for alpha chain variable domain of TCR clone 356747 (TRAV29/DV5, TRAJ45)
CAADGPFSGGGADGPPF

SEQ ID NO: 713494 - protein, 13 aa, Homo sapiens
  CDR3 for beta chain variable domain of TCR clone 356747 (TRBV19, TRBJ1-5)
CASSMRGYQPQHF

SEQ ID NO: 713495 - protein, 10 aa, Homo sapiens
  CDR3 for alpha chain variable domain of TCR clone 356748 (TRAV23/DV6, TRAJ57)
CAASSTLSQG

SEQ ID NO: 713496 - protein, 16 aa, Homo sapiens
  CDR3 for beta chain variable domain of TCR clone 356748 (TRBV6-6, TRBJ2-3)
CASSYSHAGSTDTQYF

SEQ ID NO: 713497 - protein, 13 aa, Homo sapiens
  CDR3 for alpha chain variable domain of TCR clone 356749 (TRAV27, TRAJ40)
CAGPPSVTYKYIF

SEQ ID NO: 713498 - protein, 13 aa, Homo sapiens
  CDR3 for beta chain variable domain of TCR clone 356749 (TRBV28, TRBJ1-2)
CGGRDRGNYGYTF

SEQ ID NO: 713499 - protein, 15 aa, Homo sapiens
  CDR3 for alpha chain variable domain of TCR clone 356750 (TRAV17, TRAJ16)
CATALRFSDGQKPLF

SEQ ID NO: 713500 - protein, 15 aa, Homo sapiens
  CDR3 for beta chain variable domain of TCR clone 356750 (TRBV20-1, TRBJ1-1)
CSASRGVTGNTEAFF

SEQ ID NO: 713501 - protein, 15 aa, Homo sapiens
  CDR3 for alpha chain variable domain of TCR clone 356751 (TRAV17, TRAJ57)
CATGPSQGGPEKLVL

SEQ ID NO: 713502 - protein, 15 aa, Homo sapiens
  CDR3 for beta chain variable domain of TCR clone 356751 (TRBV12-4, TRBJ1-5)
CQQPTGRVSNQPQHF

SEQ ID NO: 713503 - protein, 12 aa, Homo sapiens
  CDR3 for alpha chain variable domain of TCR clone 356752 (TRAV13-1, TRAJ36)
WRGGAGANNLCF

SEQ ID NO: 713504 - protein, 16 aa, Homo sapiens
  CDR3 for beta chain variable domain of TCR clone 356752 (TRBV7-9, TRBJ2-5)
CASRLEIGTRKETQYF

SEQ ID NO: 713505 - protein, 14 aa, Homo sapiens
  CDR3 for alpha chain variable domain of TCR clone 356753 (TRAV26-1, TRAJ49)
CIVRLRTPVTSSIL

SEQ ID NO: 713506 - protein, 13 aa, Homo sapiens
  CDR3 for beta chain variable domain of TCR clone 356753 (TRBV4-1, TRBJ2-7)
CASSQGQAYEQYF

SEQ ID NO: 713507 - protein, 14 aa, Homo sapiens
  CDR3 for alpha chain variable domain of TCR clone 356754 (TRAV12-1, TRAJ17)
CVVNYKAAGNTLPF

SEQ ID NO: 713508 - protein, 17 aa, Homo sapiens
  CDR3 for beta chain variable domain of TCR clone 356754 (TRBV20-1, TRBJ2-1)
CSASSSGLAGSYNEQFF

SEQ ID NO: 713509 - protein, 13 aa, Homo sapiens
  CDR3 for alpha chain variable domain of TCR clone 356755 (TRAV13-1, TRAJ53)
CAASKGSDYKLTF

SEQ ID NO: 713510 - protein, 13 aa, Homo sapiens
  CDR3 for beta chain variable domain of TCR clone 356755 (TRBV29-1, TRBJ2-5)
CSVTIASEETQYF

SEQ ID NO: 713511 - protein, 12 aa, Homo sapiens
  CDR3 for alpha chain variable domain of TCR clone 356756 (TRAV12-3, TRAJ17)
CAMTLTGNKLTF

SEQ ID NO: 713512 - protein, 16 aa, Homo sapiens
  CDR3 for beta chain variable domain of TCR clone 356756 (TRBV11-2, TRBJ2-7)
CASSTVTAPKTYEQYF

SEQ ID NO: 713513 - protein, 16 aa, Homo sapiens
  CDR3 for alpha chain variable domain of TCR clone 356757 (TRAV3, TRAJ10)
CAVRDMRAGGGNKLTF

SEQ ID NO: 713514 - protein, 12 aa, Homo sapiens
  CDR3 for beta chain variable domain of TCR clone 356757 (TRBV7-8, TRBJ2-1)
CASTDRDNEQFF

SEQ ID NO: 713515 - protein, 14 aa, Homo sapiens
  CDR3 for alpha chain variable domain of TCR clone 356758 (TRAV21, TRAJ28)
CAVGSGAGSYQLTF

SEQ ID NO: 713516 - protein, 14 aa, Homo sapiens
  CDR3 for beta chain variable domain of TCR clone 356758 (TRBV18, TRBJ1-4)
CASAPGPNGEKLFF

SEQ ID NO: 713517 - protein, 11 aa, Homo sapiens
  CDR3 for alpha chain variable domain of TCR clone 356759 (TRAV35, TRAJ43)
CAGQLNNDMRF

SEQ ID NO: 713518 - protein, 17 aa, Homo sapiens
  CDR3 for beta chain variable domain of TCR clone 356759 (TRBV11-2, TRBJ2-1)
CASSLYPPGVEYNEQFF

SEQ ID NO: 713519 - protein, 14 aa, Homo sapiens
  CDR3 for alpha chain variable domain of TCR clone 356760 (TRAV8-3, TRAJ4)
CAVGASGGYNKLIF

SEQ ID NO: 713520 - protein, 15 aa, Homo sapiens
  CDR3 for beta chain variable domain of TCR clone 356760 (TRBV6-3, TRBJ2-7)
CASSSPGTVFYEQCF

SEQ ID NO: 713521 - protein, 17 aa, Homo sapiens
  CDR3 for alpha chain variable domain of TCR clone 356761 (TRAV8-3, TRAJ32)
CAVGPLDYGGATNKLIF

SEQ ID NO: 713522 - protein, 22 aa, Homo sapiens
  CDR3 for beta chain variable domain of TCR clone 356761 (TRBV11-2, TRBJ1-4)
CASSLDITRRGIPRKDNEKLFF

SEQ ID NO: 713523 - protein, 14 aa, Homo sapiens
  CDR3 for alpha chain variable domain of TCR clone 356762 (TRAV2, TRAJ28)
CAASSGAGSYQLTF

SEQ ID NO: 713524 - protein, 15 aa, Homo sapiens
  CDR3 for beta chain variable domain of TCR clone 356762 (TRBV9, TRBJ2-2)
CASSVEDTYTGELFF

SEQ ID NO: 713525 - protein, 13 aa, Homo sapiens
  CDR3 for alpha chain variable domain of TCR clone 356763 (TRAV21, TRAJ27)
CAARPGNAGKSTF

SEQ ID NO: 713526 - protein, 12 aa, Homo sapiens
  CDR3 for beta chain variable domain of TCR clone 356763 (TRBV11-3, TRBJ1-1)
CASSLRDSEAFF

SEQ ID NO: 713527 - protein, 14 aa, Homo sapiens
  CDR3 for alpha chain variable domain of TCR clone 356764 (TRAV8-3, TRAJ23)
CAVIIYNQGGKLIF

SEQ ID NO: 713528 - protein, 15 aa, Homo sapiens
  CDR3 for beta chain variable domain of TCR clone 356764 (TRBV18, TRBJ2-1)
CASSPPSASNNEQFF

SEQ ID NO: 713529 - protein, 14 aa, Homo sapiens
  CDR3 for alpha chain variable domain of TCR clone 356765 (TRAV8-3, TRAJ4)
CAVGAAGGYNKLIF

SEQ ID NO: 713530 - protein, 15 aa, Homo sapiens
  CDR3 for beta chain variable domain of TCR clone 356765 (TRBV4-2, TRBJ1-1)
CASSRVGSMNTEAFF

SEQ ID NO: 713531 - protein, 18 aa, Homo sapiens
  CDR3 for alpha chain variable domain of TCR clone 356766 (TRAV21, TRAJ45)
CCGGPQGGLGGGADGLTF

SEQ ID NO: 713532 - protein, 12 aa, Homo sapiens
  CDR3 for beta chain variable domain of TCR clone 356766 (TRBV29-1, TRBJ1-3)
CSTRDSGNTIYF

SEQ ID NO: 713533 - protein, 13 aa, Homo sapiens
  CDR3 for alpha chain variable domain of TCR clone 356767 (TRAV8-3, TRAJ28)
CAVGAVGSFQLTF

SEQ ID NO: 713534 - protein, 14 aa, Homo sapiens
  CDR3 for beta chain variable domain of TCR clone 356767 (TRBV7-2, TRBJ2-7)
CASRSQGAAYEQDF

SEQ ID NO: 713535 - protein, 13 aa, Homo sapiens
  CDR3 for alpha chain variable domain of TCR clone 356768 (TRAV12-1, TRAJ26)
SATYLYYGKNFVF

SEQ ID NO: 713536 - protein, 15 aa, Homo sapiens
  CDR3 for beta chain variable domain of TCR clone 356768 (TRBV28, TRBJ2-5)
CASSPPWSYQETQYF

SEQ ID NO: 713537 - protein, 12 aa, Homo sapiens
  CDR3 for alpha chain variable domain of TCR clone 356769 (TRAV13-1, TRAJ49)
CAASIRSNQFYF

SEQ ID NO: 713538 - protein, 14 aa, Homo sapiens
  CDR3 for beta chain variable domain of TCR clone 356769 (TRBV7-2, TRBJ2-1)
CASIPGLAGNEQFF

SEQ ID NO: 713539 - protein, 12 aa, Homo sapiens
  CDR3 for alpha chain variable domain of TCR clone 356770 (TRAV29/DV5, TRAJ41)
CAAISSGYALTF

SEQ ID NO: 713540 - protein, 17 aa, Homo sapiens
  CDR3 for beta chain variable domain of TCR clone 356770 (TRBV18, TRBJ2-1)
CASSKGLSGGADNEQFF

SEQ ID NO: 713541 - protein, 11 aa, Homo sapiens
  CDR3 for alpha chain variable domain of TCR clone 356771 (TRAV2, TRAJ31)
CAAGPPARLMF

SEQ ID NO: 713542 - protein, 18 aa, Homo sapiens
  CDR3 for beta chain variable domain of TCR clone 356771 (TRBV11-2, TRBJ2-3)
CASSLGGASRGAPNTQYF

SEQ ID NO: 713543 - protein, 14 aa, Homo sapiens
  CDR3 for alpha chain variable domain of TCR clone 356772 (TRAV1-2, TRAJ16)
CAVNRFSDGQKLLF

SEQ ID NO: 713544 - protein, 15 aa, Homo sapiens
  CDR3 for beta chain variable domain of TCR clone 356772 (TRBV29-1, TRBJ2-7)
CSFEFFDRGSYEQYF

SEQ ID NO: 713545 - protein, 14 aa, Homo sapiens
  CDR3 for alpha chain variable domain of TCR clone 356773 (TRAV12-3, TRAJ39)
SATYLSTAGNMLTF

SEQ ID NO: 713546 - protein, 13 aa, Homo sapiens
  CDR3 for beta chain variable domain of TCR clone 356773 (TRBV28, TRBJ1-2)
CASSPGSRNGYTF

SEQ ID NO: 713547 - protein, 12 aa, Homo sapiens
  CDR3 for alpha chain variable domain of TCR clone 356774 (TRAV3, TRAJ43)
SAVRDPNNDMRF

SEQ ID NO: 713548 - protein, 12 aa, Homo sapiens
  CDR3 for beta chain variable domain of TCR clone 356774 (TRBV24-1, TRBJ1-1)
CATSDSDRGAFF

SEQ ID NO: 713549 - protein, 15 aa, Homo sapiens
  CDR3 for alpha chain variable domain of TCR clone 356775 (TRAV26-1, TRAJ37)
CIVRVATGNTGKLIF

SEQ ID NO: 713550 - protein, 17 aa, Homo sapiens
  CDR3 for beta chain variable domain of TCR clone 356775 (TRBV19, TRBJ2-6)
CASSTGQVFSGANVLTF

SEQ ID NO: 713551 - protein, 14 aa, Homo sapiens
  CDR3 for alpha chain variable domain of TCR clone 356776 (TRAV12-1, TRAJ27)
CGEHIRTNEGKSTF

SEQ ID NO: 713552 - protein, 15 aa, Homo sapiens
  CDR3 for beta chain variable domain of TCR clone 356776 (TRBV19, TRBJ1-1)
CASTSGQIQNTEAFF

SEQ ID NO: 713553 - protein, 12 aa, Homo sapiens
  CDR3 for alpha chain variable domain of TCR clone 356777 (TRAV17, TRAJ57)
CATGPPRADLKS

SEQ ID NO: 713554 - protein, 16 aa, Homo sapiens
  CDR3 for beta chain variable domain of TCR clone 356777 (TRBV12-4, TRBJ1-5)
CASSRQAGGSNQPQHF

SEQ ID NO: 713555 - protein, 12 aa, Homo sapiens
  CDR3 for alpha chain variable domain of TCR clone 356778 (TRAV12-3, TRAJ17)
CAMTLTGNNLPF

SEQ ID NO: 713556 - protein, 15 aa, Homo sapiens
  CDR3 for beta chain variable domain of TCR clone 356778 (TRBV20-1, TRBJ2-7)
CSARDRVSGMDEQYF

SEQ ID NO: 713557 - protein, 15 aa, Homo sapiens
  CDR3 for alpha chain variable domain of TCR clone 356779 (TRAV14/DV4, TRAJ22)
CAMREGWTTARQLTF

SEQ ID NO: 713558 - protein, 13 aa, Homo sapiens
  CDR3 for beta chain variable domain of TCR clone 356779 (TRBV5-4, TRBJ1-2)
CASSSRENYGYTV

SEQ ID NO: 713559 - protein, 13 aa, Homo sapiens
  CDR3 for alpha chain variable domain of TCR clone 356780 (TRAV12-3, TRAJ21)
CAPGLHNFNKFYF

SEQ ID NO: 713560 - protein, 14 aa, Homo sapiens
  CDR3 for beta chain variable domain of TCR clone 356780 (TRBV4-1, TRBJ2-2)
CASSQAVNTGELFF

SEQ ID NO: 713561 - protein, 13 aa, Homo sapiens
  CDR3 for alpha chain variable domain of TCR clone 356781 (TRAV2, TRAJ15)
CAVASQAGTALIF

SEQ ID NO: 713562 - protein, 16 aa, Homo sapiens
  CDR3 for beta chain variable domain of TCR clone 356781 (TRBV5-7, TRBJ2-5)
CDSSFGQGGYQETQYF

SEQ ID NO: 713563 - protein, 12 aa, Homo sapiens
  CDR3 for alpha chain variable domain of TCR clone 356782 (TRAV13-2, TRAJ23)
CAERHRGGKLIF

SEQ ID NO: 713564 - protein, 13 aa, Homo sapiens
  CDR3 for beta chain variable domain of TCR clone 356782 (TRBV27, TRBJ1-4)
CASSLMGDEKLFF

SEQ ID NO: 713565 - protein, 16 aa, Homo sapiens
  CDR3 for alpha chain variable domain of TCR clone 356783 (TRAV26-2, TRAJ28)
CILRPYSGAGSYQLTF

SEQ ID NO: 713566 - protein, 13 aa, Homo sapiens
  CDR3 for beta chain variable domain of TCR clone 356783 (TRBV7-3, TRBJ1-1)
CASSQDWGAEAFF

SEQ ID NO: 713567 - protein, 14 aa, Homo sapiens
  CDR3 for alpha chain variable domain of TCR clone 356784 (TRAV3, TRAJ6)
CAVRDPWGSYIPTF

SEQ ID NO: 713568 - protein, 16 aa, Homo sapiens
  CDR3 for beta chain variable domain of TCR clone 356784 (TRBV20-1, TRBJ2-1)
CSASLAGGPGYNEQFF

SEQ ID NO: 713569 - protein, 14 aa, Homo sapiens
  CDR3 for alpha chain variable domain of TCR clone 356785 (TRAV12-1, TRAJ37)
CVVTGSSNTGKLIF

SEQ ID NO: 713570 - protein, 13 aa, Homo sapiens
  CDR3 for beta chain variable domain of TCR clone 356785 (TRBV7-2, TRBJ2-2)
CASSSVRAGELFF

SEQ ID NO: 713571 - protein, 13 aa, Homo sapiens
  CDR3 for alpha chain variable domain of TCR clone 356786 (TRAV1-2, TRAJ20)
CAVPRSNDYKLSF

SEQ ID NO: 713572 - protein, 12 aa, Homo sapiens
  CDR3 for beta chain variable domain of TCR clone 356786 (TRBV12-4, TRBJ2-1)
CASTYVLNEQFF

SEQ ID NO: 713573 - protein, 15 aa, Homo sapiens
  CDR3 for alpha chain variable domain of TCR clone 356787 (TRAV16, TRAJ48)
CALFISNFGNEKLTF

SEQ ID NO: 713574 - protein, 16 aa, Homo sapiens
  CDR3 for beta chain variable domain of TCR clone 356787 (TRBV4-3, TRBJ2-7)
CASSPRTSGRSYEQYF

SEQ ID NO: 713575 - protein, 11 aa, Homo sapiens
  CDR3 for alpha chain variable domain of TCR clone 356788 (TRAV1-1, TRAJ16)
CAAGDGQKLLS

SEQ ID NO: 713576 - protein, 15 aa, Homo sapiens
  CDR3 for beta chain variable domain of TCR clone 356788 (TRBV28, TRBJ1-2)
CASIPQGSDDYGHTF

SEQ ID NO: 713577 - protein, 13 aa, Homo sapiens
  CDR3 for alpha chain variable domain of TCR clone 356789 (TRAV20, TRAJ50)
CAVQQTSYDKVIF

SEQ ID NO: 713578 - protein, 16 aa, Homo sapiens
  CDR3 for beta chain variable domain of TCR clone 356789 (TRBV11-1, TRBJ2-1)
CASSSLTSGSGNEQFF

SEQ ID NO: 713579 - protein, 18 aa, Homo sapiens
  CDR3 for alpha chain variable domain of TCR clone 356790 (TRAV4, )
CLVDIQNPDPAVYQLRDF

SEQ ID NO: 713580 - protein, 15 aa, Homo sapiens
  CDR3 for beta chain variable domain of TCR clone 356790 (TRBV20-1, TRBJ1-5)
CSARVGRVVSQPQHF

SEQ ID NO: 713581 - protein, 14 aa, Homo sapiens
  CDR3 for alpha chain variable domain of TCR clone 356791 (TRAV1-2, TRAJ16)
CAVNRFSDGQKLLF

SEQ ID NO: 713582 - protein, 13 aa, Homo sapiens
  CDR3 for beta chain variable domain of TCR clone 356791 (TRBV20-1, TRBJ1-1)
CSARLGQGTEDFF

SEQ ID NO: 713583 - protein, 13 aa, Homo sapiens
  CDR3 for alpha chain variable domain of TCR clone 356792 (TRAV12-2, TRAJ40)
CAVKRTGTYKYIF

SEQ ID NO: 713584 - protein, 16 aa, Homo sapiens
  CDR3 for beta chain variable domain of TCR clone 356792 (TRBV28, TRBJ1-5)
CASSFRGGYSNQPQHF

SEQ ID NO: 713585 - protein, 17 aa, Homo sapiens
  CDR3 for alpha chain variable domain of TCR clone 356793 (TRAV3, TRAJ6)
CAVRDGPRAGGSYIPTF

SEQ ID NO: 713586 - protein, 14 aa, Homo sapiens
  CDR3 for beta chain variable domain of TCR clone 356793 (TRBV6-1, TRBJ1-3)
CASVQGGGGNTIFF

SEQ ID NO: 713587 - protein, 22 aa, Homo sapiens
  CDR3 for alpha chain variable domain of TCR clone 356794 (TRAV26-1, TRAJ23)
CCVLLHRQSRPGSVEPGGKLIF

SEQ ID NO: 713588 - protein, 16 aa, Homo sapiens
  CDR3 for beta chain variable domain of TCR clone 356794 (TRBV12-4, TRBJ2-5)
CASSFFVRGRQETQYF

SEQ ID NO: 713589 - protein, 15 aa, Homo sapiens
  CDR3 for alpha chain variable domain of TCR clone 356795 (TRAV8-4, TRAJ37)
CAVSKVPGNTGKLIF

SEQ ID NO: 713590 - protein, 13 aa, Homo sapiens
  CDR3 for beta chain variable domain of TCR clone 356795 (TRBV28, TRBJ2-2)
CASIGGLGGELFF

SEQ ID NO: 713591 - protein, 13 aa, Homo sapiens
  CDR3 for alpha chain variable domain of TCR clone 356796 (TRAV27, TRAJ41)
CAGEGNSGYAHNF

SEQ ID NO: 713592 - protein, 13 aa, Homo sapiens
  CDR3 for beta chain variable domain of TCR clone 356796 (TRBV19, TRBJ1-2)
CASSVPGQDGYTF

SEQ ID NO: 713593 - protein, 14 aa, Homo sapiens
  CDR3 for alpha chain variable domain of TCR clone 356797 (TRAV1-2, TRAJ16)
CAVNRFSDGQKLLF

SEQ ID NO: 713594 - protein, 13 aa, Homo sapiens
  CDR3 for beta chain variable domain of TCR clone 356797 (TRBV2, TRBJ2-5)
CASRGGGKETQYF

SEQ ID NO: 713595 - protein, 14 aa, Homo sapiens
  CDR3 for alpha chain variable domain of TCR clone 356798 (TRAV12-3, TRAJ58)
CAMSTETSGPRLTV

SEQ ID NO: 713596 - protein, 15 aa, Homo sapiens
  CDR3 for beta chain variable domain of TCR clone 356798 (TRBV11-3, TRBJ2-3)
CASLKDGREGDTQYF

SEQ ID NO: 713597 - protein, 15 aa, Homo sapiens
  CDR3 for alpha chain variable domain of TCR clone 356799 (TRAV13-1, TRAJ32)
CAASIYGRATNKLIF

SEQ ID NO: 713598 - protein, 14 aa, Homo sapiens
  CDR3 for beta chain variable domain of TCR clone 356799 (TRBV7-9, TRBJ2-1)
CASILASGSNEQFF

SEQ ID NO: 713599 - protein, 12 aa, Homo sapiens
  CDR3 for alpha chain variable domain of TCR clone 356800 (TRAV17, TRAJ20)
CATQANDYKLSF

SEQ ID NO: 713600 - protein, 15 aa, Homo sapiens
  CDR3 for beta chain variable domain of TCR clone 356800 (TRBV7-6, TRBJ2-1)
CASSPGQGPYNEQFF

SEQ ID NO: 713601 - protein, 14 aa, Homo sapiens
  CDR3 for alpha chain variable domain of TCR clone 356801 (TRAV25, TRAJ27)
CAGEHLTNAGKSTF

SEQ ID NO: 713602 - protein, 13 aa, Homo sapiens
  CDR3 for beta chain variable domain of TCR clone 356801 (TRBV7-3, TRBJ2-5)
CASSFRGGETQYF

SEQ ID NO: 713603 - protein, 11 aa, Homo sapiens
  CDR3 for alpha chain variable domain of TCR clone 356802 (TRAV12-3, TRAJ43)
CAMSVSNDMRF

SEQ ID NO: 713604 - protein, 14 aa, Homo sapiens
  CDR3 for beta chain variable domain of TCR clone 356802 (TRBV11-2, TRBJ2-5)
CASRPLAGRETQYF

SEQ ID NO: 713605 - protein, 12 aa, Homo sapiens
  CDR3 for alpha chain variable domain of TCR clone 356803 (TRAV17, TRAJ39)
CATGAAGNMLAL

SEQ ID NO: 713606 - protein, 14 aa, Homo sapiens
  CDR3 for beta chain variable domain of TCR clone 356803 (TRBV7-9, TRBJ1-2)
CASSRQGANYGYTF

SEQ ID NO: 713607 - protein, 13 aa, Homo sapiens
  CDR3 for alpha chain variable domain of TCR clone 356804 (TRAV12-1, TRAJ6)
CVVFPGGSYIPTF

SEQ ID NO: 713608 - protein, 14 aa, Homo sapiens
  CDR3 for beta chain variable domain of TCR clone 356804 (TRBV20-1, TRBJ2-7)
CSAKRGRSSYEQYF

SEQ ID NO: 713609 - protein, 15 aa, Homo sapiens
  CDR3 for alpha chain variable domain of TCR clone 356805 (TRAV4, TRAJ39)
CLVGPNNNAGNMLTF

SEQ ID NO: 713610 - protein, 15 aa, Homo sapiens
  CDR3 for beta chain variable domain of TCR clone 356805 (TRBV10-3, TRBJ2-3)
CAISLTSGGTDTQYF

SEQ ID NO: 713611 - protein, 13 aa, Homo sapiens
  CDR3 for alpha chain variable domain of TCR clone 356806 (TRAV8-3, TRAJ43)
CAVGADNNNDMRF

SEQ ID NO: 713612 - protein, 14 aa, Homo sapiens
  CDR3 for beta chain variable domain of TCR clone 356806 (TRBV19, TRBJ2-1)
CASKDPSSYNEQFF

SEQ ID NO: 713613 - protein, 13 aa, Homo sapiens
  CDR3 for alpha chain variable domain of TCR clone 356807 (TRAV3, TRAJ27)
CAVRPLGAGKSTF

SEQ ID NO: 713614 - protein, 14 aa, Homo sapiens
  CDR3 for beta chain variable domain of TCR clone 356807 (TRBV4-2, TRBJ1-2)
CASSQTTGNYGYTF

SEQ ID NO: 713615 - protein, 13 aa, Homo sapiens
  CDR3 for alpha chain variable domain of TCR clone 356808 (TRAV35, TRAJ42)
CAGFPGSQGNLIV

SEQ ID NO: 713616 - protein, 14 aa, Homo sapiens
  CDR3 for beta chain variable domain of TCR clone 356808 (TRBV4-1, TRBJ2-2)
CASSQAVNTGELFF

SEQ ID NO: 713617 - protein, 14 aa, Homo sapiens
  CDR3 for alpha chain variable domain of TCR clone 356809 (TRAV1-2, TRAJ16)
CAVNRFSDGQKLLF

SEQ ID NO: 713618 - protein, 19 aa, Homo sapiens
  CDR3 for beta chain variable domain of TCR clone 356809 (TRBV12-4, TRBJ2-7)
CASSPRSLRTSGRGHEQYF

SEQ ID NO: 713619 - protein, 12 aa, Homo sapiens
  CDR3 for alpha chain variable domain of TCR clone 356810 (TRAV23/DV6, TRAJ16)
CAATGTGQKLLF

SEQ ID NO: 713620 - protein, 15 aa, Homo sapiens
  CDR3 for beta chain variable domain of TCR clone 356810 (TRBV5-1, TRBJ2-3)
CASSLETASTDTQYV

SEQ ID NO: 713621 - protein, 15 aa, Homo sapiens
  CDR3 for alpha chain variable domain of TCR clone 356811 (TRAV1-2, TRAJ15)
CAVDVMGSAVTALIF

SEQ ID NO: 713622 - protein, 13 aa, Homo sapiens
  CDR3 for beta chain variable domain of TCR clone 356811 (TRBV20-1, TRBJ1-1)
CSAFDRENTEAFF

SEQ ID NO: 713623 - protein, 13 aa, Homo sapiens
  CDR3 for alpha chain variable domain of TCR clone 356812 (TRAV21, TRAJ57)
CAVTQGGSENLVL

SEQ ID NO: 713624 - protein, 11 aa, Homo sapiens
  CDR3 for beta chain variable domain of TCR clone 356812 (TRBV11-2, TRBJ2-2)
CASSLPGELFF

SEQ ID NO: 713625 - protein, 14 aa, Homo sapiens
  CDR3 for alpha chain variable domain of TCR clone 356813 (TRAV17, TRAJ6)
CATDASGGSYIPTF

SEQ ID NO: 713626 - protein, 15 aa, Homo sapiens
  CDR3 for beta chain variable domain of TCR clone 356813 (TRBV20-1, TRBJ2-7)
CSARVPAAYFYEQYF

SEQ ID NO: 713627 - protein, 13 aa, Homo sapiens
  CDR3 for alpha chain variable domain of TCR clone 356814 (TRAV12-3, TRAJ9)
CAMTNTGGFKTIF

SEQ ID NO: 713628 - protein, 16 aa, Homo sapiens
  CDR3 for beta chain variable domain of TCR clone 356814 (TRBV19, TRBJ2-1)
CASSIDGSFAYNEQFF

SEQ ID NO: 713629 - protein, 18 aa, Homo sapiens
  CDR3 for alpha chain variable domain of TCR clone 356815 (TRAV21, TRAJ52)
CAVRHSPEGGTSYGKLTF

SEQ ID NO: 713630 - protein, 17 aa, Homo sapiens
  CDR3 for beta chain variable domain of TCR clone 356815 (TRBV13, TRBJ2-3)
CASSLSRVAGGRNTQYF

SEQ ID NO: 713631 - protein, 13 aa, Homo sapiens
  CDR3 for alpha chain variable domain of TCR clone 356816 (TRAV2, TRAJ40)
CALVTSGTYKYIF

SEQ ID NO: 713632 - protein, 15 aa, Homo sapiens
  CDR3 for beta chain variable domain of TCR clone 356816 (TRBV18, TRBJ2-1)
CASSPPSASYNEQFF

SEQ ID NO: 713633 - protein, 15 aa, Homo sapiens
  CDR3 for alpha chain variable domain of TCR clone 356817 (TRAV2, TRAJ15)
CAVVNRGPAGTALIF

SEQ ID NO: 713634 - protein, 13 aa, Homo sapiens
  CDR3 for beta chain variable domain of TCR clone 356817 (TRBV10-2, TRBJ2-7)
CASGASGGYEQYF

SEQ ID NO: 713635 - protein, 14 aa, Homo sapiens
  CDR3 for alpha chain variable domain of TCR clone 356818 (TRAV12-3, TRAJ54)
CAMRGIQGAQKLVF

SEQ ID NO: 713636 - protein, 13 aa, Homo sapiens
  CDR3 for beta chain variable domain of TCR clone 356818 (TRBV19, TRBJ1-1)
CASSPSNVGEAFF

SEQ ID NO: 713637 - protein, 14 aa, Homo sapiens
  CDR3 for alpha chain variable domain of TCR clone 356819 (TRAV12-3, TRAJ43)
CAMSLRGAGTRLTV

SEQ ID NO: 713638 - protein, 16 aa, Homo sapiens
  CDR3 for beta chain variable domain of TCR clone 356819 (TRBV24-1, TRBJ2-1)
CATSGVTGANYNEQFF

SEQ ID NO: 713639 - protein, 16 aa, Homo sapiens
  CDR3 for alpha chain variable domain of TCR clone 356820 (TRAV1-1, TRAJ39)
CLLLLRCARGSNMLTF

SEQ ID NO: 713640 - protein, 15 aa, Homo sapiens
  CDR3 for beta chain variable domain of TCR clone 356820 (TRBV19, TRBJ1-6)
CASSTQGAVGSPLHF

SEQ ID NO: 713641 - protein, 13 aa, Homo sapiens
  CDR3 for alpha chain variable domain of TCR clone 356821 (TRAV20, TRAJ20)
CAVQAGSGYKLSF

SEQ ID NO: 713642 - protein, 14 aa, Homo sapiens
  CDR3 for beta chain variable domain of TCR clone 356821 (TRBV20-1, TRBJ2-7)
CSAKRGRSSYEQYF

SEQ ID NO: 713643 - protein, 15 aa, Homo sapiens
  CDR3 for alpha chain variable domain of TCR clone 356822 (TRAV12-3, TRAJ49)
CAMAVTPNTGNQFYF

SEQ ID NO: 713644 - protein, 13 aa, Homo sapiens
  CDR3 for beta chain variable domain of TCR clone 356822 (TRBV6-1, TRBJ1-1)
CASSRQGNTEAFF

SEQ ID NO: 713645 - protein, 12 aa, Homo sapiens
  CDR3 for alpha chain variable domain of TCR clone 356823 (TRAV13-2, TRAJ8)
CAPWLGFQKLVF

SEQ ID NO: 713646 - protein, 15 aa, Homo sapiens
  CDR3 for beta chain variable domain of TCR clone 356823 (TRBV12-4, TRBJ2-5)
CASSLGGAVQETQYF

SEQ ID NO: 713647 - protein, 10 aa, Homo sapiens
  CDR3 for alpha chain variable domain of TCR clone 356824 (TRAV4, TRAJ31)
CLAPRERPMF

SEQ ID NO: 713648 - protein, 14 aa, Homo sapiens
  CDR3 for beta chain variable domain of TCR clone 356824 (TRBV18, TRBJ2-7)
CASSPRGGAYEQYF

SEQ ID NO: 713649 - protein, 14 aa, Homo sapiens
  CDR3 for alpha chain variable domain of TCR clone 356825 (TRAV3, TRAJ9)
CAVRLNTGGFKNIF

SEQ ID NO: 713650 - protein, 16 aa, Homo sapiens
  CDR3 for beta chain variable domain of TCR clone 356825 (TRBV24-1, TRBJ2-3)
CATSDRRQDLTDTQYF

SEQ ID NO: 713651 - protein, 14 aa, Homo sapiens
  CDR3 for alpha chain variable domain of TCR clone 356826 (TRAV1-2, TRAJ8)
CAVIEDTGFQKLVF

SEQ ID NO: 713652 - protein, 17 aa, Homo sapiens
  CDR3 for beta chain variable domain of TCR clone 356826 (TRBV28, TRBJ2-5)
CASSRQGGLAGAETQYF

SEQ ID NO: 713653 - protein, 13 aa, Homo sapiens
  CDR3 for alpha chain variable domain of TCR clone 356827 (TRAV8-3, TRAJ4)
WVFYSGGYNTLIF

SEQ ID NO: 713654 - protein, 13 aa, Homo sapiens
  CDR3 for beta chain variable domain of TCR clone 356827 (TRBV7-9, TRBJ2-3)
CQQLEDGTDTQYF

SEQ ID NO: 713655 - protein, 16 aa, Homo sapiens
  CDR3 for alpha chain variable domain of TCR clone 356828 (TRAV26-1, TRAJ47)
CIVRVVLSQYVNKLVF

SEQ ID NO: 713656 - protein, 16 aa, Homo sapiens
  CDR3 for beta chain variable domain of TCR clone 356828 (TRBV5-1, TRBJ2-1)
CASSLGVSGSYNEQFF

SEQ ID NO: 713657 - protein, 12 aa, Homo sapiens
  CDR3 for alpha chain variable domain of TCR clone 356829 (TRAV8-3, TRAJ13)
CAVGAGYQKVTF

SEQ ID NO: 713658 - protein, 17 aa, Homo sapiens
  CDR3 for beta chain variable domain of TCR clone 356829 (TRBV11-2, TRBJ2-1)
CASSLYPPGVEYNEQFF

SEQ ID NO: 713659 - protein, 12 aa, Homo sapiens
  CDR3 for alpha chain variable domain of TCR clone 356830 (TRAV3, TRAJ20)
CAVRDGDYKLRF

SEQ ID NO: 713660 - protein, 13 aa, Homo sapiens
  CDR3 for beta chain variable domain of TCR clone 356830 (TRBV7-9, TRBJ2-3)
CASSPGSTDTQYF

SEQ ID NO: 713661 - protein, 16 aa, Homo sapiens
  CDR3 for alpha chain variable domain of TCR clone 356831 (TRAV30, TRAJ24)
CGTEIVDADSWGKFQF

SEQ ID NO: 713662 - protein, 16 aa, Homo sapiens
  CDR3 for beta chain variable domain of TCR clone 356831 (TRBV10-3, TRBJ2-2)
CAISLTSAAGTGELFF

SEQ ID NO: 713663 - protein, 13 aa, Homo sapiens
  CDR3 for alpha chain variable domain of TCR clone 356832 (TRAV3, TRAJ26)
CAVRGAEGQNFVF

SEQ ID NO: 713664 - protein, 17 aa, Homo sapiens
  CDR3 for beta chain variable domain of TCR clone 356832 (TRBV28, TRBJ2-1)
CASTGPGLAVSEDEQFF

SEQ ID NO: 713665 - protein, 13 aa, Homo sapiens
  CDR3 for alpha chain variable domain of TCR clone 356833 (TRAV13-1, TRAJ6)
CAASKGGSYIPTF

SEQ ID NO: 713666 - protein, 12 aa, Homo sapiens
  CDR3 for beta chain variable domain of TCR clone 356833 (TRBV11-2, TRBJ2-5)
CASSPPAETQYF

SEQ ID NO: 713667 - protein, 14 aa, Homo sapiens
  CDR3 for alpha chain variable domain of TCR clone 356834 (TRAV27, TRAJ22)
CAGLPSGSARQLTF

SEQ ID NO: 713668 - protein, 16 aa, Homo sapiens
  CDR3 for beta chain variable domain of TCR clone 356834 (TRBV4-1, TRBJ2-7)
CASSRGDILNSYEQYF

SEQ ID NO: 713669 - protein, 15 aa, Homo sapiens
  CDR3 for alpha chain variable domain of TCR clone 356835 (TRAV40, TRAJ45)
CLLGDLGGGADGFTF

SEQ ID NO: 713670 - protein, 13 aa, Homo sapiens
  CDR3 for beta chain variable domain of TCR clone 356835 (TRBV7-9, TRBJ1-2)
CASSLKQNYGYTF

SEQ ID NO: 713671 - protein, 13 aa, Homo sapiens
  CDR3 for alpha chain variable domain of TCR clone 356836 (TRAV35, TRAJ36)
CAGPRIGANNLFF

SEQ ID NO: 713672 - protein, 15 aa, Homo sapiens
  CDR3 for beta chain variable domain of TCR clone 356836 (TRBV11-3, TRBJ2-7)
CASSPGPASSYEQYF

SEQ ID NO: 713673 - protein, 11 aa, Homo sapiens
  CDR3 for alpha chain variable domain of TCR clone 356837 (TRAV12-3, TRAJ43)
CAMSVSNDMRF

SEQ ID NO: 713674 - protein, 16 aa, Homo sapiens
  CDR3 for beta chain variable domain of TCR clone 356837 (TRBV12-4, TRBJ2-7)
CASSLIGGTGTYEQYF

SEQ ID NO: 713675 - protein, 11 aa, Homo sapiens
  CDR3 for alpha chain variable domain of TCR clone 356838 (TRAV3, TRAJ21)
CAVGNFNTFYF

SEQ ID NO: 713676 - protein, 16 aa, Homo sapiens
  CDR3 for beta chain variable domain of TCR clone 356838 (TRBV19, TRBJ2-1)
CANSKAGPSSYNEQFF

SEQ ID NO: 713677 - protein, 15 aa, Homo sapiens
  CDR3 for alpha chain variable domain of TCR clone 356839 (TRAV3, TRAJ22)
CAVRARGGSARQLTF

SEQ ID NO: 713678 - protein, 16 aa, Homo sapiens
  CDR3 for beta chain variable domain of TCR clone 356839 (TRBV11-2, TRBJ2-7)
CASSPTTGGVSYEQYF

SEQ ID NO: 713679 - protein, 13 aa, Homo sapiens
  CDR3 for alpha chain variable domain of TCR clone 356840 (TRAV21, TRAJ27)
CAARPGNAGKSTF

SEQ ID NO: 713680 - protein, 15 aa, Homo sapiens
  CDR3 for beta chain variable domain of TCR clone 356840 (TRBV2, TRBJ2-3)
CASSHAGGPPDTQYF

SEQ ID NO: 713681 - protein, 10 aa, Homo sapiens
  CDR3 for alpha chain variable domain of TCR clone 356841 (TRAV2, TRAJ34)
CAVVNDKLIF

SEQ ID NO: 713682 - protein, 15 aa, Homo sapiens
  CDR3 for beta chain variable domain of TCR clone 356841 (TRBV11-2, TRBJ2-2)
CASSSDRVNAGELFF

SEQ ID NO: 713683 - protein, 13 aa, Homo sapiens
  CDR3 for alpha chain variable domain of TCR clone 356842 (TRAV12-1, TRAJ7)
CVVNMRGNNRLAF

SEQ ID NO: 713684 - protein, 15 aa, Homo sapiens
  CDR3 for beta chain variable domain of TCR clone 356842 (TRBV27, TRBJ2-3)
CASSLGLAATDSQYF

SEQ ID NO: 713685 - protein, 15 aa, Homo sapiens
  CDR3 for alpha chain variable domain of TCR clone 356843 (TRAV41, TRAJ45)
CAASYSGGGADRLTF

SEQ ID NO: 713686 - protein, 14 aa, Homo sapiens
  CDR3 for beta chain variable domain of TCR clone 356843 (TRBV7-2, TRBJ2-7)
CASSPKTSFYEQYF

SEQ ID NO: 713687 - protein, 15 aa, Homo sapiens
  CDR3 for alpha chain variable domain of TCR clone 356844 (TRAV13-1, TRAJ44)
CAASRGGGTASKLTF

SEQ ID NO: 713688 - protein, 14 aa, Homo sapiens
  CDR3 for beta chain variable domain of TCR clone 356844 (TRBV7-2, TRBJ2-5)
CASSPRGSSENQYF

SEQ ID NO: 713689 - protein, 17 aa, Homo sapiens
  CDR3 for alpha chain variable domain of TCR clone 356845 (TRAV3, TRAJ6)
CAVSRRTDTGGSYIPTF

SEQ ID NO: 713690 - protein, 19 aa, Homo sapiens
  CDR3 for beta chain variable domain of TCR clone 356845 (TRBV25-1, TRBJ2-2)
CAILVYRVDRGRKTGELFF

SEQ ID NO: 713691 - protein, 13 aa, Homo sapiens
  CDR3 for alpha chain variable domain of TCR clone 356846 (TRAV17, TRAJ9)
CATGSTGGFETIF

SEQ ID NO: 713692 - protein, 14 aa, Homo sapiens
  CDR3 for beta chain variable domain of TCR clone 356846 (TRBV7-8, TRBJ2-7)
CASTFRGGPNEQYF

SEQ ID NO: 713693 - protein, 18 aa, Homo sapiens
  CDR3 for alpha chain variable domain of TCR clone 356847 (TRAV26-1, TRAJ23)
CIVRVGLEVRNQGGKLIF

SEQ ID NO: 713694 - protein, 15 aa, Homo sapiens
  CDR3 for beta chain variable domain of TCR clone 356847 (TRBV19, TRBJ2-7)
CASSIGRTFSYEQYF

SEQ ID NO: 713695 - protein, 12 aa, Homo sapiens
  CDR3 for alpha chain variable domain of TCR clone 356848 (TRAV13-1, TRAJ53)
AASGGSNYKLTF

SEQ ID NO: 713696 - protein, 15 aa, Homo sapiens
  CDR3 for beta chain variable domain of TCR clone 356848 (TRBV5-1, TRBJ2-1)
CASSPRRAPYNEQFF

SEQ ID NO: 713697 - protein, 17 aa, Homo sapiens
  CDR3 for alpha chain variable domain of TCR clone 356849 (TRAV26-2, TRAJ28)
CILRPLLIVAGSYQLTF

SEQ ID NO: 713698 - protein, 15 aa, Homo sapiens
  CDR3 for beta chain variable domain of TCR clone 356849 (TRBV2, TRBJ1-3)
CASSVELPSGNTIYF

SEQ ID NO: 713699 - protein, 14 aa, Homo sapiens
  CDR3 for alpha chain variable domain of TCR clone 356850 (TRAV8-3, TRAJ4)
CAVGAAGGYNKLIF

SEQ ID NO: 713700 - protein, 16 aa, Homo sapiens
  CDR3 for beta chain variable domain of TCR clone 356850 (TRBV13, TRBJ2-2)
CAISPRTGEHTGELFF

SEQ ID NO: 713701 - protein, 14 aa, Homo sapiens
  CDR3 for alpha chain variable domain of TCR clone 356851 (TRAV25, TRAJ35)
CARRMEGFGNVRHC

SEQ ID NO: 713702 - protein, 13 aa, Homo sapiens
  CDR3 for beta chain variable domain of TCR clone 356851 (TRBV7-2, TRBJ1-4)
CASSLAGLEKLFF

SEQ ID NO: 713703 - protein, 13 aa, Homo sapiens
  CDR3 for alpha chain variable domain of TCR clone 356852 (TRAV21, TRAJ27)
CAALNTNAGKSTF

SEQ ID NO: 713704 - protein, 15 aa, Homo sapiens
  CDR3 for beta chain variable domain of TCR clone 356852 (TRBV7-2, TRBJ2-1)
CASSLASGRVNEQFF

SEQ ID NO: 713705 - protein, 14 aa, Homo sapiens
  CDR3 for alpha chain variable domain of TCR clone 356853 (TRAV12-1, TRAJ4)
CVGDFSGGYNKLIF

SEQ ID NO: 713706 - protein, 15 aa, Homo sapiens
  CDR3 for beta chain variable domain of TCR clone 356853 (TRBV19, TRBJ1-2)
CASSVGQVLNYGYTF

SEQ ID NO: 713707 - protein, 17 aa, Homo sapiens
  CDR3 for alpha chain variable domain of TCR clone 356854 (TRAV3, TRAJ42)
CSVRDRDYGGSQGNLIF

SEQ ID NO: 713708 - protein, 16 aa, Homo sapiens
  CDR3 for beta chain variable domain of TCR clone 356854 (TRBV7-3, TRBJ2-1)
CASSFTGRRSYNEQLF

SEQ ID NO: 713709 - protein, 11 aa, Homo sapiens
  CDR3 for alpha chain variable domain of TCR clone 356855 (TRAV21, TRAJ34)
CAPLDTDELIF

SEQ ID NO: 713710 - protein, 16 aa, Homo sapiens
  CDR3 for beta chain variable domain of TCR clone 356855 (TRBV5-1, TRBJ2-3)
CASSLAGDRGTDTQYF

SEQ ID NO: 713711 - protein, 12 aa, Homo sapiens
  CDR3 for alpha chain variable domain of TCR clone 356856 (TRAV2, TRAJ33)
CAFMDSNYQLIW

SEQ ID NO: 713712 - protein, 16 aa, Homo sapiens
  CDR3 for beta chain variable domain of TCR clone 356856 (TRBV29-1, TRBJ2-7)
CSVEVVGTSGSYEQYF

SEQ ID NO: 713713 - protein, 16 aa, Homo sapiens
  CDR3 for alpha chain variable domain of TCR clone 356857 (TRAV12-2, TRAJ45)
CAVIFLSGGGADGLTF

SEQ ID NO: 713714 - protein, 19 aa, Homo sapiens
  CDR3 for beta chain variable domain of TCR clone 356857 (TRBV28, TRBJ2-4)
CASSFQTGGPAHSKNIQYF

SEQ ID NO: 713715 - protein, 14 aa, Homo sapiens
  CDR3 for alpha chain variable domain of TCR clone 356858 (TRAV12-1, TRAJ17)
CVVNYKAAGNKLTF

SEQ ID NO: 713716 - protein, 14 aa, Homo sapiens
  CDR3 for beta chain variable domain of TCR clone 356858 (TRBV4-1, TRBJ2-5)
CASSQYRDQETQYF

SEQ ID NO: 713717 - protein, 16 aa, Homo sapiens
  CDR3 for alpha chain variable domain of TCR clone 356859 (TRAV3, TRAJ37)
FAVRVRGSCNTGKLIF

SEQ ID NO: 713718 - protein, 13 aa, Homo sapiens
  CDR3 for beta chain variable domain of TCR clone 356859 (TRBV7-9, TRBJ1-2)
CASSLKQNYGYTF

SEQ ID NO: 713719 - protein, 13 aa, Homo sapiens
  CDR3 for alpha chain variable domain of TCR clone 356860 (TRAV1-2, TRAJ9)
CAALNTGGFKTIF

SEQ ID NO: 713720 - protein, 13 aa, Homo sapiens
  CDR3 for beta chain variable domain of TCR clone 356860 (TRBV7-2, TRBJ2-1)
CASNRDRWNEQFF

SEQ ID NO: 713721 - protein, 17 aa, Homo sapiens
  CDR3 for alpha chain variable domain of TCR clone 356861 (TRAV3, TRAJ6)
CAARDGPRAGGSYIPTF

SEQ ID NO: 713722 - protein, 20 aa, Homo sapiens
  CDR3 for beta chain variable domain of TCR clone 356861 (TRBV28, TRBJ2-1)
CASTPIGRSPGLAGGNEQFL

SEQ ID NO: 713723 - protein, 13 aa, Homo sapiens
  CDR3 for alpha chain variable domain of TCR clone 356862 (TRAV2, TRAJ40)
CAVVTSGTYKYIF

SEQ ID NO: 713724 - protein, 16 aa, Homo sapiens
  CDR3 for beta chain variable domain of TCR clone 356862 (TRBV19, TRBJ2-1)
CVSSKAGPSSYNEQFF

SEQ ID NO: 713725 - protein, 14 aa, Homo sapiens
  CDR3 for alpha chain variable domain of TCR clone 356863 (TRAV8-1, TRAJ5)
CAVRTDTGRRALTF

SEQ ID NO: 713726 - protein, 14 aa, Homo sapiens
  CDR3 for beta chain variable domain of TCR clone 356863 (TRBV7-8, TRBJ2-3)
CASSYPDGKDTQYF

SEQ ID NO: 713727 - protein, 13 aa, Homo sapiens
  CDR3 for alpha chain variable domain of TCR clone 356864 (TRAV12-2, TRAJ50)
CAVIVTSYDKVIF

SEQ ID NO: 713728 - protein, 15 aa, Homo sapiens
  CDR3 for beta chain variable domain of TCR clone 356864 (TRBV12-4, TRBJ2-1)
CASSGSGGTLGEQFF

SEQ ID NO: 713729 - protein, 13 aa, Homo sapiens
  CDR3 for alpha chain variable domain of TCR clone 356865 (TRAV1-1, TRAJ9)
RAAKNTGGFKTFF

SEQ ID NO: 713730 - protein, 17 aa, Homo sapiens
  CDR3 for beta chain variable domain of TCR clone 356865 (TRBV13, TRBJ2-3)
CASSLSRVAGGRNTQYF

SEQ ID NO: 713731 - protein, 12 aa, Homo sapiens
  CDR3 for alpha chain variable domain of TCR clone 356866 (TRAV12-1, TRAJ40)
CVVYSGTYKYIF

SEQ ID NO: 713732 - protein, 18 aa, Homo sapiens
  CDR3 for beta chain variable domain of TCR clone 356866 (TRBV11-2, TRBJ2-3)
CASSLGGASRGARNTQYF

SEQ ID NO: 713733 - protein, 14 aa, Homo sapiens
  CDR3 for alpha chain variable domain of TCR clone 356867 (TRAV12-2, TRAJ40)
CAVKIPSGTSKYIF

SEQ ID NO: 713734 - protein, 15 aa, Homo sapiens
  CDR3 for beta chain variable domain of TCR clone 356867 (TRBV6-5, TRBJ2-1)
CASSYDAGAGNEQFF

SEQ ID NO: 713735 - protein, 13 aa, Homo sapiens
  CDR3 for alpha chain variable domain of TCR clone 356868 (TRAV8-3, TRAJ28)
CAVGAVWSYQLIF

SEQ ID NO: 713736 - protein, 15 aa, Homo sapiens
  CDR3 for beta chain variable domain of TCR clone 356868 (TRBV7-9, TRBJ1-5)
CASSQGHQPNQPQHF

SEQ ID NO: 713737 - protein, 15 aa, Homo sapiens
  CDR3 for alpha chain variable domain of TCR clone 356869 (TRAV23/DV6, TRAJ28)
CAALLAYSGAWSYQL

SEQ ID NO: 713738 - protein, 13 aa, Homo sapiens
  CDR3 for beta chain variable domain of TCR clone 356869 (TRBV4-2, TRBJ2-3)
CASSQGNTDTQYF

SEQ ID NO: 713739 - protein, 16 aa, Homo sapiens
  CDR3 for alpha chain variable domain of TCR clone 356870 (TRAV38-2/DV8, TRAJ33)
CAYRTGLFDSKYQLIW

SEQ ID NO: 713740 - protein, 13 aa, Homo sapiens
  CDR3 for beta chain variable domain of TCR clone 356870 (TRBV27, TRBJ1-4)
CASSLMGDEKLFF

SEQ ID NO: 713741 - protein, 14 aa, Homo sapiens
  CDR3 for alpha chain variable domain of TCR clone 356871 (TRAV10, TRAJ48)
CVGVFHFGNEKLTF

SEQ ID NO: 713742 - protein, 14 aa, Homo sapiens
  CDR3 for beta chain variable domain of TCR clone 356871 (TRBV7-8, TRBJ2-3)
CASSFKSSTDTQYF

SEQ ID NO: 713743 - protein, 12 aa, Homo sapiens
  CDR3 for alpha chain variable domain of TCR clone 356872 (TRAV17, TRAJ4)
CATDGGYNKLIF

SEQ ID NO: 713744 - protein, 14 aa, Homo sapiens
  CDR3 for beta chain variable domain of TCR clone 356872 (TRBV25-1, TRBJ1-1)
CASTHLGGNTEAFF

SEQ ID NO: 713745 - protein, 13 aa, Homo sapiens
  CDR3 for alpha chain variable domain of TCR clone 356873 (TRAV2, TRAJ15)
CAVASQAGTALIF

SEQ ID NO: 713746 - protein, 15 aa, Homo sapiens
  CDR3 for beta chain variable domain of TCR clone 356873 (TRBV6-1, TRBJ2-6)
CASSSRPSGANVLTF

SEQ ID NO: 713747 - protein, 11 aa, Homo sapiens
  CDR3 for alpha chain variable domain of TCR clone 356874 (TRAV2, TRAJ33)
CAVDSNFQLIW

SEQ ID NO: 713748 - protein, 17 aa, Homo sapiens
  CDR3 for beta chain variable domain of TCR clone 356874 (TRBV7-8, TRBJ2-6)
CASSAGTGGAGANVLTF

SEQ ID NO: 713749 - protein, 14 aa, Homo sapiens
  CDR3 for alpha chain variable domain of TCR clone 356875 (TRAV29/DV5, TRAJ36)
CAARRKTGANNLFF

SEQ ID NO: 713750 - protein, 20 aa, Homo sapiens
  CDR3 for beta chain variable domain of TCR clone 356875 (TRBV3-1, TRBJ2-6)
CASSPRPGLEGGAGANVLTF

SEQ ID NO: 713751 - protein, 17 aa, Homo sapiens
  CDR3 for alpha chain variable domain of TCR clone 356876 (TRAV3, TRAJ6)
CAVRGGPRAGGSYIPTF

SEQ ID NO: 713752 - protein, 13 aa, Homo sapiens
  CDR3 for beta chain variable domain of TCR clone 356876 (TRBV12-5, TRBJ2-3)
CASGDRQSDTQYF

SEQ ID NO: 713753 - protein, 11 aa, Homo sapiens
  CDR3 for alpha chain variable domain of TCR clone 356877 (TRAV1-1, TRAJ23)
CAVRQGGKLIF

SEQ ID NO: 713754 - protein, 14 aa, Homo sapiens
  CDR3 for beta chain variable domain of TCR clone 356877 (TRBV9, TRBJ2-7)
CASSPLRAVGEQYF

SEQ ID NO: 713755 - protein, 11 aa, Homo sapiens
  CDR3 for alpha chain variable domain of TCR clone 356878 (TRAV2, TRAJ33)
CAVDSNYQLIW

SEQ ID NO: 713756 - protein, 13 aa, Homo sapiens
  CDR3 for beta chain variable domain of TCR clone 356878 (TRBV7-9, TRBJ1-2)
CASSLKQNYGYPF

SEQ ID NO: 713757 - protein, 11 aa, Homo sapiens
  CDR3 for alpha chain variable domain of TCR clone 356879 (TRAV13-2, TRAJ23)
CAESPRGKLIF

SEQ ID NO: 713758 - protein, 13 aa, Homo sapiens
  CDR3 for beta chain variable domain of TCR clone 356879 (TRBV4-2, TRBJ1-1)
CASSQAGNTEAFF

SEQ ID NO: 713759 - protein, 16 aa, Homo sapiens
  CDR3 for alpha chain variable domain of TCR clone 356880 (TRAV12-2, TRAJ48)
CAVNPTSNFGNEKLTF

SEQ ID NO: 713760 - protein, 12 aa, Homo sapiens
  CDR3 for beta chain variable domain of TCR clone 356880 (TRBV9, TRBJ2-3)
CASSRRAGTQYF

SEQ ID NO: 713761 - protein, 12 aa, Homo sapiens
  CDR3 for alpha chain variable domain of TCR clone 356881 (TRAV13-2, TRAJ23)
CAERHRGGKLNF

SEQ ID NO: 713762 - protein, 14 aa, Homo sapiens
  CDR3 for beta chain variable domain of TCR clone 356881 (TRBV2, TRBJ2-7)
CASSLTSGGYEQYF

SEQ ID NO: 713763 - protein, 13 aa, Homo sapiens
  CDR3 for alpha chain variable domain of TCR clone 356882 (TRAV8-6, TRAJ49)
CAVITNTGNQFYF

SEQ ID NO: 713764 - protein, 15 aa, Homo sapiens
  CDR3 for beta chain variable domain of TCR clone 356882 (TRBV20-1, TRBJ2-2)
CSARDTRLNTGELFF

SEQ ID NO: 713765 - protein, 12 aa, Homo sapiens
  CDR3 for alpha chain variable domain of TCR clone 356883 (TRAV21, TRAJ23)
CAVGPQGGKLIF

SEQ ID NO: 713766 - protein, 17 aa, Homo sapiens
  CDR3 for beta chain variable domain of TCR clone 356883 (TRBV20-1, TRBJ2-1)
CSASSSGLAGSYNEQFF

SEQ ID NO: 713767 - protein, 14 aa, Homo sapiens
  CDR3 for alpha chain variable domain of TCR clone 356884 (TRAV12-3, TRAJ10)
SHLPLTGGGNKLTF

SEQ ID NO: 713768 - protein, 17 aa, Homo sapiens
  CDR3 for beta chain variable domain of TCR clone 356884 (TRBV6-6, TRBJ2-5)
CASSYPLAGGPQETQYF

SEQ ID NO: 713769 - protein, 13 aa, Homo sapiens
  CDR3 for alpha chain variable domain of TCR clone 356885 (TRAV26-1, TRAJ29)
CIARRSGNTPLVF

SEQ ID NO: 713770 - protein, 16 aa, Homo sapiens
  CDR3 for beta chain variable domain of TCR clone 356885 (TRBV11-2, TRBJ2-7)
CASSFAPTGVNYEQYF

SEQ ID NO: 713771 - protein, 12 aa, Homo sapiens
  CDR3 for alpha chain variable domain of TCR clone 356886 (TRAV35, TRAJ49)
CGGWNTGNKFYF

SEQ ID NO: 713772 - protein, 16 aa, Homo sapiens
  CDR3 for beta chain variable domain of TCR clone 356886 (TRBV5-1, TRBJ2-2)
CASSLWDTTNTGELFF

SEQ ID NO: 713773 - protein, 14 aa, Homo sapiens
  CDR3 for alpha chain variable domain of TCR clone 356887 (TRAV1-2, TRAJ8)
CAVGEDTGFQKLGF

SEQ ID NO: 713774 - protein, 11 aa, Homo sapiens
  CDR3 for beta chain variable domain of TCR clone 356887 (TRBV11-3, TRBJ2-7)
CASSRTYEQYF

SEQ ID NO: 713775 - protein, 11 aa, Homo sapiens
  CDR3 for alpha chain variable domain of TCR clone 356888 (TRAV3, TRAJ21)
CAVGNFNKFYF

SEQ ID NO: 713776 - protein, 12 aa, Homo sapiens
  CDR3 for beta chain variable domain of TCR clone 356888 (TRBV7-8, TRBJ2-7)
CASSLGDREQYL

SEQ ID NO: 713777 - protein, 14 aa, Homo sapiens
  CDR3 for alpha chain variable domain of TCR clone 356889 (TRAV2, TRAJ9)
CAVEDRSGGFKTIF

SEQ ID NO: 713778 - protein, 12 aa, Homo sapiens
  CDR3 for beta chain variable domain of TCR clone 356889 (TRBV7-3, TRBJ2-1)
CASSSRGNEQFF

SEQ ID NO: 713779 - protein, 11 aa, Homo sapiens
  CDR3 for alpha chain variable domain of TCR clone 356890 (TRAV21, TRAJ34)
CAHSNTDKLIF

SEQ ID NO: 713780 - protein, 13 aa, Homo sapiens
  CDR3 for beta chain variable domain of TCR clone 356890 (TRBV7-6, TRBJ1-2)
CASSLVADYGYTF

SEQ ID NO: 713781 - protein, 15 aa, Homo sapiens
  CDR3 for alpha chain variable domain of TCR clone 356891 (TRAV8-3, TRAJ45)
CASSYSVAGADGLTF

SEQ ID NO: 713782 - protein, 13 aa, Homo sapiens
  CDR3 for beta chain variable domain of TCR clone 356891 (TRBV10-3, TRBJ2-7)
CASKLAVNYEQYF

SEQ ID NO: 713783 - protein, 16 aa, Homo sapiens
  CDR3 for alpha chain variable domain of TCR clone 356892 (TRAV2, TRAJ13)
CAARILVVTRKLPLEL

SEQ ID NO: 713784 - protein, 14 aa, Homo sapiens
  CDR3 for beta chain variable domain of TCR clone 356892 (TRBV19, TRBJ2-1)
CASEVTGARNEQFF

SEQ ID NO: 713785 - protein, 14 aa, Homo sapiens
  CDR3 for alpha chain variable domain of TCR clone 356893 (TRAV8-3, TRAJ4)
CAVPLGGGYNKLVF

SEQ ID NO: 713786 - protein, 15 aa, Homo sapiens
  CDR3 for beta chain variable domain of TCR clone 356893 (TRBV6-3, TRBJ2-7)
CASSSPGTVFYEQYF

SEQ ID NO: 713787 - protein, 14 aa, Homo sapiens
  CDR3 for alpha chain variable domain of TCR clone 356894 (TRAV8-4, TRAJ38)
CAVSYAGNNRKLIC

SEQ ID NO: 713788 - protein, 15 aa, Homo sapiens
  CDR3 for beta chain variable domain of TCR clone 356894 (TRBV12-4, TRBJ2-1)
CASSLLATGNNEQFF

SEQ ID NO: 713789 - protein, 14 aa, Homo sapiens
  CDR3 for alpha chain variable domain of TCR clone 356895 (TRAV8-3, TRAJ4)
CAVGAAGGYNKLIF

SEQ ID NO: 713790 - protein, 13 aa, Homo sapiens
  CDR3 for beta chain variable domain of TCR clone 356895 (TRBV14, TRBJ2-7)
CASSPRRPYEQYF

SEQ ID NO: 713791 - protein, 14 aa, Homo sapiens
  CDR3 for alpha chain variable domain of TCR clone 356896 (TRAV12-2, TRAJ13)
CAVKKTGGYQKVTF

SEQ ID NO: 713792 - protein, 15 aa, Homo sapiens
  CDR3 for beta chain variable domain of TCR clone 356896 (TRBV7-2, TRBJ2-3)
CASSLVVRGPDTQYF

SEQ ID NO: 713793 - protein, 16 aa, Homo sapiens
  CDR3 for alpha chain variable domain of TCR clone 356897 (TRAV21, TRAJ33)
CAVSPASMDSNYQLIW

SEQ ID NO: 713794 - protein, 15 aa, Homo sapiens
  CDR3 for beta chain variable domain of TCR clone 356897 (TRBV10-3, TRBJ2-7)
CAISDMTALSYEQYF

SEQ ID NO: 713795 - protein, 17 aa, Homo sapiens
  CDR3 for alpha chain variable domain of TCR clone 356898 (TRAV3, TRAJ6)
CAVRDGPRAGGSYIPTF

SEQ ID NO: 713796 - protein, 14 aa, Homo sapiens
  CDR3 for beta chain variable domain of TCR clone 356898 (TRBV7-2, TRBJ2-5)
CASSTGGELKTQYF

SEQ ID NO: 713797 - protein, 14 aa, Homo sapiens
  CDR3 for alpha chain variable domain of TCR clone 356899 (TRAV12-2, TRAJ17)
CAVLFKAAGNKLTF

SEQ ID NO: 713798 - protein, 15 aa, Homo sapiens
  CDR3 for beta chain variable domain of TCR clone 356899 (TRBV27, TRBJ2-7)
CASSPQREGQREQYF

SEQ ID NO: 713799 - protein, 17 aa, Homo sapiens
  CDR3 for alpha chain variable domain of TCR clone 356900 (TRAV3, TRAJ38)
CAVRDCLNAGNNRKLIW

SEQ ID NO: 713800 - protein, 15 aa, Homo sapiens
  CDR3 for beta chain variable domain of TCR clone 356900 (TRBV4-1, TRBJ2-5)
CASSQSRGDQETQYF

SEQ ID NO: 713801 - protein, 13 aa, Homo sapiens
  CDR3 for alpha chain variable domain of TCR clone 356901 (TRAV12-3, TRAJ40)
CAMSARGTYKYIF

SEQ ID NO: 713802 - protein, 15 aa, Homo sapiens
  CDR3 for beta chain variable domain of TCR clone 356901 (TRBV9, TRBJ1-6)
CASSVVGTGDSPLHF

SEQ ID NO: 713803 - protein, 12 aa, Homo sapiens
  CDR3 for alpha chain variable domain of TCR clone 356902 (TRAV2, TRAJ40)
CCGYSGTYKYIF

SEQ ID NO: 713804 - protein, 15 aa, Homo sapiens
  CDR3 for beta chain variable domain of TCR clone 356902 (TRBV11-3, TRBJ2-3)
CASLKDGREGDTQYF

SEQ ID NO: 713805 - protein, 16 aa, Homo sapiens
  CDR3 for alpha chain variable domain of TCR clone 356903 (TRAV3, TRAJ37)
CAVRGKGSGNTGKLIF

SEQ ID NO: 713806 - protein, 14 aa, Homo sapiens
  CDR3 for beta chain variable domain of TCR clone 356903 (TRBV12-5, TRBJ2-5)
RASGSRTHQETQYF

SEQ ID NO: 713807 - protein, 17 aa, Homo sapiens
  CDR3 for alpha chain variable domain of TCR clone 356904 (TRAV13-2, TRAJ42)
CAEKGKNYGGSQGNLIF

SEQ ID NO: 713808 - protein, 16 aa, Homo sapiens
  CDR3 for beta chain variable domain of TCR clone 356904 (TRBV7-9, TRBJ2-1)
CASSLGTGWDYYEQFF

SEQ ID NO: 713809 - protein, 13 aa, Homo sapiens
  CDR3 for alpha chain variable domain of TCR clone 356905 (TRAV35, TRAJ33)
CAGQLYGVYQLIW

SEQ ID NO: 713810 - protein, 14 aa, Homo sapiens
  CDR3 for beta chain variable domain of TCR clone 356905 (TRBV7-2, TRBJ1-1)
CASSLWGAGTEAFF

SEQ ID NO: 713811 - protein, 15 aa, Homo sapiens
  CDR3 for alpha chain variable domain of TCR clone 356906 (TRAV17, TRAJ45)
CATAYSGGGADGLTF

SEQ ID NO: 713812 - protein, 14 aa, Homo sapiens
  CDR3 for beta chain variable domain of TCR clone 356906 (TRBV7-8, TRBJ2-7)
CASSPGLADYEQYF

SEQ ID NO: 713813 - protein, 14 aa, Homo sapiens
  CDR3 for alpha chain variable domain of TCR clone 356907 (TRAV27, TRAJ40)
CAGSLLRGTYKYIF

SEQ ID NO: 713814 - protein, 20 aa, Homo sapiens
  CDR3 for beta chain variable domain of TCR clone 356907 (TRBV7-8, TRBJ2-2)
CASSHLFPGPTIHITGELFF

SEQ ID NO: 713815 - protein, 17 aa, Homo sapiens
  CDR3 for alpha chain variable domain of TCR clone 356908 (TRAV26-1, TRAJ53)
CIARVDDSGGSNYKLKF

SEQ ID NO: 713816 - protein, 15 aa, Homo sapiens
  CDR3 for beta chain variable domain of TCR clone 356908 (TRBV20-1, TRBJ2-7)
CSAIVPAAYFYEQYF

SEQ ID NO: 713817 - protein, 11 aa, Homo sapiens
  CDR3 for alpha chain variable domain of TCR clone 356909 (TRAV1-2, TRAJ20)
CAVANDYKLSF

SEQ ID NO: 713818 - protein, 14 aa, Homo sapiens
  CDR3 for beta chain variable domain of TCR clone 356909 (TRBV19, TRBJ2-2)
CASSTLHRSGELFF

SEQ ID NO: 713819 - protein, 18 aa, Homo sapiens
  CDR3 for alpha chain variable domain of TCR clone 356910 (TRAV13-1, TRAJ52)
CAASKRSAGGTRYGKLKF

SEQ ID NO: 713820 - protein, 15 aa, Homo sapiens
  CDR3 for beta chain variable domain of TCR clone 356910 (TRBV11-2, TRBJ2-1)
CASSPAGQSLNEQFF

SEQ ID NO: 713821 - protein, 14 aa, Homo sapiens
  CDR3 for alpha chain variable domain of TCR clone 356911 (TRAV1-2, TRAJ16)
CAVNRFSDGQKLLF

SEQ ID NO: 713822 - protein, 16 aa, Homo sapiens
  CDR3 for beta chain variable domain of TCR clone 356911 (TRBV11-2, TRBJ1-2)
CASSLDTGGADYVYTF

SEQ ID NO: 713823 - protein, 15 aa, Homo sapiens
  CDR3 for alpha chain variable domain of TCR clone 356912 (TRAV8-4, TRAJ47)
CAVSDLLGYGNKLVF

SEQ ID NO: 713824 - protein, 14 aa, Homo sapiens
  CDR3 for beta chain variable domain of TCR clone 356912 (TRBV19, TRBJ2-1)
CARGARSFQWEQFF

SEQ ID NO: 713825 - protein, 16 aa, Homo sapiens
  CDR3 for alpha chain variable domain of TCR clone 356913 (TRAV3, TRAJ37)
CALRGKESGKTGKLIF

SEQ ID NO: 713826 - protein, 13 aa, Homo sapiens
  CDR3 for beta chain variable domain of TCR clone 356913 (TRBV14, TRBJ2-7)
CASSQDRRYEQYF

SEQ ID NO: 713827 - protein, 16 aa, Homo sapiens
  CDR3 for alpha chain variable domain of TCR clone 356914 (TRAV16, TRAJ4)
CITVLPFSGGYNKLIF

SEQ ID NO: 713828 - protein, 14 aa, Homo sapiens
  CDR3 for beta chain variable domain of TCR clone 356914 (TRBV19, TRBJ2-1)
CASPTFVLSGEQFF

SEQ ID NO: 713829 - protein, 22 aa, Homo sapiens
  CDR3 for alpha chain variable domain of TCR clone 356915 (TRAV40, )
CLLGDGIPDIQNPDPAVYQLRD

SEQ ID NO: 713830 - protein, 13 aa, Homo sapiens
  CDR3 for beta chain variable domain of TCR clone 356915 (TRBV20-1, TRBJ1-1)
CSAPLGGGTEAFF

SEQ ID NO: 713831 - protein, 14 aa, Homo sapiens
  CDR3 for alpha chain variable domain of TCR clone 356916 (TRAV21, TRAJ29)
CAVRAISGNTPLVF

SEQ ID NO: 713832 - protein, 13 aa, Homo sapiens
  CDR3 for beta chain variable domain of TCR clone 356916 (TRBV7-6, TRBJ1-2)
CASSLVADYGYTF

SEQ ID NO: 713833 - protein, 13 aa, Homo sapiens
  CDR3 for alpha chain variable domain of TCR clone 356917 (TRAV2, TRAJ40)
CAVVTSGTYKYIF

SEQ ID NO: 713834 - protein, 16 aa, Homo sapiens
  CDR3 for beta chain variable domain of TCR clone 356917 (TRBV7-2, TRBJ1-2)
CASSSNQDRRGHGDTF

SEQ ID NO: 713835 - protein, 13 aa, Homo sapiens
  CDR3 for alpha chain variable domain of TCR clone 356918 (TRAV8-3, TRAJ43)
CAAVPYNNNDMRF

SEQ ID NO: 713836 - protein, 17 aa, Homo sapiens
  CDR3 for beta chain variable domain of TCR clone 356918 (TRBV7-7, TRBJ1-1)
CASIGDRPNLGVTEAFF

SEQ ID NO: 713837 - protein, 16 aa, Homo sapiens
  CDR3 for alpha chain variable domain of TCR clone 356919 (TRAV3, TRAJ37)
CAVRVRVSGNTGKLIF

SEQ ID NO: 713838 - protein, 13 aa, Homo sapiens
  CDR3 for beta chain variable domain of TCR clone 356919 (TRBV7-9, TRBJ1-2)
CASSLKQNYGYTF

SEQ ID NO: 713839 - protein, 14 aa, Homo sapiens
  CDR3 for alpha chain variable domain of TCR clone 356920 (TRAV13-1, TRAJ40)
CAASMTSGTYKYIF

SEQ ID NO: 713840 - protein, 12 aa, Homo sapiens
  CDR3 for beta chain variable domain of TCR clone 356920 (TRBV19, TRBJ2-1)
CASSMQDTEQFF

SEQ ID NO: 713841 - protein, 12 aa, Homo sapiens
  CDR3 for alpha chain variable domain of TCR clone 356921 (TRAV21, TRAJ27)
CAPPGNAGKSTF

SEQ ID NO: 713842 - protein, 13 aa, Homo sapiens
  CDR3 for beta chain variable domain of TCR clone 356921 (TRBV2, TRBJ1-1)
CARNLTGEFHAFF

SEQ ID NO: 713843 - protein, 11 aa, Homo sapiens
  CDR3 for alpha chain variable domain of TCR clone 356922 (TRAV2, TRAJ13)
CASGGYQKVTF

SEQ ID NO: 713844 - protein, 17 aa, Homo sapiens
  CDR3 for beta chain variable domain of TCR clone 356922 (TRBV2, TRBJ2-3)
CASSAGLAGYIGDTQYF

SEQ ID NO: 713845 - protein, 11 aa, Homo sapiens
  CDR3 for alpha chain variable domain of TCR clone 356923 (TRAV2, TRAJ33)
CAVDSNYQLIW

SEQ ID NO: 713846 - protein, 12 aa, Homo sapiens
  CDR3 for beta chain variable domain of TCR clone 356923 (TRBV7-8, TRBJ2-7)
CASSPGDREQYF

SEQ ID NO: 713847 - protein, 16 aa, Homo sapiens
  CDR3 for alpha chain variable domain of TCR clone 356924 (TRAV13-1, TRAJ48)
CAASIFGNFGNEKLTF

SEQ ID NO: 713848 - protein, 16 aa, Homo sapiens
  CDR3 for beta chain variable domain of TCR clone 356924 (TRBV18, TRBJ1-5)
CASSPYRVEGNQPQHS

SEQ ID NO: 713849 - protein, 16 aa, Homo sapiens
  CDR3 for alpha chain variable domain of TCR clone 356925 (TRAV20, TRAJ10)
CAVLRGLTGGGNKLTF

SEQ ID NO: 713850 - protein, 14 aa, Homo sapiens
  CDR3 for beta chain variable domain of TCR clone 356925 (TRBV19, TRBJ1-5)
CASRAPDSFLSKHF

SEQ ID NO: 713851 - protein, 17 aa, Homo sapiens
  CDR3 for alpha chain variable domain of TCR clone 356926 (TRAV26-1, TRAJ22)
TIESSEYRSGSARQLTF

SEQ ID NO: 713852 - protein, 13 aa, Homo sapiens
  CDR3 for beta chain variable domain of TCR clone 356926 (TRBV7-9, TRBJ1-2)
CASSLKQNYGYTF

SEQ ID NO: 713853 - protein, 14 aa, Homo sapiens
  CDR3 for alpha chain variable domain of TCR clone 356927 (TRAV20, TRAJ29)
CAVQAWVGNTPLVF

SEQ ID NO: 713854 - protein, 18 aa, Homo sapiens
  CDR3 for beta chain variable domain of TCR clone 356927 (TRBV11-2, TRBJ2-3)
CAGSLGGASRGAPNTQYF

SEQ ID NO: 713855 - protein, 18 aa, Homo sapiens
  CDR3 for alpha chain variable domain of TCR clone 356928 (TRAV12-2, )
CAVEDIQNPDPAVYQLID

SEQ ID NO: 713856 - protein, 20 aa, Homo sapiens
  CDR3 for beta chain variable domain of TCR clone 356928 (TRBV11-3, TRBJ2-7)
CASSQRTSGSLRAVLRAGHQ

SEQ ID NO: 713857 - protein, 16 aa, Homo sapiens
  CDR3 for alpha chain variable domain of TCR clone 356929 (TRAV13-1, TRAJ48)
CSKYRESNFGNEKLTF

SEQ ID NO: 713858 - protein, 17 aa, Homo sapiens
  CDR3 for beta chain variable domain of TCR clone 356929 (TRBV28, TRBJ2-1)
CASSSSRQALTYNEQFF

SEQ ID NO: 713859 - protein, 13 aa, Homo sapiens
  CDR3 for alpha chain variable domain of TCR clone 356930 (TRAV12-1, TRAJ9)
CLVLNTGGFKTIF

SEQ ID NO: 713860 - protein, 13 aa, Homo sapiens
  CDR3 for beta chain variable domain of TCR clone 356930 (TRBV20-1, TRBJ1-1)
CSARGGGNTEAFF

SEQ ID NO: 713861 - protein, 13 aa, Homo sapiens
  CDR3 for alpha chain variable domain of TCR clone 356931 (TRAV3, TRAJ21)
CAVREPDFNKFYF

SEQ ID NO: 713862 - protein, 13 aa, Homo sapiens
  CDR3 for beta chain variable domain of TCR clone 356931 (TRBV9, TRBJ2-1)
CASSPSGGNEQFY

SEQ ID NO: 713863 - protein, 15 aa, Homo sapiens
  CDR3 for alpha chain variable domain of TCR clone 356932 (TRAV3, TRAJ29)
CAVRDLYSGNTPLVF

SEQ ID NO: 713864 - protein, 15 aa, Homo sapiens
  CDR3 for beta chain variable domain of TCR clone 356932 (TRBV2, TRBJ2-3)
CASSDFEKATDTQYF

SEQ ID NO: 713865 - protein, 14 aa, Homo sapiens
  CDR3 for alpha chain variable domain of TCR clone 356933 (TRAV12-3, TRAJ10)
SHLPVTGGGNKLTF

SEQ ID NO: 713866 - protein, 12 aa, Homo sapiens
  CDR3 for beta chain variable domain of TCR clone 356933 (TRBV7-3, TRBJ2-5)
CASSSPGGTQYF

SEQ ID NO: 713867 - protein, 11 aa, Homo sapiens
  CDR3 for alpha chain variable domain of TCR clone 356934 (TRAV21, TRAJ41)
CAVRSGYALNF

SEQ ID NO: 713868 - protein, 13 aa, Homo sapiens
  CDR3 for beta chain variable domain of TCR clone 356934 (TRBV4-1, TRBJ2-2)
CASSQENTGELFF

SEQ ID NO: 713869 - protein, 15 aa, Homo sapiens
  CDR3 for alpha chain variable domain of TCR clone 356935 (TRAV29/DV5, TRAJ24)
CAASGATDSWGKFQF

SEQ ID NO: 713870 - protein, 15 aa, Homo sapiens
  CDR3 for beta chain variable domain of TCR clone 356935 (TRBV5-7, TRBJ1-5)
CASSYGKLWDQPQHF

SEQ ID NO: 713871 - protein, 13 aa, Homo sapiens
  CDR3 for alpha chain variable domain of TCR clone 356936 (TRAV25, TRAJ40)
CAGSASGTYKYIF

SEQ ID NO: 713872 - protein, 14 aa, Homo sapiens
  CDR3 for beta chain variable domain of TCR clone 356936 (TRBV7-2, TRBJ2-7)
CASRSQVAAYEQYF

SEQ ID NO: 713873 - protein, 18 aa, Homo sapiens
  CDR3 for alpha chain variable domain of TCR clone 356937 (TRAV21, TRAJ52)
CAVRPSPAGGTSYGKLTF

SEQ ID NO: 713874 - protein, 13 aa, Homo sapiens
  CDR3 for beta chain variable domain of TCR clone 356937 (TRBV7-3, TRBJ1-1)
CASSQDWGADAFF

SEQ ID NO: 713875 - protein, 13 aa, Homo sapiens
  CDR3 for alpha chain variable domain of TCR clone 356938 (TRAV12-3, TRAJ29)
CAMTLSGNTPLVF

SEQ ID NO: 713876 - protein, 15 aa, Homo sapiens
  CDR3 for beta chain variable domain of TCR clone 356938 (TRBV5-1, TRBJ2-6)
CASRLDPSGANVLTF

SEQ ID NO: 713877 - protein, 14 aa, Homo sapiens
  CDR3 for alpha chain variable domain of TCR clone 356939 (TRAV1-2, TRAJ16)
CAVNRFSDGQKLLF

SEQ ID NO: 713878 - protein, 15 aa, Homo sapiens
  CDR3 for beta chain variable domain of TCR clone 356939 (TRBV7-9, TRBJ1-4)
CASSARTGGNEKLFF

SEQ ID NO: 713879 - protein, 15 aa, Homo sapiens
  CDR3 for alpha chain variable domain of TCR clone 356940 (TRAV26-1, TRAJ29)
VIVRVEGSGNTPLVF

SEQ ID NO: 713880 - protein, 14 aa, Homo sapiens
  CDR3 for beta chain variable domain of TCR clone 356940 (TRBV18, TRBJ2-5)
CASSPGVSQETQYF

SEQ ID NO: 713881 - protein, 15 aa, Homo sapiens
  CDR3 for alpha chain variable domain of TCR clone 356941 (TRAV12-1, TRAJ44)
CVADLPTGTSSKLTF

SEQ ID NO: 713882 - protein, 13 aa, Homo sapiens
  CDR3 for beta chain variable domain of TCR clone 356941 (TRBV7-9, TRBJ1-2)
CASSLKQNYGYTF

SEQ ID NO: 713883 - protein, 15 aa, Homo sapiens
  CDR3 for alpha chain variable domain of TCR clone 356942 (TRAV12-1, TRAJ44)
CVVDKYTGTASKITF

SEQ ID NO: 713884 - protein, 14 aa, Homo sapiens
  CDR3 for beta chain variable domain of TCR clone 356942 (TRBV5-1, TRBJ1-2)
CASSLEPVNYGYTF

SEQ ID NO: 713885 - protein, 15 aa, Homo sapiens
  CDR3 for alpha chain variable domain of TCR clone 356943 (TRAV12-2, TRAJ53)
CAVNGGGGSNYKLTF

SEQ ID NO: 713886 - protein, 13 aa, Homo sapiens
  CDR3 for beta chain variable domain of TCR clone 356943 (TRBV4-1, TRBJ2-1)
CASSQAGGDEQFF

SEQ ID NO: 713887 - protein, 13 aa, Homo sapiens
  CDR3 for alpha chain variable domain of TCR clone 356944 (TRAV2, TRAJ40)
CAVVPSGTCKYIF

SEQ ID NO: 713888 - protein, 14 aa, Homo sapiens
  CDR3 for beta chain variable domain of TCR clone 356944 (TRBV19, TRBJ2-1)
CASPTFVLSGEQFF

SEQ ID NO: 713889 - protein, 15 aa, Homo sapiens
  CDR3 for alpha chain variable domain of TCR clone 356945 (TRAV12-2, TRAJ53)
CAVNGGEGSNYKLTF

SEQ ID NO: 713890 - protein, 13 aa, Homo sapiens
  CDR3 for beta chain variable domain of TCR clone 356945 (TRBV3-1, TRBJ1-1)
CASSPGVITEAFF

SEQ ID NO: 713891 - protein, 12 aa, Homo sapiens
  CDR3 for alpha chain variable domain of TCR clone 356946 (TRAV21, TRAJ31)
CVLAGNNSRLMF

SEQ ID NO: 713892 - protein, 17 aa, Homo sapiens
  CDR3 for beta chain variable domain of TCR clone 356946 (TRBV7-8, TRBJ2-6)
CASSAGTGGAGANVLTF

SEQ ID NO: 713893 - protein, 11 aa, Homo sapiens
  CDR3 for alpha chain variable domain of TCR clone 356947 (TRAV3, TRAJ21)
CAVGNFTKFYF

SEQ ID NO: 713894 - protein, 17 aa, Homo sapiens
  CDR3 for beta chain variable domain of TCR clone 356947 (TRBV24-1, TRBJ2-1)
CATSDVSTSGTYNEQFF

SEQ ID NO: 713895 - protein, 15 aa, Homo sapiens
  CDR3 for alpha chain variable domain of TCR clone 356948 (TRAV3, TRAJ4)
CAVRDGTGGYNKLIF

SEQ ID NO: 713896 - protein, 15 aa, Homo sapiens
  CDR3 for beta chain variable domain of TCR clone 356948 (TRBV7-2, TRBJ1-2)
CASSPRAGWNYGYTF

SEQ ID NO: 713897 - protein, 13 aa, Homo sapiens
  CDR3 for alpha chain variable domain of TCR clone 356949 (TRAV38-2/DV8, TRAJ34)
CAYRTWNTDKLIS

SEQ ID NO: 713898 - protein, 16 aa, Homo sapiens
  CDR3 for beta chain variable domain of TCR clone 356949 (TRBV5-1, TRBJ2-7)
CASSPGLAGVIYEQYF

SEQ ID NO: 713899 - protein, 15 aa, Homo sapiens
  CDR3 for alpha chain variable domain of TCR clone 356950 (TRAV12-1, TRAJ31)
CVVNPARDNNARLMF

SEQ ID NO: 713900 - protein, 14 aa, Homo sapiens
  CDR3 for beta chain variable domain of TCR clone 356950 (TRBV7-2, TRBJ2-7)
CASRSQGAAYEQYF

SEQ ID NO: 713901 - protein, 12 aa, Homo sapiens
  CDR3 for alpha chain variable domain of TCR clone 356951 (TRAV29/DV5, TRAJ49)
CEATDTGNQFYF

SEQ ID NO: 713902 - protein, 12 aa, Homo sapiens
  CDR3 for beta chain variable domain of TCR clone 356951 (TRBV12-4, TRBJ2-7)
CASSVGGYEQYF

SEQ ID NO: 713903 - protein, 14 aa, Homo sapiens
  CDR3 for alpha chain variable domain of TCR clone 356952 (TRAV2, TRAJ37)
CAVDFTSNTGKLIF

SEQ ID NO: 713904 - protein, 13 aa, Homo sapiens
  CDR3 for beta chain variable domain of TCR clone 356952 (TRBV5-7, TRBJ2-5)
CASQKRPEETQYF

SEQ ID NO: 713905 - protein, 12 aa, Homo sapiens
  CDR3 for alpha chain variable domain of TCR clone 356953 (TRAV3, TRAJ43)
CAERDPNNDMRF

SEQ ID NO: 713906 - protein, 15 aa, Homo sapiens
  CDR3 for beta chain variable domain of TCR clone 356953 (TRBV27, TRBJ1-5)
CASSLGTGFDQPQHF

SEQ ID NO: 713907 - protein, 14 aa, Homo sapiens
  CDR3 for alpha chain variable domain of TCR clone 356954 (TRAV8-1, TRAJ23)
CAVGTYNQGGKLIF

SEQ ID NO: 713908 - protein, 16 aa, Homo sapiens
  CDR3 for beta chain variable domain of TCR clone 356954 (TRBV18, TRBJ1-5)
CASSPSTGNSNQTQHS

SEQ ID NO: 713909 - protein, 12 aa, Homo sapiens
  CDR3 for alpha chain variable domain of TCR clone 356955 (TRAV27, TRAJ49)
CAGARLGNQFYF

SEQ ID NO: 713910 - protein, 14 aa, Homo sapiens
  CDR3 for beta chain variable domain of TCR clone 356955 (TRBV11-3, TRBJ2-1)
CASSATTSGSIQFF

SEQ ID NO: 713911 - protein, 17 aa, Homo sapiens
  CDR3 for alpha chain variable domain of TCR clone 356956 (TRAV29/DV5, TRAJ42)
CAAKTDEEAKEISSLEK

SEQ ID NO: 713912 - protein, 15 aa, Homo sapiens
  CDR3 for beta chain variable domain of TCR clone 356956 (TRBV5-1, TRBJ2-2)
CASSSQGGNTGELFF

SEQ ID NO: 713913 - protein, 14 aa, Homo sapiens
  CDR3 for alpha chain variable domain of TCR clone 356957 (TRAV29/DV5, TRAJ48)
CAAMALFGNEKLSF

SEQ ID NO: 713914 - protein, 15 aa, Homo sapiens
  CDR3 for beta chain variable domain of TCR clone 356957 (TRBV7-2, TRBJ2-1)
CASTHGAGIYNEQFF

SEQ ID NO: 713915 - protein, 10 aa, Homo sapiens
  CDR3 for alpha chain variable domain of TCR clone 356958 (TRAV1-2, TRAJ34)
FAVNTDKLIF

SEQ ID NO: 713916 - protein, 13 aa, Homo sapiens
  CDR3 for beta chain variable domain of TCR clone 356958 (TRBV10-1, TRBJ2-1)
CASSAGPDNEQFF

SEQ ID NO: 713917 - protein, 15 aa, Homo sapiens
  CDR3 for alpha chain variable domain of TCR clone 356959 (TRAV8-3, TRAJ45)
CASSYSGGGADGLTF

SEQ ID NO: 713918 - protein, 12 aa, Homo sapiens
  CDR3 for beta chain variable domain of TCR clone 356959 (TRBV6-1, TRBJ2-5)
CASSEGRETQYF

SEQ ID NO: 713919 - protein, 15 aa, Homo sapiens
  CDR3 for alpha chain variable domain of TCR clone 356960 (TRAV1-2, TRAJ35)
CAVRDREGFGNVLDC

SEQ ID NO: 713920 - protein, 14 aa, Homo sapiens
  CDR3 for beta chain variable domain of TCR clone 356960 (TRBV28, TRBJ1-4)
CASSRTVGNEKLFF

SEQ ID NO: 713921 - protein, 16 aa, Homo sapiens
  CDR3 for alpha chain variable domain of TCR clone 356961 (TRAV3, TRAJ37)
CAVRARGSGNTGKLIF

SEQ ID NO: 713922 - protein, 11 aa, Homo sapiens
  CDR3 for beta chain variable domain of TCR clone 356961 (TRBV11-2, TRBJ2-2)
CASSLPGELFF

SEQ ID NO: 713923 - protein, 10 aa, Homo sapiens
  CDR3 for alpha chain variable domain of TCR clone 356962 (TRAV38-2/DV8, TRAJ40)
CASGTYKYTF

SEQ ID NO: 713924 - protein, 14 aa, Homo sapiens
  CDR3 for beta chain variable domain of TCR clone 356962 (TRBV7-9, TRBJ2-1)
CASSPRDSLYEQFF

SEQ ID NO: 713925 - protein, 16 aa, Homo sapiens
  CDR3 for alpha chain variable domain of TCR clone 356963 (TRAV1-2, TRAJ10)
CAVRGVLTGGGNKLTF

SEQ ID NO: 713926 - protein, 15 aa, Homo sapiens
  CDR3 for beta chain variable domain of TCR clone 356963 (TRBV29-1, TRBJ2-1)
CSVGRHALFYNEQLF

SEQ ID NO: 713927 - protein, 14 aa, Homo sapiens
  CDR3 for alpha chain variable domain of TCR clone 356964 (TRAV1-2, TRAJ16)
CAVNRFSDGHKLLF

SEQ ID NO: 713928 - protein, 15 aa, Homo sapiens
  CDR3 for beta chain variable domain of TCR clone 356964 (TRBV27, TRBJ1-1)
CASSPYADPYTEAFF

SEQ ID NO: 713929 - protein, 18 aa, Homo sapiens
  CDR3 for alpha chain variable domain of TCR clone 356965 (TRAV21, TRAJ52)
CAVRPSPAGGTSFGKLTF

SEQ ID NO: 713930 - protein, 14 aa, Homo sapiens
  CDR3 for beta chain variable domain of TCR clone 356965 (TRBV11-3, TRBJ1-1)
CASSPGAWNTEAFF

SEQ ID NO: 713931 - protein, 14 aa, Homo sapiens
  CDR3 for alpha chain variable domain of TCR clone 356966 (TRAV2, TRAJ9)
CAVEDRGGGFKTIF

SEQ ID NO: 713932 - protein, 15 aa, Homo sapiens
  CDR3 for beta chain variable domain of TCR clone 356966 (TRBV12-4, TRBJ2-5)
CASSPPTGLQETQYF

SEQ ID NO: 713933 - protein, 12 aa, Homo sapiens
  CDR3 for alpha chain variable domain of TCR clone 356967 (TRAV12-3, TRAJ20)
CAMVRGDYKLSF

SEQ ID NO: 713934 - protein, 14 aa, Homo sapiens
  CDR3 for beta chain variable domain of TCR clone 356967 (TRBV20-1, TRBJ2-7)
CSATSREASYEQYF

SEQ ID NO: 713935 - protein, 16 aa, Homo sapiens
  CDR3 for alpha chain variable domain of TCR clone 356968 (TRAV30, TRAJ24)
CGTEIVDADSWGKFQF

SEQ ID NO: 713936 - protein, 15 aa, Homo sapiens
  CDR3 for beta chain variable domain of TCR clone 356968 (TRBV20-1, TRBJ2-6)
CSARERGPGANGLTF

SEQ ID NO: 713937 - protein, 15 aa, Homo sapiens
  CDR3 for alpha chain variable domain of TCR clone 356969 (TRAV27, TRAJ38)
CAARRNAGNNRKPIC

SEQ ID NO: 713938 - protein, 13 aa, Homo sapiens
  CDR3 for beta chain variable domain of TCR clone 356969 (TRBV12-5, TRBJ2-3)
CASGDRQSDTQYF

SEQ ID NO: 713939 - protein, 14 aa, Homo sapiens
  CDR3 for alpha chain variable domain of TCR clone 356970 (TRAV12-3, TRAJ12)
CAMSEVDSSHKLIF

SEQ ID NO: 713940 - protein, 12 aa, Homo sapiens
  CDR3 for beta chain variable domain of TCR clone 356970 (TRBV18, TRBJ1-4)
CASSPSREKLFF

SEQ ID NO: 713941 - protein, 17 aa, Homo sapiens
  CDR3 for alpha chain variable domain of TCR clone 356971 (TRAV3, TRAJ38)
CAVRDCLNAGNNRKLIW

SEQ ID NO: 713942 - protein, 13 aa, Homo sapiens
  CDR3 for beta chain variable domain of TCR clone 356971 (TRBV7-3, TRBJ1-1)
CASSQDWGAEAFF

SEQ ID NO: 713943 - protein, 16 aa, Homo sapiens
  CDR3 for alpha chain variable domain of TCR clone 356972 (TRAV14/DV4, TRAJ54)
CAMREGRIQGAQKLVF

SEQ ID NO: 713944 - protein, 17 aa, Homo sapiens
  CDR3 for beta chain variable domain of TCR clone 356972 (TRBV19, TRBJ2-7)
CASSISFYDSYPYEQYF

SEQ ID NO: 713945 - protein, 17 aa, Homo sapiens
  CDR3 for alpha chain variable domain of TCR clone 356973 (TRAV3, TRAJ42)
CAVRDRDYGGSQGKFIF

SEQ ID NO: 713946 - protein, 14 aa, Homo sapiens
  CDR3 for beta chain variable domain of TCR clone 356973 (TRBV7-2, TRBJ2-5)
CASSPRGSSETQYF

SEQ ID NO: 713947 - protein, 12 aa, Homo sapiens
  CDR3 for alpha chain variable domain of TCR clone 356974 (TRAV13-1, TRAJ26)
QVQDNYGQNFVF

SEQ ID NO: 713948 - protein, 13 aa, Homo sapiens
  CDR3 for beta chain variable domain of TCR clone 356974 (TRBV7-9, TRBJ2-7)
CAISAGLQYEQYF

SEQ ID NO: 713949 - protein, 14 aa, Homo sapiens
  CDR3 for alpha chain variable domain of TCR clone 356975 (TRAV8-1, TRAJ5)
CAVRTDTGRRALTF

SEQ ID NO: 713950 - protein, 14 aa, Homo sapiens
  CDR3 for beta chain variable domain of TCR clone 356975 (TRBV7-3, TRBJ2-1)
CQSPTGGGEVEQFF

SEQ ID NO: 713951 - protein, 12 aa, Homo sapiens
  CDR3 for alpha chain variable domain of TCR clone 356976 (TRAV27, TRAJ35)
CAGADFGNLLHC

SEQ ID NO: 713952 - protein, 13 aa, Homo sapiens
  CDR3 for beta chain variable domain of TCR clone 356976 (TRBV7-3, TRBJ1-1)
CASSQDWGAEAFL

SEQ ID NO: 713953 - protein, 14 aa, Homo sapiens
  CDR3 for alpha chain variable domain of TCR clone 356977 (TRAV12-3, TRAJ30)
CAMSLLNRDDKIIF

SEQ ID NO: 713954 - protein, 12 aa, Homo sapiens
  CDR3 for beta chain variable domain of TCR clone 356977 (TRBV11-2, TRBJ2-2)
CASSRGGGELFF

SEQ ID NO: 713955 - protein, 14 aa, Homo sapiens
  CDR3 for alpha chain variable domain of TCR clone 356978 (TRAV2, TRAJ9)
CAVEDRSGGFKTIF

SEQ ID NO: 713956 - protein, 13 aa, Homo sapiens
  CDR3 for beta chain variable domain of TCR clone 356978 (TRBV7-9, TRBJ1-2)
CASSLKQSYGYTF

SEQ ID NO: 713957 - protein, 13 aa, Homo sapiens
  CDR3 for alpha chain variable domain of TCR clone 356979 (TRAV29/DV5, TRAJ29)
CPASAAGNTPLVF

SEQ ID NO: 713958 - protein, 14 aa, Homo sapiens
  CDR3 for beta chain variable domain of TCR clone 356979 (TRBV19, TRBJ2-3)
CASSAPRGTDTQYF

SEQ ID NO: 713959 - protein, 13 aa, Homo sapiens
  CDR3 for alpha chain variable domain of TCR clone 356980 (TRAV13-1, TRAJ5)
CAASDTGRRALTF

SEQ ID NO: 713960 - protein, 12 aa, Homo sapiens
  CDR3 for beta chain variable domain of TCR clone 356980 (TRBV28, TRBJ2-3)
CAGSLCRDTQYF

SEQ ID NO: 713961 - protein, 16 aa, Homo sapiens
  CDR3 for alpha chain variable domain of TCR clone 356981 (TRAV14/DV4, TRAJ53)
CAMRDGGGGSNYKLTF

SEQ ID NO: 713962 - protein, 18 aa, Homo sapiens
  CDR3 for beta chain variable domain of TCR clone 356981 (TRBV18, TRBJ1-3)
CASSPRGGAGPSGNTIDF

SEQ ID NO: 713963 - protein, 17 aa, Homo sapiens
  CDR3 for alpha chain variable domain of TCR clone 356982 (TRAV3, TRAJ38)
CAVRDCLNAGNKRKLIW

SEQ ID NO: 713964 - protein, 15 aa, Homo sapiens
  CDR3 for beta chain variable domain of TCR clone 356982 (TRBV11-2, TRBJ2-1)
CASSRNRGLMYEQFF

SEQ ID NO: 713965 - protein, 14 aa, Homo sapiens
  CDR3 for alpha chain variable domain of TCR clone 356983 (TRAV3, TRAJ17)
CAVRDAAAGNKLTF

SEQ ID NO: 713966 - protein, 13 aa, Homo sapiens
  CDR3 for beta chain variable domain of TCR clone 356983 (TRBV6-1, TRBJ1-1)
CASSRRGNTEAFF

SEQ ID NO: 713967 - protein, 12 aa, Homo sapiens
  CDR3 for alpha chain variable domain of TCR clone 356984 (TRAV20, TRAJ56)
CAVTGANSKLTF

SEQ ID NO: 713968 - protein, 19 aa, Homo sapiens
  CDR3 for beta chain variable domain of TCR clone 356984 (TRBV7-2, TRBJ2-3)
CASSSQGGPRLAGADTQYF

SEQ ID NO: 713969 - protein, 14 aa, Homo sapiens
  CDR3 for alpha chain variable domain of TCR clone 356985 (TRAV3, TRAJ21)
CAVRDAYHFNKFYF

SEQ ID NO: 713970 - protein, 17 aa, Homo sapiens
  CDR3 for beta chain variable domain of TCR clone 356985 (TRBV20-1, TRBJ1-6)
CSARGGYTFSYNSPLHF

SEQ ID NO: 713971 - protein, 13 aa, Homo sapiens
  CDR3 for alpha chain variable domain of TCR clone 356986 (TRAV12-3, TRAJ54)
CAMTLPGAQKLVF

SEQ ID NO: 713972 - protein, 14 aa, Homo sapiens
  CDR3 for beta chain variable domain of TCR clone 356986 (TRBV4-1, TRBJ2-2)
CASSQAVNTGELFF

SEQ ID NO: 713973 - protein, 10 aa, Homo sapiens
  CDR3 for alpha chain variable domain of TCR clone 356987 (TRAV23/DV6, TRAJ9)
CASEYWRLQN

SEQ ID NO: 713974 - protein, 14 aa, Homo sapiens
  CDR3 for beta chain variable domain of TCR clone 356987 (TRBV6-1, TRBJ2-7)
CASTRTGDYYEQYF

SEQ ID NO: 713975 - protein, 14 aa, Homo sapiens
  CDR3 for alpha chain variable domain of TCR clone 356988 (TRAV13-1, TRAJ45)
CAATSGGGADGLTF

SEQ ID NO: 713976 - protein, 13 aa, Homo sapiens
  CDR3 for beta chain variable domain of TCR clone 356988 (TRBV19, TRBJ1-5)
CASSIGGEQPQHF

SEQ ID NO: 713977 - protein, 12 aa, Homo sapiens
  CDR3 for alpha chain variable domain of TCR clone 356989 (TRAV29/DV5, TRAJ49)
CAATDTGNQFYF

SEQ ID NO: 713978 - protein, 12 aa, Homo sapiens
  CDR3 for beta chain variable domain of TCR clone 356989 (TRBV12-4, TRBJ2-7)
CASSLGGYAQYF

SEQ ID NO: 713979 - protein, 10 aa, Homo sapiens
  CDR3 for alpha chain variable domain of TCR clone 356990 (TRAV26-1, TRAJ40)
CIAGTYKYIF

SEQ ID NO: 713980 - protein, 13 aa, Homo sapiens
  CDR3 for beta chain variable domain of TCR clone 356990 (TRBV10-2, TRBJ2-7)
CASGASGGYEQYF

SEQ ID NO: 713981 - protein, 14 aa, Homo sapiens
  CDR3 for alpha chain variable domain of TCR clone 356991 (TRAV17, TRAJ6)
CATDASGGSYIPTF

SEQ ID NO: 713982 - protein, 15 aa, Homo sapiens
  CDR3 for beta chain variable domain of TCR clone 356991 (TRBV5-1, TRBJ2-3)
CASSVTSGSTDTQYF

SEQ ID NO: 713983 - protein, 15 aa, Homo sapiens
  CDR3 for alpha chain variable domain of TCR clone 356992 (TRAV29/DV5, TRAJ28)
CAAGYSGARSYQLTF

SEQ ID NO: 713984 - protein, 18 aa, Homo sapiens
  CDR3 for beta chain variable domain of TCR clone 356992 (TRBV3-1, TRBJ1-2)
CASSQDVIGWNGDYGDTF

SEQ ID NO: 713985 - protein, 16 aa, Homo sapiens
  CDR3 for alpha chain variable domain of TCR clone 356993 (TRAV30, TRAJ24)
CGTEIVDADSWGKFQI

SEQ ID NO: 713986 - protein, 12 aa, Homo sapiens
  CDR3 for beta chain variable domain of TCR clone 356993 (TRBV7-8, TRBJ2-7)
CASSLGDREQYF

SEQ ID NO: 713987 - protein, 12 aa, Homo sapiens
  CDR3 for alpha chain variable domain of TCR clone 356994 (TRAV23/DV6, TRAJ3)
CAARAPQQCIQD

SEQ ID NO: 713988 - protein, 17 aa, Homo sapiens
  CDR3 for beta chain variable domain of TCR clone 356994 (TRBV7-9, TRBJ2-3)
CASSPTVAGDLTDTQYF

SEQ ID NO: 713989 - protein, 15 aa, Homo sapiens
  CDR3 for alpha chain variable domain of TCR clone 356995 (TRAV12-3, TRAJ6)
CAMSASTGGSYIPTF

SEQ ID NO: 713990 - protein, 16 aa, Homo sapiens
  CDR3 for beta chain variable domain of TCR clone 356995 (TRBV20-1, TRBJ1-2)
CSASMEQGVANYGYTF

SEQ ID NO: 713991 - protein, 13 aa, Homo sapiens
  CDR3 for alpha chain variable domain of TCR clone 356996 (TRAV2, TRAJ40)
CAVVTSGTYKYIF

SEQ ID NO: 713992 - protein, 17 aa, Homo sapiens
  CDR3 for beta chain variable domain of TCR clone 356996 (TRBV28, TRBJ2-7)
CASSPLRGRRWKGGQYF

SEQ ID NO: 713993 - protein, 14 aa, Homo sapiens
  CDR3 for alpha chain variable domain of TCR clone 356997 (TRAV12-3, TRAJ9)
CAMSVETGGFKTIF

SEQ ID NO: 713994 - protein, 14 aa, Homo sapiens
  CDR3 for beta chain variable domain of TCR clone 356997 (TRBV7-2, TRBJ2-7)
CASRPQGVAYEQYF

SEQ ID NO: 713995 - protein, 15 aa, Homo sapiens
  CDR3 for alpha chain variable domain of TCR clone 356998 (TRAV23/DV6, TRAJ44)
CAARTLTGTASKLTF

SEQ ID NO: 713996 - protein, 17 aa, Homo sapiens
  CDR3 for beta chain variable domain of TCR clone 356998 (TRBV24-1, TRBJ2-1)
CATSDVSTSGTYNEQFV

SEQ ID NO: 713997 - protein, 20 aa, Homo sapiens
  CDR3 for alpha chain variable domain of TCR clone 356999 (TRAV1-2, TRAJ9)
CAGYTGGFKTILEQEQDYLL

SEQ ID NO: 713998 - protein, 15 aa, Homo sapiens
  CDR3 for beta chain variable domain of TCR clone 356999 (TRBV11-2, TRBJ2-1)
CASSPAGQSLNEQFF

SEQ ID NO: 713999 - protein, 10 aa, Homo sapiens
  CDR3 for alpha chain variable domain of TCR clone 357000 (TRAV13-2, TRAJ49)
CADTGNQVYF

SEQ ID NO: 714000 - protein, 13 aa, Homo sapiens
  CDR3 for beta chain variable domain of TCR clone 357000 (TRBV10-3, TRBJ1-2)
CAISERDSYGYTF

SEQ ID NO: 714001 - protein, 12 aa, Homo sapiens
  CDR3 for alpha chain variable domain of TCR clone 357001 (TRAV13-2, TRAJ23)
CAERHRGGKLSF

SEQ ID NO: 714002 - protein, 13 aa, Homo sapiens
  CDR3 for beta chain variable domain of TCR clone 357001 (TRBV20-1, TRBJ2-2)
CSALSGGAGELFF

SEQ ID NO: 714003 - protein, 12 aa, Homo sapiens
  CDR3 for alpha chain variable domain of TCR clone 357002 (TRAV36/DV7, TRAJ40)
CAVAGGTYKYIF

SEQ ID NO: 714004 - protein, 16 aa, Homo sapiens
  CDR3 for beta chain variable domain of TCR clone 357002 (TRBV27, TRBJ2-5)
CASSFGPGGTKETQYF

SEQ ID NO: 714005 - protein, 15 aa, Homo sapiens
  CDR3 for alpha chain variable domain of TCR clone 357003 (TRAV8-3, TRAJ11)
CAVGLLNSGYSTLTF

SEQ ID NO: 714006 - protein, 18 aa, Homo sapiens
  CDR3 for beta chain variable domain of TCR clone 357003 (TRBV4-1, TRBJ2-3)
CASSHQLAGGRSTDTQYF

SEQ ID NO: 714007 - protein, 14 aa, Homo sapiens
  CDR3 for alpha chain variable domain of TCR clone 357004 (TRAV1-2, TRAJ8)
CAVREDTGFQKLVF

SEQ ID NO: 714008 - protein, 12 aa, Homo sapiens
  CDR3 for beta chain variable domain of TCR clone 357004 (TRBV3-1, TRBJ2-7)
CASSQEAAARHF

SEQ ID NO: 714009 - protein, 13 aa, Homo sapiens
  CDR3 for alpha chain variable domain of TCR clone 357005 (TRAV36/DV7, TRAJ50)
YAVSKTSYDKVIF

SEQ ID NO: 714010 - protein, 13 aa, Homo sapiens
  CDR3 for beta chain variable domain of TCR clone 357005 (TRBV18, TRBJ2-7)
CASSPGRNYEQYF

SEQ ID NO: 714011 - protein, 15 aa, Homo sapiens
  CDR3 for alpha chain variable domain of TCR clone 357006 (TRAV8-6, TRAJ6)
CAVSFTSGGSYIPTF

SEQ ID NO: 714012 - protein, 16 aa, Homo sapiens
  CDR3 for beta chain variable domain of TCR clone 357006 (TRBV6-1, TRBJ2-5)
CASSETLDRGAETQYF

SEQ ID NO: 714013 - protein, 16 aa, Homo sapiens
  CDR3 for alpha chain variable domain of TCR clone 357007 (TRAV8-4, TRAJ18)
CAVTANGGSTLGRLYF

SEQ ID NO: 714014 - protein, 14 aa, Homo sapiens
  CDR3 for beta chain variable domain of TCR clone 357007 (TRBV12-4, TRBJ1-2)
CASSSGGHIYGYTF

SEQ ID NO: 714015 - protein, 16 aa, Homo sapiens
  CDR3 for alpha chain variable domain of TCR clone 357008 (TRAV12-3, TRAJ53)
CAMSPGCGGSNYKMTF

SEQ ID NO: 714016 - protein, 11 aa, Homo sapiens
  CDR3 for beta chain variable domain of TCR clone 357008 (TRBV29-1, TRBJ2-5)
CSEDRTGTQYF

SEQ ID NO: 714017 - protein, 14 aa, Homo sapiens
  CDR3 for alpha chain variable domain of TCR clone 357009 (TRAV16, TRAJ54)
CALSGVQGAQKLVF

SEQ ID NO: 714018 - protein, 15 aa, Homo sapiens
  CDR3 for beta chain variable domain of TCR clone 357009 (TRBV18, TRBJ2-2)
CASSTSGLHIGELFF

SEQ ID NO: 714019 - protein, 14 aa, Homo sapiens
  CDR3 for alpha chain variable domain of TCR clone 357010 (TRAV16, TRAJ3)
CALSQYSSASKIIF

SEQ ID NO: 714020 - protein, 14 aa, Homo sapiens
  CDR3 for beta chain variable domain of TCR clone 357010 (TRBV6-3, TRBJ2-1)
CASLYSAYYNEQFF

SEQ ID NO: 714021 - protein, 14 aa, Homo sapiens
  CDR3 for alpha chain variable domain of TCR clone 357011 (TRAV29/DV5, TRAJ49)
CPASLSNTGNQFYF

SEQ ID NO: 714022 - protein, 21 aa, Homo sapiens
  CDR3 for beta chain variable domain of TCR clone 357011 (TRBV9, TRBJ2-5)
CASRGRLAGGPEDPVLRARHA

SEQ ID NO: 714023 - protein, 12 aa, Homo sapiens
  CDR3 for alpha chain variable domain of TCR clone 357012 (TRAV3, TRAJ43)
CAVRDPNNDMRF

SEQ ID NO: 714024 - protein, 13 aa, Homo sapiens
  CDR3 for beta chain variable domain of TCR clone 357012 (TRBV7-2, TRBJ1-1)
CASNLKGAKVAFF

SEQ ID NO: 714025 - protein, 17 aa, Homo sapiens
  CDR3 for alpha chain variable domain of TCR clone 357013 (TRAV36/DV7, TRAJ52)
CAVAQRAGGTSYGKLTF

SEQ ID NO: 714026 - protein, 16 aa, Homo sapiens
  CDR3 for beta chain variable domain of TCR clone 357013 (TRBV6-1, TRBJ1-3)
CASVQGGGGNTIYLER

SEQ ID NO: 714027 - protein, 16 aa, Homo sapiens
  CDR3 for alpha chain variable domain of TCR clone 357014 (TRAV12-3, TRAJ53)
CAMSPGSGGSNYKLTF

SEQ ID NO: 714028 - protein, 15 aa, Homo sapiens
  CDR3 for beta chain variable domain of TCR clone 357014 (TRBV4-1, TRBJ1-6)
CASSAGQGYNSPLHF

SEQ ID NO: 714029 - protein, 15 aa, Homo sapiens
  CDR3 for alpha chain variable domain of TCR clone 357015 (TRAV4, TRAJ39)
CLVGPNNNAGNMLTF

SEQ ID NO: 714030 - protein, 15 aa, Homo sapiens
  CDR3 for beta chain variable domain of TCR clone 357015 (TRBV28, TRBJ1-1)
CASSPGDRFAGGAFF

SEQ ID NO: 714031 - protein, 13 aa, Homo sapiens
  CDR3 for alpha chain variable domain of TCR clone 357016 (TRAV13-1, TRAJ27)
CAASIDQCRQINL

SEQ ID NO: 714032 - protein, 14 aa, Homo sapiens
  CDR3 for beta chain variable domain of TCR clone 357016 (TRBV28, TRBJ2-5)
CASSRLAGGETQYF

SEQ ID NO: 714033 - protein, 14 aa, Homo sapiens
  CDR3 for alpha chain variable domain of TCR clone 357017 (TRAV30, TRAJ26)
CCTEIVSYGQNFVF

SEQ ID NO: 714034 - protein, 13 aa, Homo sapiens
  CDR3 for beta chain variable domain of TCR clone 357017 (TRBV19, TRBJ1-3)
CASRLSLGNTIYF

SEQ ID NO: 714035 - protein, 15 aa, Homo sapiens
  CDR3 for alpha chain variable domain of TCR clone 357018 (TRAV36/DV7, TRAJ37)
CAVADGSSNTGKLIF

SEQ ID NO: 714036 - protein, 14 aa, Homo sapiens
  CDR3 for beta chain variable domain of TCR clone 357018 (TRBV12-4, TRBJ1-1)
CARSLGTGGTEAFF

SEQ ID NO: 714037 - protein, 16 aa, Homo sapiens
  CDR3 for alpha chain variable domain of TCR clone 357019 (TRAV3, TRAJ37)
CAVRPPGFGNTGKLIF

SEQ ID NO: 714038 - protein, 16 aa, Homo sapiens
  CDR3 for beta chain variable domain of TCR clone 357019 (TRBV9, TRBJ1-2)
CASSVEEKVSPYGYTF

SEQ ID NO: 714039 - protein, 11 aa, Homo sapiens
  CDR3 for alpha chain variable domain of TCR clone 357020 (TRAV12-1, TRAJ30)
CVVNGQDKIIF

SEQ ID NO: 714040 - protein, 18 aa, Homo sapiens
  CDR3 for beta chain variable domain of TCR clone 357020 (TRBV12-4, TRBJ2-4)
CASSRTGAVDVAKNIQYF

SEQ ID NO: 714041 - protein, 14 aa, Homo sapiens
  CDR3 for alpha chain variable domain of TCR clone 357021 (TRAV1-2, TRAJ16)
CAVNRFSDGQKLLF

SEQ ID NO: 714042 - protein, 16 aa, Homo sapiens
  CDR3 for beta chain variable domain of TCR clone 357021 (TRBV11-2, TRBJ2-1)
CASSVTADFSYNEQLF

SEQ ID NO: 714043 - protein, 13 aa, Homo sapiens
  CDR3 for alpha chain variable domain of TCR clone 357022 (TRAV12-2, TRAJ4)
CAVRSGGYNKLIF

SEQ ID NO: 714044 - protein, 15 aa, Homo sapiens
  CDR3 for beta chain variable domain of TCR clone 357022 (TRBV10-3, TRBJ2-1)
FAISDVQDRAYEQFF

SEQ ID NO: 714045 - protein, 16 aa, Homo sapiens
  CDR3 for alpha chain variable domain of TCR clone 357023 (TRAV14/DV4, TRAJ54)
CAMREGRIQGAQKLVF

SEQ ID NO: 714046 - protein, 14 aa, Homo sapiens
  CDR3 for beta chain variable domain of TCR clone 357023 (TRBV28, TRBJ2-5)
CASTGAGGVETQYF

SEQ ID NO: 714047 - protein, 18 aa, Homo sapiens
  CDR3 for alpha chain variable domain of TCR clone 357024 (TRAV12-3, TRAJ52)
CAMSVGGAGGTSYGKLTF

SEQ ID NO: 714048 - protein, 15 aa, Homo sapiens
  CDR3 for beta chain variable domain of TCR clone 357024 (TRBV27, TRBJ1-6)
FASSFDRGLGSPLHF

SEQ ID NO: 714049 - protein, 14 aa, Homo sapiens
  CDR3 for alpha chain variable domain of TCR clone 357025 (TRAV12-2, TRAJ13)
CAVKKTGGYQKVTF

SEQ ID NO: 714050 - protein, 15 aa, Homo sapiens
  CDR3 for beta chain variable domain of TCR clone 357025 (TRBV7-9, TRBJ2-3)
CASSSSGGATDTQYF

SEQ ID NO: 714051 - protein, 12 aa, Homo sapiens
  CDR3 for alpha chain variable domain of TCR clone 357026 (TRAV12-2, TRAJ47)
CAVMEYGNKLVF

SEQ ID NO: 714052 - protein, 14 aa, Homo sapiens
  CDR3 for beta chain variable domain of TCR clone 357026 (TRBV7-2, TRBJ2-5)
CASSLSGGGETQYF

SEQ ID NO: 714053 - protein, 12 aa, Homo sapiens
  CDR3 for alpha chain variable domain of TCR clone 357027 (TRAV1-2, TRAJ24)
CAVGGSWGKFQF

SEQ ID NO: 714054 - protein, 17 aa, Homo sapiens
  CDR3 for beta chain variable domain of TCR clone 357027 (TRBV13, TRBJ2-3)
CASSLSRVAGGRNTQYF

SEQ ID NO: 714055 - protein, 18 aa, Homo sapiens
  CDR3 for alpha chain variable domain of TCR clone 357028 (TRAV21, TRAJ52)
CAVRPSPAGGTSYGKLTF

SEQ ID NO: 714056 - protein, 17 aa, Homo sapiens
  CDR3 for beta chain variable domain of TCR clone 357028 (TRBV28, TRBJ2-1)
CASSAPWGTPSYNEQFF

SEQ ID NO: 714057 - protein, 15 aa, Homo sapiens
  CDR3 for alpha chain variable domain of TCR clone 357029 (TRAV17, TRAJ52)
CATQAGGTSYGKLTF

SEQ ID NO: 714058 - protein, 14 aa, Homo sapiens
  CDR3 for beta chain variable domain of TCR clone 357029 (TRBV28, TRBJ1-5)
CASSLGVLVKPQHF

SEQ ID NO: 714059 - protein, 13 aa, Homo sapiens
  CDR3 for alpha chain variable domain of TCR clone 357030 (TRAV21, TRAJ27)
CAARPGNAGKSTF

SEQ ID NO: 714060 - protein, 17 aa, Homo sapiens
  CDR3 for beta chain variable domain of TCR clone 357030 (TRBV5-1, TRBJ2-7)
FAPAADNPGQIPYEQYF

SEQ ID NO: 714061 - protein, 15 aa, Homo sapiens
  CDR3 for alpha chain variable domain of TCR clone 357031 (TRAV3, TRAJ22)
CALRDRGGSARQLTF

SEQ ID NO: 714062 - protein, 13 aa, Homo sapiens
  CDR3 for beta chain variable domain of TCR clone 357031 (TRBV7-3, TRBJ2-1)
CASSPVAYNEQFF

SEQ ID NO: 714063 - protein, 18 aa, Homo sapiens
  CDR3 for alpha chain variable domain of TCR clone 357032 (TRAV21, TRAJ52)
CAVRPSPAGGTSYGKLTF

SEQ ID NO: 714064 - protein, 14 aa, Homo sapiens
  CDR3 for beta chain variable domain of TCR clone 357032 (TRBV4-1, TRBJ2-2)
CASSQAVNTGEMFF

SEQ ID NO: 714065 - protein, 13 aa, Homo sapiens
  CDR3 for alpha chain variable domain of TCR clone 357033 (TRAV35, TRAJ27)
CAGQEGDAGKSTF

SEQ ID NO: 714066 - protein, 13 aa, Homo sapiens
  CDR3 for beta chain variable domain of TCR clone 357033 (TRBV7-3, TRBJ1-1)
CASSQDWGAEAFF

SEQ ID NO: 714067 - protein, 12 aa, Homo sapiens
  CDR3 for alpha chain variable domain of TCR clone 357034 (TRAV12-3, TRAJ4)
CAMTGAGTRLAV

SEQ ID NO: 714068 - protein, 16 aa, Homo sapiens
  CDR3 for beta chain variable domain of TCR clone 357034 (TRBV9, TRBJ2-1)
CASSVGGGGNYNEQFF

SEQ ID NO: 714069 - protein, 15 aa, Homo sapiens
  CDR3 for alpha chain variable domain of TCR clone 357035 (TRAV8-3, TRAJ45)
CASSYAGGGADGLTF

SEQ ID NO: 714070 - protein, 13 aa, Homo sapiens
  CDR3 for beta chain variable domain of TCR clone 357035 (TRBV10-3, TRBJ2-7)
CASKRAVNYEQYF

SEQ ID NO: 714071 - protein, 15 aa, Homo sapiens
  CDR3 for alpha chain variable domain of TCR clone 357036 (TRAV25, TRAJ53)
CSATGGGGSNYKLTF

SEQ ID NO: 714072 - protein, 11 aa, Homo sapiens
  CDR3 for beta chain variable domain of TCR clone 357036 (TRBV11-3, TRBJ2-2)
CASSSGGELFF

SEQ ID NO: 714073 - protein, 15 aa, Homo sapiens
  CDR3 for alpha chain variable domain of TCR clone 357037 (TRAV8-3, TRAJ45)
CASPYSGGRADGLTF

SEQ ID NO: 714074 - protein, 17 aa, Homo sapiens
  CDR3 for beta chain variable domain of TCR clone 357037 (TRBV7-8, TRBJ1-2)
CASSLRPLQGHLYGYTF

SEQ ID NO: 714075 - protein, 13 aa, Homo sapiens
  CDR3 for alpha chain variable domain of TCR clone 357038 (TRAV35, TRAJ42)
CAGFPGSQGNLIF

SEQ ID NO: 714076 - protein, 16 aa, Homo sapiens
  CDR3 for beta chain variable domain of TCR clone 357038 (TRBV27, TRBJ2-2)
CASSSSGVSNTGELFF

SEQ ID NO: 714077 - protein, 16 aa, Homo sapiens
  CDR3 for alpha chain variable domain of TCR clone 357039 (TRAV30, TRAJ24)
CGTEIVDADSWGKFQF

SEQ ID NO: 714078 - protein, 14 aa, Homo sapiens
  CDR3 for beta chain variable domain of TCR clone 357039 (TRBV12-5, TRBJ2-1)
CASGARTQQETEYF

SEQ ID NO: 714079 - protein, 17 aa, Homo sapiens
  CDR3 for alpha chain variable domain of TCR clone 357040 (TRAV24, TRAJ42)
CAFRVKNYGGSQGNLIF

SEQ ID NO: 714080 - protein, 15 aa, Homo sapiens
  CDR3 for beta chain variable domain of TCR clone 357040 (TRBV5-1, TRBJ2-7)
CASSLMTSGSNEQYF

SEQ ID NO: 714081 - protein, 15 aa, Homo sapiens
  CDR3 for alpha chain variable domain of TCR clone 357041 (TRAV26-1, TRAJ17)
CIVRVVKAAGNKLTF

SEQ ID NO: 714082 - protein, 16 aa, Homo sapiens
  CDR3 for beta chain variable domain of TCR clone 357041 (TRBV4-1, TRBJ1-2)
CASSQDAGQVLYGYTF

SEQ ID NO: 714083 - protein, 16 aa, Homo sapiens
  CDR3 for alpha chain variable domain of TCR clone 357042 (TRAV8-3, TRAJ10)
CAVGPILMGGGNKLTF

SEQ ID NO: 714084 - protein, 16 aa, Homo sapiens
  CDR3 for beta chain variable domain of TCR clone 357042 (TRBV7-2, TRBJ2-5)
CASSSKWLSGQETQYF

SEQ ID NO: 714085 - protein, 13 aa, Homo sapiens
  CDR3 for alpha chain variable domain of TCR clone 357043 (TRAV16, TRAJ28)
CAPTGAGSYQLTF

SEQ ID NO: 714086 - protein, 10 aa, Homo sapiens
  CDR3 for beta chain variable domain of TCR clone 357043 (TRBV28, TRBJ1-5)
CASSLTGQGW

SEQ ID NO: 714087 - protein, 14 aa, Homo sapiens
  CDR3 for alpha chain variable domain of TCR clone 357044 (TRAV1-2, TRAJ8)
CAVREDTGFLKLVF

SEQ ID NO: 714088 - protein, 17 aa, Homo sapiens
  CDR3 for beta chain variable domain of TCR clone 357044 (TRBV28, TRBJ2-5)
CASSRQGGLAGAETQYF

SEQ ID NO: 714089 - protein, 12 aa, Homo sapiens
  CDR3 for alpha chain variable domain of TCR clone 357045 (TRAV12-2, TRAJ36)
CAAPRGANNLFF

SEQ ID NO: 714090 - protein, 13 aa, Homo sapiens
  CDR3 for beta chain variable domain of TCR clone 357045 (TRBV7-9, TRBJ2-3)
CASSPGSTDTQYF

SEQ ID NO: 714091 - protein, 18 aa, Homo sapiens
  CDR3 for alpha chain variable domain of TCR clone 357046 (TRAV21, TRAJ52)
CAVRPSPAGGTSYGKLTF

SEQ ID NO: 714092 - protein, 13 aa, Homo sapiens
  CDR3 for beta chain variable domain of TCR clone 357046 (TRBV29-1, TRBJ2-2)
CSGYREDTGELFF

SEQ ID NO: 714093 - protein, 12 aa, Homo sapiens
  CDR3 for alpha chain variable domain of TCR clone 357047 (TRAV17, TRAJ48)
CALNLGNEKLTF

SEQ ID NO: 714094 - protein, 13 aa, Homo sapiens
  CDR3 for beta chain variable domain of TCR clone 357047 (TRBV6-5, TRBJ2-5)
CASSSPGGETQYF

SEQ ID NO: 714095 - protein, 17 aa, Homo sapiens
  CDR3 for alpha chain variable domain of TCR clone 357048 (TRAV3, TRAJ6)
CAVRDGPRSGGSYIPTL

SEQ ID NO: 714096 - protein, 14 aa, Homo sapiens
  CDR3 for beta chain variable domain of TCR clone 357048 (TRBV7-2, TRBJ2-7)
CASSPKTSFYEQYF

SEQ ID NO: 714097 - protein, 13 aa, Homo sapiens
  CDR3 for alpha chain variable domain of TCR clone 357049 (TRAV8-2, TRAJ21)
CVVSQYNFNKFYF

SEQ ID NO: 714098 - protein, 15 aa, Homo sapiens
  CDR3 for beta chain variable domain of TCR clone 357049 (TRBV5-1, TRBJ2-7)
CASSLNGEPAREQYF

SEQ ID NO: 714099 - protein, 15 aa, Homo sapiens
  CDR3 for alpha chain variable domain of TCR clone 357050 (TRAV8-3, TRAJ40)
CAAPSLGSGTYQYIF

SEQ ID NO: 714100 - protein, 12 aa, Homo sapiens
  CDR3 for beta chain variable domain of TCR clone 357050 (TRBV11-2, TRBJ2-2)
CASSLGGGELFF

SEQ ID NO: 714101 - protein, 16 aa, Homo sapiens
  CDR3 for alpha chain variable domain of TCR clone 357051 (TRAV30, TRAJ24)
CGTEIVYADSWGKFQF

SEQ ID NO: 714102 - protein, 14 aa, Homo sapiens
  CDR3 for beta chain variable domain of TCR clone 357051 (TRBV7-9, TRBJ2-4)
CASSLAMGGNIQYF

SEQ ID NO: 714103 - protein, 15 aa, Homo sapiens
  CDR3 for alpha chain variable domain of TCR clone 357052 (TRAV38-1, TRAJ37)
CAFIHGSGNTGKRIF

SEQ ID NO: 714104 - protein, 12 aa, Homo sapiens
  CDR3 for beta chain variable domain of TCR clone 357052 (TRBV7-9, TRBJ2-7)
CASSFGSYEQYF

SEQ ID NO: 714105 - protein, 15 aa, Homo sapiens
  CDR3 for alpha chain variable domain of TCR clone 357053 (TRAV3, TRAJ20)
CAVRDIKLSDYKPSF

SEQ ID NO: 714106 - protein, 15 aa, Homo sapiens
  CDR3 for beta chain variable domain of TCR clone 357053 (TRBV7-9, TRBJ1-6)
CASSSPGRGNSPLHL

SEQ ID NO: 714107 - protein, 14 aa, Homo sapiens
  CDR3 for alpha chain variable domain of TCR clone 357054 (TRAV8-3, TRAJ4)
CAVGAAGGYNKLIF

SEQ ID NO: 714108 - protein, 15 aa, Homo sapiens
  CDR3 for beta chain variable domain of TCR clone 357054 (TRBV19, TRBJ2-4)
CASRGPRRGENIQYF

SEQ ID NO: 714109 - protein, 16 aa, Homo sapiens
  CDR3 for alpha chain variable domain of TCR clone 357055 (TRAV12-2, TRAJ40)
CAVIRGGTSGTYKYIF

SEQ ID NO: 714110 - protein, 16 aa, Homo sapiens
  CDR3 for beta chain variable domain of TCR clone 357055 (TRBV7-9, TRBJ2-1)
CASSDVEGGSYNEQFF

SEQ ID NO: 714111 - protein, 11 aa, Homo sapiens
  CDR3 for alpha chain variable domain of TCR clone 357056 (TRAV3, TRAJ20)
CAVRPSVTTTS

SEQ ID NO: 714112 - protein, 15 aa, Homo sapiens
  CDR3 for beta chain variable domain of TCR clone 357056 (TRBV19, TRBJ2-6)
CASVRRYSGANVLTF

SEQ ID NO: 714113 - protein, 17 aa, Homo sapiens
  CDR3 for alpha chain variable domain of TCR clone 357057 (TRAV3, TRAJ6)
CAVRDGPRAGGSDIPTF

SEQ ID NO: 714114 - protein, 18 aa, Homo sapiens
  CDR3 for beta chain variable domain of TCR clone 357057 (TRBV7-9, TRBJ2-7)
CASSLTTSGSRTWHEQYF

SEQ ID NO: 714115 - protein, 13 aa, Homo sapiens
  CDR3 for alpha chain variable domain of TCR clone 357058 (TRAV8-3, TRAJ44)
CAVVPGTASKLTF

SEQ ID NO: 714116 - protein, 15 aa, Homo sapiens
  CDR3 for beta chain variable domain of TCR clone 357058 (TRBV12-4, TRBJ1-2)
CASSPITGGGYGYTF

SEQ ID NO: 714117 - protein, 13 aa, Homo sapiens
  CDR3 for alpha chain variable domain of TCR clone 357059 (TRAV38-1, TRAJ42)
CARWGGSQGNLIF

SEQ ID NO: 714118 - protein, 10 aa, Homo sapiens
  CDR3 for beta chain variable domain of TCR clone 357059 (TRBV7-3, TRBJ2-2)
CASKANGANT

SEQ ID NO: 714119 - protein, 13 aa, Homo sapiens
  CDR3 for alpha chain variable domain of TCR clone 357060 (TRAV21, TRAJ45)
CAVMGGGADGLTF

SEQ ID NO: 714120 - protein, 16 aa, Homo sapiens
  CDR3 for beta chain variable domain of TCR clone 357060 (TRBV13, TRBJ2-2)
CASSPRTGEHTGELFF

SEQ ID NO: 714121 - protein, 14 aa, Homo sapiens
  CDR3 for alpha chain variable domain of TCR clone 357061 (TRAV2, TRAJ12)
CAVDAMDSSYKLII

SEQ ID NO: 714122 - protein, 13 aa, Homo sapiens
  CDR3 for beta chain variable domain of TCR clone 357061 (TRBV19, TRBJ2-1)
CASKVGAGGEQFF

SEQ ID NO: 714123 - protein, 16 aa, Homo sapiens
  CDR3 for alpha chain variable domain of TCR clone 357062 (TRAV12-3, TRAJ28)
CAMRANSGAGSYQLTF

SEQ ID NO: 714124 - protein, 16 aa, Homo sapiens
  CDR3 for beta chain variable domain of TCR clone 357062 (TRBV24-1, TRBJ2-3)
CATSDPGTGATDTQYF

SEQ ID NO: 714125 - protein, 11 aa, Homo sapiens
  CDR3 for alpha chain variable domain of TCR clone 357063 (TRAV23/DV6, TRAJ48)
CAPRWGEKLTF

SEQ ID NO: 714126 - protein, 13 aa, Homo sapiens
  CDR3 for beta chain variable domain of TCR clone 357063 (TRBV12-4, TRBJ2-5)
CSSSPGTEETQYF

SEQ ID NO: 714127 - protein, 13 aa, Homo sapiens
  CDR3 for alpha chain variable domain of TCR clone 357064 (TRAV2, TRAJ36)
CAVDQTGANNLFF

SEQ ID NO: 714128 - protein, 14 aa, Homo sapiens
  CDR3 for beta chain variable domain of TCR clone 357064 (TRBV19, TRBJ1-1)
CASMNRYTEAFLDK

SEQ ID NO: 714129 - protein, 14 aa, Homo sapiens
  CDR3 for alpha chain variable domain of TCR clone 357065 (TRAV8-6, TRAJ12)
CAVNAADSSYKLIF

SEQ ID NO: 714130 - protein, 15 aa, Homo sapiens
  CDR3 for beta chain variable domain of TCR clone 357065 (TRBV5-1, TRBJ2-5)
CASSLGLAEQETQYF

SEQ ID NO: 714131 - protein, 18 aa, Homo sapiens
  CDR3 for alpha chain variable domain of TCR clone 357066 (TRAV21, TRAJ52)
CAVRPSPAGGTSYGKLTV

SEQ ID NO: 714132 - protein, 16 aa, Homo sapiens
  CDR3 for beta chain variable domain of TCR clone 357066 (TRBV7-3, TRBJ2-1)
CASSLEGYRSYNEQFF

SEQ ID NO: 714133 - protein, 13 aa, Homo sapiens
  CDR3 for alpha chain variable domain of TCR clone 357067 (TRAV8-3, TRAJ43)
CAVGPDNNNDMRF

SEQ ID NO: 714134 - protein, 14 aa, Homo sapiens
  CDR3 for beta chain variable domain of TCR clone 357067 (TRBV7-2, TRBJ1-6)
CASSLSVHPSTLGM

SEQ ID NO: 714135 - protein, 18 aa, Homo sapiens
  CDR3 for alpha chain variable domain of TCR clone 357068 (TRAV29/DV5, TRAJ52)
CPAGFRGAGVTSYGKLTF

SEQ ID NO: 714136 - protein, 16 aa, Homo sapiens
  CDR3 for beta chain variable domain of TCR clone 357068 (TRBV7-3, TRBJ2-2)
CASSLKRGTLSGELFF

SEQ ID NO: 714137 - protein, 17 aa, Homo sapiens
  CDR3 for alpha chain variable domain of TCR clone 357069 (TRAV14/DV4, TRAJ4)
CAMREASGRGGYNKLIF

SEQ ID NO: 714138 - protein, 14 aa, Homo sapiens
  CDR3 for beta chain variable domain of TCR clone 357069 (TRBV19, TRBJ2-7)
CAGSMGQGAIEQYF

SEQ ID NO: 714139 - protein, 16 aa, Homo sapiens
  CDR3 for alpha chain variable domain of TCR clone 357070 (TRAV27, TRAJ52)
CAGAPAGGTSYGKLTF

SEQ ID NO: 714140 - protein, 15 aa, Homo sapiens
  CDR3 for beta chain variable domain of TCR clone 357070 (TRBV20-1, TRBJ2-7)
CSARDRVSGMDEQYF

SEQ ID NO: 714141 - protein, 15 aa, Homo sapiens
  CDR3 for alpha chain variable domain of TCR clone 357071 (TRAV3, TRAJ5)
CAVRDRKTGRRALTF

SEQ ID NO: 714142 - protein, 12 aa, Homo sapiens
  CDR3 for beta chain variable domain of TCR clone 357071 (TRBV7-8, TRBJ2-1)
CASSPGNNEQFF

SEQ ID NO: 714143 - protein, 16 aa, Homo sapiens
  CDR3 for alpha chain variable domain of TCR clone 357072 (TRAV27, TRAJ53)
CAAPERSGGSNYKRTF

SEQ ID NO: 714144 - protein, 14 aa, Homo sapiens
  CDR3 for beta chain variable domain of TCR clone 357072 (TRBV4-3, TRBJ1-5)
CASSQGGQGWPQHF

SEQ ID NO: 714145 - protein, 14 aa, Homo sapiens
  CDR3 for alpha chain variable domain of TCR clone 357073 (TRAV1-1, TRAJ23)
CAVSIYNQGGKLIF

SEQ ID NO: 714146 - protein, 17 aa, Homo sapiens
  CDR3 for beta chain variable domain of TCR clone 357073 (TRBV5-1, TRBJ1-6)
CASSPSLQGSDNSPLHF

SEQ ID NO: 714147 - protein, 11 aa, Homo sapiens
  CDR3 for alpha chain variable domain of TCR clone 357074 (TRAV2, TRAJ33)
CAVDSNYQLIW

SEQ ID NO: 714148 - protein, 14 aa, Homo sapiens
  CDR3 for beta chain variable domain of TCR clone 357074 (TRBV7-9, TRBJ2-2)
CASSLGHRTGELFF

SEQ ID NO: 714149 - protein, 13 aa, Homo sapiens
  CDR3 for alpha chain variable domain of TCR clone 357075 (TRAV8-3, TRAJ48)
CAVVPFGNEKLTF

SEQ ID NO: 714150 - protein, 15 aa, Homo sapiens
  CDR3 for beta chain variable domain of TCR clone 357075 (TRBV18, TRBJ2-1)
CASSPPSASYNEQFF

SEQ ID NO: 714151 - protein, 16 aa, Homo sapiens
  CDR3 for alpha chain variable domain of TCR clone 357076 (TRAV12-2, TRAJ43)
CAGDDMRFGAGTRLTV

SEQ ID NO: 714152 - protein, 16 aa, Homo sapiens
  CDR3 for beta chain variable domain of TCR clone 357076 (TRBV2, TRBJ2-4)
CASSEAPGGEQHIQYF

SEQ ID NO: 714153 - protein, 12 aa, Homo sapiens
  CDR3 for alpha chain variable domain of TCR clone 357077 (TRAV26-2, TRAJ21)
CIPKGNFSKFYF

SEQ ID NO: 714154 - protein, 14 aa, Homo sapiens
  CDR3 for beta chain variable domain of TCR clone 357077 (TRBV12-4, TRBJ1-1)
CASSLGTGGTEAFF

SEQ ID NO: 714155 - protein, 15 aa, Homo sapiens
  CDR3 for alpha chain variable domain of TCR clone 357078 (TRAV12-3, TRAJ49)
CAMAVTPNTGNQFYF

SEQ ID NO: 714156 - protein, 18 aa, Homo sapiens
  CDR3 for beta chain variable domain of TCR clone 357078 (TRBV4-1, TRBJ1-5)
CASSQGPRGQGLNQAQHF

SEQ ID NO: 714157 - protein, 13 aa, Homo sapiens
  CDR3 for alpha chain variable domain of TCR clone 357079 (TRAV1-2, TRAJ31)
CAASRNNNASLMF

SEQ ID NO: 714158 - protein, 18 aa, Homo sapiens
  CDR3 for beta chain variable domain of TCR clone 357079 (TRBV7-2, TRBJ2-3)
CASSLGLAGGRDTDTQYF

SEQ ID NO: 714159 - protein, 14 aa, Homo sapiens
  CDR3 for alpha chain variable domain of TCR clone 357080 (TRAV3, TRAJ40)
CAVRDRRGTYKYIF

SEQ ID NO: 714160 - protein, 15 aa, Homo sapiens
  CDR3 for beta chain variable domain of TCR clone 357080 (TRBV11-1, TRBJ1-3)
CASTDPRAFGNTLYF

SEQ ID NO: 714161 - protein, 14 aa, Homo sapiens
  CDR3 for alpha chain variable domain of TCR clone 357081 (TRAV12-2, TRAJ13)
CAVNKTGGYQKVTF

SEQ ID NO: 714162 - protein, 12 aa, Homo sapiens
  CDR3 for beta chain variable domain of TCR clone 357081 (TRBV12-4, TRBJ1-2)
CASSFIWLHLRF

SEQ ID NO: 714163 - protein, 14 aa, Homo sapiens
  CDR3 for alpha chain variable domain of TCR clone 357082 (TRAV12-1, TRAJ3)
CVVILYSSASKIIF

SEQ ID NO: 714164 - protein, 15 aa, Homo sapiens
  CDR3 for beta chain variable domain of TCR clone 357082 (TRBV20-1, TRBJ2-7)
CSARDRVSGMDEQYF

SEQ ID NO: 714165 - protein, 10 aa, Homo sapiens
  CDR3 for alpha chain variable domain of TCR clone 357083 (TRAV12-2, TRAJ41)
CAVTGYALNF

SEQ ID NO: 714166 - protein, 14 aa, Homo sapiens
  CDR3 for beta chain variable domain of TCR clone 357083 (TRBV4-2, TRBJ2-1)
CQQPRRWLAGEQFF

SEQ ID NO: 714167 - protein, 14 aa, Homo sapiens
  CDR3 for alpha chain variable domain of TCR clone 357084 (TRAV12-1, TRAJ42)
CVVIYGGSQGNLIF

SEQ ID NO: 714168 - protein, 14 aa, Homo sapiens
  CDR3 for beta chain variable domain of TCR clone 357084 (TRBV4-1, TRBJ2-7)
CASSPVAGGDEQYF

SEQ ID NO: 714169 - protein, 14 aa, Homo sapiens
  CDR3 for alpha chain variable domain of TCR clone 357085 (TRAV35, TRAJ40)
CAGSTTSETYKYIF

SEQ ID NO: 714170 - protein, 13 aa, Homo sapiens
  CDR3 for beta chain variable domain of TCR clone 357085 (TRBV20-1, TRBJ1-6)
CSAPLGVGSPLHF

SEQ ID NO: 714171 - protein, 15 aa, Homo sapiens
  CDR3 for alpha chain variable domain of TCR clone 357086 (TRAV17, TRAJ57)
CATGPSQGGFEKLVF

SEQ ID NO: 714172 - protein, 14 aa, Homo sapiens
  CDR3 for beta chain variable domain of TCR clone 357086 (TRBV2, TRBJ2-1)
CASSDRAYYNEQFF

SEQ ID NO: 714173 - protein, 11 aa, Homo sapiens
  CDR3 for alpha chain variable domain of TCR clone 357087 (TRAV21, TRAJ48)
CAVDGNEKLTF

SEQ ID NO: 714174 - protein, 16 aa, Homo sapiens
  CDR3 for beta chain variable domain of TCR clone 357087 (TRBV12-4, TRBJ1-5)
CASSSGPRGSNQQQHF

SEQ ID NO: 714175 - protein, 11 aa, Homo sapiens
  CDR3 for alpha chain variable domain of TCR clone 357088 (TRAV3, TRAJ32)
CAVRQGIMVVL

SEQ ID NO: 714176 - protein, 13 aa, Homo sapiens
  CDR3 for beta chain variable domain of TCR clone 357088 (TRBV2, TRBJ1-1)
CASSEGGNTEAFF

SEQ ID NO: 714177 - protein, 14 aa, Homo sapiens
  CDR3 for alpha chain variable domain of TCR clone 357089 (TRAV26-1, TRAJ34)
CIVRVAYNTDKLIF

SEQ ID NO: 714178 - protein, 17 aa, Homo sapiens
  CDR3 for beta chain variable domain of TCR clone 357089 (TRBV28, TRBJ2-5)
CASSRQGGLAGAETQYF

SEQ ID NO: 714179 - protein, 15 aa, Homo sapiens
  CDR3 for alpha chain variable domain of TCR clone 357090 (TRAV38-2/DV8, TRAJ45)
CAYWDSGGGADGLTF

SEQ ID NO: 714180 - protein, 13 aa, Homo sapiens
  CDR3 for beta chain variable domain of TCR clone 357090 (TRBV13, TRBJ2-5)
CASNPEVGETQYF

SEQ ID NO: 714181 - protein, 16 aa, Homo sapiens
  CDR3 for alpha chain variable domain of TCR clone 357091 (TRAV30, TRAJ24)
CGTEIVDADSWGKFQF

SEQ ID NO: 714182 - protein, 15 aa, Homo sapiens
  CDR3 for beta chain variable domain of TCR clone 357091 (TRBV20-1, TRBJ2-6)
CSARDRGPGANVLAF

SEQ ID NO: 714183 - protein, 17 aa, Homo sapiens
  CDR3 for alpha chain variable domain of TCR clone 357092 (TRAV4, TRAJ18)
CLVGERSVGSTLGRLYF

SEQ ID NO: 714184 - protein, 16 aa, Homo sapiens
  CDR3 for beta chain variable domain of TCR clone 357092 (TRBV5-1, TRBJ1-1)
CASSSGGNSLNTEAFF

SEQ ID NO: 714185 - protein, 16 aa, Homo sapiens
  CDR3 for alpha chain variable domain of TCR clone 357093 (TRAV12-3, TRAJ53)
CAMSPGSGGSKYKLTF

SEQ ID NO: 714186 - protein, 12 aa, Homo sapiens
  CDR3 for beta chain variable domain of TCR clone 357093 (TRBV11-2, TRBJ2-2)
CASSLGGGELFF

SEQ ID NO: 714187 - protein, 12 aa, Homo sapiens
  CDR3 for alpha chain variable domain of TCR clone 357094 (TRAV8-3, TRAJ26)
CAGDNYGQNFVF

SEQ ID NO: 714188 - protein, 16 aa, Homo sapiens
  CDR3 for beta chain variable domain of TCR clone 357094 (TRBV20-1, TRBJ1-4)
CSAPRQGLLTNEKLFF

SEQ ID NO: 714189 - protein, 13 aa, Homo sapiens
  CDR3 for alpha chain variable domain of TCR clone 357095 (TRAV27, TRAJ6)
CAGGTRGSYIPIF

SEQ ID NO: 714190 - protein, 15 aa, Homo sapiens
  CDR3 for beta chain variable domain of TCR clone 357095 (TRBV5-7, TRBJ2-7)
CASSLGPGRGHEQYF

SEQ ID NO: 714191 - protein, 15 aa, Homo sapiens
  CDR3 for alpha chain variable domain of TCR clone 357096 (TRAV12-3, TRAJ6)
CAMSATTGGSYIPAF

SEQ ID NO: 714192 - protein, 16 aa, Homo sapiens
  CDR3 for beta chain variable domain of TCR clone 357096 (TRBV9, TRBJ2-1)
CASSPTTGASYNEQFF

SEQ ID NO: 714193 - protein, 14 aa, Homo sapiens
  CDR3 for alpha chain variable domain of TCR clone 357097 (TRAV29/DV5, TRAJ36)
CAARRKTGANNLFF

SEQ ID NO: 714194 - protein, 13 aa, Homo sapiens
  CDR3 for beta chain variable domain of TCR clone 357097 (TRBV19, TRBJ2-7)
CASSVDRTYEQYF

SEQ ID NO: 714195 - protein, 14 aa, Homo sapiens
  CDR3 for alpha chain variable domain of TCR clone 357098 (TRAV12-3, TRAJ9)
CAMSPNTGGFKTIF

SEQ ID NO: 714196 - protein, 12 aa, Homo sapiens
  CDR3 for beta chain variable domain of TCR clone 357098 (TRBV28, TRBJ2-7)
CASSGRPYEQYF

SEQ ID NO: 714197 - protein, 13 aa, Homo sapiens
  CDR3 for alpha chain variable domain of TCR clone 357099 (TRAV8-3, TRAJ28)
CAVGAVGSYQLTF

SEQ ID NO: 714198 - protein, 15 aa, Homo sapiens
  CDR3 for beta chain variable domain of TCR clone 357099 (TRBV7-9, TRBJ1-5)
RASSQGHQPNQPQHF

SEQ ID NO: 714199 - protein, 14 aa, Homo sapiens
  CDR3 for alpha chain variable domain of TCR clone 357100 (TRAV12-2, TRAJ13)
CAVNPSGGYQKVTF

SEQ ID NO: 714200 - protein, 18 aa, Homo sapiens
  CDR3 for beta chain variable domain of TCR clone 357100 (TRBV20-1, TRBJ2-3)
CSASGLAGGPGTTDTQYF

SEQ ID NO: 714201 - protein, 12 aa, Homo sapiens
  CDR3 for alpha chain variable domain of TCR clone 357101 (TRAV12-3, TRAJ40)
CAMTSGTYKYIF

SEQ ID NO: 714202 - protein, 15 aa, Homo sapiens
  CDR3 for beta chain variable domain of TCR clone 357101 (TRBV7-3, TRBJ2-2)
CASSLTRQGTGELFF

SEQ ID NO: 714203 - protein, 14 aa, Homo sapiens
  CDR3 for alpha chain variable domain of TCR clone 357102 (TRAV12-2, TRAJ17)
CAVLFKAAGNKLTF

SEQ ID NO: 714204 - protein, 13 aa, Homo sapiens
  CDR3 for beta chain variable domain of TCR clone 357102 (TRBV11-3, TRBJ1-1)
CASSSNRDTEAFF

SEQ ID NO: 714205 - protein, 18 aa, Homo sapiens
  CDR3 for alpha chain variable domain of TCR clone 357103 (TRAV16, TRAJ52)
CALSGVDAGGTSYGKLTF

SEQ ID NO: 714206 - protein, 15 aa, Homo sapiens
  CDR3 for beta chain variable domain of TCR clone 357103 (TRBV7-8, TRBJ2-1)
CASSPSGTIYNEQFF

SEQ ID NO: 714207 - protein, 12 aa, Homo sapiens
  CDR3 for alpha chain variable domain of TCR clone 357104 (TRAV13-2, TRAJ23)
CAERHRGGKLIF

SEQ ID NO: 714208 - protein, 13 aa, Homo sapiens
  CDR3 for beta chain variable domain of TCR clone 357104 (TRBV7-9, TRBJ2-3)
CASSPGSTDTQDF

SEQ ID NO: 714209 - protein, 15 aa, Homo sapiens
  CDR3 for alpha chain variable domain of TCR clone 357105 (TRAV17, TRAJ16)
CATALRFSDGRKLLF

SEQ ID NO: 714210 - protein, 12 aa, Homo sapiens
  CDR3 for beta chain variable domain of TCR clone 357105 (TRBV2, TRBJ2-7)
CASSDPDYEQYF

SEQ ID NO: 714211 - protein, 13 aa, Homo sapiens
  CDR3 for alpha chain variable domain of TCR clone 357106 (TRAV2, TRAJ12)
GAVGADSSYKLIF

SEQ ID NO: 714212 - protein, 13 aa, Homo sapiens
  CDR3 for beta chain variable domain of TCR clone 357106 (TRBV20-1, TRBJ2-1)
CSARSSPRDEQFF

SEQ ID NO: 714213 - protein, 15 aa, Homo sapiens
  CDR3 for alpha chain variable domain of TCR clone 357107 (TRAV2, TRAJ9)
CAVEDRGTGGFKTIF

SEQ ID NO: 714214 - protein, 16 aa, Homo sapiens
  CDR3 for beta chain variable domain of TCR clone 357107 (TRBV24-1, TRBJ2-3)
CASSDRGTGATDTQYF

SEQ ID NO: 714215 - protein, 14 aa, Homo sapiens
  CDR3 for alpha chain variable domain of TCR clone 357108 (TRAV29/DV5, TRAJ40)
CAAAVASGTYKYIF

SEQ ID NO: 714216 - protein, 14 aa, Homo sapiens
  CDR3 for beta chain variable domain of TCR clone 357108 (TRBV28, TRBJ1-2)
CASSRDRKNYGYTF

SEQ ID NO: 714217 - protein, 14 aa, Homo sapiens
  CDR3 for alpha chain variable domain of TCR clone 357109 (TRAV1-2, TRAJ8)
CAVREDTGFQKLVF

SEQ ID NO: 714218 - protein, 16 aa, Homo sapiens
  CDR3 for beta chain variable domain of TCR clone 357109 (TRBV7-3, TRBJ2-2)
CASSLKRGALSGELFF

SEQ ID NO: 714219 - protein, 17 aa, Homo sapiens
  CDR3 for alpha chain variable domain of TCR clone 357110 (TRAV23/DV6, TRAJ28)
CAALLAYSGSGSYQLTF

SEQ ID NO: 714220 - protein, 15 aa, Homo sapiens
  CDR3 for beta chain variable domain of TCR clone 357110 (TRBV7-2, TRBJ2-1)
CASSLVAGRYDEQFF

SEQ ID NO: 714221 - protein, 13 aa, Homo sapiens
  CDR3 for alpha chain variable domain of TCR clone 357111 (TRAV12-2, TRAJ49)
CAVNLNTGNQFYF

SEQ ID NO: 714222 - protein, 13 aa, Homo sapiens
  CDR3 for beta chain variable domain of TCR clone 357111 (TRBV7-2, TRBJ2-7)
CASSSPSGSEQYF

SEQ ID NO: 714223 - protein, 17 aa, Homo sapiens
  CDR3 for alpha chain variable domain of TCR clone 357112 (TRAV26-1, TRAJ57)
CIVRPRFTQGGSEKLGF

SEQ ID NO: 714224 - protein, 16 aa, Homo sapiens
  CDR3 for beta chain variable domain of TCR clone 357112 (TRBV13, TRBJ2-2)
CASSEVFGANTGELFF

SEQ ID NO: 714225 - protein, 14 aa, Homo sapiens
  CDR3 for alpha chain variable domain of TCR clone 357113 (TRAV12-1, TRAJ9)
CVVNRGTGGFKTIF

SEQ ID NO: 714226 - protein, 14 aa, Homo sapiens
  CDR3 for beta chain variable domain of TCR clone 357113 (TRBV12-5, TRBJ2-5)
CASGSRTHQETQYF

SEQ ID NO: 714227 - protein, 13 aa, Homo sapiens
  CDR3 for alpha chain variable domain of TCR clone 357114 (TRAV27, TRAJ49)
CAPRPYTVNQVYF

SEQ ID NO: 714228 - protein, 16 aa, Homo sapiens
  CDR3 for beta chain variable domain of TCR clone 357114 (TRBV4-1, TRBJ1-2)
CASSQDAGQVLYGYTF

SEQ ID NO: 714229 - protein, 10 aa, Homo sapiens
  CDR3 for alpha chain variable domain of TCR clone 357115 (TRAV21, TRAJ43)
CAVSANDMRF

SEQ ID NO: 714230 - protein, 12 aa, Homo sapiens
  CDR3 for beta chain variable domain of TCR clone 357115 (TRBV11-2, TRBJ2-5)
CASSLDTQTQYF

SEQ ID NO: 714231 - protein, 14 aa, Homo sapiens
  CDR3 for alpha chain variable domain of TCR clone 357116 (TRAV38-1, TRAJ40)
CALRPTSGTYKYIF

SEQ ID NO: 714232 - protein, 14 aa, Homo sapiens
  CDR3 for beta chain variable domain of TCR clone 357116 (TRBV5-4, TRBJ1-1)
CASSLDSRRDEALF

SEQ ID NO: 714233 - protein, 13 aa, Homo sapiens
  CDR3 for alpha chain variable domain of TCR clone 357117 (TRAV8-3, TRAJ28)
CAVGAVGSYQLTF

SEQ ID NO: 714234 - protein, 15 aa, Homo sapiens
  CDR3 for beta chain variable domain of TCR clone 357117 (TRBV20-1, TRBJ2-1)
CSARGIGGTYNEQFF

SEQ ID NO: 714235 - protein, 16 aa, Homo sapiens
  CDR3 for alpha chain variable domain of TCR clone 357118 (TRAV20, TRAJ22)
CAVQASSSGSARQLTF

SEQ ID NO: 714236 - protein, 16 aa, Homo sapiens
  CDR3 for beta chain variable domain of TCR clone 357118 (TRBV20-1, TRBJ1-5)
FSASRGTGYSNQPQHF

SEQ ID NO: 714237 - protein, 13 aa, Homo sapiens
  CDR3 for alpha chain variable domain of TCR clone 357119 (TRAV30, TRAJ34)
CGTVGHNTNKLIF

SEQ ID NO: 714238 - protein, 16 aa, Homo sapiens
  CDR3 for beta chain variable domain of TCR clone 357119 (TRBV7-9, TRBJ1-2)
CASSLGFSSGEDGYTF

SEQ ID NO: 714239 - protein, 13 aa, Homo sapiens
  CDR3 for alpha chain variable domain of TCR clone 357120 (TRAV21, TRAJ27)
CAALPGNAGNSTF

SEQ ID NO: 714240 - protein, 13 aa, Homo sapiens
  CDR3 for beta chain variable domain of TCR clone 357120 (TRBV27, TRBJ1-1)
CASSLSIGAEAFF

SEQ ID NO: 714241 - protein, 16 aa, Homo sapiens
  CDR3 for alpha chain variable domain of TCR clone 357121 (TRAV10, TRAJ13)
CVVSARNSGGYQKVTF

SEQ ID NO: 714242 - protein, 14 aa, Homo sapiens
  CDR3 for beta chain variable domain of TCR clone 357121 (TRBV19, TRBJ2-1)
CASPTFVLSGEQFF

SEQ ID NO: 714243 - protein, 13 aa, Homo sapiens
  CDR3 for alpha chain variable domain of TCR clone 357122 (TRAV27, TRAJ29)
CAGAHSGNTPLVF

SEQ ID NO: 714244 - protein, 14 aa, Homo sapiens
  CDR3 for beta chain variable domain of TCR clone 357122 (TRBV11-2, TRBJ2-7)
CASSLGAGAYEQYF

SEQ ID NO: 714245 - protein, 15 aa, Homo sapiens
  CDR3 for alpha chain variable domain of TCR clone 357123 (TRAV35, TRAJ23)
CAGQRGYNQGGKLTF

SEQ ID NO: 714246 - protein, 16 aa, Homo sapiens
  CDR3 for beta chain variable domain of TCR clone 357123 (TRBV27, TRBJ2-1)
CASSSRLAGNYNEQFF

SEQ ID NO: 714247 - protein, 14 aa, Homo sapiens
  CDR3 for alpha chain variable domain of TCR clone 357124 (TRAV12-2, TRAJ48)
CAVNAFFGNEKLTF

SEQ ID NO: 714248 - protein, 13 aa, Homo sapiens
  CDR3 for beta chain variable domain of TCR clone 357124 (TRBV28, TRBJ2-7)
CAGAQQGLEEQYF

SEQ ID NO: 714249 - protein, 12 aa, Homo sapiens
  CDR3 for alpha chain variable domain of TCR clone 357125 (TRAV27, TRAJ9)
CAGESGGFKPIF

SEQ ID NO: 714250 - protein, 18 aa, Homo sapiens
  CDR3 for beta chain variable domain of TCR clone 357125 (TRBV10-2, TRBJ2-2)
CISAPAVHRQADAGELFF

SEQ ID NO: 714251 - protein, 13 aa, Homo sapiens
  CDR3 for alpha chain variable domain of TCR clone 357126 (TRAV2, TRAJ40)
CAVVTSGTYKYIF

SEQ ID NO: 714252 - protein, 12 aa, Homo sapiens
  CDR3 for beta chain variable domain of TCR clone 357126 (TRBV7-9, TRBJ2-7)
CASSIKREEQYC

SEQ ID NO: 714253 - protein, 16 aa, Homo sapiens
  CDR3 for alpha chain variable domain of TCR clone 357127 (TRAV12-3, TRAJ53)
CAMSPGSGGSNYKLTF

SEQ ID NO: 714254 - protein, 15 aa, Homo sapiens
  CDR3 for beta chain variable domain of TCR clone 357127 (TRBV7-8, TRBJ2-1)
CASSPSGTIYNEQFF

SEQ ID NO: 714255 - protein, 12 aa, Homo sapiens
  CDR3 for alpha chain variable domain of TCR clone 357128 (TRAV10, TRAJ43)
CVVVRVGTDMRF

SEQ ID NO: 714256 - protein, 15 aa, Homo sapiens
  CDR3 for beta chain variable domain of TCR clone 357128 (TRBV2, TRBJ2-7)
CASSEGLARSYEQYF

SEQ ID NO: 714257 - protein, 14 aa, Homo sapiens
  CDR3 for alpha chain variable domain of TCR clone 357129 (TRAV1-2, TRAJ8)
CAVREYTGFQKLVF

SEQ ID NO: 714258 - protein, 15 aa, Homo sapiens
  CDR3 for beta chain variable domain of TCR clone 357129 (TRBV20-1, TRBJ2-7)
CSARDRVSGVDEQYF

SEQ ID NO: 714259 - protein, 15 aa, Homo sapiens
  CDR3 for alpha chain variable domain of TCR clone 357130 (TRAV4, TRAJ39)
CLVGPNNNAGNMLTF

SEQ ID NO: 714260 - protein, 11 aa, Homo sapiens
  CDR3 for beta chain variable domain of TCR clone 357130 (TRBV7-9, TRBJ2-3)
CASSPTDTQYF

SEQ ID NO: 714261 - protein, 10 aa, Homo sapiens
  CDR3 for alpha chain variable domain of TCR clone 357131 (TRAV21, TRAJ31)
CAVDNARLMF

SEQ ID NO: 714262 - protein, 13 aa, Homo sapiens
  CDR3 for beta chain variable domain of TCR clone 357131 (TRBV4-1, TRBJ1-1)
CASSRKMNIEAFF

SEQ ID NO: 714263 - protein, 14 aa, Homo sapiens
  CDR3 for alpha chain variable domain of TCR clone 357132 (TRAV27, TRAJ22)
CAGVSVLGKRQLTF

SEQ ID NO: 714264 - protein, 13 aa, Homo sapiens
  CDR3 for beta chain variable domain of TCR clone 357132 (TRBV19, TRBJ1-1)
CASSPSNGGEAFF

SEQ ID NO: 714265 - protein, 14 aa, Homo sapiens
  CDR3 for alpha chain variable domain of TCR clone 357133 (TRAV26-1, TRAJ38)
CIADNAGNNRKLVW

SEQ ID NO: 714266 - protein, 15 aa, Homo sapiens
  CDR3 for beta chain variable domain of TCR clone 357133 (TRBV27, TRBJ2-1)
CASSNGGGSSNEQFF

SEQ ID NO: 714267 - protein, 15 aa, Homo sapiens
  CDR3 for alpha chain variable domain of TCR clone 357134 (TRAV12-3, TRAJ47)
CAMSALVEYGNKLVF

SEQ ID NO: 714268 - protein, 15 aa, Homo sapiens
  CDR3 for beta chain variable domain of TCR clone 357134 (TRBV7-3, TRBJ2-2)
CASSETGQGTGELFF

SEQ ID NO: 714269 - protein, 13 aa, Homo sapiens
  CDR3 for alpha chain variable domain of TCR clone 357135 (TRAV8-3, TRAJ43)
CAVGPDNNNDIRF

SEQ ID NO: 714270 - protein, 14 aa, Homo sapiens
  CDR3 for beta chain variable domain of TCR clone 357135 (TRBV20-1, TRBJ1-3)
CSASPTGAGNTIYF

SEQ ID NO: 714271 - protein, 14 aa, Homo sapiens
  CDR3 for alpha chain variable domain of TCR clone 357136 (TRAV12-2, TRAJ13)
CAVKKTGGYQKVTF

SEQ ID NO: 714272 - protein, 16 aa, Homo sapiens
  CDR3 for beta chain variable domain of TCR clone 357136 (TRBV5-5, TRBJ2-7)
CASSLGQGPTSSTSGR

SEQ ID NO: 714273 - protein, 12 aa, Homo sapiens
  CDR3 for alpha chain variable domain of TCR clone 357137 (TRAV29/DV5, TRAJ41)
CAAISSGYALNF

SEQ ID NO: 714274 - protein, 14 aa, Homo sapiens
  CDR3 for beta chain variable domain of TCR clone 357137 (TRBV12-5, TRBJ2-5)
CASGSRTHQETQYF

SEQ ID NO: 714275 - protein, 18 aa, Homo sapiens
  CDR3 for alpha chain variable domain of TCR clone 357138 (TRAV21, TRAJ52)
CAVRPSPAGGTSFGKLTF

SEQ ID NO: 714276 - protein, 12 aa, Homo sapiens
  CDR3 for beta chain variable domain of TCR clone 357138 (TRBV11-2, TRBJ2-2)
CASSLGGGELFF

SEQ ID NO: 714277 - protein, 15 aa, Homo sapiens
  CDR3 for alpha chain variable domain of TCR clone 357139 (TRAV13-2, TRAJ23)
CAERGFYNQGGKLIF

SEQ ID NO: 714278 - protein, 12 aa, Homo sapiens
  CDR3 for beta chain variable domain of TCR clone 357139 (TRBV11-2, TRBJ2-1)
CASSPGNNEQFF

SEQ ID NO: 714279 - protein, 16 aa, Homo sapiens
  CDR3 for alpha chain variable domain of TCR clone 357140 (TRAV12-1, TRAJ4)
CLVNPGISGGYNTLIF

SEQ ID NO: 714280 - protein, 14 aa, Homo sapiens
  CDR3 for beta chain variable domain of TCR clone 357140 (TRBV5-7, TRBJ2-3)
CASRTSGGTDTQYF

SEQ ID NO: 714281 - protein, 12 aa, Homo sapiens
  CDR3 for alpha chain variable domain of TCR clone 357141 (TRAV21, TRAJ23)
CAVGPRGGKLIF

SEQ ID NO: 714282 - protein, 13 aa, Homo sapiens
  CDR3 for beta chain variable domain of TCR clone 357141 (TRBV20-1, TRBJ2-7)
CSARTGAGYEQYF

SEQ ID NO: 714283 - protein, 14 aa, Homo sapiens
  CDR3 for alpha chain variable domain of TCR clone 357142 (TRAV8-4, TRAJ37)
CAVSEPSNTGKQIF

SEQ ID NO: 714284 - protein, 14 aa, Homo sapiens
  CDR3 for beta chain variable domain of TCR clone 357142 (TRBV28, TRBJ2-1)
CAIHRTGARTEQFF

SEQ ID NO: 714285 - protein, 17 aa, Homo sapiens
  CDR3 for alpha chain variable domain of TCR clone 357143 (TRAV3, TRAJ6)
CAVRDGPRAGGSYIPTF

SEQ ID NO: 714286 - protein, 16 aa, Homo sapiens
  CDR3 for beta chain variable domain of TCR clone 357143 (TRBV4-2, TRBJ2-3)
CASSQELAGGTDTQYF

SEQ ID NO: 714287 - protein, 16 aa, Homo sapiens
  CDR3 for alpha chain variable domain of TCR clone 357144 (TRAV30, TRAJ24)
CGTEIVDADSWGKFQF

SEQ ID NO: 714288 - protein, 16 aa, Homo sapiens
  CDR3 for beta chain variable domain of TCR clone 357144 (TRBV11-2, TRBJ2-1)
CASSPRLAGVYNEQFF

SEQ ID NO: 714289 - protein, 17 aa, Homo sapiens
  CDR3 for alpha chain variable domain of TCR clone 357145 (TRAV26-1, TRAJ37)
CIVRVITVSSNTGKLIF

SEQ ID NO: 714290 - protein, 15 aa, Homo sapiens
  CDR3 for beta chain variable domain of TCR clone 357145 (TRBV2, TRBJ2-3)
CASSADRGSTDTQYF

SEQ ID NO: 714291 - protein, 18 aa, Homo sapiens
  CDR3 for alpha chain variable domain of TCR clone 357146 (TRAV12-3, TRAJ52)
CAMSLTNAGGTSYGKLTF

SEQ ID NO: 714292 - protein, 17 aa, Homo sapiens
  CDR3 for beta chain variable domain of TCR clone 357146 (TRBV7-3, TRBJ2-3)
WASSLMKRMRGADTQYF

SEQ ID NO: 714293 - protein, 23 aa, Homo sapiens
  CDR3 for alpha chain variable domain of TCR clone 357147 (TRAV1-1, TRAJ4)
LLQELQMTDSASYFCALYNKLIF

SEQ ID NO: 714294 - protein, 15 aa, Homo sapiens
  CDR3 for beta chain variable domain of TCR clone 357147 (TRBV5-1, TRBJ2-1)
CASSPPRAPYNEQFF

SEQ ID NO: 714295 - protein, 14 aa, Homo sapiens
  CDR3 for alpha chain variable domain of TCR clone 357148 (TRAV2, TRAJ9)
CAVEDRSGGFKTIF

SEQ ID NO: 714296 - protein, 12 aa, Homo sapiens
  CDR3 for beta chain variable domain of TCR clone 357148 (TRBV2, TRBJ1-5)
CASARAGQPQHF

SEQ ID NO: 714297 - protein, 13 aa, Homo sapiens
  CDR3 for alpha chain variable domain of TCR clone 357149 (TRAV17, TRAJ9)
CATDYTGGFKTIF

SEQ ID NO: 714298 - protein, 16 aa, Homo sapiens
  CDR3 for beta chain variable domain of TCR clone 357149 (TRBV7-7, TRBJ2-1)
CASSLASGTSYNEQFF

SEQ ID NO: 714299 - protein, 14 aa, Homo sapiens
  CDR3 for alpha chain variable domain of TCR clone 357150 (TRAV13-1, TRAJ6)
CVASITGGSYIPTF

SEQ ID NO: 714300 - protein, 12 aa, Homo sapiens
  CDR3 for beta chain variable domain of TCR clone 357150 (TRBV14, TRBJ1-1)
CSSQEAGTEAFF

SEQ ID NO: 714301 - protein, 15 aa, Homo sapiens
  CDR3 for alpha chain variable domain of TCR clone 357151 (TRAV26-1, TRAJ22)
CIVRVSFWFCKATDL

SEQ ID NO: 714302 - protein, 10 aa, Homo sapiens
  CDR3 for beta chain variable domain of TCR clone 357151 (TRBV7-9, TRBJ1-2)
CASSLSRTMA

SEQ ID NO: 714303 - protein, 16 aa, Homo sapiens
  CDR3 for alpha chain variable domain of TCR clone 357152 (TRAV12-3, TRAJ53)
CAMSPGSGGCNYKLTF

SEQ ID NO: 714304 - protein, 17 aa, Homo sapiens
  CDR3 for beta chain variable domain of TCR clone 357152 (TRBV28, TRBJ2-5)
CASSTPEGDALQETQYF

SEQ ID NO: 714305 - protein, 14 aa, Homo sapiens
  CDR3 for alpha chain variable domain of TCR clone 357153 (TRAV23/DV6, TRAJ37)
CAASTSTNTGKLIF

SEQ ID NO: 714306 - protein, 12 aa, Homo sapiens
  CDR3 for beta chain variable domain of TCR clone 357153 (TRBV27, TRBJ2-2)
CASKLFTGELFF

SEQ ID NO: 714307 - protein, 15 aa, Homo sapiens
  CDR3 for alpha chain variable domain of TCR clone 357154 (TRAV12-1, TRAJ45)
CVVLSGGGGADGLTF

SEQ ID NO: 714308 - protein, 12 aa, Homo sapiens
  CDR3 for beta chain variable domain of TCR clone 357154 (TRBV11-2, TRBJ2-4)
CASSSASGSEYF

SEQ ID NO: 714309 - protein, 13 aa, Homo sapiens
  CDR3 for alpha chain variable domain of TCR clone 357155 (TRAV1-2, TRAJ9)
CAALNTGGFKTIF

SEQ ID NO: 714310 - protein, 11 aa, Homo sapiens
  CDR3 for beta chain variable domain of TCR clone 357155 (TRBV29-1, TRBJ2-5)
CSEYRTGTQYF

SEQ ID NO: 714311 - protein, 16 aa, Homo sapiens
  CDR3 for alpha chain variable domain of TCR clone 357156 (TRAV12-3, TRAJ53)
CAMSPGSGGSNYKLTF

SEQ ID NO: 714312 - protein, 14 aa, Homo sapiens
  CDR3 for beta chain variable domain of TCR clone 357156 (TRBV28, TRBJ1-1)
CASSSEQGYAEAFF

SEQ ID NO: 714313 - protein, 13 aa, Homo sapiens
  CDR3 for alpha chain variable domain of TCR clone 357157 (TRAV22, TRAJ29)
CAVGGSGNTPLVF

SEQ ID NO: 714314 - protein, 14 aa, Homo sapiens
  CDR3 for beta chain variable domain of TCR clone 357157 (TRBV7-3, TRBJ1-1)
CASSLKGGNTEAFF

SEQ ID NO: 714315 - protein, 16 aa, Homo sapiens
  CDR3 for alpha chain variable domain of TCR clone 357158 (TRAV30, TRAJ44)
CGTEDKRTGTASKLTS

SEQ ID NO: 714316 - protein, 16 aa, Homo sapiens
  CDR3 for beta chain variable domain of TCR clone 357158 (TRBV10-2, TRBJ2-7)
CASSESPGSSGFEQYF

SEQ ID NO: 714317 - protein, 13 aa, Homo sapiens
  CDR3 for alpha chain variable domain of TCR clone 357159 (TRAV13-1, TRAJ21)
CAASIYNFNKFCF

SEQ ID NO: 714318 - protein, 13 aa, Homo sapiens
  CDR3 for beta chain variable domain of TCR clone 357159 (TRBV20-1, TRBJ2-5)
CSAREAFQETQYF

SEQ ID NO: 714319 - protein, 12 aa, Homo sapiens
  CDR3 for alpha chain variable domain of TCR clone 357160 (TRAV13-1, TRAJ43)
CVASIGDNDMRF

SEQ ID NO: 714320 - protein, 17 aa, Homo sapiens
  CDR3 for beta chain variable domain of TCR clone 357160 (TRBV11-3, TRBJ2-3)
CASSPGSSGGRTDTQYF

SEQ ID NO: 714321 - protein, 11 aa, Homo sapiens
  CDR3 for alpha chain variable domain of TCR clone 357161 (TRAV21, TRAJ34)
CAHYNTDKLIF

SEQ ID NO: 714322 - protein, 15 aa, Homo sapiens
  CDR3 for beta chain variable domain of TCR clone 357161 (TRBV11-2, TRBJ2-2)
CASSSDRVNAGELFF

SEQ ID NO: 714323 - protein, 14 aa, Homo sapiens
  CDR3 for alpha chain variable domain of TCR clone 357162 (TRAV13-1, TRAJ10)
CAAKEPGGGNKLTF

SEQ ID NO: 714324 - protein, 14 aa, Homo sapiens
  CDR3 for beta chain variable domain of TCR clone 357162 (TRBV6-6, TRBJ2-7)
YASSDSGAGYEQYF

SEQ ID NO: 714325 - protein, 16 aa, Homo sapiens
  CDR3 for alpha chain variable domain of TCR clone 357163 (TRAV26-1, TRAJ53)
CIVRVAMGGSNYKLTF

SEQ ID NO: 714326 - protein, 15 aa, Homo sapiens
  CDR3 for beta chain variable domain of TCR clone 357163 (TRBV7-9, TRBJ1-1)
CASSLLEQGGTEAFF

SEQ ID NO: 714327 - protein, 16 aa, Homo sapiens
  CDR3 for alpha chain variable domain of TCR clone 357164 (TRAV8-3, TRAJ13)
CAVGAYPSGGYQKVTF

SEQ ID NO: 714328 - protein, 19 aa, Homo sapiens
  CDR3 for beta chain variable domain of TCR clone 357164 (TRBV2, TRBJ2-7)
CASSDDETSGRANDYEQYF

SEQ ID NO: 714329 - protein, 16 aa, Homo sapiens
  CDR3 for alpha chain variable domain of TCR clone 357165 (TRAV16, TRAJ42)
CALSGLLGGSQGDLIF

SEQ ID NO: 714330 - protein, 15 aa, Homo sapiens
  CDR3 for beta chain variable domain of TCR clone 357165 (TRBV5-1, TRBJ2-1)
CASSPGGLAGNEQFF

SEQ ID NO: 714331 - protein, 17 aa, Homo sapiens
  CDR3 for alpha chain variable domain of TCR clone 357166 (TRAV12-3, TRAJ6)
CAMRARGGAGGSYIPTF

SEQ ID NO: 714332 - protein, 12 aa, Homo sapiens
  CDR3 for beta chain variable domain of TCR clone 357166 (TRBV12-4, TRBJ2-3)
CASSPLPDTQYF

SEQ ID NO: 714333 - protein, 15 aa, Homo sapiens
  CDR3 for alpha chain variable domain of TCR clone 357167 (TRAV23/DV6, TRAJ37)
CAAGEGSSNTGKLIF

SEQ ID NO: 714334 - protein, 17 aa, Homo sapiens
  CDR3 for beta chain variable domain of TCR clone 357167 (TRBV20-1, TRBJ2-7)
CSVTRAGGVAGVEEQYF

SEQ ID NO: 714335 - protein, 16 aa, Homo sapiens
  CDR3 for alpha chain variable domain of TCR clone 357168 (TRAV30, TRAJ24)
CGTEIVDADSWGKFQF

SEQ ID NO: 714336 - protein, 15 aa, Homo sapiens
  CDR3 for beta chain variable domain of TCR clone 357168 (TRBV7-9, TRBJ1-4)
CASSARTGCNEKLFF

SEQ ID NO: 714337 - protein, 14 aa, Homo sapiens
  CDR3 for alpha chain variable domain of TCR clone 357169 (TRAV12-2, TRAJ13)
CAVKKTGGYQKVTF

SEQ ID NO: 714338 - protein, 15 aa, Homo sapiens
  CDR3 for beta chain variable domain of TCR clone 357169 (TRBV20-1, TRBJ2-1)
CSARGIGGTYNQQFF

SEQ ID NO: 714339 - protein, 14 aa, Homo sapiens
  CDR3 for alpha chain variable domain of TCR clone 357170 (TRAV9-2, TRAJ39)
CALYIYNAGNMLTF

SEQ ID NO: 714340 - protein, 13 aa, Homo sapiens
  CDR3 for beta chain variable domain of TCR clone 357170 (TRBV7-2, TRBJ2-7)
CASSSPSGSEQYF

SEQ ID NO: 714341 - protein, 10 aa, Homo sapiens
  CDR3 for alpha chain variable domain of TCR clone 357171 (TRAV13-1, TRAJ30)
CAARDDKIIF

SEQ ID NO: 714342 - protein, 17 aa, Homo sapiens
  CDR3 for beta chain variable domain of TCR clone 357171 (TRBV11-2, TRBJ2-1)
CASSLYPPGVEYNEQFF

SEQ ID NO: 714343 - protein, 17 aa, Homo sapiens
  CDR3 for alpha chain variable domain of TCR clone 357172 (TRAV17, TRAJ52)
CATERPSGGTSYGKLTF

SEQ ID NO: 714344 - protein, 15 aa, Homo sapiens
  CDR3 for beta chain variable domain of TCR clone 357172 (TRBV2, TRBJ2-7)
CASSEGLARSYEQYF

SEQ ID NO: 714345 - protein, 14 aa, Homo sapiens
  CDR3 for alpha chain variable domain of TCR clone 357173 (TRAV12-2, TRAJ13)
CAVKKTGGYHKVTF

SEQ ID NO: 714346 - protein, 13 aa, Homo sapiens
  CDR3 for beta chain variable domain of TCR clone 357173 (TRBV20-1, TRBJ1-1)
CSARLGQGTEAFF

SEQ ID NO: 714347 - protein, 12 aa, Homo sapiens
  CDR3 for alpha chain variable domain of TCR clone 357174 (TRAV12-3, TRAJ17)
CAMTLTGNTLSF

SEQ ID NO: 714348 - protein, 15 aa, Homo sapiens
  CDR3 for beta chain variable domain of TCR clone 357174 (TRBV20-1, TRBJ2-7)
CSARDRVSGMDEQYF

SEQ ID NO: 714349 - protein, 16 aa, Homo sapiens
  CDR3 for alpha chain variable domain of TCR clone 357175 (TRAV16, TRAJ52)
CALSAAGGTSYGKLTF

SEQ ID NO: 714350 - protein, 12 aa, Homo sapiens
  CDR3 for beta chain variable domain of TCR clone 357175 (TRBV12-4, TRBJ1-3)
CASSFSGSTMYF

SEQ ID NO: 714351 - protein, 16 aa, Homo sapiens
  CDR3 for alpha chain variable domain of TCR clone 357176 (TRAV4, TRAJ22)
CLVGDLYSGSARQLTF

SEQ ID NO: 714352 - protein, 16 aa, Homo sapiens
  CDR3 for beta chain variable domain of TCR clone 357176 (TRBV7-9, TRBJ2-1)
CASSDVAGGSYNSSSS

SEQ ID NO: 714353 - protein, 14 aa, Homo sapiens
  CDR3 for alpha chain variable domain of TCR clone 357177 (TRAV2, TRAJ9)
CAVEDRSGGFKTIF

SEQ ID NO: 714354 - protein, 18 aa, Homo sapiens
  CDR3 for beta chain variable domain of TCR clone 357177 (TRBV20-1, TRBJ2-3)
CSASGLAGGPGTTDTQYF

SEQ ID NO: 714355 - protein, 14 aa, Homo sapiens
  CDR3 for alpha chain variable domain of TCR clone 357178 (TRAV38-1, TRAJ40)
CALRPTSGTYKYIF

SEQ ID NO: 714356 - protein, 13 aa, Homo sapiens
  CDR3 for beta chain variable domain of TCR clone 357178 (TRBV25-1, TRBJ1-1)
CASTHLGGNTEAF

SEQ ID NO: 714357 - protein, 14 aa, Homo sapiens
  CDR3 for alpha chain variable domain of TCR clone 357179 (TRAV17, TRAJ42)
CATDAPGSQGNLIF

SEQ ID NO: 714358 - protein, 13 aa, Homo sapiens
  CDR3 for beta chain variable domain of TCR clone 357179 (TRBV7-7, TRBJ1-5)
CASSPGKNHPQHF

SEQ ID NO: 714359 - protein, 14 aa, Homo sapiens
  CDR3 for alpha chain variable domain of TCR clone 357180 (TRAV1-2, TRAJ8)
CAVREDTGFQRLVF

SEQ ID NO: 714360 - protein, 15 aa, Homo sapiens
  CDR3 for beta chain variable domain of TCR clone 357180 (TRBV6-3, TRBJ2-7)
CDSSSPGTVFYEQYF

SEQ ID NO: 714361 - protein, 14 aa, Homo sapiens
  CDR3 for alpha chain variable domain of TCR clone 357181 (TRAV8-3, TRAJ17)
CSVGVQTAGNKLTF

SEQ ID NO: 714362 - protein, 11 aa, Homo sapiens
  CDR3 for beta chain variable domain of TCR clone 357181 (TRBV29-1, TRBJ1-4)
CSVSSGEKLFF

SEQ ID NO: 714363 - protein, 11 aa, Homo sapiens
  CDR3 for alpha chain variable domain of TCR clone 357182 (TRAV3, TRAJ21)
CAVGNFNKFYF

SEQ ID NO: 714364 - protein, 13 aa, Homo sapiens
  CDR3 for beta chain variable domain of TCR clone 357182 (TRBV19, TRBJ1-2)
CASSVHGQDGYTF

SEQ ID NO: 714365 - protein, 11 aa, Homo sapiens
  CDR3 for alpha chain variable domain of TCR clone 357183 (TRAV2, TRAJ13)
CASAGYQKVTF

SEQ ID NO: 714366 - protein, 18 aa, Homo sapiens
  CDR3 for beta chain variable domain of TCR clone 357183 (TRBV19, TRBJ2-6)
CASIGPTSGGSGANVLTF

SEQ ID NO: 714367 - protein, 14 aa, Homo sapiens
  CDR3 for alpha chain variable domain of TCR clone 357184 (TRAV2, TRAJ37)
CDVDFTSNTGKLIF

SEQ ID NO: 714368 - protein, 12 aa, Homo sapiens
  CDR3 for beta chain variable domain of TCR clone 357184 (TRBV20-1, TRBJ1-1)
QCSTWAGTEAFF

SEQ ID NO: 714369 - protein, 11 aa, Homo sapiens
  CDR3 for alpha chain variable domain of TCR clone 357185 (TRAV1-2, TRAJ20)
CAVSNDYKLSF

SEQ ID NO: 714370 - protein, 14 aa, Homo sapiens
  CDR3 for beta chain variable domain of TCR clone 357185 (TRBV7-8, TRBJ2-3)
CASSLEAGTDTQYF

SEQ ID NO: 714371 - protein, 14 aa, Homo sapiens
  CDR3 for alpha chain variable domain of TCR clone 357186 (TRAV12-2, TRAJ36)
CAEKISTGANNLFF

SEQ ID NO: 714372 - protein, 14 aa, Homo sapiens
  CDR3 for beta chain variable domain of TCR clone 357186 (TRBV25-1, TRBJ1-2)
CASSDTTGVVGYTF

SEQ ID NO: 714373 - protein, 14 aa, Homo sapiens
  CDR3 for alpha chain variable domain of TCR clone 357187 (TRAV9-2, TRAJ39)
CALYIYNAGNMLTF

SEQ ID NO: 714374 - protein, 15 aa, Homo sapiens
  CDR3 for beta chain variable domain of TCR clone 357187 (TRBV11-2, TRBJ2-7)
CASSLMVGGSYEQYF

SEQ ID NO: 714375 - protein, 12 aa, Homo sapiens
  CDR3 for alpha chain variable domain of TCR clone 357188 (TRAV12-3, TRAJ40)
CAMSSGTYKYIF

SEQ ID NO: 714376 - protein, 14 aa, Homo sapiens
  CDR3 for beta chain variable domain of TCR clone 357188 (TRBV7-3, TRBJ2-2)
CQQRDGTGNRELFF

SEQ ID NO: 714377 - protein, 12 aa, Homo sapiens
  CDR3 for alpha chain variable domain of TCR clone 357189 (TRAV12-1, TRAJ40)
CVVSSGTYKYIF

SEQ ID NO: 714378 - protein, 13 aa, Homo sapiens
  CDR3 for beta chain variable domain of TCR clone 357189 (TRBV11-2, TRBJ1-3)
CASSLEPVNTMYF

SEQ ID NO: 714379 - protein, 14 aa, Homo sapiens
  CDR3 for alpha chain variable domain of TCR clone 357190 (TRAV27, TRAJ22)
CAGVVPGSARQLTF

SEQ ID NO: 714380 - protein, 14 aa, Homo sapiens
  CDR3 for beta chain variable domain of TCR clone 357190 (TRBV24-1, TRBJ1-1)
CATSIPRGDTEAFF

SEQ ID NO: 714381 - protein, 15 aa, Homo sapiens
  CDR3 for alpha chain variable domain of TCR clone 357191 (TRAV20, TRAJ41)
CAVQANSNSGYALNS

SEQ ID NO: 714382 - protein, 18 aa, Homo sapiens
  CDR3 for beta chain variable domain of TCR clone 357191 (TRBV7-9, TRBJ2-7)
CASSLTTSGSRTWYEQYF

SEQ ID NO: 714383 - protein, 13 aa, Homo sapiens
  CDR3 for alpha chain variable domain of TCR clone 357192 (TRAV3, TRAJ21)
CAVREPDFNKFYL

SEQ ID NO: 714384 - protein, 15 aa, Homo sapiens
  CDR3 for beta chain variable domain of TCR clone 357192 (TRBV2, TRBJ2-1)
CASSELAGGYNEQFF

SEQ ID NO: 714385 - protein, 14 aa, Homo sapiens
  CDR3 for alpha chain variable domain of TCR clone 357193 (TRAV26-1, TRAJ38)
CIADNAGNNRKLIW

SEQ ID NO: 714386 - protein, 16 aa, Homo sapiens
  CDR3 for beta chain variable domain of TCR clone 357193 (TRBV20-1, TRBJ2-4)
CSARAILAGQGDIQYF

SEQ ID NO: 714387 - protein, 15 aa, Homo sapiens
  CDR3 for alpha chain variable domain of TCR clone 357194 (TRAV25, TRAJ6)
CAGPPPSGGSYIPTF

SEQ ID NO: 714388 - protein, 14 aa, Homo sapiens
  CDR3 for beta chain variable domain of TCR clone 357194 (TRBV12-4, TRBJ1-1)
CASTWTGHDTEAFF

SEQ ID NO: 714389 - protein, 15 aa, Homo sapiens
  CDR3 for alpha chain variable domain of TCR clone 357195 (TRAV26-2, TRAJ13)
CILRDLSGGHQKVTS

SEQ ID NO: 714390 - protein, 14 aa, Homo sapiens
  CDR3 for beta chain variable domain of TCR clone 357195 (TRBV4-1, TRBJ2-3)
CASSQEGSTDTQYF

SEQ ID NO: 714391 - protein, 14 aa, Homo sapiens
  CDR3 for alpha chain variable domain of TCR clone 357196 (TRAV38-2/DV8, TRAJ49)
CAYRSAMAGNQFYF

SEQ ID NO: 714392 - protein, 17 aa, Homo sapiens
  CDR3 for beta chain variable domain of TCR clone 357196 (TRBV13, TRBJ2-3)
CASSLSRVAGGRNTQYF

SEQ ID NO: 714393 - protein, 10 aa, Homo sapiens
  CDR3 for alpha chain variable domain of TCR clone 357197 (TRAV26-1, TRAJ40)
CVAGTYKYIF

SEQ ID NO: 714394 - protein, 15 aa, Homo sapiens
  CDR3 for beta chain variable domain of TCR clone 357197 (TRBV19, TRBJ2-1)
CASSSPGVPLDEQCF

SEQ ID NO: 714395 - protein, 11 aa, Homo sapiens
  CDR3 for alpha chain variable domain of TCR clone 357198 (TRAV2, TRAJ13)
CASGGYQKVTF

SEQ ID NO: 714396 - protein, 16 aa, Homo sapiens
  CDR3 for beta chain variable domain of TCR clone 357198 (TRBV6-1, TRBJ2-5)
CGGGETLDRGAETQYF

SEQ ID NO: 714397 - protein, 15 aa, Homo sapiens
  CDR3 for alpha chain variable domain of TCR clone 357199 (TRAV16, TRAJ4)
CDLEDPSGGYNKLIF

SEQ ID NO: 714398 - protein, 13 aa, Homo sapiens
  CDR3 for beta chain variable domain of TCR clone 357199 (TRBV7-3, TRBJ2-7)
CASSQAGGYEQYF

SEQ ID NO: 714399 - protein, 14 aa, Homo sapiens
  CDR3 for alpha chain variable domain of TCR clone 357200 (TRAV35, TRAJ38)
CAGSNAGNNRKLIW

SEQ ID NO: 714400 - protein, 18 aa, Homo sapiens
  CDR3 for beta chain variable domain of TCR clone 357200 (TRBV25-1, TRBJ1-2)
CASSGLQNGQGLIFGYTF

SEQ ID NO: 714401 - protein, 14 aa, Homo sapiens
  CDR3 for alpha chain variable domain of TCR clone 357201 (TRAV8-4, TRAJ9)
WSVRINTGGFKTIF

SEQ ID NO: 714402 - protein, 15 aa, Homo sapiens
  CDR3 for beta chain variable domain of TCR clone 357201 (TRBV10-2, TRBJ2-6)
CASSEQGTGANVLTF

SEQ ID NO: 714403 - protein, 15 aa, Homo sapiens
  CDR3 for alpha chain variable domain of TCR clone 357202 (TRAV2, TRAJ15)
CAVEDRNQAGTARIF

SEQ ID NO: 714404 - protein, 13 aa, Homo sapiens
  CDR3 for beta chain variable domain of TCR clone 357202 (TRBV10-3, TRBJ2-7)
CASKLAVNYEQYF

SEQ ID NO: 714405 - protein, 14 aa, Homo sapiens
  CDR3 for alpha chain variable domain of TCR clone 357203 (TRAV1-2, TRAJ16)
CAVNRFSDGQKLLF

SEQ ID NO: 714406 - protein, 12 aa, Homo sapiens
  CDR3 for beta chain variable domain of TCR clone 357203 (TRBV12-4, TRBJ2-1)
CASSLQGSESSS

SEQ ID NO: 714407 - protein, 14 aa, Homo sapiens
  CDR3 for alpha chain variable domain of TCR clone 357204 (TRAV8-3, TRAJ10)
CAVGNAGGGNKLTF

SEQ ID NO: 714408 - protein, 14 aa, Homo sapiens
  CDR3 for beta chain variable domain of TCR clone 357204 (TRBV11-1, TRBJ1-1)
CASSLEHPNTEAFF

SEQ ID NO: 714409 - protein, 13 aa, Homo sapiens
  CDR3 for alpha chain variable domain of TCR clone 357205 (TRAV12-1, TRAJ21)
CVVTLYNFNKFYF

SEQ ID NO: 714410 - protein, 20 aa, Homo sapiens
  CDR3 for beta chain variable domain of TCR clone 357205 (TRBV7-8, TRBJ2-1)
CASSLAHRLAGVLSYNEQFF

SEQ ID NO: 714411 - protein, 13 aa, Homo sapiens
  CDR3 for alpha chain variable domain of TCR clone 357206 (TRAV8-6, TRAJ49)
CAVITNTGNQLYF

SEQ ID NO: 714412 - protein, 12 aa, Homo sapiens
  CDR3 for beta chain variable domain of TCR clone 357206 (TRBV12-4, TRBJ2-7)
CASSLGGYEQYF

SEQ ID NO: 714413 - protein, 13 aa, Homo sapiens
  CDR3 for alpha chain variable domain of TCR clone 357207 (TRAV8-3, TRAJ37)
CAVCSGNTGKLIF

SEQ ID NO: 714414 - protein, 11 aa, Homo sapiens
  CDR3 for beta chain variable domain of TCR clone 357207 (TRBV29-1, TRBJ1-1)
CSLQQNTEAFF

SEQ ID NO: 714415 - protein, 14 aa, Homo sapiens
  CDR3 for alpha chain variable domain of TCR clone 357208 (TRAV35, TRAJ22)
CAGLRPGSARRLTF

SEQ ID NO: 714416 - protein, 15 aa, Homo sapiens
  CDR3 for beta chain variable domain of TCR clone 357208 (TRBV12-4, TRBJ2-5)
CASSPPTGLQETQCF

SEQ ID NO: 714417 - protein, 13 aa, Homo sapiens
  CDR3 for alpha chain variable domain of TCR clone 357209 (TRAV20, TRAJ37)
CAGCSSSTGKRIF

SEQ ID NO: 714418 - protein, 11 aa, Homo sapiens
  CDR3 for beta chain variable domain of TCR clone 357209 (TRBV12-4, TRBJ2-3)
CASTATDTQYF

SEQ ID NO: 714419 - protein, 15 aa, Homo sapiens
  CDR3 for alpha chain variable domain of TCR clone 357210 (TRAV23/DV6, TRAJ37)
CAAGEGSSNTGKLLF

SEQ ID NO: 714420 - protein, 17 aa, Homo sapiens
  CDR3 for beta chain variable domain of TCR clone 357210 (TRBV20-1, TRBJ2-7)
CSATRAGGLAGVEEQYF

SEQ ID NO: 714421 - protein, 14 aa, Homo sapiens
  CDR3 for alpha chain variable domain of TCR clone 357211 (TRAV12-3, TRAJ35)
CAMSLIGFGNVVHC

SEQ ID NO: 714422 - protein, 12 aa, Homo sapiens
  CDR3 for beta chain variable domain of TCR clone 357211 (TRBV12-4, TRBJ1-1)
CASSLAGHEAFF

SEQ ID NO: 714423 - protein, 14 aa, Homo sapiens
  CDR3 for alpha chain variable domain of TCR clone 357212 (TRAV12-3, TRAJ10)
SHLPLTGGGNKLTF

SEQ ID NO: 714424 - protein, 14 aa, Homo sapiens
  CDR3 for beta chain variable domain of TCR clone 357212 (TRBV6-1, TRBJ1-3)
CASVQGGGGDTIYF

SEQ ID NO: 714425 - protein, 12 aa, Homo sapiens
  CDR3 for alpha chain variable domain of TCR clone 357213 (TRAV8-3, TRAJ26)
CAGDNYGQNFVF

SEQ ID NO: 714426 - protein, 15 aa, Homo sapiens
  CDR3 for beta chain variable domain of TCR clone 357213 (TRBV7-3, TRBJ2-2)
CASSETGQGTGELFF

SEQ ID NO: 714427 - protein, 15 aa, Homo sapiens
  CDR3 for alpha chain variable domain of TCR clone 357214 (TRAV20, TRAJ58)
CAVQDLETSGSRLTF

SEQ ID NO: 714428 - protein, 13 aa, Homo sapiens
  CDR3 for beta chain variable domain of TCR clone 357214 (TRBV20-1, TRBJ1-1)
CSARGRGNTEAFF

SEQ ID NO: 714429 - protein, 15 aa, Homo sapiens
  CDR3 for alpha chain variable domain of TCR clone 357215 (TRAV21, TRAJ18)
CAVRDRGSTLGRLYF

SEQ ID NO: 714430 - protein, 15 aa, Homo sapiens
  CDR3 for beta chain variable domain of TCR clone 357215 (TRBV11-2, TRBJ2-1)
CASSLAPRAHNEQSF

SEQ ID NO: 714431 - protein, 13 aa, Homo sapiens
  CDR3 for alpha chain variable domain of TCR clone 357216 (TRAV3, TRAJ21)
CAVREPDFNKFYF

SEQ ID NO: 714432 - protein, 18 aa, Homo sapiens
  CDR3 for beta chain variable domain of TCR clone 357216 (TRBV11-2, TRBJ2-3)
CASSLEGASRGAPNTQYF

SEQ ID NO: 714433 - protein, 12 aa, Homo sapiens
  CDR3 for alpha chain variable domain of TCR clone 357217 (TRAV3, TRAJ39)
CAVIEWSNMLTF

SEQ ID NO: 714434 - protein, 16 aa, Homo sapiens
  CDR3 for beta chain variable domain of TCR clone 357217 (TRBV27, TRBJ2-2)
CASRRLGDQRTGELFF

SEQ ID NO: 714435 - protein, 14 aa, Homo sapiens
  CDR3 for alpha chain variable domain of TCR clone 357218 (TRAV1-2, TRAJ16)
CAVNRFSDGQKLLF

SEQ ID NO: 714436 - protein, 13 aa, Homo sapiens
  CDR3 for beta chain variable domain of TCR clone 357218 (TRBV4-1, TRBJ2-1)
CASSQAGGHEQFF

SEQ ID NO: 714437 - protein, 10 aa, Homo sapiens
  CDR3 for alpha chain variable domain of TCR clone 357219 (TRAV2, TRAJ34)
CAVVNDKLIF

SEQ ID NO: 714438 - protein, 15 aa, Homo sapiens
  CDR3 for beta chain variable domain of TCR clone 357219 (TRBV6-1, TRBJ2-3)
CASSERGGITDTQYF

SEQ ID NO: 714439 - protein, 16 aa, Homo sapiens
  CDR3 for alpha chain variable domain of TCR clone 357220 (TRAV1-2, TRAJ6)
CAVRDQGTGGSYIPTF

SEQ ID NO: 714440 - protein, 13 aa, Homo sapiens
  CDR3 for beta chain variable domain of TCR clone 357220 (TRBV28, TRBJ2-7)
CASTPGLAGEQCF

SEQ ID NO: 714441 - protein, 16 aa, Homo sapiens
  CDR3 for alpha chain variable domain of TCR clone 357221 (TRAV12-1, TRAJ13)
CVVNLEVSGGYQKVTF

SEQ ID NO: 714442 - protein, 16 aa, Homo sapiens
  CDR3 for beta chain variable domain of TCR clone 357221 (TRBV18, TRBJ1-5)
CASSPRTGGGNQPQHF

SEQ ID NO: 714443 - protein, 15 aa, Homo sapiens
  CDR3 for alpha chain variable domain of TCR clone 357222 (TRAV17, TRAJ22)
CATAALLGTARQLTF

SEQ ID NO: 714444 - protein, 13 aa, Homo sapiens
  CDR3 for beta chain variable domain of TCR clone 357222 (TRBV29-1, TRBJ2-3)
CSVVPQGGDTQYF

SEQ ID NO: 714445 - protein, 14 aa, Homo sapiens
  CDR3 for alpha chain variable domain of TCR clone 357223 (TRAV12-1, TRAJ26)
CVVKGSNYGQNFVF

SEQ ID NO: 714446 - protein, 17 aa, Homo sapiens
  CDR3 for beta chain variable domain of TCR clone 357223 (TRBV11-2, TRBJ2-6)
CASSQRDIFSGANVLTV

SEQ ID NO: 714447 - protein, 16 aa, Homo sapiens
  CDR3 for alpha chain variable domain of TCR clone 357224 (TRAV13-1, TRAJ18)
CAASRMRGSTLGRLYF

SEQ ID NO: 714448 - protein, 19 aa, Homo sapiens
  CDR3 for beta chain variable domain of TCR clone 357224 (TRBV2, TRBJ2-2)
CASSQPGLAGGGNTGELFF

SEQ ID NO: 714449 - protein, 21 aa, Homo sapiens
  CDR3 for alpha chain variable domain of TCR clone 357225 (TRAV34, TRAJ44)
PAMQASTSVEQTTGTASKLTF

SEQ ID NO: 714450 - protein, 16 aa, Homo sapiens
  CDR3 for beta chain variable domain of TCR clone 357225 (TRBV5-1, TRBJ2-3)
CASSSIGAGSTDTQYF

SEQ ID NO: 714451 - protein, 13 aa, Homo sapiens
  CDR3 for alpha chain variable domain of TCR clone 357226 (TRAV1-1, TRAJ9)
CAAKNTGGLKTIF

SEQ ID NO: 714452 - protein, 14 aa, Homo sapiens
  CDR3 for beta chain variable domain of TCR clone 357226 (TRBV20-1, TRBJ2-1)
CSAQIGESANEQFF

SEQ ID NO: 714453 - protein, 15 aa, Homo sapiens
  CDR3 for alpha chain variable domain of TCR clone 357227 (TRAV29/DV5, TRAJ24)
CAASGATDSWGKFQF

SEQ ID NO: 714454 - protein, 15 aa, Homo sapiens
  CDR3 for beta chain variable domain of TCR clone 357227 (TRBV6-3, TRBJ2-7)
CASSSPGTVFYEQYF

SEQ ID NO: 714455 - protein, 12 aa, Homo sapiens
  CDR3 for alpha chain variable domain of TCR clone 357228 (TRAV16, TRAJ49)
CALNEGDNQFYF

SEQ ID NO: 714456 - protein, 14 aa, Homo sapiens
  CDR3 for beta chain variable domain of TCR clone 357228 (TRBV7-9, TRBJ2-1)
CASRPTGLRNEQFF

SEQ ID NO: 714457 - protein, 16 aa, Homo sapiens
  CDR3 for alpha chain variable domain of TCR clone 357229 (TRAV30, TRAJ24)
CGTEIVDADSWGKFKF

SEQ ID NO: 714458 - protein, 14 aa, Homo sapiens
  CDR3 for beta chain variable domain of TCR clone 357229 (TRBV12-5, TRBJ2-5)
CASDSRTHQETQYF

SEQ ID NO: 714459 - protein, 14 aa, Homo sapiens
  CDR3 for alpha chain variable domain of TCR clone 357230 (TRAV34, TRAJ44)
CGADGTGTASKLTF

SEQ ID NO: 714460 - protein, 14 aa, Homo sapiens
  CDR3 for beta chain variable domain of TCR clone 357230 (TRBV7-2, TRBJ2-1)
CASSPGLAGNEQFF

SEQ ID NO: 714461 - protein, 14 aa, Homo sapiens
  CDR3 for alpha chain variable domain of TCR clone 357231 (TRAV2, TRAJ9)
CAVEDRSGGFKTIF

SEQ ID NO: 714462 - protein, 13 aa, Homo sapiens
  CDR3 for beta chain variable domain of TCR clone 357231 (TRBV4-1, TRBJ1-1)
CASSRKMNTEAFF

SEQ ID NO: 714463 - protein, 15 aa, Homo sapiens
  CDR3 for alpha chain variable domain of TCR clone 357232 (TRAV12-3, TRAJ6)
CAMSATTGGSYIPTF

SEQ ID NO: 714464 - protein, 22 aa, Homo sapiens
  CDR3 for beta chain variable domain of TCR clone 357232 (TRBV20-1, TRBJ2-1)
CSARSPSGGPPTMSSSSGQGHG

SEQ ID NO: 714465 - protein, 13 aa, Homo sapiens
  CDR3 for alpha chain variable domain of TCR clone 357233 (TRAV8-3, TRAJ50)
CAVDQTSYDKVIF

SEQ ID NO: 714466 - protein, 15 aa, Homo sapiens
  CDR3 for beta chain variable domain of TCR clone 357233 (TRBV6-5, TRBJ1-5)
CASSYSWDSNQPQHF

SEQ ID NO: 714467 - protein, 11 aa, Homo sapiens
  CDR3 for alpha chain variable domain of TCR clone 357234 (TRAV26-1, TRAJ37)
CIVRVGRKLIF

SEQ ID NO: 714468 - protein, 15 aa, Homo sapiens
  CDR3 for beta chain variable domain of TCR clone 357234 (TRBV27, TRBJ2-7)
CASSPQREGQREQYF

SEQ ID NO: 714469 - protein, 15 aa, Homo sapiens
  CDR3 for alpha chain variable domain of TCR clone 357235 (TRAV21, TRAJ38)
CAVRQDAGNNRKLIW

SEQ ID NO: 714470 - protein, 16 aa, Homo sapiens
  CDR3 for beta chain variable domain of TCR clone 357235 (TRBV4-2, TRBJ1-1)
CDSRPRDGGGDTEAFF

SEQ ID NO: 714471 - protein, 14 aa, Homo sapiens
  CDR3 for alpha chain variable domain of TCR clone 357236 (TRAV26-1, TRAJ21)
CIVRPPYNFNKFYF

SEQ ID NO: 714472 - protein, 14 aa, Homo sapiens
  CDR3 for beta chain variable domain of TCR clone 357236 (TRBV11-3, TRBJ2-1)
CASSATPSGSIQFF

SEQ ID NO: 714473 - protein, 12 aa, Homo sapiens
  CDR3 for alpha chain variable domain of TCR clone 357237 (TRAV1-1, TRAJ20)
WAVREDDYKLSF

SEQ ID NO: 714474 - protein, 18 aa, Homo sapiens
  CDR3 for beta chain variable domain of TCR clone 357237 (TRBV20-1, TRBJ2-3)
CSASGLAGGPGTTDTQYF

SEQ ID NO: 714475 - protein, 14 aa, Homo sapiens
  CDR3 for alpha chain variable domain of TCR clone 357238 (TRAV1-2, TRAJ16)
CAVNRFSDSQKLLF

SEQ ID NO: 714476 - protein, 19 aa, Homo sapiens
  CDR3 for beta chain variable domain of TCR clone 357238 (TRBV25-1, TRBJ2-2)
CAILVYRVDRGRKTGELFF

SEQ ID NO: 714477 - protein, 14 aa, Homo sapiens
  CDR3 for alpha chain variable domain of TCR clone 357239 (TRAV1-2, TRAJ8)
CAVREDTGFQKLVF

SEQ ID NO: 714478 - protein, 13 aa, Homo sapiens
  CDR3 for beta chain variable domain of TCR clone 357239 (TRBV12-4, TRBJ1-1)
CASTPRMNTEAFF

SEQ ID NO: 714479 - protein, 15 aa, Homo sapiens
  CDR3 for alpha chain variable domain of TCR clone 357240 (TRAV13-1, TRAJ32)
CAASIYGGATNKLIF

SEQ ID NO: 714480 - protein, 14 aa, Homo sapiens
  CDR3 for beta chain variable domain of TCR clone 357240 (TRBV7-9, TRBJ2-1)
CASSVASGSNEQFF

SEQ ID NO: 714481 - protein, 11 aa, Homo sapiens
  CDR3 for alpha chain variable domain of TCR clone 357241 (TRAV12-3, TRAJ27)
CAMANAGKSTL

SEQ ID NO: 714482 - protein, 14 aa, Homo sapiens
  CDR3 for beta chain variable domain of TCR clone 357241 (TRBV4-1, TRBJ2-2)
CASSQAVNTGELFF

SEQ ID NO: 714483 - protein, 17 aa, Homo sapiens
  CDR3 for alpha chain variable domain of TCR clone 357242 (TRAV4, TRAJ18)
CLVGERSVGPTLGRLYF

SEQ ID NO: 714484 - protein, 11 aa, Homo sapiens
  CDR3 for beta chain variable domain of TCR clone 357242 (TRBV29-1, TRBJ2-5)
CSEDRTGTQYF

SEQ ID NO: 714485 - protein, 16 aa, Homo sapiens
  CDR3 for alpha chain variable domain of TCR clone 357243 (TRAV30, TRAJ24)
FGTEIVDADSWGKFQF

SEQ ID NO: 714486 - protein, 15 aa, Homo sapiens
  CDR3 for beta chain variable domain of TCR clone 357243 (TRBV20-1, TRBJ2-7)
CSARDRVSGMDEQYF

SEQ ID NO: 714487 - protein, 12 aa, Homo sapiens
  CDR3 for alpha chain variable domain of TCR clone 357244 (TRAV8-3, TRAJ20)
CAVDFNDYKLSF

SEQ ID NO: 714488 - protein, 14 aa, Homo sapiens
  CDR3 for beta chain variable domain of TCR clone 357244 (TRBV20-1, TRBJ1-5)
CSARDDRGNQPQHF

SEQ ID NO: 714489 - protein, 14 aa, Homo sapiens
  CDR3 for alpha chain variable domain of TCR clone 357245 (TRAV1-2, TRAJ16)
FAVNRFSDGQKLLF

SEQ ID NO: 714490 - protein, 13 aa, Homo sapiens
  CDR3 for beta chain variable domain of TCR clone 357245 (TRBV20-1, TRBJ1-1)
CSARVGGNTEAFF

SEQ ID NO: 714491 - protein, 14 aa, Homo sapiens
  CDR3 for alpha chain variable domain of TCR clone 357246 (TRAV17, TRAJ57)
CATDPQGGSEKLVF

SEQ ID NO: 714492 - protein, 15 aa, Homo sapiens
  CDR3 for beta chain variable domain of TCR clone 357246 (TRBV2, TRBJ2-1)
CATQARLVMIGEQFF

SEQ ID NO: 714493 - protein, 17 aa, Homo sapiens
  CDR3 for alpha chain variable domain of TCR clone 357247 (TRAV23/DV6, TRAJ57)
CAASSTLSQGGSEKLVF

SEQ ID NO: 714494 - protein, 15 aa, Homo sapiens
  CDR3 for beta chain variable domain of TCR clone 357247 (TRBV15, TRBJ1-6)
CATSGALIHPSTLGT

SEQ ID NO: 714495 - protein, 14 aa, Homo sapiens
  CDR3 for alpha chain variable domain of TCR clone 357248 (TRAV13-2, TRAJ17)
CAENSKAAGNTLTF

SEQ ID NO: 714496 - protein, 14 aa, Homo sapiens
  CDR3 for beta chain variable domain of TCR clone 357248 (TRBV19, TRBJ2-1)
CASPTFVLSGEQFF

SEQ ID NO: 714497 - protein, 10 aa, Homo sapiens
  CDR3 for alpha chain variable domain of TCR clone 357249 (TRAV20, TRAJ22)
CAAPERQLTF

SEQ ID NO: 714498 - protein, 14 aa, Homo sapiens
  CDR3 for beta chain variable domain of TCR clone 357249 (TRBV19, TRBJ2-1)
CASSMGSGATEQFF

SEQ ID NO: 714499 - protein, 16 aa, Homo sapiens
  CDR3 for alpha chain variable domain of TCR clone 357250 (TRAV3, TRAJ37)
CAVRVRGSGNTGKLIF

SEQ ID NO: 714500 - protein, 13 aa, Homo sapiens
  CDR3 for beta chain variable domain of TCR clone 357250 (TRBV9, TRBJ2-1)
CASSVGQGGEQFF

SEQ ID NO: 714501 - protein, 14 aa, Homo sapiens
  CDR3 for alpha chain variable domain of TCR clone 357251 (TRAV1-2, TRAJ8)
CAVREDTGFQKLVF

SEQ ID NO: 714502 - protein, 14 aa, Homo sapiens
  CDR3 for beta chain variable domain of TCR clone 357251 (TRBV20-1, TRBJ2-5)
CSASDSGSGETQYF

SEQ ID NO: 714503 - protein, 14 aa, Homo sapiens
  CDR3 for alpha chain variable domain of TCR clone 357252 (TRAV12-1, TRAJ30)
CVVNIGGRDDKIIF

SEQ ID NO: 714504 - protein, 13 aa, Homo sapiens
  CDR3 for beta chain variable domain of TCR clone 357252 (TRBV12-5, TRBJ2-1)
CASGLGRANEQFF

SEQ ID NO: 714505 - protein, 13 aa, Homo sapiens
  CDR3 for alpha chain variable domain of TCR clone 357253 (TRAV1-2, TRAJ9)
CAALNTGGFKTIF

SEQ ID NO: 714506 - protein, 13 aa, Homo sapiens
  CDR3 for beta chain variable domain of TCR clone 357253 (TRBV19, TRBJ1-2)
RASSVLGQDGYTF

SEQ ID NO: 714507 - protein, 14 aa, Homo sapiens
  CDR3 for alpha chain variable domain of TCR clone 357254 (TRAV17, TRAJ57)
CATDPQGGSEKLVF

SEQ ID NO: 714508 - protein, 15 aa, Homo sapiens
  CDR3 for beta chain variable domain of TCR clone 357254 (TRBV5-1, TRBJ1-1)
CASSLAPRGNTEAFF

SEQ ID NO: 714509 - protein, 14 aa, Homo sapiens
  CDR3 for alpha chain variable domain of TCR clone 357255 (TRAV8-3, TRAJ13)
CAVGGTLGYQKVTF

SEQ ID NO: 714510 - protein, 17 aa, Homo sapiens
  CDR3 for beta chain variable domain of TCR clone 357255 (TRBV7-9, TRBJ2-1)
CASSAGTLGRSYNEQFF

SEQ ID NO: 714511 - protein, 15 aa, Homo sapiens
  CDR3 for alpha chain variable domain of TCR clone 357256 (TRAV21, TRAJ40)
CAVRPQTSGTYKYIF

SEQ ID NO: 714512 - protein, 14 aa, Homo sapiens
  CDR3 for beta chain variable domain of TCR clone 357256 (TRBV19, TRBJ2-1)
CASPTFVLSGEQFF

SEQ ID NO: 714513 - protein, 13 aa, Homo sapiens
  CDR3 for alpha chain variable domain of TCR clone 357257 (TRAV13-1, TRAJ10)
CAAAEGGGNKLTF

SEQ ID NO: 714514 - protein, 15 aa, Homo sapiens
  CDR3 for beta chain variable domain of TCR clone 357257 (TRBV10-1, TRBJ2-3)
CASSATSGGFDTQYF

SEQ ID NO: 714515 - protein, 14 aa, Homo sapiens
  CDR3 for alpha chain variable domain of TCR clone 357258 (TRAV12-3, TRAJ10)
SHLPLTGGGNKLTF

SEQ ID NO: 714516 - protein, 14 aa, Homo sapiens
  CDR3 for beta chain variable domain of TCR clone 357258 (TRBV7-3, TRBJ2-3)
CASSSTGVADTQYF

SEQ ID NO: 714517 - protein, 13 aa, Homo sapiens
  CDR3 for alpha chain variable domain of TCR clone 357259 (TRAV1-2, TRAJ9)
CAALNTGGFKTIF

SEQ ID NO: 714518 - protein, 15 aa, Homo sapiens
  CDR3 for beta chain variable domain of TCR clone 357259 (TRBV7-2, TRBJ2-1)
CASSLVGSSYNEQFF

SEQ ID NO: 714519 - protein, 13 aa, Homo sapiens
  CDR3 for alpha chain variable domain of TCR clone 357260 (TRAV12-2, TRAJ13)
CAVNMSGYQKVTF

SEQ ID NO: 714520 - protein, 15 aa, Homo sapiens
  CDR3 for beta chain variable domain of TCR clone 357260 (TRBV5-7, TRBJ1-5)
CASSYGKLWDQPQHF

SEQ ID NO: 714521 - protein, 14 aa, Homo sapiens
  CDR3 for alpha chain variable domain of TCR clone 357261 (TRAV13-1, TRAJ44)
CAAKATGTASKLTF

SEQ ID NO: 714522 - protein, 16 aa, Homo sapiens
  CDR3 for beta chain variable domain of TCR clone 357261 (TRBV20-1, TRBJ2-2)
CSASASGIPGAGELFF

SEQ ID NO: 714523 - protein, 22 aa, Homo sapiens
  CDR3 for alpha chain variable domain of TCR clone 357262 (TRAV8-2, TRAJ45)
HLTKPSAHMSDAAEYSADRLTF

SEQ ID NO: 714524 - protein, 13 aa, Homo sapiens
  CDR3 for beta chain variable domain of TCR clone 357262 (TRBV7-3, TRBJ2-1)
CASSPVAYNEQFF

SEQ ID NO: 714525 - protein, 11 aa, Homo sapiens
  CDR3 for alpha chain variable domain of TCR clone 357263 (TRAV2, TRAJ33)
CAVESNYQLIW

SEQ ID NO: 714526 - protein, 16 aa, Homo sapiens
  CDR3 for beta chain variable domain of TCR clone 357263 (TRBV5-4, TRBJ2-1)
CASSLVGSGQDNEQFF

SEQ ID NO: 714527 - protein, 13 aa, Homo sapiens
  CDR3 for alpha chain variable domain of TCR clone 357264 (TRAV12-3, TRAJ7)
CAMTPYGNNRLAF

SEQ ID NO: 714528 - protein, 16 aa, Homo sapiens
  CDR3 for beta chain variable domain of TCR clone 357264 (TRBV20-1, TRBJ1-4)
CSARPYGGELIEKLFF

SEQ ID NO: 714529 - protein, 16 aa, Homo sapiens
  CDR3 for alpha chain variable domain of TCR clone 357265 (TRAV38-1, TRAJ32)
CAFMKGGGGATNKLIF

SEQ ID NO: 714530 - protein, 15 aa, Homo sapiens
  CDR3 for beta chain variable domain of TCR clone 357265 (TRBV2, TRBJ2-1)
CASSEEREGDNEQFF

SEQ ID NO: 714531 - protein, 18 aa, Homo sapiens
  CDR3 for alpha chain variable domain of TCR clone 357266 (TRAV26-2, TRAJ45)
CILRVDKYSGGGADGLTL

SEQ ID NO: 714532 - protein, 14 aa, Homo sapiens
  CDR3 for beta chain variable domain of TCR clone 357266 (TRBV19, TRBJ2-1)
CASPTFVLSGEQFF

SEQ ID NO: 714533 - protein, 14 aa, Homo sapiens
  CDR3 for alpha chain variable domain of TCR clone 357267 (TRAV12-1, TRAJ26)
CVVKGSNYGQNFVF

SEQ ID NO: 714534 - protein, 14 aa, Homo sapiens
  CDR3 for beta chain variable domain of TCR clone 357267 (TRBV7-2, TRBJ2-7)
CASSPKTSFYEQYF

SEQ ID NO: 714535 - protein, 16 aa, Homo sapiens
  CDR3 for alpha chain variable domain of TCR clone 357268 (TRAV8-2, TRAJ45)
CVVSEGTGGGADGLTF

SEQ ID NO: 714536 - protein, 12 aa, Homo sapiens
  CDR3 for beta chain variable domain of TCR clone 357268 (TRBV7-8, TRBJ2-3)
CASSLWDEAQYF

SEQ ID NO: 714537 - protein, 15 aa, Homo sapiens
  CDR3 for alpha chain variable domain of TCR clone 357269 (TRAV41, TRAJ45)
CAASYSGGGSDGLTF

SEQ ID NO: 714538 - protein, 14 aa, Homo sapiens
  CDR3 for beta chain variable domain of TCR clone 357269 (TRBV12-5, TRBJ2-5)
CASGSRTHQETQYF

SEQ ID NO: 714539 - protein, 14 aa, Homo sapiens
  CDR3 for alpha chain variable domain of TCR clone 357270 (TRAV35, TRAJ33)
CWPRGRDSNYQLIW

SEQ ID NO: 714540 - protein, 13 aa, Homo sapiens
  CDR3 for beta chain variable domain of TCR clone 357270 (TRBV7-2, TRBJ2-2)
CASSLAVTGELFF

SEQ ID NO: 714541 - protein, 15 aa, Homo sapiens
  CDR3 for alpha chain variable domain of TCR clone 357271 (TRAV26-2, TRAJ50)
CTLRDEETSYNKVIF

SEQ ID NO: 714542 - protein, 13 aa, Homo sapiens
  CDR3 for beta chain variable domain of TCR clone 357271 (TRBV7-3, TRBJ1-1)
CASSQDWGAEAFF

SEQ ID NO: 714543 - protein, 15 aa, Homo sapiens
  CDR3 for alpha chain variable domain of TCR clone 357272 (TRAV20, TRAJ52)
CAVQAGGTSYGKLTF

SEQ ID NO: 714544 - protein, 16 aa, Homo sapiens
  CDR3 for beta chain variable domain of TCR clone 357272 (TRBV7-3, TRBJ2-2)
CASSLKRGTLSGELFF

SEQ ID NO: 714545 - protein, 12 aa, Homo sapiens
  CDR3 for alpha chain variable domain of TCR clone 357273 (TRAV12-2, TRAJ9)
CAVNTGGFKTIF

SEQ ID NO: 714546 - protein, 13 aa, Homo sapiens
  CDR3 for beta chain variable domain of TCR clone 357273 (TRBV11-2, TRBJ2-5)
CASSRGPSETQYF

SEQ ID NO: 714547 - protein, 16 aa, Homo sapiens
  CDR3 for alpha chain variable domain of TCR clone 357274 (TRAV26-1, TRAJ36)
CIVRVPDQTGAYNLFF

SEQ ID NO: 714548 - protein, 21 aa, Homo sapiens
  CDR3 for beta chain variable domain of TCR clone 357274 (TRBV6-1, TRBJ1-1)
CASSGVGNYKGISGFDTEAFF

SEQ ID NO: 714549 - protein, 16 aa, Homo sapiens
  CDR3 for alpha chain variable domain of TCR clone 357275 (TRAV4, TRAJ8)
CLVGDSGNTGFQKLVF

SEQ ID NO: 714550 - protein, 20 aa, Homo sapiens
  CDR3 for beta chain variable domain of TCR clone 357275 (TRBV3-1, TRBJ2-6)
CASSPRPGLEGGAGANVLTF

SEQ ID NO: 714551 - protein, 13 aa, Homo sapiens
  CDR3 for alpha chain variable domain of TCR clone 357276 (TRAV21, TRAJ27)
CAARPGKAGKSTF

SEQ ID NO: 714552 - protein, 18 aa, Homo sapiens
  CDR3 for beta chain variable domain of TCR clone 357276 (TRBV4-2, TRBJ2-7)
CISVPAAKLAGGTYEQYF

SEQ ID NO: 714553 - protein, 13 aa, Homo sapiens
  CDR3 for alpha chain variable domain of TCR clone 357277 (TRAV27, TRAJ27)
CAGGITNAGKSNF

SEQ ID NO: 714554 - protein, 13 aa, Homo sapiens
  CDR3 for beta chain variable domain of TCR clone 357277 (TRBV20-1, TRBJ1-2)
CSASLGVGYGYTF

SEQ ID NO: 714555 - protein, 12 aa, Homo sapiens
  CDR3 for alpha chain variable domain of TCR clone 357278 (TRAV12-3, TRAJ17)
CAMTLTDNKLTF

SEQ ID NO: 714556 - protein, 17 aa, Homo sapiens
  CDR3 for beta chain variable domain of TCR clone 357278 (TRBV11-2, TRBJ2-1)
CASSLYPPGVEYNEQFF

SEQ ID NO: 714557 - protein, 16 aa, Homo sapiens
  CDR3 for alpha chain variable domain of TCR clone 357279 (TRAV12-3, TRAJ53)
CAMSPGSGGSNYKLTF

SEQ ID NO: 714558 - protein, 14 aa, Homo sapiens
  CDR3 for beta chain variable domain of TCR clone 357279 (TRBV2, TRBJ2-7)
CTSSLTSGGYEQYF

SEQ ID NO: 714559 - protein, 16 aa, Homo sapiens
  CDR3 for alpha chain variable domain of TCR clone 357280 (TRAV30, TRAJ24)
CGTEIVDADSWRKFQS

SEQ ID NO: 714560 - protein, 14 aa, Homo sapiens
  CDR3 for beta chain variable domain of TCR clone 357280 (TRBV12-5, TRBJ2-5)
CASGSRTHQETQYF

SEQ ID NO: 714561 - protein, 17 aa, Homo sapiens
  CDR3 for alpha chain variable domain of TCR clone 357281 (TRAV3, TRAJ6)
CAVRDGPRAGGSYIPTF

SEQ ID NO: 714562 - protein, 14 aa, Homo sapiens
  CDR3 for beta chain variable domain of TCR clone 357281 (TRBV7-2, TRBJ2-7)
CASSPTTSFYEQFF

SEQ ID NO: 714563 - protein, 14 aa, Homo sapiens
  CDR3 for alpha chain variable domain of TCR clone 357282 (TRAV16, TRAJ15)
CALSGPQAGTAVIF

SEQ ID NO: 714564 - protein, 17 aa, Homo sapiens
  CDR3 for beta chain variable domain of TCR clone 357282 (TRBV7-8, TRBJ2-6)
CASSAGTGGAGANVLTF

SEQ ID NO: 714565 - protein, 14 aa, Homo sapiens
  CDR3 for alpha chain variable domain of TCR clone 357283 (TRAV20, TRAJ47)
CAVTFGEYGNKLVF

SEQ ID NO: 714566 - protein, 15 aa, Homo sapiens
  CDR3 for beta chain variable domain of TCR clone 357283 (TRBV28, TRBJ2-4)
CAAGSGTLLMGIQYF

SEQ ID NO: 714567 - protein, 14 aa, Homo sapiens
  CDR3 for alpha chain variable domain of TCR clone 357284 (TRAV1-2, TRAJ8)
CAVREETGFQKLVF

SEQ ID NO: 714568 - protein, 13 aa, Homo sapiens
  CDR3 for beta chain variable domain of TCR clone 357284 (TRBV23-1, TRBJ1-4)
CASRGKFNEKLFF

SEQ ID NO: 714569 - protein, 13 aa, Homo sapiens
  CDR3 for alpha chain variable domain of TCR clone 357285 (TRAV17, TRAJ5)
CALRGTGRRALTF

SEQ ID NO: 714570 - protein, 12 aa, Homo sapiens
  CDR3 for beta chain variable domain of TCR clone 357285 (TRBV28, TRBJ2-3)
CASSLYRDTQYF

SEQ ID NO: 714571 - protein, 12 aa, Homo sapiens
  CDR3 for alpha chain variable domain of TCR clone 357286 (TRAV13-2, TRAJ23)
CAERHRGGELIF

SEQ ID NO: 714572 - protein, 16 aa, Homo sapiens
  CDR3 for beta chain variable domain of TCR clone 357286 (TRBV20-1, TRBJ1-4)
CSAPRQGLLTNEKLFF

SEQ ID NO: 714573 - protein, 15 aa, Homo sapiens
  CDR3 for alpha chain variable domain of TCR clone 357287 (TRAV2, TRAJ11)
CAVGGRNSGYSTLTF

SEQ ID NO: 714574 - protein, 14 aa, Homo sapiens
  CDR3 for beta chain variable domain of TCR clone 357287 (TRBV20-1, TRBJ2-1)
CSAQIGGSANERFF

SEQ ID NO: 714575 - protein, 14 aa, Homo sapiens
  CDR3 for alpha chain variable domain of TCR clone 357288 (TRAV12-2, TRAJ11)
CAVNRESGYSTLTF

SEQ ID NO: 714576 - protein, 10 aa, Homo sapiens
  CDR3 for beta chain variable domain of TCR clone 357288 (TRBV20-1, TRBJ2-5)
CSARFVTQYF

SEQ ID NO: 714577 - protein, 18 aa, Homo sapiens
  CDR3 for alpha chain variable domain of TCR clone 357289 (TRAV29/DV5, TRAJ52)
CAAGFRGAGGTSYGKLTF

SEQ ID NO: 714578 - protein, 16 aa, Homo sapiens
  CDR3 for beta chain variable domain of TCR clone 357289 (TRBV6-1, TRBJ1-3)
CASVQGGVETPYILER

SEQ ID NO: 714579 - protein, 13 aa, Homo sapiens
  CDR3 for alpha chain variable domain of TCR clone 357290 (TRAV21, TRAJ57)
CAVTQGGSEKLVF

SEQ ID NO: 714580 - protein, 14 aa, Homo sapiens
  CDR3 for beta chain variable domain of TCR clone 357290 (TRBV5-1, TRBJ2-1)
CASSALWAGNEKFF

SEQ ID NO: 714581 - protein, 17 aa, Homo sapiens
  CDR3 for alpha chain variable domain of TCR clone 357291 (TRAV13-1, TRAJ3)
CAASKAGRGSSASKRIF

SEQ ID NO: 714582 - protein, 15 aa, Homo sapiens
  CDR3 for beta chain variable domain of TCR clone 357291 (TRBV20-1, TRBJ1-5)
CSAREGGHSNQPQHF

SEQ ID NO: 714583 - protein, 12 aa, Homo sapiens
  CDR3 for alpha chain variable domain of TCR clone 357292 (TRAV1-1, TRAJ39)
CAVPVVGNMLTF

SEQ ID NO: 714584 - protein, 17 aa, Homo sapiens
  CDR3 for beta chain variable domain of TCR clone 357292 (TRBV28, TRBJ2-5)
CASSTPEGDARQETQYF

SEQ ID NO: 714585 - protein, 17 aa, Homo sapiens
  CDR3 for alpha chain variable domain of TCR clone 357293 (TRAV3, TRAJ38)
CAVRDCLNAGNNRKLIW

SEQ ID NO: 714586 - protein, 15 aa, Homo sapiens
  CDR3 for beta chain variable domain of TCR clone 357293 (TRBV5-1, TRBJ2-7)
CASSLNGGPAREQYF

SEQ ID NO: 714587 - protein, 14 aa, Homo sapiens
  CDR3 for alpha chain variable domain of TCR clone 357294 (TRAV38-1, TRAJ40)
CALRPTSGTYKYIF

SEQ ID NO: 714588 - protein, 11 aa, Homo sapiens
  CDR3 for beta chain variable domain of TCR clone 357294 (TRBV27, TRBJ2-3)
CASSLGDTQYF

SEQ ID NO: 714589 - protein, 14 aa, Homo sapiens
  CDR3 for alpha chain variable domain of TCR clone 357295 (TRAV12-1, TRAJ12)
CVVTRMDSSYKLIF

SEQ ID NO: 714590 - protein, 13 aa, Homo sapiens
  CDR3 for beta chain variable domain of TCR clone 357295 (TRBV11-2, TRBJ2-7)
CASSGTRPYEQYF

SEQ ID NO: 714591 - protein, 12 aa, Homo sapiens
  CDR3 for alpha chain variable domain of TCR clone 357296 (TRAV3, TRAJ20)
CAVTDPDYKLSF

SEQ ID NO: 714592 - protein, 13 aa, Homo sapiens
  CDR3 for beta chain variable domain of TCR clone 357296 (TRBV9, TRBJ2-1)
CASSVGQGGEQFF

SEQ ID NO: 714593 - protein, 13 aa, Homo sapiens
  CDR3 for alpha chain variable domain of TCR clone 357297 (TRAV1-2, TRAJ9)
CAALNTGGFKTIF

SEQ ID NO: 714594 - protein, 16 aa, Homo sapiens
  CDR3 for beta chain variable domain of TCR clone 357297 (TRBV6-1, TRBJ1-3)
CASVQGGVETPYILER

SEQ ID NO: 714595 - protein, 14 aa, Homo sapiens
  CDR3 for alpha chain variable domain of TCR clone 357298 (TRAV12-1, TRAJ17)
CVVNYKAAGNKLTV

SEQ ID NO: 714596 - protein, 14 aa, Homo sapiens
  CDR3 for beta chain variable domain of TCR clone 357298 (TRBV28, TRBJ2-1)
CASSPSTGYNEQFF

SEQ ID NO: 714597 - protein, 17 aa, Homo sapiens
  CDR3 for alpha chain variable domain of TCR clone 357299 (TRAV3, TRAJ6)
CAVRDGPRAGGSYIPTF

SEQ ID NO: 714598 - protein, 16 aa, Homo sapiens
  CDR3 for beta chain variable domain of TCR clone 357299 (TRBV12-4, TRBJ2-7)
CASSLIGGTGTYEQDF

SEQ ID NO: 714599 - protein, 14 aa, Homo sapiens
  CDR3 for alpha chain variable domain of TCR clone 357300 (TRAV12-2, TRAJ6)
CAVIASGGSYIPTF

SEQ ID NO: 714600 - protein, 12 aa, Homo sapiens
  CDR3 for beta chain variable domain of TCR clone 357300 (TRBV28, TRBJ2-7)
CASTGNHYEQYF

SEQ ID NO: 714601 - protein, 11 aa, Homo sapiens
  CDR3 for alpha chain variable domain of TCR clone 357301 (TRAV4, TRAJ31)
CLVGLNARLMF

SEQ ID NO: 714602 - protein, 16 aa, Homo sapiens
  CDR3 for beta chain variable domain of TCR clone 357301 (TRBV15, TRBJ2-6)
CATSVNGGCLANVLTF

SEQ ID NO: 714603 - protein, 16 aa, Homo sapiens
  CDR3 for alpha chain variable domain of TCR clone 357302 (TRAV8-3, TRAJ13)
CAVGAYASGGYQEVTF

SEQ ID NO: 714604 - protein, 15 aa, Homo sapiens
  CDR3 for beta chain variable domain of TCR clone 357302 (TRBV19, TRBJ1-5)
CASSIVWADNQPQHF

SEQ ID NO: 714605 - protein, 21 aa, Homo sapiens
  CDR3 for alpha chain variable domain of TCR clone 357303 (TRAV26-1, TRAJ22)
CIVRVSFWFCKATDLWIWATF

SEQ ID NO: 714606 - protein, 13 aa, Homo sapiens
  CDR3 for beta chain variable domain of TCR clone 357303 (TRBV7-9, TRBJ1-2)
CASSLKQNYGYTF

SEQ ID NO: 714607 - protein, 15 aa, Homo sapiens
  CDR3 for alpha chain variable domain of TCR clone 357304 (TRAV12-1, TRAJ5)
CVVNMLETGRRALTF

SEQ ID NO: 714608 - protein, 12 aa, Homo sapiens
  CDR3 for beta chain variable domain of TCR clone 357304 (TRBV11-2, TRBJ2-2)
WASSLGGGELFF

SEQ ID NO: 714609 - protein, 17 aa, Homo sapiens
  CDR3 for alpha chain variable domain of TCR clone 357305 (TRAV3, TRAJ42)
CAVRDRDYGGSQGNLIF

SEQ ID NO: 714610 - protein, 12 aa, Homo sapiens
  CDR3 for beta chain variable domain of TCR clone 357305 (TRBV11-2, TRBJ2-1)
CASSPGNNGQFF

SEQ ID NO: 714611 - protein, 14 aa, Homo sapiens
  CDR3 for alpha chain variable domain of TCR clone 357306 (TRAV21, TRAJ35)
CALMPIGFGNVLHC

SEQ ID NO: 714612 - protein, 12 aa, Homo sapiens
  CDR3 for beta chain variable domain of TCR clone 357306 (TRBV7-9, TRBJ2-7)
CASSIKREEQYF

SEQ ID NO: 714613 - protein, 12 aa, Homo sapiens
  CDR3 for alpha chain variable domain of TCR clone 357307 (TRAV13-2, TRAJ23)
CAERHRGGKLIF

SEQ ID NO: 714614 - protein, 15 aa, Homo sapiens
  CDR3 for beta chain variable domain of TCR clone 357307 (TRBV7-3, TRBJ2-1)
CASSLSSGSFDEQFF

SEQ ID NO: 714615 - protein, 15 aa, Homo sapiens
  CDR3 for alpha chain variable domain of TCR clone 357308 (TRAV1-2, TRAJ8)
CAVRDRHTGFQKLVF

SEQ ID NO: 714616 - protein, 13 aa, Homo sapiens
  CDR3 for beta chain variable domain of TCR clone 357308 (TRBV5-7, TRBJ2-1)
CASSLVESVEQFF

SEQ ID NO: 714617 - protein, 13 aa, Homo sapiens
  CDR3 for alpha chain variable domain of TCR clone 357309 (TRAV20, TRAJ34)
CTVSSYNTDKLIF

SEQ ID NO: 714618 - protein, 12 aa, Homo sapiens
  CDR3 for beta chain variable domain of TCR clone 357309 (TRBV19, TRBJ2-1)
CASSMQDTEQFF

SEQ ID NO: 714619 - protein, 13 aa, Homo sapiens
  CDR3 for alpha chain variable domain of TCR clone 357310 (TRAV13-1, TRAJ43)
CAASVGWDNDMRF

SEQ ID NO: 714620 - protein, 12 aa, Homo sapiens
  CDR3 for beta chain variable domain of TCR clone 357310 (TRBV5-1, TRBJ2-5)
CASSLGLETQYF

SEQ ID NO: 714621 - protein, 15 aa, Homo sapiens
  CDR3 for alpha chain variable domain of TCR clone 357311 (TRAV3, TRAJ4)
CAQNMFSGGYNKLIF

SEQ ID NO: 714622 - protein, 16 aa, Homo sapiens
  CDR3 for beta chain variable domain of TCR clone 357311 (TRBV3-1, TRBJ1-6)
CASSQEFQGAYSPLHF

SEQ ID NO: 714623 - protein, 18 aa, Homo sapiens
  CDR3 for alpha chain variable domain of TCR clone 357312 (TRAV8-3, TRAJ6)
CAVGAEHQEEATYRHLEE

SEQ ID NO: 714624 - protein, 14 aa, Homo sapiens
  CDR3 for beta chain variable domain of TCR clone 357312 (TRBV6-6, TRBJ2-7)
CASSDSGAGYEQYF

SEQ ID NO: 714625 - protein, 12 aa, Homo sapiens
  CDR3 for alpha chain variable domain of TCR clone 357313 (TRAV13-2, TRAJ33)
CRDFWSNYQLIW

SEQ ID NO: 714626 - protein, 15 aa, Homo sapiens
  CDR3 for beta chain variable domain of TCR clone 357313 (TRBV6-1, TRBJ2-6)
CASSSRPSGANVPTF

SEQ ID NO: 714627 - protein, 16 aa, Homo sapiens
  CDR3 for alpha chain variable domain of TCR clone 357314 (TRAV1-2, TRAJ10)
CAVRGVLTGGGNKLTF

SEQ ID NO: 714628 - protein, 13 aa, Homo sapiens
  CDR3 for beta chain variable domain of TCR clone 357314 (TRBV20-1, TRBJ1-1)
CSAGTVGNTEGFF

SEQ ID NO: 714629 - protein, 14 aa, Homo sapiens
  CDR3 for alpha chain variable domain of TCR clone 357315 (TRAV1-2, TRAJ8)
CVVREDTGSQKLVF

SEQ ID NO: 714630 - protein, 12 aa, Homo sapiens
  CDR3 for beta chain variable domain of TCR clone 357315 (TRBV11-2, TRBJ2-2)
CASSLGGGELFF

SEQ ID NO: 714631 - protein, 13 aa, Homo sapiens
  CDR3 for alpha chain variable domain of TCR clone 357316 (TRAV17, TRAJ39)
CAISTNAGNMLTF

SEQ ID NO: 714632 - protein, 17 aa, Homo sapiens
  CDR3 for beta chain variable domain of TCR clone 357316 (TRBV13, TRBJ2-3)
CASSLSRVAGGRNTQYF

SEQ ID NO: 714633 - protein, 14 aa, Homo sapiens
  CDR3 for alpha chain variable domain of TCR clone 357317 (TRAV12-3, TRAJ17)
CVVNYKAAGNKRTF

SEQ ID NO: 714634 - protein, 16 aa, Homo sapiens
  CDR3 for beta chain variable domain of TCR clone 357317 (TRBV12-4, TRBJ1-5)
CASSRPVGGSNQPQHF

SEQ ID NO: 714635 - protein, 11 aa, Homo sapiens
  CDR3 for alpha chain variable domain of TCR clone 357318 (TRAV12-3, TRAJ43)
CAMSVSNDMRF

SEQ ID NO: 714636 - protein, 12 aa, Homo sapiens
  CDR3 for beta chain variable domain of TCR clone 357318 (TRBV5-1, TRBJ2-7)
CASSLDSYEQYF

SEQ ID NO: 714637 - protein, 14 aa, Homo sapiens
  CDR3 for alpha chain variable domain of TCR clone 357319 (TRAV12-3, TRAJ10)
SHLPLTGGGNKLTF

SEQ ID NO: 714638 - protein, 16 aa, Homo sapiens
  CDR3 for beta chain variable domain of TCR clone 357319 (TRBV19, TRBJ1-1)
CSSRFGGPVTGTEAFF

SEQ ID NO: 714639 - protein, 16 aa, Homo sapiens
  CDR3 for alpha chain variable domain of TCR clone 357320 (TRAV20, TRAJ22)
CAVQASSSGSARQLTF

SEQ ID NO: 714640 - protein, 17 aa, Homo sapiens
  CDR3 for beta chain variable domain of TCR clone 357320 (TRBV4-1, TRBJ2-5)
CASSQDPSGGPQETQYF

SEQ ID NO: 714641 - protein, 12 aa, Homo sapiens
  CDR3 for alpha chain variable domain of TCR clone 357321 (TRAV12-3, TRAJ17)
CAMTLTGNALTF

SEQ ID NO: 714642 - protein, 15 aa, Homo sapiens
  CDR3 for beta chain variable domain of TCR clone 357321 (TRBV20-1, TRBJ2-7)
CSARDRVSGMDEQYF

SEQ ID NO: 714643 - protein, 13 aa, Homo sapiens
  CDR3 for alpha chain variable domain of TCR clone 357322 (TRAV26-1, TRAJ36)
FIVVGTGANNLFF

SEQ ID NO: 714644 - protein, 15 aa, Homo sapiens
  CDR3 for beta chain variable domain of TCR clone 357322 (TRBV27, TRBJ2-1)
CASSNGGGSSNEQFF

SEQ ID NO: 714645 - protein, 15 aa, Homo sapiens
  CDR3 for alpha chain variable domain of TCR clone 357323 (TRAV27, TRAJ38)
CAARRNAGNNRKLIW

SEQ ID NO: 714646 - protein, 17 aa, Homo sapiens
  CDR3 for beta chain variable domain of TCR clone 357323 (TRBV25-1, TRBJ2-5)
CASSRRGGRGGQETQYF

SEQ ID NO: 714647 - protein, 12 aa, Homo sapiens
  CDR3 for alpha chain variable domain of TCR clone 357324 (TRAV12-3, TRAJ17)
CAMTLTGNKLTF

SEQ ID NO: 714648 - protein, 16 aa, Homo sapiens
  CDR3 for beta chain variable domain of TCR clone 357324 (TRBV11-2, TRBJ1-1)
YASSLRQGGEHSKAFF

SEQ ID NO: 714649 - protein, 12 aa, Homo sapiens
  CDR3 for alpha chain variable domain of TCR clone 357325 (TRAV12-3, TRAJ48)
CAMRIGDEKLTF

SEQ ID NO: 714650 - protein, 12 aa, Homo sapiens
  CDR3 for beta chain variable domain of TCR clone 357325 (TRBV13, TRBJ2-7)
CASSLQAYEQYF

SEQ ID NO: 714651 - protein, 15 aa, Homo sapiens
  CDR3 for alpha chain variable domain of TCR clone 357326 (TRAV8-3, TRAJ23)
CAVSDRYNQGGKLIF

SEQ ID NO: 714652 - protein, 22 aa, Homo sapiens
  CDR3 for beta chain variable domain of TCR clone 357326 (TRBV29-1, TRBJ2-5)
TVSNMSPEDSSIYLCSAGTQYF

SEQ ID NO: 714653 - protein, 15 aa, Homo sapiens
  CDR3 for alpha chain variable domain of TCR clone 357327 (TRAV3, TRAJ5)
CAVRGRKTGRRALTF

SEQ ID NO: 714654 - protein, 15 aa, Homo sapiens
  CDR3 for beta chain variable domain of TCR clone 357327 (TRBV7-8, TRBJ2-1)
CASSLADSLYNEKFF

SEQ ID NO: 714655 - protein, 14 aa, Homo sapiens
  CDR3 for alpha chain variable domain of TCR clone 357328 (TRAV1-2, TRAJ16)
CAVNRFSDGQKLPF

SEQ ID NO: 714656 - protein, 16 aa, Homo sapiens
  CDR3 for beta chain variable domain of TCR clone 357328 (TRBV19, TRBJ2-1)
CASSKTGPSSYNEQFF

SEQ ID NO: 714657 - protein, 15 aa, Homo sapiens
  CDR3 for alpha chain variable domain of TCR clone 357329 (TRAV3, TRAJ5)
CAVRDRKTGRRACTF

SEQ ID NO: 714658 - protein, 15 aa, Homo sapiens
  CDR3 for beta chain variable domain of TCR clone 357329 (TRBV7-8, TRBJ2-1)
CASSLADSLYNEQFF

SEQ ID NO: 714659 - protein, 12 aa, Homo sapiens
  CDR3 for alpha chain variable domain of TCR clone 357330 (TRAV12-3, TRAJ17)
CAMTLTGNKLTF

SEQ ID NO: 714660 - protein, 13 aa, Homo sapiens
  CDR3 for beta chain variable domain of TCR clone 357330 (TRBV7-9, TRBJ1-2)
FASSLKQNYGYTF

SEQ ID NO: 714661 - protein, 11 aa, Homo sapiens
  CDR3 for alpha chain variable domain of TCR clone 357331 (TRAV3, TRAJ21)
CAVGNFNKFYF

SEQ ID NO: 714662 - protein, 15 aa, Homo sapiens
  CDR3 for beta chain variable domain of TCR clone 357331 (TRBV20-1, TRBJ2-7)
CSARDRVSGMDEQYL

SEQ ID NO: 714663 - protein, 13 aa, Homo sapiens
  CDR3 for alpha chain variable domain of TCR clone 357332 (TRAV2, TRAJ40)
CAVVTSGTYKYIF

SEQ ID NO: 714664 - protein, 14 aa, Homo sapiens
  CDR3 for beta chain variable domain of TCR clone 357332 (TRBV19, TRBJ2-1)
CASPDFVLSGEQFF

SEQ ID NO: 714665 - protein, 15 aa, Homo sapiens
  CDR3 for alpha chain variable domain of TCR clone 357333 (TRAV25, TRAJ52)
CAGRPGGTSYGELTF

SEQ ID NO: 714666 - protein, 17 aa, Homo sapiens
  CDR3 for beta chain variable domain of TCR clone 357333 (TRBV7-8, TRBJ2-6)
CASSAGTGGAGANVLPL

SEQ ID NO: 714667 - protein, 14 aa, Homo sapiens
  CDR3 for alpha chain variable domain of TCR clone 357334 (TRAV8-3, TRAJ4)
CAVGAAGGYNKLIF

SEQ ID NO: 714668 - protein, 13 aa, Homo sapiens
  CDR3 for beta chain variable domain of TCR clone 357334 (TRBV12-4, TRBJ2-5)
CASSLGGSRTQYF

SEQ ID NO: 714669 - protein, 14 aa, Homo sapiens
  CDR3 for alpha chain variable domain of TCR clone 357335 (TRAV12-2, TRAJ13)
CAVKKTGGYQKVTF

SEQ ID NO: 714670 - protein, 19 aa, Homo sapiens
  CDR3 for beta chain variable domain of TCR clone 357335 (TRBV7-9, TRBJ2-6)
CASSLESATVLPGANVLTF

SEQ ID NO: 714671 - protein, 13 aa, Homo sapiens
  CDR3 for alpha chain variable domain of TCR clone 357336 (TRAV21, TRAJ57)
CAITQGGSEKLVF

SEQ ID NO: 714672 - protein, 16 aa, Homo sapiens
  CDR3 for beta chain variable domain of TCR clone 357336 (TRBV29-1, TRBJ2-7)
CSVEDAEDDTAYEQYF

SEQ ID NO: 714673 - protein, 16 aa, Homo sapiens
  CDR3 for alpha chain variable domain of TCR clone 357337 (TRAV12-1, TRAJ45)
CVVIRYSGGSADGLTF

SEQ ID NO: 714674 - protein, 12 aa, Homo sapiens
  CDR3 for beta chain variable domain of TCR clone 357337 (TRBV6-5, TRBJ2-2)
CASRQITGELFF

SEQ ID NO: 714675 - protein, 13 aa, Homo sapiens
  CDR3 for alpha chain variable domain of TCR clone 357338 (TRAV3, TRAJ15)
CAVRDQAGTALVF

SEQ ID NO: 714676 - protein, 13 aa, Homo sapiens
  CDR3 for beta chain variable domain of TCR clone 357338 (TRBV4-1, TRBJ2-1)
CASSQAGGDEQFF

SEQ ID NO: 714677 - protein, 13 aa, Homo sapiens
  CDR3 for alpha chain variable domain of TCR clone 357339 (TRAV1-2, TRAJ36)
CAVDQTWANNLFF

SEQ ID NO: 714678 - protein, 14 aa, Homo sapiens
  CDR3 for beta chain variable domain of TCR clone 357339 (TRBV20-1, TRBJ2-5)
CSAREMTKQETQYF

SEQ ID NO: 714679 - protein, 15 aa, Homo sapiens
  CDR3 for alpha chain variable domain of TCR clone 357340 (TRAV3, TRAJ3)
CAVRDMSSSASKIIF

SEQ ID NO: 714680 - protein, 12 aa, Homo sapiens
  CDR3 for beta chain variable domain of TCR clone 357340 (TRBV28, TRBJ2-7)
CASSFSSYEQYF

SEQ ID NO: 714681 - protein, 14 aa, Homo sapiens
  CDR3 for alpha chain variable domain of TCR clone 357341 (TRAV1-2, TRAJ16)
CAVNRFSDGQKLLF

SEQ ID NO: 714682 - protein, 13 aa, Homo sapiens
  CDR3 for beta chain variable domain of TCR clone 357341 (TRBV11-3, TRBJ2-1)
CASSSRRVDEQFF

SEQ ID NO: 714683 - protein, 14 aa, Homo sapiens
  CDR3 for alpha chain variable domain of TCR clone 357342 (TRAV12-2, TRAJ24)
CAVTPADSWGKLQF

SEQ ID NO: 714684 - protein, 12 aa, Homo sapiens
  CDR3 for beta chain variable domain of TCR clone 357342 (TRBV3-1, TRBJ2-1)
CASRQGSSGQFF

SEQ ID NO: 714685 - protein, 11 aa, Homo sapiens
  CDR3 for alpha chain variable domain of TCR clone 357343 (TRAV1-2, TRAJ40)
CAVPGTYKYVF

SEQ ID NO: 714686 - protein, 13 aa, Homo sapiens
  CDR3 for beta chain variable domain of TCR clone 357343 (TRBV19, TRBJ1-2)
CASSQGQVYGYTF

SEQ ID NO: 714687 - protein, 12 aa, Homo sapiens
  CDR3 for alpha chain variable domain of TCR clone 357344 (TRAV12-3, TRAJ17)
CAMTLTGNKLTF

SEQ ID NO: 714688 - protein, 17 aa, Homo sapiens
  CDR3 for beta chain variable domain of TCR clone 357344 (TRBV19, TRBJ2-3)
CASSIDPAGGGTDTQYF

SEQ ID NO: 714689 - protein, 15 aa, Homo sapiens
  CDR3 for alpha chain variable domain of TCR clone 357345 (TRAV3, TRAJ4)
CAQNMFSGGYNKLIF

SEQ ID NO: 714690 - protein, 16 aa, Homo sapiens
  CDR3 for beta chain variable domain of TCR clone 357345 (TRBV4-1, TRBJ2-3)
CASSQSTSGAEDTQYF

SEQ ID NO: 714691 - protein, 12 aa, Homo sapiens
  CDR3 for alpha chain variable domain of TCR clone 357346 (TRAV21, TRAJ11)
CAATSGYSTLTF

SEQ ID NO: 714692 - protein, 16 aa, Homo sapiens
  CDR3 for beta chain variable domain of TCR clone 357346 (TRBV4-1, TRBJ2-3)
CASSQRAGGLTDTQYF

SEQ ID NO: 714693 - protein, 15 aa, Homo sapiens
  CDR3 for alpha chain variable domain of TCR clone 357347 (TRAV8-2, TRAJ24)
CVVSDRTDSWGKLQF

SEQ ID NO: 714694 - protein, 13 aa, Homo sapiens
  CDR3 for beta chain variable domain of TCR clone 357347 (TRBV20-1, TRBJ1-1)
CSAPLGGGTEAFF

SEQ ID NO: 714695 - protein, 17 aa, Homo sapiens
  CDR3 for alpha chain variable domain of TCR clone 357348 (TRAV12-3, TRAJ6)
CAMSARGGGGGSYIPTF

SEQ ID NO: 714696 - protein, 12 aa, Homo sapiens
  CDR3 for beta chain variable domain of TCR clone 357348 (TRBV12-4, TRBJ2-3)
CASSTLPDTQYF

SEQ ID NO: 714697 - protein, 15 aa, Homo sapiens
  CDR3 for alpha chain variable domain of TCR clone 357349 (TRAV3, TRAJ5)
CAVRDLDTGRTARTF

SEQ ID NO: 714698 - protein, 13 aa, Homo sapiens
  CDR3 for beta chain variable domain of TCR clone 357349 (TRBV12-4, TRBJ2-7)
CASSPTETYEQYF

SEQ ID NO: 714699 - protein, 14 aa, Homo sapiens
  CDR3 for alpha chain variable domain of TCR clone 357350 (TRAV13-1, TRAJ35)
CAASKGGFGNVLHC

SEQ ID NO: 714700 - protein, 13 aa, Homo sapiens
  CDR3 for beta chain variable domain of TCR clone 357350 (TRBV4-1, TRBJ2-1)
CASSQAGGDEQFF

SEQ ID NO: 714701 - protein, 16 aa, Homo sapiens
  CDR3 for alpha chain variable domain of TCR clone 357351 (TRAV3, TRAJ37)
CAVRGKGSGNTGKLIS

SEQ ID NO: 714702 - protein, 15 aa, Homo sapiens
  CDR3 for beta chain variable domain of TCR clone 357351 (TRBV6-6, TRBJ2-5)
CASSYGKIIQETQYF

SEQ ID NO: 714703 - protein, 16 aa, Homo sapiens
  CDR3 for alpha chain variable domain of TCR clone 357352 (TRAV30, TRAJ24)
CGTEIVDADSWGKFTF

SEQ ID NO: 714704 - protein, 19 aa, Homo sapiens
  CDR3 for beta chain variable domain of TCR clone 357352 (TRBV25-1, TRBJ2-2)
CAILVYRVERGRKTGELFF

SEQ ID NO: 714705 - protein, 11 aa, Homo sapiens
  CDR3 for alpha chain variable domain of TCR clone 357353 (TRAV1-2, TRAJ20)
CAVSNDYKLGF

SEQ ID NO: 714706 - protein, 15 aa, Homo sapiens
  CDR3 for beta chain variable domain of TCR clone 357353 (TRBV5-1, TRBJ2-2)
CASSSQGGNTGELFF

SEQ ID NO: 714707 - protein, 12 aa, Homo sapiens
  CDR3 for alpha chain variable domain of TCR clone 357354 (TRAV12-3, TRAJ20)
CAMVRGVYKLSF

SEQ ID NO: 714708 - protein, 15 aa, Homo sapiens
  CDR3 for beta chain variable domain of TCR clone 357354 (TRBV5-1, TRBJ2-5)
CASSLGLAEQETQYF

SEQ ID NO: 714709 - protein, 12 aa, Homo sapiens
  CDR3 for alpha chain variable domain of TCR clone 357355 (TRAV12-1, TRAJ40)
CVFYSGTYKYIF

SEQ ID NO: 714710 - protein, 15 aa, Homo sapiens
  CDR3 for beta chain variable domain of TCR clone 357355 (TRBV20-1, TRBJ2-7)
CSARDRVSGMDEQYF

SEQ ID NO: 714711 - protein, 12 aa, Homo sapiens
  CDR3 for alpha chain variable domain of TCR clone 357356 (TRAV12-3, TRAJ17)
CAMTLTGDKLTF

SEQ ID NO: 714712 - protein, 16 aa, Homo sapiens
  CDR3 for beta chain variable domain of TCR clone 357356 (TRBV7-3, TRBJ2-5)
CASSLRGGGGPETQYF

SEQ ID NO: 714713 - protein, 12 aa, Homo sapiens
  CDR3 for alpha chain variable domain of TCR clone 357357 (TRAV3, TRAJ20)
WAVRDPDYKLSF

SEQ ID NO: 714714 - protein, 11 aa, Homo sapiens
  CDR3 for beta chain variable domain of TCR clone 357357 (TRBV28, TRBJ2-5)
CASSLKETQYF

SEQ ID NO: 714715 - protein, 11 aa, Homo sapiens
  CDR3 for alpha chain variable domain of TCR clone 357358 (TRAV2, TRAJ33)
CAVDSNYQLIW

SEQ ID NO: 714716 - protein, 13 aa, Homo sapiens
  CDR3 for beta chain variable domain of TCR clone 357358 (TRBV19, TRBJ1-5)
CASSIGGNQPQHF

SEQ ID NO: 714717 - protein, 14 aa, Homo sapiens
  CDR3 for alpha chain variable domain of TCR clone 357359 (TRAV21, TRAJ35)
CAVMPIGFGNVLHC

SEQ ID NO: 714718 - protein, 13 aa, Homo sapiens
  CDR3 for beta chain variable domain of TCR clone 357359 (TRBV12-5, TRBJ2-3)
CASGDRQSDTQYF

SEQ ID NO: 714719 - protein, 14 aa, Homo sapiens
  CDR3 for alpha chain variable domain of TCR clone 357360 (TRAV8-4, TRAJ48)
WALSETFGNEKLTF

SEQ ID NO: 714720 - protein, 14 aa, Homo sapiens
  CDR3 for beta chain variable domain of TCR clone 357360 (TRBV13, TRBJ2-7)
CASSLKGASYEQYF

SEQ ID NO: 714721 - protein, 13 aa, Homo sapiens
  CDR3 for alpha chain variable domain of TCR clone 357361 (TRAV21, TRAJ49)
CAMRQSTGNQFYF

SEQ ID NO: 714722 - protein, 13 aa, Homo sapiens
  CDR3 for beta chain variable domain of TCR clone 357361 (TRBV6-6, TRBJ1-5)
CASRAYQDQPQHF

SEQ ID NO: 714723 - protein, 14 aa, Homo sapiens
  CDR3 for alpha chain variable domain of TCR clone 357362 (TRAV1-2, TRAJ8)
CAVREDTGFQKLGF

SEQ ID NO: 714724 - protein, 13 aa, Homo sapiens
  CDR3 for beta chain variable domain of TCR clone 357362 (TRBV4-2, TRBJ2-2)
CASEDRGTGELFF

SEQ ID NO: 714725 - protein, 16 aa, Homo sapiens
  CDR3 for alpha chain variable domain of TCR clone 357363 (TRAV30, TRAJ24)
CGTEIVDADSWGKFQF

SEQ ID NO: 714726 - protein, 13 aa, Homo sapiens
  CDR3 for beta chain variable domain of TCR clone 357363 (TRBV12-4, TRBJ2-1)
CASSFQGYNEQFF

SEQ ID NO: 714727 - protein, 18 aa, Homo sapiens
  CDR3 for alpha chain variable domain of TCR clone 357364 (TRAV12-1, TRAJ52)
CVVKPINAGGTSYGKLTF

SEQ ID NO: 714728 - protein, 15 aa, Homo sapiens
  CDR3 for beta chain variable domain of TCR clone 357364 (TRBV4-3, TRBJ2-7)
CASSQGGRGIYEQYF

SEQ ID NO: 714729 - protein, 15 aa, Homo sapiens
  CDR3 for alpha chain variable domain of TCR clone 357365 (TRAV34, TRAJ38)
CGADFTPGNNRKLIW

SEQ ID NO: 714730 - protein, 16 aa, Homo sapiens
  CDR3 for beta chain variable domain of TCR clone 357365 (TRBV12-5, TRBJ2-5)
CASGPRTSGNQETQDF

SEQ ID NO: 714731 - protein, 12 aa, Homo sapiens
  CDR3 for alpha chain variable domain of TCR clone 357366 (TRAV12-3, TRAJ17)
CAMTLTGNKLTF

SEQ ID NO: 714732 - protein, 13 aa, Homo sapiens
  CDR3 for beta chain variable domain of TCR clone 357366 (TRBV28, TRBJ2-7)
CASTPGLAGEQYF

SEQ ID NO: 714733 - protein, 11 aa, Homo sapiens
  CDR3 for alpha chain variable domain of TCR clone 357367 (TRAV21, TRAJ34)
CAVTNTDKLIF

SEQ ID NO: 714734 - protein, 12 aa, Homo sapiens
  CDR3 for beta chain variable domain of TCR clone 357367 (TRBV7-9, TRBJ1-1)
CASSLVRGEALF

SEQ ID NO: 714735 - protein, 13 aa, Homo sapiens
  CDR3 for alpha chain variable domain of TCR clone 357368 (TRAV38-2/DV8, TRAJ56)
CAYQSGANSKLTF

SEQ ID NO: 714736 - protein, 16 aa, Homo sapiens
  CDR3 for beta chain variable domain of TCR clone 357368 (TRBV28, TRBJ1-1)
CASSSGGQPVATEAFF

SEQ ID NO: 714737 - protein, 16 aa, Homo sapiens
  CDR3 for alpha chain variable domain of TCR clone 357369 (TRAV14/DV4, TRAJ53)
CAMREGGGGSNYKLTF

SEQ ID NO: 714738 - protein, 19 aa, Homo sapiens
  CDR3 for beta chain variable domain of TCR clone 357369 (TRBV28, TRBJ2-4)
CARSFQPGGPAHSKNIQYF

SEQ ID NO: 714739 - protein, 12 aa, Homo sapiens
  CDR3 for alpha chain variable domain of TCR clone 357370 (TRAV21, TRAJ11)
CAATSGYSTIPF

SEQ ID NO: 714740 - protein, 14 aa, Homo sapiens
  CDR3 for beta chain variable domain of TCR clone 357370 (TRBV20-1, TRBJ2-7)
CSAPGLAGVGEQYF

SEQ ID NO: 714741 - protein, 14 aa, Homo sapiens
  CDR3 for alpha chain variable domain of TCR clone 357371 (TRAV36/DV7, TRAJ53)
CAVVDGGSNYKLTF

SEQ ID NO: 714742 - protein, 11 aa, Homo sapiens
  CDR3 for beta chain variable domain of TCR clone 357371 (TRBV11-2, TRBJ2-2)
CASSLPGELFF

SEQ ID NO: 714743 - protein, 14 aa, Homo sapiens
  CDR3 for alpha chain variable domain of TCR clone 357372 (TRAV13-1, TRAJ5)
CAASPGSRRRALTF

SEQ ID NO: 714744 - protein, 17 aa, Homo sapiens
  CDR3 for beta chain variable domain of TCR clone 357372 (TRBV20-1, TRBJ2-1)
CSASSSGLGDPTMSSSS

SEQ ID NO: 714745 - protein, 13 aa, Homo sapiens
  CDR3 for alpha chain variable domain of TCR clone 357373 (TRAV39, TRAJ58)
CAGEETSGSRLTF

SEQ ID NO: 714746 - protein, 13 aa, Homo sapiens
  CDR3 for beta chain variable domain of TCR clone 357373 (TRBV7-3, TRBJ1-1)
CASSQDWGAEAFF

SEQ ID NO: 714747 - protein, 16 aa, Homo sapiens
  CDR3 for alpha chain variable domain of TCR clone 357374 (TRAV29/DV5, TRAJ39)
CAACLLFNNAGNMLTF

SEQ ID NO: 714748 - protein, 16 aa, Homo sapiens
  CDR3 for beta chain variable domain of TCR clone 357374 (TRBV19, TRBJ2-6)
CASSMSGLSGANVLTF

SEQ ID NO: 714749 - protein, 15 aa, Homo sapiens
  CDR3 for alpha chain variable domain of TCR clone 357375 (TRAV20, TRAJ24)
CAVQAAPDSWGKFQF

SEQ ID NO: 714750 - protein, 14 aa, Homo sapiens
  CDR3 for beta chain variable domain of TCR clone 357375 (TRBV20-1, TRBJ1-1)
CGARDRGQGSEAFF

SEQ ID NO: 714751 - protein, 23 aa, Homo sapiens
  CDR3 for alpha chain variable domain of TCR clone 357376 (TRAV8-3, TRAJ38)
CAVGASNAGNNHIQNPDHAVYQL

SEQ ID NO: 714752 - protein, 15 aa, Homo sapiens
  CDR3 for beta chain variable domain of TCR clone 357376 (TRBV11-3, TRBJ1-3)
CASSLFGPSGNTIYF

SEQ ID NO: 714753 - protein, 15 aa, Homo sapiens
  CDR3 for alpha chain variable domain of TCR clone 357377 (TRAV13-1, TRAJ52)
CAASSPSTSYGKLTF

SEQ ID NO: 714754 - protein, 14 aa, Homo sapiens
  CDR3 for beta chain variable domain of TCR clone 357377 (TRBV18, TRBJ2-5)
CASSPGVSQETQYF

SEQ ID NO: 714755 - protein, 15 aa, Homo sapiens
  CDR3 for alpha chain variable domain of TCR clone 357378 (TRAV40, TRAJ45)
CLLGDLGGGADGLTF

SEQ ID NO: 714756 - protein, 15 aa, Homo sapiens
  CDR3 for beta chain variable domain of TCR clone 357378 (TRBV3-1, TRBJ1-5)
CASSPGGLGNQPQHF

SEQ ID NO: 714757 - protein, 15 aa, Homo sapiens
  CDR3 for alpha chain variable domain of TCR clone 357379 (TRAV17, TRAJ22)
CATVAPSGSARQLPF

SEQ ID NO: 714758 - protein, 15 aa, Homo sapiens
  CDR3 for beta chain variable domain of TCR clone 357379 (TRBV27, TRBJ1-6)
CASSFDRGLGSPLHF

SEQ ID NO: 714759 - protein, 16 aa, Homo sapiens
  CDR3 for alpha chain variable domain of TCR clone 357380 (TRAV3, TRAJ37)
CAVRGKGSGNTGKLIF

SEQ ID NO: 714760 - protein, 14 aa, Homo sapiens
  CDR3 for beta chain variable domain of TCR clone 357380 (TRBV7-8, TRBJ2-3)
CASSSEAGTDTQYF

SEQ ID NO: 714761 - protein, 15 aa, Homo sapiens
  CDR3 for alpha chain variable domain of TCR clone 357381 (TRAV14/DV4, TRAJ36)
CAMREPQTGANNLFF

SEQ ID NO: 714762 - protein, 16 aa, Homo sapiens
  CDR3 for beta chain variable domain of TCR clone 357381 (TRBV12-5, TRBJ2-5)
CASGPRTSGNQETQYF

SEQ ID NO: 714763 - protein, 14 aa, Homo sapiens
  CDR3 for alpha chain variable domain of TCR clone 357382 (TRAV14/DV4, TRAJ20)
CAMRESLTDYKLSF

SEQ ID NO: 714764 - protein, 15 aa, Homo sapiens
  CDR3 for beta chain variable domain of TCR clone 357382 (TRBV27, TRBJ2-1)
CASSNGGGSSNEQFF

SEQ ID NO: 714765 - protein, 14 aa, Homo sapiens
  CDR3 for alpha chain variable domain of TCR clone 357383 (TRAV1-2, TRAJ16)
CAVNRFSDGQKLLF

SEQ ID NO: 714766 - protein, 15 aa, Homo sapiens
  CDR3 for beta chain variable domain of TCR clone 357383 (TRBV24-1, TRBJ2-1)
CATRAAQGGYNEQFF

SEQ ID NO: 714767 - protein, 14 aa, Homo sapiens
  CDR3 for alpha chain variable domain of TCR clone 357384 (TRAV2, TRAJ29)
CAVTPPSGNTPLFF

SEQ ID NO: 714768 - protein, 13 aa, Homo sapiens
  CDR3 for beta chain variable domain of TCR clone 357384 (TRBV11-2, TRBJ2-1)
CASSLGLAGGRFF

SEQ ID NO: 714769 - protein, 16 aa, Homo sapiens
  CDR3 for alpha chain variable domain of TCR clone 357385 (TRAV30, TRAJ49)
SAAQRVGPNTGNQFYF

SEQ ID NO: 714770 - protein, 15 aa, Homo sapiens
  CDR3 for beta chain variable domain of TCR clone 357385 (TRBV2, TRBJ2-1)
CASSELAWSYNEQFF

SEQ ID NO: 714771 - protein, 15 aa, Homo sapiens
  CDR3 for alpha chain variable domain of TCR clone 357386 (TRAV8-3, TRAJ27)
CAVGPSKTNSGKSTF

SEQ ID NO: 714772 - protein, 15 aa, Homo sapiens
  CDR3 for beta chain variable domain of TCR clone 357386 (TRBV7-9, TRBJ2-7)
CASSLALAEDYEQYF

SEQ ID NO: 714773 - protein, 14 aa, Homo sapiens
  CDR3 for alpha chain variable domain of TCR clone 357387 (TRAV2, TRAJ37)
CAVDFTSSTGKLIF

SEQ ID NO: 714774 - protein, 15 aa, Homo sapiens
  CDR3 for beta chain variable domain of TCR clone 357387 (TRBV20-1, TRBJ1-1)
CSARRGVTGNTEAFF

SEQ ID NO: 714775 - protein, 13 aa, Homo sapiens
  CDR3 for alpha chain variable domain of TCR clone 357388 (TRAV12-3, TRAJ33)
CAMNVNSNYQLIW

SEQ ID NO: 714776 - protein, 12 aa, Homo sapiens
  CDR3 for beta chain variable domain of TCR clone 357388 (TRBV11-2, TRBJ2-2)
CASSLGGGELFF

SEQ ID NO: 714777 - protein, 14 aa, Homo sapiens
  CDR3 for alpha chain variable domain of TCR clone 357389 (TRAV3, TRAJ8)
RAALMNTGFQKLVF

SEQ ID NO: 714778 - protein, 15 aa, Homo sapiens
  CDR3 for beta chain variable domain of TCR clone 357389 (TRBV28, TRBJ2-5)
CASSLGLGNQETQYF

SEQ ID NO: 714779 - protein, 14 aa, Homo sapiens
  CDR3 for alpha chain variable domain of TCR clone 357390 (TRAV12-3, TRAJ11)
CAMTTNSGYSTLTF

SEQ ID NO: 714780 - protein, 16 aa, Homo sapiens
  CDR3 for beta chain variable domain of TCR clone 357390 (TRBV20-1, TRBJ1-1)
CSARALTQGLNTEAFF

SEQ ID NO: 714781 - protein, 13 aa, Homo sapiens
  CDR3 for alpha chain variable domain of TCR clone 357391 (TRAV13-1, TRAJ6)
CAASRGGSYIPTF

SEQ ID NO: 714782 - protein, 14 aa, Homo sapiens
  CDR3 for beta chain variable domain of TCR clone 357391 (TRBV7-2, TRBJ2-5)
CSSSFGGAQETQYF

SEQ ID NO: 714783 - protein, 15 aa, Homo sapiens
  CDR3 for alpha chain variable domain of TCR clone 357392 (TRAV8-3, TRAJ27)
CAVGPSKTNAGNSTF

SEQ ID NO: 714784 - protein, 15 aa, Homo sapiens
  CDR3 for beta chain variable domain of TCR clone 357392 (TRBV7-2, TRBJ2-1)
CASSAGLAGGNEQFF

SEQ ID NO: 714785 - protein, 13 aa, Homo sapiens
  CDR3 for alpha chain variable domain of TCR clone 357393 (TRAV17, TRAJ5)
SALRGTGRRALTF

SEQ ID NO: 714786 - protein, 17 aa, Homo sapiens
  CDR3 for beta chain variable domain of TCR clone 357393 (TRBV4-1, TRBJ2-3)
CASSQGYVSGGTDTQYF

SEQ ID NO: 714787 - protein, 14 aa, Homo sapiens
  CDR3 for alpha chain variable domain of TCR clone 357394 (TRAV13-1, TRAJ44)
CAAKATGTASKLTF

SEQ ID NO: 714788 - protein, 18 aa, Homo sapiens
  CDR3 for beta chain variable domain of TCR clone 357394 (TRBV20-1, TRBJ2-6)
CSAETTPTHGSGANVLTF

SEQ ID NO: 714789 - protein, 17 aa, Homo sapiens
  CDR3 for alpha chain variable domain of TCR clone 357395 (TRAV14/DV4, TRAJ22)
CAMREGFSSGSARQLTF

SEQ ID NO: 714790 - protein, 13 aa, Homo sapiens
  CDR3 for beta chain variable domain of TCR clone 357395 (TRBV7-3, TRBJ2-7)
CASSPGQGSEQYF

SEQ ID NO: 714791 - protein, 14 aa, Homo sapiens
  CDR3 for alpha chain variable domain of TCR clone 357396 (TRAV17, TRAJ57)
CATDPQGGSEKLVF

SEQ ID NO: 714792 - protein, 16 aa, Homo sapiens
  CDR3 for beta chain variable domain of TCR clone 357396 (TRBV13, TRBJ2-2)
CASSTRTGEHTGELFF

SEQ ID NO: 714793 - protein, 14 aa, Homo sapiens
  CDR3 for alpha chain variable domain of TCR clone 357397 (TRAV26-1, TRAJ48)
CIVKSNFGNQKLTF

SEQ ID NO: 714794 - protein, 13 aa, Homo sapiens
  CDR3 for beta chain variable domain of TCR clone 357397 (TRBV5-1, TRBJ2-5)
CASSVPPAETQYF

SEQ ID NO: 714795 - protein, 16 aa, Homo sapiens
  CDR3 for alpha chain variable domain of TCR clone 357398 (TRAV30, TRAJ24)
CGTEIVDADSWGKFQF

SEQ ID NO: 714796 - protein, 14 aa, Homo sapiens
  CDR3 for beta chain variable domain of TCR clone 357398 (TRBV7-8, TRBJ2-3)
CASSLEAGSDTQYF

SEQ ID NO: 714797 - protein, 15 aa, Homo sapiens
  CDR3 for alpha chain variable domain of TCR clone 357399 (TRAV12-2, TRAJ53)
CAVNRGGGSNYKLTF

SEQ ID NO: 714798 - protein, 17 aa, Homo sapiens
  CDR3 for beta chain variable domain of TCR clone 357399 (TRBV20-1, TRBJ2-2)
CSASGSGQGGLTGELFF

SEQ ID NO: 714799 - protein, 14 aa, Homo sapiens
  CDR3 for alpha chain variable domain of TCR clone 357400 (TRAV8-3, TRAJ30)
CVVGDMNRDDKIIF

SEQ ID NO: 714800 - protein, 17 aa, Homo sapiens
  CDR3 for beta chain variable domain of TCR clone 357400 (TRBV19, TRBJ2-2)
CASSRNPGGFGTGELFF

SEQ ID NO: 714801 - protein, 11 aa, Homo sapiens
  CDR3 for alpha chain variable domain of TCR clone 357401 (TRAV2, TRAJ13)
CASGGYQKVTF

SEQ ID NO: 714802 - protein, 20 aa, Homo sapiens
  CDR3 for beta chain variable domain of TCR clone 357401 (TRBV4-1, TRBJ2-5)
CASPPGGAETRDPVLRARHA

SEQ ID NO: 714803 - protein, 14 aa, Homo sapiens
  CDR3 for alpha chain variable domain of TCR clone 357402 (TRAV21, TRAJ45)
CAVSSGGGADGLTF

SEQ ID NO: 714804 - protein, 15 aa, Homo sapiens
  CDR3 for beta chain variable domain of TCR clone 357402 (TRBV15, TRBJ1-3)
CATSRDRRRGNTIYF

SEQ ID NO: 714805 - protein, 12 aa, Homo sapiens
  CDR3 for alpha chain variable domain of TCR clone 357403 (TRAV2, TRAJ5)
CALDTGRKALTF

SEQ ID NO: 714806 - protein, 15 aa, Homo sapiens
  CDR3 for beta chain variable domain of TCR clone 357403 (TRBV10-3, TRBJ2-1)
CAISDVQDRAYEQFF

SEQ ID NO: 714807 - protein, 14 aa, Homo sapiens
  CDR3 for alpha chain variable domain of TCR clone 357404 (TRAV1-2, TRAJ6)
CAVSLSGGSYIPTF

SEQ ID NO: 714808 - protein, 15 aa, Homo sapiens
  CDR3 for beta chain variable domain of TCR clone 357404 (TRBV28, TRBJ2-7)
CASSHGGRGFYEQYF

SEQ ID NO: 714809 - protein, 13 aa, Homo sapiens
  CDR3 for alpha chain variable domain of TCR clone 357405 (TRAV12-1, TRAJ29)
CVVNGPGHTPLVF

SEQ ID NO: 714810 - protein, 13 aa, Homo sapiens
  CDR3 for beta chain variable domain of TCR clone 357405 (TRBV7-2, TRBJ2-5)
CASSRGGLETRYF

SEQ ID NO: 714811 - protein, 16 aa, Homo sapiens
  CDR3 for alpha chain variable domain of TCR clone 357406 (TRAV3, TRAJ8)
CAVRDYPNTGFQKLVF

SEQ ID NO: 714812 - protein, 15 aa, Homo sapiens
  CDR3 for beta chain variable domain of TCR clone 357406 (TRBV7-9, TRBJ2-7)
CASSLALAEAYEQYF

SEQ ID NO: 714813 - protein, 16 aa, Homo sapiens
  CDR3 for alpha chain variable domain of TCR clone 357407 (TRAV2, TRAJ20)
TTVLWSFRSNDYKLSF

SEQ ID NO: 714814 - protein, 12 aa, Homo sapiens
  CDR3 for beta chain variable domain of TCR clone 357407 (TRBV7-6, TRBJ2-3)
CASSTGTDTKYF

SEQ ID NO: 714815 - protein, 10 aa, Homo sapiens
  CDR3 for alpha chain variable domain of TCR clone 357408 (TRAV12-3, TRAJ49)
CAMNDDQFYF

SEQ ID NO: 714816 - protein, 14 aa, Homo sapiens
  CDR3 for beta chain variable domain of TCR clone 357408 (TRBV28, TRBJ2-1)
CASSLLQGTNEQFF

SEQ ID NO: 714817 - protein, 15 aa, Homo sapiens
  CDR3 for alpha chain variable domain of TCR clone 357409 (TRAV1-2, TRAJ38)
CAVSENAGNNRKLIW

SEQ ID NO: 714818 - protein, 16 aa, Homo sapiens
  CDR3 for beta chain variable domain of TCR clone 357409 (TRBV4-1, TRBJ2-7)
CASSLTAGKATYEQYF

SEQ ID NO: 714819 - protein, 15 aa, Homo sapiens
  CDR3 for alpha chain variable domain of TCR clone 357410 (TRAV17, TRAJ16)
CATALRFSEGQKLLF

SEQ ID NO: 714820 - protein, 15 aa, Homo sapiens
  CDR3 for beta chain variable domain of TCR clone 357410 (TRBV13, TRBJ1-5)
CASSFGQGGVQPQHF

SEQ ID NO: 714821 - protein, 15 aa, Homo sapiens
  CDR3 for alpha chain variable domain of TCR clone 357411 (TRAV8-3, TRAJ27)
CAVGPSKTNAGNSTF

SEQ ID NO: 714822 - protein, 15 aa, Homo sapiens
  CDR3 for beta chain variable domain of TCR clone 357411 (TRBV7-2, TRBJ2-1)
CASSPGLAGGNEQFF

SEQ ID NO: 714823 - protein, 13 aa, Homo sapiens
  CDR3 for alpha chain variable domain of TCR clone 357412 (TRAV23/DV6, TRAJ22)
CAQWGGSARQLTF

SEQ ID NO: 714824 - protein, 14 aa, Homo sapiens
  CDR3 for beta chain variable domain of TCR clone 357412 (TRBV18, TRBJ2-7)
CASSPTSGGYEQYF

SEQ ID NO: 714825 - protein, 12 aa, Homo sapiens
  CDR3 for alpha chain variable domain of TCR clone 357413 (TRAV23/DV6, TRAJ58)
CAARLLRGETSG

SEQ ID NO: 714826 - protein, 14 aa, Homo sapiens
  CDR3 for beta chain variable domain of TCR clone 357413 (TRBV2, TRBJ2-7)
CASSLTSGGYDQYF

SEQ ID NO: 714827 - protein, 14 aa, Homo sapiens
  CDR3 for alpha chain variable domain of TCR clone 357414 (TRAV26-1, TRAJ34)
FIVRVAYNTAKLIF

SEQ ID NO: 714828 - protein, 15 aa, Homo sapiens
  CDR3 for beta chain variable domain of TCR clone 357414 (TRBV20-1, TRBJ2-7)
CSARVPAAYFYEQYF

SEQ ID NO: 714829 - protein, 13 aa, Homo sapiens
  CDR3 for alpha chain variable domain of TCR clone 357415 (TRAV21, TRAJ56)
CAVRTGVNSKLTF

SEQ ID NO: 714830 - protein, 15 aa, Homo sapiens
  CDR3 for beta chain variable domain of TCR clone 357415 (TRBV7-9, TRBJ1-1)
CASSHRGTVNTEAFF

SEQ ID NO: 714831 - protein, 11 aa, Homo sapiens
  CDR3 for alpha chain variable domain of TCR clone 357416 (TRAV1-1, TRAJ23)
CSVRQGGKLIF

SEQ ID NO: 714832 - protein, 13 aa, Homo sapiens
  CDR3 for beta chain variable domain of TCR clone 357416 (TRBV11-2, TRBJ2-5)
CASSRGPSETQYF

SEQ ID NO: 714833 - protein, 14 aa, Homo sapiens
  CDR3 for alpha chain variable domain of TCR clone 357417 (TRAV1-2, TRAJ8)
CAVREDTGFQKLVF

SEQ ID NO: 714834 - protein, 15 aa, Homo sapiens
  CDR3 for beta chain variable domain of TCR clone 357417 (TRBV19, TRBJ2-7)
CASSIGRTFSYEQYF

SEQ ID NO: 714835 - protein, 13 aa, Homo sapiens
  CDR3 for alpha chain variable domain of TCR clone 357418 (TRAV17, TRAJ29)
CATDAFRKNTSCL

SEQ ID NO: 714836 - protein, 15 aa, Homo sapiens
  CDR3 for beta chain variable domain of TCR clone 357418 (TRBV4-1, TRBJ2-5)
CASSQWDLYQETQYF

SEQ ID NO: 714837 - protein, 14 aa, Homo sapiens
  CDR3 for alpha chain variable domain of TCR clone 357419 (TRAV12-1, TRAJ30)
CVVNIGGRDDKIIF

SEQ ID NO: 714838 - protein, 17 aa, Homo sapiens
  CDR3 for beta chain variable domain of TCR clone 357419 (TRBV20-1, TRBJ2-1)
CSASSSGLAGSYNEQFF

SEQ ID NO: 714839 - protein, 13 aa, Homo sapiens
  CDR3 for alpha chain variable domain of TCR clone 357420 (TRAV21, TRAJ20)
CAVGLRVDYKLSF

SEQ ID NO: 714840 - protein, 11 aa, Homo sapiens
  CDR3 for beta chain variable domain of TCR clone 357420 (TRBV29-1, TRBJ2-5)
CSEDRTGTQYV

SEQ ID NO: 714841 - protein, 14 aa, Homo sapiens
  CDR3 for alpha chain variable domain of TCR clone 357421 (TRAV29/DV5, TRAJ36)
CAARRRTGANNLFF

SEQ ID NO: 714842 - protein, 16 aa, Homo sapiens
  CDR3 for beta chain variable domain of TCR clone 357421 (TRBV19, TRBJ1-1)
CASRFGGPVTGTEAFF

SEQ ID NO: 714843 - protein, 11 aa, Homo sapiens
  CDR3 for alpha chain variable domain of TCR clone 357422 (TRAV21, TRAJ17)
CAAPAGNKLTF

SEQ ID NO: 714844 - protein, 14 aa, Homo sapiens
  CDR3 for beta chain variable domain of TCR clone 357422 (TRBV4-1, TRBJ2-2)
CASSQAVNTGELFF

SEQ ID NO: 714845 - protein, 14 aa, Homo sapiens
  CDR3 for alpha chain variable domain of TCR clone 357423 (TRAV8-3, TRAJ36)
CAVGPITGANNLFF

SEQ ID NO: 714846 - protein, 15 aa, Homo sapiens
  CDR3 for beta chain variable domain of TCR clone 357423 (TRBV11-2, TRBJ2-1)
CASSRNRGLMYEQFF

SEQ ID NO: 714847 - protein, 15 aa, Homo sapiens
  CDR3 for alpha chain variable domain of TCR clone 357424 (TRAV26-1, TRAJ29)
CIVRVEGSGNTPLVF

SEQ ID NO: 714848 - protein, 17 aa, Homo sapiens
  CDR3 for beta chain variable domain of TCR clone 357424 (TRBV18, TRBJ1-5)
CASSPTMGQGTNQPQHF

SEQ ID NO: 714849 - protein, 11 aa, Homo sapiens
  CDR3 for alpha chain variable domain of TCR clone 357425 (TRAV12-3, TRAJ43)
CAMSVSNDMRF

SEQ ID NO: 714850 - protein, 12 aa, Homo sapiens
  CDR3 for beta chain variable domain of TCR clone 357425 (TRBV6-1, TRBJ2-7)
CASSDYSYEQYF

SEQ ID NO: 714851 - protein, 14 aa, Homo sapiens
  CDR3 for alpha chain variable domain of TCR clone 357426 (TRAV8-4, TRAJ15)
CAVTIREAGTALIF

SEQ ID NO: 714852 - protein, 16 aa, Homo sapiens
  CDR3 for beta chain variable domain of TCR clone 357426 (TRBV29-1, TRBJ2-6)
CSVENITYSGANVLTF

SEQ ID NO: 714853 - protein, 12 aa, Homo sapiens
  CDR3 for alpha chain variable domain of TCR clone 357427 (TRAV12-2, TRAJ21)
CAVQYNFNKFYF

SEQ ID NO: 714854 - protein, 14 aa, Homo sapiens
  CDR3 for beta chain variable domain of TCR clone 357427 (TRBV28, TRBJ2-1)
CASSYYTAYNEQFF

SEQ ID NO: 714855 - protein, 14 aa, Homo sapiens
  CDR3 for alpha chain variable domain of TCR clone 357428 (TRAV12-2, TRAJ13)
CAVNPSGGYQKVTF

SEQ ID NO: 714856 - protein, 14 aa, Homo sapiens
  CDR3 for beta chain variable domain of TCR clone 357428 (TRBV12-4, TRBJ1-1)
CASSLGTGGTEAFC

SEQ ID NO: 714857 - protein, 12 aa, Homo sapiens
  CDR3 for alpha chain variable domain of TCR clone 357429 (TRAV3, TRAJ20)
CAVRDPDYKLSF

SEQ ID NO: 714858 - protein, 12 aa, Homo sapiens
  CDR3 for beta chain variable domain of TCR clone 357429 (TRBV9, TRBJ2-1)
CQQRRARGEQFF

SEQ ID NO: 714859 - protein, 13 aa, Homo sapiens
  CDR3 for alpha chain variable domain of TCR clone 357430 (TRAV16, TRAJ28)
CALTGAGSYQLTF

SEQ ID NO: 714860 - protein, 12 aa, Homo sapiens
  CDR3 for beta chain variable domain of TCR clone 357430 (TRBV11-2, TRBJ2-2)
CASSLGGGELFF

SEQ ID NO: 714861 - protein, 15 aa, Homo sapiens
  CDR3 for alpha chain variable domain of TCR clone 357431 (TRAV26-2, TRAJ13)
CILRDLSGGYQKVTF

SEQ ID NO: 714862 - protein, 11 aa, Homo sapiens
  CDR3 for beta chain variable domain of TCR clone 357431 (TRBV7-9, TRBJ2-5)
CASILSATQYF

SEQ ID NO: 714863 - protein, 14 aa, Homo sapiens
  CDR3 for alpha chain variable domain of TCR clone 357432 (TRAV1-2, TRAJ8)
CAVREDTGSQKLVF

SEQ ID NO: 714864 - protein, 15 aa, Homo sapiens
  CDR3 for beta chain variable domain of TCR clone 357432 (TRBV10-2, TRBJ2-6)
CASSEQGTGANVLTF

SEQ ID NO: 714865 - protein, 16 aa, Homo sapiens
  CDR3 for alpha chain variable domain of TCR clone 357433 (TRAV29/DV5, TRAJ28)
CAADAYSGAGSYQLTC

SEQ ID NO: 714866 - protein, 15 aa, Homo sapiens
  CDR3 for beta chain variable domain of TCR clone 357433 (TRBV24-1, TRBJ1-4)
CATSDPQGADEKLFF

SEQ ID NO: 714867 - protein, 19 aa, Homo sapiens
  CDR3 for alpha chain variable domain of TCR clone 357434 (TRAV35, TRAJ22)
CAGQLATVDASGSARQLTF

SEQ ID NO: 714868 - protein, 12 aa, Homo sapiens
  CDR3 for beta chain variable domain of TCR clone 357434 (TRBV11-2, TRBJ2-2)
CASSLGGGELFF

SEQ ID NO: 714869 - protein, 15 aa, Homo sapiens
  CDR3 for alpha chain variable domain of TCR clone 357435 (TRAV27, TRAJ38)
CAARRNAGHNRKLIW

SEQ ID NO: 714870 - protein, 17 aa, Homo sapiens
  CDR3 for beta chain variable domain of TCR clone 357435 (TRBV20-1, TRBJ2-2)
CSASGSGQGGLTGELFF

SEQ ID NO: 714871 - protein, 12 aa, Homo sapiens
  CDR3 for alpha chain variable domain of TCR clone 357436 (TRAV3, TRAJ20)
CALRDHDYKPSF

SEQ ID NO: 714872 - protein, 13 aa, Homo sapiens
  CDR3 for beta chain variable domain of TCR clone 357436 (TRBV9, TRBJ2-7)
CASSVGQGGEQYF

SEQ ID NO: 714873 - protein, 17 aa, Homo sapiens
  CDR3 for alpha chain variable domain of TCR clone 357437 (TRAV36/DV7, TRAJ52)
CAVAQRAGSTSYGKLTF

SEQ ID NO: 714874 - protein, 14 aa, Homo sapiens
  CDR3 for beta chain variable domain of TCR clone 357437 (TRBV6-1, TRBJ1-3)
CASVQGGGGNTIYF

SEQ ID NO: 714875 - protein, 14 aa, Homo sapiens
  CDR3 for alpha chain variable domain of TCR clone 357438 (TRAV25, TRAJ27)
CAGPGNTNAGKSTF

SEQ ID NO: 714876 - protein, 16 aa, Homo sapiens
  CDR3 for beta chain variable domain of TCR clone 357438 (TRBV4-1, TRBJ2-6)
CASSQDGGPGADVLTF

SEQ ID NO: 714877 - protein, 15 aa, Homo sapiens
  CDR3 for alpha chain variable domain of TCR clone 357439 (TRAV26-1, TRAJ29)
CIVRVEGSGNTPLVF

SEQ ID NO: 714878 - protein, 12 aa, Homo sapiens
  CDR3 for beta chain variable domain of TCR clone 357439 (TRBV24-1, TRBJ2-3)
CATSDSTDTQYF

SEQ ID NO: 714879 - protein, 13 aa, Homo sapiens
  CDR3 for alpha chain variable domain of TCR clone 357440 (TRAV8-4, TRAJ30)
CDVSVNRDDKIIF

SEQ ID NO: 714880 - protein, 13 aa, Homo sapiens
  CDR3 for beta chain variable domain of TCR clone 357440 (TRBV3-1, TRBJ2-2)
CASLARGSGELFF

SEQ ID NO: 714881 - protein, 13 aa, Homo sapiens
  CDR3 for alpha chain variable domain of TCR clone 357441 (TRAV23/DV6, TRAJ6)
CSAKTGGSYIPTF

SEQ ID NO: 714882 - protein, 15 aa, Homo sapiens
  CDR3 for beta chain variable domain of TCR clone 357441 (TRBV5-1, TRBJ1-2)
CASSSYGEFDYGYTF

SEQ ID NO: 714883 - protein, 13 aa, Homo sapiens
  CDR3 for alpha chain variable domain of TCR clone 357442 (TRAV2, TRAJ15)
CSVASQAGTALIF

SEQ ID NO: 714884 - protein, 20 aa, Homo sapiens
  CDR3 for beta chain variable domain of TCR clone 357442 (TRBV7-8, TRBJ2-2)
CASSHLFPGPTIHITGELFF

SEQ ID NO: 714885 - protein, 15 aa, Homo sapiens
  CDR3 for alpha chain variable domain of TCR clone 357443 (TRAV17, TRAJ57)
CATGPSQGGSEKLVF

SEQ ID NO: 714886 - protein, 15 aa, Homo sapiens
  CDR3 for beta chain variable domain of TCR clone 357443 (TRBV7-2, TRBJ1-2)
SASSPRAGWNYGYTF

SEQ ID NO: 714887 - protein, 20 aa, Homo sapiens
  CDR3 for alpha chain variable domain of TCR clone 357444 (TRAV26-1, TRAJ42)
CCVLLHRQTYYGGSQGNLIF

SEQ ID NO: 714888 - protein, 18 aa, Homo sapiens
  CDR3 for beta chain variable domain of TCR clone 357444 (TRBV7-2, TRBJ2-3)
CASSLKREGSGITDTQYF

SEQ ID NO: 714889 - protein, 15 aa, Homo sapiens
  CDR3 for alpha chain variable domain of TCR clone 357445 (TRAV27, TRAJ50)
CAGRERGTSHDKVIF

SEQ ID NO: 714890 - protein, 16 aa, Homo sapiens
  CDR3 for beta chain variable domain of TCR clone 357445 (TRBV10-3, TRBJ1-5)
CAISDQVGAPNQPQHF

SEQ ID NO: 714891 - protein, 11 aa, Homo sapiens
  CDR3 for alpha chain variable domain of TCR clone 357446 (TRAV12-1, TRAJ8)
CVVTGFQKLVF

SEQ ID NO: 714892 - protein, 16 aa, Homo sapiens
  CDR3 for beta chain variable domain of TCR clone 357446 (TRBV5-1, TRBJ2-7)
CASSLEGLAGLYEQYF

SEQ ID NO: 714893 - protein, 14 aa, Homo sapiens
  CDR3 for alpha chain variable domain of TCR clone 357447 (TRAV23/DV6, TRAJ27)
CAASRDTNPGKSTF

SEQ ID NO: 714894 - protein, 13 aa, Homo sapiens
  CDR3 for beta chain variable domain of TCR clone 357447 (TRBV20-1, TRBJ1-5)
CSASGRGNQHQHF

SEQ ID NO: 714895 - protein, 16 aa, Homo sapiens
  CDR3 for alpha chain variable domain of TCR clone 357448 (TRAV30, TRAJ24)
CGTEIVDADSWGKFQF

SEQ ID NO: 714896 - protein, 15 aa, Homo sapiens
  CDR3 for beta chain variable domain of TCR clone 357448 (TRBV7-9, TRBJ1-4)
CASSARTGGNEHLFF

SEQ ID NO: 714897 - protein, 16 aa, Homo sapiens
  CDR3 for alpha chain variable domain of TCR clone 357449 (TRAV12-3, TRAJ18)
CAMRGSRGSNLGRLYF

SEQ ID NO: 714898 - protein, 19 aa, Homo sapiens
  CDR3 for beta chain variable domain of TCR clone 357449 (TRBV6-3, TRBJ2-7)
CASSYRTGLAGGVSGEQYF

SEQ ID NO: 714899 - protein, 14 aa, Homo sapiens
  CDR3 for alpha chain variable domain of TCR clone 357450 (TRAV20, TRAJ9)
CAVQASIGGFKTIF

SEQ ID NO: 714900 - protein, 14 aa, Homo sapiens
  CDR3 for beta chain variable domain of TCR clone 357450 (TRBV12-5, TRBJ1-6)
CASRVGQINSPLHF

SEQ ID NO: 714901 - protein, 18 aa, Homo sapiens
  CDR3 for alpha chain variable domain of TCR clone 357451 (TRAV13-1, TRAJ52)
CAASKRSAGGTSYGKLTF

SEQ ID NO: 714902 - protein, 14 aa, Homo sapiens
  CDR3 for beta chain variable domain of TCR clone 357451 (TRBV11-2, TRBJ2-3)
CASSRLARTDTQYF

SEQ ID NO: 714903 - protein, 14 aa, Homo sapiens
  CDR3 for alpha chain variable domain of TCR clone 357452 (TRAV16, TRAJ32)
CALNSGGATNKLIF

SEQ ID NO: 714904 - protein, 17 aa, Homo sapiens
  CDR3 for beta chain variable domain of TCR clone 357452 (TRBV20-1, TRBJ2-1)
CSASSSGLAGSYNEQFF

SEQ ID NO: 714905 - protein, 14 aa, Homo sapiens
  CDR3 for alpha chain variable domain of TCR clone 357453 (TRAV12-3, TRAJ10)
SHLPLTGGGNRLTF

SEQ ID NO: 714906 - protein, 20 aa, Homo sapiens
  CDR3 for beta chain variable domain of TCR clone 357453 (TRBV28, TRBJ2-1)
CASTPIGRSPGLAGGNEQFF

SEQ ID NO: 714907 - protein, 13 aa, Homo sapiens
  CDR3 for alpha chain variable domain of TCR clone 357454 (TRAV12-2, TRAJ9)
CAGGNTGGFKTIF

SEQ ID NO: 714908 - protein, 15 aa, Homo sapiens
  CDR3 for beta chain variable domain of TCR clone 357454 (TRBV20-1, TRBJ2-7)
CSARDRVSGMDEQYF

SEQ ID NO: 714909 - protein, 15 aa, Homo sapiens
  CDR3 for alpha chain variable domain of TCR clone 357455 (TRAV14/DV4, TRAJ36)
CAMREPQTGANNLFF

SEQ ID NO: 714910 - protein, 11 aa, Homo sapiens
  CDR3 for beta chain variable domain of TCR clone 357455 (TRBV2, TRBJ2-2)
CASSPYGELFF

SEQ ID NO: 714911 - protein, 12 aa, Homo sapiens
  CDR3 for alpha chain variable domain of TCR clone 357456 (TRAV16, TRAJ10)
CSRTGGGNKLTF

SEQ ID NO: 714912 - protein, 12 aa, Homo sapiens
  CDR3 for beta chain variable domain of TCR clone 357456 (TRBV3-1, TRBJ2-1)
CASSQGSSGQFF

SEQ ID NO: 714913 - protein, 15 aa, Homo sapiens
  CDR3 for alpha chain variable domain of TCR clone 357457 (TRAV35, TRAJ40)
CAGQLGTSGTYKYIF

SEQ ID NO: 714914 - protein, 15 aa, Homo sapiens
  CDR3 for beta chain variable domain of TCR clone 357457 (TRBV9, TRBJ1-6)
CASSVAGTGDSPLHF

SEQ ID NO: 714915 - protein, 18 aa, Homo sapiens
  CDR3 for alpha chain variable domain of TCR clone 357458 (TRAV26-1, TRAJ22)
CIVRVALISSGSARQLTF

SEQ ID NO: 714916 - protein, 13 aa, Homo sapiens
  CDR3 for beta chain variable domain of TCR clone 357458 (TRBV13, TRBJ2-5)
CASSPVVGETQYF

SEQ ID NO: 714917 - protein, 11 aa, Homo sapiens
  CDR3 for alpha chain variable domain of TCR clone 357459 (TRAV12-3, TRAJ41)
CAMNAREALNF

SEQ ID NO: 714918 - protein, 13 aa, Homo sapiens
  CDR3 for beta chain variable domain of TCR clone 357459 (TRBV20-1, TRBJ2-5)
CSAREAFQETQYF

SEQ ID NO: 714919 - protein, 15 aa, Homo sapiens
  CDR3 for alpha chain variable domain of TCR clone 357460 (TRAV8-4, TRAJ47)
CAVSDPEEYGNKLVF

SEQ ID NO: 714920 - protein, 15 aa, Homo sapiens
  CDR3 for beta chain variable domain of TCR clone 357460 (TRBV11-2, TRBJ2-1)
CASILGPDSYNEQFF

SEQ ID NO: 714921 - protein, 13 aa, Homo sapiens
  CDR3 for alpha chain variable domain of TCR clone 357461 (TRAV8-3, TRAJ44)
CAVVPGTASKLTF

SEQ ID NO: 714922 - protein, 14 aa, Homo sapiens
  CDR3 for beta chain variable domain of TCR clone 357461 (TRBV12-4, TRBJ1-1)
CASRPGQGRTEAFF

SEQ ID NO: 714923 - protein, 16 aa, Homo sapiens
  CDR3 for alpha chain variable domain of TCR clone 357462 (TRAV8-6, TRAJ58)
CAVSDHTETSGSRWTF

SEQ ID NO: 714924 - protein, 14 aa, Homo sapiens
  CDR3 for beta chain variable domain of TCR clone 357462 (TRBV7-2, TRBJ1-5)
CASSPRGGPQPQHF

SEQ ID NO: 714925 - protein, 13 aa, Homo sapiens
  CDR3 for alpha chain variable domain of TCR clone 357463 (TRAV2, TRAJ40)
CAVVTSGTYKYIF

SEQ ID NO: 714926 - protein, 15 aa, Homo sapiens
  CDR3 for beta chain variable domain of TCR clone 357463 (TRBV18, TRBJ2-6)
CASSPSYAGANVLTF

SEQ ID NO: 714927 - protein, 15 aa, Homo sapiens
  CDR3 for alpha chain variable domain of TCR clone 357464 (TRAV38-1, TRAJ57)
CAFMDSQGGSEKLVF

SEQ ID NO: 714928 - protein, 12 aa, Homo sapiens
  CDR3 for beta chain variable domain of TCR clone 357464 (TRBV7-3, TRBJ1-2)
CASSKKGVPVNF

SEQ ID NO: 714929 - protein, 14 aa, Homo sapiens
  CDR3 for alpha chain variable domain of TCR clone 357465 (TRAV12-2, TRAJ36)
CAVSPPTGANNHFF

SEQ ID NO: 714930 - protein, 13 aa, Homo sapiens
  CDR3 for beta chain variable domain of TCR clone 357465 (TRBV20-1, TRBJ1-6)
CSAPTGLGSPLHF

SEQ ID NO: 714931 - protein, 12 aa, Homo sapiens
  CDR3 for alpha chain variable domain of TCR clone 357466 (TRAV2, TRAJ33)
CAFMDSNYQLIW

SEQ ID NO: 714932 - protein, 15 aa, Homo sapiens
  CDR3 for beta chain variable domain of TCR clone 357466 (TRBV20-1, TRBJ2-2)
CSARGGQGNTGELFF

SEQ ID NO: 714933 - protein, 14 aa, Homo sapiens
  CDR3 for alpha chain variable domain of TCR clone 357467 (TRAV26-1, TRAJ40)
CIVRLLSGTYIYIF

SEQ ID NO: 714934 - protein, 13 aa, Homo sapiens
  CDR3 for beta chain variable domain of TCR clone 357467 (TRBV4-1, TRBJ1-1)
CASSRKMNTEAFF

SEQ ID NO: 714935 - protein, 13 aa, Homo sapiens
  CDR3 for alpha chain variable domain of TCR clone 357468 (TRAV12-1, TRAJ15)
CVAQNQAGTALIF

SEQ ID NO: 714936 - protein, 14 aa, Homo sapiens
  CDR3 for beta chain variable domain of TCR clone 357468 (TRBV12-5, TRBJ2-5)
CASGSRTHQETQYF

SEQ ID NO: 714937 - protein, 15 aa, Homo sapiens
  CDR3 for alpha chain variable domain of TCR clone 357469 (TRAV26-1, TRAJ3)
CIVRSGYSSASKIIF

SEQ ID NO: 714938 - protein, 14 aa, Homo sapiens
  CDR3 for beta chain variable domain of TCR clone 357469 (TRBV13, TRBJ2-5)
CAGYRRLAEETQYF

SEQ ID NO: 714939 - protein, 15 aa, Homo sapiens
  CDR3 for alpha chain variable domain of TCR clone 357470 (TRAV12-3, TRAJ10)
CASYILTGGGTKLTF

SEQ ID NO: 714940 - protein, 13 aa, Homo sapiens
  CDR3 for beta chain variable domain of TCR clone 357470 (TRBV12-4, TRBJ1-2)
CASSLRQGKGYTF

SEQ ID NO: 714941 - protein, 12 aa, Homo sapiens
  CDR3 for alpha chain variable domain of TCR clone 357471 (TRAV13-2, TRAJ8)
CAPWLGFEKLVF

SEQ ID NO: 714942 - protein, 13 aa, Homo sapiens
  CDR3 for beta chain variable domain of TCR clone 357471 (TRBV27, TRBJ1-1)
CASSLSIGAEAFF

SEQ ID NO: 714943 - protein, 16 aa, Homo sapiens
  CDR3 for alpha chain variable domain of TCR clone 357472 (TRAV12-2, TRAJ40)
CAVIRGGTSGTYKYIF

SEQ ID NO: 714944 - protein, 16 aa, Homo sapiens
  CDR3 for beta chain variable domain of TCR clone 357472 (TRBV20-1, TRBJ1-4)
CSAPGQGLLTNEKLFF

SEQ ID NO: 714945 - protein, 16 aa, Homo sapiens
  CDR3 for alpha chain variable domain of TCR clone 357473 (TRAV8-3, TRAJ8)
CAVPSDGNTGFQKLGF

SEQ ID NO: 714946 - protein, 14 aa, Homo sapiens
  CDR3 for beta chain variable domain of TCR clone 357473 (TRBV28, TRBJ1-1)
CASSESGRGTEAFF

SEQ ID NO: 714947 - protein, 17 aa, Homo sapiens
  CDR3 for alpha chain variable domain of TCR clone 357474 (TRAV13-1, TRAJ28)
CAASPPYSGAGSYQLTF

SEQ ID NO: 714948 - protein, 11 aa, Homo sapiens
  CDR3 for beta chain variable domain of TCR clone 357474 (TRBV12-4, TRBJ2-3)
CASTATDTQYF

SEQ ID NO: 714949 - protein, 20 aa, Homo sapiens
  CDR3 for alpha chain variable domain of TCR clone 357475 (TRAV26-1, TRAJ52)
CCVLLHRPSAGGTSYGQLTF

SEQ ID NO: 714950 - protein, 14 aa, Homo sapiens
  CDR3 for beta chain variable domain of TCR clone 357475 (TRBV7-2, TRBJ1-4)
CASSHSKTNEKLFF

SEQ ID NO: 714951 - protein, 12 aa, Homo sapiens
  CDR3 for alpha chain variable domain of TCR clone 357476 (TRAV35, TRAJ39)
LAPNNAGNMLTF

SEQ ID NO: 714952 - protein, 16 aa, Homo sapiens
  CDR3 for beta chain variable domain of TCR clone 357476 (TRBV2, TRBJ2-3)
CASSTSVEVVTDTQYL

SEQ ID NO: 714953 - protein, 14 aa, Homo sapiens
  CDR3 for alpha chain variable domain of TCR clone 357477 (TRAV1-2, TRAJ16)
CAVNRFSDGQKLLF

SEQ ID NO: 714954 - protein, 12 aa, Homo sapiens
  CDR3 for beta chain variable domain of TCR clone 357477 (TRBV5-1, TRBJ2-7)
CASISTTYEQYF

SEQ ID NO: 714955 - protein, 14 aa, Homo sapiens
  CDR3 for alpha chain variable domain of TCR clone 357478 (TRAV12-2, TRAJ15)
CAPHTGQAGTALIF

SEQ ID NO: 714956 - protein, 18 aa, Homo sapiens
  CDR3 for beta chain variable domain of TCR clone 357478 (TRBV28, TRBJ2-3)
CTSVPAVYIAASTDTQYF

SEQ ID NO: 714957 - protein, 17 aa, Homo sapiens
  CDR3 for alpha chain variable domain of TCR clone 357479 (TRAV3, TRAJ6)
CAVRDGPTAGGSYIPTF

SEQ ID NO: 714958 - protein, 14 aa, Homo sapiens
  CDR3 for beta chain variable domain of TCR clone 357479 (TRBV7-3, TRBJ2-1)
CASSLAGGTNEQFF

SEQ ID NO: 714959 - protein, 16 aa, Homo sapiens
  CDR3 for alpha chain variable domain of TCR clone 357480 (TRAV12-2, TRAJ40)
CAVIRGGTSGTYKYIF

SEQ ID NO: 714960 - protein, 16 aa, Homo sapiens
  CDR3 for beta chain variable domain of TCR clone 357480 (TRBV7-2, TRBJ2-3)
CASSLVALYSTDTQYF

SEQ ID NO: 714961 - protein, 13 aa, Homo sapiens
  CDR3 for alpha chain variable domain of TCR clone 357481 (TRAV3, TRAJ30)
CAVSDRGDDKIIL

SEQ ID NO: 714962 - protein, 16 aa, Homo sapiens
  CDR3 for beta chain variable domain of TCR clone 357481 (TRBV7-3, TRBJ2-2)
CASSLKRGTLSGELFF

SEQ ID NO: 714963 - protein, 13 aa, Homo sapiens
  CDR3 for alpha chain variable domain of TCR clone 357482 (TRAV27, TRAJ49)
CAPRPYTGNQFYF

SEQ ID NO: 714964 - protein, 13 aa, Homo sapiens
  CDR3 for beta chain variable domain of TCR clone 357482 (TRBV4-2, TRBJ1-1)
CASSQAGNTEAFF

SEQ ID NO: 714965 - protein, 13 aa, Homo sapiens
  CDR3 for alpha chain variable domain of TCR clone 357483 (TRAV1-2, TRAJ12)
CAVSMDSSYKLIF

SEQ ID NO: 714966 - protein, 17 aa, Homo sapiens
  CDR3 for beta chain variable domain of TCR clone 357483 (TRBV11-2, TRBJ2-1)
CASSLYPPGVEYTEQFF

SEQ ID NO: 714967 - protein, 17 aa, Homo sapiens
  CDR3 for alpha chain variable domain of TCR clone 357484 (TRAV3, TRAJ6)
CAVRDSPRAGGSYIPTF

SEQ ID NO: 714968 - protein, 12 aa, Homo sapiens
  CDR3 for beta chain variable domain of TCR clone 357484 (TRBV11-2, TRBJ2-2)
CASSLGGGELFF

SEQ ID NO: 714969 - protein, 16 aa, Homo sapiens
  CDR3 for alpha chain variable domain of TCR clone 357485 (TRAV12-3, TRAJ53)
CAMSPGSGGSNYKLTF

SEQ ID NO: 714970 - protein, 15 aa, Homo sapiens
  CDR3 for beta chain variable domain of TCR clone 357485 (TRBV5-1, TRBJ2-7)
CASSPQGRPLDEQYF

SEQ ID NO: 714971 - protein, 15 aa, Homo sapiens
  CDR3 for alpha chain variable domain of TCR clone 357486 (TRAV8-4, TRAJ3)
CAVTGENLVQQCFQD

SEQ ID NO: 714972 - protein, 14 aa, Homo sapiens
  CDR3 for beta chain variable domain of TCR clone 357486 (TRBV19, TRBJ2-2)
CASSIAGAFGELFF

SEQ ID NO: 714973 - protein, 12 aa, Homo sapiens
  CDR3 for alpha chain variable domain of TCR clone 357487 (TRAV10, TRAJ43)
CVVVRVGNDMRV

SEQ ID NO: 714974 - protein, 15 aa, Homo sapiens
  CDR3 for beta chain variable domain of TCR clone 357487 (TRBV2, TRBJ2-7)
CASSEGLARSYEQYF

SEQ ID NO: 714975 - protein, 17 aa, Homo sapiens
  CDR3 for alpha chain variable domain of TCR clone 357488 (TRAV8-6, TRAJ58)
CAVSSWVEETSGSRLTF

SEQ ID NO: 714976 - protein, 17 aa, Homo sapiens
  CDR3 for beta chain variable domain of TCR clone 357488 (TRBV11-2, TRBJ2-1)
CASSLYPPGVEYNEQFF

SEQ ID NO: 714977 - protein, 14 aa, Homo sapiens
  CDR3 for alpha chain variable domain of TCR clone 357489 (TRAV30, TRAJ26)
CGTEIVSYGQNFVF

SEQ ID NO: 714978 - protein, 11 aa, Homo sapiens
  CDR3 for beta chain variable domain of TCR clone 357489 (TRBV7-2, TRBJ2-7)
CASSLGWEQYF

SEQ ID NO: 714979 - protein, 12 aa, Homo sapiens
  CDR3 for alpha chain variable domain of TCR clone 357490 (TRAV2, TRAJ33)
CAFMYSNYQLIW

SEQ ID NO: 714980 - protein, 22 aa, Homo sapiens
  CDR3 for beta chain variable domain of TCR clone 357490 (TRBV7-2, TRBJ1-4)
CASSFDPYSKTVFWQWNPALCL

SEQ ID NO: 714981 - protein, 12 aa, Homo sapiens
  CDR3 for alpha chain variable domain of TCR clone 357491 (TRAV26-1, TRAJ53)
CIEGGSNYKLTF

SEQ ID NO: 714982 - protein, 18 aa, Homo sapiens
  CDR3 for beta chain variable domain of TCR clone 357491 (TRBV7-2, TRBJ2-3)
CASSLKREGSGITDTQYF

SEQ ID NO: 714983 - protein, 15 aa, Homo sapiens
  CDR3 for alpha chain variable domain of TCR clone 357492 (TRAV3, TRAJ22)
CAVRDRGGSASQLTF

SEQ ID NO: 714984 - protein, 15 aa, Homo sapiens
  CDR3 for beta chain variable domain of TCR clone 357492 (TRBV7-3, TRBJ2-1)
CASSPTGGGEVEQFF

SEQ ID NO: 714985 - protein, 14 aa, Homo sapiens
  CDR3 for alpha chain variable domain of TCR clone 357493 (TRAV6, TRAJ37)
CALGSQGNTGKLIF

SEQ ID NO: 714986 - protein, 15 aa, Homo sapiens
  CDR3 for beta chain variable domain of TCR clone 357493 (TRBV2, TRBJ2-1)
CASSEEGEGDNEQFF

SEQ ID NO: 714987 - protein, 14 aa, Homo sapiens
  CDR3 for alpha chain variable domain of TCR clone 357494 (TRAV1-2, TRAJ8)
CAVREDTGFQKLVF

SEQ ID NO: 714988 - protein, 13 aa, Homo sapiens
  CDR3 for beta chain variable domain of TCR clone 357494 (TRBV7-9, TRBJ2-5)
CASLPSGRETQYF

SEQ ID NO: 714989 - protein, 10 aa, Homo sapiens
  CDR3 for alpha chain variable domain of TCR clone 357495 (TRAV1-2, TRAJ31)
CAFFDARLMF

SEQ ID NO: 714990 - protein, 15 aa, Homo sapiens
  CDR3 for beta chain variable domain of TCR clone 357495 (TRBV4-1, TRBJ1-4)
CASSDTGGTNEKLLF

SEQ ID NO: 714991 - protein, 15 aa, Homo sapiens
  CDR3 for alpha chain variable domain of TCR clone 357496 (TRAV26-1, TRAJ22)
CIVRVSCWFCKATAL

SEQ ID NO: 714992 - protein, 13 aa, Homo sapiens
  CDR3 for beta chain variable domain of TCR clone 357496 (TRBV7-9, TRBJ1-2)
CASSLKQNYGYTF

SEQ ID NO: 714993 - protein, 13 aa, Homo sapiens
  CDR3 for alpha chain variable domain of TCR clone 357497 (TRAV21, TRAJ15)
CAVANQAGTALIF

SEQ ID NO: 714994 - protein, 13 aa, Homo sapiens
  CDR3 for beta chain variable domain of TCR clone 357497 (TRBV24-1, TRBJ2-2)
CATSDWSTGELFF

SEQ ID NO: 714995 - protein, 15 aa, Homo sapiens
  CDR3 for alpha chain variable domain of TCR clone 357498 (TRAV23/DV6, TRAJ18)
CAARYRGSTLGRLYV

SEQ ID NO: 714996 - protein, 15 aa, Homo sapiens
  CDR3 for beta chain variable domain of TCR clone 357498 (TRBV9, TRBJ1-6)
CASSVAGTGDSPLHF

SEQ ID NO: 714997 - protein, 13 aa, Homo sapiens
  CDR3 for alpha chain variable domain of TCR clone 357499 (TRAV21, TRAJ36)
CAVREAGANNLFF

SEQ ID NO: 714998 - protein, 14 aa, Homo sapiens
  CDR3 for beta chain variable domain of TCR clone 357499 (TRBV11-2, TRBJ2-1)
CASTTGQGNNEQFF

SEQ ID NO: 714999 - protein, 12 aa, Homo sapiens
  CDR3 for alpha chain variable domain of TCR clone 357500 (TRAV12-3, TRAJ17)
CAMTLTGNKLTF

SEQ ID NO: 715000 - protein, 17 aa, Homo sapiens
  CDR3 for beta chain variable domain of TCR clone 357500 (TRBV5-1, TRBJ2-1)
CASSLGQISFSYNEQFF

SEQ ID NO: 715001 - protein, 15 aa, Homo sapiens
  CDR3 for alpha chain variable domain of TCR clone 357501 (TRAV12-1, TRAJ15)
CVVNSYGQAGTALIC

SEQ ID NO: 715002 - protein, 14 aa, Homo sapiens
  CDR3 for beta chain variable domain of TCR clone 357501 (TRBV7-2, TRBJ2-7)
CASSLQGPYGEQYF

SEQ ID NO: 715003 - protein, 12 aa, Homo sapiens
  CDR3 for alpha chain variable domain of TCR clone 357502 (TRAV38-1, TRAJ20)
CAFIWNDDKLSF

SEQ ID NO: 715004 - protein, 14 aa, Homo sapiens
  CDR3 for beta chain variable domain of TCR clone 357502 (TRBV19, TRBJ2-1)
CASSMGSGATEQFF

SEQ ID NO: 715005 - protein, 12 aa, Homo sapiens
  CDR3 for alpha chain variable domain of TCR clone 357503 (TRAV12-2, TRAJ8)
CAVNTGFQKLVF

SEQ ID NO: 715006 - protein, 15 aa, Homo sapiens
  CDR3 for beta chain variable domain of TCR clone 357503 (TRBV7-8, TRBJ1-5)
CASSLERRGLEPQHC

SEQ ID NO: 715007 - protein, 16 aa, Homo sapiens
  CDR3 for alpha chain variable domain of TCR clone 357504 (TRAV3, TRAJ3)
CAVRERAKSSASKIIF

SEQ ID NO: 715008 - protein, 16 aa, Homo sapiens
  CDR3 for beta chain variable domain of TCR clone 357504 (TRBV20-1, TRBJ2-4)
CSATSLAELAKNIQYF

SEQ ID NO: 715009 - protein, 13 aa, Homo sapiens
  CDR3 for alpha chain variable domain of TCR clone 357505 (TRAV21, TRAJ27)
CAARPGNAGKSTF

SEQ ID NO: 715010 - protein, 16 aa, Homo sapiens
  CDR3 for beta chain variable domain of TCR clone 357505 (TRBV5-1, TRBJ2-7)
CASSLVAGGPSGEQYF

SEQ ID NO: 715011 - protein, 14 aa, Homo sapiens
  CDR3 for alpha chain variable domain of TCR clone 357506 (TRAV8-3, TRAJ39)
CAVGANNAGNMLTF

SEQ ID NO: 715012 - protein, 15 aa, Homo sapiens
  CDR3 for beta chain variable domain of TCR clone 357506 (TRBV4-3, TRBJ1-1)
CASSLELGRGTEAFF

SEQ ID NO: 715013 - protein, 17 aa, Homo sapiens
  CDR3 for alpha chain variable domain of TCR clone 357507 (TRAV3, TRAJ6)
CAVRDGPGAGGSYIPTF

SEQ ID NO: 715014 - protein, 11 aa, Homo sapiens
  CDR3 for beta chain variable domain of TCR clone 357507 (TRBV12-4, TRBJ2-2)
CASSSAGELFF

SEQ ID NO: 715015 - protein, 14 aa, Homo sapiens
  CDR3 for alpha chain variable domain of TCR clone 357508 (TRAV1-2, TRAJ16)
CAVNRFSDGQKLLF

SEQ ID NO: 715016 - protein, 14 aa, Homo sapiens
  CDR3 for beta chain variable domain of TCR clone 357508 (TRBV9, TRBJ2-7)
CASSVGVGSYEQYL

SEQ ID NO: 715017 - protein, 15 aa, Homo sapiens
  CDR3 for alpha chain variable domain of TCR clone 357509 (TRAV36/DV7, TRAJ53)
CAVEGSGGSNDKLTF

SEQ ID NO: 715018 - protein, 16 aa, Homo sapiens
  CDR3 for beta chain variable domain of TCR clone 357509 (TRBV27, TRBJ2-5)
CASSYGPGGQKETQYF

SEQ ID NO: 715019 - protein, 15 aa, Homo sapiens
  CDR3 for alpha chain variable domain of TCR clone 357510 (TRAV3, TRAJ22)
CAVRDRGGSARQLTF

SEQ ID NO: 715020 - protein, 16 aa, Homo sapiens
  CDR3 for beta chain variable domain of TCR clone 357510 (TRBV7-7, TRBJ2-1)
CASSLASGTSYNEQFF

SEQ ID NO: 715021 - protein, 13 aa, Homo sapiens
  CDR3 for alpha chain variable domain of TCR clone 357511 (TRAV16, TRAJ34)
CALTGYNTGKLIF

SEQ ID NO: 715022 - protein, 13 aa, Homo sapiens
  CDR3 for beta chain variable domain of TCR clone 357511 (TRBV6-1, TRBJ2-1)
CASREDGGHEQFF

SEQ ID NO: 715023 - protein, 11 aa, Homo sapiens
  CDR3 for alpha chain variable domain of TCR clone 357512 (TRAV13-2, TRAJ20)
CVDSNDYKLSF

SEQ ID NO: 715024 - protein, 14 aa, Homo sapiens
  CDR3 for beta chain variable domain of TCR clone 357512 (TRBV11-2, TRBJ1-5)
CASSLDRGRQPQHF

SEQ ID NO: 715025 - protein, 15 aa, Homo sapiens
  CDR3 for alpha chain variable domain of TCR clone 357513 (TRAV17, TRAJ22)
CSTVAPSGSARQLTF

SEQ ID NO: 715026 - protein, 16 aa, Homo sapiens
  CDR3 for beta chain variable domain of TCR clone 357513 (TRBV10-3, TRBJ2-7)
CAISADCADRPYEQYF

SEQ ID NO: 715027 - protein, 12 aa, Homo sapiens
  CDR3 for alpha chain variable domain of TCR clone 357514 (TRAV12-1, TRAJ40)
CVVNGETYKYIF

SEQ ID NO: 715028 - protein, 13 aa, Homo sapiens
  CDR3 for beta chain variable domain of TCR clone 357514 (TRBV7-3, TRBJ1-1)
CASSQDWGAEAFF

SEQ ID NO: 715029 - protein, 11 aa, Homo sapiens
  CDR3 for alpha chain variable domain of TCR clone 357515 (TRAV3, TRAJ21)
FAVGSFNKFYF

SEQ ID NO: 715030 - protein, 16 aa, Homo sapiens
  CDR3 for beta chain variable domain of TCR clone 357515 (TRBV19, TRBJ2-1)
CASSKAGPSSYNEQFF

SEQ ID NO: 715031 - protein, 15 aa, Homo sapiens
  CDR3 for alpha chain variable domain of TCR clone 357516 (TRAV3, TRAJ22)
CAVRDRGGSARQLTF

SEQ ID NO: 715032 - protein, 13 aa, Homo sapiens
  CDR3 for beta chain variable domain of TCR clone 357516 (TRBV18, TRBJ1-2)
CASSASATEGYTF

SEQ ID NO: 715033 - protein, 15 aa, Homo sapiens
  CDR3 for alpha chain variable domain of TCR clone 357517 (TRAV12-1, TRAJ44)
CVVFVNTGTASKLTF

SEQ ID NO: 715034 - protein, 15 aa, Homo sapiens
  CDR3 for beta chain variable domain of TCR clone 357517 (TRBV10-2, TRBJ2-6)
CASSEQGTGANVLTF

SEQ ID NO: 715035 - protein, 16 aa, Homo sapiens
  CDR3 for alpha chain variable domain of TCR clone 357518 (TRAV26-1, TRAJ45)
CIVEKYSGGGADGLTF

SEQ ID NO: 715036 - protein, 15 aa, Homo sapiens
  CDR3 for beta chain variable domain of TCR clone 357518 (TRBV11-3, TRBJ2-7)
CASSPGPASSYEQYF

SEQ ID NO: 715037 - protein, 16 aa, Homo sapiens
  CDR3 for alpha chain variable domain of TCR clone 357519 (TRAV4, TRAJ5)
CLVGPDHGHGQESTYF

SEQ ID NO: 715038 - protein, 13 aa, Homo sapiens
  CDR3 for beta chain variable domain of TCR clone 357519 (TRBV4-2, TRBJ1-2)
CASSLSASGGYSF

SEQ ID NO: 715039 - protein, 17 aa, Homo sapiens
  CDR3 for alpha chain variable domain of TCR clone 357520 (TRAV26-1, TRAJ10)
CIVPFRALTGGGNKLTF

SEQ ID NO: 715040 - protein, 13 aa, Homo sapiens
  CDR3 for beta chain variable domain of TCR clone 357520 (TRBV20-1, TRBJ2-3)
CSASRQAADTQYF

SEQ ID NO: 715041 - protein, 16 aa, Homo sapiens
  CDR3 for alpha chain variable domain of TCR clone 357521 (TRAV13-1, TRAJ48)
CAASIFGNFGNEKLTF

SEQ ID NO: 715042 - protein, 14 aa, Homo sapiens
  CDR3 for beta chain variable domain of TCR clone 357521 (TRBV7-3, TRBJ1-1)
CASSLKGGKTEAFF

SEQ ID NO: 715043 - protein, 16 aa, Homo sapiens
  CDR3 for alpha chain variable domain of TCR clone 357522 (TRAV16, TRAJ52)
CALSAAGGNGYGKLKF

SEQ ID NO: 715044 - protein, 12 aa, Homo sapiens
  CDR3 for beta chain variable domain of TCR clone 357522 (TRBV12-4, TRBJ1-3)
CASSFSGNTIYF

SEQ ID NO: 715045 - protein, 14 aa, Homo sapiens
  CDR3 for alpha chain variable domain of TCR clone 357523 (TRAV8-3, TRAJ27)
CAGGRNTNAGKSTF

SEQ ID NO: 715046 - protein, 19 aa, Homo sapiens
  CDR3 for beta chain variable domain of TCR clone 357523 (TRBV11-3, TRBJ2-5)
CASSLRGRVQETVLRARHA

SEQ ID NO: 715047 - protein, 13 aa, Homo sapiens
  CDR3 for alpha chain variable domain of TCR clone 357524 (TRAV12-1, TRAJ36)
CGDAQTGANNLFF

SEQ ID NO: 715048 - protein, 14 aa, Homo sapiens
  CDR3 for beta chain variable domain of TCR clone 357524 (TRBV7-2, TRBJ2-7)
CASRSQGAAYEQYF

SEQ ID NO: 715049 - protein, 14 aa, Homo sapiens
  CDR3 for alpha chain variable domain of TCR clone 357525 (TRAV12-2, TRAJ5)
CAVNRSTGRRALTF

SEQ ID NO: 715050 - protein, 12 aa, Homo sapiens
  CDR3 for beta chain variable domain of TCR clone 357525 (TRBV19, TRBJ1-5)
CASSIAEQHQHF

SEQ ID NO: 715051 - protein, 14 aa, Homo sapiens
  CDR3 for alpha chain variable domain of TCR clone 357526 (TRAV12-2, TRAJ53)
CAVKGGGSNYKLTF

SEQ ID NO: 715052 - protein, 14 aa, Homo sapiens
  CDR3 for beta chain variable domain of TCR clone 357526 (TRBV7-7, TRBJ2-2)
CACSSGGYTGELFF

SEQ ID NO: 715053 - protein, 10 aa, Homo sapiens
  CDR3 for alpha chain variable domain of TCR clone 357527 (TRAV39, TRAJ49)
CAVAGNQFYF

SEQ ID NO: 715054 - protein, 17 aa, Homo sapiens
  CDR3 for beta chain variable domain of TCR clone 357527 (TRBV7-8, TRBJ2-6)
CASSAGTGGAGANVLTF

SEQ ID NO: 715055 - protein, 16 aa, Homo sapiens
  CDR3 for alpha chain variable domain of TCR clone 357528 (TRAV12-3, TRAJ50)
CAMRDPMKTSYDKVIF

SEQ ID NO: 715056 - protein, 15 aa, Homo sapiens
  CDR3 for beta chain variable domain of TCR clone 357528 (TRBV9, TRBJ2-1)
CASSLAGSSYNEQFF

SEQ ID NO: 715057 - protein, 14 aa, Homo sapiens
  CDR3 for alpha chain variable domain of TCR clone 357529 (TRAV1-2, TRAJ16)
CAVNRFSDGQKLLF

SEQ ID NO: 715058 - protein, 15 aa, Homo sapiens
  CDR3 for beta chain variable domain of TCR clone 357529 (TRBV9, TRBJ1-6)
CASSVTGTADSPLHF

SEQ ID NO: 715059 - protein, 16 aa, Homo sapiens
  CDR3 for alpha chain variable domain of TCR clone 357530 (TRAV17, TRAJ52)
CATGIIGGTSYGKLTF

SEQ ID NO: 715060 - protein, 11 aa, Homo sapiens
  CDR3 for beta chain variable domain of TCR clone 357530 (TRBV11-2, TRBJ2-2)
CASSLPGELFF

SEQ ID NO: 715061 - protein, 13 aa, Homo sapiens
  CDR3 for alpha chain variable domain of TCR clone 357531 (TRAV14/DV4, TRAJ23)
CAMREVKGGKLIF

SEQ ID NO: 715062 - protein, 15 aa, Homo sapiens
  CDR3 for beta chain variable domain of TCR clone 357531 (TRBV13, TRBJ2-1)
CASSLLSGLNNEQFF

SEQ ID NO: 715063 - protein, 15 aa, Homo sapiens
  CDR3 for alpha chain variable domain of TCR clone 357532 (TRAV8-6, TRAJ28)
CAARPLRAGSYQLTF

SEQ ID NO: 715064 - protein, 13 aa, Homo sapiens
  CDR3 for beta chain variable domain of TCR clone 357532 (TRBV19, TRBJ1-2)
CASSVPGQDGYTF

SEQ ID NO: 715065 - protein, 13 aa, Homo sapiens
  CDR3 for alpha chain variable domain of TCR clone 357533 (TRAV12-3, TRAJ21)
CAPGPHNFNKFYF

SEQ ID NO: 715066 - protein, 12 aa, Homo sapiens
  CDR3 for beta chain variable domain of TCR clone 357533 (TRBV14, TRBJ2-5)
CASSQLKETQYF

SEQ ID NO: 715067 - protein, 13 aa, Homo sapiens
  CDR3 for alpha chain variable domain of TCR clone 357534 (TRAV27, TRAJ18)
CAGRGSTLGRLYF

SEQ ID NO: 715068 - protein, 18 aa, Homo sapiens
  CDR3 for beta chain variable domain of TCR clone 357534 (TRBV4-1, TRBJ1-4)
CASSPRTGGAWTNEKLFF

SEQ ID NO: 715069 - protein, 16 aa, Homo sapiens
  CDR3 for alpha chain variable domain of TCR clone 357535 (TRAV16, TRAJ42)
CARKMNYGGSQGNLIF

SEQ ID NO: 715070 - protein, 13 aa, Homo sapiens
  CDR3 for beta chain variable domain of TCR clone 357535 (TRBV20-1, TRBJ2-7)
CSASPPSSYEQYS

SEQ ID NO: 715071 - protein, 14 aa, Homo sapiens
  CDR3 for alpha chain variable domain of TCR clone 357536 (TRAV29/DV5, TRAJ32)
CAAASGGATNKLIF

SEQ ID NO: 715072 - protein, 14 aa, Homo sapiens
  CDR3 for beta chain variable domain of TCR clone 357536 (TRBV20-1, TRBJ1-1)
CSAQTRIGGTEAFF

SEQ ID NO: 715073 - protein, 13 aa, Homo sapiens
  CDR3 for alpha chain variable domain of TCR clone 357537 (TRAV36/DV7, TRAJ37)
CAVFPSNTGKLIF

SEQ ID NO: 715074 - protein, 15 aa, Homo sapiens
  CDR3 for beta chain variable domain of TCR clone 357537 (TRBV12-4, TRBJ2-5)
CRQFFVRGRQETQYF

SEQ ID NO: 715075 - protein, 15 aa, Homo sapiens
  CDR3 for alpha chain variable domain of TCR clone 357538 (TRAV8-3, TRAJ23)
GAVGDRYNQGGKLSF

SEQ ID NO: 715076 - protein, 22 aa, Homo sapiens
  CDR3 for beta chain variable domain of TCR clone 357538 (TRBV29-1, TRBJ2-5)
TVSNMSPEDSSIYLCSAGTQYF

SEQ ID NO: 715077 - protein, 14 aa, Homo sapiens
  CDR3 for alpha chain variable domain of TCR clone 357539 (TRAV2, TRAJ9)
CAVEDRSGGFKTIF

SEQ ID NO: 715078 - protein, 16 aa, Homo sapiens
  CDR3 for beta chain variable domain of TCR clone 357539 (TRBV4-3, TRBJ2-2)
CASSHLQGSGTGELFF

SEQ ID NO: 715079 - protein, 12 aa, Homo sapiens
  CDR3 for alpha chain variable domain of TCR clone 357540 (TRAV21, TRAJ29)
CAVTSGNTPLVF

SEQ ID NO: 715080 - protein, 16 aa, Homo sapiens
  CDR3 for beta chain variable domain of TCR clone 357540 (TRBV7-3, TRBJ2-1)
CASSLEGYRSYNEQFF

SEQ ID NO: 715081 - protein, 13 aa, Homo sapiens
  CDR3 for alpha chain variable domain of TCR clone 357541 (TRAV2, TRAJ40)
CAVVTSGTYEYIF

SEQ ID NO: 715082 - protein, 14 aa, Homo sapiens
  CDR3 for beta chain variable domain of TCR clone 357541 (TRBV19, TRBJ2-1)
CASPTFVLSGEQFS

SEQ ID NO: 715083 - protein, 19 aa, Homo sapiens
  CDR3 for alpha chain variable domain of TCR clone 357542 (TRAV12-2, TRAJ52)
PVTQPPTSFRSTSYGKLTF

SEQ ID NO: 715084 - protein, 14 aa, Homo sapiens
  CDR3 for beta chain variable domain of TCR clone 357542 (TRBV7-8, TRBJ2-7)
CASSPRDRVYEQYF

SEQ ID NO: 715085 - protein, 14 aa, Homo sapiens
  CDR3 for alpha chain variable domain of TCR clone 357543 (TRAV14/DV4, TRAJ56)
CAMSSTGANSKLTF

SEQ ID NO: 715086 - protein, 15 aa, Homo sapiens
  CDR3 for beta chain variable domain of TCR clone 357543 (TRBV7-9, TRBJ1-6)
CASSSPGRGNSPLHF

SEQ ID NO: 715087 - protein, 12 aa, Homo sapiens
  CDR3 for alpha chain variable domain of TCR clone 357544 (TRAV12-2, TRAJ8)
CAVNTDFQKLVF

SEQ ID NO: 715088 - protein, 15 aa, Homo sapiens
  CDR3 for beta chain variable domain of TCR clone 357544 (TRBV7-8, TRBJ1-5)
CASSLERRGLEPQHF

SEQ ID NO: 715089 - protein, 14 aa, Homo sapiens
  CDR3 for alpha chain variable domain of TCR clone 357545 (TRAV20, TRAJ29)
CAVQAWVGNTPLVF

SEQ ID NO: 715090 - protein, 11 aa, Homo sapiens
  CDR3 for beta chain variable domain of TCR clone 357545 (TRBV19, TRBJ1-2)
CASSISSGYTF

SEQ ID NO: 715091 - protein, 13 aa, Homo sapiens
  CDR3 for alpha chain variable domain of TCR clone 357546 (TRAV27, TRAJ41)
CAGEGNSEYALNF

SEQ ID NO: 715092 - protein, 16 aa, Homo sapiens
  CDR3 for beta chain variable domain of TCR clone 357546 (TRBV29-1, TRBJ2-7)
CSVEVVGTSGSYEQYF

SEQ ID NO: 715093 - protein, 15 aa, Homo sapiens
  CDR3 for alpha chain variable domain of TCR clone 357547 (TRAV8-3, TRAJ6)
CAMGPLGGGSYIPTF

SEQ ID NO: 715094 - protein, 14 aa, Homo sapiens
  CDR3 for beta chain variable domain of TCR clone 357547 (TRBV19, TRBJ2-2)
CASSTGQGAGELFF

SEQ ID NO: 715095 - protein, 13 aa, Homo sapiens
  CDR3 for alpha chain variable domain of TCR clone 357548 (TRAV26-1, TRAJ35)
CIVSRRVGEMRHF

SEQ ID NO: 715096 - protein, 17 aa, Homo sapiens
  CDR3 for beta chain variable domain of TCR clone 357548 (TRBV7-9, TRBJ2-7)
CASSFDGSRGGAYEQYF

SEQ ID NO: 715097 - protein, 13 aa, Homo sapiens
  CDR3 for alpha chain variable domain of TCR clone 357549 (TRAV3, TRAJ20)
CCEAFCNDYKISF

SEQ ID NO: 715098 - protein, 15 aa, Homo sapiens
  CDR3 for beta chain variable domain of TCR clone 357549 (TRBV19, TRBJ2-6)
CASVRRDSGANVLTF

SEQ ID NO: 715099 - protein, 15 aa, Homo sapiens
  CDR3 for alpha chain variable domain of TCR clone 357550 (TRAV1-2, TRAJ17)
CAVRGYGAAGNKLTF

SEQ ID NO: 715100 - protein, 23 aa, Homo sapiens
  CDR3 for beta chain variable domain of TCR clone 357550 (TRBV11-2, TRBJ2-5)
CASNSPGGEGAASRDPVLRARHA

SEQ ID NO: 715101 - protein, 21 aa, Homo sapiens
  CDR3 for alpha chain variable domain of TCR clone 357551 (TRAV12-1, TRAJ32)
SSVIQPPTSMNYGGATNKLIF

SEQ ID NO: 715102 - protein, 18 aa, Homo sapiens
  CDR3 for beta chain variable domain of TCR clone 357551 (TRBV20-1, TRBJ2-3)
GSASGLAGGPGTTDTQYF

SEQ ID NO: 715103 - protein, 13 aa, Homo sapiens
  CDR3 for alpha chain variable domain of TCR clone 357552 (TRAV20, TRAJ31)
CAVQAIGGARLMF

SEQ ID NO: 715104 - protein, 14 aa, Homo sapiens
  CDR3 for beta chain variable domain of TCR clone 357552 (TRBV2, TRBJ1-5)
CASSGTVINQPQHF

SEQ ID NO: 715105 - protein, 14 aa, Homo sapiens
  CDR3 for alpha chain variable domain of TCR clone 357553 (TRAV1-2, TRAJ16)
CAVNRFSDGQKLLF

SEQ ID NO: 715106 - protein, 15 aa, Homo sapiens
  CDR3 for beta chain variable domain of TCR clone 357553 (TRBV7-6, TRBJ2-3)
CASSPIIYSTDTQYF

SEQ ID NO: 715107 - protein, 15 aa, Homo sapiens
  CDR3 for alpha chain variable domain of TCR clone 357554 (TRAV27, TRAJ38)
CAARRNAGNNRKLIW

SEQ ID NO: 715108 - protein, 13 aa, Homo sapiens
  CDR3 for beta chain variable domain of TCR clone 357554 (TRBV7-9, TRBJ2-3)
CASSPRGPDTQYF

SEQ ID NO: 715109 - protein, 15 aa, Homo sapiens
  CDR3 for alpha chain variable domain of TCR clone 357555 (TRAV12-1, TRAJ44)
CVADLPTGTASKLTF

SEQ ID NO: 715110 - protein, 16 aa, Homo sapiens
  CDR3 for beta chain variable domain of TCR clone 357555 (TRBV27, TRBJ2-2)
CASSSSGVSNTGELFF

SEQ ID NO: 715111 - protein, 12 aa, Homo sapiens
  CDR3 for alpha chain variable domain of TCR clone 357556 (TRAV13-1, TRAJ21)
CAAREGFNKFYF

SEQ ID NO: 715112 - protein, 12 aa, Homo sapiens
  CDR3 for beta chain variable domain of TCR clone 357556 (TRBV7-8, TRBJ2-7)
CASSLGDREQYF

SEQ ID NO: 715113 - protein, 11 aa, Homo sapiens
  CDR3 for alpha chain variable domain of TCR clone 357557 (TRAV3, TRAJ21)
CAVGNFNKFYF

SEQ ID NO: 715114 - protein, 16 aa, Homo sapiens
  CDR3 for beta chain variable domain of TCR clone 357557 (TRBV20-1, TRBJ1-2)
CSASMGQVVANYGYTF

SEQ ID NO: 715115 - protein, 15 aa, Homo sapiens
  CDR3 for alpha chain variable domain of TCR clone 357558 (TRAV3, TRAJ4)
CAVRDGTGGYNKLIF

SEQ ID NO: 715116 - protein, 16 aa, Homo sapiens
  CDR3 for beta chain variable domain of TCR clone 357558 (TRBV7-3, TRBJ2-1)
CASSLEGYRSYNEQFF

SEQ ID NO: 715117 - protein, 15 aa, Homo sapiens
  CDR3 for alpha chain variable domain of TCR clone 357559 (TRAV4, TRAJ39)
CLVGPNNNAGNMLTF

SEQ ID NO: 715118 - protein, 16 aa, Homo sapiens
  CDR3 for beta chain variable domain of TCR clone 357559 (TRBV13, TRBJ2-2)
CARSPRTGEHTGELFF

SEQ ID NO: 715119 - protein, 14 aa, Homo sapiens
  CDR3 for alpha chain variable domain of TCR clone 357560 (TRAV8-6, TRAJ4)
CAVTVSGGYNKLIF

SEQ ID NO: 715120 - protein, 18 aa, Homo sapiens
  CDR3 for beta chain variable domain of TCR clone 357560 (TRBV4-3, TRBJ1-1)
CISAPAAKNWDGGTEAFF

SEQ ID NO: 715121 - protein, 15 aa, Homo sapiens
  CDR3 for alpha chain variable domain of TCR clone 357561 (TRAV16, TRAJ4)
FALEDPSGGDNKLIF

SEQ ID NO: 715122 - protein, 13 aa, Homo sapiens
  CDR3 for beta chain variable domain of TCR clone 357561 (TRBV7-3, TRBJ2-7)
CASSQAGGYEQYF

SEQ ID NO: 715123 - protein, 15 aa, Homo sapiens
  CDR3 for alpha chain variable domain of TCR clone 357562 (TRAV2, TRAJ9)
CAVEDRGTGGYKTIF

SEQ ID NO: 715124 - protein, 17 aa, Homo sapiens
  CDR3 for beta chain variable domain of TCR clone 357562 (TRBV13, TRBJ2-3)
CASSLSRVAGGRNTQYF

SEQ ID NO: 715125 - protein, 16 aa, Homo sapiens
  CDR3 for alpha chain variable domain of TCR clone 357563 (TRAV12-3, TRAJ53)
CAMSPGSGGSNYKLTF

SEQ ID NO: 715126 - protein, 14 aa, Homo sapiens
  CDR3 for beta chain variable domain of TCR clone 357563 (TRBV5-7, TRBJ1-1)
CASSLAGDWTEAFF

SEQ ID NO: 715127 - protein, 12 aa, Homo sapiens
  CDR3 for alpha chain variable domain of TCR clone 357564 (TRAV9-2, TRAJ26)
CALRGYGQNFVF

SEQ ID NO: 715128 - protein, 18 aa, Homo sapiens
  CDR3 for beta chain variable domain of TCR clone 357564 (TRBV4-1, TRBJ1-5)
CASSQDPRGQGLNQPQHF

SEQ ID NO: 715129 - protein, 13 aa, Homo sapiens
  CDR3 for alpha chain variable domain of TCR clone 357565 (TRAV3, TRAJ15)
CAVRDQAGTALIF

SEQ ID NO: 715130 - protein, 13 aa, Homo sapiens
  CDR3 for beta chain variable domain of TCR clone 357565 (TRBV7-3, TRBJ1-1)
CASSPAGGLEAFF

SEQ ID NO: 715131 - protein, 14 aa, Homo sapiens
  CDR3 for alpha chain variable domain of TCR clone 357566 (TRAV2, TRAJ37)
CAVDFTSNTGKLIS

SEQ ID NO: 715132 - protein, 15 aa, Homo sapiens
  CDR3 for beta chain variable domain of TCR clone 357566 (TRBV20-1, TRBJ1-1)
CSASRGVTGNAEAFF

SEQ ID NO: 715133 - protein, 13 aa, Homo sapiens
  CDR3 for alpha chain variable domain of TCR clone 357567 (TRAV2, TRAJ40)
CAVVTSGTYKYIF

SEQ ID NO: 715134 - protein, 15 aa, Homo sapiens
  CDR3 for beta chain variable domain of TCR clone 357567 (TRBV7-6, TRBJ2-3)
CASSYLAGEADTQYF

SEQ ID NO: 715135 - protein, 16 aa, Homo sapiens
  CDR3 for alpha chain variable domain of TCR clone 357568 (TRAV17, TRAJ52)
CATGIIGGTSYGKLTF

SEQ ID NO: 715136 - protein, 14 aa, Homo sapiens
  CDR3 for beta chain variable domain of TCR clone 357568 (TRBV7-3, TRBJ2-2)
CACSSGGYAGELFF

SEQ ID NO: 715137 - protein, 16 aa, Homo sapiens
  CDR3 for alpha chain variable domain of TCR clone 357569 (TRAV12-2, TRAJ56)
CAVRRVDTGANSKLTF

SEQ ID NO: 715138 - protein, 11 aa, Homo sapiens
  CDR3 for beta chain variable domain of TCR clone 357569 (TRBV3-1, TRBJ2-7)
CASSHVREQYF

SEQ ID NO: 715139 - protein, 13 aa, Homo sapiens
  CDR3 for alpha chain variable domain of TCR clone 357570 (TRAV26-2, TRAJ43)
CILRAVNNNDMRF

SEQ ID NO: 715140 - protein, 13 aa, Homo sapiens
  CDR3 for beta chain variable domain of TCR clone 357570 (TRBV14, TRBJ2-1)
CASSQDRRNKQFF

SEQ ID NO: 715141 - protein, 15 aa, Homo sapiens
  CDR3 for alpha chain variable domain of TCR clone 357571 (TRAV8-3, TRAJ45)
CASSYSGGGADGLTF

SEQ ID NO: 715142 - protein, 14 aa, Homo sapiens
  CDR3 for beta chain variable domain of TCR clone 357571 (TRBV12-4, TRBJ2-5)
CASSLWQKQETQYF

SEQ ID NO: 715143 - protein, 15 aa, Homo sapiens
  CDR3 for alpha chain variable domain of TCR clone 357572 (TRAV8-3, TRAJ11)
CAVGLLNSGYSTRTF

SEQ ID NO: 715144 - protein, 23 aa, Homo sapiens
  CDR3 for beta chain variable domain of TCR clone 357572 (TRBV7-9, TRBJ1-2)
EAQLEKSRLLSDRFSSGEDGYTF

SEQ ID NO: 715145 - protein, 15 aa, Homo sapiens
  CDR3 for alpha chain variable domain of TCR clone 357573 (TRAV23/DV6, TRAJ18)
CAARNRGPTLGRLYF

SEQ ID NO: 715146 - protein, 13 aa, Homo sapiens
  CDR3 for beta chain variable domain of TCR clone 357573 (TRBV7-2, TRBJ2-7)
CASSSPSGSEQYF

SEQ ID NO: 715147 - protein, 14 aa, Homo sapiens
  CDR3 for alpha chain variable domain of TCR clone 357574 (TRAV1-2, TRAJ16)
CAVNRFSAGQKLLF

SEQ ID NO: 715148 - protein, 15 aa, Homo sapiens
  CDR3 for beta chain variable domain of TCR clone 357574 (TRBV7-9, TRBJ1-6)
CASSSPGRGNSPRHF

SEQ ID NO: 715149 - protein, 16 aa, Homo sapiens
  CDR3 for alpha chain variable domain of TCR clone 357575 (TRAV17, TRAJ57)
CATDSITQGGSEKLVF

SEQ ID NO: 715150 - protein, 15 aa, Homo sapiens
  CDR3 for beta chain variable domain of TCR clone 357575 (TRBV10-2, TRBJ2-6)
CASSEQGTGANVLTF

SEQ ID NO: 715151 - protein, 15 aa, Homo sapiens
  CDR3 for alpha chain variable domain of TCR clone 357576 (TRAV25, TRAJ52)
CSGRPGGTSYGKLTF

SEQ ID NO: 715152 - protein, 18 aa, Homo sapiens
  CDR3 for beta chain variable domain of TCR clone 357576 (TRBV4-3, TRBJ1-6)
CASSQETPASSYNSPLHF

SEQ ID NO: 715153 - protein, 23 aa, Homo sapiens
  CDR3 for alpha chain variable domain of TCR clone 357577 (TRAV1-1, TRAJ11)
LLQELQMKDSASYFCAGYSTLTF

SEQ ID NO: 715154 - protein, 15 aa, Homo sapiens
  CDR3 for beta chain variable domain of TCR clone 357577 (TRBV5-1, TRBJ2-3)
CASSVTSGSTDTQYF

SEQ ID NO: 715155 - protein, 15 aa, Homo sapiens
  CDR3 for alpha chain variable domain of TCR clone 357578 (TRAV26-1, TRAJ29)
CIVRVEGSGNTPLVF

SEQ ID NO: 715156 - protein, 13 aa, Homo sapiens
  CDR3 for beta chain variable domain of TCR clone 357578 (TRBV18, TRBJ2-3)
CASSTGRTDTQYF

SEQ ID NO: 715157 - protein, 15 aa, Homo sapiens
  CDR3 for alpha chain variable domain of TCR clone 357579 (TRAV17, TRAJ16)
CATALRLSDGQKLLF

SEQ ID NO: 715158 - protein, 15 aa, Homo sapiens
  CDR3 for beta chain variable domain of TCR clone 357579 (TRBV13, TRBJ1-5)
CASSFGQGGVQPQHF

SEQ ID NO: 715159 - protein, 13 aa, Homo sapiens
  CDR3 for alpha chain variable domain of TCR clone 357580 (TRAV3, TRAJ20)
CAVRDTGDYKLRF

SEQ ID NO: 715160 - protein, 12 aa, Homo sapiens
  CDR3 for beta chain variable domain of TCR clone 357580 (TRBV29-1, TRBJ2-3)
CSVTGGADTQYF

SEQ ID NO: 715161 - protein, 16 aa, Homo sapiens
  CDR3 for alpha chain variable domain of TCR clone 357581 (TRAV16, TRAJ52)
CALSADGGTSYGKLTF

SEQ ID NO: 715162 - protein, 12 aa, Homo sapiens
  CDR3 for beta chain variable domain of TCR clone 357581 (TRBV12-4, TRBJ1-3)
CASSFSGNTIYF

SEQ ID NO: 715163 - protein, 12 aa, Homo sapiens
  CDR3 for alpha chain variable domain of TCR clone 357582 (TRAV12-3, TRAJ20)
CAMVRGDYKLSF

SEQ ID NO: 715164 - protein, 17 aa, Homo sapiens
  CDR3 for beta chain variable domain of TCR clone 357582 (TRBV7-7, TRBJ2-2)
CASSSVPAGGEIGELFF

SEQ ID NO: 715165 - protein, 14 aa, Homo sapiens
  CDR3 for alpha chain variable domain of TCR clone 357583 (TRAV23/DV6, TRAJ11)
CAASLESGYSTLTF

SEQ ID NO: 715166 - protein, 14 aa, Homo sapiens
  CDR3 for beta chain variable domain of TCR clone 357583 (TRBV4-1, TRBJ2-2)
CASSQAVNTGELFF

SEQ ID NO: 715167 - protein, 12 aa, Homo sapiens
  CDR3 for alpha chain variable domain of TCR clone 357584 (TRAV12-2, TRAJ21)
CAVRYNFNKFYF

SEQ ID NO: 715168 - protein, 14 aa, Homo sapiens
  CDR3 for beta chain variable domain of TCR clone 357584 (TRBV28, TRBJ2-1)
CASSYYTADNEQFF

SEQ ID NO: 715169 - protein, 14 aa, Homo sapiens
  CDR3 for alpha chain variable domain of TCR clone 357585 (TRAV12-2, TRAJ5)
CAVNRSTGRRALTF

SEQ ID NO: 715170 - protein, 13 aa, Homo sapiens
  CDR3 for beta chain variable domain of TCR clone 357585 (TRBV28, TRBJ2-5)
CASSFAGGETQYF

SEQ ID NO: 715171 - protein, 13 aa, Homo sapiens
  CDR3 for alpha chain variable domain of TCR clone 357586 (TRAV13-2, TRAJ57)
CAESEGGSEKLVL

SEQ ID NO: 715172 - protein, 14 aa, Homo sapiens
  CDR3 for beta chain variable domain of TCR clone 357586 (TRBV20-1, TRBJ1-2)
CSANQPPGRYGYTF

SEQ ID NO: 715173 - protein, 14 aa, Homo sapiens
  CDR3 for alpha chain variable domain of TCR clone 357587 (TRAV16, TRAJ57)
CSLCGQVGSEKLVC

SEQ ID NO: 715174 - protein, 13 aa, Homo sapiens
  CDR3 for beta chain variable domain of TCR clone 357587 (TRBV5-4, TRBJ2-1)
CASSLQGPREQFF

SEQ ID NO: 715175 - protein, 15 aa, Homo sapiens
  CDR3 for alpha chain variable domain of TCR clone 357588 (TRAV3, TRAJ38)
CAVRDCLNAGNNHIQ

SEQ ID NO: 715176 - protein, 13 aa, Homo sapiens
  CDR3 for beta chain variable domain of TCR clone 357588 (TRBV7-9, TRBJ1-2)
CASSLKQNYGYTF

SEQ ID NO: 715177 - protein, 14 aa, Homo sapiens
  CDR3 for alpha chain variable domain of TCR clone 357589 (TRAV35, TRAJ22)
CAGLRPGSARQLTF

SEQ ID NO: 715178 - protein, 13 aa, Homo sapiens
  CDR3 for beta chain variable domain of TCR clone 357589 (TRBV28, TRBJ2-7)
CASSFGQVYEQYF

SEQ ID NO: 715179 - protein, 14 aa, Homo sapiens
  CDR3 for alpha chain variable domain of TCR clone 357590 (TRAV12-3, TRAJ29)
CAMSPYSGNTPLVS

SEQ ID NO: 715180 - protein, 12 aa, Homo sapiens
  CDR3 for beta chain variable domain of TCR clone 357590 (TRBV12-5, TRBJ2-5)
CASGQGVETQYF

SEQ ID NO: 715181 - protein, 13 aa, Homo sapiens
  CDR3 for alpha chain variable domain of TCR clone 357591 (TRAV36/DV7, TRAJ37)
CAVFSSNTGKLIF

SEQ ID NO: 715182 - protein, 16 aa, Homo sapiens
  CDR3 for beta chain variable domain of TCR clone 357591 (TRBV3-1, TRBJ2-5)
CASSPGQFNGFGTRYF

SEQ ID NO: 715183 - protein, 14 aa, Homo sapiens
  CDR3 for alpha chain variable domain of TCR clone 357592 (TRAV4, TRAJ17)
CLVGDPLVGNKLTF

SEQ ID NO: 715184 - protein, 15 aa, Homo sapiens
  CDR3 for beta chain variable domain of TCR clone 357592 (TRBV20-1, TRBJ2-7)
CSARDRVSGMDEQYF

SEQ ID NO: 715185 - protein, 17 aa, Homo sapiens
  CDR3 for alpha chain variable domain of TCR clone 357593 (TRAV3, TRAJ6)
CAVRDGPRAGGSYIPTL

SEQ ID NO: 715186 - protein, 14 aa, Homo sapiens
  CDR3 for beta chain variable domain of TCR clone 357593 (TRBV7-2, TRBJ2-7)
CASSHKTSFYEQYF

SEQ ID NO: 715187 - protein, 11 aa, Homo sapiens
  CDR3 for alpha chain variable domain of TCR clone 357594 (TRAV21, TRAJ11)
CAVNGYSTLTF

SEQ ID NO: 715188 - protein, 14 aa, Homo sapiens
  CDR3 for beta chain variable domain of TCR clone 357594 (TRBV15, TRBJ2-1)
CATSGVEDYNEQFF

SEQ ID NO: 715189 - protein, 12 aa, Homo sapiens
  CDR3 for alpha chain variable domain of TCR clone 357595 (TRAV3, TRAJ20)
CAVRDPDYKLSF

SEQ ID NO: 715190 - protein, 13 aa, Homo sapiens
  CDR3 for beta chain variable domain of TCR clone 357595 (TRBV7-2, TRBJ2-1)
CASSLALGGEQFF

SEQ ID NO: 715191 - protein, 15 aa, Homo sapiens
  CDR3 for alpha chain variable domain of TCR clone 357596 (TRAV8-3, TRAJ23)
CAVGDRYNQGGKLIF

SEQ ID NO: 715192 - protein, 14 aa, Homo sapiens
  CDR3 for beta chain variable domain of TCR clone 357596 (TRBV11-2, TRBJ2-3)
CASSRLARTDTQYF

SEQ ID NO: 715193 - protein, 14 aa, Homo sapiens
  CDR3 for alpha chain variable domain of TCR clone 357597 (TRAV8-3, TRAJ17)
CAVGAQTAGNKLPF

SEQ ID NO: 715194 - protein, 14 aa, Homo sapiens
  CDR3 for beta chain variable domain of TCR clone 357597 (TRBV25-1, TRBJ1-1)
CASTHLGGNTEAFF

SEQ ID NO: 715195 - protein, 15 aa, Homo sapiens
  CDR3 for alpha chain variable domain of TCR clone 357598 (TRAV27, TRAJ38)
CAGRFNAGNNRKLFW

SEQ ID NO: 715196 - protein, 13 aa, Homo sapiens
  CDR3 for beta chain variable domain of TCR clone 357598 (TRBV20-1, TRBJ2-1)
TSWALPPGNEQFF

SEQ ID NO: 715197 - protein, 11 aa, Homo sapiens
  CDR3 for alpha chain variable domain of TCR clone 357599 (TRAV1-1, TRAJ23)
CAVRQGGKLIF

SEQ ID NO: 715198 - protein, 18 aa, Homo sapiens
  CDR3 for beta chain variable domain of TCR clone 357599 (TRBV11-2, TRBJ2-7)
CASSLAPTGLTTSSTSGR

SEQ ID NO: 715199 - protein, 14 aa, Homo sapiens
  CDR3 for alpha chain variable domain of TCR clone 357600 (TRAV12-2, TRAJ13)
CAVKKTGGYQKVTF

SEQ ID NO: 715200 - protein, 15 aa, Homo sapiens
  CDR3 for beta chain variable domain of TCR clone 357600 (TRBV20-1, TRBJ2-7)
CSARDRVPGMDEQYF

SEQ ID NO: 715201 - protein, 12 aa, Homo sapiens
  CDR3 for alpha chain variable domain of TCR clone 357601 (TRAV16, TRAJ26)
CALRSYGQNFVF

SEQ ID NO: 715202 - protein, 14 aa, Homo sapiens
  CDR3 for beta chain variable domain of TCR clone 357601 (TRBV10-3, TRBJ2-1)
CTIRSDLAYNEQFS

SEQ ID NO: 715203 - protein, 17 aa, Homo sapiens
  CDR3 for alpha chain variable domain of TCR clone 357602 (TRAV8-6, TRAJ58)
CAVSSWVGETSGSRLTF

SEQ ID NO: 715204 - protein, 16 aa, Homo sapiens
  CDR3 for beta chain variable domain of TCR clone 357602 (TRBV11-3, TRBJ2-5)
CASSSVVAGSTKTQYV

SEQ ID NO: 715205 - protein, 16 aa, Homo sapiens
  CDR3 for alpha chain variable domain of TCR clone 357603 (TRAV30, TRAJ24)
CGTEIVDAESWGKFQF

SEQ ID NO: 715206 - protein, 13 aa, Homo sapiens
  CDR3 for beta chain variable domain of TCR clone 357603 (TRBV7-8, TRBJ2-7)
RRVRLTEMGEQYF

SEQ ID NO: 715207 - protein, 15 aa, Homo sapiens
  CDR3 for alpha chain variable domain of TCR clone 357604 (TRAV21, TRAJ53)
CATLSSGGSDYKLTF

SEQ ID NO: 715208 - protein, 16 aa, Homo sapiens
  CDR3 for beta chain variable domain of TCR clone 357604 (TRBV12-4, TRBJ1-5)
CASSRPVGGSNQPQHF

SEQ ID NO: 715209 - protein, 14 aa, Homo sapiens
  CDR3 for alpha chain variable domain of TCR clone 357605 (TRAV3, TRAJ34)
CSVRVPGNTDKLIF

SEQ ID NO: 715210 - protein, 17 aa, Homo sapiens
  CDR3 for beta chain variable domain of TCR clone 357605 (TRBV20-1, TRBJ2-7)
CSAAPGLARGISYEQYF

SEQ ID NO: 715211 - protein, 14 aa, Homo sapiens
  CDR3 for alpha chain variable domain of TCR clone 357606 (TRAV12-2, TRAJ13)
CAVKKTGGYQKVTF

SEQ ID NO: 715212 - protein, 15 aa, Homo sapiens
  CDR3 for beta chain variable domain of TCR clone 357606 (TRBV28, TRBJ2-1)
CDSSIIAGGRSEQFF

SEQ ID NO: 715213 - protein, 13 aa, Homo sapiens
  CDR3 for alpha chain variable domain of TCR clone 357607 (TRAV20, TRAJ44)
CAVDTGTASKLTF

SEQ ID NO: 715214 - protein, 13 aa, Homo sapiens
  CDR3 for beta chain variable domain of TCR clone 357607 (TRBV4-2, TRBJ1-1)
CASSQAGNTEAFF

SEQ ID NO: 715215 - protein, 13 aa, Homo sapiens
  CDR3 for alpha chain variable domain of TCR clone 357608 (TRAV12-2, TRAJ6)
CAVDVSRKLHTYI

SEQ ID NO: 715216 - protein, 13 aa, Homo sapiens
  CDR3 for beta chain variable domain of TCR clone 357608 (TRBV4-2, TRBJ2-2)
CASEDRGTGELFF

SEQ ID NO: 715217 - protein, 17 aa, Homo sapiens
  CDR3 for alpha chain variable domain of TCR clone 357609 (TRAV12-2, TRAJ6)
CATQGPPRAGGSYIPTF

SEQ ID NO: 715218 - protein, 16 aa, Homo sapiens
  CDR3 for beta chain variable domain of TCR clone 357609 (TRBV19, TRBJ2-2)
CASSTARASNTGELFF

SEQ ID NO: 715219 - protein, 19 aa, Homo sapiens
  CDR3 for alpha chain variable domain of TCR clone 357610 (TRAV10, TRAJ43)
TASQLSDSASYPAPNDMRF

SEQ ID NO: 715220 - protein, 13 aa, Homo sapiens
  CDR3 for beta chain variable domain of TCR clone 357610 (TRBV20-1, TRBJ2-7)
CSARPSTTYEQYF

SEQ ID NO: 715221 - protein, 13 aa, Homo sapiens
  CDR3 for alpha chain variable domain of TCR clone 357611 (TRAV21, TRAJ57)
YAVTQGGSDKLVF

SEQ ID NO: 715222 - protein, 16 aa, Homo sapiens
  CDR3 for beta chain variable domain of TCR clone 357611 (TRBV29-1, TRBJ2-7)
CSVEDAEDGTAYEQYF

SEQ ID NO: 715223 - protein, 18 aa, Homo sapiens
  CDR3 for alpha chain variable domain of TCR clone 357612 (TRAV26-1, TRAJ23)
CIVRVGLEVWNQVGKRIF

SEQ ID NO: 715224 - protein, 16 aa, Homo sapiens
  CDR3 for beta chain variable domain of TCR clone 357612 (TRBV12-4, TRBJ2-5)
CASSFFVRGRQETQYF

SEQ ID NO: 715225 - protein, 10 aa, Homo sapiens
  CDR3 for alpha chain variable domain of TCR clone 357613 (TRAV36/DV7, TRAJ38)
CAATNRKLIW

SEQ ID NO: 715226 - protein, 15 aa, Homo sapiens
  CDR3 for beta chain variable domain of TCR clone 357613 (TRBV20-1, TRBJ2-7)
CSARDRVSGMDEQYF

SEQ ID NO: 715227 - protein, 11 aa, Homo sapiens
  CDR3 for alpha chain variable domain of TCR clone 357614 (TRAV17, TRAJ31)
CATSNNARLMF

SEQ ID NO: 715228 - protein, 16 aa, Homo sapiens
  CDR3 for beta chain variable domain of TCR clone 357614 (TRBV7-8, TRBJ2-4)
CASSAERTLAKNSRYF

SEQ ID NO: 715229 - protein, 12 aa, Homo sapiens
  CDR3 for alpha chain variable domain of TCR clone 357615 (TRAV1-2, TRAJ33)
CAALDSNYQLIW

SEQ ID NO: 715230 - protein, 13 aa, Homo sapiens
  CDR3 for beta chain variable domain of TCR clone 357615 (TRBV19, TRBJ2-7)
CASRKAGGREQYF

SEQ ID NO: 715231 - protein, 14 aa, Homo sapiens
  CDR3 for alpha chain variable domain of TCR clone 357616 (TRAV1-2, TRAJ8)
CAVREDTGFQKLVF

SEQ ID NO: 715232 - protein, 14 aa, Homo sapiens
  CDR3 for beta chain variable domain of TCR clone 357616 (TRBV7-8, TRBJ2-7)
CASSVGQGAYEQYF

SEQ ID NO: 715233 - protein, 14 aa, Homo sapiens
  CDR3 for alpha chain variable domain of TCR clone 357617 (TRAV12-2, TRAJ40)
CSVKIPSGAYKYIF

SEQ ID NO: 715234 - protein, 14 aa, Homo sapiens
  CDR3 for beta chain variable domain of TCR clone 357617 (TRBV20-1, TRBJ1-1)
CSAQTRIGGTEAFF

SEQ ID NO: 715235 - protein, 13 aa, Homo sapiens
  CDR3 for alpha chain variable domain of TCR clone 357618 (TRAV27, TRAJ24)
CAGVTDSWGKFQF

SEQ ID NO: 715236 - protein, 15 aa, Homo sapiens
  CDR3 for beta chain variable domain of TCR clone 357618 (TRBV7-8, TRBJ2-3)
CASSPRTGSTDTQYF

SEQ ID NO: 715237 - protein, 15 aa, Homo sapiens
  CDR3 for alpha chain variable domain of TCR clone 357619 (TRAV20, TRAJ4)
CAVQVFSGGYNKLIF

SEQ ID NO: 715238 - protein, 14 aa, Homo sapiens
  CDR3 for beta chain variable domain of TCR clone 357619 (TRBV20-1, TRBJ1-1)
CSAQTRIGGTEAFF

SEQ ID NO: 715239 - protein, 13 aa, Homo sapiens
  CDR3 for alpha chain variable domain of TCR clone 357620 (TRAV36/DV7, TRAJ53)
CALSGGSNYKLTF

SEQ ID NO: 715240 - protein, 13 aa, Homo sapiens
  CDR3 for beta chain variable domain of TCR clone 357620 (TRBV28, TRBJ2-4)
CASSQSSKNLQYF

SEQ ID NO: 715241 - protein, 13 aa, Homo sapiens
  CDR3 for alpha chain variable domain of TCR clone 357621 (TRAV26-1, TRAJ40)
CIIRGTGTYKYIF

SEQ ID NO: 715242 - protein, 16 aa, Homo sapiens
  CDR3 for beta chain variable domain of TCR clone 357621 (TRBV20-1, TRBJ1-1)
CSARDRTLSMNTEAFF

SEQ ID NO: 715243 - protein, 13 aa, Homo sapiens
  CDR3 for alpha chain variable domain of TCR clone 357622 (TRAV2, TRAJ40)
CAVVTSGTYKYIF

SEQ ID NO: 715244 - protein, 18 aa, Homo sapiens
  CDR3 for beta chain variable domain of TCR clone 357622 (TRBV2, TRBJ2-2)
CQQATGTSGGGNTGELFF

SEQ ID NO: 715245 - protein, 14 aa, Homo sapiens
  CDR3 for alpha chain variable domain of TCR clone 357623 (TRAV2, TRAJ9)
CAVDDRSGGFKTIF

SEQ ID NO: 715246 - protein, 14 aa, Homo sapiens
  CDR3 for beta chain variable domain of TCR clone 357623 (TRBV4-1, TRBJ2-2)
CASSQAVNTGELFF

SEQ ID NO: 715247 - protein, 12 aa, Homo sapiens
  CDR3 for alpha chain variable domain of TCR clone 357624 (TRAV8-3, TRAJ26)
CAGDNYGQNFVF

SEQ ID NO: 715248 - protein, 13 aa, Homo sapiens
  CDR3 for beta chain variable domain of TCR clone 357624 (TRBV20-1, TRBJ1-1)
CIAPLGGGTEAFF

SEQ ID NO: 715249 - protein, 14 aa, Homo sapiens
  CDR3 for alpha chain variable domain of TCR clone 357625 (TRAV12-1, TRAJ24)
CVVRSTDSWGKFQF

SEQ ID NO: 715250 - protein, 12 aa, Homo sapiens
  CDR3 for beta chain variable domain of TCR clone 357625 (TRBV2, TRBJ2-3)
CQHTSGGQGQYF

SEQ ID NO: 715251 - protein, 15 aa, Homo sapiens
  CDR3 for alpha chain variable domain of TCR clone 357626 (TRAV17, TRAJ16)
CATALRFSDGQKLLF

SEQ ID NO: 715252 - protein, 15 aa, Homo sapiens
  CDR3 for beta chain variable domain of TCR clone 357626 (TRBV20-1, TRBJ1-1)
CSASRGETGNTEAFF

SEQ ID NO: 715253 - protein, 13 aa, Homo sapiens
  CDR3 for alpha chain variable domain of TCR clone 357627 (TRAV20, TRAJ20)
CAVRWVRDYKLSF

SEQ ID NO: 715254 - protein, 14 aa, Homo sapiens
  CDR3 for beta chain variable domain of TCR clone 357627 (TRBV19, TRBJ2-2)
CATTVTANTGELFF

SEQ ID NO: 715255 - protein, 13 aa, Homo sapiens
  CDR3 for alpha chain variable domain of TCR clone 357628 (TRAV21, TRAJ20)
CAVSRLGDYKLSF

SEQ ID NO: 715256 - protein, 13 aa, Homo sapiens
  CDR3 for beta chain variable domain of TCR clone 357628 (TRBV7-3, TRBJ1-1)
CASSPAGGLEACF

SEQ ID NO: 715257 - protein, 13 aa, Homo sapiens
  CDR3 for alpha chain variable domain of TCR clone 357629 (TRAV35, TRAJ42)
CAGFPGSQGNLIF

SEQ ID NO: 715258 - protein, 13 aa, Homo sapiens
  CDR3 for beta chain variable domain of TCR clone 357629 (TRBV29-1, TRBJ2-1)
CSAEGGRVNEQFF

SEQ ID NO: 715259 - protein, 13 aa, Homo sapiens
  CDR3 for alpha chain variable domain of TCR clone 357630 (TRAV36/DV7, TRAJ37)
CAVFSSNTGKLIF

SEQ ID NO: 715260 - protein, 16 aa, Homo sapiens
  CDR3 for beta chain variable domain of TCR clone 357630 (TRBV3-1, TRBJ2-5)
CVSSPGQFNGFGTQYF

SEQ ID NO: 715261 - protein, 14 aa, Homo sapiens
  CDR3 for alpha chain variable domain of TCR clone 357631 (TRAV13-1, TRAJ17)
CAASRDAAGNKLTF

SEQ ID NO: 715262 - protein, 12 aa, Homo sapiens
  CDR3 for beta chain variable domain of TCR clone 357631 (TRBV11-2, TRBJ2-2)
CASSLGGGELFF

SEQ ID NO: 715263 - protein, 14 aa, Homo sapiens
  CDR3 for alpha chain variable domain of TCR clone 357632 (TRAV17, TRAJ35)
CATDRPGFGNVLHC

SEQ ID NO: 715264 - protein, 13 aa, Homo sapiens
  CDR3 for beta chain variable domain of TCR clone 357632 (TRBV7-9, TRBJ2-3)
CASSPGSTDTQYF

SEQ ID NO: 715265 - protein, 14 aa, Homo sapiens
  CDR3 for alpha chain variable domain of TCR clone 357633 (TRAV13-1, TRAJ50)
CAASSETSYDKVIF

SEQ ID NO: 715266 - protein, 13 aa, Homo sapiens
  CDR3 for beta chain variable domain of TCR clone 357633 (TRBV28, TRBJ2-7)
CASSPGQSYEQYF

SEQ ID NO: 715267 - protein, 11 aa, Homo sapiens
  CDR3 for alpha chain variable domain of TCR clone 357634 (TRAV12-1, TRAJ26)
CVVAYGQNFVF

SEQ ID NO: 715268 - protein, 14 aa, Homo sapiens
  CDR3 for beta chain variable domain of TCR clone 357634 (TRBV2, TRBJ1-6)
CASSESRNNSPLHF

SEQ ID NO: 715269 - protein, 11 aa, Homo sapiens
  CDR3 for alpha chain variable domain of TCR clone 357635 (TRAV12-2, TRAJ33)
CAVTSNYQLIW

SEQ ID NO: 715270 - protein, 13 aa, Homo sapiens
  CDR3 for beta chain variable domain of TCR clone 357635 (TRBV7-9, TRBJ1-2)
CASSLKQNYGYTF

SEQ ID NO: 715271 - protein, 14 aa, Homo sapiens
  CDR3 for alpha chain variable domain of TCR clone 357636 (TRAV2, TRAJ9)
CAVEDRCGGFKTIF

SEQ ID NO: 715272 - protein, 12 aa, Homo sapiens
  CDR3 for beta chain variable domain of TCR clone 357636 (TRBV12-4, TRBJ2-7)
CASSLGGYEQYF

SEQ ID NO: 715273 - protein, 14 aa, Homo sapiens
  CDR3 for alpha chain variable domain of TCR clone 357637 (TRAV4, TRAJ30)
CLLTLMNRDDKIIF

SEQ ID NO: 715274 - protein, 12 aa, Homo sapiens
  CDR3 for beta chain variable domain of TCR clone 357637 (TRBV7-2, TRBJ2-1)
CASSPQDIEQFF

SEQ ID NO: 715275 - protein, 15 aa, Homo sapiens
  CDR3 for alpha chain variable domain of TCR clone 357638 (TRAV38-2/DV8, TRAJ57)
CAYKSGFGGSEKLVF

SEQ ID NO: 715276 - protein, 16 aa, Homo sapiens
  CDR3 for beta chain variable domain of TCR clone 357638 (TRBV28, TRBJ1-5)
CASSFRGGYSNQPQHF

SEQ ID NO: 715277 - protein, 11 aa, Homo sapiens
  CDR3 for alpha chain variable domain of TCR clone 357639 (TRAV2, TRAJ31)
CAGGPPARLMF

SEQ ID NO: 715278 - protein, 12 aa, Homo sapiens
  CDR3 for beta chain variable domain of TCR clone 357639 (TRBV7-8, TRBJ2-7)
CASSLGDREQYF

SEQ ID NO: 715279 - protein, 11 aa, Homo sapiens
  CDR3 for alpha chain variable domain of TCR clone 357640 (TRAV3, TRAJ13)
CAVTSYQKVTF

SEQ ID NO: 715280 - protein, 15 aa, Homo sapiens
  CDR3 for beta chain variable domain of TCR clone 357640 (TRBV7-9, TRBJ2-7)
CASSSSGLAVYELYF

SEQ ID NO: 715281 - protein, 15 aa, Homo sapiens
  CDR3 for alpha chain variable domain of TCR clone 357641 (TRAV12-1, TRAJ44)
CVVDTPQGTASQLTF

SEQ ID NO: 715282 - protein, 14 aa, Homo sapiens
  CDR3 for beta chain variable domain of TCR clone 357641 (TRBV7-9, TRBJ2-1)
CASSPRDSLYEQFF

SEQ ID NO: 715283 - protein, 13 aa, Homo sapiens
  CDR3 for alpha chain variable domain of TCR clone 357642 (TRAV26-2, TRAJ43)
CILRAVNNNDMRF

SEQ ID NO: 715284 - protein, 15 aa, Homo sapiens
  CDR3 for beta chain variable domain of TCR clone 357642 (TRBV7-2, TRBJ2-1)
CPSTHGTGIYNEQFF

SEQ ID NO: 715285 - protein, 14 aa, Homo sapiens
  CDR3 for alpha chain variable domain of TCR clone 357643 (TRAV1-2, TRAJ8)
CAVREDTGFQKLVF

SEQ ID NO: 715286 - protein, 11 aa, Homo sapiens
  CDR3 for beta chain variable domain of TCR clone 357643 (TRBV11-3, TRBJ2-7)
CASSRAYEQYF

SEQ ID NO: 715287 - protein, 14 aa, Homo sapiens
  CDR3 for alpha chain variable domain of TCR clone 357644 (TRAV8-1, TRAJ5)
CAVRTDTGRRAPTF

SEQ ID NO: 715288 - protein, 16 aa, Homo sapiens
  CDR3 for beta chain variable domain of TCR clone 357644 (TRBV29-1, TRBJ2-7)
CSVEVVGTSGSYEQYF

SEQ ID NO: 715289 - protein, 18 aa, Homo sapiens
  CDR3 for alpha chain variable domain of TCR clone 357645 (TRAV21, TRAJ52)
CAVRPSPAGGTSSGKLTF

SEQ ID NO: 715290 - protein, 14 aa, Homo sapiens
  CDR3 for beta chain variable domain of TCR clone 357645 (TRBV4-1, TRBJ2-2)
CASSQAVNTGELFL

SEQ ID NO: 715291 - protein, 19 aa, Homo sapiens
  CDR3 for alpha chain variable domain of TCR clone 357646 (TRAV26-1, TRAJ52)
CIVRVANNAGGTSYGKLTF

SEQ ID NO: 715292 - protein, 14 aa, Homo sapiens
  CDR3 for beta chain variable domain of TCR clone 357646 (TRBV19, TRBJ1-2)
CASSIGVGSYGYTF

SEQ ID NO: 715293 - protein, 15 aa, Homo sapiens
  CDR3 for alpha chain variable domain of TCR clone 357647 (TRAV3, TRAJ17)
CAVSPKGAAGNKLTF

SEQ ID NO: 715294 - protein, 12 aa, Homo sapiens
  CDR3 for beta chain variable domain of TCR clone 357647 (TRBV7-9, TRBJ1-6)
CASSLMTSPLHF

SEQ ID NO: 715295 - protein, 14 aa, Homo sapiens
  CDR3 for alpha chain variable domain of TCR clone 357648 (TRAV12-3, TRAJ9)
CVMSPNTGGFKTIF

SEQ ID NO: 715296 - protein, 14 aa, Homo sapiens
  CDR3 for beta chain variable domain of TCR clone 357648 (TRBV19, TRBJ2-1)
CASPTFVLSGEQFF

SEQ ID NO: 715297 - protein, 10 aa, Homo sapiens
  CDR3 for alpha chain variable domain of TCR clone 357649 (TRAV38-2/DV8, TRAJ40)
CASGTYKYIF

SEQ ID NO: 715298 - protein, 12 aa, Homo sapiens
  CDR3 for beta chain variable domain of TCR clone 357649 (TRBV18, TRBJ2-1)
CASSSDEDEQFF

SEQ ID NO: 715299 - protein, 16 aa, Homo sapiens
  CDR3 for alpha chain variable domain of TCR clone 357650 (TRAV16, TRAJ4)
CALSRMFSGGYNKRIF

SEQ ID NO: 715300 - protein, 19 aa, Homo sapiens
  CDR3 for beta chain variable domain of TCR clone 357650 (TRBV28, TRBJ2-7)
CASSYSGTSRLGWVYEQYF

SEQ ID NO: 715301 - protein, 14 aa, Homo sapiens
  CDR3 for alpha chain variable domain of TCR clone 357651 (TRAV9-2, TRAJ39)
CALYIYSAGNMLTF

SEQ ID NO: 715302 - protein, 22 aa, Homo sapiens
  CDR3 for beta chain variable domain of TCR clone 357651 (TRBV6-1, TRBJ1-3)
CASVQGGGWKHHIFWRGKLAHC

SEQ ID NO: 715303 - protein, 14 aa, Homo sapiens
  CDR3 for alpha chain variable domain of TCR clone 357652 (TRAV4, TRAJ30)
CLVGDMNRDDQIIF

SEQ ID NO: 715304 - protein, 15 aa, Homo sapiens
  CDR3 for beta chain variable domain of TCR clone 357652 (TRBV7-2, TRBJ2-7)
CASSLSSGRTYEQYF

SEQ ID NO: 715305 - protein, 10 aa, Homo sapiens
  CDR3 for alpha chain variable domain of TCR clone 357653 (TRAV25, TRAJ52)
CAGRPGGTSY

SEQ ID NO: 715306 - protein, 17 aa, Homo sapiens
  CDR3 for beta chain variable domain of TCR clone 357653 (TRBV7-8, TRBJ2-6)
CASSAGTGGAGANVLTF

SEQ ID NO: 715307 - protein, 15 aa, Homo sapiens
  CDR3 for alpha chain variable domain of TCR clone 357654 (TRAV8-3, TRAJ45)
CASSYSGGCADGLTF

SEQ ID NO: 715308 - protein, 13 aa, Homo sapiens
  CDR3 for beta chain variable domain of TCR clone 357654 (TRBV19, TRBJ1-2)
CASSVPGQDGYTF

SEQ ID NO: 715309 - protein, 15 aa, Homo sapiens
  CDR3 for alpha chain variable domain of TCR clone 357655 (TRAV3, TRAJ4)
CAVRDGTGGYNQLIF

SEQ ID NO: 715310 - protein, 16 aa, Homo sapiens
  CDR3 for beta chain variable domain of TCR clone 357655 (TRBV27, TRBJ2-2)
CASSSSGVSNTGELFF

SEQ ID NO: 715311 - protein, 13 aa, Homo sapiens
  CDR3 for alpha chain variable domain of TCR clone 357656 (TRAV3, TRAJ21)
CAVREPDFNKFYF

SEQ ID NO: 715312 - protein, 15 aa, Homo sapiens
  CDR3 for beta chain variable domain of TCR clone 357656 (TRBV20-1, TRBJ1-1)
CSASRGVTGNTGAFF

SEQ ID NO: 715313 - protein, 14 aa, Homo sapiens
  CDR3 for alpha chain variable domain of TCR clone 357657 (TRAV12-2, TRAJ13)
CAVKKTGGDQKVTF

SEQ ID NO: 715314 - protein, 15 aa, Homo sapiens
  CDR3 for beta chain variable domain of TCR clone 357657 (TRBV27, TRBJ2-1)
CASSNGGGSSNEQLF

SEQ ID NO: 715315 - protein, 16 aa, Homo sapiens
  CDR3 for alpha chain variable domain of TCR clone 357658 (TRAV12-3, TRAJ53)
CAMSPGSGGSNCKLTF

SEQ ID NO: 715316 - protein, 17 aa, Homo sapiens
  CDR3 for beta chain variable domain of TCR clone 357658 (TRBV28, TRBJ2-5)
CASSTPEGDALQETQYF

SEQ ID NO: 715317 - protein, 16 aa, Homo sapiens
  CDR3 for alpha chain variable domain of TCR clone 357659 (TRAV21, TRAJ37)
CAVRPRGTSNTSKLIF

SEQ ID NO: 715318 - protein, 16 aa, Homo sapiens
  CDR3 for beta chain variable domain of TCR clone 357659 (TRBV2, TRBJ2-1)
YASSVGGSLSYNEQFF

SEQ ID NO: 715319 - protein, 12 aa, Homo sapiens
  CDR3 for alpha chain variable domain of TCR clone 357660 (TRAV35, TRAJ30)
CAGLNRADKIIF

SEQ ID NO: 715320 - protein, 15 aa, Homo sapiens
  CDR3 for beta chain variable domain of TCR clone 357660 (TRBV18, TRBJ2-3)
CASSPLAGEADTQYF

SEQ ID NO: 715321 - protein, 23 aa, Homo sapiens
  CDR3 for alpha chain variable domain of TCR clone 357661 (TRAV26-1, TRAJ38)
CIADNAGNNHIQNPDPAVYQLRD

SEQ ID NO: 715322 - protein, 14 aa, Homo sapiens
  CDR3 for beta chain variable domain of TCR clone 357661 (TRBV19, TRBJ2-5)
CASSMTGQQETQYF

SEQ ID NO: 715323 - protein, 14 aa, Homo sapiens
  CDR3 for alpha chain variable domain of TCR clone 357662 (TRAV8-1, TRAJ34)
CAVITTYNTDKLTF

SEQ ID NO: 715324 - protein, 14 aa, Homo sapiens
  CDR3 for beta chain variable domain of TCR clone 357662 (TRBV11-3, TRBJ1-3)
CASSHNGQGNTIYF

SEQ ID NO: 715325 - protein, 17 aa, Homo sapiens
  CDR3 for alpha chain variable domain of TCR clone 357663 (TRAV17, TRAJ45)
CYVPRLVFRRRSDGLTF

SEQ ID NO: 715326 - protein, 15 aa, Homo sapiens
  CDR3 for beta chain variable domain of TCR clone 357663 (TRBV11-2, TRBJ2-1)
CASSKNRGLIYEQFF

SEQ ID NO: 715327 - protein, 14 aa, Homo sapiens
  CDR3 for alpha chain variable domain of TCR clone 357664 (TRAV1-2, TRAJ27)
CAVTINTNAGKSTF

SEQ ID NO: 715328 - protein, 15 aa, Homo sapiens
  CDR3 for beta chain variable domain of TCR clone 357664 (TRBV6-1, TRBJ2-3)
CASSEIAHSTDTQYF

SEQ ID NO: 715329 - protein, 11 aa, Homo sapiens
  CDR3 for alpha chain variable domain of TCR clone 357665 (TRAV2, TRAJ23)
CAVETRGKLIF

SEQ ID NO: 715330 - protein, 14 aa, Homo sapiens
  CDR3 for beta chain variable domain of TCR clone 357665 (TRBV2, TRBJ2-3)
CASSEGQKTDTQYF

SEQ ID NO: 715331 - protein, 14 aa, Homo sapiens
  CDR3 for alpha chain variable domain of TCR clone 357666 (TRAV2, TRAJ37)
CAVDFTSNTGKLIF

SEQ ID NO: 715332 - protein, 13 aa, Homo sapiens
  CDR3 for beta chain variable domain of TCR clone 357666 (TRBV25-1, TRBJ2-7)
CASRLQDTYEQYF

SEQ ID NO: 715333 - protein, 12 aa, Homo sapiens
  CDR3 for alpha chain variable domain of TCR clone 357667 (TRAV1-2, TRAJ11)
CAVDSGYSTLTF

SEQ ID NO: 715334 - protein, 14 aa, Homo sapiens
  CDR3 for beta chain variable domain of TCR clone 357667 (TRBV7-2, TRBJ2-1)
CASSLEGGHNEQFF

SEQ ID NO: 715335 - protein, 16 aa, Homo sapiens
  CDR3 for alpha chain variable domain of TCR clone 357668 (TRAV26-1, TRAJ56)
CIVRVAETGANSKPTF

SEQ ID NO: 715336 - protein, 15 aa, Homo sapiens
  CDR3 for beta chain variable domain of TCR clone 357668 (TRBV5-7, TRBJ1-4)
CASSLWHQGGEKLFF

SEQ ID NO: 715337 - protein, 14 aa, Homo sapiens
  CDR3 for alpha chain variable domain of TCR clone 357669 (TRAV12-2, TRAJ40)
CAVKIPSGTYKYIF

SEQ ID NO: 715338 - protein, 16 aa, Homo sapiens
  CDR3 for beta chain variable domain of TCR clone 357669 (TRBV27, TRBJ2-7)
CASSSERRDSAYEQYF

SEQ ID NO: 715339 - protein, 14 aa, Homo sapiens
  CDR3 for alpha chain variable domain of TCR clone 357670 (TRAV1-2, TRAJ8)
CAVREDTGCQKLVF

SEQ ID NO: 715340 - protein, 15 aa, Homo sapiens
  CDR3 for beta chain variable domain of TCR clone 357670 (TRBV11-3, TRBJ2-3)
CASLKDGREGDTQYF

SEQ ID NO: 715341 - protein, 19 aa, Homo sapiens
  CDR3 for alpha chain variable domain of TCR clone 357671 (TRAV1-2, TRAJ26)
CLLPLCCERPDNYGQNFVF

SEQ ID NO: 715342 - protein, 11 aa, Homo sapiens
  CDR3 for beta chain variable domain of TCR clone 357671 (TRBV12-4, TRBJ2-3)
CASTATDTQYI

SEQ ID NO: 715343 - protein, 12 aa, Homo sapiens
  CDR3 for alpha chain variable domain of TCR clone 357672 (TRAV12-3, TRAJ17)
CAMTLTGNKLTF

SEQ ID NO: 715344 - protein, 13 aa, Homo sapiens
  CDR3 for beta chain variable domain of TCR clone 357672 (TRBV6-5, TRBJ2-2)
CASSLPGVGELFF

SEQ ID NO: 715345 - protein, 12 aa, Homo sapiens
  CDR3 for alpha chain variable domain of TCR clone 357673 (TRAV21, TRAJ23)
CAVMLQGGKLIF

SEQ ID NO: 715346 - protein, 14 aa, Homo sapiens
  CDR3 for beta chain variable domain of TCR clone 357673 (TRBV7-9, IGLJ4)
CAITEGEANEKLFF

SEQ ID NO: 715347 - protein, 14 aa, Homo sapiens
  CDR3 for alpha chain variable domain of TCR clone 357674 (TRAV14/DV4, TRAJ32)
SNVLPLTPTNKLIF

SEQ ID NO: 715348 - protein, 17 aa, Homo sapiens
  CDR3 for beta chain variable domain of TCR clone 357674 (TRBV20-1, TRBJ2-1)
CSVSSSGLAGSYNEQFF

SEQ ID NO: 715349 - protein, 13 aa, Homo sapiens
  CDR3 for alpha chain variable domain of TCR clone 357675 (TRAV14/DV4, TRAJ44)
CAMETGTASKLTF

SEQ ID NO: 715350 - protein, 13 aa, Homo sapiens
  CDR3 for beta chain variable domain of TCR clone 357675 (TRBV24-1, TRBJ2-2)
CATSDWSTGELFF

SEQ ID NO: 715351 - protein, 14 aa, Homo sapiens
  CDR3 for alpha chain variable domain of TCR clone 357676 (TRAV12-2, TRAJ44)
CAVNPAGTASKLTF

SEQ ID NO: 715352 - protein, 15 aa, Homo sapiens
  CDR3 for beta chain variable domain of TCR clone 357676 (TRBV11-2, TRBJ1-2)
CASSLEGVQRNGYTF

SEQ ID NO: 715353 - protein, 13 aa, Homo sapiens
  CDR3 for alpha chain variable domain of TCR clone 357677 (TRAV1-1, TRAJ31)
YASYLNNNARLMF

SEQ ID NO: 715354 - protein, 14 aa, Homo sapiens
  CDR3 for beta chain variable domain of TCR clone 357677 (TRBV4-1, TRBJ2-5)
CASSRSGSGETQYF

SEQ ID NO: 715355 - protein, 11 aa, Homo sapiens
  CDR3 for alpha chain variable domain of TCR clone 357678 (TRAV21, TRAJ33)
CAVLSNYQLIW

SEQ ID NO: 715356 - protein, 15 aa, Homo sapiens
  CDR3 for beta chain variable domain of TCR clone 357678 (TRBV11-2, TRBJ2-7)
YASSLMVGGSYEQYF

SEQ ID NO: 715357 - protein, 14 aa, Homo sapiens
  CDR3 for alpha chain variable domain of TCR clone 357679 (TRAV8-3, TRAJ10)
CAVGNAGGGNKLTF

SEQ ID NO: 715358 - protein, 14 aa, Homo sapiens
  CDR3 for beta chain variable domain of TCR clone 357679 (TRBV12-5, TRBJ2-5)
CASGSRTHQETQYF

SEQ ID NO: 715359 - protein, 13 aa, Homo sapiens
  CDR3 for alpha chain variable domain of TCR clone 357680 (TRAV12-3, TRAJ26)
CAMSEPRGQNFVF

SEQ ID NO: 715360 - protein, 15 aa, Homo sapiens
  CDR3 for beta chain variable domain of TCR clone 357680 (TRBV7-9, TRBJ2-7)
CASSPGGGLTYEQYF

SEQ ID NO: 715361 - protein, 14 aa, Homo sapiens
  CDR3 for alpha chain variable domain of TCR clone 357681 (TRAV13-1, TRAJ9)
CAASALTGGFKTIF

SEQ ID NO: 715362 - protein, 16 aa, Homo sapiens
  CDR3 for beta chain variable domain of TCR clone 357681 (TRBV7-8, TRBJ2-4)
CASRAERTLAKNIQYF

SEQ ID NO: 715363 - protein, 13 aa, Homo sapiens
  CDR3 for alpha chain variable domain of TCR clone 357682 (TRAV1-2, TRAJ20)
CAVRDGNDYNLSF

SEQ ID NO: 715364 - protein, 16 aa, Homo sapiens
  CDR3 for beta chain variable domain of TCR clone 357682 (TRBV12-5, TRBJ2-5)
CASGPRTSGNQETQYF

SEQ ID NO: 715365 - protein, 15 aa, Homo sapiens
  CDR3 for alpha chain variable domain of TCR clone 357683 (TRAV8-4, TRAJ3)
CAVSEPYSSASKIIF

SEQ ID NO: 715366 - protein, 20 aa, Homo sapiens
  CDR3 for beta chain variable domain of TCR clone 357683 (TRBV7-8, TRBJ2-2)
CASSHLFPGPTIHITGELFF

SEQ ID NO: 715367 - protein, 15 aa, Homo sapiens
  CDR3 for alpha chain variable domain of TCR clone 357684 (TRAV38-2/DV8, TRAJ29)
CAYRTWNSGNTPLVF

SEQ ID NO: 715368 - protein, 16 aa, Homo sapiens
  CDR3 for beta chain variable domain of TCR clone 357684 (TRBV20-1, TRBJ1-4)
CSAPGQGLLTNEKLFF

SEQ ID NO: 715369 - protein, 12 aa, Homo sapiens
  CDR3 for alpha chain variable domain of TCR clone 357685 (TRAV3, TRAJ20)
CAVRDGDYKLSF

SEQ ID NO: 715370 - protein, 13 aa, Homo sapiens
  CDR3 for beta chain variable domain of TCR clone 357685 (TRBV20-1, TRBJ2-5)
CSAREAFQETQYF

SEQ ID NO: 715371 - protein, 14 aa, Homo sapiens
  CDR3 for alpha chain variable domain of TCR clone 357686 (TRAV21, TRAJ21)
CAVKGFGNYNKFYF

SEQ ID NO: 715372 - protein, 13 aa, Homo sapiens
  CDR3 for beta chain variable domain of TCR clone 357686 (TRBV18, TRBJ1-1)
CASSPETKPEAFF

SEQ ID NO: 715373 - protein, 14 aa, Homo sapiens
  CDR3 for alpha chain variable domain of TCR clone 357687 (TRAV9-2, TRAJ33)
CALSIMDSNYQLIW

SEQ ID NO: 715374 - protein, 15 aa, Homo sapiens
  CDR3 for beta chain variable domain of TCR clone 357687 (TRBV19, TRBJ2-4)
CASRGPRRGENIQYF

SEQ ID NO: 715375 - protein, 15 aa, Homo sapiens
  CDR3 for alpha chain variable domain of TCR clone 357688 (TRAV2, TRAJ9)
CAVEDRGTGGFKTIF

SEQ ID NO: 715376 - protein, 17 aa, Homo sapiens
  CDR3 for beta chain variable domain of TCR clone 357688 (TRBV4-3, TRBJ2-1)
CASSQFSSGRASGEQFV

SEQ ID NO: 715377 - protein, 16 aa, Homo sapiens
  CDR3 for alpha chain variable domain of TCR clone 357689 (TRAV13-1, TRAJ31)
CAPRDRLMFGDGTQLV

SEQ ID NO: 715378 - protein, 12 aa, Homo sapiens
  CDR3 for beta chain variable domain of TCR clone 357689 (TRBV7-9, TRBJ2-7)
CASSLEGYEQFF

SEQ ID NO: 715379 - protein, 16 aa, Homo sapiens
  CDR3 for alpha chain variable domain of TCR clone 357690 (TRAV30, TRAJ24)
CGTEIMDADSWGKFQF

SEQ ID NO: 715380 - protein, 14 aa, Homo sapiens
  CDR3 for beta chain variable domain of TCR clone 357690 (TRBV12-5, TRBJ2-5)
CASGSRTHQETQYL

SEQ ID NO: 715381 - protein, 15 aa, Homo sapiens
  CDR3 for alpha chain variable domain of TCR clone 357691 (TRAV26-1, TRAJ40)
CIVRVTTSGTYKYIF

SEQ ID NO: 715382 - protein, 17 aa, Homo sapiens
  CDR3 for beta chain variable domain of TCR clone 357691 (TRBV7-8, TRBJ2-6)
CASSAGTGGAGANVLTF

SEQ ID NO: 715383 - protein, 14 aa, Homo sapiens
  CDR3 for alpha chain variable domain of TCR clone 357692 (TRAV4, TRAJ26)
CFVGPHNYGQNFVF

SEQ ID NO: 715384 - protein, 17 aa, Homo sapiens
  CDR3 for beta chain variable domain of TCR clone 357692 (TRBV24-1, TRBJ2-1)
CATSDVSTSGTYNEQFF

SEQ ID NO: 715385 - protein, 12 aa, Homo sapiens
  CDR3 for alpha chain variable domain of TCR clone 357693 (TRAV1-2, TRAJ33)
CAALDSNYQLLW

SEQ ID NO: 715386 - protein, 13 aa, Homo sapiens
  CDR3 for beta chain variable domain of TCR clone 357693 (TRBV7-2, TRBJ2-7)
CASSFGQEKEQYF

SEQ ID NO: 715387 - protein, 12 aa, Homo sapiens
  CDR3 for alpha chain variable domain of TCR clone 357694 (TRAV3, TRAJ27)
CAVRDKAGKPTF

SEQ ID NO: 715388 - protein, 14 aa, Homo sapiens
  CDR3 for beta chain variable domain of TCR clone 357694 (TRBV5-1, TRBJ1-2)
CASSVDSTNYGYSF

SEQ ID NO: 715389 - protein, 17 aa, Homo sapiens
  CDR3 for alpha chain variable domain of TCR clone 357695 (TRAV8-6, TRAJ58)
CAVSSWVGETSGSRLNF

SEQ ID NO: 715390 - protein, 16 aa, Homo sapiens
  CDR3 for beta chain variable domain of TCR clone 357695 (TRBV20-1, TRBJ1-4)
CSAPGQGLLTNEKLFF

SEQ ID NO: 715391 - protein, 14 aa, Homo sapiens
  CDR3 for alpha chain variable domain of TCR clone 357696 (TRAV20, TRAJ22)
CAVQVSGSARQLTF

SEQ ID NO: 715392 - protein, 13 aa, Homo sapiens
  CDR3 for beta chain variable domain of TCR clone 357696 (TRBV11-2, TRBJ2-7)
CASSGTRPYEQYF

SEQ ID NO: 715393 - protein, 15 aa, Homo sapiens
  CDR3 for alpha chain variable domain of TCR clone 357697 (TRAV4, TRAJ39)
CLVGPNNSSGNILPF

SEQ ID NO: 715394 - protein, 14 aa, Homo sapiens
  CDR3 for beta chain variable domain of TCR clone 357697 (TRBV19, TRBJ2-1)
CASPTVVLSGEQFL

SEQ ID NO: 715395 - protein, 14 aa, Homo sapiens
  CDR3 for alpha chain variable domain of TCR clone 357698 (TRAV8-1, TRAJ5)
CAVRTDTGRRALTF

SEQ ID NO: 715396 - protein, 11 aa, Homo sapiens
  CDR3 for beta chain variable domain of TCR clone 357698 (TRBV29-1, TRBJ2-5)
CSEDRTGTQYF

SEQ ID NO: 715397 - protein, 14 aa, Homo sapiens
  CDR3 for alpha chain variable domain of TCR clone 357699 (TRAV13-2, TRAJ23)
CAENTYNQGGKLIF

SEQ ID NO: 715398 - protein, 15 aa, Homo sapiens
  CDR3 for beta chain variable domain of TCR clone 357699 (TRBV27, TRBJ2-1)
CASSNGGGSSNEQFF

SEQ ID NO: 715399 - protein, 11 aa, Homo sapiens
  CDR3 for alpha chain variable domain of TCR clone 357700 (TRAV12-3, TRAJ43)
CAMSVSNDMRS

SEQ ID NO: 715400 - protein, 18 aa, Homo sapiens
  CDR3 for beta chain variable domain of TCR clone 357700 (TRBV20-1, TRBJ2-3)
CSASGLAGGPGTTDTQYF

SEQ ID NO: 715401 - protein, 16 aa, Homo sapiens
  CDR3 for alpha chain variable domain of TCR clone 357701 (TRAV14/DV4, TRAJ54)
CAMREGRIQGAQKLVF

SEQ ID NO: 715402 - protein, 16 aa, Homo sapiens
  CDR3 for beta chain variable domain of TCR clone 357701 (TRBV6-6, TRBJ2-5)
CASSSQTSGFQETQYF

SEQ ID NO: 715403 - protein, 13 aa, Homo sapiens
  CDR3 for alpha chain variable domain of TCR clone 357702 (TRAV36/DV7, TRAJ57)
CAVGEGGSEKLVF

SEQ ID NO: 715404 - protein, 15 aa, Homo sapiens
  CDR3 for beta chain variable domain of TCR clone 357702 (TRBV5-1, TRBJ2-1)
CASSPPRAPYNEQFF

SEQ ID NO: 715405 - protein, 16 aa, Homo sapiens
  CDR3 for alpha chain variable domain of TCR clone 357703 (TRAV26-1, TRAJ56)
CIVRVAETGANSKLTF

SEQ ID NO: 715406 - protein, 15 aa, Homo sapiens
  CDR3 for beta chain variable domain of TCR clone 357703 (TRBV5-7, TRBJ1-4)
CASSLWHQGGEKLFL

SEQ ID NO: 715407 - protein, 12 aa, Homo sapiens
  CDR3 for alpha chain variable domain of TCR clone 357704 (TRAV8-6, TRAJ43)
CAVSHNNNDLRF

SEQ ID NO: 715408 - protein, 14 aa, Homo sapiens
  CDR3 for beta chain variable domain of TCR clone 357704 (TRBV10-3, TRBJ1-1)
CAISDGSGVTEAFF

SEQ ID NO: 715409 - protein, 12 aa, Homo sapiens
  CDR3 for alpha chain variable domain of TCR clone 357705 (TRAV36/DV7, TRAJ54)
CAVVPGAQKLVF

SEQ ID NO: 715410 - protein, 14 aa, Homo sapiens
  CDR3 for beta chain variable domain of TCR clone 357705 (TRBV7-3, TRBJ1-1)
CASSLKGGNTEAFF

SEQ ID NO: 715411 - protein, 12 aa, Homo sapiens
  CDR3 for alpha chain variable domain of TCR clone 357706 (TRAV12-3, TRAJ17)
CSMTLTGNKLTF

SEQ ID NO: 715412 - protein, 15 aa, Homo sapiens
  CDR3 for beta chain variable domain of TCR clone 357706 (TRBV11-2, TRBJ2-2)
CASSSDRVNAGELFF

SEQ ID NO: 715413 - protein, 11 aa, Homo sapiens
  CDR3 for alpha chain variable domain of TCR clone 357707 (TRAV12-1, TRAJ30)
CVVNGQDKIIF

SEQ ID NO: 715414 - protein, 12 aa, Homo sapiens
  CDR3 for beta chain variable domain of TCR clone 357707 (TRBV27, TRBJ2-2)
CASKLFTGELLV

SEQ ID NO: 715415 - protein, 15 aa, Homo sapiens
  CDR3 for alpha chain variable domain of TCR clone 357708 (TRAV14/DV4, TRAJ33)
CAMREGRDSNYQLIW

SEQ ID NO: 715416 - protein, 12 aa, Homo sapiens
  CDR3 for beta chain variable domain of TCR clone 357708 (TRBV27, TRBJ2-1)
CASRGFYNEQFF

SEQ ID NO: 715417 - protein, 13 aa, Homo sapiens
  CDR3 for alpha chain variable domain of TCR clone 357709 (TRAV12-1, TRAJ22)
CVVYSGSARQLTF

SEQ ID NO: 715418 - protein, 14 aa, Homo sapiens
  CDR3 for beta chain variable domain of TCR clone 357709 (TRBV15, TRBJ2-7)
CATSRVARGYEQYF

SEQ ID NO: 715419 - protein, 12 aa, Homo sapiens
  CDR3 for alpha chain variable domain of TCR clone 357710 (TRAV12-1, TRAJ31)
CVVKRNNARLMF

SEQ ID NO: 715420 - protein, 15 aa, Homo sapiens
  CDR3 for beta chain variable domain of TCR clone 357710 (TRBV10-3, TRBJ2-3)
CAISEALSSTDTQYF

SEQ ID NO: 715421 - protein, 14 aa, Homo sapiens
  CDR3 for alpha chain variable domain of TCR clone 357711 (TRAV13-1, TRAJ35)
CAASTGGFGNVLHC

SEQ ID NO: 715422 - protein, 14 aa, Homo sapiens
  CDR3 for beta chain variable domain of TCR clone 357711 (TRBV19, TRBJ2-3)
CASSIDLGGDTQYF

SEQ ID NO: 715423 - protein, 13 aa, Homo sapiens
  CDR3 for alpha chain variable domain of TCR clone 357712 (TRAV21, TRAJ27)
CAARPGNAGKSTF

SEQ ID NO: 715424 - protein, 16 aa, Homo sapiens
  CDR3 for beta chain variable domain of TCR clone 357712 (TRBV20-1, TRBJ1-2)
CSASMGQGVANDGDTF

SEQ ID NO: 715425 - protein, 14 aa, Homo sapiens
  CDR3 for alpha chain variable domain of TCR clone 357713 (TRAV1-2, TRAJ8)
CAVREDTGFQKLVF

SEQ ID NO: 715426 - protein, 14 aa, Homo sapiens
  CDR3 for beta chain variable domain of TCR clone 357713 (TRBV7-2, TRBJ2-7)
CASSLYPGHYEQYF

SEQ ID NO: 715427 - protein, 13 aa, Homo sapiens
  CDR3 for alpha chain variable domain of TCR clone 357714 (TRAV8-6, TRAJ49)
CAVITNTGNQFYF

SEQ ID NO: 715428 - protein, 14 aa, Homo sapiens
  CDR3 for beta chain variable domain of TCR clone 357714 (TRBV20-1, TRBJ2-1)
CSAQIGGSANEQFF

SEQ ID NO: 715429 - protein, 14 aa, Homo sapiens
  CDR3 for alpha chain variable domain of TCR clone 357715 (TRAV23/DV6, TRAJ17)
CAARGRAAGNQLPF

SEQ ID NO: 715430 - protein, 13 aa, Homo sapiens
  CDR3 for beta chain variable domain of TCR clone 357715 (TRBV7-6, TRBJ1-2)
CASSLVADYGYTF

SEQ ID NO: 715431 - protein, 13 aa, Homo sapiens
  CDR3 for alpha chain variable domain of TCR clone 357716 (TRAV27, TRAJ29)
CAGAHSGNTPLVF

SEQ ID NO: 715432 - protein, 14 aa, Homo sapiens
  CDR3 for beta chain variable domain of TCR clone 357716 (TRBV20-1, TRBJ2-1)
CSAQIGGSANEQFF

SEQ ID NO: 715433 - protein, 11 aa, Homo sapiens
  CDR3 for alpha chain variable domain of TCR clone 357717 (TRAV3, TRAJ21)
CAVGNFNKFYF

SEQ ID NO: 715434 - protein, 16 aa, Homo sapiens
  CDR3 for beta chain variable domain of TCR clone 357717 (TRBV19, TRBJ2-1)
CASSRAGPSSYNGQFF

SEQ ID NO: 715435 - protein, 16 aa, Homo sapiens
  CDR3 for alpha chain variable domain of TCR clone 357718 (TRAV30, TRAJ26)
CGTESVGDNFGQNFVF

SEQ ID NO: 715436 - protein, 13 aa, Homo sapiens
  CDR3 for beta chain variable domain of TCR clone 357718 (TRBV19, TRBJ1-2)
CASSISEDYGYTF

SEQ ID NO: 715437 - protein, 14 aa, Homo sapiens
  CDR3 for alpha chain variable domain of TCR clone 357719 (TRAV17, TRAJ45)
CATDARGGSDGLTF

SEQ ID NO: 715438 - protein, 11 aa, Homo sapiens
  CDR3 for beta chain variable domain of TCR clone 357719 (TRBV28, TRBJ2-5)
CATGNQETQYF

SEQ ID NO: 715439 - protein, 18 aa, Homo sapiens
  CDR3 for alpha chain variable domain of TCR clone 357720 (TRAV26-1, TRAJ23)
CIVRVGLEVWNQGGKLIF

SEQ ID NO: 715440 - protein, 16 aa, Homo sapiens
  CDR3 for beta chain variable domain of TCR clone 357720 (TRBV12-4, TRBJ2-5)
CDSSFFVRGRQETQYF

SEQ ID NO: 715441 - protein, 14 aa, Homo sapiens
  CDR3 for alpha chain variable domain of TCR clone 357721 (TRAV3, TRAJ21)
CAVESQANCNKFYF

SEQ ID NO: 715442 - protein, 18 aa, Homo sapiens
  CDR3 for beta chain variable domain of TCR clone 357721 (TRBV7-9, TRBJ2-1)
CASSFAVSGTSGRNEQFF

SEQ ID NO: 715443 - protein, 16 aa, Homo sapiens
  CDR3 for alpha chain variable domain of TCR clone 357722 (TRAV3, TRAJ37)
CAVRPHGSGNTGKLIF

SEQ ID NO: 715444 - protein, 13 aa, Homo sapiens
  CDR3 for beta chain variable domain of TCR clone 357722 (TRBV19, TRBJ2-7)
CASSPRQSYEQYF

SEQ ID NO: 715445 - protein, 15 aa, Homo sapiens
  CDR3 for alpha chain variable domain of TCR clone 357723 (TRAV8-3, TRAJ28)
CAVAYSVAGSYQLTF

SEQ ID NO: 715446 - protein, 12 aa, Homo sapiens
  CDR3 for beta chain variable domain of TCR clone 357723 (TRBV5-1, TRBJ2-1)
CASIGGYNEQFF

SEQ ID NO: 715447 - protein, 13 aa, Homo sapiens
  CDR3 for alpha chain variable domain of TCR clone 357724 (TRAV2, TRAJ40)
CAVVASGTYNYIF

SEQ ID NO: 715448 - protein, 15 aa, Homo sapiens
  CDR3 for beta chain variable domain of TCR clone 357724 (TRBV11-3, TRBJ2-3)
CASLKDGREGDTQYF

SEQ ID NO: 715449 - protein, 11 aa, Homo sapiens
  CDR3 for alpha chain variable domain of TCR clone 357725 (TRAV26-1, TRAJ37)
CIVRVGRTLIF

SEQ ID NO: 715450 - protein, 14 aa, Homo sapiens
  CDR3 for beta chain variable domain of TCR clone 357725 (TRBV11-3, TRBJ2-7)
CASSSRTGRYEQYF

SEQ ID NO: 715451 - protein, 11 aa, Homo sapiens
  CDR3 for alpha chain variable domain of TCR clone 357726 (TRAV12-1, TRAJ43)
CVEYDNNDMRF

SEQ ID NO: 715452 - protein, 14 aa, Homo sapiens
  CDR3 for beta chain variable domain of TCR clone 357726 (TRBV10-2, TRBJ2-1)
CASSEGASEDEQFF

SEQ ID NO: 715453 - protein, 15 aa, Homo sapiens
  CDR3 for alpha chain variable domain of TCR clone 357727 (TRAV23/DV6, TRAJ27)
CAASKPMQANQPLVM

SEQ ID NO: 715454 - protein, 16 aa, Homo sapiens
  CDR3 for beta chain variable domain of TCR clone 357727 (TRBV12-5, TRBJ2-5)
CASGPRTSGNQETQYF

SEQ ID NO: 715455 - protein, 11 aa, Homo sapiens
  CDR3 for alpha chain variable domain of TCR clone 357728 (TRAV12-1, TRAJ3)
CVVSSASKIIF

SEQ ID NO: 715456 - protein, 15 aa, Homo sapiens
  CDR3 for beta chain variable domain of TCR clone 357728 (TRBV5-1, TRBJ1-1)
CASSSTTGTNTEAFF

SEQ ID NO: 715457 - protein, 12 aa, Homo sapiens
  CDR3 for alpha chain variable domain of TCR clone 357729 (TRAV16, TRAJ26)
CSSKDGGQNFIF

SEQ ID NO: 715458 - protein, 13 aa, Homo sapiens
  CDR3 for beta chain variable domain of TCR clone 357729 (TRBV25-1, TRBJ1-1)
CASSDRGRAEAFF

SEQ ID NO: 715459 - protein, 14 aa, Homo sapiens
  CDR3 for alpha chain variable domain of TCR clone 357730 (TRAV8-1, TRAJ5)
CAVSTDTGRRALTF

SEQ ID NO: 715460 - protein, 14 aa, Homo sapiens
  CDR3 for beta chain variable domain of TCR clone 357730 (TRBV19, TRBJ2-1)
CASPTFVLSGEQFF

SEQ ID NO: 715461 - protein, 16 aa, Homo sapiens
  CDR3 for alpha chain variable domain of TCR clone 357731 (TRAV3, TRAJ21)
CAVRDIDRGNFNKFYF

SEQ ID NO: 715462 - protein, 13 aa, Homo sapiens
  CDR3 for beta chain variable domain of TCR clone 357731 (TRBV4-2, TRBJ1-1)
CASSQAGNTEAFF

SEQ ID NO: 715463 - protein, 17 aa, Homo sapiens
  CDR3 for alpha chain variable domain of TCR clone 357732 (TRAV3, TRAJ42)
CAVRDRDYGGCQGNLIF

SEQ ID NO: 715464 - protein, 20 aa, Homo sapiens
  CDR3 for beta chain variable domain of TCR clone 357732 (TRBV28, TRBJ2-1)
CASTPIGRSPGLAGGNEQFF

SEQ ID NO: 715465 - protein, 16 aa, Homo sapiens
  CDR3 for alpha chain variable domain of TCR clone 357733 (TRAV30, TRAJ24)
CGTDIVDADSWGKFQF

SEQ ID NO: 715466 - protein, 12 aa, Homo sapiens
  CDR3 for beta chain variable domain of TCR clone 357733 (TRBV12-4, TRBJ2-3)
CASSSTTDTQYF

SEQ ID NO: 715467 - protein, 15 aa, Homo sapiens
  CDR3 for alpha chain variable domain of TCR clone 357734 (TRAV29/DV5, TRAJ29)
CAASERSSGNTPLVF

SEQ ID NO: 715468 - protein, 12 aa, Homo sapiens
  CDR3 for beta chain variable domain of TCR clone 357734 (TRBV7-8, TRBJ2-7)
CASSLGDREQYF

SEQ ID NO: 715469 - protein, 14 aa, Homo sapiens
  CDR3 for alpha chain variable domain of TCR clone 357735 (TRAV13-2, TRAJ15)
CAENPNQAGTDLIF

SEQ ID NO: 715470 - protein, 16 aa, Homo sapiens
  CDR3 for beta chain variable domain of TCR clone 357735 (TRBV12-4, TRBJ1-2)
CAGSPTATGKTRGYTF

SEQ ID NO: 715471 - protein, 13 aa, Homo sapiens
  CDR3 for alpha chain variable domain of TCR clone 357736 (TRAV26-1, TRAJ31)
CIARVDVNARFMF

SEQ ID NO: 715472 - protein, 17 aa, Homo sapiens
  CDR3 for beta chain variable domain of TCR clone 357736 (TRBV11-2, TRBJ2-1)
CASSLYPPGVEYNEQFF

SEQ ID NO: 715473 - protein, 12 aa, Homo sapiens
  CDR3 for alpha chain variable domain of TCR clone 357737 (TRAV2, TRAJ31)
RAVEDNNARLMF

SEQ ID NO: 715474 - protein, 14 aa, Homo sapiens
  CDR3 for beta chain variable domain of TCR clone 357737 (TRBV19, TRBJ2-5)
CASSMTGQQETQYF

SEQ ID NO: 715475 - protein, 15 aa, Homo sapiens
  CDR3 for alpha chain variable domain of TCR clone 357738 (TRAV2, TRAJ28)
CAVPYSGAGSYQLTF

SEQ ID NO: 715476 - protein, 17 aa, Homo sapiens
  CDR3 for beta chain variable domain of TCR clone 357738 (TRBV20-1, TRBJ2-4)
CSASDWASGGRENSQYF

SEQ ID NO: 715477 - protein, 13 aa, Homo sapiens
  CDR3 for alpha chain variable domain of TCR clone 357739 (TRAV2, TRAJ40)
CAVVTSGTYKYIF

SEQ ID NO: 715478 - protein, 13 aa, Homo sapiens
  CDR3 for beta chain variable domain of TCR clone 357739 (TRBV6-3, TRBJ1-6)
CASSEGTGPPLHF

SEQ ID NO: 715479 - protein, 15 aa, Homo sapiens
  CDR3 for alpha chain variable domain of TCR clone 357740 (TRAV2, TRAJ9)
CAVDDRGTGGFKTIF

SEQ ID NO: 715480 - protein, 17 aa, Homo sapiens
  CDR3 for beta chain variable domain of TCR clone 357740 (TRBV11-2, TRBJ2-1)
CASSLYPPGVEYNEQFF

SEQ ID NO: 715481 - protein, 12 aa, Homo sapiens
  CDR3 for alpha chain variable domain of TCR clone 357741 (TRAV13-1, TRAJ21)
CAAKEGFNNFYF

SEQ ID NO: 715482 - protein, 14 aa, Homo sapiens
  CDR3 for beta chain variable domain of TCR clone 357741 (TRBV19, TRBJ2-1)
CASPTFVLSGEQFF

SEQ ID NO: 715483 - protein, 13 aa, Homo sapiens
  CDR3 for alpha chain variable domain of TCR clone 357742 (TRAV16, TRAJ27)
CALSGGNAGKSTF

SEQ ID NO: 715484 - protein, 17 aa, Homo sapiens
  CDR3 for beta chain variable domain of TCR clone 357742 (TRBV13, TRBJ2-3)
CASSLSRVAGGRNTQYF

SEQ ID NO: 715485 - protein, 10 aa, Homo sapiens
  CDR3 for alpha chain variable domain of TCR clone 357743 (TRAV1-2, TRAJ34)
CAVNTDKLIF

SEQ ID NO: 715486 - protein, 18 aa, Homo sapiens
  CDR3 for beta chain variable domain of TCR clone 357743 (TRBV7-9, TRBJ2-7)
CARSLTTSGSRTWYEQYF

SEQ ID NO: 715487 - protein, 14 aa, Homo sapiens
  CDR3 for alpha chain variable domain of TCR clone 357744 (TRAV35, TRAJ22)
CAGLRPGSARQLTF

SEQ ID NO: 715488 - protein, 16 aa, Homo sapiens
  CDR3 for beta chain variable domain of TCR clone 357744 (TRBV11-2, TRBJ2-7)
CASSLAPTGVNYEQYF

SEQ ID NO: 715489 - protein, 13 aa, Homo sapiens
  CDR3 for alpha chain variable domain of TCR clone 357745 (TRAV2, TRAJ40)
CAVVTSGTYKYIF

SEQ ID NO: 715490 - protein, 14 aa, Homo sapiens
  CDR3 for beta chain variable domain of TCR clone 357745 (TRBV19, TRBJ2-3)
CASSAPRGTDTHYF

SEQ ID NO: 715491 - protein, 13 aa, Homo sapiens
  CDR3 for alpha chain variable domain of TCR clone 357746 (TRAV1-1, TRAJ30)
CAVRSDRDDEIIF

SEQ ID NO: 715492 - protein, 14 aa, Homo sapiens
  CDR3 for beta chain variable domain of TCR clone 357746 (TRBV28, TRBJ2-7)
CASTFYGRAHEQYF

SEQ ID NO: 715493 - protein, 16 aa, Homo sapiens
  CDR3 for alpha chain variable domain of TCR clone 357747 (TRAV35, TRAJ28)
CAGQKYSGAGSYQLTF

SEQ ID NO: 715494 - protein, 14 aa, Homo sapiens
  CDR3 for beta chain variable domain of TCR clone 357747 (TRBV11-1, TRBJ1-1)
CASSLEHPNTEAFF

SEQ ID NO: 715495 - protein, 14 aa, Homo sapiens
  CDR3 for alpha chain variable domain of TCR clone 357748 (TRAV13-1, TRAJ24)
CAASPADSWGKFQF

SEQ ID NO: 715496 - protein, 14 aa, Homo sapiens
  CDR3 for beta chain variable domain of TCR clone 357748 (TRBV7-3, TRBJ2-1)
CASSLAGGTNEQFF

SEQ ID NO: 715497 - protein, 11 aa, Homo sapiens
  CDR3 for alpha chain variable domain of TCR clone 357749 (TRAV13-1, TRAJ39)
FASHAGNMLTF

SEQ ID NO: 715498 - protein, 15 aa, Homo sapiens
  CDR3 for beta chain variable domain of TCR clone 357749 (TRBV20-1, TRBJ2-7)
CSARDRVSGIDEQYF

SEQ ID NO: 715499 - protein, 15 aa, Homo sapiens
  CDR3 for alpha chain variable domain of TCR clone 357750 (TRAV20, TRAJ4)
CTVQVFSGGYNKLIF

SEQ ID NO: 715500 - protein, 14 aa, Homo sapiens
  CDR3 for beta chain variable domain of TCR clone 357750 (TRBV7-6, TRBJ2-3)
CASNSGGDANTQYF

SEQ ID NO: 715501 - protein, 11 aa, Homo sapiens
  CDR3 for alpha chain variable domain of TCR clone 357751 (TRAV3, TRAJ21)
CAVGNFNQFYF

SEQ ID NO: 715502 - protein, 13 aa, Homo sapiens
  CDR3 for beta chain variable domain of TCR clone 357751 (TRBV20-1, TRBJ2-2)
CSASAAGTGELFF

SEQ ID NO: 715503 - protein, 14 aa, Homo sapiens
  CDR3 for alpha chain variable domain of TCR clone 357752 (TRAV13-1, TRAJ29)
CSASSNSGNTPLVF

SEQ ID NO: 715504 - protein, 13 aa, Homo sapiens
  CDR3 for beta chain variable domain of TCR clone 357752 (TRBV10-2, TRBJ1-1)
CASNDQMNTEAFF

SEQ ID NO: 715505 - protein, 13 aa, Homo sapiens
  CDR3 for alpha chain variable domain of TCR clone 357753 (TRAV23/DV6, TRAJ36)
CAAGQTGANNLFF

SEQ ID NO: 715506 - protein, 13 aa, Homo sapiens
  CDR3 for beta chain variable domain of TCR clone 357753 (TRBV7-8, TRBJ1-5)
CASSLGGDQTQHF

SEQ ID NO: 715507 - protein, 13 aa, Homo sapiens
  CDR3 for alpha chain variable domain of TCR clone 357754 (TRAV1-2, TRAJ11)
CAVRREGYSTLTF

SEQ ID NO: 715508 - protein, 14 aa, Homo sapiens
  CDR3 for beta chain variable domain of TCR clone 357754 (TRBV25-1, TRBJ1-1)
CASTHLGGNTESFF

SEQ ID NO: 715509 - protein, 15 aa, Homo sapiens
  CDR3 for alpha chain variable domain of TCR clone 357755 (TRAV8-3, TRAJ40)
CAVVPYTSGTYKYIF

SEQ ID NO: 715510 - protein, 16 aa, Homo sapiens
  CDR3 for beta chain variable domain of TCR clone 357755 (TRBV7-2, TRBJ2-7)
CASSLDPGGGSGEQYF

SEQ ID NO: 715511 - protein, 15 aa, Homo sapiens
  CDR3 for alpha chain variable domain of TCR clone 357756 (TRAV13-1, TRAJ48)
CASIFGNFGNEKLTF

SEQ ID NO: 715512 - protein, 16 aa, Homo sapiens
  CDR3 for beta chain variable domain of TCR clone 357756 (TRBV7-2, TRBJ2-6)
CASSERRASGANVLTF

SEQ ID NO: 715513 - protein, 18 aa, Homo sapiens
  CDR3 for alpha chain variable domain of TCR clone 357757 (TRAV21, TRAJ52)
CAVRPSPAGGTSYGKLTF

SEQ ID NO: 715514 - protein, 12 aa, Homo sapiens
  CDR3 for beta chain variable domain of TCR clone 357757 (TRBV7-9, TRBJ2-7)
CASSLEGYEQYF

SEQ ID NO: 715515 - protein, 14 aa, Homo sapiens
  CDR3 for alpha chain variable domain of TCR clone 357758 (TRAV26-1, TRAJ40)
CIVRVARGTYKYIF

SEQ ID NO: 715516 - protein, 14 aa, Homo sapiens
  CDR3 for beta chain variable domain of TCR clone 357758 (TRBV7-3, TRBJ2-7)
CASSLKADSYGQYF

SEQ ID NO: 715517 - protein, 14 aa, Homo sapiens
  CDR3 for alpha chain variable domain of TCR clone 357759 (TRAV26-1, TRAJ38)
CIADNAGNNRKLIW

SEQ ID NO: 715518 - protein, 13 aa, Homo sapiens
  CDR3 for beta chain variable domain of TCR clone 357759 (TRBV7-2, TRBJ1-4)
CASSLAGLEKLFF

SEQ ID NO: 715519 - protein, 15 aa, Homo sapiens
  CDR3 for alpha chain variable domain of TCR clone 357760 (TRAV20, TRAJ50)
CAVRQMKTSYDKGIF

SEQ ID NO: 715520 - protein, 16 aa, Homo sapiens
  CDR3 for beta chain variable domain of TCR clone 357760 (TRBV15, TRBJ1-2)
CATSRGPRTGGGGYTF

SEQ ID NO: 715521 - protein, 14 aa, Homo sapiens
  CDR3 for alpha chain variable domain of TCR clone 357761 (TRAV3, TRAJ20)
CAVRDSFNDYTLSF

SEQ ID NO: 715522 - protein, 14 aa, Homo sapiens
  CDR3 for beta chain variable domain of TCR clone 357761 (TRBV19, TRBJ2-1)
CASPTFVLSGEQFF

SEQ ID NO: 715523 - protein, 14 aa, Homo sapiens
  CDR3 for alpha chain variable domain of TCR clone 357762 (TRAV2, TRAJ9)
CAVEDRSGGFKTIF

SEQ ID NO: 715524 - protein, 12 aa, Homo sapiens
  CDR3 for beta chain variable domain of TCR clone 357762 (TRBV12-4, TRBJ2-3)
CASSTLPDTQYF

SEQ ID NO: 715525 - protein, 17 aa, Homo sapiens
  CDR3 for alpha chain variable domain of TCR clone 357763 (TRAV3, TRAJ6)
CAVRDGPRAGGSYIPTF

SEQ ID NO: 715526 - protein, 16 aa, Homo sapiens
  CDR3 for beta chain variable domain of TCR clone 357763 (TRBV19, TRBJ1-2)
CASSRRQRGKNYGYTF

SEQ ID NO: 715527 - protein, 11 aa, Homo sapiens
  CDR3 for alpha chain variable domain of TCR clone 357764 (TRAV3, TRAJ21)
CAVGNFNTFYF

SEQ ID NO: 715528 - protein, 16 aa, Homo sapiens
  CDR3 for beta chain variable domain of TCR clone 357764 (TRBV19, TRBJ2-1)
CASSKAGPSSYNEQFV

SEQ ID NO: 715529 - protein, 13 aa, Homo sapiens
  CDR3 for alpha chain variable domain of TCR clone 357765 (TRAV36/DV7, TRAJ33)
CAVDMDRNYQLIW

SEQ ID NO: 715530 - protein, 16 aa, Homo sapiens
  CDR3 for beta chain variable domain of TCR clone 357765 (TRBV15, TRBJ2-3)
CATRLSGGRAPDTQYF

SEQ ID NO: 715531 - protein, 15 aa, Homo sapiens
  CDR3 for alpha chain variable domain of TCR clone 357766 (TRAV17, TRAJ52)
CATEAGGTSYVKLTF

SEQ ID NO: 715532 - protein, 14 aa, Homo sapiens
  CDR3 for beta chain variable domain of TCR clone 357766 (TRBV28, TRBJ1-5)
CASSLGILVKPQHF

SEQ ID NO: 715533 - protein, 13 aa, Homo sapiens
  CDR3 for alpha chain variable domain of TCR clone 357767 (TRAV21, TRAJ33)
CAVAGDSNYQLIW

SEQ ID NO: 715534 - protein, 13 aa, Homo sapiens
  CDR3 for beta chain variable domain of TCR clone 357767 (TRBV10-3, TRBJ2-7)
CASRLAVNYEQYF

SEQ ID NO: 715535 - protein, 14 aa, Homo sapiens
  CDR3 for alpha chain variable domain of TCR clone 357768 (TRAV8-3, TRAJ10)
CAVGNAGGGNKLTF

SEQ ID NO: 715536 - protein, 13 aa, Homo sapiens
  CDR3 for beta chain variable domain of TCR clone 357768 (TRBV20-1, TRBJ1-6)
CSAPLGVGSPLHF

SEQ ID NO: 715537 - protein, 13 aa, Homo sapiens
  CDR3 for alpha chain variable domain of TCR clone 357769 (TRAV8-3, TRAJ21)
CAVGAYNFNKFYF

SEQ ID NO: 715538 - protein, 14 aa, Homo sapiens
  CDR3 for beta chain variable domain of TCR clone 357769 (TRBV2, TRBJ1-2)
CASRRTGSPYGYTF

SEQ ID NO: 715539 - protein, 14 aa, Homo sapiens
  CDR3 for alpha chain variable domain of TCR clone 357770 (TRAV29/DV5, TRAJ36)
CAARRRTGANNLFF

SEQ ID NO: 715540 - protein, 15 aa, Homo sapiens
  CDR3 for beta chain variable domain of TCR clone 357770 (TRBV6-1, TRBJ2-3)
CASSERGGITDTQYF

SEQ ID NO: 715541 - protein, 15 aa, Homo sapiens
  CDR3 for alpha chain variable domain of TCR clone 357771 (TRAV12-3, TRAJ6)
CAMSATTGGSYIPTF

SEQ ID NO: 715542 - protein, 17 aa, Homo sapiens
  CDR3 for beta chain variable domain of TCR clone 357771 (TRBV11-2, TRBJ2-3)
CQQLRGASRGAPNTQYF

SEQ ID NO: 715543 - protein, 12 aa, Homo sapiens
  CDR3 for alpha chain variable domain of TCR clone 357772 (TRAV12-3, TRAJ17)
CAMTLTGNKLTF

SEQ ID NO: 715544 - protein, 15 aa, Homo sapiens
  CDR3 for beta chain variable domain of TCR clone 357772 (TRBV20-1, TRBJ2-7)
CSARERVSGMDEQFF

SEQ ID NO: 715545 - protein, 13 aa, Homo sapiens
  CDR3 for alpha chain variable domain of TCR clone 357773 (TRAV8-6, TRAJ50)
CAVIKTSYDKVLF

SEQ ID NO: 715546 - protein, 15 aa, Homo sapiens
  CDR3 for beta chain variable domain of TCR clone 357773 (TRBV7-2, TRBJ2-2)
CASRRPGQNTGELFF

SEQ ID NO: 715547 - protein, 18 aa, Homo sapiens
  CDR3 for alpha chain variable domain of TCR clone 357774 (TRAV3, TRAJ32)
CAVRDIRGYGGATTKLIF

SEQ ID NO: 715548 - protein, 10 aa, Homo sapiens
  CDR3 for beta chain variable domain of TCR clone 357774 (TRBV12-4, TRBJ2-2)
CASSLGVRHT

SEQ ID NO: 715549 - protein, 14 aa, Homo sapiens
  CDR3 for alpha chain variable domain of TCR clone 357775 (TRAV17, TRAJ35)
CATDRPGFGNVLHC

SEQ ID NO: 715550 - protein, 12 aa, Homo sapiens
  CDR3 for beta chain variable domain of TCR clone 357775 (TRBV29-1, TRBJ2-3)
CSVVLGADTQYF

SEQ ID NO: 715551 - protein, 12 aa, Homo sapiens
  CDR3 for alpha chain variable domain of TCR clone 357776 (TRAV23/DV6, TRAJ30)
CAASKGDDKIIF

SEQ ID NO: 715552 - protein, 15 aa, Homo sapiens
  CDR3 for beta chain variable domain of TCR clone 357776 (TRBV12-4, TRBJ2-7)
CASRPTRTGYNEQFF

SEQ ID NO: 715553 - protein, 14 aa, Homo sapiens
  CDR3 for alpha chain variable domain of TCR clone 357777 (TRAV38-1, TRAJ29)
CAFITPSGNTLLVF

SEQ ID NO: 715554 - protein, 14 aa, Homo sapiens
  CDR3 for beta chain variable domain of TCR clone 357777 (TRBV18, TRBJ2-7)
CASSPRGGAYEQYF

SEQ ID NO: 715555 - protein, 17 aa, Homo sapiens
  CDR3 for alpha chain variable domain of TCR clone 357778 (TRAV3, TRAJ6)
CAVRDGPREGGSYLPNF

SEQ ID NO: 715556 - protein, 14 aa, Homo sapiens
  CDR3 for beta chain variable domain of TCR clone 357778 (TRBV7-2, TRBJ2-7)
CASSPKTSFYEQYF

SEQ ID NO: 715557 - protein, 13 aa, Homo sapiens
  CDR3 for alpha chain variable domain of TCR clone 357779 (TRAV35, TRAJ42)
CAGFPRSQGNLIF

SEQ ID NO: 715558 - protein, 13 aa, Homo sapiens
  CDR3 for beta chain variable domain of TCR clone 357779 (TRBV29-1, TRBJ2-1)
CSVEGGRVNEQFF

SEQ ID NO: 715559 - protein, 12 aa, Homo sapiens
  CDR3 for alpha chain variable domain of TCR clone 357780 (TRAV12-3, TRAJ17)
CPMTLTGNKLTF

SEQ ID NO: 715560 - protein, 15 aa, Homo sapiens
  CDR3 for beta chain variable domain of TCR clone 357780 (TRBV20-1, TRBJ2-7)
CSARYRVSGMDEQYF

SEQ ID NO: 715561 - protein, 14 aa, Homo sapiens
  CDR3 for alpha chain variable domain of TCR clone 357781 (TRAV16, TRAJ32)
CALKSGGATNKLIF

SEQ ID NO: 715562 - protein, 12 aa, Homo sapiens
  CDR3 for beta chain variable domain of TCR clone 357781 (TRBV6-3, TRBJ2-1)
CASSGSYNEQFF

SEQ ID NO: 715563 - protein, 15 aa, Homo sapiens
  CDR3 for alpha chain variable domain of TCR clone 357782 (TRAV3, TRAJ23)
CAVRERGNQGGKLIF

SEQ ID NO: 715564 - protein, 13 aa, Homo sapiens
  CDR3 for beta chain variable domain of TCR clone 357782 (TRBV7-2, TRBJ2-7)
CASSSPSGSEQYF

SEQ ID NO: 715565 - protein, 13 aa, Homo sapiens
  CDR3 for alpha chain variable domain of TCR clone 357783 (TRAV34, TRAJ33)
CGADMNSNYHLIW

SEQ ID NO: 715566 - protein, 16 aa, Homo sapiens
  CDR3 for beta chain variable domain of TCR clone 357783 (TRBV20-1, TRBJ2-1)
CSASLAGGPGYNEQFF

SEQ ID NO: 715567 - protein, 13 aa, Homo sapiens
  CDR3 for alpha chain variable domain of TCR clone 357784 (TRAV8-6, TRAJ49)
CAGITNPGNQFYF

SEQ ID NO: 715568 - protein, 13 aa, Homo sapiens
  CDR3 for beta chain variable domain of TCR clone 357784 (TRBV10-3, TRBJ2-7)
CASKLAVNYEQYF

SEQ ID NO: 715569 - protein, 13 aa, Homo sapiens
  CDR3 for alpha chain variable domain of TCR clone 357785 (TRAV23/DV6, TRAJ10)
ASVLTGVGNKLTF

SEQ ID NO: 715570 - protein, 13 aa, Homo sapiens
  CDR3 for beta chain variable domain of TCR clone 357785 (TRBV11-1, TRBJ1-2)
CASVGSWGYGYTF

SEQ ID NO: 715571 - protein, 12 aa, Homo sapiens
  CDR3 for alpha chain variable domain of TCR clone 357786 (TRAV12-3, TRAJ40)
CAMSSGTYKYIF

SEQ ID NO: 715572 - protein, 20 aa, Homo sapiens
  CDR3 for beta chain variable domain of TCR clone 357786 (TRBV7-8, TRBJ2-2)
CASSHLFPGPTIDITGELFF

SEQ ID NO: 715573 - protein, 14 aa, Homo sapiens
  CDR3 for alpha chain variable domain of TCR clone 357787 (TRAV9-2, TRAJ39)
WALYIYNAGNMLTF

SEQ ID NO: 715574 - protein, 14 aa, Homo sapiens
  CDR3 for beta chain variable domain of TCR clone 357787 (TRBV25-1, TRBJ1-1)
CASTHLGGNTEAFF

SEQ ID NO: 715575 - protein, 13 aa, Homo sapiens
  CDR3 for alpha chain variable domain of TCR clone 357788 (TRAV8-3, TRAJ43)
CAVGPDNNKDMRF

SEQ ID NO: 715576 - protein, 12 aa, Homo sapiens
  CDR3 for beta chain variable domain of TCR clone 357788 (TRBV7-2, TRBJ1-6)
CASSLSSSPLHF

SEQ ID NO: 715577 - protein, 15 aa, Homo sapiens
  CDR3 for alpha chain variable domain of TCR clone 357789 (TRAV8-3, TRAJ45)
CASSYSGGGADGLTF

SEQ ID NO: 715578 - protein, 13 aa, Homo sapiens
  CDR3 for beta chain variable domain of TCR clone 357789 (TRBV10-3, TRBJ2-7)
CATRLAVNYEQYF

SEQ ID NO: 715579 - protein, 16 aa, Homo sapiens
  CDR3 for alpha chain variable domain of TCR clone 357790 (TRAV30, TRAJ24)
CGTEIVDADSWGQFQF

SEQ ID NO: 715580 - protein, 14 aa, Homo sapiens
  CDR3 for beta chain variable domain of TCR clone 357790 (TRBV12-5, TRBJ2-5)
CASGTRTHQETQYF

SEQ ID NO: 715581 - protein, 13 aa, Homo sapiens
  CDR3 for alpha chain variable domain of TCR clone 357791 (TRAV2, TRAJ40)
CAVVTSGNYKYIF

SEQ ID NO: 715582 - protein, 17 aa, Homo sapiens
  CDR3 for beta chain variable domain of TCR clone 357791 (TRBV11-2, TRBJ2-1)
CASSLYPPGVEYNEQFF

SEQ ID NO: 715583 - protein, 15 aa, Homo sapiens
  CDR3 for alpha chain variable domain of TCR clone 357792 (TRAV21, TRAJ53)
CATLNSGGSNYKLTF

SEQ ID NO: 715584 - protein, 13 aa, Homo sapiens
  CDR3 for beta chain variable domain of TCR clone 357792 (TRBV11-2, TRBJ2-5)
CGSSSTGEETQYF

SEQ ID NO: 715585 - protein, 17 aa, Homo sapiens
  CDR3 for alpha chain variable domain of TCR clone 357793 (TRAV3, TRAJ6)
RAVRDGPRAGGSYIPTF

SEQ ID NO: 715586 - protein, 14 aa, Homo sapiens
  CDR3 for beta chain variable domain of TCR clone 357793 (TRBV7-2, TRBJ2-7)
CASRSQGAAYEQYF

SEQ ID NO: 715587 - protein, 15 aa, Homo sapiens
  CDR3 for alpha chain variable domain of TCR clone 357794 (TRAV12-3, TRAJ5)
CAMSGLGTGRRALTF

SEQ ID NO: 715588 - protein, 14 aa, Homo sapiens
  CDR3 for beta chain variable domain of TCR clone 357794 (TRBV11-2, TRBJ2-3)
CASSRLARTDTQYF

SEQ ID NO: 715589 - protein, 11 aa, Homo sapiens
  CDR3 for alpha chain variable domain of TCR clone 357795 (TRAV21, TRAJ34)
CAVTNTDKLIF

SEQ ID NO: 715590 - protein, 16 aa, Homo sapiens
  CDR3 for beta chain variable domain of TCR clone 357795 (TRBV7-2, TRBJ2-5)
CASSPRGRGGGETQYF

SEQ ID NO: 715591 - protein, 13 aa, Homo sapiens
  CDR3 for alpha chain variable domain of TCR clone 357796 (TRAV38-1, TRAJ20)
CAFMRNNDYKLSF

SEQ ID NO: 715592 - protein, 12 aa, Homo sapiens
  CDR3 for beta chain variable domain of TCR clone 357796 (TRBV18, TRBJ2-5)
CASSPSKETQYF

SEQ ID NO: 715593 - protein, 13 aa, Homo sapiens
  CDR3 for alpha chain variable domain of TCR clone 357797 (TRAV3, TRAJ3)
CAVRALGASKLIF

SEQ ID NO: 715594 - protein, 18 aa, Homo sapiens
  CDR3 for beta chain variable domain of TCR clone 357797 (TRBV12-4, TRBJ2-5)
CASSPSGGRDPVLRARHA

SEQ ID NO: 715595 - protein, 15 aa, Homo sapiens
  CDR3 for alpha chain variable domain of TCR clone 357798 (TRAV25, TRAJ52)
CAGRPGGTSYGKLTF

SEQ ID NO: 715596 - protein, 14 aa, Homo sapiens
  CDR3 for beta chain variable domain of TCR clone 357798 (TRBV4-1, TRBJ2-2)
CASSQAVSTGELFF

SEQ ID NO: 715597 - protein, 14 aa, Homo sapiens
  CDR3 for alpha chain variable domain of TCR clone 357799 (TRAV12-3, TRAJ53)
GGATRGGSNYKLTF

SEQ ID NO: 715598 - protein, 13 aa, Homo sapiens
  CDR3 for beta chain variable domain of TCR clone 357799 (TRBV19, TRBJ1-5)
CASSTQDGQPQHF

SEQ ID NO: 715599 - protein, 11 aa, Homo sapiens
  CDR3 for alpha chain variable domain of TCR clone 357800 (TRAV16, TRAJ26)
CALTRWSEFCL

SEQ ID NO: 715600 - protein, 15 aa, Homo sapiens
  CDR3 for beta chain variable domain of TCR clone 357800 (TRBV7-2, TRBJ2-3)
CASSSTGLETDTQYF

SEQ ID NO: 715601 - protein, 19 aa, Homo sapiens
  CDR3 for alpha chain variable domain of TCR clone 357801 (TRAV26-1, TRAJ50)
CCVLLHRQNPKTSYDKVIF

SEQ ID NO: 715602 - protein, 17 aa, Homo sapiens
  CDR3 for beta chain variable domain of TCR clone 357801 (TRBV4-1, TRBJ1-4)
CASSLEGPRGVGEKLFF

SEQ ID NO: 715603 - protein, 18 aa, Homo sapiens
  CDR3 for alpha chain variable domain of TCR clone 357802 (TRAV1-1, TRAJ42)
CAVSLSAFYGGSQGNLIF

SEQ ID NO: 715604 - protein, 14 aa, Homo sapiens
  CDR3 for beta chain variable domain of TCR clone 357802 (TRBV6-3, TRBJ2-7)
CASSYSTGGDEQYF

SEQ ID NO: 715605 - protein, 15 aa, Homo sapiens
  CDR3 for alpha chain variable domain of TCR clone 357803 (TRAV3, TRAJ24)
CAVGDKMTAGGNCRL

SEQ ID NO: 715606 - protein, 14 aa, Homo sapiens
  CDR3 for beta chain variable domain of TCR clone 357803 (TRBV7-2, TRBJ2-3)
CASSQTGSSYTQYF

SEQ ID NO: 715607 - protein, 14 aa, Homo sapiens
  CDR3 for alpha chain variable domain of TCR clone 357804 (TRAV12-2, TRAJ24)
CAVTPADSWGKLQF

SEQ ID NO: 715608 - protein, 17 aa, Homo sapiens
  CDR3 for beta chain variable domain of TCR clone 357804 (TRBV13, TRBJ2-3)
CASGLSRVAGGRNTQYF

SEQ ID NO: 715609 - protein, 12 aa, Homo sapiens
  CDR3 for alpha chain variable domain of TCR clone 357805 (TRAV13-1, TRAJ49)
CAASPMGNQFYF

SEQ ID NO: 715610 - protein, 15 aa, Homo sapiens
  CDR3 for beta chain variable domain of TCR clone 357805 (TRBV9, TRBJ1-6)
CASSVAGTGDSPLRF

SEQ ID NO: 715611 - protein, 10 aa, Homo sapiens
  CDR3 for alpha chain variable domain of TCR clone 357806 (TRAV23/DV6, TRAJ57)
CAASSTLSQG

SEQ ID NO: 715612 - protein, 14 aa, Homo sapiens
  CDR3 for beta chain variable domain of TCR clone 357806 (TRBV25-1, TRBJ1-1)
CASARLGGNTEAFF

SEQ ID NO: 715613 - protein, 11 aa, Homo sapiens
  CDR3 for alpha chain variable domain of TCR clone 357807 (TRAV1-1, TRAJ23)
CAVYQGGKLIF

SEQ ID NO: 715614 - protein, 20 aa, Homo sapiens
  CDR3 for beta chain variable domain of TCR clone 357807 (TRBV7-8, TRBJ2-2)
CASSHLFPGPTIHITGELFF

SEQ ID NO: 715615 - protein, 13 aa, Homo sapiens
  CDR3 for alpha chain variable domain of TCR clone 357808 (TRAV12-2, TRAJ49)
CAVETRAGNQFYF

SEQ ID NO: 715616 - protein, 15 aa, Homo sapiens
  CDR3 for beta chain variable domain of TCR clone 357808 (TRBV7-2, TRBJ2-1)
CASISGLAGGNEQFF

SEQ ID NO: 715617 - protein, 15 aa, Homo sapiens
  CDR3 for alpha chain variable domain of TCR clone 357809 (TRAV23/DV6, TRAJ37)
CAASRGSSNTGKLIF

SEQ ID NO: 715618 - protein, 15 aa, Homo sapiens
  CDR3 for beta chain variable domain of TCR clone 357809 (TRBV28, TRBJ2-1)
CASSGLAEVDNEQFF

SEQ ID NO: 715619 - protein, 16 aa, Homo sapiens
  CDR3 for alpha chain variable domain of TCR clone 357810 (TRAV12-3, TRAJ53)
CAMSPGSGGSNYKLTF

SEQ ID NO: 715620 - protein, 15 aa, Homo sapiens
  CDR3 for beta chain variable domain of TCR clone 357810 (TRBV2, TRBJ2-5)
CASRIAGVGGETQYF

SEQ ID NO: 715621 - protein, 15 aa, Homo sapiens
  CDR3 for alpha chain variable domain of TCR clone 357811 (TRAV3, TRAJ42)
CAVRGGTGSQGNLIF

SEQ ID NO: 715622 - protein, 14 aa, Homo sapiens
  CDR3 for beta chain variable domain of TCR clone 357811 (TRBV4-2, TRBJ2-1)
CASGLDRAYNEQFF

SEQ ID NO: 715623 - protein, 14 aa, Homo sapiens
  CDR3 for alpha chain variable domain of TCR clone 357812 (TRAV1-2, TRAJ16)
CAVNRFSDGQKLLF

SEQ ID NO: 715624 - protein, 13 aa, Homo sapiens
  CDR3 for beta chain variable domain of TCR clone 357812 (TRBV3-1, TRBJ2-5)
CASIAVARETQYF

SEQ ID NO: 715625 - protein, 17 aa, Homo sapiens
  CDR3 for alpha chain variable domain of TCR clone 357813 (TRAV3, TRAJ6)
CAVGDGPRSGGSYIPTF

SEQ ID NO: 715626 - protein, 16 aa, Homo sapiens
  CDR3 for beta chain variable domain of TCR clone 357813 (TRBV5-1, TRBJ1-3)
CASSPWAPSSGNTIYF

SEQ ID NO: 715627 - protein, 14 aa, Homo sapiens
  CDR3 for alpha chain variable domain of TCR clone 357814 (TRAV12-2, TRAJ13)
CAVKKTGGYQKVTF

SEQ ID NO: 715628 - protein, 19 aa, Homo sapiens
  CDR3 for beta chain variable domain of TCR clone 357814 (TRBV7-9, TRBJ2-1)
CASSHNRGALLRSYNEQFF

SEQ ID NO: 715629 - protein, 13 aa, Homo sapiens
  CDR3 for alpha chain variable domain of TCR clone 357815 (TRAV12-3, TRAJ43)
CAMRPYNNNDMRF

SEQ ID NO: 715630 - protein, 15 aa, Homo sapiens
  CDR3 for beta chain variable domain of TCR clone 357815 (TRBV7-2, TRBJ2-3)
CASSSTGLETDTQYF

SEQ ID NO: 715631 - protein, 13 aa, Homo sapiens
  CDR3 for alpha chain variable domain of TCR clone 357816 (TRAV8-3, TRAJ28)
CAVGAVGSSNSLS

SEQ ID NO: 715632 - protein, 15 aa, Homo sapiens
  CDR3 for beta chain variable domain of TCR clone 357816 (TRBV7-9, TRBJ1-5)
CASSQGHQPNQPQHF

SEQ ID NO: 715633 - protein, 15 aa, Homo sapiens
  CDR3 for alpha chain variable domain of TCR clone 357817 (TRAV12-3, TRAJ6)
CAVSATTGGSYIPTF

SEQ ID NO: 715634 - protein, 16 aa, Homo sapiens
  CDR3 for beta chain variable domain of TCR clone 357817 (TRBV20-1, TRBJ1-2)
CSASMGQGVANYGYAF

SEQ ID NO: 715635 - protein, 16 aa, Homo sapiens
  CDR3 for alpha chain variable domain of TCR clone 357818 (TRAV20, TRAJ22)
CAVQASSSGSARQLTF

SEQ ID NO: 715636 - protein, 14 aa, Homo sapiens
  CDR3 for beta chain variable domain of TCR clone 357818 (TRBV5-1, TRBJ2-3)
CASSPGLAADTQYF

SEQ ID NO: 715637 - protein, 14 aa, Homo sapiens
  CDR3 for alpha chain variable domain of TCR clone 357819 (TRAV12-1, TRAJ26)
CVVKGSNYGQNFVF

SEQ ID NO: 715638 - protein, 15 aa, Homo sapiens
  CDR3 for beta chain variable domain of TCR clone 357819 (TRBV10-2, TRBJ2-6)
CASSEQVTGANVLTF

SEQ ID NO: 715639 - protein, 14 aa, Homo sapiens
  CDR3 for alpha chain variable domain of TCR clone 357820 (TRAV27, TRAJ22)
CAGLPSGSARQLTF

SEQ ID NO: 715640 - protein, 16 aa, Homo sapiens
  CDR3 for beta chain variable domain of TCR clone 357820 (TRBV7-3, TRBJ2-2)
CASSLKRGTLPGELFF

SEQ ID NO: 715641 - protein, 12 aa, Homo sapiens
  CDR3 for alpha chain variable domain of TCR clone 357821 (TRAV30, TRAJ43)
CGTEERGNDMRF

SEQ ID NO: 715642 - protein, 12 aa, Homo sapiens
  CDR3 for beta chain variable domain of TCR clone 357821 (TRBV5-4, TRBJ2-5)
CASSSTRETQYF

SEQ ID NO: 715643 - protein, 14 aa, Homo sapiens
  CDR3 for alpha chain variable domain of TCR clone 357822 (TRAV1-2, TRAJ16)
CAVNRFSDGQKLLF

SEQ ID NO: 715644 - protein, 13 aa, Homo sapiens
  CDR3 for beta chain variable domain of TCR clone 357822 (TRBV19, TRBJ2-2)
CASSGRGTGELFF

SEQ ID NO: 715645 - protein, 10 aa, Homo sapiens
  CDR3 for alpha chain variable domain of TCR clone 357823 (TRAV23/DV6, TRAJ57)
CAASSTPSQG

SEQ ID NO: 715646 - protein, 14 aa, Homo sapiens
  CDR3 for beta chain variable domain of TCR clone 357823 (TRBV25-1, TRBJ1-1)
CASTHLGGNTEAVF

SEQ ID NO: 715647 - protein, 16 aa, Homo sapiens
  CDR3 for alpha chain variable domain of TCR clone 357824 (TRAV12-2, TRAJ6)
CAAPLAGSGGSYIPTF

SEQ ID NO: 715648 - protein, 19 aa, Homo sapiens
  CDR3 for beta chain variable domain of TCR clone 357824 (TRBV28, TRBJ2-4)
CASSFQPGGPAHSKNIQYF

SEQ ID NO: 715649 - protein, 16 aa, Homo sapiens
  CDR3 for alpha chain variable domain of TCR clone 357825 (TRAV30, TRAJ24)
CGTEIVDADSWGKFQF

SEQ ID NO: 715650 - protein, 12 aa, Homo sapiens
  CDR3 for beta chain variable domain of TCR clone 357825 (TRBV28, TRBJ2-7)
CASSFSSYEQYF

SEQ ID NO: 715651 - protein, 16 aa, Homo sapiens
  CDR3 for alpha chain variable domain of TCR clone 357826 (TRAV30, TRAJ24)
CGTEIVDADSWGKFQF

SEQ ID NO: 715652 - protein, 15 aa, Homo sapiens
  CDR3 for beta chain variable domain of TCR clone 357826 (TRBV20-1, TRBJ2-4)
CNARDLTGGPNIQYF

SEQ ID NO: 715653 - protein, 16 aa, Homo sapiens
  CDR3 for alpha chain variable domain of TCR clone 357827 (TRAV3, TRAJ37)
CAVRGKGSGNTGQLIF

SEQ ID NO: 715654 - protein, 13 aa, Homo sapiens
  CDR3 for beta chain variable domain of TCR clone 357827 (TRBV4-2, TRBJ1-1)
CASSQAGNTEAFF

SEQ ID NO: 715655 - protein, 16 aa, Homo sapiens
  CDR3 for alpha chain variable domain of TCR clone 357828 (TRAV30, TRAJ24)
CGTEIVDADSWGNSSL

SEQ ID NO: 715656 - protein, 14 aa, Homo sapiens
  CDR3 for beta chain variable domain of TCR clone 357828 (TRBV12-5, TRBJ2-5)
CAIGSRTHQETQYF

SEQ ID NO: 715657 - protein, 10 aa, Homo sapiens
  CDR3 for alpha chain variable domain of TCR clone 357829 (TRAV23/DV6, TRAJ10)
CAASGLLYSR

SEQ ID NO: 715658 - protein, 15 aa, Homo sapiens
  CDR3 for beta chain variable domain of TCR clone 357829 (TRBV20-1, TRBJ2-1)
CSAEGGLLAGDEQFF

SEQ ID NO: 715659 - protein, 15 aa, Homo sapiens
  CDR3 for alpha chain variable domain of TCR clone 357830 (TRAV35, TRAJ50)
CAGQLRKTSYAQVIF

SEQ ID NO: 715660 - protein, 12 aa, Homo sapiens
  CDR3 for beta chain variable domain of TCR clone 357830 (TRBV5-1, TRBJ2-5)
CASSLGLETQYF

SEQ ID NO: 715661 - protein, 16 aa, Homo sapiens
  CDR3 for alpha chain variable domain of TCR clone 357831 (TRAV3, TRAJ37)
CAVRPQGSGNTGKLIF

SEQ ID NO: 715662 - protein, 15 aa, Homo sapiens
  CDR3 for beta chain variable domain of TCR clone 357831 (TRBV20-1, TRBJ2-7)
CSARDRVSGMDEQYF

SEQ ID NO: 715663 - protein, 18 aa, Homo sapiens
  CDR3 for alpha chain variable domain of TCR clone 357832 (TRAV13-1, TRAJ52)
CAAKNPNAGGTSYGKMTF

SEQ ID NO: 715664 - protein, 11 aa, Homo sapiens
  CDR3 for beta chain variable domain of TCR clone 357832 (TRBV29-1, TRBJ2-5)
CSEDRTGTQYF

SEQ ID NO: 715665 - protein, 13 aa, Homo sapiens
  CDR3 for alpha chain variable domain of TCR clone 357833 (TRAV30, TRAJ49)
CGTEWDHRQPVLF

SEQ ID NO: 715666 - protein, 14 aa, Homo sapiens
  CDR3 for beta chain variable domain of TCR clone 357833 (TRBV19, TRBJ2-1)
CASGKSTQYNEQFF

SEQ ID NO: 715667 - protein, 18 aa, Homo sapiens
  CDR3 for alpha chain variable domain of TCR clone 357834 (TRAV13-1, TRAJ52)
CAAKNPNASGTSYGKLTF

SEQ ID NO: 715668 - protein, 14 aa, Homo sapiens
  CDR3 for beta chain variable domain of TCR clone 357834 (TRBV7-2, TRBJ2-7)
CASRSQGAAYEQYF

SEQ ID NO: 715669 - protein, 13 aa, Homo sapiens
  CDR3 for alpha chain variable domain of TCR clone 357835 (TRAV26-1, TRAJ29)
CIVRRSGNTPLVF

SEQ ID NO: 715670 - protein, 14 aa, Homo sapiens
  CDR3 for beta chain variable domain of TCR clone 357835 (TRBV7-2, TRBJ2-7)
CASSPKTSFYEQYF

SEQ ID NO: 715671 - protein, 12 aa, Homo sapiens
  CDR3 for alpha chain variable domain of TCR clone 357836 (TRAV1-2, TRAJ26)
CAVSPYGQNFVF

SEQ ID NO: 715672 - protein, 14 aa, Homo sapiens
  CDR3 for beta chain variable domain of TCR clone 357836 (TRBV5-1, TRBJ2-7)
CASSFASGINEQYF

SEQ ID NO: 715673 - protein, 13 aa, Homo sapiens
  CDR3 for alpha chain variable domain of TCR clone 357837 (TRAV3, TRAJ21)
CAVREPDFNKFYF

SEQ ID NO: 715674 - protein, 18 aa, Homo sapiens
  CDR3 for beta chain variable domain of TCR clone 357837 (TRBV11-2, TRBJ2-3)
CASSLGGGSRGAPNTQYF

SEQ ID NO: 715675 - protein, 15 aa, Homo sapiens
  CDR3 for alpha chain variable domain of TCR clone 357838 (TRAV12-2, TRAJ50)
CAVNGLATSYDKVIF

SEQ ID NO: 715676 - protein, 16 aa, Homo sapiens
  CDR3 for beta chain variable domain of TCR clone 357838 (TRBV5-4, TRBJ2-3)
CASQQPGAGGADTQYF

SEQ ID NO: 715677 - protein, 13 aa, Homo sapiens
  CDR3 for alpha chain variable domain of TCR clone 357839 (TRAV27, TRAJ9)
CAGRDTGGFKTIF

SEQ ID NO: 715678 - protein, 13 aa, Homo sapiens
  CDR3 for beta chain variable domain of TCR clone 357839 (TRBV12-4, TRBJ1-2)
CASSLRQGKGYTF

SEQ ID NO: 715679 - protein, 14 aa, Homo sapiens
  CDR3 for alpha chain variable domain of TCR clone 357840 (TRAV12-2, TRAJ40)
CAVKIPSGTYKYIF

SEQ ID NO: 715680 - protein, 14 aa, Homo sapiens
  CDR3 for beta chain variable domain of TCR clone 357840 (TRBV20-1, TRBJ1-1)
CSAQTRIGGTEAIF

SEQ ID NO: 715681 - protein, 14 aa, Homo sapiens
  CDR3 for alpha chain variable domain of TCR clone 357841 (TRAV1-2, TRAJ16)
CAVNRFPDGQKLLF

SEQ ID NO: 715682 - protein, 15 aa, Homo sapiens
  CDR3 for beta chain variable domain of TCR clone 357841 (TRBV12-4, TRBJ1-2)
CASSPITGGGYGYTF

SEQ ID NO: 715683 - protein, 13 aa, Homo sapiens
  CDR3 for alpha chain variable domain of TCR clone 357842 (TRAV20, TRAJ15)
CATINQAGTDLIF

SEQ ID NO: 715684 - protein, 13 aa, Homo sapiens
  CDR3 for beta chain variable domain of TCR clone 357842 (TRBV12-4, TRBJ2-1)
CASRQPSNNEQFF

SEQ ID NO: 715685 - protein, 11 aa, Homo sapiens
  CDR3 for alpha chain variable domain of TCR clone 357843 (TRAV12-1, TRAJ8)
CVVTGFQKLVF

SEQ ID NO: 715686 - protein, 14 aa, Homo sapiens
  CDR3 for beta chain variable domain of TCR clone 357843 (TRBV19, TRBJ2-1)
SASGKSTQYNEQFF

SEQ ID NO: 715687 - protein, 11 aa, Homo sapiens
  CDR3 for alpha chain variable domain of TCR clone 357844 (TRAV1-2, TRAJ40)
CAVPGTYKYIF

SEQ ID NO: 715688 - protein, 16 aa, Homo sapiens
  CDR3 for beta chain variable domain of TCR clone 357844 (TRBV7-9, TRBJ2-1)
CASSLDPGLAIDEQFF

SEQ ID NO: 715689 - protein, 15 aa, Homo sapiens
  CDR3 for alpha chain variable domain of TCR clone 357845 (TRAV12-3, TRAJ49)
CAMAVTPNTGNQFYF

SEQ ID NO: 715690 - protein, 17 aa, Homo sapiens
  CDR3 for beta chain variable domain of TCR clone 357845 (TRBV4-1, TRBJ1-5)
RQQPRPPGTGVKSAQHF

SEQ ID NO: 715691 - protein, 16 aa, Homo sapiens
  CDR3 for alpha chain variable domain of TCR clone 357846 (TRAV13-1, TRAJ48)
CAASIFGNFGNEKLTF

SEQ ID NO: 715692 - protein, 14 aa, Homo sapiens
  CDR3 for beta chain variable domain of TCR clone 357846 (TRBV19, TRBJ1-1)
CASSIEVSGGSAFF

SEQ ID NO: 715693 - protein, 14 aa, Homo sapiens
  CDR3 for alpha chain variable domain of TCR clone 357847 (TRAV4, TRAJ43)
CLVGPMYNNNDMRF

SEQ ID NO: 715694 - protein, 21 aa, Homo sapiens
  CDR3 for beta chain variable domain of TCR clone 357847 (TRBV11-1, TRBJ2-1)
CASSARERLRPEGPSDNEQFF

SEQ ID NO: 715695 - protein, 14 aa, Homo sapiens
  CDR3 for alpha chain variable domain of TCR clone 357848 (TRAV17, TRAJ35)
CATDRPGFGNVLHC

SEQ ID NO: 715696 - protein, 13 aa, Homo sapiens
  CDR3 for beta chain variable domain of TCR clone 357848 (TRBV4-1, TRBJ2-1)
CASSQEVQYEQFF

SEQ ID NO: 715697 - protein, 14 aa, Homo sapiens
  CDR3 for alpha chain variable domain of TCR clone 357849 (TRAV8-2, TRAJ11)
CVVSEKSGYSTLPF

SEQ ID NO: 715698 - protein, 16 aa, Homo sapiens
  CDR3 for beta chain variable domain of TCR clone 357849 (TRBV11-2, TRBJ1-1)
CASSLRQGGEHSKAFF

SEQ ID NO: 715699 - protein, 17 aa, Homo sapiens
  CDR3 for alpha chain variable domain of TCR clone 357850 (TRAV3, TRAJ42)
CAVRDRDYGGSQGNLNF

SEQ ID NO: 715700 - protein, 13 aa, Homo sapiens
  CDR3 for beta chain variable domain of TCR clone 357850 (TRBV10-3, TRBJ2-7)
CASKLAVNYEQYF

SEQ ID NO: 715701 - protein, 14 aa, Homo sapiens
  CDR3 for alpha chain variable domain of TCR clone 357851 (TRAV13-1, TRAJ44)
CAAKATSTASKLTF

SEQ ID NO: 715702 - protein, 16 aa, Homo sapiens
  CDR3 for beta chain variable domain of TCR clone 357851 (TRBV15, TRBJ1-2)
CATSRGPRTGGGGYTF

SEQ ID NO: 715703 - protein, 15 aa, Homo sapiens
  CDR3 for alpha chain variable domain of TCR clone 357852 (TRAV13-1, TRAJ3)
CAASKLASSASKITF

SEQ ID NO: 715704 - protein, 16 aa, Homo sapiens
  CDR3 for beta chain variable domain of TCR clone 357852 (TRBV25-1, TRBJ1-5)
CASGAPTVNSHQPQHF

SEQ ID NO: 715705 - protein, 14 aa, Homo sapiens
  CDR3 for alpha chain variable domain of TCR clone 357853 (TRAV17, TRAJ40)
CATALTSGTYKYIF

SEQ ID NO: 715706 - protein, 14 aa, Homo sapiens
  CDR3 for beta chain variable domain of TCR clone 357853 (TRBV6-6, TRBJ2-7)
CASSDSGAGYEQYF

SEQ ID NO: 715707 - protein, 13 aa, Homo sapiens
  CDR3 for alpha chain variable domain of TCR clone 357854 (TRAV27, TRAJ45)
CRGGGGGADGLTF

SEQ ID NO: 715708 - protein, 13 aa, Homo sapiens
  CDR3 for beta chain variable domain of TCR clone 357854 (TRBV20-1, TRBJ1-1)
CSAPEGGKTEAFF

SEQ ID NO: 715709 - protein, 13 aa, Homo sapiens
  CDR3 for alpha chain variable domain of TCR clone 357855 (TRAV13-1, TRAJ24)
CTASDGSWGKLQF

SEQ ID NO: 715710 - protein, 13 aa, Homo sapiens
  CDR3 for beta chain variable domain of TCR clone 357855 (TRBV4-3, TRBJ2-5)
CASSQGGGETQYF

SEQ ID NO: 715711 - protein, 13 aa, Homo sapiens
  CDR3 for alpha chain variable domain of TCR clone 357856 (TRAV2, TRAJ40)
CAVVTSGTYKYIF

SEQ ID NO: 715712 - protein, 13 aa, Homo sapiens
  CDR3 for beta chain variable domain of TCR clone 357856 (TRBV18, TRBJ2-5)
CASSPAGKETQYF

SEQ ID NO: 715713 - protein, 17 aa, Homo sapiens
  CDR3 for alpha chain variable domain of TCR clone 357857 (TRAV13-1, TRAJ53)
CAASWKSSGGSNYKLTF

SEQ ID NO: 715714 - protein, 19 aa, Homo sapiens
  CDR3 for beta chain variable domain of TCR clone 357857 (TRBV7-9, TRBJ2-1)
CASSHNRGALLHSYNEQFF

SEQ ID NO: 715715 - protein, 13 aa, Homo sapiens
  CDR3 for alpha chain variable domain of TCR clone 357858 (TRAV29/DV5, TRAJ33)
CAASVESNYQLIW

SEQ ID NO: 715716 - protein, 14 aa, Homo sapiens
  CDR3 for beta chain variable domain of TCR clone 357858 (TRBV7-9, TRBJ2-2)
CASSLGHRTGELFF

SEQ ID NO: 715717 - protein, 13 aa, Homo sapiens
  CDR3 for alpha chain variable domain of TCR clone 357859 (TRAV2, TRAJ15)
CAVASQAGTALIF

SEQ ID NO: 715718 - protein, 17 aa, Homo sapiens
  CDR3 for beta chain variable domain of TCR clone 357859 (TRBV20-1, TRBJ2-2)
CSASGSGQSGLTGELFF

SEQ ID NO: 715719 - protein, 20 aa, Homo sapiens
  CDR3 for alpha chain variable domain of TCR clone 357860 (TRAV8-3, TRAJ44)
LSTSVLWVRLYTGTASKLTF

SEQ ID NO: 715720 - protein, 14 aa, Homo sapiens
  CDR3 for beta chain variable domain of TCR clone 357860 (TRBV19, TRBJ2-7)
CASSMGQGAIEQYF

SEQ ID NO: 715721 - protein, 11 aa, Homo sapiens
  CDR3 for alpha chain variable domain of TCR clone 357861 (TRAV21, TRAJ34)
CAHYNTDKLIF

SEQ ID NO: 715722 - protein, 17 aa, Homo sapiens
  CDR3 for beta chain variable domain of TCR clone 357861 (TRBV4-1, TRBJ2-3)
CASSQGYVSGGTDTQYF

SEQ ID NO: 715723 - protein, 14 aa, Homo sapiens
  CDR3 for alpha chain variable domain of TCR clone 357862 (TRAV23/DV6, TRAJ27)
CAASRDTNAGKSTF

SEQ ID NO: 715724 - protein, 14 aa, Homo sapiens
  CDR3 for beta chain variable domain of TCR clone 357862 (TRBV7-9, TRBJ1-1)
CASTPLQSYTEAFF

SEQ ID NO: 715725 - protein, 16 aa, Homo sapiens
  CDR3 for alpha chain variable domain of TCR clone 357863 (TRAV8-3, TRAJ42)
CAVGEGNGGSQGNLIV

SEQ ID NO: 715726 - protein, 14 aa, Homo sapiens
  CDR3 for beta chain variable domain of TCR clone 357863 (TRBV7-2, TRBJ2-1)
CASSRGGARNEQFF

SEQ ID NO: 715727 - protein, 12 aa, Homo sapiens
  CDR3 for alpha chain variable domain of TCR clone 357864 (TRAV17, TRAJ12)
CATLRSSYKLIF

SEQ ID NO: 715728 - protein, 12 aa, Homo sapiens
  CDR3 for beta chain variable domain of TCR clone 357864 (TRBV29-1, TRBJ2-3)
CSVTGGADTQYF

SEQ ID NO: 715729 - protein, 13 aa, Homo sapiens
  CDR3 for alpha chain variable domain of TCR clone 357865 (TRAV8-4, TRAJ40)
CAVSAGGTYKYIF

SEQ ID NO: 715730 - protein, 13 aa, Homo sapiens
  CDR3 for beta chain variable domain of TCR clone 357865 (TRBV20-1, TRBJ1-5)
CSAPGGPNQPQHF

SEQ ID NO: 715731 - protein, 14 aa, Homo sapiens
  CDR3 for alpha chain variable domain of TCR clone 357866 (TRAV2, TRAJ37)
CAVDFTSNTGKLIF

SEQ ID NO: 715732 - protein, 14 aa, Homo sapiens
  CDR3 for beta chain variable domain of TCR clone 357866 (TRBV11-2, TRBJ2-5)
CASRPLAGRETQYF

SEQ ID NO: 715733 - protein, 13 aa, Homo sapiens
  CDR3 for alpha chain variable domain of TCR clone 357867 (TRAV13-2, TRAJ48)
CAEMDFGNEKLTF

SEQ ID NO: 715734 - protein, 16 aa, Homo sapiens
  CDR3 for beta chain variable domain of TCR clone 357867 (TRBV7-8, TRBJ2-4)
CASSAERTLAKNIQYF

SEQ ID NO: 715735 - protein, 14 aa, Homo sapiens
  CDR3 for alpha chain variable domain of TCR clone 357868 (TRAV2, TRAJ9)
CAVEDRSGGFKTIF

SEQ ID NO: 715736 - protein, 17 aa, Homo sapiens
  CDR3 for beta chain variable domain of TCR clone 357868 (TRBV18, TRBJ2-1)
CASSKGLSGGADNEQFF

SEQ ID NO: 715737 - protein, 14 aa, Homo sapiens
  CDR3 for alpha chain variable domain of TCR clone 357869 (TRAV12-1, TRAJ30)
CVVNIGGRDDKIIF

SEQ ID NO: 715738 - protein, 15 aa, Homo sapiens
  CDR3 for beta chain variable domain of TCR clone 357869 (TRBV7-6, TRBJ2-5)
CASSKPTGPQETQYF

SEQ ID NO: 715739 - protein, 17 aa, Homo sapiens
  CDR3 for alpha chain variable domain of TCR clone 357870 (TRAV12-2, TRAJ48)
CASNEKLTFGTGTRLTI

SEQ ID NO: 715740 - protein, 14 aa, Homo sapiens
  CDR3 for beta chain variable domain of TCR clone 357870 (TRBV5-1, TRBJ2-5)
CPSSLAGKQETQYF

SEQ ID NO: 715741 - protein, 15 aa, Homo sapiens
  CDR3 for alpha chain variable domain of TCR clone 357871 (TRAV21, TRAJ32)
CAAAPYGGATNKLIF

SEQ ID NO: 715742 - protein, 17 aa, Homo sapiens
  CDR3 for beta chain variable domain of TCR clone 357871 (TRBV13, TRBJ2-3)
CASSLSRVAGGRNTQYC

SEQ ID NO: 715743 - protein, 15 aa, Homo sapiens
  CDR3 for alpha chain variable domain of TCR clone 357872 (TRAV3, TRAJ22)
CAVRDRGGSARHLTF

SEQ ID NO: 715744 - protein, 17 aa, Homo sapiens
  CDR3 for beta chain variable domain of TCR clone 357872 (TRBV28, TRBJ2-5)
CASSTPEGDALQETQYF

SEQ ID NO: 715745 - protein, 13 aa, Homo sapiens
  CDR3 for alpha chain variable domain of TCR clone 357873 (TRAV25, TRAJ30)
CAGRVDRDDKIIF

SEQ ID NO: 715746 - protein, 12 aa, Homo sapiens
  CDR3 for beta chain variable domain of TCR clone 357873 (TRBV7-9, TRBJ2-6)
GAGYSGANVLTF

SEQ ID NO: 715747 - protein, 11 aa, Homo sapiens
  CDR3 for alpha chain variable domain of TCR clone 357874 (TRAV2, TRAJ13)
CASGGYQKVTF

SEQ ID NO: 715748 - protein, 13 aa, Homo sapiens
  CDR3 for beta chain variable domain of TCR clone 357874 (TRBV28, TRBJ2-5)
CAGVSRGEETQYF

SEQ ID NO: 715749 - protein, 14 aa, Homo sapiens
  CDR3 for alpha chain variable domain of TCR clone 357875 (TRAV12-2, TRAJ17)
CAVLFKAAGNKLTF

SEQ ID NO: 715750 - protein, 17 aa, Homo sapiens
  CDR3 for beta chain variable domain of TCR clone 357875 (TRBV20-1, TRBJ2-2)
SAVLADRQGGLTGELFF

SEQ ID NO: 715751 - protein, 11 aa, Homo sapiens
  CDR3 for alpha chain variable domain of TCR clone 357876 (TRAV2, TRAJ33)
CAVESNYQLIW

SEQ ID NO: 715752 - protein, 15 aa, Homo sapiens
  CDR3 for beta chain variable domain of TCR clone 357876 (TRBV7-9, TRBJ2-7)
CISVSEAPPMNEQYF

SEQ ID NO: 715753 - protein, 21 aa, Homo sapiens
  CDR3 for alpha chain variable domain of TCR clone 357877 (TRAV8-3, TRAJ10)
CAVGHTHGRRKQTHLWDRHSA

SEQ ID NO: 715754 - protein, 10 aa, Homo sapiens
  CDR3 for beta chain variable domain of TCR clone 357877 (TRBV20-1, TRBJ2-5)
CSARFETQHF

SEQ ID NO: 715755 - protein, 14 aa, Homo sapiens
  CDR3 for alpha chain variable domain of TCR clone 357878 (TRAV26-1, TRAJ45)
CIEVTGGGADGRTV

SEQ ID NO: 715756 - protein, 13 aa, Homo sapiens
  CDR3 for beta chain variable domain of TCR clone 357878 (TRBV7-6, TRBJ1-2)
CASSLVADYGYTF

SEQ ID NO: 715757 - protein, 14 aa, Homo sapiens
  CDR3 for alpha chain variable domain of TCR clone 357879 (TRAV12-3, TRAJ5)
CAVSTYTGRRALTF

SEQ ID NO: 715758 - protein, 13 aa, Homo sapiens
  CDR3 for beta chain variable domain of TCR clone 357879 (TRBV28, TRBJ2-3)
CASSTGGGDTQYF

SEQ ID NO: 715759 - protein, 15 aa, Homo sapiens
  CDR3 for alpha chain variable domain of TCR clone 357880 (TRAV3, TRAJ22)
CAVRDRGGSARQLTF

SEQ ID NO: 715760 - protein, 14 aa, Homo sapiens
  CDR3 for beta chain variable domain of TCR clone 357880 (TRBV12-4, TRBJ2-3)
CASSGQGSTDTQYF

SEQ ID NO: 715761 - protein, 16 aa, Homo sapiens
  CDR3 for alpha chain variable domain of TCR clone 357881 (TRAV3, TRAJ37)
CAVRPHGSCNTGNLIF

SEQ ID NO: 715762 - protein, 13 aa, Homo sapiens
  CDR3 for beta chain variable domain of TCR clone 357881 (TRBV2, TRBJ1-5)
CASGTGGYQPQHF

SEQ ID NO: 715763 - protein, 16 aa, Homo sapiens
  CDR3 for alpha chain variable domain of TCR clone 357882 (TRAV1-2, TRAJ10)
CAVKGVLTGGGNKLTF

SEQ ID NO: 715764 - protein, 14 aa, Homo sapiens
  CDR3 for beta chain variable domain of TCR clone 357882 (TRBV19, TRBJ2-1)
CARGARSYQWEQFF

SEQ ID NO: 715765 - protein, 14 aa, Homo sapiens
  CDR3 for alpha chain variable domain of TCR clone 357883 (TRAV3, TRAJ9)
CAVRDETGGFKTIF

SEQ ID NO: 715766 - protein, 17 aa, Homo sapiens
  CDR3 for beta chain variable domain of TCR clone 357883 (TRBV11-2, TRBJ2-1)
CASSLYPPGVEYNEQFF

SEQ ID NO: 715767 - protein, 14 aa, Homo sapiens
  CDR3 for alpha chain variable domain of TCR clone 357884 (TRAV12-1, TRAJ8)
WVVNSNTGFQKLVF

SEQ ID NO: 715768 - protein, 16 aa, Homo sapiens
  CDR3 for beta chain variable domain of TCR clone 357884 (TRBV20-1, TRBJ2-2)
CSARDDRVGLTGELFF

SEQ ID NO: 715769 - protein, 17 aa, Homo sapiens
  CDR3 for alpha chain variable domain of TCR clone 357885 (TRAV14/DV4, TRAJ4)
CAMREASGRGCYNKLIF

SEQ ID NO: 715770 - protein, 14 aa, Homo sapiens
  CDR3 for beta chain variable domain of TCR clone 357885 (TRBV19, TRBJ2-7)
CASSMGQGAIEQYF

SEQ ID NO: 715771 - protein, 11 aa, Homo sapiens
  CDR3 for alpha chain variable domain of TCR clone 357886 (TRAV1-2, TRAJ40)
CAVPGTYKYIF

SEQ ID NO: 715772 - protein, 16 aa, Homo sapiens
  CDR3 for beta chain variable domain of TCR clone 357886 (TRBV29-1, TRBJ2-7)
CSVEVVGTSGSYKQYF

SEQ ID NO: 715773 - protein, 15 aa, Homo sapiens
  CDR3 for alpha chain variable domain of TCR clone 357887 (TRAV8-3, TRAJ18)
CAVSPGGSTLGRLYF

SEQ ID NO: 715774 - protein, 18 aa, Homo sapiens
  CDR3 for beta chain variable domain of TCR clone 357887 (TRBV4-2, TRBJ2-7)
CASSQDGRAGENSYEQYF

SEQ ID NO: 715775 - protein, 16 aa, Homo sapiens
  CDR3 for alpha chain variable domain of TCR clone 357888 (TRAV8-1, TRAJ39)
CAVNVPSYNAGNMLIF

SEQ ID NO: 715776 - protein, 15 aa, Homo sapiens
  CDR3 for beta chain variable domain of TCR clone 357888 (TRBV4-1, TRBJ2-3)
CASRSTRAGTDTQYF

SEQ ID NO: 715777 - protein, 13 aa, Homo sapiens
  CDR3 for alpha chain variable domain of TCR clone 357889 (TRAV23/DV6, TRAJ27)
CAASKPMPANQPL

SEQ ID NO: 715778 - protein, 14 aa, Homo sapiens
  CDR3 for beta chain variable domain of TCR clone 357889 (TRBV4-1, TRBJ2-2)
CASSQAVNTGELFF

SEQ ID NO: 715779 - protein, 14 aa, Homo sapiens
  CDR3 for alpha chain variable domain of TCR clone 357890 (TRAV3, TRAJ34)
CAVRDINNTDKLIC

SEQ ID NO: 715780 - protein, 15 aa, Homo sapiens
  CDR3 for beta chain variable domain of TCR clone 357890 (TRBV20-1, TRBJ2-7)
CSARDRVSGMDEQYF

SEQ ID NO: 715781 - protein, 15 aa, Homo sapiens
  CDR3 for alpha chain variable domain of TCR clone 357891 (TRAV12-2, TRAJ53)
CAVTTGGGSNYKLTF

SEQ ID NO: 715782 - protein, 15 aa, Homo sapiens
  CDR3 for beta chain variable domain of TCR clone 357891 (TRBV5-1, TRBJ2-5)
CASSLGLGEIKTQYF

SEQ ID NO: 715783 - protein, 13 aa, Homo sapiens
  CDR3 for alpha chain variable domain of TCR clone 357892 (TRAV29/DV5, TRAJ31)
FSASRNNNARLMF

SEQ ID NO: 715784 - protein, 17 aa, Homo sapiens
  CDR3 for beta chain variable domain of TCR clone 357892 (TRBV27, TRBJ2-6)
CASSLTGFASGANVLTF

SEQ ID NO: 715785 - protein, 12 aa, Homo sapiens
  CDR3 for alpha chain variable domain of TCR clone 357893 (TRAV12-3, TRAJ17)
CAMPLTGNKLTF

SEQ ID NO: 715786 - protein, 15 aa, Homo sapiens
  CDR3 for beta chain variable domain of TCR clone 357893 (TRBV20-1, TRBJ2-7)
CSARDRVSGMDEQYF

SEQ ID NO: 715787 - protein, 12 aa, Homo sapiens
  CDR3 for alpha chain variable domain of TCR clone 357894 (TRAV1-1, TRAJ8)
CAGGTGFQKLVF

SEQ ID NO: 715788 - protein, 13 aa, Homo sapiens
  CDR3 for beta chain variable domain of TCR clone 357894 (TRBV9, TRBJ2-1)
CASSPSGGSEQFF

SEQ ID NO: 715789 - protein, 14 aa, Homo sapiens
  CDR3 for alpha chain variable domain of TCR clone 357895 (TRAV8-4, TRAJ13)
CAVTLSGGYQKVTF

SEQ ID NO: 715790 - protein, 11 aa, Homo sapiens
  CDR3 for beta chain variable domain of TCR clone 357895 (TRBV7-2, TRBJ1-2)
CASRGDRGYTF

SEQ ID NO: 715791 - protein, 17 aa, Homo sapiens
  CDR3 for alpha chain variable domain of TCR clone 357896 (TRAV3, TRAJ42)
CAVRDRDYGGSQGNLIF

SEQ ID NO: 715792 - protein, 15 aa, Homo sapiens
  CDR3 for beta chain variable domain of TCR clone 357896 (TRBV6-6, TRBJ2-7)
CASSYSYGGSSEQYF

SEQ ID NO: 715793 - protein, 16 aa, Homo sapiens
  CDR3 for alpha chain variable domain of TCR clone 357897 (TRAV4, TRAJ22)
CLVGDLYSGSARQLTF

SEQ ID NO: 715794 - protein, 13 aa, Homo sapiens
  CDR3 for beta chain variable domain of TCR clone 357897 (TRBV12-5, TRBJ2-3)
CASGDRQSDTQYF

SEQ ID NO: 715795 - protein, 12 aa, Homo sapiens
  CDR3 for alpha chain variable domain of TCR clone 357898 (TRAV12-3, TRAJ17)
CAMTLTGNRLTF

SEQ ID NO: 715796 - protein, 14 aa, Homo sapiens
  CDR3 for beta chain variable domain of TCR clone 357898 (TRBV19, TRBJ2-1)
CASPTFVLSGEQFF

SEQ ID NO: 715797 - protein, 12 aa, Homo sapiens
  CDR3 for alpha chain variable domain of TCR clone 357899 (TRAV21, TRAJ39)
CAADNACNMLTF

SEQ ID NO: 715798 - protein, 14 aa, Homo sapiens
  CDR3 for beta chain variable domain of TCR clone 357899 (TRBV25-1, TRBJ1-1)
CASTHLGGNTEAFF

SEQ ID NO: 715799 - protein, 17 aa, Homo sapiens
  CDR3 for alpha chain variable domain of TCR clone 357900 (TRAV3, TRAJ42)
CAVGDRDYGGSQGNLIF

SEQ ID NO: 715800 - protein, 15 aa, Homo sapiens
  CDR3 for beta chain variable domain of TCR clone 357900 (TRBV2, TRBJ2-7)
CASSEGLARSYEQYF

SEQ ID NO: 715801 - protein, 16 aa, Homo sapiens
  CDR3 for alpha chain variable domain of TCR clone 357901 (TRAV38-2/DV8, TRAJ47)
CAYRSAIMEYGNKLVF

SEQ ID NO: 715802 - protein, 14 aa, Homo sapiens
  CDR3 for beta chain variable domain of TCR clone 357901 (TRBV19, TRBJ2-7)
CASIIFAGTYEQYF

SEQ ID NO: 715803 - protein, 17 aa, Homo sapiens
  CDR3 for alpha chain variable domain of TCR clone 357902 (TRAV27, TRAJ18)
CAGLHRGRRSTLGRLYF

SEQ ID NO: 715804 - protein, 14 aa, Homo sapiens
  CDR3 for beta chain variable domain of TCR clone 357902 (TRBV20-1, TRBJ1-5)
CSARGRGSNQPQHF

SEQ ID NO: 715805 - protein, 15 aa, Homo sapiens
  CDR3 for alpha chain variable domain of TCR clone 357903 (TRAV14/DV4, TRAJ22)
CAMSRLSGSERQLTF

SEQ ID NO: 715806 - protein, 15 aa, Homo sapiens
  CDR3 for beta chain variable domain of TCR clone 357903 (TRBV28, TRBJ2-5)
CASSFRQGALETQYF

SEQ ID NO: 715807 - protein, 11 aa, Homo sapiens
  CDR3 for alpha chain variable domain of TCR clone 357904 (TRAV3, TRAJ21)
CAVGNFNKFYF

SEQ ID NO: 715808 - protein, 14 aa, Homo sapiens
  CDR3 for beta chain variable domain of TCR clone 357904 (TRBV28, TRBJ1-5)
CASSLGVLVKPQHF

SEQ ID NO: 715809 - protein, 16 aa, Homo sapiens
  CDR3 for alpha chain variable domain of TCR clone 357905 (TRAV26-1, TRAJ53)
CIVRVAMGGSNYKLTF

SEQ ID NO: 715810 - protein, 15 aa, Homo sapiens
  CDR3 for beta chain variable domain of TCR clone 357905 (TRBV4-3, TRBJ2-7)
CASSQGGRGIYEQYF

SEQ ID NO: 715811 - protein, 13 aa, Homo sapiens
  CDR3 for alpha chain variable domain of TCR clone 357906 (TRAV13-1, TRAJ21)
CAASIYNFNKFYF

SEQ ID NO: 715812 - protein, 16 aa, Homo sapiens
  CDR3 for beta chain variable domain of TCR clone 357906 (TRBV7-3, TRBJ2-1)
CASSLEGYRSYNEQFF

SEQ ID NO: 715813 - protein, 14 aa, Homo sapiens
  CDR3 for alpha chain variable domain of TCR clone 357907 (TRAV12-2, TRAJ17)
CAVNIKAAGNKLTF

SEQ ID NO: 715814 - protein, 14 aa, Homo sapiens
  CDR3 for beta chain variable domain of TCR clone 357907 (TRBV7-2, TRBJ2-7)
CASSLPPGQGPQYF

SEQ ID NO: 715815 - protein, 13 aa, Homo sapiens
  CDR3 for alpha chain variable domain of TCR clone 357908 (TRAV8-3, TRAJ28)
CAVGAVGSYQLTF

SEQ ID NO: 715816 - protein, 19 aa, Homo sapiens
  CDR3 for beta chain variable domain of TCR clone 357908 (TRBV7-2, TRBJ2-3)
CASSPGLAGGGLTTDTQYF

SEQ ID NO: 715817 - protein, 13 aa, Homo sapiens
  CDR3 for alpha chain variable domain of TCR clone 357909 (TRAV4, TRAJ20)
CLVGSSNDYKLSF

SEQ ID NO: 715818 - protein, 15 aa, Homo sapiens
  CDR3 for beta chain variable domain of TCR clone 357909 (TRBV9, TRBJ1-6)
CASSVAGTGDSPLHF

SEQ ID NO: 715819 - protein, 12 aa, Homo sapiens
  CDR3 for alpha chain variable domain of TCR clone 357910 (TRAV12-1, TRAJ40)
CVFYSGTYKYIF

SEQ ID NO: 715820 - protein, 17 aa, Homo sapiens
  CDR3 for beta chain variable domain of TCR clone 357910 (TRBV12-4, TRBJ2-2)
CASSLVAGTRGRTGELF

SEQ ID NO: 715821 - protein, 12 aa, Homo sapiens
  CDR3 for alpha chain variable domain of TCR clone 357911 (TRAV17, TRAJ12)
CATLRSSYKLIF

SEQ ID NO: 715822 - protein, 12 aa, Homo sapiens
  CDR3 for beta chain variable domain of TCR clone 357911 (TRBV12-4, TRBJ2-7)
CASSLGGYEQYF

SEQ ID NO: 715823 - protein, 18 aa, Homo sapiens
  CDR3 for alpha chain variable domain of TCR clone 357912 (TRAV13-1, TRAJ52)
CAASKRSAGGTSYGTLTF

SEQ ID NO: 715824 - protein, 13 aa, Homo sapiens
  CDR3 for beta chain variable domain of TCR clone 357912 (TRBV12-4, TRBJ1-2)
CAGSLRQGKGYTF

SEQ ID NO: 715825 - protein, 12 aa, Homo sapiens
  CDR3 for alpha chain variable domain of TCR clone 357913 (TRAV3, TRAJ7)
CADLLWEQQTRF

SEQ ID NO: 715826 - protein, 13 aa, Homo sapiens
  CDR3 for beta chain variable domain of TCR clone 357913 (TRBV7-3, TRBJ2-5)
CASSFRGGEAQYF

SEQ ID NO: 715827 - protein, 15 aa, Homo sapiens
  CDR3 for alpha chain variable domain of TCR clone 357914 (TRAV17, TRAJ57)
CATGPSQGGSEKLVF

SEQ ID NO: 715828 - protein, 13 aa, Homo sapiens
  CDR3 for beta chain variable domain of TCR clone 357914 (TRBV7-3, TRBJ2-1)
CASSPVAYNEQFF

SEQ ID NO: 715829 - protein, 22 aa, Homo sapiens
  CDR3 for alpha chain variable domain of TCR clone 357915 (TRAV26-1, TRAJ42)
CIVRPIMEEAKEISSLEMSLNS

SEQ ID NO: 715830 - protein, 16 aa, Homo sapiens
  CDR3 for beta chain variable domain of TCR clone 357915 (TRBV7-3, TRBJ2-2)
CASSLKRGTLSGELFF

SEQ ID NO: 715831 - protein, 13 aa, Homo sapiens
  CDR3 for alpha chain variable domain of TCR clone 357916 (TRAV12-2, TRAJ18)
CAVRGSTLGRLYF

SEQ ID NO: 715832 - protein, 13 aa, Homo sapiens
  CDR3 for beta chain variable domain of TCR clone 357916 (TRBV4-1, TRBJ2-2)
CASSQENTGELFF

SEQ ID NO: 715833 - protein, 17 aa, Homo sapiens
  CDR3 for alpha chain variable domain of TCR clone 357917 (TRAV13-1, TRAJ31)
CAPRDRLMFGDVTQLVG

SEQ ID NO: 715834 - protein, 12 aa, Homo sapiens
  CDR3 for beta chain variable domain of TCR clone 357917 (TRBV7-9, TRBJ2-7)
CASSLEGYEQYF

SEQ ID NO: 715835 - protein, 14 aa, Homo sapiens
  CDR3 for alpha chain variable domain of TCR clone 357918 (TRAV8-1, TRAJ31)
CAVTSWNNNARLMF

SEQ ID NO: 715836 - protein, 13 aa, Homo sapiens
  CDR3 for beta chain variable domain of TCR clone 357918 (TRBV5-7, TRBJ1-1)
CASSLFQNTEAFF

SEQ ID NO: 715837 - protein, 13 aa, Homo sapiens
  CDR3 for alpha chain variable domain of TCR clone 357919 (TRAV8-3, TRAJ4)
WVFYSGGYTKLIF

SEQ ID NO: 715838 - protein, 16 aa, Homo sapiens
  CDR3 for beta chain variable domain of TCR clone 357919 (TRBV7-8, TRBJ2-3)
CASSTEGQRETDTQYF

SEQ ID NO: 715839 - protein, 16 aa, Homo sapiens
  CDR3 for alpha chain variable domain of TCR clone 357920 (TRAV30, TRAJ24)
CGTEIVDADSWGKFQF

SEQ ID NO: 715840 - protein, 19 aa, Homo sapiens
  CDR3 for beta chain variable domain of TCR clone 357920 (TRBV25-1, TRBJ2-2)
CAILVYRVDRGRKTGELFF

SEQ ID NO: 715841 - protein, 15 aa, Homo sapiens
  CDR3 for alpha chain variable domain of TCR clone 357921 (TRAV2, TRAJ32)
CAVANYGGATNKLIF

SEQ ID NO: 715842 - protein, 15 aa, Homo sapiens
  CDR3 for beta chain variable domain of TCR clone 357921 (TRBV7-7, TRBJ2-5)
CANSQLERAEETQYF

SEQ ID NO: 715843 - protein, 14 aa, Homo sapiens
  CDR3 for alpha chain variable domain of TCR clone 357922 (TRAV21, TRAJ57)
CAVRNQGGSEKLVF

SEQ ID NO: 715844 - protein, 13 aa, Homo sapiens
  CDR3 for beta chain variable domain of TCR clone 357922 (TRBV7-6, TRBJ2-3)
CASSLAFVDTQYF

SEQ ID NO: 715845 - protein, 13 aa, Homo sapiens
  CDR3 for alpha chain variable domain of TCR clone 357923 (TRAV1-2, TRAJ9)
CAALNTGGFKTIF

SEQ ID NO: 715846 - protein, 13 aa, Homo sapiens
  CDR3 for beta chain variable domain of TCR clone 357923 (TRBV5-8, TRBJ1-1)
CASSLGGGTEAFF

SEQ ID NO: 715847 - protein, 16 aa, Homo sapiens
  CDR3 for alpha chain variable domain of TCR clone 357924 (TRAV27, TRAJ13)
CAGAKSDSGGYQKVTF

SEQ ID NO: 715848 - protein, 15 aa, Homo sapiens
  CDR3 for beta chain variable domain of TCR clone 357924 (TRBV7-2, TRBJ1-2)
CASSPRAGWNYGYTF

SEQ ID NO: 715849 - protein, 19 aa, Homo sapiens
  CDR3 for alpha chain variable domain of TCR clone 357925 (TRAV26-1, TRAJ22)
CCVLLHRQSIVLVARQLTF

SEQ ID NO: 715850 - protein, 13 aa, Homo sapiens
  CDR3 for beta chain variable domain of TCR clone 357925 (TRBV7-9, TRBJ1-2)
CASSLKQNYGYTF

SEQ ID NO: 715851 - protein, 13 aa, Homo sapiens
  CDR3 for alpha chain variable domain of TCR clone 357926 (TRAV17, TRAJ40)
CATRSPGTYKYIF

SEQ ID NO: 715852 - protein, 13 aa, Homo sapiens
  CDR3 for beta chain variable domain of TCR clone 357926 (TRBV2, TRBJ1-5)
CATAGPGNQPQHL

SEQ ID NO: 715853 - protein, 15 aa, Homo sapiens
  CDR3 for alpha chain variable domain of TCR clone 357927 (TRAV12-3, TRAJ6)
CAMSATTGGSYIPTF

SEQ ID NO: 715854 - protein, 16 aa, Homo sapiens
  CDR3 for beta chain variable domain of TCR clone 357927 (TRBV20-1, TRBJ1-2)
CSASMGQGVANYGYGF

SEQ ID NO: 715855 - protein, 10 aa, Homo sapiens
  CDR3 for alpha chain variable domain of TCR clone 357928 (TRAV1-2, TRAJ20)
CALNDYKLSF

SEQ ID NO: 715856 - protein, 13 aa, Homo sapiens
  CDR3 for beta chain variable domain of TCR clone 357928 (TRBV4-1, TRBJ2-1)
CASSQAGGDEQFF

SEQ ID NO: 715857 - protein, 12 aa, Homo sapiens
  CDR3 for alpha chain variable domain of TCR clone 357929 (TRAV2, TRAJ3)
CAVRSSASKIIF

SEQ ID NO: 715858 - protein, 12 aa, Homo sapiens
  CDR3 for beta chain variable domain of TCR clone 357929 (TRBV11-2, TRBJ2-2)
CASSLGGGELFF

SEQ ID NO: 715859 - protein, 16 aa, Homo sapiens
  CDR3 for alpha chain variable domain of TCR clone 357930 (TRAV4, TRAJ37)
CLVGDIGSSNTGKLIF

SEQ ID NO: 715860 - protein, 13 aa, Homo sapiens
  CDR3 for beta chain variable domain of TCR clone 357930 (TRBV29-1, TRBJ1-3)
CSVEGGSGNTIYF

SEQ ID NO: 715861 - protein, 13 aa, Homo sapiens
  CDR3 for alpha chain variable domain of TCR clone 357931 (TRAV2, TRAJ15)
CAVASQAGTALIF

SEQ ID NO: 715862 - protein, 15 aa, Homo sapiens
  CDR3 for beta chain variable domain of TCR clone 357931 (TRBV7-2, TRBJ1-2)
CASSPRAGWNYGYTF

SEQ ID NO: 715863 - protein, 13 aa, Homo sapiens
  CDR3 for alpha chain variable domain of TCR clone 357932 (TRAV27, TRAJ17)
CAGAATAGNKLTF

SEQ ID NO: 715864 - protein, 12 aa, Homo sapiens
  CDR3 for beta chain variable domain of TCR clone 357932 (TRBV24-1, TRBJ2-7)
CATSDPGYEQYF

SEQ ID NO: 715865 - protein, 12 aa, Homo sapiens
  CDR3 for alpha chain variable domain of TCR clone 357933 (TRAV3, TRAJ13)
CAVSGGYQKVTF

SEQ ID NO: 715866 - protein, 14 aa, Homo sapiens
  CDR3 for beta chain variable domain of TCR clone 357933 (TRBV25-1, TRBJ1-1)
CASTHLGGNTEAFF

SEQ ID NO: 715867 - protein, 13 aa, Homo sapiens
  CDR3 for alpha chain variable domain of TCR clone 357934 (TRAV30, TRAJ49)
CGTESQPVTSSIL

SEQ ID NO: 715868 - protein, 17 aa, Homo sapiens
  CDR3 for beta chain variable domain of TCR clone 357934 (TRBV7-9, TRBJ2-3)
CASSPTVAGDLTDTQYF

SEQ ID NO: 715869 - protein, 11 aa, Homo sapiens
  CDR3 for alpha chain variable domain of TCR clone 357935 (TRAV21, TRAJ24)
CAVRTYDNLQL

SEQ ID NO: 715870 - protein, 12 aa, Homo sapiens
  CDR3 for beta chain variable domain of TCR clone 357935 (TRBV11-2, TRBJ2-7)
CASSPPADEQYF

SEQ ID NO: 715871 - protein, 14 aa, Homo sapiens
  CDR3 for alpha chain variable domain of TCR clone 357936 (TRAV9-2, TRAJ39)
CALYIYNAGNMLTF

SEQ ID NO: 715872 - protein, 13 aa, Homo sapiens
  CDR3 for beta chain variable domain of TCR clone 357936 (TRBV7-9, TRBJ1-2)
CASSLKQNYGYIF

SEQ ID NO: 715873 - protein, 13 aa, Homo sapiens
  CDR3 for alpha chain variable domain of TCR clone 357937 (TRAV13-1, TRAJ6)
CAASSGGSYIPTF

SEQ ID NO: 715874 - protein, 15 aa, Homo sapiens
  CDR3 for beta chain variable domain of TCR clone 357937 (TRBV12-4, TRBJ2-5)
CASSPPTGVQETQYF

SEQ ID NO: 715875 - protein, 12 aa, Homo sapiens
  CDR3 for alpha chain variable domain of TCR clone 357938 (TRAV2, TRAJ9)
CAVGAGGFKTIF

SEQ ID NO: 715876 - protein, 14 aa, Homo sapiens
  CDR3 for beta chain variable domain of TCR clone 357938 (TRBV7-2, TRBJ2-2)
CASSLNSNTGELFF

SEQ ID NO: 715877 - protein, 14 aa, Homo sapiens
  CDR3 for alpha chain variable domain of TCR clone 357939 (TRAV12-1, TRAJ30)
CVVNIGGRDDKIIF

SEQ ID NO: 715878 - protein, 13 aa, Homo sapiens
  CDR3 for beta chain variable domain of TCR clone 357939 (TRBV7-6, TRBJ2-3)
CASSLGTVRYAVF

SEQ ID NO: 715879 - protein, 16 aa, Homo sapiens
  CDR3 for alpha chain variable domain of TCR clone 357940 (TRAV4, TRAJ28)
CTTAFLSGAGSDQLTF

SEQ ID NO: 715880 - protein, 14 aa, Homo sapiens
  CDR3 for beta chain variable domain of TCR clone 357940 (TRBV7-9, TRBJ2-5)
CASSLDTAQETQYF

SEQ ID NO: 715881 - protein, 14 aa, Homo sapiens
  CDR3 for alpha chain variable domain of TCR clone 357941 (TRAV8-2, TRAJ33)
CVVGGMDNNYQLIW

SEQ ID NO: 715882 - protein, 14 aa, Homo sapiens
  CDR3 for beta chain variable domain of TCR clone 357941 (TRBV9, TRBJ2-1)
CASSQGVSYNEQFF

SEQ ID NO: 715883 - protein, 12 aa, Homo sapiens
  CDR3 for alpha chain variable domain of TCR clone 357942 (TRAV26-2, TRAJ21)
CILKGNFNKFYF

SEQ ID NO: 715884 - protein, 14 aa, Homo sapiens
  CDR3 for beta chain variable domain of TCR clone 357942 (TRBV7-9, TRBJ1-1)
CASTTLESYTEAFF

SEQ ID NO: 715885 - protein, 14 aa, Homo sapiens
  CDR3 for alpha chain variable domain of TCR clone 357943 (TRAV27, TRAJ23)
CAGLSYNQGGKLIF

SEQ ID NO: 715886 - protein, 15 aa, Homo sapiens
  CDR3 for beta chain variable domain of TCR clone 357943 (TRBV19, TRBJ2-2)
CASSLNRGVTGALFF

SEQ ID NO: 715887 - protein, 13 aa, Homo sapiens
  CDR3 for alpha chain variable domain of TCR clone 357944 (TRAV12-1, TRAJ26)
SATYLYYGQNFVF

SEQ ID NO: 715888 - protein, 15 aa, Homo sapiens
  CDR3 for beta chain variable domain of TCR clone 357944 (TRBV5-1, TRBJ2-6)
CASSLDPSGANVLTS

SEQ ID NO: 715889 - protein, 17 aa, Homo sapiens
  CDR3 for alpha chain variable domain of TCR clone 357945 (TRAV8-6, TRAJ58)
CAVSSWVGETSGSWWTF

SEQ ID NO: 715890 - protein, 14 aa, Homo sapiens
  CDR3 for beta chain variable domain of TCR clone 357945 (TRBV19, TRBJ2-1)
CASPTFVLSGEQFF

SEQ ID NO: 715891 - protein, 17 aa, Homo sapiens
  CDR3 for alpha chain variable domain of TCR clone 357946 (TRAV27, TRAJ18)
CAGLHRGRGSTLGRLYF

SEQ ID NO: 715892 - protein, 15 aa, Homo sapiens
  CDR3 for beta chain variable domain of TCR clone 357946 (TRBV11-3, TRBJ2-3)
CASLKDGREGDTQYF

SEQ ID NO: 715893 - protein, 12 aa, Homo sapiens
  CDR3 for alpha chain variable domain of TCR clone 357947 (TRAV2, TRAJ5)
CALERAGEHLLL

SEQ ID NO: 715894 - protein, 15 aa, Homo sapiens
  CDR3 for beta chain variable domain of TCR clone 357947 (TRBV10-3, TRBJ2-1)
CAISDVQDRAYEQFF

SEQ ID NO: 715895 - protein, 14 aa, Homo sapiens
  CDR3 for alpha chain variable domain of TCR clone 357948 (TRAV13-1, TRAJ10)
CASKEPGGGNKLTF

SEQ ID NO: 715896 - protein, 14 aa, Homo sapiens
  CDR3 for beta chain variable domain of TCR clone 357948 (TRBV6-6, TRBJ2-7)
CASSDSGAGYEQHF

SEQ ID NO: 715897 - protein, 18 aa, Homo sapiens
  CDR3 for alpha chain variable domain of TCR clone 357949 (TRAV21, TRAJ52)
CAVRPSPTGGTSYGRLTF

SEQ ID NO: 715898 - protein, 16 aa, Homo sapiens
  CDR3 for beta chain variable domain of TCR clone 357949 (TRBV13, TRBJ2-2)
CASSPRTGEHTGELLF

SEQ ID NO: 715899 - protein, 12 aa, Homo sapiens
  CDR3 for alpha chain variable domain of TCR clone 357950 (TRAV29/DV5, TRAJ49)
CAATDTGNQFYF

SEQ ID NO: 715900 - protein, 14 aa, Homo sapiens
  CDR3 for beta chain variable domain of TCR clone 357950 (TRBV7-3, TRBJ2-1)
CASSLAGGTNEQFF

SEQ ID NO: 715901 - protein, 13 aa, Homo sapiens
  CDR3 for alpha chain variable domain of TCR clone 357951 (TRAV21, TRAJ27)
CAARPGNAGKSPF

SEQ ID NO: 715902 - protein, 13 aa, Homo sapiens
  CDR3 for beta chain variable domain of TCR clone 357951 (TRBV18, TRBJ2-7)
CASQSGGGYEQYF

SEQ ID NO: 715903 - protein, 11 aa, Homo sapiens
  CDR3 for alpha chain variable domain of TCR clone 357952 (TRAV4, TRAJ31)
CLVGDNARLMF

SEQ ID NO: 715904 - protein, 16 aa, Homo sapiens
  CDR3 for beta chain variable domain of TCR clone 357952 (TRBV7-2, TRBJ2-5)
CASSSEWLSGQETQYF

SEQ ID NO: 715905 - protein, 15 aa, Homo sapiens
  CDR3 for alpha chain variable domain of TCR clone 357953 (TRAV26-1, TRAJ29)
CIVRGEGSGNTPLVF

SEQ ID NO: 715906 - protein, 15 aa, Homo sapiens
  CDR3 for beta chain variable domain of TCR clone 357953 (TRBV28, TRBJ2-5)
CASSPGQGSIETQYF

SEQ ID NO: 715907 - protein, 17 aa, Homo sapiens
  CDR3 for alpha chain variable domain of TCR clone 357954 (TRAV1-2, TRAJ9)
CAVRGPNPDTGGFKTIL

SEQ ID NO: 715908 - protein, 13 aa, Homo sapiens
  CDR3 for beta chain variable domain of TCR clone 357954 (TRBV20-1, TRBJ1-1)
CSARGGGNTEAFF

SEQ ID NO: 715909 - protein, 12 aa, Homo sapiens
  CDR3 for alpha chain variable domain of TCR clone 357955 (TRAV17, TRAJ39)
VATGAAGNMLTF

SEQ ID NO: 715910 - protein, 14 aa, Homo sapiens
  CDR3 for beta chain variable domain of TCR clone 357955 (TRBV7-9, TRBJ1-2)
CASSRQGANYGYTF

SEQ ID NO: 715911 - protein, 14 aa, Homo sapiens
  CDR3 for alpha chain variable domain of TCR clone 357956 (TRAV17, TRAJ53)
CATDAGGSNYKLTF

SEQ ID NO: 715912 - protein, 16 aa, Homo sapiens
  CDR3 for beta chain variable domain of TCR clone 357956 (TRBV4-1, TRBJ1-1)
CDSSQDAGMGNTEAFF

SEQ ID NO: 715913 - protein, 11 aa, Homo sapiens
  CDR3 for alpha chain variable domain of TCR clone 357957 (TRAV1-2, TRAJ20)
CAVANDYKLSF

SEQ ID NO: 715914 - protein, 15 aa, Homo sapiens
  CDR3 for beta chain variable domain of TCR clone 357957 (TRBV12-4, TRBJ2-5)
CASSPPAGLQETQYF

SEQ ID NO: 715915 - protein, 14 aa, Homo sapiens
  CDR3 for alpha chain variable domain of TCR clone 357958 (TRAV26-1, TRAJ34)
CIVGVAYNTDKLIF

SEQ ID NO: 715916 - protein, 15 aa, Homo sapiens
  CDR3 for beta chain variable domain of TCR clone 357958 (TRBV20-1, TRBJ2-7)
CSTSVPAAYFYEQYF

SEQ ID NO: 715917 - protein, 15 aa, Homo sapiens
  CDR3 for alpha chain variable domain of TCR clone 357959 (TRAV17, TRAJ45)
CATAELRGGADGLTF

SEQ ID NO: 715918 - protein, 14 aa, Homo sapiens
  CDR3 for beta chain variable domain of TCR clone 357959 (TRBV3-1, TRBJ2-5)
CASSQAVRQETQYF

SEQ ID NO: 715919 - protein, 10 aa, Homo sapiens
  CDR3 for alpha chain variable domain of TCR clone 357960 (TRAV12-3, TRAJ49)
CAMNDDQFYF

SEQ ID NO: 715920 - protein, 12 aa, Homo sapiens
  CDR3 for beta chain variable domain of TCR clone 357960 (TRBV19, TRBJ2-1)
CASSQISNEQFF

SEQ ID NO: 715921 - protein, 13 aa, Homo sapiens
  CDR3 for alpha chain variable domain of TCR clone 357961 (TRAV30, TRAJ31)
CGTEITNNVRLMF

SEQ ID NO: 715922 - protein, 13 aa, Homo sapiens
  CDR3 for beta chain variable domain of TCR clone 357961 (TRBV12-5, TRBJ2-3)
CASGDRQSDTQYF

SEQ ID NO: 715923 - protein, 15 aa, Homo sapiens
  CDR3 for alpha chain variable domain of TCR clone 357962 (TRAV4, TRAJ39)
CLVGPNNNAGNMLTF

SEQ ID NO: 715924 - protein, 14 aa, Homo sapiens
  CDR3 for beta chain variable domain of TCR clone 357962 (TRBV19, TRBJ2-2)
CATTGHANTGELFF

SEQ ID NO: 715925 - protein, 15 aa, Homo sapiens
  CDR3 for alpha chain variable domain of TCR clone 357963 (TRAV8-2, TRAJ15)
CVVTMGNQAGTALIF

SEQ ID NO: 715926 - protein, 14 aa, Homo sapiens
  CDR3 for beta chain variable domain of TCR clone 357963 (TRBV11-1, TRBJ2-7)
CASSFRQGSYEQYF

SEQ ID NO: 715927 - protein, 13 aa, Homo sapiens
  CDR3 for alpha chain variable domain of TCR clone 357964 (TRAV12-1, TRAJ11)
CVVNRAGYSTLTF

SEQ ID NO: 715928 - protein, 16 aa, Homo sapiens
  CDR3 for beta chain variable domain of TCR clone 357964 (TRBV27, TRBJ2-2)
CASSLRPGGEPGELFF

SEQ ID NO: 715929 - protein, 17 aa, Homo sapiens
  CDR3 for alpha chain variable domain of TCR clone 357965 (TRAV12-2, TRAJ52)
CAVHPYAGGTSYGKLTF

SEQ ID NO: 715930 - protein, 16 aa, Homo sapiens
  CDR3 for beta chain variable domain of TCR clone 357965 (TRBV5-5, TRBJ2-2)
CASSGRREGATGELFF

SEQ ID NO: 715931 - protein, 13 aa, Homo sapiens
  CDR3 for alpha chain variable domain of TCR clone 357966 (TRAV39, TRAJ48)
CAAVNFGNEKLTF

SEQ ID NO: 715932 - protein, 19 aa, Homo sapiens
  CDR3 for beta chain variable domain of TCR clone 357966 (TRBV7-2, TRBJ2-5)
CASGTSGGTPPLGSETQYF

SEQ ID NO: 715933 - protein, 15 aa, Homo sapiens
  CDR3 for alpha chain variable domain of TCR clone 357967 (TRAV38-2/DV8, TRAJ26)
CAYRSRDNYGQNFVF

SEQ ID NO: 715934 - protein, 14 aa, Homo sapiens
  CDR3 for beta chain variable domain of TCR clone 357967 (TRBV29-1, TRBJ1-3)
CSVADGVVGNTIYF

SEQ ID NO: 715935 - protein, 12 aa, Homo sapiens
  CDR3 for alpha chain variable domain of TCR clone 357968 (TRAV12-2, TRAJ43)
CAVNANNNDMRF

SEQ ID NO: 715936 - protein, 14 aa, Homo sapiens
  CDR3 for beta chain variable domain of TCR clone 357968 (TRBV25-1, TRBJ2-2)
CASSELGLPGELFF

SEQ ID NO: 715937 - protein, 11 aa, Homo sapiens
  CDR3 for alpha chain variable domain of TCR clone 357969 (TRAV3, TRAJ21)
CAVGNFNKFYF

SEQ ID NO: 715938 - protein, 14 aa, Homo sapiens
  CDR3 for beta chain variable domain of TCR clone 357969 (TRBV7-9, TRBJ2-5)
CASSPAQDQETQYF

SEQ ID NO: 715939 - protein, 12 aa, Homo sapiens
  CDR3 for alpha chain variable domain of TCR clone 357970 (TRAV16, TRAJ10)
CSRTGGGNKLTF

SEQ ID NO: 715940 - protein, 13 aa, Homo sapiens
  CDR3 for beta chain variable domain of TCR clone 357970 (TRBV15, TRBJ2-7)
CATSTTGHYDQYF

SEQ ID NO: 715941 - protein, 13 aa, Homo sapiens
  CDR3 for alpha chain variable domain of TCR clone 357971 (TRAV2, TRAJ40)
CTVVTSGTYKYIF

SEQ ID NO: 715942 - protein, 14 aa, Homo sapiens
  CDR3 for beta chain variable domain of TCR clone 357971 (TRBV19, TRBJ2-1)
CASPTFVLSGEQIF

SEQ ID NO: 715943 - protein, 15 aa, Homo sapiens
  CDR3 for alpha chain variable domain of TCR clone 357972 (TRAV17, TRAJ4)
CATGTWSGGYNKLIF

SEQ ID NO: 715944 - protein, 13 aa, Homo sapiens
  CDR3 for beta chain variable domain of TCR clone 357972 (TRBV27, TRBJ1-1)
CASSLSIGAEAFF

SEQ ID NO: 715945 - protein, 13 aa, Homo sapiens
  CDR3 for alpha chain variable domain of TCR clone 357973 (TRAV13-1, TRAJ21)
CAASIYNFNKFYF

SEQ ID NO: 715946 - protein, 16 aa, Homo sapiens
  CDR3 for beta chain variable domain of TCR clone 357973 (TRBV20-1, TRBJ1-2)
CSASMGQGVANYGYTF

SEQ ID NO: 715947 - protein, 15 aa, Homo sapiens
  CDR3 for alpha chain variable domain of TCR clone 357974 (TRAV12-2, TRAJ57)
CAVSRGQGGSENLVF

SEQ ID NO: 715948 - protein, 14 aa, Homo sapiens
  CDR3 for beta chain variable domain of TCR clone 357974 (TRBV20-1, TRBJ2-1)
CSAHPGLPYNEQFF

SEQ ID NO: 715949 - protein, 14 aa, Homo sapiens
  CDR3 for alpha chain variable domain of TCR clone 357975 (TRAV30, TRAJ26)
CGTEIVSYGQDFVF

SEQ ID NO: 715950 - protein, 16 aa, Homo sapiens
  CDR3 for beta chain variable domain of TCR clone 357975 (TRBV9, TRBJ2-2)
CASSAMGKGNTGELFF

SEQ ID NO: 715951 - protein, 15 aa, Homo sapiens
  CDR3 for alpha chain variable domain of TCR clone 357976 (TRAV13-1, TRAJ10)
CAATILTGGGNKLTL

SEQ ID NO: 715952 - protein, 14 aa, Homo sapiens
  CDR3 for beta chain variable domain of TCR clone 357976 (TRBV2, TRBJ1-5)
CASSGTGFNQPQHF

SEQ ID NO: 715953 - protein, 14 aa, Homo sapiens
  CDR3 for alpha chain variable domain of TCR clone 357977 (TRAV13-2, TRAJ4)
CAEKGPKGYNKLIF

SEQ ID NO: 715954 - protein, 13 aa, Homo sapiens
  CDR3 for beta chain variable domain of TCR clone 357977 (TRBV18, TRBJ2-5)
CASSPPGKEQQYF

SEQ ID NO: 715955 - protein, 15 aa, Homo sapiens
  CDR3 for alpha chain variable domain of TCR clone 357978 (TRAV2, TRAJ9)
CAVEDRGTGGSKTIF

SEQ ID NO: 715956 - protein, 16 aa, Homo sapiens
  CDR3 for beta chain variable domain of TCR clone 357978 (TRBV24-1, TRBJ2-3)
CAASDPGTGATDTQYF

SEQ ID NO: 715957 - protein, 14 aa, Homo sapiens
  CDR3 for alpha chain variable domain of TCR clone 357979 (TRAV1-2, TRAJ16)
CAVNRFSDVQKLLF

SEQ ID NO: 715958 - protein, 15 aa, Homo sapiens
  CDR3 for beta chain variable domain of TCR clone 357979 (TRBV7-9, TRBJ2-7)
CASSPGGGLTYEQYF

SEQ ID NO: 715959 - protein, 15 aa, Homo sapiens
  CDR3 for alpha chain variable domain of TCR clone 357980 (TRAV8-3, TRAJ27)
CAVGPSKTNAGKSTF

SEQ ID NO: 715960 - protein, 15 aa, Homo sapiens
  CDR3 for beta chain variable domain of TCR clone 357980 (TRBV18, TRBJ2-1)
CASSPPSASYNEQFF

SEQ ID NO: 715961 - protein, 17 aa, Homo sapiens
  CDR3 for alpha chain variable domain of TCR clone 357981 (TRAV17, TRAJ28)
CATDPRRGGAGRYQLTF

SEQ ID NO: 715962 - protein, 16 aa, Homo sapiens
  CDR3 for beta chain variable domain of TCR clone 357981 (TRBV25-1, TRBJ1-1)
CAGSGDRDRGRIEAFF

SEQ ID NO: 715963 - protein, 13 aa, Homo sapiens
  CDR3 for alpha chain variable domain of TCR clone 357982 (TRAV27, TRAJ45)
CRSSGGGADGLTF

SEQ ID NO: 715964 - protein, 18 aa, Homo sapiens
  CDR3 for beta chain variable domain of TCR clone 357982 (TRBV6-5, TRBJ2-1)
CASSYSSRRAGVYNEQFF

SEQ ID NO: 715965 - protein, 14 aa, Homo sapiens
  CDR3 for alpha chain variable domain of TCR clone 357983 (TRAV12-2, TRAJ13)
FAVKKTGGYQKVTF

SEQ ID NO: 715966 - protein, 15 aa, Homo sapiens
  CDR3 for beta chain variable domain of TCR clone 357983 (TRBV27, TRBJ1-6)
CASSFDRGLGSPLHF

SEQ ID NO: 715967 - protein, 15 aa, Homo sapiens
  CDR3 for alpha chain variable domain of TCR clone 357984 (TRAV4, TRAJ36)
CLVGDRQTGANNLFF

SEQ ID NO: 715968 - protein, 16 aa, Homo sapiens
  CDR3 for beta chain variable domain of TCR clone 357984 (TRBV29-1, TRBJ2-7)
CSVEDAEDGTAYEQYF

SEQ ID NO: 715969 - protein, 14 aa, Homo sapiens
  CDR3 for alpha chain variable domain of TCR clone 357985 (TRAV17, TRAJ57)
CATDPQGGSEKLVF

SEQ ID NO: 715970 - protein, 12 aa, Homo sapiens
  CDR3 for beta chain variable domain of TCR clone 357985 (TRBV11-2, TRBJ2-5)
CASSLGQETQYF

SEQ ID NO: 715971 - protein, 14 aa, Homo sapiens
  CDR3 for alpha chain variable domain of TCR clone 357986 (TRAV13-2, TRAJ4)
CAAGFSGCYNKLIF

SEQ ID NO: 715972 - protein, 12 aa, Homo sapiens
  CDR3 for beta chain variable domain of TCR clone 357986 (TRBV11-2, TRBJ2-1)
CASSPGNNEQFF

SEQ ID NO: 715973 - protein, 14 aa, Homo sapiens
  CDR3 for alpha chain variable domain of TCR clone 357987 (TRAV17, TRAJ32)
CATDPGGVANKLIF

SEQ ID NO: 715974 - protein, 14 aa, Homo sapiens
  CDR3 for beta chain variable domain of TCR clone 357987 (TRBV2, TRBJ1-5)
CASSENRGGQPQHF

SEQ ID NO: 715975 - protein, 17 aa, Homo sapiens
  CDR3 for alpha chain variable domain of TCR clone 357988 (TRAV3, TRAJ6)
CAVRDGPRARGSYISTF

SEQ ID NO: 715976 - protein, 14 aa, Homo sapiens
  CDR3 for beta chain variable domain of TCR clone 357988 (TRBV7-2, TRBJ2-7)
CASSPKTSFYEQYF

SEQ ID NO: 715977 - protein, 15 aa, Homo sapiens
  CDR3 for alpha chain variable domain of TCR clone 357989 (TRAV2, TRAJ9)
CAVEDRGTGGFKTIF

SEQ ID NO: 715978 - protein, 14 aa, Homo sapiens
  CDR3 for beta chain variable domain of TCR clone 357989 (TRBV5-1, TRBJ2-7)
CASSFRDTGSVQYF

SEQ ID NO: 715979 - protein, 20 aa, Homo sapiens
  CDR3 for alpha chain variable domain of TCR clone 357990 (TRAV12-1, TRAJ42)
SPVIQPPTSVKGESQGNLIF

SEQ ID NO: 715980 - protein, 18 aa, Homo sapiens
  CDR3 for beta chain variable domain of TCR clone 357990 (TRBV11-2, TRBJ2-3)
CASSLGGASRGAPNTQYF

SEQ ID NO: 715981 - protein, 15 aa, Homo sapiens
  CDR3 for alpha chain variable domain of TCR clone 357991 (TRAV8-3, TRAJ45)
CSSSCSGGGADGLTF

SEQ ID NO: 715982 - protein, 13 aa, Homo sapiens
  CDR3 for beta chain variable domain of TCR clone 357991 (TRBV10-3, TRBJ2-7)
CASKLAVNYEQYF

SEQ ID NO: 715983 - protein, 14 aa, Homo sapiens
  CDR3 for alpha chain variable domain of TCR clone 357992 (TRAV8-3, TRAJ16)
CAVDRFSDGQKLLF

SEQ ID NO: 715984 - protein, 15 aa, Homo sapiens
  CDR3 for beta chain variable domain of TCR clone 357992 (TRBV7-6, TRBJ2-1)
CASSPGQGPYNEQVF

SEQ ID NO: 715985 - protein, 16 aa, Homo sapiens
  CDR3 for alpha chain variable domain of TCR clone 357993 (TRAV30, TRAJ24)
CGTEIVDADSWGKFQF

SEQ ID NO: 715986 - protein, 18 aa, Homo sapiens
  CDR3 for beta chain variable domain of TCR clone 357993 (TRBV28, TRBJ2-5)
CASSFPNFGTGGGETQYF

SEQ ID NO: 715987 - protein, 14 aa, Homo sapiens
  CDR3 for alpha chain variable domain of TCR clone 357994 (TRAV8-4, TRAJ9)
GAVRINTGGFKTIF

SEQ ID NO: 715988 - protein, 14 aa, Homo sapiens
  CDR3 for beta chain variable domain of TCR clone 357994 (TRBV5-1, TRBJ1-1)
CASSLQGASTEAFF

SEQ ID NO: 715989 - protein, 12 aa, Homo sapiens
  CDR3 for alpha chain variable domain of TCR clone 357995 (TRAV12-3, TRAJ17)
CAMTLTGNKLTF

SEQ ID NO: 715990 - protein, 19 aa, Homo sapiens
  CDR3 for beta chain variable domain of TCR clone 357995 (TRBV4-2, TRBJ2-5)
CASSPIKTGPGAKQETQYF

SEQ ID NO: 715991 - protein, 15 aa, Homo sapiens
  CDR3 for alpha chain variable domain of TCR clone 357996 (TRAV25, TRAJ53)
CPTSKRGGSNYKLTF

SEQ ID NO: 715992 - protein, 14 aa, Homo sapiens
  CDR3 for beta chain variable domain of TCR clone 357996 (TRBV11-2, TRBJ2-3)
CASSRLARTDTQYF

SEQ ID NO: 715993 - protein, 14 aa, Homo sapiens
  CDR3 for alpha chain variable domain of TCR clone 357997 (TRAV21, TRAJ52)
CGRAGGTSYGKLTF

SEQ ID NO: 715994 - protein, 14 aa, Homo sapiens
  CDR3 for beta chain variable domain of TCR clone 357997 (TRBV19, TRBJ1-2)
CASSVLGYNYAYTF

SEQ ID NO: 715995 - protein, 15 aa, Homo sapiens
  CDR3 for alpha chain variable domain of TCR clone 357998 (TRAV2, TRAJ32)
CAVANYGGATNRLIF

SEQ ID NO: 715996 - protein, 15 aa, Homo sapiens
  CDR3 for beta chain variable domain of TCR clone 357998 (TRBV7-7, TRBJ2-5)
CASSQLERAEETQYF

SEQ ID NO: 715997 - protein, 12 aa, Homo sapiens
  CDR3 for alpha chain variable domain of TCR clone 357999 (TRAV8-3, TRAJ26)
CAGDNYGQNFVF

SEQ ID NO: 715998 - protein, 11 aa, Homo sapiens
  CDR3 for beta chain variable domain of TCR clone 357999 (TRBV19, TRBJ1-1)
CASSIGSEAFV

SEQ ID NO: 715999 - protein, 14 aa, Homo sapiens
  CDR3 for alpha chain variable domain of TCR clone 358000 (TRAV12-1, TRAJ42)
CVVIYGGSQGNLIF

SEQ ID NO: 716000 - protein, 17 aa, Homo sapiens
  CDR3 for beta chain variable domain of TCR clone 358000 (TRBV3-1, TRBJ2-6)
CASSASTGPAGANDLTF

SEQ ID NO: 716001 - protein, 12 aa, Homo sapiens
  CDR3 for alpha chain variable domain of TCR clone 358001 (TRAV38-2/DV8, TRAJ43)
CAYTINNNDMRF

SEQ ID NO: 716002 - protein, 15 aa, Homo sapiens
  CDR3 for beta chain variable domain of TCR clone 358001 (TRBV6-1, TRBJ1-4)
YASSLLDRANEKLFF

SEQ ID NO: 716003 - protein, 16 aa, Homo sapiens
  CDR3 for alpha chain variable domain of TCR clone 358002 (TRAV30, TRAJ24)
CGTEIVDADSWGKFQV

SEQ ID NO: 716004 - protein, 17 aa, Homo sapiens
  CDR3 for beta chain variable domain of TCR clone 358002 (TRBV25-1, TRBJ2-1)
CASSAYGQGRGVYEQFF

SEQ ID NO: 716005 - protein, 13 aa, Homo sapiens
  CDR3 for alpha chain variable domain of TCR clone 358003 (TRAV26-1, TRAJ48)
CIVRVVGDEKLTF

SEQ ID NO: 716006 - protein, 18 aa, Homo sapiens
  CDR3 for beta chain variable domain of TCR clone 358003 (TRBV11-2, TRBJ2-3)
CASSLGGASRGAPNTQYF

SEQ ID NO: 716007 - protein, 14 aa, Homo sapiens
  CDR3 for alpha chain variable domain of TCR clone 358004 (TRAV12-3, TRAJ29)
CAMIVLSGNTPLVF

SEQ ID NO: 716008 - protein, 16 aa, Homo sapiens
  CDR3 for beta chain variable domain of TCR clone 358004 (TRBV28, TRBJ2-7)
CASSSGTSGRGYEQYF

SEQ ID NO: 716009 - protein, 12 aa, Homo sapiens
  CDR3 for alpha chain variable domain of TCR clone 358005 (TRAV21, TRAJ31)
CAVRPARGRLMF

SEQ ID NO: 716010 - protein, 14 aa, Homo sapiens
  CDR3 for beta chain variable domain of TCR clone 358005 (TRBV28, TRBJ2-7)
CASSLLRISYEQYF

SEQ ID NO: 716011 - protein, 15 aa, Homo sapiens
  CDR3 for alpha chain variable domain of TCR clone 358006 (TRAV12-3, TRAJ27)
CAMRAYNTNAGKSTF

SEQ ID NO: 716012 - protein, 13 aa, Homo sapiens
  CDR3 for beta chain variable domain of TCR clone 358006 (TRBV7-9, TRBJ2-7)
CASSFAGAYEQYF

SEQ ID NO: 716013 - protein, 12 aa, Homo sapiens
  CDR3 for alpha chain variable domain of TCR clone 358007 (TRAV29/DV5, TRAJ49)
CAATDTGNQFYF

SEQ ID NO: 716014 - protein, 19 aa, Homo sapiens
  CDR3 for beta chain variable domain of TCR clone 358007 (TRBV25-1, TRBJ2-2)
CATLVYRVDRGRKTGELFF

SEQ ID NO: 716015 - protein, 14 aa, Homo sapiens
  CDR3 for alpha chain variable domain of TCR clone 358008 (TRAV12-2, TRAJ13)
CAVKKTGGYQKVTF

SEQ ID NO: 716016 - protein, 14 aa, Homo sapiens
  CDR3 for beta chain variable domain of TCR clone 358008 (TRBV7-8, TRBJ2-3)
RASSLEAGTDTQYF

SEQ ID NO: 716017 - protein, 18 aa, Homo sapiens
  CDR3 for alpha chain variable domain of TCR clone 358009 (TRAV21, TRAJ52)
CAVRPSPAGGTSCGKLTF

SEQ ID NO: 716018 - protein, 14 aa, Homo sapiens
  CDR3 for beta chain variable domain of TCR clone 358009 (TRBV7-2, TRBJ2-7)
CASSPKTSFYEQYF

SEQ ID NO: 716019 - protein, 14 aa, Homo sapiens
  CDR3 for alpha chain variable domain of TCR clone 358010 (TRAV38-1, TRAJ35)
GAFLTIGFGNVLHC

SEQ ID NO: 716020 - protein, 17 aa, Homo sapiens
  CDR3 for beta chain variable domain of TCR clone 358010 (TRBV28, TRBJ1-1)
CASSGDLRTESNTEAFF

SEQ ID NO: 716021 - protein, 14 aa, Homo sapiens
  CDR3 for alpha chain variable domain of TCR clone 358011 (TRAV12-3, TRAJ10)
SHLPLTGGGNKLTF

SEQ ID NO: 716022 - protein, 15 aa, Homo sapiens
  CDR3 for beta chain variable domain of TCR clone 358011 (TRBV7-9, TRBJ1-4)
CASRRTGGFNEKLFF

SEQ ID NO: 716023 - protein, 15 aa, Homo sapiens
  CDR3 for alpha chain variable domain of TCR clone 358012 (TRAV12-1, TRAJ44)
CVADLPTGTASKLTF

SEQ ID NO: 716024 - protein, 13 aa, Homo sapiens
  CDR3 for beta chain variable domain of TCR clone 358012 (TRBV6-5, TRBJ2-1)
CASSPQGGETQFF

SEQ ID NO: 716025 - protein, 14 aa, Homo sapiens
  CDR3 for alpha chain variable domain of TCR clone 358013 (TRAV21, TRAJ38)
CAVMGACNNRKLIW

SEQ ID NO: 716026 - protein, 13 aa, Homo sapiens
  CDR3 for beta chain variable domain of TCR clone 358013 (TRBV7-3, TRBJ2-5)
CASSIGFFETQYF

SEQ ID NO: 716027 - protein, 17 aa, Homo sapiens
  CDR3 for alpha chain variable domain of TCR clone 358014 (TRAV3, TRAJ6)
CAVRDGPRAGGSYIPTF

SEQ ID NO: 716028 - protein, 14 aa, Homo sapiens
  CDR3 for beta chain variable domain of TCR clone 358014 (TRBV11-1, TRBJ1-1)
CASSLPRGGTEAFF

SEQ ID NO: 716029 - protein, 18 aa, Homo sapiens
  CDR3 for alpha chain variable domain of TCR clone 358015 (TRAV21, TRAJ13)
CAVPRSFWGLPESYLLNW

SEQ ID NO: 716030 - protein, 13 aa, Homo sapiens
  CDR3 for beta chain variable domain of TCR clone 358015 (TRBV7-9, TRBJ1-2)
CASSLKQNYGYTF

SEQ ID NO: 716031 - protein, 16 aa, Homo sapiens
  CDR3 for alpha chain variable domain of TCR clone 358016 (TRAV3, TRAJ10)
CAVRDMRAGGGNKLTL

SEQ ID NO: 716032 - protein, 15 aa, Homo sapiens
  CDR3 for beta chain variable domain of TCR clone 358016 (TRBV11-2, TRBJ1-6)
CACTGFGTAVSPLHY

SEQ ID NO: 716033 - protein, 14 aa, Homo sapiens
  CDR3 for alpha chain variable domain of TCR clone 358017 (TRAV1-2, TRAJ16)
CAVNRFSDGQKLLF

SEQ ID NO: 716034 - protein, 14 aa, Homo sapiens
  CDR3 for beta chain variable domain of TCR clone 358017 (TRBV2, TRBJ1-1)
CASRDTIRNTEAFF

SEQ ID NO: 716035 - protein, 15 aa, Homo sapiens
  CDR3 for alpha chain variable domain of TCR clone 358018 (TRAV17, TRAJ48)
CATDETNFGNEKLTF

SEQ ID NO: 716036 - protein, 13 aa, Homo sapiens
  CDR3 for beta chain variable domain of TCR clone 358018 (TRBV12-4, TRBJ1-5)
CASSPDGAQPQHF

SEQ ID NO: 716037 - protein, 14 aa, Homo sapiens
  CDR3 for alpha chain variable domain of TCR clone 358019 (TRAV1-2, TRAJ16)
CAVNRFSDGQKLLL

SEQ ID NO: 716038 - protein, 20 aa, Homo sapiens
  CDR3 for beta chain variable domain of TCR clone 358019 (TRBV7-8, TRBJ2-2)
CASSHLFPGPTIHITGELFF

SEQ ID NO: 716039 - protein, 16 aa, Homo sapiens
  CDR3 for alpha chain variable domain of TCR clone 358020 (TRAV21, TRAJ45)
CAVSWGSGGGADGLTF

SEQ ID NO: 716040 - protein, 14 aa, Homo sapiens
  CDR3 for beta chain variable domain of TCR clone 358020 (TRBV4-2, TRBJ1-2)
CASSPGGSNYGHTF

SEQ ID NO: 716041 - protein, 14 aa, Homo sapiens
  CDR3 for alpha chain variable domain of TCR clone 358021 (TRAV38-1, TRAJ45)
CAYYSGGGADGLTF

SEQ ID NO: 716042 - protein, 14 aa, Homo sapiens
  CDR3 for beta chain variable domain of TCR clone 358021 (TRBV11-2, TRBJ2-5)
CASSRTGGIETQYC

SEQ ID NO: 716043 - protein, 11 aa, Homo sapiens
  CDR3 for alpha chain variable domain of TCR clone 358022 (TRAV12-3, TRAJ43)
CAMSVSNDMRF

SEQ ID NO: 716044 - protein, 17 aa, Homo sapiens
  CDR3 for beta chain variable domain of TCR clone 358022 (TRBV7-8, TRBJ2-6)
CTSSAGTGGAGANVLTF

SEQ ID NO: 716045 - protein, 15 aa, Homo sapiens
  CDR3 for alpha chain variable domain of TCR clone 358023 (TRAV17, TRAJ22)
CATVAPSGSARQLTF

SEQ ID NO: 716046 - protein, 15 aa, Homo sapiens
  CDR3 for beta chain variable domain of TCR clone 358023 (TRBV11-3, TRBJ2-3)
CASLKDGREGDMQYF

SEQ ID NO: 716047 - protein, 14 aa, Homo sapiens
  CDR3 for alpha chain variable domain of TCR clone 358024 (TRAV21, TRAJ52)
CGRAGGTSYGKLTF

SEQ ID NO: 716048 - protein, 14 aa, Homo sapiens
  CDR3 for beta chain variable domain of TCR clone 358024 (TRBV19, TRBJ1-2)
CASSVLGYNYGYTC

SEQ ID NO: 716049 - protein, 11 aa, Homo sapiens
  CDR3 for alpha chain variable domain of TCR clone 358025 (TRAV21, TRAJ4)
HVSGCYNKLIF

SEQ ID NO: 716050 - protein, 13 aa, Homo sapiens
  CDR3 for beta chain variable domain of TCR clone 358025 (TRBV7-3, TRBJ2-5)
CASSLTAGETQYF

SEQ ID NO: 716051 - protein, 15 aa, Homo sapiens
  CDR3 for alpha chain variable domain of TCR clone 358026 (TRAV21, TRAJ53)
CATLNSGGSNSKLTL

SEQ ID NO: 716052 - protein, 16 aa, Homo sapiens
  CDR3 for beta chain variable domain of TCR clone 358026 (TRBV9, TRBJ2-1)
CASSVGGGGNYNEQSF

SEQ ID NO: 716053 - protein, 13 aa, Homo sapiens
  CDR3 for alpha chain variable domain of TCR clone 358027 (TRAV2, TRAJ29)
CAAGNSGDTPLVF

SEQ ID NO: 716054 - protein, 16 aa, Homo sapiens
  CDR3 for beta chain variable domain of TCR clone 358027 (TRBV7-9, TRBJ1-2)
CASSPGGGAINYGYTF

SEQ ID NO: 716055 - protein, 14 aa, Homo sapiens
  CDR3 for alpha chain variable domain of TCR clone 358028 (TRAV12-2, TRAJ13)
CAVKQTGGYQKVTF

SEQ ID NO: 716056 - protein, 19 aa, Homo sapiens
  CDR3 for beta chain variable domain of TCR clone 358028 (TRBV25-1, TRBJ2-2)
CAILVYRVDRGRKTGELFF

SEQ ID NO: 716057 - protein, 13 aa, Homo sapiens
  CDR3 for alpha chain variable domain of TCR clone 358029 (TRAV13-1, TRAJ6)
CARGSGGSYIPTF

SEQ ID NO: 716058 - protein, 15 aa, Homo sapiens
  CDR3 for beta chain variable domain of TCR clone 358029 (TRBV2, TRBJ2-1)
CASSELAGSYNDQFF

SEQ ID NO: 716059 - protein, 14 aa, Homo sapiens
  CDR3 for alpha chain variable domain of TCR clone 358030 (TRAV13-1, TRAJ21)
CAARKASTNFTLDL

SEQ ID NO: 716060 - protein, 20 aa, Homo sapiens
  CDR3 for beta chain variable domain of TCR clone 358030 (TRBV7-8, TRBJ2-2)
CASSHLFPGPTIHITGELFF

SEQ ID NO: 716061 - protein, 15 aa, Homo sapiens
  CDR3 for alpha chain variable domain of TCR clone 358031 (TRAV3, TRAJ20)
CAVRDIKLSDYKLSF

SEQ ID NO: 716062 - protein, 16 aa, Homo sapiens
  CDR3 for beta chain variable domain of TCR clone 358031 (TRBV20-1, TRBJ1-4)
CSSPGQGLLTNEKLFF

SEQ ID NO: 716063 - protein, 11 aa, Homo sapiens
  CDR3 for alpha chain variable domain of TCR clone 358032 (TRAV12-1, TRAJ30)
CVVNGQDKIIF

SEQ ID NO: 716064 - protein, 19 aa, Homo sapiens
  CDR3 for beta chain variable domain of TCR clone 358032 (TRBV7-2, TRBJ2-3)
CASSFLSRNWGGGTDTQYF

SEQ ID NO: 716065 - protein, 16 aa, Homo sapiens
  CDR3 for alpha chain variable domain of TCR clone 358033 (TRAV30, TRAJ24)
CGTESVDADSWGKFQC

SEQ ID NO: 716066 - protein, 14 aa, Homo sapiens
  CDR3 for beta chain variable domain of TCR clone 358033 (TRBV12-5, TRBJ2-5)
CASGSRTHQETQYF

SEQ ID NO: 716067 - protein, 14 aa, Homo sapiens
  CDR3 for alpha chain variable domain of TCR clone 358034 (TRAV1-2, TRAJ8)
CAVREDTGFQKLVF

SEQ ID NO: 716068 - protein, 14 aa, Homo sapiens
  CDR3 for beta chain variable domain of TCR clone 358034 (TRBV4-1, TRBJ2-2)
CASSHAVNTGELFF

SEQ ID NO: 716069 - protein, 14 aa, Homo sapiens
  CDR3 for alpha chain variable domain of TCR clone 358035 (TRAV1-2, TRAJ8)
CAVREDTGFQKLVF

SEQ ID NO: 716070 - protein, 15 aa, Homo sapiens
  CDR3 for beta chain variable domain of TCR clone 358035 (TRBV20-1, TRBJ2-7)
CSARDRVSGMDEQCF

SEQ ID NO: 716071 - protein, 12 aa, Homo sapiens
  CDR3 for alpha chain variable domain of TCR clone 358036 (TRAV21, TRAJ10)
WTARGGGNKLTF

SEQ ID NO: 716072 - protein, 12 aa, Homo sapiens
  CDR3 for beta chain variable domain of TCR clone 358036 (TRBV11-2, TRBJ2-2)
CASSLGGGELFF

SEQ ID NO: 716073 - protein, 18 aa, Homo sapiens
  CDR3 for alpha chain variable domain of TCR clone 358037 (TRAV21, TRAJ52)
CAVRPSPAGGTSYGKLTL

SEQ ID NO: 716074 - protein, 17 aa, Homo sapiens
  CDR3 for beta chain variable domain of TCR clone 358037 (TRBV13, TRBJ2-3)
CASSPSRVAGGRNTQYF

SEQ ID NO: 716075 - protein, 18 aa, Homo sapiens
  CDR3 for alpha chain variable domain of TCR clone 358038 (TRAV13-1, TRAJ52)
CAASKRSAGGTSYGKLTF

SEQ ID NO: 716076 - protein, 18 aa, Homo sapiens
  CDR3 for beta chain variable domain of TCR clone 358038 (TRBV11-2, TRBJ2-6)
CASSLNPFLGTGANVLTF

SEQ ID NO: 716077 - protein, 16 aa, Homo sapiens
  CDR3 for alpha chain variable domain of TCR clone 358039 (TRAV3, TRAJ21)
CAVRDIERGNFNKFYF

SEQ ID NO: 716078 - protein, 16 aa, Homo sapiens
  CDR3 for beta chain variable domain of TCR clone 358039 (TRBV11-2, TRBJ1-1)
CASSLRQGGEHSNSFF

SEQ ID NO: 716079 - protein, 14 aa, Homo sapiens
  CDR3 for alpha chain variable domain of TCR clone 358040 (TRAV35, TRAJ50)
CAGHRKTSYDKVIF

SEQ ID NO: 716080 - protein, 13 aa, Homo sapiens
  CDR3 for beta chain variable domain of TCR clone 358040 (TRBV7-7, TRBJ2-3)
CASSLSRADTPVF

SEQ ID NO: 716081 - protein, 15 aa, Homo sapiens
  CDR3 for alpha chain variable domain of TCR clone 358041 (TRAV12-2, TRAJ53)
CAVNGGGGRNYKLTF

SEQ ID NO: 716082 - protein, 13 aa, Homo sapiens
  CDR3 for beta chain variable domain of TCR clone 358041 (TRBV3-1, TRBJ1-1)
CASSLGVITEAFF

SEQ ID NO: 716083 - protein, 15 aa, Homo sapiens
  CDR3 for alpha chain variable domain of TCR clone 358042 (TRAV27, TRAJ38)
CAARRNAGNNRKLIW

SEQ ID NO: 716084 - protein, 16 aa, Homo sapiens
  CDR3 for beta chain variable domain of TCR clone 358042 (TRBV4-1, TRBJ2-7)
CASSQEWTSGPLEQYL

SEQ ID NO: 716085 - protein, 10 aa, Homo sapiens
  CDR3 for alpha chain variable domain of TCR clone 358043 (TRAV12-3, TRAJ30)
CALPEDKIIF

SEQ ID NO: 716086 - protein, 14 aa, Homo sapiens
  CDR3 for beta chain variable domain of TCR clone 358043 (TRBV7-3, TRBJ1-1)
CASSLGTGYTEAFF

SEQ ID NO: 716087 - protein, 15 aa, Homo sapiens
  CDR3 for alpha chain variable domain of TCR clone 358044 (TRAV26-1, TRAJ22)
CIVRVSFWFGKATDL

SEQ ID NO: 716088 - protein, 16 aa, Homo sapiens
  CDR3 for beta chain variable domain of TCR clone 358044 (TRBV24-1, TRBJ2-3)
CATSDPGTGATDTQYF

SEQ ID NO: 716089 - protein, 11 aa, Homo sapiens
  CDR3 for alpha chain variable domain of TCR clone 358045 (TRAV4, TRAJ23)
CLVAPGGKLIF

SEQ ID NO: 716090 - protein, 14 aa, Homo sapiens
  CDR3 for beta chain variable domain of TCR clone 358045 (TRBV7-2, TRBJ2-5)
CASSPRGSSETQYF

SEQ ID NO: 716091 - protein, 16 aa, Homo sapiens
  CDR3 for alpha chain variable domain of TCR clone 358046 (TRAV20, TRAJ22)
CAVQASSSGSARQLTF

SEQ ID NO: 716092 - protein, 20 aa, Homo sapiens
  CDR3 for beta chain variable domain of TCR clone 358046 (TRBV28, TRBJ2-1)
CASTPIGRSPGLAGGNEQFF

SEQ ID NO: 716093 - protein, 21 aa, Homo sapiens
  CDR3 for alpha chain variable domain of TCR clone 358047 (TRAV1-2, TRAJ37)
CLLPLCCERFHGSGNTRKLIF

SEQ ID NO: 716094 - protein, 14 aa, Homo sapiens
  CDR3 for beta chain variable domain of TCR clone 358047 (TRBV2, TRBJ2-5)
CASSEVLAQETQYF

SEQ ID NO: 716095 - protein, 15 aa, Homo sapiens
  CDR3 for alpha chain variable domain of TCR clone 358048 (TRAV25, TRAJ52)
CAGRPGGTSYGKLTF

SEQ ID NO: 716096 - protein, 14 aa, Homo sapiens
  CDR3 for beta chain variable domain of TCR clone 358048 (TRBV15, TRBJ2-5)
CATSGDRGQETQYF

SEQ ID NO: 716097 - protein, 14 aa, Homo sapiens
  CDR3 for alpha chain variable domain of TCR clone 358049 (TRAV3, TRAJ9)
CAVRLNTGGFKTIF

SEQ ID NO: 716098 - protein, 15 aa, Homo sapiens
  CDR3 for beta chain variable domain of TCR clone 358049 (TRBV7-2, TRBJ2-1)
CASSLASVRVNEQFF

SEQ ID NO: 716099 - protein, 20 aa, Homo sapiens
  CDR3 for alpha chain variable domain of TCR clone 358050 (TRAV8-3, )
CAGDNYEIQNPDPAVYQLRD

SEQ ID NO: 716100 - protein, 16 aa, Homo sapiens
  CDR3 for beta chain variable domain of TCR clone 358050 (TRBV7-3, TRBJ2-2)
CASSLKRGTLSGELFF

SEQ ID NO: 716101 - protein, 13 aa, Homo sapiens
  CDR3 for alpha chain variable domain of TCR clone 358051 (TRAV26-1, TRAJ34)
CTVRPWITDKLIF

SEQ ID NO: 716102 - protein, 14 aa, Homo sapiens
  CDR3 for beta chain variable domain of TCR clone 358051 (TRBV7-2, TRBJ2-7)
CASRSQGAAYEQYF

SEQ ID NO: 716103 - protein, 13 aa, Homo sapiens
  CDR3 for alpha chain variable domain of TCR clone 358052 (TRAV8-3, TRAJ43)
CAVGIYNNNDMRF

SEQ ID NO: 716104 - protein, 16 aa, Homo sapiens
  CDR3 for beta chain variable domain of TCR clone 358052 (TRBV7-2, TRBJ2-5)
CTSSLVLWTKQETQYF

SEQ ID NO: 716105 - protein, 13 aa, Homo sapiens
  CDR3 for alpha chain variable domain of TCR clone 358053 (TRAV3, TRAJ20)
CAVRDTGDNKLSF

SEQ ID NO: 716106 - protein, 15 aa, Homo sapiens
  CDR3 for beta chain variable domain of TCR clone 358053 (TRBV6-1, TRBJ2-7)
CASSEGGGVSYEQYF

SEQ ID NO: 716107 - protein, 14 aa, Homo sapiens
  CDR3 for alpha chain variable domain of TCR clone 358054 (TRAV26-1, TRAJ34)
CIVRVAYNTDKLIF

SEQ ID NO: 716108 - protein, 15 aa, Homo sapiens
  CDR3 for beta chain variable domain of TCR clone 358054 (TRBV20-1, TRBJ2-7)
CSARVPGAYFYEQYF

SEQ ID NO: 716109 - protein, 15 aa, Homo sapiens
  CDR3 for alpha chain variable domain of TCR clone 358055 (TRAV12-3, TRAJ6)
CAMSATTGGSYIPTF

SEQ ID NO: 716110 - protein, 18 aa, Homo sapiens
  CDR3 for beta chain variable domain of TCR clone 358055 (TRBV7-3, TRBJ2-1)
CASSLTLASGRAMVSSSS

SEQ ID NO: 716111 - protein, 10 aa, Homo sapiens
  CDR3 for alpha chain variable domain of TCR clone 358056 (TRAV23/DV6, TRAJ57)
CAASSTLSQG

SEQ ID NO: 716112 - protein, 13 aa, Homo sapiens
  CDR3 for beta chain variable domain of TCR clone 358056 (TRBV15, TRBJ1-6)
CATSGGLNSPLRF

SEQ ID NO: 716113 - protein, 13 aa, Homo sapiens
  CDR3 for alpha chain variable domain of TCR clone 358057 (TRAV8-1, TRAJ13)
CAVSKGGYQKVTF

SEQ ID NO: 716114 - protein, 13 aa, Homo sapiens
  CDR3 for beta chain variable domain of TCR clone 358057 (TRBV12-5, TRBJ2-3)
CASGDRQSDTQYF

SEQ ID NO: 716115 - protein, 13 aa, Homo sapiens
  CDR3 for alpha chain variable domain of TCR clone 358058 (TRAV3, TRAJ27)
CAVRPLGAGKSTF

SEQ ID NO: 716116 - protein, 16 aa, Homo sapiens
  CDR3 for beta chain variable domain of TCR clone 358058 (TRBV7-2, TRBJ2-5)
CASSPRGRGGGETQYF

SEQ ID NO: 716117 - protein, 16 aa, Homo sapiens
  CDR3 for alpha chain variable domain of TCR clone 358059 (TRAV16, TRAJ57)
CAPYLITQGGSEKLVF

SEQ ID NO: 716118 - protein, 17 aa, Homo sapiens
  CDR3 for beta chain variable domain of TCR clone 358059 (TRBV24-1, TRBJ2-4)
CATSDAEARGVRTIQYF

SEQ ID NO: 716119 - protein, 13 aa, Homo sapiens
  CDR3 for alpha chain variable domain of TCR clone 358060 (TRAV20, TRAJ31)
CAVQAWNNARLMF

SEQ ID NO: 716120 - protein, 13 aa, Homo sapiens
  CDR3 for beta chain variable domain of TCR clone 358060 (TRBV12-4, TRBJ1-2)
CAGSLRQGKGYTF

SEQ ID NO: 716121 - protein, 22 aa, Homo sapiens
  CDR3 for alpha chain variable domain of TCR clone 358061 (TRAV8-2, TRAJ45)
HLTKPSAHMSDAAEYSADGLTF

SEQ ID NO: 716122 - protein, 16 aa, Homo sapiens
  CDR3 for beta chain variable domain of TCR clone 358061 (TRBV5-7, TRBJ1-4)
CASSPSGGLKTEKLFF

SEQ ID NO: 716123 - protein, 13 aa, Homo sapiens
  CDR3 for alpha chain variable domain of TCR clone 358062 (TRAV3, TRAJ21)
CAVREPDFNKFYF

SEQ ID NO: 716124 - protein, 15 aa, Homo sapiens
  CDR3 for beta chain variable domain of TCR clone 358062 (TRBV9, TRBJ1-6)
CASNVAGTGDSPLHF

SEQ ID NO: 716125 - protein, 11 aa, Homo sapiens
  CDR3 for alpha chain variable domain of TCR clone 358063 (TRAV2, TRAJ13)
CASGGYQKVTF

SEQ ID NO: 716126 - protein, 16 aa, Homo sapiens
  CDR3 for beta chain variable domain of TCR clone 358063 (TRBV6-1, TRBJ2-5)
CASSETLARGAETQYF

SEQ ID NO: 716127 - protein, 16 aa, Homo sapiens
  CDR3 for alpha chain variable domain of TCR clone 358064 (TRAV3, TRAJ3)
CAVRDRAKSSASKIIF

SEQ ID NO: 716128 - protein, 16 aa, Homo sapiens
  CDR3 for beta chain variable domain of TCR clone 358064 (TRBV7-2, TRBJ2-5)
CASSSKWLSGQETQYF

SEQ ID NO: 716129 - protein, 15 aa, Homo sapiens
  CDR3 for alpha chain variable domain of TCR clone 358065 (TRAV21, TRAJ53)
CATLNSGGSNYKLTF

SEQ ID NO: 716130 - protein, 12 aa, Homo sapiens
  CDR3 for beta chain variable domain of TCR clone 358065 (TRBV5-1, TRBJ2-5)
CASSLGLETQYF

SEQ ID NO: 716131 - protein, 16 aa, Homo sapiens
  CDR3 for alpha chain variable domain of TCR clone 358066 (TRAV12-3, TRAJ53)
CAMIPGSGGSNYKLTF

SEQ ID NO: 716132 - protein, 13 aa, Homo sapiens
  CDR3 for beta chain variable domain of TCR clone 358066 (TRBV19, TRBJ1-2)
CASSVPVQDGYTF

SEQ ID NO: 716133 - protein, 11 aa, Homo sapiens
  CDR3 for alpha chain variable domain of TCR clone 358067 (TRAV16, TRAJ31)
CALFNNARLMF

SEQ ID NO: 716134 - protein, 15 aa, Homo sapiens
  CDR3 for beta chain variable domain of TCR clone 358067 (TRBV18, TRBJ1-1)
CASSPRQGENTEACF

SEQ ID NO: 716135 - protein, 11 aa, Homo sapiens
  CDR3 for alpha chain variable domain of TCR clone 358068 (TRAV26-1, TRAJ37)
CIVRFGRKLIF

SEQ ID NO: 716136 - protein, 13 aa, Homo sapiens
  CDR3 for beta chain variable domain of TCR clone 358068 (TRBV7-2, TRBJ2-2)
CASSLAVTGELFF

SEQ ID NO: 716137 - protein, 14 aa, Homo sapiens
  CDR3 for alpha chain variable domain of TCR clone 358069 (TRAV9-2, TRAJ39)
CALYIYNAGNMLTF

SEQ ID NO: 716138 - protein, 15 aa, Homo sapiens
  CDR3 for beta chain variable domain of TCR clone 358069 (TRBV5-1, TRBJ2-1)
CASSPPRAPYNGQFF

SEQ ID NO: 716139 - protein, 13 aa, Homo sapiens
  CDR3 for alpha chain variable domain of TCR clone 358070 (TRAV27, TRAJ3)
ASLRGSSASKIIF

SEQ ID NO: 716140 - protein, 15 aa, Homo sapiens
  CDR3 for beta chain variable domain of TCR clone 358070 (TRBV28, TRBJ2-7)
CASSPGGRGFYEQYF

SEQ ID NO: 716141 - protein, 14 aa, Homo sapiens
  CDR3 for alpha chain variable domain of TCR clone 358071 (TRAV4, TRAJ10)
CLVGDTGGGKKLIF

SEQ ID NO: 716142 - protein, 13 aa, Homo sapiens
  CDR3 for beta chain variable domain of TCR clone 358071 (TRBV10-2, TRBJ2-5)
CASSVGPQETQYF

SEQ ID NO: 716143 - protein, 11 aa, Homo sapiens
  CDR3 for alpha chain variable domain of TCR clone 358072 (TRAV2, TRAJ13)
CASRGYRKVTF

SEQ ID NO: 716144 - protein, 14 aa, Homo sapiens
  CDR3 for beta chain variable domain of TCR clone 358072 (TRBV7-3, TRBJ2-1)
CASSLAGGTNEQFF

SEQ ID NO: 716145 - protein, 15 aa, Homo sapiens
  CDR3 for alpha chain variable domain of TCR clone 358073 (TRAV23/DV6, TRAJ18)
CAARYRGSTLGRLYF

SEQ ID NO: 716146 - protein, 13 aa, Homo sapiens
  CDR3 for beta chain variable domain of TCR clone 358073 (TRBV7-2, TRBJ2-7)
CASSSPSGSGQYF

SEQ ID NO: 716147 - protein, 11 aa, Homo sapiens
  CDR3 for alpha chain variable domain of TCR clone 358074 (TRAV3, TRAJ21)
CAVGNSNKFYF

SEQ ID NO: 716148 - protein, 16 aa, Homo sapiens
  CDR3 for beta chain variable domain of TCR clone 358074 (TRBV19, TRBJ2-1)
CASSKVGPSSYNEQFF

SEQ ID NO: 716149 - protein, 11 aa, Homo sapiens
  CDR3 for alpha chain variable domain of TCR clone 358075 (TRAV35, TRAJ34)
CWARNTDKLIF

SEQ ID NO: 716150 - protein, 13 aa, Homo sapiens
  CDR3 for beta chain variable domain of TCR clone 358075 (TRBV3-1, TRBJ1-1)
CASSPGVITEAFF

SEQ ID NO: 716151 - protein, 15 aa, Homo sapiens
  CDR3 for alpha chain variable domain of TCR clone 358076 (TRAV3, TRAJ3)
CAVRDMSSSASKIIF

SEQ ID NO: 716152 - protein, 13 aa, Homo sapiens
  CDR3 for beta chain variable domain of TCR clone 358076 (TRBV13, TRBJ2-1)
CASILGGRGEQFF

SEQ ID NO: 716153 - protein, 14 aa, Homo sapiens
  CDR3 for alpha chain variable domain of TCR clone 358077 (TRAV27, TRAJ15)
CAGFDNQAGTALIF

SEQ ID NO: 716154 - protein, 11 aa, Homo sapiens
  CDR3 for beta chain variable domain of TCR clone 358077 (TRBV29-1, TRBJ1-1)
CSVEVGTRTFC

SEQ ID NO: 716155 - protein, 16 aa, Homo sapiens
  CDR3 for alpha chain variable domain of TCR clone 358078 (TRAV13-1, TRAJ48)
CAASIFGNFGNEKLTF

SEQ ID NO: 716156 - protein, 12 aa, Homo sapiens
  CDR3 for beta chain variable domain of TCR clone 358078 (TRBV14, TRBJ2-4)
CDSSNLKSIQYF

SEQ ID NO: 716157 - protein, 11 aa, Homo sapiens
  CDR3 for alpha chain variable domain of TCR clone 358079 (TRAV13-1, TRAJ20)
RAASNDYKLSF

SEQ ID NO: 716158 - protein, 15 aa, Homo sapiens
  CDR3 for beta chain variable domain of TCR clone 358079 (TRBV6-3, TRBJ2-7)
CASSSPGTVFYEQYF

SEQ ID NO: 716159 - protein, 19 aa, Homo sapiens
  CDR3 for alpha chain variable domain of TCR clone 358080 (TRAV16, )
CALSGDIQNPDPAVYQLRD

SEQ ID NO: 716160 - protein, 16 aa, Homo sapiens
  CDR3 for beta chain variable domain of TCR clone 358080 (TRBV12-5, TRBJ2-5)
CSSGPRTSGNQETQYF

SEQ ID NO: 716161 - protein, 14 aa, Homo sapiens
  CDR3 for alpha chain variable domain of TCR clone 358081 (TRAV8-6, TRAJ8)
CAVNENTGFQKLVF

SEQ ID NO: 716162 - protein, 14 aa, Homo sapiens
  CDR3 for beta chain variable domain of TCR clone 358081 (TRBV4-1, TRBJ2-2)
CASSQAVNTGELFF

SEQ ID NO: 716163 - protein, 14 aa, Homo sapiens
  CDR3 for alpha chain variable domain of TCR clone 358082 (TRAV38-1, TRAJ29)
CAFTTPSGNTPLVF

SEQ ID NO: 716164 - protein, 13 aa, Homo sapiens
  CDR3 for beta chain variable domain of TCR clone 358082 (TRBV5-5, TRBJ1-2)
CASSFWRGEDYTF

SEQ ID NO: 716165 - protein, 16 aa, Homo sapiens
  CDR3 for alpha chain variable domain of TCR clone 358083 (TRAV30, TRAJ24)
CGTEIVGADSWGKFQF

SEQ ID NO: 716166 - protein, 14 aa, Homo sapiens
  CDR3 for beta chain variable domain of TCR clone 358083 (TRBV12-5, TRBJ2-5)
CASGSRTHQGTQYF

SEQ ID NO: 716167 - protein, 16 aa, Homo sapiens
  CDR3 for alpha chain variable domain of TCR clone 358084 (TRAV3, TRAJ37)
CAVRVRGSGNTGKLIF

SEQ ID NO: 716168 - protein, 16 aa, Homo sapiens
  CDR3 for beta chain variable domain of TCR clone 358084 (TRBV11-2, TRBJ2-7)
RASSPTTGGVSYEQYF

SEQ ID NO: 716169 - protein, 15 aa, Homo sapiens
  CDR3 for alpha chain variable domain of TCR clone 358085 (TRAV8-3, TRAJ28)
CAVAYSGAGRYQLTF

SEQ ID NO: 716170 - protein, 12 aa, Homo sapiens
  CDR3 for beta chain variable domain of TCR clone 358085 (TRBV5-1, TRBJ2-1)
CASIGGYNEQFF

SEQ ID NO: 716171 - protein, 13 aa, Homo sapiens
  CDR3 for alpha chain variable domain of TCR clone 358086 (TRAV1-1, TRAJ13)
CAVNSRGYQKVTF

SEQ ID NO: 716172 - protein, 12 aa, Homo sapiens
  CDR3 for beta chain variable domain of TCR clone 358086 (TRBV28, TRBJ2-1)
CASSVQINEQFF

SEQ ID NO: 716173 - protein, 13 aa, Homo sapiens
  CDR3 for alpha chain variable domain of TCR clone 358087 (TRAV25, TRAJ30)
CAGRVDRDDKIIF

SEQ ID NO: 716174 - protein, 13 aa, Homo sapiens
  CDR3 for beta chain variable domain of TCR clone 358087 (TRBV7-9, TRBJ1-2)
CASSLKQNYGYTF

SEQ ID NO: 716175 - protein, 11 aa, Homo sapiens
  CDR3 for alpha chain variable domain of TCR clone 358088 (TRAV3, TRAJ21)
CAVGNFNKFYF

SEQ ID NO: 716176 - protein, 13 aa, Homo sapiens
  CDR3 for beta chain variable domain of TCR clone 358088 (TRBV9, TRBJ2-7)
CASSVGQGGEQYF

SEQ ID NO: 716177 - protein, 14 aa, Homo sapiens
  CDR3 for alpha chain variable domain of TCR clone 358089 (TRAV12-3, TRAJ37)
CVSESSSNTGKLIF

SEQ ID NO: 716178 - protein, 14 aa, Homo sapiens
  CDR3 for beta chain variable domain of TCR clone 358089 (TRBV20-1, TRBJ1-1)
CSAQTRIGGTEAFF

SEQ ID NO: 716179 - protein, 17 aa, Homo sapiens
  CDR3 for alpha chain variable domain of TCR clone 358090 (TRAV3, TRAJ6)
CAVRDGPRAGGSYIPTF

SEQ ID NO: 716180 - protein, 17 aa, Homo sapiens
  CDR3 for beta chain variable domain of TCR clone 358090 (TRBV7-9, TRBJ2-3)
CASSLEEAGAYPDTQYF

SEQ ID NO: 716181 - protein, 11 aa, Homo sapiens
  CDR3 for alpha chain variable domain of TCR clone 358091 (TRAV21, TRAJ34)
CAVTNTDKLIF

SEQ ID NO: 716182 - protein, 16 aa, Homo sapiens
  CDR3 for beta chain variable domain of TCR clone 358091 (TRBV20-1, TRBJ1-4)
GSAPGQGLLTNEKLFF

SEQ ID NO: 716183 - protein, 13 aa, Homo sapiens
  CDR3 for alpha chain variable domain of TCR clone 358092 (TRAV12-2, TRAJ20)
CAVYPSNDYKLSF

SEQ ID NO: 716184 - protein, 15 aa, Homo sapiens
  CDR3 for beta chain variable domain of TCR clone 358092 (TRBV5-1, TRBJ1-4)
CASSLTADSDEKLFF

SEQ ID NO: 716185 - protein, 16 aa, Homo sapiens
  CDR3 for alpha chain variable domain of TCR clone 358093 (TRAV26-2, TRAJ13)
CILRRRGSGGYQKVTF

SEQ ID NO: 716186 - protein, 17 aa, Homo sapiens
  CDR3 for beta chain variable domain of TCR clone 358093 (TRBV5-1, TRBJ2-5)
CASSPVALGQNQETQYF

SEQ ID NO: 716187 - protein, 15 aa, Homo sapiens
  CDR3 for alpha chain variable domain of TCR clone 358094 (TRAV4, TRAJ27)
CLVGDEGTNAGKSTF

SEQ ID NO: 716188 - protein, 13 aa, Homo sapiens
  CDR3 for beta chain variable domain of TCR clone 358094 (TRBV7-3, TRBJ1-1)
CASSQDWGAEAFF

SEQ ID NO: 716189 - protein, 13 aa, Homo sapiens
  CDR3 for alpha chain variable domain of TCR clone 358095 (TRAV1-2, TRAJ9)
CAVLNTVGFKTIF

SEQ ID NO: 716190 - protein, 13 aa, Homo sapiens
  CDR3 for beta chain variable domain of TCR clone 358095 (TRBV19, TRBJ2-7)
CASRKAGGSEQYF

SEQ ID NO: 716191 - protein, 10 aa, Homo sapiens
  CDR3 for alpha chain variable domain of TCR clone 358096 (TRAV36/DV7, TRAJ56)
CAGPAVELTF

SEQ ID NO: 716192 - protein, 20 aa, Homo sapiens
  CDR3 for beta chain variable domain of TCR clone 358096 (TRBV7-9, TRBJ2-7)
RGTRPCISVPAAWSSYEQYF

SEQ ID NO: 716193 - protein, 14 aa, Homo sapiens
  CDR3 for alpha chain variable domain of TCR clone 358097 (TRAV17, TRAJ54)
CAPDANQGAQKLVF

SEQ ID NO: 716194 - protein, 12 aa, Homo sapiens
  CDR3 for beta chain variable domain of TCR clone 358097 (TRBV6-3, TRBJ2-1)
CASSGSYNEQFF

SEQ ID NO: 716195 - protein, 11 aa, Homo sapiens
  CDR3 for alpha chain variable domain of TCR clone 358098 (TRAV1-2, TRAJ40)
CAVPGTYKYIF

SEQ ID NO: 716196 - protein, 16 aa, Homo sapiens
  CDR3 for beta chain variable domain of TCR clone 358098 (TRBV29-1, TRBJ2-7)
CSVEVVGTSGSYEQYF

SEQ ID NO: 716197 - protein, 17 aa, Homo sapiens
  CDR3 for alpha chain variable domain of TCR clone 358099 (TRAV27, TRAJ26)
CAGARAPLDNYGQNFVF

SEQ ID NO: 716198 - protein, 15 aa, Homo sapiens
  CDR3 for beta chain variable domain of TCR clone 358099 (TRBV11-2, TRBJ2-5)
CASSPRSGRLETQYF

SEQ ID NO: 716199 - protein, 16 aa, Homo sapiens
  CDR3 for alpha chain variable domain of TCR clone 358100 (TRAV21, TRAJ37)
CAVRTAGSSNTGKLIF

SEQ ID NO: 716200 - protein, 16 aa, Homo sapiens
  CDR3 for beta chain variable domain of TCR clone 358100 (TRBV12-5, TRBJ2-5)
CASGPRTSGNQETQYF

SEQ ID NO: 716201 - protein, 18 aa, Homo sapiens
  CDR3 for alpha chain variable domain of TCR clone 358101 (TRAV16, TRAJ45)
CAQVSYPSSGGGADGLTF

SEQ ID NO: 716202 - protein, 12 aa, Homo sapiens
  CDR3 for beta chain variable domain of TCR clone 358101 (TRBV11-3, TRBJ2-4)
CASSAGRVMQYF

SEQ ID NO: 716203 - protein, 11 aa, Homo sapiens
  CDR3 for alpha chain variable domain of TCR clone 358102 (TRAV26-1, TRAJ37)
CIVRVGRKLIF

SEQ ID NO: 716204 - protein, 13 aa, Homo sapiens
  CDR3 for beta chain variable domain of TCR clone 358102 (TRBV28, TRBJ2-3)
CASSLAREDTQYF

SEQ ID NO: 716205 - protein, 13 aa, Homo sapiens
  CDR3 for alpha chain variable domain of TCR clone 358103 (TRAV3, TRAJ21)
CAVREPDFNKFYF

SEQ ID NO: 716206 - protein, 14 aa, Homo sapiens
  CDR3 for beta chain variable domain of TCR clone 358103 (TRBV7-9, TRBJ2-1)
CASSPRDSLYEQFF

SEQ ID NO: 716207 - protein, 12 aa, Homo sapiens
  CDR3 for alpha chain variable domain of TCR clone 358104 (TRAV36/DV7, TRAJ40)
CAVGTGTYKYIF

SEQ ID NO: 716208 - protein, 14 aa, Homo sapiens
  CDR3 for beta chain variable domain of TCR clone 358104 (TRBV19, TRBJ2-3)
CASSIDRGGDTQYF

SEQ ID NO: 716209 - protein, 17 aa, Homo sapiens
  CDR3 for alpha chain variable domain of TCR clone 358105 (TRAV13-1, TRAJ31)
CAPRDRLMFGDGTQLVV

SEQ ID NO: 716210 - protein, 14 aa, Homo sapiens
  CDR3 for beta chain variable domain of TCR clone 358105 (TRBV7-2, TRBJ2-7)
CASRSQGAAYEQYF

SEQ ID NO: 716211 - protein, 14 aa, Homo sapiens
  CDR3 for alpha chain variable domain of TCR clone 358106 (TRAV12-1, TRAJ17)
CVVNYKAAGNKLTF

SEQ ID NO: 716212 - protein, 15 aa, Homo sapiens
  CDR3 for beta chain variable domain of TCR clone 358106 (TRBV7-3, TRBJ2-1)
CASTHGTGIYNEQFF

SEQ ID NO: 716213 - protein, 15 aa, Homo sapiens
  CDR3 for alpha chain variable domain of TCR clone 358107 (TRAV12-2, TRAJ56)
CAVNPFTGANSKLTF

SEQ ID NO: 716214 - protein, 13 aa, Homo sapiens
  CDR3 for beta chain variable domain of TCR clone 358107 (TRBV20-1, TRBJ1-2)
CSARGRVYGGYTF

SEQ ID NO: 716215 - protein, 14 aa, Homo sapiens
  CDR3 for alpha chain variable domain of TCR clone 358108 (TRAV12-2, TRAJ48)
CAVNAFFGNEKLTY

SEQ ID NO: 716216 - protein, 13 aa, Homo sapiens
  CDR3 for beta chain variable domain of TCR clone 358108 (TRBV28, TRBJ2-7)
CAGAQQGLDEQYF

SEQ ID NO: 716217 - protein, 14 aa, Homo sapiens
  CDR3 for alpha chain variable domain of TCR clone 358109 (TRAV1-2, TRAJ8)
CAVREDTGFQKLVF

SEQ ID NO: 716218 - protein, 13 aa, Homo sapiens
  CDR3 for beta chain variable domain of TCR clone 358109 (TRBV4-2, TRBJ1-1)
CASSQAENTEAFF

SEQ ID NO: 716219 - protein, 13 aa, Homo sapiens
  CDR3 for alpha chain variable domain of TCR clone 358110 (TRAV12-3, TRAJ9)
CAMSADGGFKTIF

SEQ ID NO: 716220 - protein, 15 aa, Homo sapiens
  CDR3 for beta chain variable domain of TCR clone 358110 (TRBV27, TRBJ2-1)
CASSNGGGSSNEQFF

SEQ ID NO: 716221 - protein, 14 aa, Homo sapiens
  CDR3 for alpha chain variable domain of TCR clone 358111 (TRAV9-2, TRAJ39)
CALYIYNAGNMLTF

SEQ ID NO: 716222 - protein, 13 aa, Homo sapiens
  CDR3 for beta chain variable domain of TCR clone 358111 (TRBV14, TRBJ2-7)
CASSHQGAYEQYF

SEQ ID NO: 716223 - protein, 14 aa, Homo sapiens
  CDR3 for alpha chain variable domain of TCR clone 358112 (TRAV12-3, TRAJ9)
CAMSPNTGGFKTIF

SEQ ID NO: 716224 - protein, 12 aa, Homo sapiens
  CDR3 for beta chain variable domain of TCR clone 358112 (TRBV19, TRBJ1-5)
GASSIAQQPQHF

SEQ ID NO: 716225 - protein, 15 aa, Homo sapiens
  CDR3 for alpha chain variable domain of TCR clone 358113 (TRAV8-4, TRAJ6)
CAVSAPSGGSYILTF

SEQ ID NO: 716226 - protein, 15 aa, Homo sapiens
  CDR3 for beta chain variable domain of TCR clone 358113 (TRBV7-3, TRBJ2-2)
CASKANGANTGELFF

SEQ ID NO: 716227 - protein, 17 aa, Homo sapiens
  CDR3 for alpha chain variable domain of TCR clone 358114 (TRAV3, TRAJ6)
CAVRDGPRAGGSYIPTF

SEQ ID NO: 716228 - protein, 15 aa, Homo sapiens
  CDR3 for beta chain variable domain of TCR clone 358114 (TRBV7-6, TRBJ1-5)
CASSQSSGVNQPQHF

SEQ ID NO: 716229 - protein, 11 aa, Homo sapiens
  CDR3 for alpha chain variable domain of TCR clone 358115 (TRAV12-1, TRAJ30)
CVVNGQDKIIF

SEQ ID NO: 716230 - protein, 14 aa, Homo sapiens
  CDR3 for beta chain variable domain of TCR clone 358115 (TRBV25-1, TRBJ1-1)
CASSHLGGNTEAFF

SEQ ID NO: 716231 - protein, 12 aa, Homo sapiens
  CDR3 for alpha chain variable domain of TCR clone 358116 (TRAV1-1, TRAJ43)
CAPRVSSNDMRF

SEQ ID NO: 716232 - protein, 15 aa, Homo sapiens
  CDR3 for beta chain variable domain of TCR clone 358116 (TRBV5-1, TRBJ2-7)
CASSLGDFTTYGQYF

SEQ ID NO: 716233 - protein, 13 aa, Homo sapiens
  CDR3 for alpha chain variable domain of TCR clone 358117 (TRAV8-3, TRAJ7)
CAVMPYGNNRLAF

SEQ ID NO: 716234 - protein, 15 aa, Homo sapiens
  CDR3 for beta chain variable domain of TCR clone 358117 (TRBV19, TRBJ1-1)
CASTSGQIQNTEAFF

SEQ ID NO: 716235 - protein, 17 aa, Homo sapiens
  CDR3 for alpha chain variable domain of TCR clone 358118 (TRAV4, )
CLVDIQNPDPAVYQLRD

SEQ ID NO: 716236 - protein, 15 aa, Homo sapiens
  CDR3 for beta chain variable domain of TCR clone 358118 (TRBV28, TRBJ2-5)
CASSSGRTIQETQYF

SEQ ID NO: 716237 - protein, 15 aa, Homo sapiens
  CDR3 for alpha chain variable domain of TCR clone 358119 (TRAV35, TRAJ50)
CAGQLRKTSYDKVIF

SEQ ID NO: 716238 - protein, 12 aa, Homo sapiens
  CDR3 for beta chain variable domain of TCR clone 358119 (TRBV5-1, TRBJ2-5)
CASSLGLEIQYF

SEQ ID NO: 716239 - protein, 14 aa, Homo sapiens
  CDR3 for alpha chain variable domain of TCR clone 358120 (TRAV12-3, TRAJ10)
SQLPLTGGGNKLTF

SEQ ID NO: 716240 - protein, 15 aa, Homo sapiens
  CDR3 for beta chain variable domain of TCR clone 358120 (TRBV7-9, TRBJ1-4)
CASSRTGGFNEKLFF

SEQ ID NO: 716241 - protein, 12 aa, Homo sapiens
  CDR3 for alpha chain variable domain of TCR clone 358121 (TRAV21, TRAJ33)
CAKMDSNYQLIW

SEQ ID NO: 716242 - protein, 14 aa, Homo sapiens
  CDR3 for beta chain variable domain of TCR clone 358121 (TRBV7-3, TRBJ1-1)
CASRLKGGNTEAFF

SEQ ID NO: 716243 - protein, 13 aa, Homo sapiens
  CDR3 for alpha chain variable domain of TCR clone 358122 (TRAV12-1, TRAJ49)
CVVNTNTGNQFYF

SEQ ID NO: 716244 - protein, 12 aa, Homo sapiens
  CDR3 for beta chain variable domain of TCR clone 358122 (TRBV29-1, TRBJ2-3)
CSVTGGADTQYF

SEQ ID NO: 716245 - protein, 15 aa, Homo sapiens
  CDR3 for alpha chain variable domain of TCR clone 358123 (TRAV26-1, TRAJ44)
CIVRANTGTASKLTF

SEQ ID NO: 716246 - protein, 15 aa, Homo sapiens
  CDR3 for beta chain variable domain of TCR clone 358123 (TRBV7-8, TRBJ1-1)
CASSLGDSRNTEAFF

SEQ ID NO: 716247 - protein, 13 aa, Homo sapiens
  CDR3 for alpha chain variable domain of TCR clone 358124 (TRAV13-1, TRAJ37)
CAAVSGNTGQLIF

SEQ ID NO: 716248 - protein, 17 aa, Homo sapiens
  CDR3 for beta chain variable domain of TCR clone 358124 (TRBV10-2, TRBJ1-6)
CASSENRGSSYNSPLHF

SEQ ID NO: 716249 - protein, 13 aa, Homo sapiens
  CDR3 for alpha chain variable domain of TCR clone 358125 (TRAV12-1, TRAJ26)
CVVRSNYGQNFVF

SEQ ID NO: 716250 - protein, 14 aa, Homo sapiens
  CDR3 for beta chain variable domain of TCR clone 358125 (TRBV6-3, TRBJ1-1)
CASRYTGESTEAFF

SEQ ID NO: 716251 - protein, 14 aa, Homo sapiens
  CDR3 for alpha chain variable domain of TCR clone 358126 (TRAV16, TRAJ53)
CPPPWWGSNYKLAF

SEQ ID NO: 716252 - protein, 15 aa, Homo sapiens
  CDR3 for beta chain variable domain of TCR clone 358126 (TRBV20-1, TRBJ2-7)
CSARDRVSGMDEQYF

SEQ ID NO: 716253 - protein, 14 aa, Homo sapiens
  CDR3 for alpha chain variable domain of TCR clone 358127 (TRAV38-1, TRAJ43)
CAFMKHNNNNDMRF

SEQ ID NO: 716254 - protein, 17 aa, Homo sapiens
  CDR3 for beta chain variable domain of TCR clone 358127 (TRBV7-7, TRBJ1-4)
CASSLVGQGASTEKLFF

SEQ ID NO: 716255 - protein, 15 aa, Homo sapiens
  CDR3 for alpha chain variable domain of TCR clone 358128 (TRAV3, TRAJ22)
CAVRDRGGSAGKLTF

SEQ ID NO: 716256 - protein, 15 aa, Homo sapiens
  CDR3 for beta chain variable domain of TCR clone 358128 (TRBV27, TRBJ2-1)
CASSNGGGSSNEQFF

SEQ ID NO: 716257 - protein, 12 aa, Homo sapiens
  CDR3 for alpha chain variable domain of TCR clone 358129 (TRAV1-2, TRAJ29)
CAVPSGNTPLVF

SEQ ID NO: 716258 - protein, 13 aa, Homo sapiens
  CDR3 for beta chain variable domain of TCR clone 358129 (TRBV7-6, TRBJ2-1)
CQQRGGGADEQFF

SEQ ID NO: 716259 - protein, 14 aa, Homo sapiens
  CDR3 for alpha chain variable domain of TCR clone 358130 (TRAV23/DV6, TRAJ22)
CAASVSGSAMQLNF

SEQ ID NO: 716260 - protein, 16 aa, Homo sapiens
  CDR3 for beta chain variable domain of TCR clone 358130 (TRBV19, TRBJ2-2)
CASSFPGQGLAGELFF

SEQ ID NO: 716261 - protein, 13 aa, Homo sapiens
  CDR3 for alpha chain variable domain of TCR clone 358131 (TRAV2, TRAJ12)
CAVGADSSYKLIF

SEQ ID NO: 716262 - protein, 15 aa, Homo sapiens
  CDR3 for beta chain variable domain of TCR clone 358131 (TRBV20-1, TRBJ2-7)
CSARDRVSGMDEQYF

SEQ ID NO: 716263 - protein, 14 aa, Homo sapiens
  CDR3 for alpha chain variable domain of TCR clone 358132 (TRAV12-3, TRAJ10)
SHLHLTGGGNELTF

SEQ ID NO: 716264 - protein, 11 aa, Homo sapiens
  CDR3 for beta chain variable domain of TCR clone 358132 (TRBV19, TRBJ1-1)
CASSIGSEAFF

SEQ ID NO: 716265 - protein, 15 aa, Homo sapiens
  CDR3 for alpha chain variable domain of TCR clone 358133 (TRAV21, TRAJ24)
CATRSSTNSWGKLQF

SEQ ID NO: 716266 - protein, 13 aa, Homo sapiens
  CDR3 for beta chain variable domain of TCR clone 358133 (TRBV11-2, TRBJ2-5)
CASSSTGEETQFF

SEQ ID NO: 716267 - protein, 11 aa, Homo sapiens
  CDR3 for alpha chain variable domain of TCR clone 358134 (TRAV2, TRAJ33)
CAVDSNYQLIW

SEQ ID NO: 716268 - protein, 17 aa, Homo sapiens
  CDR3 for beta chain variable domain of TCR clone 358134 (TRBV20-1, TRBJ2-1)
CSASSSGLAGSYNEQFF

SEQ ID NO: 716269 - protein, 16 aa, Homo sapiens
  CDR3 for alpha chain variable domain of TCR clone 358135 (TRAV26-1, TRAJ37)
CIYARHGSSNTGKLIF

SEQ ID NO: 716270 - protein, 13 aa, Homo sapiens
  CDR3 for beta chain variable domain of TCR clone 358135 (TRBV4-1, TRBJ2-2)
CASSQENTGELFF

SEQ ID NO: 716271 - protein, 11 aa, Homo sapiens
  CDR3 for alpha chain variable domain of TCR clone 358136 (TRAV1-1, TRAJ23)
CAVRQGGKLIF

SEQ ID NO: 716272 - protein, 13 aa, Homo sapiens
  CDR3 for beta chain variable domain of TCR clone 358136 (TRBV7-7, TRBJ2-3)
CASSLSRADTQYF

SEQ ID NO: 716273 - protein, 23 aa, Homo sapiens
  CDR3 for alpha chain variable domain of TCR clone 358137 (TRAV26-1, )
CIADIAGSNHIQNPDPAVYQLRD

SEQ ID NO: 716274 - protein, 13 aa, Homo sapiens
  CDR3 for beta chain variable domain of TCR clone 358137 (TRBV20-1, TRBJ1-1)
CSARGGGNTEAFF

SEQ ID NO: 716275 - protein, 12 aa, Homo sapiens
  CDR3 for alpha chain variable domain of TCR clone 358138 (TRAV25, TRAJ17)
CSGEAAGNNLTF

SEQ ID NO: 716276 - protein, 14 aa, Homo sapiens
  CDR3 for beta chain variable domain of TCR clone 358138 (TRBV5-1, TRBJ2-1)
CASSALWAGNEQFF

SEQ ID NO: 716277 - protein, 15 aa, Homo sapiens
  CDR3 for alpha chain variable domain of TCR clone 358139 (TRAV26-1, TRAJ37)
CIVTTGSSNTGKLIF

SEQ ID NO: 716278 - protein, 12 aa, Homo sapiens
  CDR3 for beta chain variable domain of TCR clone 358139 (TRBV7-8, TRBJ2-7)
CASSLGDREQYF

SEQ ID NO: 716279 - protein, 13 aa, Homo sapiens
  CDR3 for alpha chain variable domain of TCR clone 358140 (TRAV3, TRAJ21)
CAVREPDFNKFYF

SEQ ID NO: 716280 - protein, 12 aa, Homo sapiens
  CDR3 for beta chain variable domain of TCR clone 358140 (TRBV7-3, TRBJ1-2)
CASSKKGVPVTF

SEQ ID NO: 716281 - protein, 16 aa, Homo sapiens
  CDR3 for alpha chain variable domain of TCR clone 358141 (TRAV3, TRAJ10)
CAVRDMRAGGGNKLTF

SEQ ID NO: 716282 - protein, 13 aa, Homo sapiens
  CDR3 for beta chain variable domain of TCR clone 358141 (TRBV7-2, TRBJ1-1)
CASSLARPAEAFF

SEQ ID NO: 716283 - protein, 12 aa, Homo sapiens
  CDR3 for alpha chain variable domain of TCR clone 358142 (TRAV35, TRAJ23)
CCAHNQGGKLIF

SEQ ID NO: 716284 - protein, 13 aa, Homo sapiens
  CDR3 for beta chain variable domain of TCR clone 358142 (TRBV4-2, TRBJ1-1)
CASSQAGNTEAFF

SEQ ID NO: 716285 - protein, 13 aa, Homo sapiens
  CDR3 for alpha chain variable domain of TCR clone 358143 (TRAV21, TRAJ20)
CAVGLRVDYKLSF

SEQ ID NO: 716286 - protein, 13 aa, Homo sapiens
  CDR3 for beta chain variable domain of TCR clone 358143 (TRBV6-1, TRBJ1-1)
CASSRQGNTVAFF

SEQ ID NO: 716287 - protein, 15 aa, Homo sapiens
  CDR3 for alpha chain variable domain of TCR clone 358144 (TRAV2, TRAJ9)
CAVEDRGTGGFKTIL

SEQ ID NO: 716288 - protein, 16 aa, Homo sapiens
  CDR3 for beta chain variable domain of TCR clone 358144 (TRBV24-1, TRBJ2-3)
CATSEPGTGATDTQYF

SEQ ID NO: 716289 - protein, 10 aa, Homo sapiens
  CDR3 for alpha chain variable domain of TCR clone 358145 (TRAV36/DV7, TRAJ38)
CAANNRKLIW

SEQ ID NO: 716290 - protein, 15 aa, Homo sapiens
  CDR3 for beta chain variable domain of TCR clone 358145 (TRBV20-1, TRBJ2-7)
CSARGRVSGMDEQYF

SEQ ID NO: 716291 - protein, 10 aa, Homo sapiens
  CDR3 for alpha chain variable domain of TCR clone 358146 (TRAV23/DV6, TRAJ57)
CAASPTLSQG

SEQ ID NO: 716292 - protein, 14 aa, Homo sapiens
  CDR3 for beta chain variable domain of TCR clone 358146 (TRBV25-1, TRBJ1-1)
CTSTHLGGNTEAFF

SEQ ID NO: 716293 - protein, 13 aa, Homo sapiens
  CDR3 for alpha chain variable domain of TCR clone 358147 (TRAV25, TRAJ10)
CAGRTGGGKKLTF

SEQ ID NO: 716294 - protein, 15 aa, Homo sapiens
  CDR3 for beta chain variable domain of TCR clone 358147 (TRBV19, TRBJ2-1)
CASSSPGVPLDEQFF

SEQ ID NO: 716295 - protein, 14 aa, Homo sapiens
  CDR3 for alpha chain variable domain of TCR clone 358148 (TRAV8-6, TRAJ49)
CAVSVRYTGNQFYF

SEQ ID NO: 716296 - protein, 19 aa, Homo sapiens
  CDR3 for beta chain variable domain of TCR clone 358148 (TRBV28, TRBJ2-1)
CASSISIRGSGRTRYEQVF

SEQ ID NO: 716297 - protein, 12 aa, Homo sapiens
  CDR3 for alpha chain variable domain of TCR clone 358149 (TRAV27, TRAJ34)
CAGAKNTDKLIF

SEQ ID NO: 716298 - protein, 13 aa, Homo sapiens
  CDR3 for beta chain variable domain of TCR clone 358149 (TRBV4-1, TRBJ2-1)
CASSQEVQYKQFL

SEQ ID NO: 716299 - protein, 14 aa, Homo sapiens
  CDR3 for alpha chain variable domain of TCR clone 358150 (TRAV8-3, TRAJ4)
CAVGAAGGYNKLIF

SEQ ID NO: 716300 - protein, 11 aa, Homo sapiens
  CDR3 for beta chain variable domain of TCR clone 358150 (TRBV7-2, TRBJ2-3)
CASSSSDTQYF

SEQ ID NO: 716301 - protein, 14 aa, Homo sapiens
  CDR3 for alpha chain variable domain of TCR clone 358151 (TRAV29/DV5, TRAJ38)
CAASGAGNNRKLIW

SEQ ID NO: 716302 - protein, 14 aa, Homo sapiens
  CDR3 for beta chain variable domain of TCR clone 358151 (TRBV7-9, TRBJ2-2)
CASSLGHRTGELFF

SEQ ID NO: 716303 - protein, 17 aa, Homo sapiens
  CDR3 for alpha chain variable domain of TCR clone 358152 (TRAV8-6, TRAJ58)
CAVSPWVGETSGSRLTF

SEQ ID NO: 716304 - protein, 14 aa, Homo sapiens
  CDR3 for beta chain variable domain of TCR clone 358152 (TRBV20-1, TRBJ2-1)
CSAQIGGSANEQFF

SEQ ID NO: 716305 - protein, 14 aa, Homo sapiens
  CDR3 for alpha chain variable domain of TCR clone 358153 (TRAV12-3, TRAJ15)
CAMIPPQAGTALIF

SEQ ID NO: 716306 - protein, 14 aa, Homo sapiens
  CDR3 for beta chain variable domain of TCR clone 358153 (TRBV20-1, TRBJ2-2)
CSARRRIATGELFF

SEQ ID NO: 716307 - protein, 16 aa, Homo sapiens
  CDR3 for alpha chain variable domain of TCR clone 358154 (TRAV30, TRAJ24)
CGTEIVDADSWGQFQF

SEQ ID NO: 716308 - protein, 14 aa, Homo sapiens
  CDR3 for beta chain variable domain of TCR clone 358154 (TRBV12-5, TRBJ2-5)
CASGSRTHQEAQYF

SEQ ID NO: 716309 - protein, 11 aa, Homo sapiens
  CDR3 for alpha chain variable domain of TCR clone 358155 (TRAV14/DV4, )
CAMREISRTLT

SEQ ID NO: 716310 - protein, 14 aa, Homo sapiens
  CDR3 for beta chain variable domain of TCR clone 358155 (TRBV2, TRBJ2-1)
CASSDRAYYNEQIF

SEQ ID NO: 716311 - protein, 13 aa, Homo sapiens
  CDR3 for alpha chain variable domain of TCR clone 358156 (TRAV27, TRAJ57)
CAGFQGGSEKLVF

SEQ ID NO: 716312 - protein, 14 aa, Homo sapiens
  CDR3 for beta chain variable domain of TCR clone 358156 (TRBV11-2, TRBJ2-7)
CASSLGAGAYEQYF

SEQ ID NO: 716313 - protein, 14 aa, Homo sapiens
  CDR3 for alpha chain variable domain of TCR clone 358157 (TRAV17, TRAJ56)
CATVPAGANSKLTF

SEQ ID NO: 716314 - protein, 15 aa, Homo sapiens
  CDR3 for beta chain variable domain of TCR clone 358157 (TRBV19, TRBJ2-2)
CASSPRTGWTGELFF

SEQ ID NO: 716315 - protein, 13 aa, Homo sapiens
  CDR3 for alpha chain variable domain of TCR clone 358158 (TRAV4, TRAJ20)
CLVVLGYDYKLSF

SEQ ID NO: 716316 - protein, 16 aa, Homo sapiens
  CDR3 for beta chain variable domain of TCR clone 358158 (TRBV12-4, TRBJ1-5)
CASSRPVGGSNQPQHF

SEQ ID NO: 716317 - protein, 14 aa, Homo sapiens
  CDR3 for alpha chain variable domain of TCR clone 358159 (TRAV12-1, TRAJ42)
CVVIYGGSQGNLIF

SEQ ID NO: 716318 - protein, 15 aa, Homo sapiens
  CDR3 for beta chain variable domain of TCR clone 358159 (TRBV5-1, TRBJ1-3)
CASSLEGGSGNTIYF

SEQ ID NO: 716319 - protein, 14 aa, Homo sapiens
  CDR3 for alpha chain variable domain of TCR clone 358160 (TRAV4, TRAJ6)
CLVGEAGGSYIPTF

SEQ ID NO: 716320 - protein, 16 aa, Homo sapiens
  CDR3 for beta chain variable domain of TCR clone 358160 (TRBV7-6, TRBJ2-1)
CASSVNEGPSYNEQFF

SEQ ID NO: 716321 - protein, 13 aa, Homo sapiens
  CDR3 for alpha chain variable domain of TCR clone 358161 (TRAV2, TRAJ15)
CAVASQAGTALIF

SEQ ID NO: 716322 - protein, 17 aa, Homo sapiens
  CDR3 for beta chain variable domain of TCR clone 358161 (TRBV7-3, TRBJ2-3)
CASSLIKRMRGADTQYF

SEQ ID NO: 716323 - protein, 13 aa, Homo sapiens
  CDR3 for alpha chain variable domain of TCR clone 358162 (TRAV14/DV4, TRAJ23)
CAMREVKGGKLIF

SEQ ID NO: 716324 - protein, 15 aa, Homo sapiens
  CDR3 for beta chain variable domain of TCR clone 358162 (TRBV6-3, TRBJ2-1)
SASSYTSDSYNEQFF

SEQ ID NO: 716325 - protein, 15 aa, Homo sapiens
  CDR3 for alpha chain variable domain of TCR clone 358163 (TRAV17, TRAJ57)
CATGPSQGGSEKLVF

SEQ ID NO: 716326 - protein, 14 aa, Homo sapiens
  CDR3 for beta chain variable domain of TCR clone 358163 (TRBV5-4, TRBJ2-2)
CASSLTSRTGELFF

SEQ ID NO: 716327 - protein, 14 aa, Homo sapiens
  CDR3 for alpha chain variable domain of TCR clone 358164 (TRAV17, TRAJ37)
CATDPSGNTGKLIF

SEQ ID NO: 716328 - protein, 12 aa, Homo sapiens
  CDR3 for beta chain variable domain of TCR clone 358164 (TRBV7-9, TRBJ2-5)
CASSPNIETQYF

SEQ ID NO: 716329 - protein, 15 aa, Homo sapiens
  CDR3 for alpha chain variable domain of TCR clone 358165 (TRAV21, TRAJ53)
CAVRQSGGSNYKLTF

SEQ ID NO: 716330 - protein, 15 aa, Homo sapiens
  CDR3 for beta chain variable domain of TCR clone 358165 (TRBV4-1, TRBJ2-7)
CASSQNTGRLYEQYF

SEQ ID NO: 716331 - protein, 13 aa, Homo sapiens
  CDR3 for alpha chain variable domain of TCR clone 358166 (TRAV21, TRAJ57)
CAVTQGGTEQLVF

SEQ ID NO: 716332 - protein, 16 aa, Homo sapiens
  CDR3 for beta chain variable domain of TCR clone 358166 (TRBV29-1, TRBJ2-7)
CSVEDAEDGTAYEQYF

SEQ ID NO: 716333 - protein, 12 aa, Homo sapiens
  CDR3 for alpha chain variable domain of TCR clone 358167 (TRAV21, TRAJ6)
CAVKGGSYIPTS

SEQ ID NO: 716334 - protein, 13 aa, Homo sapiens
  CDR3 for beta chain variable domain of TCR clone 358167 (TRBV11-2, TRBJ1-1)
CASSFTENTEAFF

SEQ ID NO: 716335 - protein, 15 aa, Homo sapiens
  CDR3 for alpha chain variable domain of TCR clone 358168 (TRAV2, TRAJ9)
YAVEDRGTGGFKTIF

SEQ ID NO: 716336 - protein, 16 aa, Homo sapiens
  CDR3 for beta chain variable domain of TCR clone 358168 (TRBV24-1, TRBJ2-3)
CATIDPGTGATDTQYF

SEQ ID NO: 716337 - protein, 15 aa, Homo sapiens
  CDR3 for alpha chain variable domain of TCR clone 358169 (TRAV4, TRAJ27)
CLVGDEGTNAGKSTF

SEQ ID NO: 716338 - protein, 16 aa, Homo sapiens
  CDR3 for beta chain variable domain of TCR clone 358169 (TRBV7-3, TRBJ2-2)
CASSLKRGTLSGELFF

SEQ ID NO: 716339 - protein, 13 aa, Homo sapiens
  CDR3 for alpha chain variable domain of TCR clone 358170 (TRAV12-1, TRAJ36)
CGDAQTGANNLFF

SEQ ID NO: 716340 - protein, 14 aa, Homo sapiens
  CDR3 for beta chain variable domain of TCR clone 358170 (TRBV19, TRBJ2-1)
CASPTFVLSGEQFF

SEQ ID NO: 716341 - protein, 13 aa, Homo sapiens
  CDR3 for alpha chain variable domain of TCR clone 358171 (TRAV38-1, TRAJ42)
CARRGGSQGNLSF

SEQ ID NO: 716342 - protein, 16 aa, Homo sapiens
  CDR3 for beta chain variable domain of TCR clone 358171 (TRBV4-2, TRBJ2-3)
CASSQELAGDTDTQYF

SEQ ID NO: 716343 - protein, 14 aa, Homo sapiens
  CDR3 for alpha chain variable domain of TCR clone 358172 (TRAV1-1, TRAJ13)
CASPNSGGYQKVTF

SEQ ID NO: 716344 - protein, 15 aa, Homo sapiens
  CDR3 for beta chain variable domain of TCR clone 358172 (TRBV7-9, TRBJ1-6)
CASSSPGRGNSPLHF

SEQ ID NO: 716345 - protein, 15 aa, Homo sapiens
  CDR3 for alpha chain variable domain of TCR clone 358173 (TRAV2, TRAJ9)
CAVEDRGTGGFKTIF

SEQ ID NO: 716346 - protein, 14 aa, Homo sapiens
  CDR3 for beta chain variable domain of TCR clone 358173 (TRBV12-4, TRBJ1-6)
CASNLQGKGSPLHF

SEQ ID NO: 716347 - protein, 14 aa, Homo sapiens
  CDR3 for alpha chain variable domain of TCR clone 358174 (TRAV13-1, TRAJ17)
LSSRNKAAGNKLTF

SEQ ID NO: 716348 - protein, 14 aa, Homo sapiens
  CDR3 for beta chain variable domain of TCR clone 358174 (TRBV7-9, TRBJ2-1)
CASSSMVGFGEQFF

SEQ ID NO: 716349 - protein, 14 aa, Homo sapiens
  CDR3 for alpha chain variable domain of TCR clone 358175 (TRAV12-2, TRAJ9)
CAVNMEGGGFKTIF

SEQ ID NO: 716350 - protein, 12 aa, Homo sapiens
  CDR3 for beta chain variable domain of TCR clone 358175 (TRBV7-9, TRBJ2-7)
CASSFGSYEQYF

SEQ ID NO: 716351 - protein, 13 aa, Homo sapiens
  CDR3 for alpha chain variable domain of TCR clone 358176 (TRAV2, TRAJ40)
CAVVTSGTYKYIF

SEQ ID NO: 716352 - protein, 13 aa, Homo sapiens
  CDR3 for beta chain variable domain of TCR clone 358176 (TRBV7-9, TRBJ2-5)
CASPSPGQETQYF

SEQ ID NO: 716353 - protein, 14 aa, Homo sapiens
  CDR3 for alpha chain variable domain of TCR clone 358177 (TRAV1-2, TRAJ16)
CAVNRFADGQKLLF

SEQ ID NO: 716354 - protein, 11 aa, Homo sapiens
  CDR3 for beta chain variable domain of TCR clone 358177 (TRBV11-2, TRBJ2-2)
CASSLPGELFF

SEQ ID NO: 716355 - protein, 17 aa, Homo sapiens
  CDR3 for alpha chain variable domain of TCR clone 358178 (TRAV13-1, TRAJ10)
CAASIWKGTGGGKKLTF

SEQ ID NO: 716356 - protein, 13 aa, Homo sapiens
  CDR3 for beta chain variable domain of TCR clone 358178 (TRBV20-1, TRBJ1-1)
CSARGGGNTEAFF

SEQ ID NO: 716357 - protein, 16 aa, Homo sapiens
  CDR3 for alpha chain variable domain of TCR clone 358179 (TRAV21, TRAJ37)
CAVRTAGSSNKGTLIF

SEQ ID NO: 716358 - protein, 13 aa, Homo sapiens
  CDR3 for beta chain variable domain of TCR clone 358179 (TRBV7-9, TRBJ2-5)
CASLPSGRETQCF

SEQ ID NO: 716359 - protein, 15 aa, Homo sapiens
  CDR3 for alpha chain variable domain of TCR clone 358180 (TRAV8-6, TRAJ10)
CAVSVQAGGGNKLTF

SEQ ID NO: 716360 - protein, 15 aa, Homo sapiens
  CDR3 for beta chain variable domain of TCR clone 358180 (TRBV3-1, TRBJ2-5)
CASSANLGGPETQYF

SEQ ID NO: 716361 - protein, 13 aa, Homo sapiens
  CDR3 for alpha chain variable domain of TCR clone 358181 (TRAV12-2, TRAJ9)
CAVKCAGGFKTIF

SEQ ID NO: 716362 - protein, 15 aa, Homo sapiens
  CDR3 for beta chain variable domain of TCR clone 358181 (TRBV5-1, TRBJ1-4)
CASSLTADSDEKLFF

SEQ ID NO: 716363 - protein, 13 aa, Homo sapiens
  CDR3 for alpha chain variable domain of TCR clone 358182 (TRAV3, TRAJ20)
CCEAFCNDYKLSF

SEQ ID NO: 716364 - protein, 13 aa, Homo sapiens
  CDR3 for beta chain variable domain of TCR clone 358182 (TRBV4-1, TRBJ2-2)
CASSQENTGELFF

SEQ ID NO: 716365 - protein, 14 aa, Homo sapiens
  CDR3 for alpha chain variable domain of TCR clone 358183 (TRAV27, TRAJ45)
CAGAQEEVLTDSTL

SEQ ID NO: 716366 - protein, 13 aa, Homo sapiens
  CDR3 for beta chain variable domain of TCR clone 358183 (TRBV7-7, TRBJ2-5)
CASSRSGQETQYF

SEQ ID NO: 716367 - protein, 13 aa, Homo sapiens
  CDR3 for alpha chain variable domain of TCR clone 358184 (TRAV20, TRAJ21)
CAVEGYNFNKFYF

SEQ ID NO: 716368 - protein, 19 aa, Homo sapiens
  CDR3 for beta chain variable domain of TCR clone 358184 (TRBV25-1, TRBJ2-2)
CAILVYRVDRGRKTGELFF

SEQ ID NO: 716369 - protein, 11 aa, Homo sapiens
  CDR3 for alpha chain variable domain of TCR clone 358185 (TRAV12-3, TRAJ27)
CAMANAGKSTF

SEQ ID NO: 716370 - protein, 15 aa, Homo sapiens
  CDR3 for beta chain variable domain of TCR clone 358185 (TRBV12-4, TRBJ2-2)
CASSLVRGLGGELFF

SEQ ID NO: 716371 - protein, 15 aa, Homo sapiens
  CDR3 for alpha chain variable domain of TCR clone 358186 (TRAV2, TRAJ15)
CAVEDREQAGTALHF

SEQ ID NO: 716372 - protein, 13 aa, Homo sapiens
  CDR3 for beta chain variable domain of TCR clone 358186 (TRBV10-2, TRBJ2-3)
CASSESGDHTQYF

SEQ ID NO: 716373 - protein, 17 aa, Homo sapiens
  CDR3 for alpha chain variable domain of TCR clone 358187 (TRAV8-6, TRAJ58)
CAVSSWVGETSGARLTF

SEQ ID NO: 716374 - protein, 13 aa, Homo sapiens
  CDR3 for beta chain variable domain of TCR clone 358187 (TRBV15, TRBJ1-6)
CATSGGLNSPLHF

SEQ ID NO: 716375 - protein, 11 aa, Homo sapiens
  CDR3 for alpha chain variable domain of TCR clone 358188 (TRAV1-2, TRAJ31)
CAGNNNARRMF

SEQ ID NO: 716376 - protein, 15 aa, Homo sapiens
  CDR3 for beta chain variable domain of TCR clone 358188 (TRBV28, TRBJ2-1)
CASSIIAGGRSEQFF

SEQ ID NO: 716377 - protein, 14 aa, Homo sapiens
  CDR3 for alpha chain variable domain of TCR clone 358189 (TRAV27, TRAJ58)
CAGDGETSGSRLTF

SEQ ID NO: 716378 - protein, 12 aa, Homo sapiens
  CDR3 for beta chain variable domain of TCR clone 358189 (TRBV7-8, TRBJ2-7)
CASEGGPHGQYF

SEQ ID NO: 716379 - protein, 13 aa, Homo sapiens
  CDR3 for alpha chain variable domain of TCR clone 358190 (TRAV8-6, TRAJ41)
CSVSENSGYALNF

SEQ ID NO: 716380 - protein, 14 aa, Homo sapiens
  CDR3 for beta chain variable domain of TCR clone 358190 (TRBV7-3, TRBJ2-2)
CASSSGGYTGELFF

SEQ ID NO: 716381 - protein, 15 aa, Homo sapiens
  CDR3 for alpha chain variable domain of TCR clone 358191 (TRAV8-3, TRAJ40)
CAAPSLGSGTYKYIF

SEQ ID NO: 716382 - protein, 16 aa, Homo sapiens
  CDR3 for beta chain variable domain of TCR clone 358191 (TRBV7-3, TRBJ2-3)
CASSLSRYRPEDTQYF

SEQ ID NO: 716383 - protein, 17 aa, Homo sapiens
  CDR3 for alpha chain variable domain of TCR clone 358192 (TRAV3, TRAJ6)
CAVRDGPRAGESYIPTF

SEQ ID NO: 716384 - protein, 14 aa, Homo sapiens
  CDR3 for beta chain variable domain of TCR clone 358192 (TRBV6-1, TRBJ1-3)
CASVQGGGGNTIYF

SEQ ID NO: 716385 - protein, 10 aa, Homo sapiens
  CDR3 for alpha chain variable domain of TCR clone 358193 (TRAV6, TRAJ31)
CALQQCQTHV

SEQ ID NO: 716386 - protein, 13 aa, Homo sapiens
  CDR3 for beta chain variable domain of TCR clone 358193 (TRBV19, TRBJ1-5)
CASSEGSNQPQHF

SEQ ID NO: 716387 - protein, 16 aa, Homo sapiens
  CDR3 for alpha chain variable domain of TCR clone 358194 (TRAV14/DV4, TRAJ21)
CAMREGPENNFSKFYF

SEQ ID NO: 716388 - protein, 12 aa, Homo sapiens
  CDR3 for beta chain variable domain of TCR clone 358194 (TRBV29-1, TRBJ2-2)
CSVDKYTGELFF

SEQ ID NO: 716389 - protein, 14 aa, Homo sapiens
  CDR3 for alpha chain variable domain of TCR clone 358195 (TRAV1-2, TRAJ16)
CAVNRFSDGQKLLF

SEQ ID NO: 716390 - protein, 16 aa, Homo sapiens
  CDR3 for beta chain variable domain of TCR clone 358195 (TRBV7-2, TRBJ2-7)
CGSSLDLSGGAYEQYF

SEQ ID NO: 716391 - protein, 11 aa, Homo sapiens
  CDR3 for alpha chain variable domain of TCR clone 358196 (TRAV12-2, TRAJ21)
CAVEGFNKFYF

SEQ ID NO: 716392 - protein, 15 aa, Homo sapiens
  CDR3 for beta chain variable domain of TCR clone 358196 (TRBV20-1, TRBJ1-5)
CSASRRCDLGQPQHF

SEQ ID NO: 716393 - protein, 13 aa, Homo sapiens
  CDR3 for alpha chain variable domain of TCR clone 358197 (TRAV12-3, TRAJ13)
CAISHGGYQKVTF

SEQ ID NO: 716394 - protein, 16 aa, Homo sapiens
  CDR3 for beta chain variable domain of TCR clone 358197 (TRBV7-3, TRBJ2-2)
CASSLKRGTLSGELLF

SEQ ID NO: 716395 - protein, 14 aa, Homo sapiens
  CDR3 for alpha chain variable domain of TCR clone 358198 (TRAV3, TRAJ37)
CAVKESGNTGQLIF

SEQ ID NO: 716396 - protein, 14 aa, Homo sapiens
  CDR3 for beta chain variable domain of TCR clone 358198 (TRBV2, TRBJ1-5)
CASSENRGGQPQHF

SEQ ID NO: 716397 - protein, 12 aa, Homo sapiens
  CDR3 for alpha chain variable domain of TCR clone 358199 (TRAV12-3, TRAJ17)
CAMTLTGNKLTF

SEQ ID NO: 716398 - protein, 13 aa, Homo sapiens
  CDR3 for beta chain variable domain of TCR clone 358199 (TRBV7-2, TRBJ2-7)
CASSSPSGSEQHF

SEQ ID NO: 716399 - protein, 14 aa, Homo sapiens
  CDR3 for alpha chain variable domain of TCR clone 358200 (TRAV20, TRAJ40)
CAVSLTSGTYKYIF

SEQ ID NO: 716400 - protein, 15 aa, Homo sapiens
  CDR3 for beta chain variable domain of TCR clone 358200 (TRBV7-9, TRBJ1-5)
CASSQGHQPNQPQHF

SEQ ID NO: 716401 - protein, 14 aa, Homo sapiens
  CDR3 for alpha chain variable domain of TCR clone 358201 (TRAV1-2, TRAJ8)
CAVREDTGSQKLVF

SEQ ID NO: 716402 - protein, 13 aa, Homo sapiens
  CDR3 for beta chain variable domain of TCR clone 358201 (TRBV20-1, TRBJ1-1)
CSARGGGNTEAFF

SEQ ID NO: 716403 - protein, 11 aa, Homo sapiens
  CDR3 for alpha chain variable domain of TCR clone 358202 (TRAV13-1, TRAJ5)
CAPKCRRALTF

SEQ ID NO: 716404 - protein, 17 aa, Homo sapiens
  CDR3 for beta chain variable domain of TCR clone 358202 (TRBV28, TRBJ2-5)
CASSTPEGDALQENQYF

SEQ ID NO: 716405 - protein, 11 aa, Homo sapiens
  CDR3 for alpha chain variable domain of TCR clone 358203 (TRAV2, TRAJ33)
CAVDSNYQLIW

SEQ ID NO: 716406 - protein, 17 aa, Homo sapiens
  CDR3 for beta chain variable domain of TCR clone 358203 (TRBV19, TRBJ2-7)
CASSISFYGSYPYEQYF

SEQ ID NO: 716407 - protein, 10 aa, Homo sapiens
  CDR3 for alpha chain variable domain of TCR clone 358204 (TRAV35, TRAJ30)
LPGGDDKIIF

SEQ ID NO: 716408 - protein, 14 aa, Homo sapiens
  CDR3 for beta chain variable domain of TCR clone 358204 (TRBV7-8, TRBJ2-3)
CASSLEAGTDTQYF

SEQ ID NO: 716409 - protein, 14 aa, Homo sapiens
  CDR3 for alpha chain variable domain of TCR clone 358205 (TRAV1-2, TRAJ16)
CAVNRFSDGQKLLF

SEQ ID NO: 716410 - protein, 16 aa, Homo sapiens
  CDR3 for beta chain variable domain of TCR clone 358205 (TRBV4-3, TRBJ2-2)
CASRHLQGSGTGELFF

SEQ ID NO: 716411 - protein, 14 aa, Homo sapiens
  CDR3 for alpha chain variable domain of TCR clone 358206 (TRAV12-3, TRAJ10)
SHLPLTGGGNKLTF

SEQ ID NO: 716412 - protein, 14 aa, Homo sapiens
  CDR3 for beta chain variable domain of TCR clone 358206 (TRBV12-4, TRBJ1-4)
CASRMTGRSEKLFF

SEQ ID NO: 716413 - protein, 14 aa, Homo sapiens
  CDR3 for alpha chain variable domain of TCR clone 358207 (TRAV12-1, TRAJ13)
CVVIDSGGYQKVTF

SEQ ID NO: 716414 - protein, 13 aa, Homo sapiens
  CDR3 for beta chain variable domain of TCR clone 358207 (TRBV20-1, TRBJ1-1)
GSAPPGGHTEAFF

SEQ ID NO: 716415 - protein, 12 aa, Homo sapiens
  CDR3 for alpha chain variable domain of TCR clone 358208 (TRAV13-1, TRAJ21)
CAAKEGFNKFYF

SEQ ID NO: 716416 - protein, 13 aa, Homo sapiens
  CDR3 for beta chain variable domain of TCR clone 358208 (TRBV7-3, TRBJ1-1)
CASRQDWGAEAFF

SEQ ID NO: 716417 - protein, 14 aa, Homo sapiens
  CDR3 for alpha chain variable domain of TCR clone 358209 (TRAV13-2, TRAJ57)
CAESFQGGSEKLVF

SEQ ID NO: 716418 - protein, 16 aa, Homo sapiens
  CDR3 for beta chain variable domain of TCR clone 358209 (TRBV11-3, TRBJ2-3)
CASSSGSGGGTDTQYF

SEQ ID NO: 716419 - protein, 17 aa, Homo sapiens
  CDR3 for alpha chain variable domain of TCR clone 358210 (TRAV17, TRAJ28)
CDTDPRRGGAGSYQLTF

SEQ ID NO: 716420 - protein, 16 aa, Homo sapiens
  CDR3 for beta chain variable domain of TCR clone 358210 (TRBV25-1, TRBJ1-1)
CASSGDRDRGRIEAFF

SEQ ID NO: 716421 - protein, 13 aa, Homo sapiens
  CDR3 for alpha chain variable domain of TCR clone 358211 (TRAV12-1, TRAJ31)
CVVNMNNNARLMF

SEQ ID NO: 716422 - protein, 15 aa, Homo sapiens
  CDR3 for beta chain variable domain of TCR clone 358211 (TRBV4-1, TRBJ1-2)
CASSQGEGAAYGYTF

SEQ ID NO: 716423 - protein, 13 aa, Homo sapiens
  CDR3 for alpha chain variable domain of TCR clone 358212 (TRAV30, TRAJ16)
CGTFGGDGQKLLF

SEQ ID NO: 716424 - protein, 13 aa, Homo sapiens
  CDR3 for beta chain variable domain of TCR clone 358212 (TRBV7-3, TRBJ2-1)
CASSLDSYTEQFF

SEQ ID NO: 716425 - protein, 12 aa, Homo sapiens
  CDR3 for alpha chain variable domain of TCR clone 358213 (TRAV16, TRAJ22)
CALEVSARQLSF

SEQ ID NO: 716426 - protein, 14 aa, Homo sapiens
  CDR3 for beta chain variable domain of TCR clone 358213 (TRBV11-2, TRBJ2-3)
CASSSIASTDTQYF

SEQ ID NO: 716427 - protein, 20 aa, Homo sapiens
  CDR3 for alpha chain variable domain of TCR clone 358214 (TRAV26-1, TRAJ47)
CSVLLHRQSSFMEYGNKLVF

SEQ ID NO: 716428 - protein, 14 aa, Homo sapiens
  CDR3 for beta chain variable domain of TCR clone 358214 (TRBV7-2, TRBJ1-2)
CASSRGGTNYGYTF

SEQ ID NO: 716429 - protein, 16 aa, Homo sapiens
  CDR3 for alpha chain variable domain of TCR clone 358215 (TRAV3, TRAJ5)
CAVRNLMDTGRRALTF

SEQ ID NO: 716430 - protein, 16 aa, Homo sapiens
  CDR3 for beta chain variable domain of TCR clone 358215 (TRBV4-2, TRBJ2-7)
CASIQEGLANSYEQYF

SEQ ID NO: 716431 - protein, 16 aa, Homo sapiens
  CDR3 for alpha chain variable domain of TCR clone 358216 (TRAV3, TRAJ18)
CAVRDGRGSPLGRLYF

SEQ ID NO: 716432 - protein, 15 aa, Homo sapiens
  CDR3 for beta chain variable domain of TCR clone 358216 (TRBV7-9, TRBJ1-6)
CASSSPGRGNSPLHF

SEQ ID NO: 716433 - protein, 16 aa, Homo sapiens
  CDR3 for alpha chain variable domain of TCR clone 358217 (TRAV3, TRAJ37)
CAGRGKGSGNTGKLIF

SEQ ID NO: 716434 - protein, 12 aa, Homo sapiens
  CDR3 for beta chain variable domain of TCR clone 358217 (TRBV5-7, TRBJ2-7)
CASSLGRYEQYF

SEQ ID NO: 716435 - protein, 15 aa, Homo sapiens
  CDR3 for alpha chain variable domain of TCR clone 358218 (TRAV4, TRAJ32)
CLVGEDGGATNKLIF

SEQ ID NO: 716436 - protein, 13 aa, Homo sapiens
  CDR3 for beta chain variable domain of TCR clone 358218 (TRBV6-5, TRBJ2-5)
CASSPQGGETRYF

SEQ ID NO: 716437 - protein, 11 aa, Homo sapiens
  CDR3 for alpha chain variable domain of TCR clone 358219 (TRAV12-1, TRAJ21)
CVVNNFNKFYF

SEQ ID NO: 716438 - protein, 16 aa, Homo sapiens
  CDR3 for beta chain variable domain of TCR clone 358219 (TRBV6-4, TRBJ1-2)
CASSEAVGDPNYGYTF

SEQ ID NO: 716439 - protein, 11 aa, Homo sapiens
  CDR3 for alpha chain variable domain of TCR clone 358220 (TRAV13-1, TRAJ34)
CAASETDKLIF

SEQ ID NO: 716440 - protein, 12 aa, Homo sapiens
  CDR3 for beta chain variable domain of TCR clone 358220 (TRBV11-2, TRBJ2-2)
CASSLGGGELFF

SEQ ID NO: 716441 - protein, 13 aa, Homo sapiens
  CDR3 for alpha chain variable domain of TCR clone 358221 (TRAV12-3, TRAJ7)
CAMTPYGNNRLAF

SEQ ID NO: 716442 - protein, 16 aa, Homo sapiens
  CDR3 for beta chain variable domain of TCR clone 358221 (TRBV20-1, TRBJ1-4)
CSSSPYGGELNEKLFF

SEQ ID NO: 716443 - protein, 15 aa, Homo sapiens
  CDR3 for alpha chain variable domain of TCR clone 358222 (TRAV3, TRAJ5)
CAVRDLDTGSRALTF

SEQ ID NO: 716444 - protein, 14 aa, Homo sapiens
  CDR3 for beta chain variable domain of TCR clone 358222 (TRBV25-1, TRBJ1-4)
CASSGGGQPEKLFF

SEQ ID NO: 716445 - protein, 14 aa, Homo sapiens
  CDR3 for alpha chain variable domain of TCR clone 358223 (TRAV13-1, TRAJ35)
CAASKEGFGNVLHC

SEQ ID NO: 716446 - protein, 13 aa, Homo sapiens
  CDR3 for beta chain variable domain of TCR clone 358223 (TRBV7-3, TRBJ1-1)
CASSQGWGAEAFF

SEQ ID NO: 716447 - protein, 15 aa, Homo sapiens
  CDR3 for alpha chain variable domain of TCR clone 358224 (TRAV21, TRAJ53)
CATLNSGGSNYKLTF

SEQ ID NO: 716448 - protein, 15 aa, Homo sapiens
  CDR3 for beta chain variable domain of TCR clone 358224 (TRBV20-1, TRBJ2-7)
CSARDRASGMDEQYF

SEQ ID NO: 716449 - protein, 14 aa, Homo sapiens
  CDR3 for alpha chain variable domain of TCR clone 358225 (TRAV17, TRAJ24)
CATLTTDSWGKFQF

SEQ ID NO: 716450 - protein, 16 aa, Homo sapiens
  CDR3 for beta chain variable domain of TCR clone 358225 (TRBV4-2, TRBJ2-7)
CASNQDGGSLRGEQYF

SEQ ID NO: 716451 - protein, 12 aa, Homo sapiens
  CDR3 for alpha chain variable domain of TCR clone 358226 (TRAV12-3, TRAJ17)
CAMALTGNQLTF

SEQ ID NO: 716452 - protein, 15 aa, Homo sapiens
  CDR3 for beta chain variable domain of TCR clone 358226 (TRBV20-1, TRBJ2-7)
CSARDRVSGMDEQYF

SEQ ID NO: 716453 - protein, 11 aa, Homo sapiens
  CDR3 for alpha chain variable domain of TCR clone 358227 (TRAV1-2, TRAJ11)
CSVRGYSTLTF

SEQ ID NO: 716454 - protein, 13 aa, Homo sapiens
  CDR3 for beta chain variable domain of TCR clone 358227 (TRBV10-3, TRBJ2-7)
CASKLAVNYEQYF

SEQ ID NO: 716455 - protein, 15 aa, Homo sapiens
  CDR3 for alpha chain variable domain of TCR clone 358228 (TRAV26-1, TRAJ44)
CIAGVPFGTASKLTF

SEQ ID NO: 716456 - protein, 17 aa, Homo sapiens
  CDR3 for beta chain variable domain of TCR clone 358228 (TRBV24-1, TRBJ2-4)
CATSDAEARGVRNMQYF

SEQ ID NO: 716457 - protein, 16 aa, Homo sapiens
  CDR3 for alpha chain variable domain of TCR clone 358229 (TRAV12-2, TRAJ13)
CAVKKTGVTRKLPLEL

SEQ ID NO: 716458 - protein, 17 aa, Homo sapiens
  CDR3 for beta chain variable domain of TCR clone 358229 (TRBV20-1, TRBJ2-2)
CSASGSGQGGLTGELFF

SEQ ID NO: 716459 - protein, 15 aa, Homo sapiens
  CDR3 for alpha chain variable domain of TCR clone 358230 (TRAV20, TRAJ24)
CAVQAAPDSWGKFQL

SEQ ID NO: 716460 - protein, 14 aa, Homo sapiens
  CDR3 for beta chain variable domain of TCR clone 358230 (TRBV20-1, TRBJ1-1)
CSARDRGQGSEAFF

SEQ ID NO: 716461 - protein, 16 aa, Homo sapiens
  CDR3 for alpha chain variable domain of TCR clone 358231 (TRAV30, TRAJ24)
CGTEIVDADSWGKFQF

SEQ ID NO: 716462 - protein, 14 aa, Homo sapiens
  CDR3 for beta chain variable domain of TCR clone 358231 (TRBV12-5, TRBJ2-5)
RASGTSGGGETQYF

SEQ ID NO: 716463 - protein, 12 aa, Homo sapiens
  CDR3 for alpha chain variable domain of TCR clone 358232 (TRAV23/DV6, TRAJ24)
CAANDSLGKLHC

SEQ ID NO: 716464 - protein, 16 aa, Homo sapiens
  CDR3 for beta chain variable domain of TCR clone 358232 (TRBV12-4, TRBJ2-5)
CASSLSTSGGKETQYF

SEQ ID NO: 716465 - protein, 13 aa, Homo sapiens
  CDR3 for alpha chain variable domain of TCR clone 358233 (TRAV12-2, TRAJ47)
CAVFMEYGNKLVF

SEQ ID NO: 716466 - protein, 14 aa, Homo sapiens
  CDR3 for beta chain variable domain of TCR clone 358233 (TRBV4-1, TRBJ1-5)
CASSHGPTNQPQHF

SEQ ID NO: 716467 - protein, 14 aa, Homo sapiens
  CDR3 for alpha chain variable domain of TCR clone 358234 (TRAV4, TRAJ9)
CLVGSGTGGFKTIF

SEQ ID NO: 716468 - protein, 16 aa, Homo sapiens
  CDR3 for beta chain variable domain of TCR clone 358234 (TRBV29-1, TRBJ2-7)
CSVEVVGTSGSYEQYF

SEQ ID NO: 716469 - protein, 15 aa, Homo sapiens
  CDR3 for alpha chain variable domain of TCR clone 358235 (TRAV27, TRAJ17)
CRSTMIKAAGNKLTF

SEQ ID NO: 716470 - protein, 13 aa, Homo sapiens
  CDR3 for beta chain variable domain of TCR clone 358235 (TRBV18, TRBJ2-7)
CAGQSGGGYEQYF

SEQ ID NO: 716471 - protein, 16 aa, Homo sapiens
  CDR3 for alpha chain variable domain of TCR clone 358236 (TRAV4, TRAJ8)
CLVGDSGNTGFQKLVF

SEQ ID NO: 716472 - protein, 15 aa, Homo sapiens
  CDR3 for beta chain variable domain of TCR clone 358236 (TRBV15, TRBJ1-2)
CPTSRVRASGSGYTF

SEQ ID NO: 716473 - protein, 15 aa, Homo sapiens
  CDR3 for alpha chain variable domain of TCR clone 358237 (TRAV2, TRAJ15)
CAVEDREQEGTALIF

SEQ ID NO: 716474 - protein, 13 aa, Homo sapiens
  CDR3 for beta chain variable domain of TCR clone 358237 (TRBV10-2, TRBJ2-7)
CACGTSGGYEQYF

SEQ ID NO: 716475 - protein, 12 aa, Homo sapiens
  CDR3 for alpha chain variable domain of TCR clone 358238 (TRAV12-3, TRAJ40)
CAMSSGTYKYIF

SEQ ID NO: 716476 - protein, 16 aa, Homo sapiens
  CDR3 for beta chain variable domain of TCR clone 358238 (TRBV7-3, TRBJ2-2)
CASSLKRGSLSGELFF

SEQ ID NO: 716477 - protein, 15 aa, Homo sapiens
  CDR3 for alpha chain variable domain of TCR clone 358239 (TRAV8-4, TRAJ12)
CAVSDRVDSSFKLIF

SEQ ID NO: 716478 - protein, 15 aa, Homo sapiens
  CDR3 for beta chain variable domain of TCR clone 358239 (TRBV11-3, TRBJ2-1)
CASSLAGQTYNEQFF

SEQ ID NO: 716479 - protein, 14 aa, Homo sapiens
  CDR3 for alpha chain variable domain of TCR clone 358240 (TRAV1-2, TRAJ16)
CAVNRFSDGQKLLF

SEQ ID NO: 716480 - protein, 18 aa, Homo sapiens
  CDR3 for beta chain variable domain of TCR clone 358240 (TRBV12-4, TRBJ1-2)
CASSPNPGQAGPYYGYTF

SEQ ID NO: 716481 - protein, 19 aa, Homo sapiens
  CDR3 for alpha chain variable domain of TCR clone 358241 (TRAV26-1, TRAJ52)
RIVRAHRNAGGTSYGKLPF

SEQ ID NO: 716482 - protein, 15 aa, Homo sapiens
  CDR3 for beta chain variable domain of TCR clone 358241 (TRBV29-1, TRBJ2-1)
CSGRDRKSSYNEQFF

SEQ ID NO: 716483 - protein, 16 aa, Homo sapiens
  CDR3 for alpha chain variable domain of TCR clone 358242 (TRAV26-1, TRAJ28)
CFVRVGLWGWELPTHF

SEQ ID NO: 716484 - protein, 16 aa, Homo sapiens
  CDR3 for beta chain variable domain of TCR clone 358242 (TRBV20-1, TRBJ1-2)
CSASMGQGVANYGYTF

SEQ ID NO: 716485 - protein, 12 aa, Homo sapiens
  CDR3 for alpha chain variable domain of TCR clone 358243 (TRAV12-3, TRAJ17)
CAMTLTGNKLTF

SEQ ID NO: 716486 - protein, 16 aa, Homo sapiens
  CDR3 for beta chain variable domain of TCR clone 358243 (TRBV19, TRBJ2-2)
CASSFPGQGLAGELFF

SEQ ID NO: 716487 - protein, 15 aa, Homo sapiens
  CDR3 for alpha chain variable domain of TCR clone 358244 (TRAV3, TRAJ27)
CAVRAGGHQCRQINL

SEQ ID NO: 716488 - protein, 13 aa, Homo sapiens
  CDR3 for beta chain variable domain of TCR clone 358244 (TRBV10-3, TRBJ2-7)
RASKLAVNYEQYF

SEQ ID NO: 716489 - protein, 13 aa, Homo sapiens
  CDR3 for alpha chain variable domain of TCR clone 358245 (TRAV22, TRAJ44)
CALNPGTASKLTF

SEQ ID NO: 716490 - protein, 13 aa, Homo sapiens
  CDR3 for beta chain variable domain of TCR clone 358245 (TRBV10-3, TRBJ2-7)
CASKLAVNYEQYF

SEQ ID NO: 716491 - protein, 10 aa, Homo sapiens
  CDR3 for alpha chain variable domain of TCR clone 358246 (TRAV1-2, TRAJ31)
CAFFRCQTHV

SEQ ID NO: 716492 - protein, 13 aa, Homo sapiens
  CDR3 for beta chain variable domain of TCR clone 358246 (TRBV7-9, TRBJ1-2)
CASSLKRNYGYTF

SEQ ID NO: 716493 - protein, 14 aa, Homo sapiens
  CDR3 for alpha chain variable domain of TCR clone 358247 (TRAV12-2, TRAJ22)
CAVRFSGSARQLTF

SEQ ID NO: 716494 - protein, 13 aa, Homo sapiens
  CDR3 for beta chain variable domain of TCR clone 358247 (TRBV28, TRBJ2-7)
CAGAQQGLDEQYF

SEQ ID NO: 716495 - protein, 16 aa, Homo sapiens
  CDR3 for alpha chain variable domain of TCR clone 358248 (TRAV3, TRAJ21)
CSVRDIERGNFNKFYF

SEQ ID NO: 716496 - protein, 13 aa, Homo sapiens
  CDR3 for beta chain variable domain of TCR clone 358248 (TRBV27, TRBJ2-7)
CASSLTTGYEQYF

SEQ ID NO: 716497 - protein, 13 aa, Homo sapiens
  CDR3 for alpha chain variable domain of TCR clone 358249 (TRAV8-4, TRAJ49)
CAVSDPGGTQFYF

SEQ ID NO: 716498 - protein, 15 aa, Homo sapiens
  CDR3 for beta chain variable domain of TCR clone 358249 (TRBV12-4, TRBJ1-3)
CASSLGLQKGNTIYF

SEQ ID NO: 716499 - protein, 13 aa, Homo sapiens
  CDR3 for alpha chain variable domain of TCR clone 358250 (TRAV8-6, TRAJ54)
CAVEAQGAQKLVF

SEQ ID NO: 716500 - protein, 13 aa, Homo sapiens
  CDR3 for beta chain variable domain of TCR clone 358250 (TRBV7-2, TRBJ2-2)
CASSLAVTGELFF

SEQ ID NO: 716501 - protein, 15 aa, Homo sapiens
  CDR3 for alpha chain variable domain of TCR clone 358251 (TRAV14/DV4, TRAJ47)
CAMREAMEYGNKLVF

SEQ ID NO: 716502 - protein, 14 aa, Homo sapiens
  CDR3 for beta chain variable domain of TCR clone 358251 (TRBV5-1, TRBJ1-1)
CASSLERVGTEAFF

SEQ ID NO: 716503 - protein, 13 aa, Homo sapiens
  CDR3 for alpha chain variable domain of TCR clone 358252 (TRAV27, TRAJ56)
CAGKPGANRKLTF

SEQ ID NO: 716504 - protein, 12 aa, Homo sapiens
  CDR3 for beta chain variable domain of TCR clone 358252 (TRBV11-2, TRBJ2-3)
GASRGAPNTQYF

SEQ ID NO: 716505 - protein, 14 aa, Homo sapiens
  CDR3 for alpha chain variable domain of TCR clone 358253 (TRAV13-1, TRAJ44)
CAAKATGTASKLTF

SEQ ID NO: 716506 - protein, 13 aa, Homo sapiens
  CDR3 for beta chain variable domain of TCR clone 358253 (TRBV7-3, TRBJ1-1)
CATSQDWGAEAFF

SEQ ID NO: 716507 - protein, 13 aa, Homo sapiens
  CDR3 for alpha chain variable domain of TCR clone 358254 (TRAV21, TRAJ37)
CAVSSGNTGKLIF

SEQ ID NO: 716508 - protein, 17 aa, Homo sapiens
  CDR3 for beta chain variable domain of TCR clone 358254 (TRBV5-1, TRBJ2-5)
CASSLLGLAANQETQFF

SEQ ID NO: 716509 - protein, 13 aa, Homo sapiens
  CDR3 for alpha chain variable domain of TCR clone 358255 (TRAV23/DV6, TRAJ22)
CAPYSDSARQLTF

SEQ ID NO: 716510 - protein, 13 aa, Homo sapiens
  CDR3 for beta chain variable domain of TCR clone 358255 (TRBV6-1, TRBJ1-1)
CASSRQGNTEAFF

SEQ ID NO: 716511 - protein, 12 aa, Homo sapiens
  CDR3 for alpha chain variable domain of TCR clone 358256 (TRAV12-3, TRAJ41)
CAMSYSGYALNF

SEQ ID NO: 716512 - protein, 16 aa, Homo sapiens
  CDR3 for beta chain variable domain of TCR clone 358256 (TRBV20-1, TRBJ1-4)
CSAPGQGLLTNEKLFF

SEQ ID NO: 716513 - protein, 11 aa, Homo sapiens
  CDR3 for alpha chain variable domain of TCR clone 358257 (TRAV26-1, TRAJ37)
CIVRVGRKLIF

SEQ ID NO: 716514 - protein, 13 aa, Homo sapiens
  CDR3 for beta chain variable domain of TCR clone 358257 (TRBV14, TRBJ1-2)
GASSEDRRYGYTF

SEQ ID NO: 716515 - protein, 14 aa, Homo sapiens
  CDR3 for alpha chain variable domain of TCR clone 358258 (TRAV17, TRAJ15)
CATGPNQAGTALIF

SEQ ID NO: 716516 - protein, 20 aa, Homo sapiens
  CDR3 for beta chain variable domain of TCR clone 358258 (TRBV28, TRBJ2-1)
CASTPIGRSPGLAGGNEQFF

SEQ ID NO: 716517 - protein, 18 aa, Homo sapiens
  CDR3 for alpha chain variable domain of TCR clone 358259 (TRAV13-1, TRAJ52)
CEASKRSAGGTSYGKLTF

SEQ ID NO: 716518 - protein, 16 aa, Homo sapiens
  CDR3 for beta chain variable domain of TCR clone 358259 (TRBV12-5, TRBJ2-5)
CASGPRTSGNQETQYF

SEQ ID NO: 716519 - protein, 13 aa, Homo sapiens
  CDR3 for alpha chain variable domain of TCR clone 358260 (TRAV8-4, TRAJ8)
CAVSYTGFQKLVF

SEQ ID NO: 716520 - protein, 16 aa, Homo sapiens
  CDR3 for beta chain variable domain of TCR clone 358260 (TRBV20-1, TRBJ1-4)
CSAPGQGLLTNEKLFF

SEQ ID NO: 716521 - protein, 14 aa, Homo sapiens
  CDR3 for alpha chain variable domain of TCR clone 358261 (TRAV1-2, TRAJ16)
CAVNRFSDGQKLLF

SEQ ID NO: 716522 - protein, 16 aa, Homo sapiens
  CDR3 for beta chain variable domain of TCR clone 358261 (TRBV27, TRBJ2-2)
CASSSDRGTGTGELFF

SEQ ID NO: 716523 - protein, 14 aa, Homo sapiens
  CDR3 for alpha chain variable domain of TCR clone 358262 (TRAV17, TRAJ40)
CATALTSGTYKYIF

SEQ ID NO: 716524 - protein, 17 aa, Homo sapiens
  CDR3 for beta chain variable domain of TCR clone 358262 (TRBV7-3, TRBJ2-3)
CASSLMKRMRGADTQYF

SEQ ID NO: 716525 - protein, 10 aa, Homo sapiens
  CDR3 for alpha chain variable domain of TCR clone 358263 (TRAV25, TRAJ20)
CAVNDYKLSF

SEQ ID NO: 716526 - protein, 12 aa, Homo sapiens
  CDR3 for beta chain variable domain of TCR clone 358263 (TRBV7-2, TRBJ2-5)
CASSQYQETQYF

SEQ ID NO: 716527 - protein, 18 aa, Homo sapiens
  CDR3 for alpha chain variable domain of TCR clone 358264 (TRAV13-1, TRAJ52)
CAAKNPNAGGTSYGKLTF

SEQ ID NO: 716528 - protein, 15 aa, Homo sapiens
  CDR3 for beta chain variable domain of TCR clone 358264 (TRBV19, TRBJ1-2)
CASNDGTGKDYGYTF

SEQ ID NO: 716529 - protein, 19 aa, Homo sapiens
  CDR3 for alpha chain variable domain of TCR clone 358265 (TRAV1-2, TRAJ26)
CLLPLCCERPDNYGQNFVF

SEQ ID NO: 716530 - protein, 12 aa, Homo sapiens
  CDR3 for beta chain variable domain of TCR clone 358265 (TRBV5-1, TRBJ1-2)
CASSQDTYGYTF

SEQ ID NO: 716531 - protein, 13 aa, Homo sapiens
  CDR3 for alpha chain variable domain of TCR clone 358266 (TRAV17, TRAJ48)
CATAVFGNEKLTF

SEQ ID NO: 716532 - protein, 14 aa, Homo sapiens
  CDR3 for beta chain variable domain of TCR clone 358266 (TRBV27, TRBJ2-5)
CASKGGPLQETQYF

SEQ ID NO: 716533 - protein, 13 aa, Homo sapiens
  CDR3 for alpha chain variable domain of TCR clone 358267 (TRAV12-1, TRAJ22)
CGEQGGSARQLTF

SEQ ID NO: 716534 - protein, 13 aa, Homo sapiens
  CDR3 for beta chain variable domain of TCR clone 358267 (TRBV3-1, TRBJ2-7)
CASSQGVGYEQYF

SEQ ID NO: 716535 - protein, 15 aa, Homo sapiens
  CDR3 for alpha chain variable domain of TCR clone 358268 (TRAV13-1, TRAJ10)
CAADVVTGGGNKLTF

SEQ ID NO: 716536 - protein, 13 aa, Homo sapiens
  CDR3 for beta chain variable domain of TCR clone 358268 (TRBV28, TRBJ2-5)
CAGVSRGEESQYF

SEQ ID NO: 716537 - protein, 14 aa, Homo sapiens
  CDR3 for alpha chain variable domain of TCR clone 358269 (TRAV1-2, TRAJ16)
CAVNRFSDGQKLLF

SEQ ID NO: 716538 - protein, 14 aa, Homo sapiens
  CDR3 for beta chain variable domain of TCR clone 358269 (TRBV25-1, TRBJ1-1)
CASTPLGGNTEAFF

SEQ ID NO: 716539 - protein, 14 aa, Homo sapiens
  CDR3 for alpha chain variable domain of TCR clone 358270 (TRAV8-4, TRAJ5)
CAVSTDTGRRALTF

SEQ ID NO: 716540 - protein, 16 aa, Homo sapiens
  CDR3 for beta chain variable domain of TCR clone 358270 (TRBV6-1, TRBJ2-5)
CASSATLDRGAETQYF

SEQ ID NO: 716541 - protein, 16 aa, Homo sapiens
  CDR3 for alpha chain variable domain of TCR clone 358271 (TRAV35, TRAJ28)
CAGQKYSGAGSYQLTF

SEQ ID NO: 716542 - protein, 16 aa, Homo sapiens
  CDR3 for beta chain variable domain of TCR clone 358271 (TRBV7-3, TRBJ2-2)
RASSLKRGTLSGELFF

SEQ ID NO: 716543 - protein, 12 aa, Homo sapiens
  CDR3 for alpha chain variable domain of TCR clone 358272 (TRAV12-3, TRAJ17)
CAMTLTGNKLTF

SEQ ID NO: 716544 - protein, 16 aa, Homo sapiens
  CDR3 for beta chain variable domain of TCR clone 358272 (TRBV5-1, TRBJ2-1)
CASSLSSLRESNEQFF

SEQ ID NO: 716545 - protein, 16 aa, Homo sapiens
  CDR3 for alpha chain variable domain of TCR clone 358273 (TRAV17, TRAJ35)
CATAEGGIGFGNVLHC

SEQ ID NO: 716546 - protein, 16 aa, Homo sapiens
  CDR3 for beta chain variable domain of TCR clone 358273 (TRBV6-5, TRBJ2-7)
CASSSDQTSGFYEQYF

SEQ ID NO: 716547 - protein, 21 aa, Homo sapiens
  CDR3 for alpha chain variable domain of TCR clone 358274 (TRAV12-1, TRAJ32)
SSVIEPPTSMNYGGAANKLIF

SEQ ID NO: 716548 - protein, 18 aa, Homo sapiens
  CDR3 for beta chain variable domain of TCR clone 358274 (TRBV20-1, TRBJ2-3)
CSASGLAGGPGTTDTQYF

SEQ ID NO: 716549 - protein, 10 aa, Homo sapiens
  CDR3 for alpha chain variable domain of TCR clone 358275 (TRAV1-2, TRAJ31)
CAFFDARLMF

SEQ ID NO: 716550 - protein, 18 aa, Homo sapiens
  CDR3 for beta chain variable domain of TCR clone 358275 (TRBV4-1, TRBJ1-4)
CASSPRTGGAWTNEKLFF

SEQ ID NO: 716551 - protein, 10 aa, Homo sapiens
  CDR3 for alpha chain variable domain of TCR clone 358276 (TRAV30, TRAJ48)
CGIGNEKLTF

SEQ ID NO: 716552 - protein, 14 aa, Homo sapiens
  CDR3 for beta chain variable domain of TCR clone 358276 (TRBV7-6, TRBJ2-3)
CANSVAGGTDTQYF

SEQ ID NO: 716553 - protein, 13 aa, Homo sapiens
  CDR3 for alpha chain variable domain of TCR clone 358277 (TRAV8-3, TRAJ4)
WVFYSVGYNKLIS

SEQ ID NO: 716554 - protein, 14 aa, Homo sapiens
  CDR3 for beta chain variable domain of TCR clone 358277 (TRBV7-9, TRBJ2-3)
CASSLEDGTDTQYF

SEQ ID NO: 716555 - protein, 15 aa, Homo sapiens
  CDR3 for alpha chain variable domain of TCR clone 358278 (TRAV30, TRAJ13)
CGTQGVTGGYQKVTF

SEQ ID NO: 716556 - protein, 14 aa, Homo sapiens
  CDR3 for beta chain variable domain of TCR clone 358278 (TRBV7-8, TRBJ2-3)
CASSLEAGTDTQYF

SEQ ID NO: 716557 - protein, 14 aa, Homo sapiens
  CDR3 for alpha chain variable domain of TCR clone 358279 (TRAV8-2, TRAJ23)
RVVSVDNQGGKLFF

SEQ ID NO: 716558 - protein, 16 aa, Homo sapiens
  CDR3 for beta chain variable domain of TCR clone 358279 (TRBV4-2, TRBJ2-5)
CASSQELVGSQETQYF

SEQ ID NO: 716559 - protein, 14 aa, Homo sapiens
  CDR3 for alpha chain variable domain of TCR clone 358280 (TRAV23/DV6, TRAJ12)
CAASRMDSSYKLIF

SEQ ID NO: 716560 - protein, 15 aa, Homo sapiens
  CDR3 for beta chain variable domain of TCR clone 358280 (TRBV20-1, TRBJ2-7)
CSARDRVSGMDEQYF

SEQ ID NO: 716561 - protein, 13 aa, Homo sapiens
  CDR3 for alpha chain variable domain of TCR clone 358281 (TRAV21, TRAJ36)
CAVIKTGANNPFF

SEQ ID NO: 716562 - protein, 13 aa, Homo sapiens
  CDR3 for beta chain variable domain of TCR clone 358281 (TRBV29-1, TRBJ2-3)
CSATLGGRDTQYF

SEQ ID NO: 716563 - protein, 14 aa, Homo sapiens
  CDR3 for alpha chain variable domain of TCR clone 358282 (TRAV8-4, TRAJ26)
CAVSVGNYGQNFVF

SEQ ID NO: 716564 - protein, 17 aa, Homo sapiens
  CDR3 for beta chain variable domain of TCR clone 358282 (TRBV20-1, TRBJ2-2)
CSASGSGQGGLTGELFF

SEQ ID NO: 716565 - protein, 13 aa, Homo sapiens
  CDR3 for alpha chain variable domain of TCR clone 358283 (TRAV12-3, TRAJ33)
CAMSVNSNYQLIW

SEQ ID NO: 716566 - protein, 16 aa, Homo sapiens
  CDR3 for beta chain variable domain of TCR clone 358283 (TRBV5-4, TRBJ2-3)
CASQQPVAGGADTQYF

SEQ ID NO: 716567 - protein, 19 aa, Homo sapiens
  CDR3 for alpha chain variable domain of TCR clone 358284 (TRAV1-2, TRAJ26)
CLLPLCCERPDNYGQNFVF

SEQ ID NO: 716568 - protein, 17 aa, Homo sapiens
  CDR3 for beta chain variable domain of TCR clone 358284 (TRBV4-1, TRBJ2-7)
CASSRDPLGVRGGEQYF

SEQ ID NO: 716569 - protein, 16 aa, Homo sapiens
  CDR3 for alpha chain variable domain of TCR clone 358285 (TRAV38-1, TRAJ45)
CAFMKGSGGGADGRTF

SEQ ID NO: 716570 - protein, 15 aa, Homo sapiens
  CDR3 for beta chain variable domain of TCR clone 358285 (TRBV7-2, TRBJ2-3)
CASSSTGLETDTQYF

SEQ ID NO: 716571 - protein, 18 aa, Homo sapiens
  CDR3 for alpha chain variable domain of TCR clone 358286 (TRAV21, TRAJ52)
CAVRPSPAGGTSCGKLTF

SEQ ID NO: 716572 - protein, 14 aa, Homo sapiens
  CDR3 for beta chain variable domain of TCR clone 358286 (TRBV7-9, TRBJ1-1)
CASRDTTGDTEAFF

SEQ ID NO: 716573 - protein, 15 aa, Homo sapiens
  CDR3 for alpha chain variable domain of TCR clone 358287 (TRAV1-2, TRAJ12)
CAVIPEVDSSYKLIF

SEQ ID NO: 716574 - protein, 12 aa, Homo sapiens
  CDR3 for beta chain variable domain of TCR clone 358287 (TRBV12-4, TRBJ2-7)
CASSVGGYEQYF

SEQ ID NO: 716575 - protein, 14 aa, Homo sapiens
  CDR3 for alpha chain variable domain of TCR clone 358288 (TRAV1-2, TRAJ8)
CAVREDTGFQKLVL

SEQ ID NO: 716576 - protein, 15 aa, Homo sapiens
  CDR3 for beta chain variable domain of TCR clone 358288 (TRBV7-2, TRBJ2-7)
CASSTPGLTRGEQYF

SEQ ID NO: 716577 - protein, 11 aa, Homo sapiens
  CDR3 for alpha chain variable domain of TCR clone 358289 (TRAV23/DV6, TRAJ18)
CADGALGRLYF

SEQ ID NO: 716578 - protein, 15 aa, Homo sapiens
  CDR3 for beta chain variable domain of TCR clone 358289 (TRBV20-1, TRBJ2-7)
CSARDRVSGMDEQYF

SEQ ID NO: 716579 - protein, 12 aa, Homo sapiens
  CDR3 for alpha chain variable domain of TCR clone 358290 (TRAV17, TRAJ20)
CATDGDDYKLSF

SEQ ID NO: 716580 - protein, 15 aa, Homo sapiens
  CDR3 for beta chain variable domain of TCR clone 358290 (TRBV5-1, TRBJ2-3)
CASSVTSGSTDTQYF

SEQ ID NO: 716581 - protein, 13 aa, Homo sapiens
  CDR3 for alpha chain variable domain of TCR clone 358291 (TRAV8-3, TRAJ48)
CAVVRFGNEKLTF

SEQ ID NO: 716582 - protein, 16 aa, Homo sapiens
  CDR3 for beta chain variable domain of TCR clone 358291 (TRBV20-1, TRBJ2-5)
CSARDFASGIQETQYF

SEQ ID NO: 716583 - protein, 14 aa, Homo sapiens
  CDR3 for alpha chain variable domain of TCR clone 358292 (TRAV35, TRAJ33)
CAGSSQDSNYQLIW

SEQ ID NO: 716584 - protein, 13 aa, Homo sapiens
  CDR3 for beta chain variable domain of TCR clone 358292 (TRBV4-2, TRBJ1-1)
CASSQAGNTEAFF

SEQ ID NO: 716585 - protein, 20 aa, Homo sapiens
  CDR3 for alpha chain variable domain of TCR clone 358293 (TRAV26-1, TRAJ42)
CCVLLHRKTYYGGSQGNLIF

SEQ ID NO: 716586 - protein, 16 aa, Homo sapiens
  CDR3 for beta chain variable domain of TCR clone 358293 (TRBV7-3, TRBJ2-2)
CASSLRRGTLSGELFF

SEQ ID NO: 716587 - protein, 15 aa, Homo sapiens
  CDR3 for alpha chain variable domain of TCR clone 358294 (TRAV1-2, TRAJ17)
CAVRGYGAAGNKLTF

SEQ ID NO: 716588 - protein, 23 aa, Homo sapiens
  CDR3 for beta chain variable domain of TCR clone 358294 (TRBV11-2, TRBJ2-5)
CASSSPGGEGAASRDPVLRAGHA

SEQ ID NO: 716589 - protein, 15 aa, Homo sapiens
  CDR3 for alpha chain variable domain of TCR clone 358295 (TRAV8-3, TRAJ15)
CAVGAPNQAGTALIF

SEQ ID NO: 716590 - protein, 14 aa, Homo sapiens
  CDR3 for beta chain variable domain of TCR clone 358295 (TRBV20-1, TRBJ2-1)
CSPNDEASYNEQFV

SEQ ID NO: 716591 - protein, 14 aa, Homo sapiens
  CDR3 for alpha chain variable domain of TCR clone 358296 (TRAV36/DV7, TRAJ57)
CSVGFPGGSEKLVF

SEQ ID NO: 716592 - protein, 12 aa, Homo sapiens
  CDR3 for beta chain variable domain of TCR clone 358296 (TRBV19, TRBJ2-7)
CASTSGTYEQYF

SEQ ID NO: 716593 - protein, 13 aa, Homo sapiens
  CDR3 for alpha chain variable domain of TCR clone 358297 (TRAV13-2, TRAJ48)
CAEVYFGNEKLTF

SEQ ID NO: 716594 - protein, 15 aa, Homo sapiens
  CDR3 for beta chain variable domain of TCR clone 358297 (TRBV7-9, TRBJ1-6)
CASSSPGRGNSPLHF

SEQ ID NO: 716595 - protein, 13 aa, Homo sapiens
  CDR3 for alpha chain variable domain of TCR clone 358298 (TRAV21, TRAJ44)
CAAHTSTASKLTF

SEQ ID NO: 716596 - protein, 15 aa, Homo sapiens
  CDR3 for beta chain variable domain of TCR clone 358298 (TRBV10-3, TRBJ2-2)
CAIRTDREDTGELFF

SEQ ID NO: 716597 - protein, 15 aa, Homo sapiens
  CDR3 for alpha chain variable domain of TCR clone 358299 (TRAV3, TRAJ5)
CAVRDLDTGRRALTF

SEQ ID NO: 716598 - protein, 13 aa, Homo sapiens
  CDR3 for beta chain variable domain of TCR clone 358299 (TRBV12-4, TRBJ1-1)
CASSSRAGAEAFF

SEQ ID NO: 716599 - protein, 10 aa, Homo sapiens
  CDR3 for alpha chain variable domain of TCR clone 358300 (TRAV30, TRAJ48)
CGIGNEKVTF

SEQ ID NO: 716600 - protein, 14 aa, Homo sapiens
  CDR3 for beta chain variable domain of TCR clone 358300 (TRBV7-6, TRBJ2-3)
CASSVAGGTDTQYF

SEQ ID NO: 716601 - protein, 14 aa, Homo sapiens
  CDR3 for alpha chain variable domain of TCR clone 358301 (TRAV23/DV6, TRAJ37)
CAASTSSNTGNLIF

SEQ ID NO: 716602 - protein, 15 aa, Homo sapiens
  CDR3 for beta chain variable domain of TCR clone 358301 (TRBV7-9, TRBJ2-7)
CASSPGGGLTYEQYF

SEQ ID NO: 716603 - protein, 16 aa, Homo sapiens
  CDR3 for alpha chain variable domain of TCR clone 358302 (TRAV1-1, TRAJ45)
CAVRAYSGGGADGLTF

SEQ ID NO: 716604 - protein, 13 aa, Homo sapiens
  CDR3 for beta chain variable domain of TCR clone 358302 (TRBV20-1, TRBJ1-2)
CSARGTAEYGYTF

SEQ ID NO: 716605 - protein, 14 aa, Homo sapiens
  CDR3 for alpha chain variable domain of TCR clone 358303 (TRAV26-1, TRAJ38)
CIADNAGNNRKLIW

SEQ ID NO: 716606 - protein, 13 aa, Homo sapiens
  CDR3 for beta chain variable domain of TCR clone 358303 (TRBV20-1, TRBJ1-1)
CSARDGGNNEAFF

SEQ ID NO: 716607 - protein, 22 aa, Homo sapiens
  CDR3 for alpha chain variable domain of TCR clone 358304 (TRAV34, TRAJ52)
STSVEQTRRSNAGGTSYGKLTF

SEQ ID NO: 716608 - protein, 15 aa, Homo sapiens
  CDR3 for beta chain variable domain of TCR clone 358304 (TRBV5-1, TRBJ2-7)
CASSVNGGPAGEQYF

SEQ ID NO: 716609 - protein, 13 aa, Homo sapiens
  CDR3 for alpha chain variable domain of TCR clone 358305 (TRAV13-1, TRAJ10)
CAATAGVGNKLTF

SEQ ID NO: 716610 - protein, 14 aa, Homo sapiens
  CDR3 for beta chain variable domain of TCR clone 358305 (TRBV12-4, TRBJ2-7)
CASSPAGLKYEQYF

SEQ ID NO: 716611 - protein, 12 aa, Homo sapiens
  CDR3 for alpha chain variable domain of TCR clone 358306 (TRAV13-1, TRAJ11)
CAGPSGYVTLTF

SEQ ID NO: 716612 - protein, 13 aa, Homo sapiens
  CDR3 for beta chain variable domain of TCR clone 358306 (TRBV12-4, TRBJ2-1)
CASSLSPSNEQFF

SEQ ID NO: 716613 - protein, 13 aa, Homo sapiens
  CDR3 for alpha chain variable domain of TCR clone 358307 (TRAV27, TRAJ6)
CAGGTRGSDIPTF

SEQ ID NO: 716614 - protein, 14 aa, Homo sapiens
  CDR3 for beta chain variable domain of TCR clone 358307 (TRBV7-3, TRBJ1-1)
CASSVGTGYTEAFF

SEQ ID NO: 716615 - protein, 13 aa, Homo sapiens
  CDR3 for alpha chain variable domain of TCR clone 358308 (TRAV12-3, TRAJ44)
CARTTCTASKLTS

SEQ ID NO: 716616 - protein, 15 aa, Homo sapiens
  CDR3 for beta chain variable domain of TCR clone 358308 (TRBV29-1, TRBJ1-2)
CSGLDVRGANYGYTF

SEQ ID NO: 716617 - protein, 14 aa, Homo sapiens
  CDR3 for alpha chain variable domain of TCR clone 358309 (TRAV38-1, TRAJ40)
CALRPTSGTYKYIF

SEQ ID NO: 716618 - protein, 14 aa, Homo sapiens
  CDR3 for beta chain variable domain of TCR clone 358309 (TRBV25-1, TRBJ1-1)
CASTHLGGNADAFF

SEQ ID NO: 716619 - protein, 17 aa, Homo sapiens
  CDR3 for alpha chain variable domain of TCR clone 358310 (TRAV3, TRAJ42)
CAVRDRDYGGSQGNLIF

SEQ ID NO: 716620 - protein, 15 aa, Homo sapiens
  CDR3 for beta chain variable domain of TCR clone 358310 (TRBV29-1, TRBJ2-7)
CSVEFFDRGSYEQYF

SEQ ID NO: 716621 - protein, 13 aa, Homo sapiens
  CDR3 for alpha chain variable domain of TCR clone 358311 (TRAV13-2, TRAJ5)
CAVMDTGRRALTL

SEQ ID NO: 716622 - protein, 12 aa, Homo sapiens
  CDR3 for beta chain variable domain of TCR clone 358311 (TRBV28, TRBJ2-7)
CASSCSSYEQYF

SEQ ID NO: 716623 - protein, 14 aa, Homo sapiens
  CDR3 for alpha chain variable domain of TCR clone 358312 (TRAV12-3, TRAJ23)
CVVMIYNQGGKLIF

SEQ ID NO: 716624 - protein, 23 aa, Homo sapiens
  CDR3 for beta chain variable domain of TCR clone 358312 (TRBV7-3, TRBJ1-6)
CASSLTSRDEASDPSSYNSPLHF

SEQ ID NO: 716625 - protein, 17 aa, Homo sapiens
  CDR3 for alpha chain variable domain of TCR clone 358313 (TRAV12-2, TRAJ48)
CASNEKLTFGTGTRLTV

SEQ ID NO: 716626 - protein, 20 aa, Homo sapiens
  CDR3 for beta chain variable domain of TCR clone 358313 (TRBV5-1, TRBJ2-5)
GSWCSVSAGCWGAGEKTQYF

SEQ ID NO: 716627 - protein, 13 aa, Homo sapiens
  CDR3 for alpha chain variable domain of TCR clone 358314 (TRAV22, TRAJ29)
CAVGGSGNTPLVF

SEQ ID NO: 716628 - protein, 12 aa, Homo sapiens
  CDR3 for beta chain variable domain of TCR clone 358314 (TRBV12-4, TRBJ2-7)
CASGLGGYEQYF

SEQ ID NO: 716629 - protein, 12 aa, Homo sapiens
  CDR3 for alpha chain variable domain of TCR clone 358315 (TRAV12-1, TRAJ34)
CVVAGATDKLIF

SEQ ID NO: 716630 - protein, 16 aa, Homo sapiens
  CDR3 for beta chain variable domain of TCR clone 358315 (TRBV4-2, TRBJ2-7)
CASSQEGLANSYEQYF

SEQ ID NO: 716631 - protein, 16 aa, Homo sapiens
  CDR3 for alpha chain variable domain of TCR clone 358316 (TRAV16, TRAJ4)
CARSRMFSGCYNKRIF

SEQ ID NO: 716632 - protein, 16 aa, Homo sapiens
  CDR3 for beta chain variable domain of TCR clone 358316 (TRBV24-1, TRBJ2-3)
CATSDPGTGATDTQYF

SEQ ID NO: 716633 - protein, 17 aa, Homo sapiens
  CDR3 for alpha chain variable domain of TCR clone 358317 (TRAV12-3, TRAJ6)
CAMSARGGAGGSYIPTF

SEQ ID NO: 716634 - protein, 12 aa, Homo sapiens
  CDR3 for beta chain variable domain of TCR clone 358317 (TRBV12-4, TRBJ2-3)
CASSPLPDTQYF

SEQ ID NO: 716635 - protein, 15 aa, Homo sapiens
  CDR3 for alpha chain variable domain of TCR clone 358318 (TRAV12-3, TRAJ6)
CAMSATTGGSYIPTF

SEQ ID NO: 716636 - protein, 19 aa, Homo sapiens
  CDR3 for beta chain variable domain of TCR clone 358318 (TRBV25-1, TRBJ2-2)
CAILAYRVDRGRKTGELFC

SEQ ID NO: 716637 - protein, 14 aa, Homo sapiens
  CDR3 for alpha chain variable domain of TCR clone 358319 (TRAV2, TRAJ20)
CAVEDVVNDYKLSF

SEQ ID NO: 716638 - protein, 16 aa, Homo sapiens
  CDR3 for beta chain variable domain of TCR clone 358319 (TRBV19, TRBJ2-1)
CASSKAGPSSYNEQFF

SEQ ID NO: 716639 - protein, 14 aa, Homo sapiens
  CDR3 for alpha chain variable domain of TCR clone 358320 (TRAV1-2, TRAJ8)
CAVREDTGFQKLVF

SEQ ID NO: 716640 - protein, 11 aa, Homo sapiens
  CDR3 for beta chain variable domain of TCR clone 358320 (TRBV19, TRBJ2-7)
CASSILGEQYF

SEQ ID NO: 716641 - protein, 11 aa, Homo sapiens
  CDR3 for alpha chain variable domain of TCR clone 358321 (TRAV12-2, TRAJ13)
CAARFYQKVTF

SEQ ID NO: 716642 - protein, 16 aa, Homo sapiens
  CDR3 for beta chain variable domain of TCR clone 358321 (TRBV4-2, TRBJ2-3)
CASSQELAGDTDTQYF

SEQ ID NO: 716643 - protein, 10 aa, Homo sapiens
  CDR3 for alpha chain variable domain of TCR clone 358322 (TRAV1-2, TRAJ20)
CALNDYKPSF

SEQ ID NO: 716644 - protein, 16 aa, Homo sapiens
  CDR3 for beta chain variable domain of TCR clone 358322 (TRBV20-1, TRBJ1-1)
CSVRALTQGMNTEAFF

SEQ ID NO: 716645 - protein, 17 aa, Homo sapiens
  CDR3 for alpha chain variable domain of TCR clone 358323 (TRAV3, TRAJ42)
CAVRDRDYGVSQGNLIF

SEQ ID NO: 716646 - protein, 14 aa, Homo sapiens
  CDR3 for beta chain variable domain of TCR clone 358323 (TRBV25-1, TRBJ1-1)
CASTHLGGNTEAFF

SEQ ID NO: 716647 - protein, 15 aa, Homo sapiens
  CDR3 for alpha chain variable domain of TCR clone 358324 (TRAV8-2, TRAJ40)
CVVLGTTSGTYKYIF

SEQ ID NO: 716648 - protein, 16 aa, Homo sapiens
  CDR3 for beta chain variable domain of TCR clone 358324 (TRBV2, TRBJ2-1)
CASSVGGSLSYNEQFF

SEQ ID NO: 716649 - protein, 15 aa, Homo sapiens
  CDR3 for alpha chain variable domain of TCR clone 358325 (TRAV27, TRAJ38)
CAARRNAGINRKLIW

SEQ ID NO: 716650 - protein, 14 aa, Homo sapiens
  CDR3 for beta chain variable domain of TCR clone 358325 (TRBV6-1, TRBJ1-3)
CASVQGGGGNTIYF

SEQ ID NO: 716651 - protein, 12 aa, Homo sapiens
  CDR3 for alpha chain variable domain of TCR clone 358326 (TRAV21, TRAJ49)
CAVRNTGNQFYV

SEQ ID NO: 716652 - protein, 12 aa, Homo sapiens
  CDR3 for beta chain variable domain of TCR clone 358326 (TRBV7-9, TRBJ2-7)
CATRTDAYEQYF

SEQ ID NO: 716653 - protein, 16 aa, Homo sapiens
  CDR3 for alpha chain variable domain of TCR clone 358327 (TRAV16, TRAJ4)
CALSRMCSGGYNKLIF

SEQ ID NO: 716654 - protein, 16 aa, Homo sapiens
  CDR3 for beta chain variable domain of TCR clone 358327 (TRBV24-1, TRBJ2-3)
CATSDPGTGSTDTQYF

SEQ ID NO: 716655 - protein, 19 aa, Homo sapiens
  CDR3 for alpha chain variable domain of TCR clone 358328 (TRAV3, TRAJ6)
CAVRDRNPSRSGGSYIPTF

SEQ ID NO: 716656 - protein, 15 aa, Homo sapiens
  CDR3 for beta chain variable domain of TCR clone 358328 (TRBV18, TRBJ2-7)
CASSPTFMDSYELYF

SEQ ID NO: 716657 - protein, 11 aa, Homo sapiens
  CDR3 for alpha chain variable domain of TCR clone 358329 (TRAV3, TRAJ21)
CAVGNFNKFYS

SEQ ID NO: 716658 - protein, 16 aa, Homo sapiens
  CDR3 for beta chain variable domain of TCR clone 358329 (TRBV19, TRBJ2-1)
CASSKAGPSSYNEQFF

SEQ ID NO: 716659 - protein, 11 aa, Homo sapiens
  CDR3 for alpha chain variable domain of TCR clone 358330 (TRAV20, TRAJ32)
CAVDGMVVLQT

SEQ ID NO: 716660 - protein, 15 aa, Homo sapiens
  CDR3 for beta chain variable domain of TCR clone 358330 (TRBV6-3, TRBJ2-2)
CASRGMTVDTGELFF

SEQ ID NO: 716661 - protein, 12 aa, Homo sapiens
  CDR3 for alpha chain variable domain of TCR clone 358331 (TRAV29/DV5, TRAJ43)
CAAPYNNNDMCF

SEQ ID NO: 716662 - protein, 15 aa, Homo sapiens
  CDR3 for beta chain variable domain of TCR clone 358331 (TRBV18, TRBJ1-6)
CASSRIQGRNSPLHF

SEQ ID NO: 716663 - protein, 14 aa, Homo sapiens
  CDR3 for alpha chain variable domain of TCR clone 358332 (TRAV3, TRAJ37)
CAVKESGNTGKLIF

SEQ ID NO: 716664 - protein, 20 aa, Homo sapiens
  CDR3 for beta chain variable domain of TCR clone 358332 (TRBV28, TRBJ2-1)
CASTPIGRSPGLAGGNEQFF

SEQ ID NO: 716665 - protein, 14 aa, Homo sapiens
  CDR3 for alpha chain variable domain of TCR clone 358333 (TRAV8-2, TRAJ6)
CVVISAGGSYIPTF

SEQ ID NO: 716666 - protein, 16 aa, Homo sapiens
  CDR3 for beta chain variable domain of TCR clone 358333 (TRBV7-6, TRBJ2-6)
CASSLPGRCGANVLTF

SEQ ID NO: 716667 - protein, 14 aa, Homo sapiens
  CDR3 for alpha chain variable domain of TCR clone 358334 (TRAV2, TRAJ9)
CAVVDRSGGFKTIF

SEQ ID NO: 716668 - protein, 15 aa, Homo sapiens
  CDR3 for beta chain variable domain of TCR clone 358334 (TRBV6-6, TRBJ2-7)
CASSYSYGGSYEQYF

SEQ ID NO: 716669 - protein, 12 aa, Homo sapiens
  CDR3 for alpha chain variable domain of TCR clone 358335 (TRAV14/DV4, TRAJ9)
CAMNPVGFKTIF

SEQ ID NO: 716670 - protein, 16 aa, Homo sapiens
  CDR3 for beta chain variable domain of TCR clone 358335 (TRBV28, TRBJ2-5)
CASSFSPAGGWETQYF

SEQ ID NO: 716671 - protein, 14 aa, Homo sapiens
  CDR3 for alpha chain variable domain of TCR clone 358336 (TRAV17, TRAJ57)
CATDPQGGSEKLVF

SEQ ID NO: 716672 - protein, 18 aa, Homo sapiens
  CDR3 for beta chain variable domain of TCR clone 358336 (TRBV20-1, TRBJ2-3)
CSASGLAGGPGTTDTQYF

SEQ ID NO: 716673 - protein, 12 aa, Homo sapiens
  CDR3 for alpha chain variable domain of TCR clone 358337 (TRAV21, TRAJ11)
CAGTSGYSTLTF

SEQ ID NO: 716674 - protein, 14 aa, Homo sapiens
  CDR3 for beta chain variable domain of TCR clone 358337 (TRBV20-1, TRBJ2-7)
CSAPELAGVGEQYF

SEQ ID NO: 716675 - protein, 18 aa, Homo sapiens
  CDR3 for alpha chain variable domain of TCR clone 358338 (TRAV17, TRAJ28)
CAADPPRGPGAGSYQLTF

SEQ ID NO: 716676 - protein, 14 aa, Homo sapiens
  CDR3 for beta chain variable domain of TCR clone 358338 (TRBV13, TRBJ2-5)
CASSLDYPQETQYF

SEQ ID NO: 716677 - protein, 16 aa, Homo sapiens
  CDR3 for alpha chain variable domain of TCR clone 358339 (TRAV3, TRAJ10)
CAVRDMRAGGGNKLTF

SEQ ID NO: 716678 - protein, 15 aa, Homo sapiens
  CDR3 for beta chain variable domain of TCR clone 358339 (TRBV10-3, TRBJ2-1)
CAISDVQDRAYEQFF

SEQ ID NO: 716679 - protein, 14 aa, Homo sapiens
  CDR3 for alpha chain variable domain of TCR clone 358340 (TRAV23/DV6, TRAJ22)
CADISSGSARQLTV

SEQ ID NO: 716680 - protein, 16 aa, Homo sapiens
  CDR3 for beta chain variable domain of TCR clone 358340 (TRBV5-7, TRBJ2-5)
CASIRGQTGYQETQYF

SEQ ID NO: 716681 - protein, 11 aa, Homo sapiens
  CDR3 for alpha chain variable domain of TCR clone 358341 (TRAV2, TRAJ33)
CAVDSNYQLIW

SEQ ID NO: 716682 - protein, 11 aa, Homo sapiens
  CDR3 for beta chain variable domain of TCR clone 358341 (TRBV19, TRBJ1-2)
VSDVLNYGYTF

SEQ ID NO: 716683 - protein, 14 aa, Homo sapiens
  CDR3 for alpha chain variable domain of TCR clone 358342 (TRAV16, TRAJ33)
CALSAMDSNYQLIW

SEQ ID NO: 716684 - protein, 12 aa, Homo sapiens
  CDR3 for beta chain variable domain of TCR clone 358342 (TRBV2, TRBJ2-7)
CASSDPGYEQYF

SEQ ID NO: 716685 - protein, 15 aa, Homo sapiens
  CDR3 for alpha chain variable domain of TCR clone 358343 (TRAV17, TRAJ57)
CATGPSQGGSEKLVF

SEQ ID NO: 716686 - protein, 14 aa, Homo sapiens
  CDR3 for beta chain variable domain of TCR clone 358343 (TRBV12-5, TRBJ2-5)
YASGSRTHQETQYF

SEQ ID NO: 716687 - protein, 14 aa, Homo sapiens
  CDR3 for alpha chain variable domain of TCR clone 358344 (TRAV14/DV4, TRAJ41)
CARGGPDSGYALNF

SEQ ID NO: 716688 - protein, 15 aa, Homo sapiens
  CDR3 for beta chain variable domain of TCR clone 358344 (TRBV19, TRBJ2-1)
CASSIQATSYNEEFF

SEQ ID NO: 716689 - protein, 13 aa, Homo sapiens
  CDR3 for alpha chain variable domain of TCR clone 358345 (TRAV12-3, TRAJ33)
CAISVSSNYQLIW

SEQ ID NO: 716690 - protein, 13 aa, Homo sapiens
  CDR3 for beta chain variable domain of TCR clone 358345 (TRBV7-2, TRBJ2-2)
CASSLAVTGELFF

SEQ ID NO: 716691 - protein, 12 aa, Homo sapiens
  CDR3 for alpha chain variable domain of TCR clone 358346 (TRAV21, TRAJ33)
CAKLDSNYQLIW

SEQ ID NO: 716692 - protein, 13 aa, Homo sapiens
  CDR3 for beta chain variable domain of TCR clone 358346 (TRBV19, TRBJ2-7)
CASRKAGGSEQYF

SEQ ID NO: 716693 - protein, 15 aa, Homo sapiens
  CDR3 for alpha chain variable domain of TCR clone 358347 (TRAV35, TRAJ58)
CAGRRQETSGSRLTF

SEQ ID NO: 716694 - protein, 15 aa, Homo sapiens
  CDR3 for beta chain variable domain of TCR clone 358347 (TRBV10-3, TRBJ1-1)
CHSDPRTGGNTEAFF

SEQ ID NO: 716695 - protein, 14 aa, Homo sapiens
  CDR3 for alpha chain variable domain of TCR clone 358348 (TRAV9-2, TRAJ36)
CALPWRTGANNLFF

SEQ ID NO: 716696 - protein, 13 aa, Homo sapiens
  CDR3 for beta chain variable domain of TCR clone 358348 (TRBV9, TRBJ2-1)
CASSPSGGNEQFF

SEQ ID NO: 716697 - protein, 12 aa, Homo sapiens
  CDR3 for alpha chain variable domain of TCR clone 358349 (TRAV16, TRAJ26)
CALRSYGQNFVF

SEQ ID NO: 716698 - protein, 14 aa, Homo sapiens
  CDR3 for beta chain variable domain of TCR clone 358349 (TRBV10-3, TRBJ2-1)
CAISSDLAYNEQFC

SEQ ID NO: 716699 - protein, 16 aa, Homo sapiens
  CDR3 for alpha chain variable domain of TCR clone 358350 (TRAV4, TRAJ22)
CLVGDLYSGSARQLTF

SEQ ID NO: 716700 - protein, 16 aa, Homo sapiens
  CDR3 for beta chain variable domain of TCR clone 358350 (TRBV7-9, TRBJ2-1)
CASSDVAGGSDNEQLF

SEQ ID NO: 716701 - protein, 13 aa, Homo sapiens
  CDR3 for alpha chain variable domain of TCR clone 358351 (TRAV21, TRAJ27)
CAARPGNAGKSTF

SEQ ID NO: 716702 - protein, 15 aa, Homo sapiens
  CDR3 for beta chain variable domain of TCR clone 358351 (TRBV20-1, TRBJ2-7)
CSARDRVCGMDEQYF

SEQ ID NO: 716703 - protein, 17 aa, Homo sapiens
  CDR3 for alpha chain variable domain of TCR clone 358352 (TRAV3, TRAJ38)
CAVRYCLNAGNKRKLIW

SEQ ID NO: 716704 - protein, 14 aa, Homo sapiens
  CDR3 for beta chain variable domain of TCR clone 358352 (TRBV5-5, TRBJ1-5)
CASSGQGVDQPQHF

SEQ ID NO: 716705 - protein, 11 aa, Homo sapiens
  CDR3 for alpha chain variable domain of TCR clone 358353 (TRAV29/DV5, TRAJ47)
CAAQRGNKLVF

SEQ ID NO: 716706 - protein, 12 aa, Homo sapiens
  CDR3 for beta chain variable domain of TCR clone 358353 (TRBV11-2, TRBJ2-7)
CASSLPSYEQYF

SEQ ID NO: 716707 - protein, 17 aa, Homo sapiens
  CDR3 for alpha chain variable domain of TCR clone 358354 (TRAV12-2, TRAJ22)
CAVNRIPFSVSARQLTF

SEQ ID NO: 716708 - protein, 13 aa, Homo sapiens
  CDR3 for beta chain variable domain of TCR clone 358354 (TRBV11-3, TRBJ1-1)
CASSSNRDTEAFF

SEQ ID NO: 716709 - protein, 11 aa, Homo sapiens
  CDR3 for alpha chain variable domain of TCR clone 358355 (TRAV2, TRAJ13)
CASGGYQKVTF

SEQ ID NO: 716710 - protein, 14 aa, Homo sapiens
  CDR3 for beta chain variable domain of TCR clone 358355 (TRBV7-2, TRBJ2-7)
CASSPKTSCYEQYF

SEQ ID NO: 716711 - protein, 16 aa, Homo sapiens
  CDR3 for alpha chain variable domain of TCR clone 358356 (TRAV27, TRAJ52)
CAGAGAGGPSYGKLTF

SEQ ID NO: 716712 - protein, 17 aa, Homo sapiens
  CDR3 for beta chain variable domain of TCR clone 358356 (TRBV24-1, TRBJ2-3)
CATSDLPSGEDTDTQYF

SEQ ID NO: 716713 - protein, 15 aa, Homo sapiens
  CDR3 for alpha chain variable domain of TCR clone 358357 (TRAV12-3, TRAJ6)
CAMSATSGGSYIPTF

SEQ ID NO: 716714 - protein, 15 aa, Homo sapiens
  CDR3 for beta chain variable domain of TCR clone 358357 (TRBV28, TRBJ2-1)
CASSIIAGGRSEQFF

SEQ ID NO: 716715 - protein, 18 aa, Homo sapiens
  CDR3 for alpha chain variable domain of TCR clone 358358 (TRAV12-3, TRAJ52)
CAMSVGGAGGTSYGKLTF

SEQ ID NO: 716716 - protein, 14 aa, Homo sapiens
  CDR3 for beta chain variable domain of TCR clone 358358 (TRBV6-3, TRBJ2-5)
CASLWAGGTETQYF

SEQ ID NO: 716717 - protein, 14 aa, Homo sapiens
  CDR3 for alpha chain variable domain of TCR clone 358359 (TRAV1-2, TRAJ16)
CAVNRFSDGQKLLF

SEQ ID NO: 716718 - protein, 13 aa, Homo sapiens
  CDR3 for beta chain variable domain of TCR clone 358359 (TRBV7-3, TRBJ1-2)
CASSLKWGYGYTF

SEQ ID NO: 716719 - protein, 13 aa, Homo sapiens
  CDR3 for alpha chain variable domain of TCR clone 358360 (TRAV1-2, TRAJ9)
CAVLNTGGFKTIF

SEQ ID NO: 716720 - protein, 13 aa, Homo sapiens
  CDR3 for beta chain variable domain of TCR clone 358360 (TRBV19, TRBJ2-1)
CQSDFRLSGEQFF

SEQ ID NO: 716721 - protein, 13 aa, Homo sapiens
  CDR3 for alpha chain variable domain of TCR clone 358361 (TRAV13-1, TRAJ53)
CAASKGSNYKLTF

SEQ ID NO: 716722 - protein, 14 aa, Homo sapiens
  CDR3 for beta chain variable domain of TCR clone 358361 (TRBV7-9, TRBJ2-2)
CASSGLADTGELFF

SEQ ID NO: 716723 - protein, 13 aa, Homo sapiens
  CDR3 for alpha chain variable domain of TCR clone 358362 (TRAV2, TRAJ15)
CAVASQAGTALIF

SEQ ID NO: 716724 - protein, 15 aa, Homo sapiens
  CDR3 for beta chain variable domain of TCR clone 358362 (TRBV5-1, TRBJ2-2)
CASSSQGGNTGELFF

SEQ ID NO: 716725 - protein, 15 aa, Homo sapiens
  CDR3 for alpha chain variable domain of TCR clone 358363 (TRAV13-1, TRAJ3)
CAASKLASSASKIIF

SEQ ID NO: 716726 - protein, 16 aa, Homo sapiens
  CDR3 for beta chain variable domain of TCR clone 358363 (TRBV25-1, TRBJ1-5)
CASGAPTVNSNQAQHF

SEQ ID NO: 716727 - protein, 13 aa, Homo sapiens
  CDR3 for alpha chain variable domain of TCR clone 358364 (TRAV20, TRAJ9)
CAVPDTGGFKTIF

SEQ ID NO: 716728 - protein, 15 aa, Homo sapiens
  CDR3 for beta chain variable domain of TCR clone 358364 (TRBV27, TRBJ2-7)
CASSRAGRGGYEQYF

SEQ ID NO: 716729 - protein, 11 aa, Homo sapiens
  CDR3 for alpha chain variable domain of TCR clone 358365 (TRAV3, TRAJ21)
CAVGNFNKFYF

SEQ ID NO: 716730 - protein, 16 aa, Homo sapiens
  CDR3 for beta chain variable domain of TCR clone 358365 (TRBV25-1, TRBJ2-5)
CASSEMGSRAPETQYF

SEQ ID NO: 716731 - protein, 11 aa, Homo sapiens
  CDR3 for alpha chain variable domain of TCR clone 358366 (TRAV3, TRAJ21)
CAVGNSNKFYF

SEQ ID NO: 716732 - protein, 13 aa, Homo sapiens
  CDR3 for beta chain variable domain of TCR clone 358366 (TRBV12-5, TRBJ2-3)
CASGDRQSDTQYF

SEQ ID NO: 716733 - protein, 16 aa, Homo sapiens
  CDR3 for alpha chain variable domain of TCR clone 358367 (TRAV1-2, TRAJ10)
CAVRVVLTGGGNNLTF

SEQ ID NO: 716734 - protein, 17 aa, Homo sapiens
  CDR3 for beta chain variable domain of TCR clone 358367 (TRBV13, TRBJ2-3)
CASSLSRVAGGRNTQYF

SEQ ID NO: 716735 - protein, 13 aa, Homo sapiens
  CDR3 for alpha chain variable domain of TCR clone 358368 (TRAV12-2, TRAJ20)
CAVNRFGDYKLSF

SEQ ID NO: 716736 - protein, 15 aa, Homo sapiens
  CDR3 for beta chain variable domain of TCR clone 358368 (TRBV12-4, TRBJ2-5)
CASSPPTGLQETQYF

SEQ ID NO: 716737 - protein, 14 aa, Homo sapiens
  CDR3 for alpha chain variable domain of TCR clone 358369 (TRAV12-3, TRAJ42)
CAMNYGGSQGTLIF

SEQ ID NO: 716738 - protein, 13 aa, Homo sapiens
  CDR3 for beta chain variable domain of TCR clone 358369 (TRBV20-1, TRBJ1-6)
CSAPLGVGSPLHF

SEQ ID NO: 716739 - protein, 16 aa, Homo sapiens
  CDR3 for alpha chain variable domain of TCR clone 358370 (TRAV8-6, TRAJ58)
CAVSDRTETSGSRLTF

SEQ ID NO: 716740 - protein, 14 aa, Homo sapiens
  CDR3 for beta chain variable domain of TCR clone 358370 (TRBV7-2, TRBJ1-5)
CASRPRGGPQPQHF

SEQ ID NO: 716741 - protein, 15 aa, Homo sapiens
  CDR3 for alpha chain variable domain of TCR clone 358371 (TRAV8-6, TRAJ9)
CAVSDRDTGGFKTIF

SEQ ID NO: 716742 - protein, 16 aa, Homo sapiens
  CDR3 for beta chain variable domain of TCR clone 358371 (TRBV19, TRBJ2-3)
CASSPEWDRGADTQYF

SEQ ID NO: 716743 - protein, 12 aa, Homo sapiens
  CDR3 for alpha chain variable domain of TCR clone 358372 (TRAV30, TRAJ43)
CGTAERGNDMRF

SEQ ID NO: 716744 - protein, 13 aa, Homo sapiens
  CDR3 for beta chain variable domain of TCR clone 358372 (TRBV12-4, TRBJ1-2)
CASSSGSKDGYTF

SEQ ID NO: 716745 - protein, 14 aa, Homo sapiens
  CDR3 for alpha chain variable domain of TCR clone 358373 (TRAV12-3, TRAJ7)
CAMSEIGWNKRLAF

SEQ ID NO: 716746 - protein, 12 aa, Homo sapiens
  CDR3 for beta chain variable domain of TCR clone 358373 (TRBV5-4, TRBJ1-1)
CASSLDRREAFF

SEQ ID NO: 716747 - protein, 16 aa, Homo sapiens
  CDR3 for alpha chain variable domain of TCR clone 358374 (TRAV3, TRAJ18)
CAVRDGRGSTLGRLYF

SEQ ID NO: 716748 - protein, 17 aa, Homo sapiens
  CDR3 for beta chain variable domain of TCR clone 358374 (TRBV11-2, TRBJ2-7)
CASSLAGAGVTLYEQYF

SEQ ID NO: 716749 - protein, 13 aa, Homo sapiens
  CDR3 for alpha chain variable domain of TCR clone 358375 (TRAV21, TRAJ20)
CAVGLRVDYKLSF

SEQ ID NO: 716750 - protein, 15 aa, Homo sapiens
  CDR3 for beta chain variable domain of TCR clone 358375 (TRBV12-4, TRBJ1-5)
CASTRQGSGNQPQHF

SEQ ID NO: 716751 - protein, 13 aa, Homo sapiens
  CDR3 for alpha chain variable domain of TCR clone 358376 (TRAV12-3, TRAJ39)
CAMKVGAGNMLTF

SEQ ID NO: 716752 - protein, 14 aa, Homo sapiens
  CDR3 for beta chain variable domain of TCR clone 358376 (TRBV28, TRBJ1-1)
CASSSNRGNTEAFF

SEQ ID NO: 716753 - protein, 23 aa, Homo sapiens
  CDR3 for alpha chain variable domain of TCR clone 358377 (TRAV12-2, TRAJ43)
SLLIRDSQPSDSATYLCAFDMRF

SEQ ID NO: 716754 - protein, 15 aa, Homo sapiens
  CDR3 for beta chain variable domain of TCR clone 358377 (TRBV20-1, TRBJ2-7)
CSARDRVSGMDEQYF

SEQ ID NO: 716755 - protein, 14 aa, Homo sapiens
  CDR3 for alpha chain variable domain of TCR clone 358378 (TRAV20, TRAJ32)
CCGWYGGATNKLIF

SEQ ID NO: 716756 - protein, 16 aa, Homo sapiens
  CDR3 for beta chain variable domain of TCR clone 358378 (TRBV19, TRBJ2-2)
CASRSPGTGATGELFF

SEQ ID NO: 716757 - protein, 12 aa, Homo sapiens
  CDR3 for alpha chain variable domain of TCR clone 358379 (TRAV30, TRAJ39)
CGRGNAGNMLTF

SEQ ID NO: 716758 - protein, 15 aa, Homo sapiens
  CDR3 for beta chain variable domain of TCR clone 358379 (TRBV5-1, TRBJ1-1)
CASSWTGRGNTKAFF

SEQ ID NO: 716759 - protein, 15 aa, Homo sapiens
  CDR3 for alpha chain variable domain of TCR clone 358380 (TRAV8-6, TRAJ42)
CAVRGRKPRKSHLWK

SEQ ID NO: 716760 - protein, 12 aa, Homo sapiens
  CDR3 for beta chain variable domain of TCR clone 358380 (TRBV11-2, TRBJ2-1)
CASSPGNNEQFF

SEQ ID NO: 716761 - protein, 13 aa, Homo sapiens
  CDR3 for alpha chain variable domain of TCR clone 358381 (TRAV12-2, TRAJ34)
CAVRGYNTDKLIF

SEQ ID NO: 716762 - protein, 12 aa, Homo sapiens
  CDR3 for beta chain variable domain of TCR clone 358381 (TRBV24-1, TRBJ1-1)
CATSDSDRGAFF

SEQ ID NO: 716763 - protein, 15 aa, Homo sapiens
  CDR3 for alpha chain variable domain of TCR clone 358382 (TRAV8-3, TRAJ45)
CASSYSGGGADGLTF

SEQ ID NO: 716764 - protein, 13 aa, Homo sapiens
  CDR3 for beta chain variable domain of TCR clone 358382 (TRBV7-7, TRBJ2-3)
CASSLSRADTQYF

SEQ ID NO: 716765 - protein, 19 aa, Homo sapiens
  CDR3 for alpha chain variable domain of TCR clone 358383 (TRAV26-1, TRAJ52)
CIVRAHRNAGGTSYENLTF

SEQ ID NO: 716766 - protein, 15 aa, Homo sapiens
  CDR3 for beta chain variable domain of TCR clone 358383 (TRBV29-1, TRBJ2-1)
CSGRDRKSSYNEQFF

SEQ ID NO: 716767 - protein, 14 aa, Homo sapiens
  CDR3 for alpha chain variable domain of TCR clone 358384 (TRAV4, TRAJ5)
CLVVPDTGRRALTF

SEQ ID NO: 716768 - protein, 14 aa, Homo sapiens
  CDR3 for beta chain variable domain of TCR clone 358384 (TRBV2, TRBJ1-5)
CASSENRGGQPQHF

SEQ ID NO: 716769 - protein, 11 aa, Homo sapiens
  CDR3 for alpha chain variable domain of TCR clone 358385 (TRAV3, TRAJ21)
CAVGNLNKFYF

SEQ ID NO: 716770 - protein, 12 aa, Homo sapiens
  CDR3 for beta chain variable domain of TCR clone 358385 (TRBV11-2, TRBJ2-2)
CASSLPTGELFF

SEQ ID NO: 716771 - protein, 12 aa, Homo sapiens
  CDR3 for alpha chain variable domain of TCR clone 358386 (TRAV4, TRAJ21)
CLVGDNFNKIYF

SEQ ID NO: 716772 - protein, 17 aa, Homo sapiens
  CDR3 for beta chain variable domain of TCR clone 358386 (TRBV3-1, TRBJ2-7)
CASSQDLTGLSSYEQYF

SEQ ID NO: 716773 - protein, 11 aa, Homo sapiens
  CDR3 for alpha chain variable domain of TCR clone 358387 (TRAV21, TRAJ39)
LLVNAGNMLTF

SEQ ID NO: 716774 - protein, 14 aa, Homo sapiens
  CDR3 for beta chain variable domain of TCR clone 358387 (TRBV7-8, TRBJ2-3)
CASSLEAGTDTQYF

SEQ ID NO: 716775 - protein, 12 aa, Homo sapiens
  CDR3 for alpha chain variable domain of TCR clone 358388 (TRAV35, TRAJ31)
CAAASNNARLLF

SEQ ID NO: 716776 - protein, 14 aa, Homo sapiens
  CDR3 for beta chain variable domain of TCR clone 358388 (TRBV2, TRBJ2-2)
CASSLFGGNGELFF

SEQ ID NO: 716777 - protein, 14 aa, Homo sapiens
  CDR3 for alpha chain variable domain of TCR clone 358389 (TRAV17, TRAJ45)
CATDARGGADGLTF

SEQ ID NO: 716778 - protein, 11 aa, Homo sapiens
  CDR3 for beta chain variable domain of TCR clone 358389 (TRBV28, TRBJ2-5)
CATGNQETQYS

SEQ ID NO: 716779 - protein, 13 aa, Homo sapiens
  CDR3 for alpha chain variable domain of TCR clone 358390 (TRAV13-1, TRAJ6)
CAARRGGSSIPTF

SEQ ID NO: 716780 - protein, 14 aa, Homo sapiens
  CDR3 for beta chain variable domain of TCR clone 358390 (TRBV19, TRBJ2-2)
CASSTLHRSGELFF

SEQ ID NO: 716781 - protein, 15 aa, Homo sapiens
  CDR3 for alpha chain variable domain of TCR clone 358391 (TRAV38-1, TRAJ37)
CAFIFGSGNTGKLIF

SEQ ID NO: 716782 - protein, 13 aa, Homo sapiens
  CDR3 for beta chain variable domain of TCR clone 358391 (TRBV10-3, TRBJ2-5)
CAISESGRGAQYF

SEQ ID NO: 716783 - protein, 14 aa, Homo sapiens
  CDR3 for alpha chain variable domain of TCR clone 358392 (TRAV1-1, TRAJ30)
CAVRSLNRDDKIIF

SEQ ID NO: 716784 - protein, 17 aa, Homo sapiens
  CDR3 for beta chain variable domain of TCR clone 358392 (TRBV4-1, TRBJ2-3)
CASSQGYVSGGTDTQYF

SEQ ID NO: 716785 - protein, 10 aa, Homo sapiens
  CDR3 for alpha chain variable domain of TCR clone 358393 (TRAV5, TRAJ34)
CAEDTDKLIF

SEQ ID NO: 716786 - protein, 17 aa, Homo sapiens
  CDR3 for beta chain variable domain of TCR clone 358393 (TRBV4-1, TRBJ2-5)
CASSQDLTGGPIETQYF

SEQ ID NO: 716787 - protein, 15 aa, Homo sapiens
  CDR3 for alpha chain variable domain of TCR clone 358394 (TRAV17, TRAJ42)
CATDHYGGSQGNLIF

SEQ ID NO: 716788 - protein, 15 aa, Homo sapiens
  CDR3 for beta chain variable domain of TCR clone 358394 (TRBV7-2, TRBJ2-7)
CASSLKGALTYEQYF

SEQ ID NO: 716789 - protein, 14 aa, Homo sapiens
  CDR3 for alpha chain variable domain of TCR clone 358395 (TRAV1-2, TRAJ16)
CAVNRFSDGQKLLF

SEQ ID NO: 716790 - protein, 16 aa, Homo sapiens
  CDR3 for beta chain variable domain of TCR clone 358395 (TRBV12-4, TRBJ1-5)
CSSSRPVGGSNQPQHF

SEQ ID NO: 716791 - protein, 11 aa, Homo sapiens
  CDR3 for alpha chain variable domain of TCR clone 358396 (TRAV13-2, TRAJ17)
CAENKGGKLQA

SEQ ID NO: 716792 - protein, 17 aa, Homo sapiens
  CDR3 for beta chain variable domain of TCR clone 358396 (TRBV20-1, TRBJ1-5)
CSASLSPGQGGNQPQHF

SEQ ID NO: 716793 - protein, 14 aa, Homo sapiens
  CDR3 for alpha chain variable domain of TCR clone 358397 (TRAV12-3, TRAJ10)
SHLPLTGGGNKLTF

SEQ ID NO: 716794 - protein, 15 aa, Homo sapiens
  CDR3 for beta chain variable domain of TCR clone 358397 (TRBV9, TRBJ1-6)
CASSVSGTGDSPLHF

SEQ ID NO: 716795 - protein, 14 aa, Homo sapiens
  CDR3 for alpha chain variable domain of TCR clone 358398 (TRAV36/DV7, TRAJ44)
CRGANTGTASKLTF

SEQ ID NO: 716796 - protein, 15 aa, Homo sapiens
  CDR3 for beta chain variable domain of TCR clone 358398 (TRBV12-4, TRBJ2-5)
CASSPPTGLQETQYF

SEQ ID NO: 716797 - protein, 16 aa, Homo sapiens
  CDR3 for alpha chain variable domain of TCR clone 358399 (TRAV3, TRAJ42)
CAVRAIEGGSQGNLIF

SEQ ID NO: 716798 - protein, 14 aa, Homo sapiens
  CDR3 for beta chain variable domain of TCR clone 358399 (TRBV18, TRBJ1-1)
CASSPPTGRTEAFF

SEQ ID NO: 716799 - protein, 13 aa, Homo sapiens
  CDR3 for alpha chain variable domain of TCR clone 358400 (TRAV8-3, TRAJ36)
CAVGVTGANNLFF

SEQ ID NO: 716800 - protein, 15 aa, Homo sapiens
  CDR3 for beta chain variable domain of TCR clone 358400 (TRBV7-2, TRBJ1-2)
CASSPRASWNYGYTF

SEQ ID NO: 716801 - protein, 10 aa, Homo sapiens
  CDR3 for alpha chain variable domain of TCR clone 358401 (TRAV26-1, TRAJ40)
CIAGTYKYIF

SEQ ID NO: 716802 - protein, 13 aa, Homo sapiens
  CDR3 for beta chain variable domain of TCR clone 358401 (TRBV2, TRBJ2-7)
CASSVVEAYEQYF

SEQ ID NO: 716803 - protein, 12 aa, Homo sapiens
  CDR3 for alpha chain variable domain of TCR clone 358402 (TRAV21, TRAJ43)
CAVSWNNNDMRF

SEQ ID NO: 716804 - protein, 15 aa, Homo sapiens
  CDR3 for beta chain variable domain of TCR clone 358402 (TRBV20-1, TRBJ1-1)
CSASRGVTGNTEAFF

SEQ ID NO: 716805 - protein, 14 aa, Homo sapiens
  CDR3 for alpha chain variable domain of TCR clone 358403 (TRAV2, TRAJ9)
CAVDPNTGGFKTIF

SEQ ID NO: 716806 - protein, 14 aa, Homo sapiens
  CDR3 for beta chain variable domain of TCR clone 358403 (TRBV7-2, TRBJ2-7)
CDSSPKTSFYEQYF

SEQ ID NO: 716807 - protein, 12 aa, Homo sapiens
  CDR3 for alpha chain variable domain of TCR clone 358404 (TRAV13-1, TRAJ15)
CAASQAGTALIV

SEQ ID NO: 716808 - protein, 14 aa, Homo sapiens
  CDR3 for beta chain variable domain of TCR clone 358404 (TRBV19, TRBJ2-1)
CAGPTVVLSGEQFF

SEQ ID NO: 716809 - protein, 15 aa, Homo sapiens
  CDR3 for alpha chain variable domain of TCR clone 358405 (TRAV9-2, TRAJ49)
CALSPPDHTGNKFYF

SEQ ID NO: 716810 - protein, 14 aa, Homo sapiens
  CDR3 for beta chain variable domain of TCR clone 358405 (TRBV12-4, TRBJ1-1)
CASSLGTGGTEAFF

SEQ ID NO: 716811 - protein, 14 aa, Homo sapiens
  CDR3 for alpha chain variable domain of TCR clone 358406 (TRAV26-1, TRAJ38)
CIADNAGNNRNLIW

SEQ ID NO: 716812 - protein, 13 aa, Homo sapiens
  CDR3 for beta chain variable domain of TCR clone 358406 (TRBV4-1, TRBJ2-7)
CASSQGQAYEQYF

SEQ ID NO: 716813 - protein, 14 aa, Homo sapiens
  CDR3 for alpha chain variable domain of TCR clone 358407 (TRAV12-2, TRAJ13)
CAVKKTGGYQKVTF

SEQ ID NO: 716814 - protein, 15 aa, Homo sapiens
  CDR3 for beta chain variable domain of TCR clone 358407 (TRBV11-2, TRBJ2-5)
CASSLGAGGVETQYF

SEQ ID NO: 716815 - protein, 14 aa, Homo sapiens
  CDR3 for alpha chain variable domain of TCR clone 358408 (TRAV8-3, TRAJ36)
CAVGPITGANNHFF

SEQ ID NO: 716816 - protein, 15 aa, Homo sapiens
  CDR3 for beta chain variable domain of TCR clone 358408 (TRBV4-1, TRBJ2-1)
CASSQDPGNYNEQFF

SEQ ID NO: 716817 - protein, 13 aa, Homo sapiens
  CDR3 for alpha chain variable domain of TCR clone 358409 (TRAV3, TRAJ29)
CTVRDIIDTPLVF

SEQ ID NO: 716818 - protein, 14 aa, Homo sapiens
  CDR3 for beta chain variable domain of TCR clone 358409 (TRBV27, TRBJ2-1)
CASSATGGYNEQFF

SEQ ID NO: 716819 - protein, 12 aa, Homo sapiens
  CDR3 for alpha chain variable domain of TCR clone 358410 (TRAV12-3, TRAJ17)
FAMALTGNKLTF

SEQ ID NO: 716820 - protein, 15 aa, Homo sapiens
  CDR3 for beta chain variable domain of TCR clone 358410 (TRBV20-1, TRBJ2-7)
CSARDRVSGMDEQYF

SEQ ID NO: 716821 - protein, 14 aa, Homo sapiens
  CDR3 for alpha chain variable domain of TCR clone 358411 (TRAV8-1, TRAJ34)
CAVNPYYNTDKLIF

SEQ ID NO: 716822 - protein, 16 aa, Homo sapiens
  CDR3 for beta chain variable domain of TCR clone 358411 (TRBV7-2, TRBJ2-6)
CASSLAGRSGANVLTF

SEQ ID NO: 716823 - protein, 18 aa, Homo sapiens
  CDR3 for alpha chain variable domain of TCR clone 358412 (TRAV26-1, TRAJ22)
CIVRVALISSGSARQLTF

SEQ ID NO: 716824 - protein, 13 aa, Homo sapiens
  CDR3 for beta chain variable domain of TCR clone 358412 (TRBV13, TRBJ2-5)
CDSSPEVGETQYF

SEQ ID NO: 716825 - protein, 12 aa, Homo sapiens
  CDR3 for alpha chain variable domain of TCR clone 358413 (TRAV13-2, TRAJ23)
CAERHRGGKLIV

SEQ ID NO: 716826 - protein, 18 aa, Homo sapiens
  CDR3 for beta chain variable domain of TCR clone 358413 (TRBV11-2, TRBJ2-3)
CASSLGGASRGAPNTQYF

SEQ ID NO: 716827 - protein, 14 aa, Homo sapiens
  CDR3 for alpha chain variable domain of TCR clone 358414 (TRAV26-1, TRAJ6)
FIVSPVGGSYIPTF

SEQ ID NO: 716828 - protein, 16 aa, Homo sapiens
  CDR3 for beta chain variable domain of TCR clone 358414 (TRBV4-1, TRBJ2-5)
CASSSGLAGVLGTQYF

SEQ ID NO: 716829 - protein, 15 aa, Homo sapiens
  CDR3 for alpha chain variable domain of TCR clone 358415 (TRAV12-3, TRAJ13)
CAMSARSGGYQKVTF

SEQ ID NO: 716830 - protein, 18 aa, Homo sapiens
  CDR3 for beta chain variable domain of TCR clone 358415 (TRBV3-1, TRBJ2-7)
CASSQAGGGRSWYYEQYF

SEQ ID NO: 716831 - protein, 14 aa, Homo sapiens
  CDR3 for alpha chain variable domain of TCR clone 358416 (TRAV1-2, TRAJ16)
CAVNRFSDGQKLLF

SEQ ID NO: 716832 - protein, 14 aa, Homo sapiens
  CDR3 for beta chain variable domain of TCR clone 358416 (TRBV7-2, TRBJ1-1)
CASSHRQGRTEAFF

SEQ ID NO: 716833 - protein, 13 aa, Homo sapiens
  CDR3 for alpha chain variable domain of TCR clone 358417 (TRAV8-4, TRAJ10)
CAAFTAGGNKLTF

SEQ ID NO: 716834 - protein, 15 aa, Homo sapiens
  CDR3 for beta chain variable domain of TCR clone 358417 (TRBV2, TRBJ2-3)
CASSDFEKATDTQYF

SEQ ID NO: 716835 - protein, 13 aa, Homo sapiens
  CDR3 for alpha chain variable domain of TCR clone 358418 (TRAV23/DV6, TRAJ47)
CAASIRSGIWKQT

SEQ ID NO: 716836 - protein, 13 aa, Homo sapiens
  CDR3 for beta chain variable domain of TCR clone 358418 (TRBV19, TRBJ1-2)
CASSQGQVYGYTF

SEQ ID NO: 716837 - protein, 15 aa, Homo sapiens
  CDR3 for alpha chain variable domain of TCR clone 358419 (TRAV8-3, TRAJ45)
CASSYSGGCADGLTF

SEQ ID NO: 716838 - protein, 13 aa, Homo sapiens
  CDR3 for beta chain variable domain of TCR clone 358419 (TRBV10-3, TRBJ2-7)
CASNLAVNYEQYF

SEQ ID NO: 716839 - protein, 14 aa, Homo sapiens
  CDR3 for alpha chain variable domain of TCR clone 358420 (TRAV17, TRAJ39)
CATEPVRAGKMLTF

SEQ ID NO: 716840 - protein, 15 aa, Homo sapiens
  CDR3 for beta chain variable domain of TCR clone 358420 (TRBV13, TRBJ1-5)
CASSFGQGGVQPQHF

SEQ ID NO: 716841 - protein, 13 aa, Homo sapiens
  CDR3 for alpha chain variable domain of TCR clone 358421 (TRAV8-3, TRAJ43)
CAVGPDNNNDMRF

SEQ ID NO: 716842 - protein, 14 aa, Homo sapiens
  CDR3 for beta chain variable domain of TCR clone 358421 (TRBV19, TRBJ2-1)
CAIPTFVLSGEQFF

SEQ ID NO: 716843 - protein, 12 aa, Homo sapiens
  CDR3 for alpha chain variable domain of TCR clone 358422 (TRAV12-3, TRAJ17)
CAMTITGNKLTF

SEQ ID NO: 716844 - protein, 14 aa, Homo sapiens
  CDR3 for beta chain variable domain of TCR clone 358422 (TRBV12-4, TRBJ1-1)
CASSLGTGGTEAFF

SEQ ID NO: 716845 - protein, 16 aa, Homo sapiens
  CDR3 for alpha chain variable domain of TCR clone 358423 (TRAV1-2, TRAJ10)
CAVRGVLTGGGNKLTS

SEQ ID NO: 716846 - protein, 14 aa, Homo sapiens
  CDR3 for beta chain variable domain of TCR clone 358423 (TRBV27, TRBJ2-5)
CASSSLKGWETQYF

SEQ ID NO: 716847 - protein, 17 aa, Homo sapiens
  CDR3 for alpha chain variable domain of TCR clone 358424 (TRAV23/DV6, TRAJ57)
CAASSNLSQGGSEKLVF

SEQ ID NO: 716848 - protein, 14 aa, Homo sapiens
  CDR3 for beta chain variable domain of TCR clone 358424 (TRBV19, TRBJ2-1)
CASSKDRGQDEQFF

SEQ ID NO: 716849 - protein, 12 aa, Homo sapiens
  CDR3 for alpha chain variable domain of TCR clone 358425 (TRAV2, TRAJ10)
CASTGGGNKLTF

SEQ ID NO: 716850 - protein, 15 aa, Homo sapiens
  CDR3 for beta chain variable domain of TCR clone 358425 (TRBV12-4, TRBJ2-5)
CASSPPTGLQETQYF

SEQ ID NO: 716851 - protein, 16 aa, Homo sapiens
  CDR3 for alpha chain variable domain of TCR clone 358426 (TRAV27, TRAJ13)
CAGAKSDSGGYKKVTF

SEQ ID NO: 716852 - protein, 15 aa, Homo sapiens
  CDR3 for beta chain variable domain of TCR clone 358426 (TRBV9, TRBJ1-6)
CASSVAGTGDSPLHF

SEQ ID NO: 716853 - protein, 16 aa, Homo sapiens
  CDR3 for alpha chain variable domain of TCR clone 358427 (TRAV3, TRAJ10)
CAVRDMRAAGGNKLTF

SEQ ID NO: 716854 - protein, 15 aa, Homo sapiens
  CDR3 for beta chain variable domain of TCR clone 358427 (TRBV11-2, TRBJ1-6)
CASTGFGTAVSPLHF

SEQ ID NO: 716855 - protein, 14 aa, Homo sapiens
  CDR3 for alpha chain variable domain of TCR clone 358428 (TRAV12-2, TRAJ44)
CAVNPAGTASKLTF

SEQ ID NO: 716856 - protein, 13 aa, Homo sapiens
  CDR3 for beta chain variable domain of TCR clone 358428 (TRBV20-1, TRBJ1-6)
CSAPFGVGSPLHF

SEQ ID NO: 716857 - protein, 14 aa, Homo sapiens
  CDR3 for alpha chain variable domain of TCR clone 358429 (TRAV8-3, TRAJ11)
CAVGSNSGYSTLTF

SEQ ID NO: 716858 - protein, 19 aa, Homo sapiens
  CDR3 for beta chain variable domain of TCR clone 358429 (TRBV25-1, TRBJ2-2)
CAILVYRVDRGRKTGELFF

SEQ ID NO: 716859 - protein, 14 aa, Homo sapiens
  CDR3 for alpha chain variable domain of TCR clone 358430 (TRAV23/DV6, TRAJ22)
CAASVSGSTRQLTF

SEQ ID NO: 716860 - protein, 13 aa, Homo sapiens
  CDR3 for beta chain variable domain of TCR clone 358430 (TRBV11-2, TRBJ2-5)
CASSRGPSETQYF

SEQ ID NO: 716861 - protein, 14 aa, Homo sapiens
  CDR3 for alpha chain variable domain of TCR clone 358431 (TRAV13-1, TRAJ40)
CAASMTSGTYKYIF

SEQ ID NO: 716862 - protein, 14 aa, Homo sapiens
  CDR3 for beta chain variable domain of TCR clone 358431 (TRBV18, TRBJ2-5)
CASSPGVSQETQYS

SEQ ID NO: 716863 - protein, 12 aa, Homo sapiens
  CDR3 for alpha chain variable domain of TCR clone 358432 (TRAV21, TRAJ13)
PGPSGGYQKVTF

SEQ ID NO: 716864 - protein, 13 aa, Homo sapiens
  CDR3 for beta chain variable domain of TCR clone 358432 (TRBV7-7, TRBJ2-3)
CASSLSRADTQYF

SEQ ID NO: 716865 - protein, 13 aa, Homo sapiens
  CDR3 for alpha chain variable domain of TCR clone 358433 (TRAV21, TRAJ20)
CAVGLRVDYKLSF

SEQ ID NO: 716866 - protein, 16 aa, Homo sapiens
  CDR3 for beta chain variable domain of TCR clone 358433 (TRBV18, TRBJ2-7)
CASSPRSQGISYEQYF

SEQ ID NO: 716867 - protein, 15 aa, Homo sapiens
  CDR3 for alpha chain variable domain of TCR clone 358434 (TRAV17, TRAJ54)
CATEKLGQGAQKLVF

SEQ ID NO: 716868 - protein, 14 aa, Homo sapiens
  CDR3 for beta chain variable domain of TCR clone 358434 (TRBV18, TRBJ2-5)
CASSPGVSKETQYF

SEQ ID NO: 716869 - protein, 16 aa, Homo sapiens
  CDR3 for alpha chain variable domain of TCR clone 358435 (TRAV3, TRAJ10)
CAVRDMRAGGGNKLTI

SEQ ID NO: 716870 - protein, 13 aa, Homo sapiens
  CDR3 for beta chain variable domain of TCR clone 358435 (TRBV6-1, TRBJ1-1)
CASSRRGNTEAFF

SEQ ID NO: 716871 - protein, 15 aa, Homo sapiens
  CDR3 for alpha chain variable domain of TCR clone 358436 (TRAV26-1, TRAJ56)
CIVRVDNGANSKMTF

SEQ ID NO: 716872 - protein, 15 aa, Homo sapiens
  CDR3 for beta chain variable domain of TCR clone 358436 (TRBV20-1, TRBJ2-7)
CSARDPTEVGHEQYF

SEQ ID NO: 716873 - protein, 13 aa, Homo sapiens
  CDR3 for alpha chain variable domain of TCR clone 358437 (TRAV23/DV6, TRAJ58)
CEARLIRGSRLTF

SEQ ID NO: 716874 - protein, 13 aa, Homo sapiens
  CDR3 for beta chain variable domain of TCR clone 358437 (TRBV2, TRBJ1-6)
CADSGSYNSPLHF

SEQ ID NO: 716875 - protein, 16 aa, Homo sapiens
  CDR3 for alpha chain variable domain of TCR clone 358438 (TRAV30, TRAJ49)
SAAQRVGPNTVNQFYF

SEQ ID NO: 716876 - protein, 15 aa, Homo sapiens
  CDR3 for beta chain variable domain of TCR clone 358438 (TRBV2, TRBJ2-1)
CASSEIAGSYNEQFF

SEQ ID NO: 716877 - protein, 15 aa, Homo sapiens
  CDR3 for alpha chain variable domain of TCR clone 358439 (TRAV8-2, TRAJ40)
CVVRDRGSGTYKYIF

SEQ ID NO: 716878 - protein, 14 aa, Homo sapiens
  CDR3 for beta chain variable domain of TCR clone 358439 (TRBV7-2, TRBJ2-7)
CASSPKTSFYEQYF

SEQ ID NO: 716879 - protein, 10 aa, Homo sapiens
  CDR3 for alpha chain variable domain of TCR clone 358440 (TRAV12-2, TRAJ20)
CAVYLYKLSF

SEQ ID NO: 716880 - protein, 19 aa, Homo sapiens
  CDR3 for beta chain variable domain of TCR clone 358440 (TRBV11-2, TRBJ1-3)
CASRKEFGTGRTPGNTIYF

SEQ ID NO: 716881 - protein, 13 aa, Homo sapiens
  CDR3 for alpha chain variable domain of TCR clone 358441 (TRAV3, TRAJ36)
CAVKRTGANNLFF

SEQ ID NO: 716882 - protein, 15 aa, Homo sapiens
  CDR3 for beta chain variable domain of TCR clone 358441 (TRBV19, TRBJ2-1)
CASSIQATSYNEQFF

SEQ ID NO: 716883 - protein, 12 aa, Homo sapiens
  CDR3 for alpha chain variable domain of TCR clone 358442 (TRAV27, TRAJ35)
CAGADFGNVLHC

SEQ ID NO: 716884 - protein, 16 aa, Homo sapiens
  CDR3 for beta chain variable domain of TCR clone 358442 (TRBV6-1, TRBJ2-1)
CASMSRQGSSYNEQFF

SEQ ID NO: 716885 - protein, 13 aa, Homo sapiens
  CDR3 for alpha chain variable domain of TCR clone 358443 (TRAV16, TRAJ15)
CALRPNGRNCSDL

SEQ ID NO: 716886 - protein, 16 aa, Homo sapiens
  CDR3 for beta chain variable domain of TCR clone 358443 (TRBV6-5, TRBJ2-2)
CASSYGRVPDTGELFF

SEQ ID NO: 716887 - protein, 13 aa, Homo sapiens
  CDR3 for alpha chain variable domain of TCR clone 358444 (TRAV3, TRAJ20)
CAVRSLNDYKLSF

SEQ ID NO: 716888 - protein, 13 aa, Homo sapiens
  CDR3 for beta chain variable domain of TCR clone 358444 (TRBV6-1, TRBJ2-1)
CAGMDPTNSEQFF

SEQ ID NO: 716889 - protein, 15 aa, Homo sapiens
  CDR3 for alpha chain variable domain of TCR clone 358445 (TRAV13-1, TRAJ32)
CAASNGWWCYKQAHL

SEQ ID NO: 716890 - protein, 15 aa, Homo sapiens
  CDR3 for beta chain variable domain of TCR clone 358445 (TRBV20-1, TRBJ1-2)
CSAIRTGAFSYGYTF

SEQ ID NO: 716891 - protein, 12 aa, Homo sapiens
  CDR3 for alpha chain variable domain of TCR clone 358446 (TRAV2, TRAJ9)
CAVGAGGFKTIF

SEQ ID NO: 716892 - protein, 15 aa, Homo sapiens
  CDR3 for beta chain variable domain of TCR clone 358446 (TRBV11-2, TRBJ1-3)
CASSLDGTVGNTMYF

SEQ ID NO: 716893 - protein, 14 aa, Homo sapiens
  CDR3 for alpha chain variable domain of TCR clone 358447 (TRAV1-2, TRAJ8)
CAVRDPPGFQKLVF

SEQ ID NO: 716894 - protein, 16 aa, Homo sapiens
  CDR3 for beta chain variable domain of TCR clone 358447 (TRBV7-9, TRBJ1-2)
CASSLGFSSGEDGYTF

SEQ ID NO: 716895 - protein, 16 aa, Homo sapiens
  CDR3 for alpha chain variable domain of TCR clone 358448 (TRAV3, TRAJ5)
CAVRNLMDTGRRVLTF

SEQ ID NO: 716896 - protein, 16 aa, Homo sapiens
  CDR3 for beta chain variable domain of TCR clone 358448 (TRBV4-2, TRBJ2-7)
CASSQEGLAISYEQYF

SEQ ID NO: 716897 - protein, 14 aa, Homo sapiens
  CDR3 for alpha chain variable domain of TCR clone 358449 (TRAV27, TRAJ22)
CAGVSVLGKRQLTF

SEQ ID NO: 716898 - protein, 17 aa, Homo sapiens
  CDR3 for beta chain variable domain of TCR clone 358449 (TRBV14, TRBJ2-1)
WASSQDRRVTSYNEQFF

SEQ ID NO: 716899 - protein, 12 aa, Homo sapiens
  CDR3 for alpha chain variable domain of TCR clone 358450 (TRAV1-1, TRAJ8)
CAGGTGFQKLVF

SEQ ID NO: 716900 - protein, 15 aa, Homo sapiens
  CDR3 for beta chain variable domain of TCR clone 358450 (TRBV11-2, TRBJ2-1)
CASSLGPDSYNEQFF

SEQ ID NO: 716901 - protein, 16 aa, Homo sapiens
  CDR3 for alpha chain variable domain of TCR clone 358451 (TRAV38-1, TRAJ45)
CAFMKGSGGGADGLTF

SEQ ID NO: 716902 - protein, 15 aa, Homo sapiens
  CDR3 for beta chain variable domain of TCR clone 358451 (TRBV20-1, TRBJ2-7)
CRAREGRDSLYEQYF

SEQ ID NO: 716903 - protein, 13 aa, Homo sapiens
  CDR3 for alpha chain variable domain of TCR clone 358452 (TRAV19, TRAJ57)
CALLQGGSEKLVF

SEQ ID NO: 716904 - protein, 13 aa, Homo sapiens
  CDR3 for beta chain variable domain of TCR clone 358452 (TRBV10-3, TRBJ2-7)
CASKLAVNYEQYF

SEQ ID NO: 716905 - protein, 11 aa, Homo sapiens
  CDR3 for alpha chain variable domain of TCR clone 358453 (TRAV12-1, TRAJ21)
CVVNNFNKFYF

SEQ ID NO: 716906 - protein, 17 aa, Homo sapiens
  CDR3 for beta chain variable domain of TCR clone 358453 (TRBV13, TRBJ2-3)
CASSLSRVAGGRNTQYF

SEQ ID NO: 716907 - protein, 14 aa, Homo sapiens
  CDR3 for alpha chain variable domain of TCR clone 358454 (TRAV1-2, TRAJ16)
CAVNRFSDGQKLLF

SEQ ID NO: 716908 - protein, 14 aa, Homo sapiens
  CDR3 for beta chain variable domain of TCR clone 358454 (TRBV7-3, TRBJ1-1)
CASRLGTGYTEAFF

SEQ ID NO: 716909 - protein, 14 aa, Homo sapiens
  CDR3 for alpha chain variable domain of TCR clone 358455 (TRAV12-3, TRAJ9)
CAMSPNNGGFKTIF

SEQ ID NO: 716910 - protein, 13 aa, Homo sapiens
  CDR3 for beta chain variable domain of TCR clone 358455 (TRBV4-2, TRBJ1-1)
CASSQAGNTEAFF

SEQ ID NO: 716911 - protein, 15 aa, Homo sapiens
  CDR3 for alpha chain variable domain of TCR clone 358456 (TRAV26-1, TRAJ22)
CFVRVSFWFCKATDL

SEQ ID NO: 716912 - protein, 16 aa, Homo sapiens
  CDR3 for beta chain variable domain of TCR clone 358456 (TRBV24-1, TRBJ2-3)
CATSDPGTGATDTQYF

SEQ ID NO: 716913 - protein, 11 aa, Homo sapiens
  CDR3 for alpha chain variable domain of TCR clone 358457 (TRAV35, TRAJ30)
CAGERDDKMIF

SEQ ID NO: 716914 - protein, 14 aa, Homo sapiens
  CDR3 for beta chain variable domain of TCR clone 358457 (TRBV15, TRBJ2-5)
CATSGDRGQETQYF

SEQ ID NO: 716915 - protein, 14 aa, Homo sapiens
  CDR3 for alpha chain variable domain of TCR clone 358458 (TRAV1-2, TRAJ8)
CAVREDTGFQKIVF

SEQ ID NO: 716916 - protein, 16 aa, Homo sapiens
  CDR3 for beta chain variable domain of TCR clone 358458 (TRBV20-1, TRBJ1-4)
CSAPGQGLLTNEKLFF

SEQ ID NO: 716917 - protein, 15 aa, Homo sapiens
  CDR3 for alpha chain variable domain of TCR clone 358459 (TRAV13-1, TRAJ10)
CAATILTGGGDKLTF

SEQ ID NO: 716918 - protein, 16 aa, Homo sapiens
  CDR3 for beta chain variable domain of TCR clone 358459 (TRBV28, TRBJ2-7)
CASSSSGTSGSYEQYF

SEQ ID NO: 716919 - protein, 14 aa, Homo sapiens
  CDR3 for alpha chain variable domain of TCR clone 358460 (TRAV1-1, TRAJ28)
CAVQLWGWELPTHF

SEQ ID NO: 716920 - protein, 15 aa, Homo sapiens
  CDR3 for beta chain variable domain of TCR clone 358460 (TRBV5-1, TRBJ2-1)
CASSPPRAPYNEQFF

SEQ ID NO: 716921 - protein, 15 aa, Homo sapiens
  CDR3 for alpha chain variable domain of TCR clone 358461 (TRAV8-3, TRAJ45)
CASSYSGGGADGLPF

SEQ ID NO: 716922 - protein, 13 aa, Homo sapiens
  CDR3 for beta chain variable domain of TCR clone 358461 (TRBV10-3, TRBJ2-7)
CASELAVNYEQYL

SEQ ID NO: 716923 - protein, 14 aa, Homo sapiens
  CDR3 for alpha chain variable domain of TCR clone 358462 (TRAV21, TRAJ48)
CAVIAHFGTEKLTF

SEQ ID NO: 716924 - protein, 14 aa, Homo sapiens
  CDR3 for beta chain variable domain of TCR clone 358462 (TRBV12-5, TRBJ2-5)
CASGSRTHQETQYF

SEQ ID NO: 716925 - protein, 13 aa, Homo sapiens
  CDR3 for alpha chain variable domain of TCR clone 358463 (TRAV12-2, TRAJ52)
CNAGGTSYGKLTF

SEQ ID NO: 716926 - protein, 13 aa, Homo sapiens
  CDR3 for beta chain variable domain of TCR clone 358463 (TRBV24-1, TRBJ2-2)
CATSDWSTGELFF

SEQ ID NO: 716927 - protein, 18 aa, Homo sapiens
  CDR3 for alpha chain variable domain of TCR clone 358464 (TRAV26-2, TRAJ45)
CILRVDKYSGGGADGLTF

SEQ ID NO: 716928 - protein, 16 aa, Homo sapiens
  CDR3 for beta chain variable domain of TCR clone 358464 (TRBV2, TRBJ1-4)
CASNLVQGATNEKLFF

SEQ ID NO: 716929 - protein, 13 aa, Homo sapiens
  CDR3 for alpha chain variable domain of TCR clone 358465 (TRAV35, TRAJ57)
CAGSQGGSEKPVF

SEQ ID NO: 716930 - protein, 11 aa, Homo sapiens
  CDR3 for beta chain variable domain of TCR clone 358465 (TRBV7-8, TRBJ2-7)
CDSSLSLEQYF

SEQ ID NO: 716931 - protein, 16 aa, Homo sapiens
  CDR3 for alpha chain variable domain of TCR clone 358466 (TRAV30, TRAJ24)
CGTEIVDADGWGKFQF

SEQ ID NO: 716932 - protein, 14 aa, Homo sapiens
  CDR3 for beta chain variable domain of TCR clone 358466 (TRBV12-5, TRBJ2-5)
CASGPRTHQETQYF

SEQ ID NO: 716933 - protein, 15 aa, Homo sapiens
  CDR3 for alpha chain variable domain of TCR clone 358467 (TRAV27, TRAJ38)
CAARRNAGNNRKLIW

SEQ ID NO: 716934 - protein, 17 aa, Homo sapiens
  CDR3 for beta chain variable domain of TCR clone 358467 (TRBV20-1, TRBJ2-2)
CSASGSGQGGLTGELFV

SEQ ID NO: 716935 - protein, 14 aa, Homo sapiens
  CDR3 for alpha chain variable domain of TCR clone 358468 (TRAV3, TRAJ7)
CAVREEERERQTRF

SEQ ID NO: 716936 - protein, 15 aa, Homo sapiens
  CDR3 for beta chain variable domain of TCR clone 358468 (TRBV20-1, TRBJ1-5)
CSAFKNGQRYQPQHF

SEQ ID NO: 716937 - protein, 11 aa, Homo sapiens
  CDR3 for alpha chain variable domain of TCR clone 358469 (TRAV2, TRAJ13)
CASGGYQKVTF

SEQ ID NO: 716938 - protein, 15 aa, Homo sapiens
  CDR3 for beta chain variable domain of TCR clone 358469 (TRBV7-3, TRBJ2-1)
CASSLAGAGADEQFF

SEQ ID NO: 716939 - protein, 12 aa, Homo sapiens
  CDR3 for alpha chain variable domain of TCR clone 358470 (TRAV12-3, TRAJ20)
CAMVRGDYKLSF

SEQ ID NO: 716940 - protein, 14 aa, Homo sapiens
  CDR3 for beta chain variable domain of TCR clone 358470 (TRBV7-3, TRBJ2-1)
CASSLAGGTNEQFF

SEQ ID NO: 716941 - protein, 13 aa, Homo sapiens
  CDR3 for alpha chain variable domain of TCR clone 358471 (TRAV38-2/DV8, TRAJ34)
CAYRTWNNDKLIF

SEQ ID NO: 716942 - protein, 18 aa, Homo sapiens
  CDR3 for beta chain variable domain of TCR clone 358471 (TRBV6-6, TRBJ1-3)
CASSYSKWDSISGNTIYF

SEQ ID NO: 716943 - protein, 17 aa, Homo sapiens
  CDR3 for alpha chain variable domain of TCR clone 358472 (TRAV8-1, TRAJ42)
CAVQWGTYGGSQGNLIF

SEQ ID NO: 716944 - protein, 15 aa, Homo sapiens
  CDR3 for beta chain variable domain of TCR clone 358472 (TRBV9, TRBJ1-6)
CASSVAGTGDSPLHF

SEQ ID NO: 716945 - protein, 16 aa, Homo sapiens
  CDR3 for alpha chain variable domain of TCR clone 358473 (TRAV3, TRAJ8)
CAVRDYPNTGFQKLVF

SEQ ID NO: 716946 - protein, 16 aa, Homo sapiens
  CDR3 for beta chain variable domain of TCR clone 358473 (TRBV5-1, TRBJ1-1)
CASSSGGNSLNTEAFF

SEQ ID NO: 716947 - protein, 15 aa, Homo sapiens
  CDR3 for alpha chain variable domain of TCR clone 358474 (TRAV17, TRAJ4)
CATGTWSGGYNKLIF

SEQ ID NO: 716948 - protein, 13 aa, Homo sapiens
  CDR3 for beta chain variable domain of TCR clone 358474 (TRBV19, TRBJ2-1)
CATSRGVYNEQFF

SEQ ID NO: 716949 - protein, 12 aa, Homo sapiens
  CDR3 for alpha chain variable domain of TCR clone 358475 (TRAV16, TRAJ27)
CALNHQCGQINF

SEQ ID NO: 716950 - protein, 14 aa, Homo sapiens
  CDR3 for beta chain variable domain of TCR clone 358475 (TRBV11-2, TRBJ1-5)
CASSLDRGRQPQHF

SEQ ID NO: 716951 - protein, 14 aa, Homo sapiens
  CDR3 for alpha chain variable domain of TCR clone 358476 (TRAV8-2, TRAJ37)
CVVSISGNTGKLIF

SEQ ID NO: 716952 - protein, 15 aa, Homo sapiens
  CDR3 for beta chain variable domain of TCR clone 358476 (TRBV9, TRBJ2-1)
CASSLAGSSYNEQFF

SEQ ID NO: 716953 - protein, 15 aa, Homo sapiens
  CDR3 for alpha chain variable domain of TCR clone 358477 (TRAV8-6, TRAJ6)
CAVSGESGGSYIPTF

SEQ ID NO: 716954 - protein, 14 aa, Homo sapiens
  CDR3 for beta chain variable domain of TCR clone 358477 (TRBV18, TRBJ2-5)
CASSPGVSQETQYF

SEQ ID NO: 716955 - protein, 12 aa, Homo sapiens
  CDR3 for alpha chain variable domain of TCR clone 358478 (TRAV25, TRAJ53)
CQSGGSNYKLTF

SEQ ID NO: 716956 - protein, 15 aa, Homo sapiens
  CDR3 for beta chain variable domain of TCR clone 358478 (TRBV5-1, TRBJ2-2)
CASSWTSPNTGGLFF

SEQ ID NO: 716957 - protein, 13 aa, Homo sapiens
  CDR3 for alpha chain variable domain of TCR clone 358479 (TRAV30, TRAJ24)
CGTVTDSWGKLQF

SEQ ID NO: 716958 - protein, 14 aa, Homo sapiens
  CDR3 for beta chain variable domain of TCR clone 358479 (TRBV4-1, TRBJ2-2)
CASSQAVNTGELFF

SEQ ID NO: 716959 - protein, 16 aa, Homo sapiens
  CDR3 for alpha chain variable domain of TCR clone 358480 (TRAV30, TRAJ24)
CGTEIVDADSWGKFQF

SEQ ID NO: 716960 - protein, 17 aa, Homo sapiens
  CDR3 for beta chain variable domain of TCR clone 358480 (TRBV11-2, TRBJ2-1)
CASSLYPRGVEYNEQFF

SEQ ID NO: 716961 - protein, 13 aa, Homo sapiens
  CDR3 for alpha chain variable domain of TCR clone 358481 (TRAV20, TRAJ29)
CAVQAVGNTPLVF

SEQ ID NO: 716962 - protein, 15 aa, Homo sapiens
  CDR3 for beta chain variable domain of TCR clone 358481 (TRBV10-2, TRBJ2-5)
CARRGRGGPQEAQYF

SEQ ID NO: 716963 - protein, 15 aa, Homo sapiens
  CDR3 for alpha chain variable domain of TCR clone 358482 (TRAV3, TRAJ3)
CCERPRYGSASKIIF

SEQ ID NO: 716964 - protein, 14 aa, Homo sapiens
  CDR3 for beta chain variable domain of TCR clone 358482 (TRBV12-4, TRBJ2-7)
CASSAGIRPYEQYF

SEQ ID NO: 716965 - protein, 15 aa, Homo sapiens
  CDR3 for alpha chain variable domain of TCR clone 358483 (TRAV2, TRAJ15)
CAVGGPNQAGTALIF

SEQ ID NO: 716966 - protein, 14 aa, Homo sapiens
  CDR3 for beta chain variable domain of TCR clone 358483 (TRBV11-2, TRBJ1-5)
CASSLDRGRQPQHF

SEQ ID NO: 716967 - protein, 11 aa, Homo sapiens
  CDR3 for alpha chain variable domain of TCR clone 358484 (TRAV1-2, TRAJ40)
CAVPGTYKYIF

SEQ ID NO: 716968 - protein, 15 aa, Homo sapiens
  CDR3 for beta chain variable domain of TCR clone 358484 (TRBV28, TRBJ1-3)
CASSLAGSSGNAIYF

SEQ ID NO: 716969 - protein, 13 aa, Homo sapiens
  CDR3 for alpha chain variable domain of TCR clone 358485 (TRAV12-2, TRAJ39)
YAVNNNAGNMHTF

SEQ ID NO: 716970 - protein, 13 aa, Homo sapiens
  CDR3 for beta chain variable domain of TCR clone 358485 (TRBV2, TRBJ1-5)
CATAGPGNQPQHF

SEQ ID NO: 716971 - protein, 14 aa, Homo sapiens
  CDR3 for alpha chain variable domain of TCR clone 358486 (TRAV2, TRAJ9)
CAVEDRSGGFKTIF

SEQ ID NO: 716972 - protein, 13 aa, Homo sapiens
  CDR3 for beta chain variable domain of TCR clone 358486 (TRBV19, TRBJ1-2)
CASSVPGLDGYTF

SEQ ID NO: 716973 - protein, 11 aa, Homo sapiens
  CDR3 for alpha chain variable domain of TCR clone 358487 (TRAV12-1, TRAJ34)
CVVNKGRELIF

SEQ ID NO: 716974 - protein, 14 aa, Homo sapiens
  CDR3 for beta chain variable domain of TCR clone 358487 (TRBV4-2, TRBJ2-1)
CASGLDRAYNEQFF

SEQ ID NO: 716975 - protein, 16 aa, Homo sapiens
  CDR3 for alpha chain variable domain of TCR clone 358488 (TRAV12-2, TRAJ45)
CAVKRNPGGGADGLTF

SEQ ID NO: 716976 - protein, 13 aa, Homo sapiens
  CDR3 for beta chain variable domain of TCR clone 358488 (TRBV7-9, TRBJ1-2)
CASSLKQNYGYTF

SEQ ID NO: 716977 - protein, 14 aa, Homo sapiens
  CDR3 for alpha chain variable domain of TCR clone 358489 (TRAV23/DV6, TRAJ40)
CAASPTSGTYKYIF

SEQ ID NO: 716978 - protein, 14 aa, Homo sapiens
  CDR3 for beta chain variable domain of TCR clone 358489 (TRBV5-1, TRBJ2-3)
CASSRGQGGGTQYF

SEQ ID NO: 716979 - protein, 10 aa, Homo sapiens
  CDR3 for alpha chain variable domain of TCR clone 358490 (TRAV8-4, TRAJ43)
CAVSADDLRF

SEQ ID NO: 716980 - protein, 11 aa, Homo sapiens
  CDR3 for beta chain variable domain of TCR clone 358490 (TRBV12-4, TRBJ2-3)
CASTATDTQYF

SEQ ID NO: 716981 - protein, 17 aa, Homo sapiens
  CDR3 for alpha chain variable domain of TCR clone 358491 (TRAV12-2, TRAJ6)
CAPQGPPRAGGSDIPTF

SEQ ID NO: 716982 - protein, 16 aa, Homo sapiens
  CDR3 for beta chain variable domain of TCR clone 358491 (TRBV19, TRBJ2-2)
CASSTARASNTGELFF

SEQ ID NO: 716983 - protein, 13 aa, Homo sapiens
  CDR3 for alpha chain variable domain of TCR clone 358492 (TRAV8-3, TRAJ28)
CAVGAVGSYQLTF

SEQ ID NO: 716984 - protein, 15 aa, Homo sapiens
  CDR3 for beta chain variable domain of TCR clone 358492 (TRBV7-9, TRBJ1-5)
CASSQGHQPNQPQHF

SEQ ID NO: 716985 - protein, 12 aa, Homo sapiens
  CDR3 for alpha chain variable domain of TCR clone 358493 (TRAV13-2, TRAJ32)
RVYGGATNKLIF

SEQ ID NO: 716986 - protein, 16 aa, Homo sapiens
  CDR3 for beta chain variable domain of TCR clone 358493 (TRBV7-9, TRBJ1-2)
CASGISLDRGGYGYTF

SEQ ID NO: 716987 - protein, 14 aa, Homo sapiens
  CDR3 for alpha chain variable domain of TCR clone 358494 (TRAV35, TRAJ33)
CAGSSQDSNYQFIW

SEQ ID NO: 716988 - protein, 15 aa, Homo sapiens
  CDR3 for beta chain variable domain of TCR clone 358494 (TRBV4-1, TRBJ1-4)
CASSDTGGTNEKLFF

SEQ ID NO: 716989 - protein, 13 aa, Homo sapiens
  CDR3 for alpha chain variable domain of TCR clone 358495 (TRAV23/DV6, TRAJ16)
CAASISDGQKLLF

SEQ ID NO: 716990 - protein, 15 aa, Homo sapiens
  CDR3 for beta chain variable domain of TCR clone 358495 (TRBV2, TRBJ2-2)
CASSRETVGTGELSF

SEQ ID NO: 716991 - protein, 13 aa, Homo sapiens
  CDR3 for alpha chain variable domain of TCR clone 358496 (TRAV12-2, TRAJ20)
CAMYPSNDYKLSF

SEQ ID NO: 716992 - protein, 15 aa, Homo sapiens
  CDR3 for beta chain variable domain of TCR clone 358496 (TRBV27, TRBJ2-5)
CASSFYPRGGETQYF

SEQ ID NO: 716993 - protein, 16 aa, Homo sapiens
  CDR3 for alpha chain variable domain of TCR clone 358497 (TRAV3, TRAJ37)
CAVRGTGSGNTGKLIF

SEQ ID NO: 716994 - protein, 14 aa, Homo sapiens
  CDR3 for beta chain variable domain of TCR clone 358497 (TRBV7-2, TRBJ2-7)
CASSPKTSFYEQYF

SEQ ID NO: 716995 - protein, 13 aa, Homo sapiens
  CDR3 for alpha chain variable domain of TCR clone 358498 (TRAV3, TRAJ27)
CAVRPLGAGKSTF

SEQ ID NO: 716996 - protein, 18 aa, Homo sapiens
  CDR3 for beta chain variable domain of TCR clone 358498 (TRBV6-6, TRBJ1-3)
CASSYSKWDSISGNTIYF

SEQ ID NO: 716997 - protein, 16 aa, Homo sapiens
  CDR3 for alpha chain variable domain of TCR clone 358499 (TRAV26-1, TRAJ23)
CIVRIHPYNQGGKLIF

SEQ ID NO: 716998 - protein, 15 aa, Homo sapiens
  CDR3 for beta chain variable domain of TCR clone 358499 (TRBV5-7, TRBJ2-7)
CASSPYFEGSYEQYF

SEQ ID NO: 716999 - protein, 15 aa, Homo sapiens
  CDR3 for alpha chain variable domain of TCR clone 358500 (TRAV8-3, TRAJ11)
CAVGLLNSGYSTLTF

SEQ ID NO: 717000 - protein, 16 aa, Homo sapiens
  CDR3 for beta chain variable domain of TCR clone 358500 (TRBV28, TRBJ2-1)
CASSLWGRTTGTLQFF

SEQ ID NO: 717001 - protein, 13 aa, Homo sapiens
  CDR3 for alpha chain variable domain of TCR clone 358501 (TRAV21, TRAJ27)
CAARLGNAGKSTF

SEQ ID NO: 717002 - protein, 14 aa, Homo sapiens
  CDR3 for beta chain variable domain of TCR clone 358501 (TRBV11-2, TRBJ2-7)
CASSLGAGAYEQYF

SEQ ID NO: 717003 - protein, 15 aa, Homo sapiens
  CDR3 for alpha chain variable domain of TCR clone 358502 (TRAV8-6, TRAJ10)
CAVSDQAGGGNKLTF

SEQ ID NO: 717004 - protein, 13 aa, Homo sapiens
  CDR3 for beta chain variable domain of TCR clone 358502 (TRBV10-2, TRBJ2-3)
CASSEAGDHTQYF

SEQ ID NO: 717005 - protein, 13 aa, Homo sapiens
  CDR3 for alpha chain variable domain of TCR clone 358503 (TRAV12-3, TRAJ13)
CAMSSGGYRKVTF

SEQ ID NO: 717006 - protein, 14 aa, Homo sapiens
  CDR3 for beta chain variable domain of TCR clone 358503 (TRBV20-1, TRBJ2-2)
CSALYRGGTGELFF

SEQ ID NO: 717007 - protein, 12 aa, Homo sapiens
  CDR3 for alpha chain variable domain of TCR clone 358504 (TRAV2, TRAJ15)
CAVAQAGTALIF

SEQ ID NO: 717008 - protein, 14 aa, Homo sapiens
  CDR3 for beta chain variable domain of TCR clone 358504 (TRBV7-2, TRBJ2-7)
CASSGLAGRGEQYF

SEQ ID NO: 717009 - protein, 17 aa, Homo sapiens
  CDR3 for alpha chain variable domain of TCR clone 358505 (TRAV26-2, TRAJ42)
CILRDVGYRGSQGNLIF

SEQ ID NO: 717010 - protein, 16 aa, Homo sapiens
  CDR3 for beta chain variable domain of TCR clone 358505 (TRBV12-4, TRBJ2-7)
CASSFIGGTGTYEQYF

SEQ ID NO: 717011 - protein, 16 aa, Homo sapiens
  CDR3 for alpha chain variable domain of TCR clone 358506 (TRAV16, TRAJ42)
CALSGLLGGSQGNLIF

SEQ ID NO: 717012 - protein, 15 aa, Homo sapiens
  CDR3 for beta chain variable domain of TCR clone 358506 (TRBV5-1, TRBJ2-1)
CASSAGGLAGNEQFF

SEQ ID NO: 717013 - protein, 14 aa, Homo sapiens
  CDR3 for alpha chain variable domain of TCR clone 358507 (TRAV12-2, TRAJ17)
CAVNIKAAGNKLTF

SEQ ID NO: 717014 - protein, 14 aa, Homo sapiens
  CDR3 for beta chain variable domain of TCR clone 358507 (TRBV2, TRBJ2-3)
CASSEGQNTDTQYF

SEQ ID NO: 717015 - protein, 16 aa, Homo sapiens
  CDR3 for alpha chain variable domain of TCR clone 358508 (TRAV3, TRAJ37)
CAVRPHGSGNTGKLIS

SEQ ID NO: 717016 - protein, 14 aa, Homo sapiens
  CDR3 for beta chain variable domain of TCR clone 358508 (TRBV2, TRBJ2-1)
CASSYRAYYKEQFF

SEQ ID NO: 717017 - protein, 14 aa, Homo sapiens
  CDR3 for alpha chain variable domain of TCR clone 358509 (TRAV17, TRAJ57)
CATDPQGGSEKLVF

SEQ ID NO: 717018 - protein, 14 aa, Homo sapiens
  CDR3 for beta chain variable domain of TCR clone 358509 (TRBV18, TRBJ2-5)
CASSPPGHQETQYF

SEQ ID NO: 717019 - protein, 16 aa, Homo sapiens
  CDR3 for alpha chain variable domain of TCR clone 358510 (TRAV8-3, TRAJ44)
CAVGTLMTGTASKLTF

SEQ ID NO: 717020 - protein, 12 aa, Homo sapiens
  CDR3 for beta chain variable domain of TCR clone 358510 (TRBV19, TRBJ2-1)
CASSRQGAEQFF

SEQ ID NO: 717021 - protein, 12 aa, Homo sapiens
  CDR3 for alpha chain variable domain of TCR clone 358511 (TRAV21, TRAJ23)
CAVMLQGGKFIF

SEQ ID NO: 717022 - protein, 14 aa, Homo sapiens
  CDR3 for beta chain variable domain of TCR clone 358511 (TRBV7-9, TRBJ1-4)
CAITEGEANEKLFF

SEQ ID NO: 717023 - protein, 15 aa, Homo sapiens
  CDR3 for alpha chain variable domain of TCR clone 358512 (TRAV8-6, TRAJ26)
CAVRDQSPGGQNFVF

SEQ ID NO: 717024 - protein, 13 aa, Homo sapiens
  CDR3 for beta chain variable domain of TCR clone 358512 (TRBV27, TRBJ2-7)
CASSLRHRYEQYF

SEQ ID NO: 717025 - protein, 14 aa, Homo sapiens
  CDR3 for alpha chain variable domain of TCR clone 358513 (TRAV26-1, TRAJ45)
CIEVTGGGADGLTF

SEQ ID NO: 717026 - protein, 13 aa, Homo sapiens
  CDR3 for beta chain variable domain of TCR clone 358513 (TRBV7-6, TRBJ1-2)
CASSLVADYGDIF

SEQ ID NO: 717027 - protein, 13 aa, Homo sapiens
  CDR3 for alpha chain variable domain of TCR clone 358514 (TRAV35, TRAJ33)
CAGQLYGVYQSIW

SEQ ID NO: 717028 - protein, 14 aa, Homo sapiens
  CDR3 for beta chain variable domain of TCR clone 358514 (TRBV7-2, TRBJ1-1)
CASSLGGAGTEAFF

SEQ ID NO: 717029 - protein, 13 aa, Homo sapiens
  CDR3 for alpha chain variable domain of TCR clone 358515 (TRAV1-2, TRAJ31)
CAVRPNNNARLMF

SEQ ID NO: 717030 - protein, 11 aa, Homo sapiens
  CDR3 for beta chain variable domain of TCR clone 358515 (TRBV11-2, TRBJ2-2)
CASSLPGELFF

SEQ ID NO: 717031 - protein, 12 aa, Homo sapiens
  CDR3 for alpha chain variable domain of TCR clone 358516 (TRAV21, TRAJ23)
CAVGPQGGKLIF

SEQ ID NO: 717032 - protein, 13 aa, Homo sapiens
  CDR3 for beta chain variable domain of TCR clone 358516 (TRBV20-1, TRBJ2-7)
CSARTGAGCEQYF

SEQ ID NO: 717033 - protein, 13 aa, Homo sapiens
  CDR3 for alpha chain variable domain of TCR clone 358517 (TRAV8-3, TRAJ36)
CAVGATGANNLFF

SEQ ID NO: 717034 - protein, 15 aa, Homo sapiens
  CDR3 for beta chain variable domain of TCR clone 358517 (TRBV4-1, TRBJ2-7)
CASSQQGQGFDEQYF

SEQ ID NO: 717035 - protein, 13 aa, Homo sapiens
  CDR3 for alpha chain variable domain of TCR clone 358518 (TRAV3, TRAJ16)
CAVRDRNGQKLLF

SEQ ID NO: 717036 - protein, 15 aa, Homo sapiens
  CDR3 for beta chain variable domain of TCR clone 358518 (TRBV5-1, TRBJ2-1)
CASSPPRAPYNKQFV

SEQ ID NO: 717037 - protein, 10 aa, Homo sapiens
  CDR3 for alpha chain variable domain of TCR clone 358519 (TRAV12-3, TRAJ49)
CAMNDDQFYF

SEQ ID NO: 717038 - protein, 14 aa, Homo sapiens
  CDR3 for beta chain variable domain of TCR clone 358519 (TRBV12-4, TRBJ2-3)
CASSGQGSTDTQYF

SEQ ID NO: 717039 - protein, 14 aa, Homo sapiens
  CDR3 for alpha chain variable domain of TCR clone 358520 (TRAV3, TRAJ7)
CAVREEAREQQTRF

SEQ ID NO: 717040 - protein, 12 aa, Homo sapiens
  CDR3 for beta chain variable domain of TCR clone 358520 (TRBV24-1, TRBJ1-4)
CATSDPNEKLFF

SEQ ID NO: 717041 - protein, 14 aa, Homo sapiens
  CDR3 for alpha chain variable domain of TCR clone 358521 (TRAV12-3, TRAJ10)
SHLPLTGGGNKLTF

SEQ ID NO: 717042 - protein, 18 aa, Homo sapiens
  CDR3 for beta chain variable domain of TCR clone 358521 (TRBV28, TRBJ1-5)
CASSPLQGARYSNQPQHF

SEQ ID NO: 717043 - protein, 12 aa, Homo sapiens
  CDR3 for alpha chain variable domain of TCR clone 358522 (TRAV13-1, TRAJ21)
CAAKEGFNKFYF

SEQ ID NO: 717044 - protein, 17 aa, Homo sapiens
  CDR3 for beta chain variable domain of TCR clone 358522 (TRBV11-2, TRBJ2-5)
CASSNSQENPVLRARHA

SEQ ID NO: 717045 - protein, 15 aa, Homo sapiens
  CDR3 for alpha chain variable domain of TCR clone 358523 (TRAV21, TRAJ24)
CAARSSTDSWGKLQF

SEQ ID NO: 717046 - protein, 13 aa, Homo sapiens
  CDR3 for beta chain variable domain of TCR clone 358523 (TRBV2, TRBJ1-5)
CATAGPGNQPQHF

SEQ ID NO: 717047 - protein, 14 aa, Homo sapiens
  CDR3 for alpha chain variable domain of TCR clone 358524 (TRAV13-1, TRAJ44)
CAAKATGTASKLTF

SEQ ID NO: 717048 - protein, 14 aa, Homo sapiens
  CDR3 for beta chain variable domain of TCR clone 358524 (TRBV11-2, TRBJ2-7)
CASSSTGEGYEQYF

SEQ ID NO: 717049 - protein, 15 aa, Homo sapiens
  CDR3 for alpha chain variable domain of TCR clone 358525 (TRAV26-2, TRAJ13)
CILRDLSGGDQKVTF

SEQ ID NO: 717050 - protein, 11 aa, Homo sapiens
  CDR3 for beta chain variable domain of TCR clone 358525 (TRBV7-9, TRBJ2-5)
CASSLSATQYF

SEQ ID NO: 717051 - protein, 12 aa, Homo sapiens
  CDR3 for alpha chain variable domain of TCR clone 358526 (TRAV12-1, TRAJ40)
CVVSSGTYKYIF

SEQ ID NO: 717052 - protein, 17 aa, Homo sapiens
  CDR3 for beta chain variable domain of TCR clone 358526 (TRBV4-2, TRBJ1-1)
CASTQFGGGSGNTEAFF

SEQ ID NO: 717053 - protein, 14 aa, Homo sapiens
  CDR3 for alpha chain variable domain of TCR clone 358527 (TRAV1-2, TRAJ8)
CAVREDTGFQKLVF

SEQ ID NO: 717054 - protein, 13 aa, Homo sapiens
  CDR3 for beta chain variable domain of TCR clone 358527 (TRBV20-1, TRBJ1-6)
CSARAPPEGPLHF

SEQ ID NO: 717055 - protein, 12 aa, Homo sapiens
  CDR3 for alpha chain variable domain of TCR clone 358528 (TRAV25, TRAJ5)
CAGGGGRRALTF

SEQ ID NO: 717056 - protein, 15 aa, Homo sapiens
  CDR3 for beta chain variable domain of TCR clone 358528 (TRBV5-1, TRBJ2-5)
CASSFKGGDQETQYF

SEQ ID NO: 717057 - protein, 13 aa, Homo sapiens
  CDR3 for alpha chain variable domain of TCR clone 358529 (TRAV17, TRAJ54)
CAAGIQGAQKLVF

SEQ ID NO: 717058 - protein, 14 aa, Homo sapiens
  CDR3 for beta chain variable domain of TCR clone 358529 (TRBV11-2, TRBJ1-2)
CASSLGIANYGYTF

SEQ ID NO: 717059 - protein, 11 aa, Homo sapiens
  CDR3 for alpha chain variable domain of TCR clone 358530 (TRAV4, TRAJ31)
CLVGDNARLMF

SEQ ID NO: 717060 - protein, 16 aa, Homo sapiens
  CDR3 for beta chain variable domain of TCR clone 358530 (TRBV7-2, TRBJ2-5)
CVSSSKWLSGQETQYF

SEQ ID NO: 717061 - protein, 16 aa, Homo sapiens
  CDR3 for alpha chain variable domain of TCR clone 358531 (TRAV3, TRAJ10)
CAVRDMRAGGGNKLNF

SEQ ID NO: 717062 - protein, 16 aa, Homo sapiens
  CDR3 for beta chain variable domain of TCR clone 358531 (TRBV28, TRBJ2-7)
CASSLFFETGGPEQYF

SEQ ID NO: 717063 - protein, 17 aa, Homo sapiens
  CDR3 for alpha chain variable domain of TCR clone 358532 (TRAV4, TRAJ42)
CLVGVLNYGGSQGNLIF

SEQ ID NO: 717064 - protein, 15 aa, Homo sapiens
  CDR3 for beta chain variable domain of TCR clone 358532 (TRBV27, TRBJ1-6)
CASSFDRGLGSPLHF

SEQ ID NO: 717065 - protein, 16 aa, Homo sapiens
  CDR3 for alpha chain variable domain of TCR clone 358533 (TRAV17, TRAJ36)
CATVSLNWGKQPLLWD

SEQ ID NO: 717066 - protein, 15 aa, Homo sapiens
  CDR3 for beta chain variable domain of TCR clone 358533 (TRBV6-3, TRBJ2-7)
CASSSPGTVFYEQYF

SEQ ID NO: 717067 - protein, 13 aa, Homo sapiens
  CDR3 for alpha chain variable domain of TCR clone 358534 (TRAV3, TRAJ27)
CAVRPLGAGKSTF

SEQ ID NO: 717068 - protein, 12 aa, Homo sapiens
  CDR3 for beta chain variable domain of TCR clone 358534 (TRBV7-9, TRBJ2-7)
CSTRTDAYEQYF

SEQ ID NO: 717069 - protein, 16 aa, Homo sapiens
  CDR3 for alpha chain variable domain of TCR clone 358535 (TRAV1-2, TRAJ10)
CAVRGVLTGGGNKLTF

SEQ ID NO: 717070 - protein, 12 aa, Homo sapiens
  CDR3 for beta chain variable domain of TCR clone 358535 (TRBV7-8, TRBJ2-7)
CASSLGDMEQYF

SEQ ID NO: 717071 - protein, 11 aa, Homo sapiens
  CDR3 for alpha chain variable domain of TCR clone 358536 (TRAV26-1, TRAJ27)
CIDPNAGESTF

SEQ ID NO: 717072 - protein, 18 aa, Homo sapiens
  CDR3 for beta chain variable domain of TCR clone 358536 (TRBV7-9, TRBJ2-6)
CASSFPGAGISGANVLTF

SEQ ID NO: 717073 - protein, 13 aa, Homo sapiens
  CDR3 for alpha chain variable domain of TCR clone 358537 (TRAV16, TRAJ29)
CALSRRGTTPLVF

SEQ ID NO: 717074 - protein, 14 aa, Homo sapiens
  CDR3 for beta chain variable domain of TCR clone 358537 (TRBV7-6, TRBJ2-3)
CASSLGTVTDTQYF

SEQ ID NO: 717075 - protein, 11 aa, Homo sapiens
  CDR3 for alpha chain variable domain of TCR clone 358538 (TRAV8-1, TRAJ48)
CLYFGDEKLTF

SEQ ID NO: 717076 - protein, 13 aa, Homo sapiens
  CDR3 for beta chain variable domain of TCR clone 358538 (TRBV10-3, TRBJ2-7)
CASKLAVNYEQYF

SEQ ID NO: 717077 - protein, 15 aa, Homo sapiens
  CDR3 for alpha chain variable domain of TCR clone 358539 (TRAV27, TRAJ38)
CAARRNAGNNRKPIW

SEQ ID NO: 717078 - protein, 13 aa, Homo sapiens
  CDR3 for beta chain variable domain of TCR clone 358539 (TRBV20-1, TRBJ1-1)
CSARGGGNTEAFF

SEQ ID NO: 717079 - protein, 11 aa, Homo sapiens
  CDR3 for alpha chain variable domain of TCR clone 358540 (TRAV12-2, TRAJ43)
CASPIGNDMRF

SEQ ID NO: 717080 - protein, 14 aa, Homo sapiens
  CDR3 for beta chain variable domain of TCR clone 358540 (TRBV7-7, TRBJ2-2)
CASSRDRSTGELFF

SEQ ID NO: 717081 - protein, 14 aa, Homo sapiens
  CDR3 for alpha chain variable domain of TCR clone 358541 (TRAV20, TRDJ1)
CAVQAGGNQGKLIF

SEQ ID NO: 717082 - protein, 14 aa, Homo sapiens
  CDR3 for beta chain variable domain of TCR clone 358541 (TRBV28, TRBJ1-2)
CASRIQGANYGYTF

SEQ ID NO: 717083 - protein, 14 aa, Homo sapiens
  CDR3 for alpha chain variable domain of TCR clone 358542 (TRAV29/DV5, TRAJ20)
CAATIRSSDYKLSF

SEQ ID NO: 717084 - protein, 16 aa, Homo sapiens
  CDR3 for beta chain variable domain of TCR clone 358542 (TRBV15, TRBJ2-1)
CATSRERLAGAYEQFF

SEQ ID NO: 717085 - protein, 13 aa, Homo sapiens
  CDR3 for alpha chain variable domain of TCR clone 358543 (TRAV8-1, TRAJ32)
CAADGGATNKLIF

SEQ ID NO: 717086 - protein, 15 aa, Homo sapiens
  CDR3 for beta chain variable domain of TCR clone 358543 (TRBV7-9, TRBJ2-7)
CVSSLALAEAYEQYF

SEQ ID NO: 717087 - protein, 14 aa, Homo sapiens
  CDR3 for alpha chain variable domain of TCR clone 358544 (TRAV12-3, TRAJ33)
CAMSVPGSNYQLIW

SEQ ID NO: 717088 - protein, 12 aa, Homo sapiens
  CDR3 for beta chain variable domain of TCR clone 358544 (TRBV11-2, TRBJ2-1)
CASSPGNNEQFF

SEQ ID NO: 717089 - protein, 16 aa, Homo sapiens
  CDR3 for alpha chain variable domain of TCR clone 358545 (TRAV38-1, TRAJ32)
CAFMKGGGGATNKLIF

SEQ ID NO: 717090 - protein, 13 aa, Homo sapiens
  CDR3 for beta chain variable domain of TCR clone 358545 (TRBV20-1, TRBJ2-5)
CSGREAFQETQYF

SEQ ID NO: 717091 - protein, 14 aa, Homo sapiens
  CDR3 for alpha chain variable domain of TCR clone 358546 (TRAV12-2, TRAJ17)
CAVLFKDAGNKLTF

SEQ ID NO: 717092 - protein, 14 aa, Homo sapiens
  CDR3 for beta chain variable domain of TCR clone 358546 (TRBV12-5, TRBJ2-5)
CASGSRTHQETQYF

SEQ ID NO: 717093 - protein, 14 aa, Homo sapiens
  CDR3 for alpha chain variable domain of TCR clone 358547 (TRAV12-3, TRAJ9)
CAMSPNTGGFQTIF

SEQ ID NO: 717094 - protein, 11 aa, Homo sapiens
  CDR3 for beta chain variable domain of TCR clone 358547 (TRBV11-3, TRBJ2-1)
CASSLGNEQFF

SEQ ID NO: 717095 - protein, 13 aa, Homo sapiens
  CDR3 for alpha chain variable domain of TCR clone 358548 (TRAV36/DV7, TRAJ37)
CAVFSSNTGKLIF

SEQ ID NO: 717096 - protein, 17 aa, Homo sapiens
  CDR3 for beta chain variable domain of TCR clone 358548 (TRBV28, TRBJ2-5)
CASSRQGGLAGAETQYF

SEQ ID NO: 717097 - protein, 13 aa, Homo sapiens
  CDR3 for alpha chain variable domain of TCR clone 358549 (TRAV29/DV5, TRAJ13)
CAASVGGYQKVTF

SEQ ID NO: 717098 - protein, 14 aa, Homo sapiens
  CDR3 for beta chain variable domain of TCR clone 358549 (TRBV7-9, TRBJ2-7)
CASSLDRPTDEQYF

SEQ ID NO: 717099 - protein, 16 aa, Homo sapiens
  CDR3 for alpha chain variable domain of TCR clone 358550 (TRAV30, TRAJ24)
CGTEIVDADGWGKFQF

SEQ ID NO: 717100 - protein, 14 aa, Homo sapiens
  CDR3 for beta chain variable domain of TCR clone 358550 (TRBV20-1, TRBJ1-1)
CSAQTRIGGTEAFF

SEQ ID NO: 717101 - protein, 10 aa, Homo sapiens
  CDR3 for alpha chain variable domain of TCR clone 358551 (TRAV12-2, TRAJ22)
CAVNETQLTF

SEQ ID NO: 717102 - protein, 13 aa, Homo sapiens
  CDR3 for beta chain variable domain of TCR clone 358551 (TRBV6-5, TRBJ2-6)
CARSTSGPLRLDF

SEQ ID NO: 717103 - protein, 14 aa, Homo sapiens
  CDR3 for alpha chain variable domain of TCR clone 358552 (TRAV12-3, TRAJ10)
SHLPLTGGGNKLTF

SEQ ID NO: 717104 - protein, 13 aa, Homo sapiens
  CDR3 for beta chain variable domain of TCR clone 358552 (TRBV4-3, TRBJ1-1)
CASSQVEGSMAFF

SEQ ID NO: 717105 - protein, 11 aa, Homo sapiens
  CDR3 for alpha chain variable domain of TCR clone 358553 (TRAV12-2, TRAJ23)
CARGRGGKLIF

SEQ ID NO: 717106 - protein, 16 aa, Homo sapiens
  CDR3 for beta chain variable domain of TCR clone 358553 (TRBV29-1, TRBJ2-2)
CSVETRASGNTGELFF

SEQ ID NO: 717107 - protein, 10 aa, Homo sapiens
  CDR3 for alpha chain variable domain of TCR clone 358554 (TRAV30, TRAJ48)
CGIGNVKLTF

SEQ ID NO: 717108 - protein, 16 aa, Homo sapiens
  CDR3 for beta chain variable domain of TCR clone 358554 (TRBV27, TRBJ2-1)
SMNVEPGTSGDNEQFF

SEQ ID NO: 717109 - protein, 14 aa, Homo sapiens
  CDR3 for alpha chain variable domain of TCR clone 358555 (TRAV1-2, TRAJ17)
CAVRDMTAGNKLTF

SEQ ID NO: 717110 - protein, 15 aa, Homo sapiens
  CDR3 for beta chain variable domain of TCR clone 358555 (TRBV20-1, TRBJ2-7)
CSARDRVSGMDEQYS

SEQ ID NO: 717111 - protein, 15 aa, Homo sapiens
  CDR3 for alpha chain variable domain of TCR clone 358556 (TRAV3, TRAJ4)
CAVRDGTGGYNKLIF

SEQ ID NO: 717112 - protein, 15 aa, Homo sapiens
  CDR3 for beta chain variable domain of TCR clone 358556 (TRBV2, TRBJ2-1)
CASSEEREGDNEQFF

SEQ ID NO: 717113 - protein, 12 aa, Homo sapiens
  CDR3 for alpha chain variable domain of TCR clone 358557 (TRAV13-2, TRAJ23)
CAERHRGGKLIF

SEQ ID NO: 717114 - protein, 16 aa, Homo sapiens
  CDR3 for beta chain variable domain of TCR clone 358557 (TRBV28, TRBJ1-4)
CASSPPYRGRSEKLFF

SEQ ID NO: 717115 - protein, 14 aa, Homo sapiens
  CDR3 for alpha chain variable domain of TCR clone 358558 (TRAV13-2, TRAJ32)
CAENYGGATNKLIF

SEQ ID NO: 717116 - protein, 17 aa, Homo sapiens
  CDR3 for beta chain variable domain of TCR clone 358558 (TRBV7-8, TRBJ2-6)
CASSAGTGGAGANVLPF

SEQ ID NO: 717117 - protein, 13 aa, Homo sapiens
  CDR3 for alpha chain variable domain of TCR clone 358559 (TRAV8-3, TRAJ43)
CAVVPYNNNDMRF

SEQ ID NO: 717118 - protein, 17 aa, Homo sapiens
  CDR3 for beta chain variable domain of TCR clone 358559 (TRBV7-7, TRBJ1-1)
CASTGDRPNLGVTEAFF

SEQ ID NO: 717119 - protein, 14 aa, Homo sapiens
  CDR3 for alpha chain variable domain of TCR clone 358560 (TRAV26-1, TRAJ34)
CIVRESYNTDKLIF

SEQ ID NO: 717120 - protein, 13 aa, Homo sapiens
  CDR3 for beta chain variable domain of TCR clone 358560 (TRBV2, TRBJ1-5)
CGTAGPGNQPQHF

SEQ ID NO: 717121 - protein, 14 aa, Homo sapiens
  CDR3 for alpha chain variable domain of TCR clone 358561 (TRAV17, TRAJ6)
CATFSSGGSYIPTF

SEQ ID NO: 717122 - protein, 14 aa, Homo sapiens
  CDR3 for beta chain variable domain of TCR clone 358561 (TRBV5-1, TRBJ2-7)
CASSWGQPSYEQYF

SEQ ID NO: 717123 - protein, 16 aa, Homo sapiens
  CDR3 for alpha chain variable domain of TCR clone 358562 (TRAV1-2, TRAJ18)
CAVRVERGSTMGRLYF

SEQ ID NO: 717124 - protein, 16 aa, Homo sapiens
  CDR3 for beta chain variable domain of TCR clone 358562 (TRBV20-1, TRBJ2-7)
CSASTSGRLSSYEQYF

SEQ ID NO: 717125 - protein, 11 aa, Homo sapiens
  CDR3 for alpha chain variable domain of TCR clone 358563 (TRAV21, TRAJ34)
CAVTNADKLIF

SEQ ID NO: 717126 - protein, 17 aa, Homo sapiens
  CDR3 for beta chain variable domain of TCR clone 358563 (TRBV20-1, TRBJ2-1)
CSARSPSGGPPTMSSSS

SEQ ID NO: 717127 - protein, 13 aa, Homo sapiens
  CDR3 for alpha chain variable domain of TCR clone 358564 (TRAV21, TRAJ20)
CAVGVCADYKLSF

SEQ ID NO: 717128 - protein, 14 aa, Homo sapiens
  CDR3 for beta chain variable domain of TCR clone 358564 (TRBV4-2, TRBJ1-4)
CASSPSSGNEKLFF

SEQ ID NO: 717129 - protein, 14 aa, Homo sapiens
  CDR3 for alpha chain variable domain of TCR clone 358565 (TRAV12-3, TRAJ10)
SHLPLTGGGNKLTF

SEQ ID NO: 717130 - protein, 16 aa, Homo sapiens
  CDR3 for beta chain variable domain of TCR clone 358565 (TRBV20-1, TRBJ2-6)
FSASSQGYDGANVLTF

SEQ ID NO: 717131 - protein, 18 aa, Homo sapiens
  CDR3 for alpha chain variable domain of TCR clone 358566 (TRAV38-2/DV8, TRAJ42)
CAYRSAALTGGSQGNLIF

SEQ ID NO: 717132 - protein, 12 aa, Homo sapiens
  CDR3 for beta chain variable domain of TCR clone 358566 (TRBV11-2, TRBJ2-2)
CASSLGGGELFF

SEQ ID NO: 717133 - protein, 14 aa, Homo sapiens
  CDR3 for alpha chain variable domain of TCR clone 358567 (TRAV8-1, TRAJ5)
CAVRTDTGRRALTF

SEQ ID NO: 717134 - protein, 12 aa, Homo sapiens
  CDR3 for beta chain variable domain of TCR clone 358567 (TRBV7-8, TRBJ2-7)
CASSLGDREQYF

SEQ ID NO: 717135 - protein, 16 aa, Homo sapiens
  CDR3 for alpha chain variable domain of TCR clone 358568 (TRAV12-3, TRAJ53)
CAMSPGSGGSNYKLTF

SEQ ID NO: 717136 - protein, 16 aa, Homo sapiens
  CDR3 for beta chain variable domain of TCR clone 358568 (TRBV4-1, TRBJ2-5)
CASSQAIAASSATQYF

SEQ ID NO: 717137 - protein, 12 aa, Homo sapiens
  CDR3 for alpha chain variable domain of TCR clone 358569 (TRAV13-2, TRAJ8)
CAPWLGFQKLVF

SEQ ID NO: 717138 - protein, 16 aa, Homo sapiens
  CDR3 for beta chain variable domain of TCR clone 358569 (TRBV5-1, TRBJ2-1)
CASSLLPSGRPEEQFF

SEQ ID NO: 717139 - protein, 17 aa, Homo sapiens
  CDR3 for alpha chain variable domain of TCR clone 358570 (TRAV14/DV4, TRAJ4)
CAMREASGRGGYNKLIS

SEQ ID NO: 717140 - protein, 14 aa, Homo sapiens
  CDR3 for beta chain variable domain of TCR clone 358570 (TRBV19, TRBJ2-7)
CASSMGQGAIEQYF

SEQ ID NO: 717141 - protein, 16 aa, Homo sapiens
  CDR3 for alpha chain variable domain of TCR clone 358571 (TRAV30, TRAJ24)
CGTELVDADSWGKFQF

SEQ ID NO: 717142 - protein, 12 aa, Homo sapiens
  CDR3 for beta chain variable domain of TCR clone 358571 (TRBV11-2, TRBJ2-2)
CASSLPTGELFF

SEQ ID NO: 717143 - protein, 13 aa, Homo sapiens
  CDR3 for alpha chain variable domain of TCR clone 358572 (TRAV29/DV5, TRAJ40)
CAAIEAGTYKYIF

SEQ ID NO: 717144 - protein, 18 aa, Homo sapiens
  CDR3 for beta chain variable domain of TCR clone 358572 (TRBV14, TRBJ2-1)
CASSQEYGGAYLRGEQFF

SEQ ID NO: 717145 - protein, 14 aa, Homo sapiens
  CDR3 for alpha chain variable domain of TCR clone 358573 (TRAV8-3, TRAJ35)
CAVVLQGFGNVLHC

SEQ ID NO: 717146 - protein, 15 aa, Homo sapiens
  CDR3 for beta chain variable domain of TCR clone 358573 (TRBV6-1, TRBJ2-2)
CASSAGQGYTGELFF

SEQ ID NO: 717147 - protein, 15 aa, Homo sapiens
  CDR3 for alpha chain variable domain of TCR clone 358574 (TRAV12-2, TRAJ43)
CAFDMRFGAGTRLTV

SEQ ID NO: 717148 - protein, 17 aa, Homo sapiens
  CDR3 for beta chain variable domain of TCR clone 358574 (TRBV15, TRBJ2-3)
CATSGTTSEEGTDTQYF

SEQ ID NO: 717149 - protein, 15 aa, Homo sapiens
  CDR3 for alpha chain variable domain of TCR clone 358575 (TRAV3, TRAJ45)
CAVRTPWGGADGLTF

SEQ ID NO: 717150 - protein, 16 aa, Homo sapiens
  CDR3 for beta chain variable domain of TCR clone 358575 (TRBV6-1, TRBJ2-2)
CAGSFGQGASTGELFF

SEQ ID NO: 717151 - protein, 16 aa, Homo sapiens
  CDR3 for alpha chain variable domain of TCR clone 358576 (TRAV4, TRAJ42)
CLVGPIYGGSQGNLIF

SEQ ID NO: 717152 - protein, 13 aa, Homo sapiens
  CDR3 for beta chain variable domain of TCR clone 358576 (TRBV11-2, TRBJ2-7)
CASSPQGSYEQYF

SEQ ID NO: 717153 - protein, 15 aa, Homo sapiens
  CDR3 for alpha chain variable domain of TCR clone 358577 (TRAV14/DV4, TRAJ12)
CAMREGWDSSYKLIC

SEQ ID NO: 717154 - protein, 16 aa, Homo sapiens
  CDR3 for beta chain variable domain of TCR clone 358577 (TRBV2, TRBJ2-5)
CASSETQGVGEETQYF

SEQ ID NO: 717155 - protein, 23 aa, Homo sapiens
  CDR3 for alpha chain variable domain of TCR clone 358578 (TRAV30, TRAJ43)
CTLRPPSSVTQEPTSAALSDMRF

SEQ ID NO: 717156 - protein, 13 aa, Homo sapiens
  CDR3 for beta chain variable domain of TCR clone 358578 (TRBV12-4, TRBJ2-2)
CASSITGSGELVF

SEQ ID NO: 717157 - protein, 14 aa, Homo sapiens
  CDR3 for alpha chain variable domain of TCR clone 358579 (TRAV1-2, TRAJ16)
CAVNRFSDAQKLLF

SEQ ID NO: 717158 - protein, 15 aa, Homo sapiens
  CDR3 for beta chain variable domain of TCR clone 358579 (TRBV7-2, TRBJ2-7)
CASSLKGALTYEKYF

SEQ ID NO: 717159 - protein, 13 aa, Homo sapiens
  CDR3 for alpha chain variable domain of TCR clone 358580 (TRAV21, TRAJ15)
CAVANQAGTALIF

SEQ ID NO: 717160 - protein, 14 aa, Homo sapiens
  CDR3 for beta chain variable domain of TCR clone 358580 (TRBV24-1, TRBJ2-2)
CASSLGAATGELFF

SEQ ID NO: 717161 - protein, 14 aa, Homo sapiens
  CDR3 for alpha chain variable domain of TCR clone 358581 (TRAV2, TRAJ9)
CAVEDRSGGFKNIF

SEQ ID NO: 717162 - protein, 14 aa, Homo sapiens
  CDR3 for beta chain variable domain of TCR clone 358581 (TRBV7-3, TRBJ2-1)
CASSLAGGTNEQFF

SEQ ID NO: 717163 - protein, 13 aa, Homo sapiens
  CDR3 for alpha chain variable domain of TCR clone 358582 (TRAV12-1, TRAJ34)
CVVTGYNTDKPIF

SEQ ID NO: 717164 - protein, 13 aa, Homo sapiens
  CDR3 for beta chain variable domain of TCR clone 358582 (TRBV28, TRBJ2-7)
CASKAGGVYEQYL

SEQ ID NO: 717165 - protein, 13 aa, Homo sapiens
  CDR3 for alpha chain variable domain of TCR clone 358583 (TRAV29/DV5, TRAJ48)
CAASSFGNEKLTF

SEQ ID NO: 717166 - protein, 15 aa, Homo sapiens
  CDR3 for beta chain variable domain of TCR clone 358583 (TRBV6-1, TRBJ2-1)
CASSEAAYSYNEQFF

SEQ ID NO: 717167 - protein, 17 aa, Homo sapiens
  CDR3 for alpha chain variable domain of TCR clone 358584 (TRAV3, TRAJ6)
CAVRDGPRAGGSYIPTF

SEQ ID NO: 717168 - protein, 15 aa, Homo sapiens
  CDR3 for beta chain variable domain of TCR clone 358584 (TRBV5-8, TRBJ2-2)
CASSLDRGAIGELFF

SEQ ID NO: 717169 - protein, 17 aa, Homo sapiens
  CDR3 for alpha chain variable domain of TCR clone 358585 (TRAV8-6, TRAJ58)
CAMSSWVGETSGSRLTF

SEQ ID NO: 717170 - protein, 15 aa, Homo sapiens
  CDR3 for beta chain variable domain of TCR clone 358585 (TRBV6-3, TRBJ2-7)
CASSSPGTVFYEQYF

SEQ ID NO: 717171 - protein, 12 aa, Homo sapiens
  CDR3 for alpha chain variable domain of TCR clone 358586 (TRAV12-1, TRAJ16)
CVVFRDGQKLLF

SEQ ID NO: 717172 - protein, 16 aa, Homo sapiens
  CDR3 for beta chain variable domain of TCR clone 358586 (TRBV9, TRBJ2-1)
CASSVGGGGNYNEQFF

SEQ ID NO: 717173 - protein, 11 aa, Homo sapiens
  CDR3 for alpha chain variable domain of TCR clone 358587 (TRAV12-1, TRAJ21)
CVVNNFNKFYF

SEQ ID NO: 717174 - protein, 16 aa, Homo sapiens
  CDR3 for beta chain variable domain of TCR clone 358587 (TRBV7-8, TRBJ2-1)
CQQPATGTLAYNEQFF

SEQ ID NO: 717175 - protein, 11 aa, Homo sapiens
  CDR3 for alpha chain variable domain of TCR clone 358588 (TRAV16, TRAJ49)
CALRSGNQFYF

SEQ ID NO: 717176 - protein, 16 aa, Homo sapiens
  CDR3 for beta chain variable domain of TCR clone 358588 (TRBV20-1, TRBJ1-5)
CSARDVWGGWIQPQHF

SEQ ID NO: 717177 - protein, 16 aa, Homo sapiens
  CDR3 for alpha chain variable domain of TCR clone 358589 (TRAV23/DV6, TRAJ9)
CSKPFPPNTGGFKTIF

SEQ ID NO: 717178 - protein, 18 aa, Homo sapiens
  CDR3 for beta chain variable domain of TCR clone 358589 (TRBV4-1, TRBJ2-7)
CASSPDTGAGSGLNEQYF

SEQ ID NO: 717179 - protein, 13 aa, Homo sapiens
  CDR3 for alpha chain variable domain of TCR clone 358590 (TRAV2, TRAJ20)
CAVEDPFEYKLSF

SEQ ID NO: 717180 - protein, 20 aa, Homo sapiens
  CDR3 for beta chain variable domain of TCR clone 358590 (TRBV7-8, TRBJ2-2)
CASSHLFPGPTIHITGELFF

SEQ ID NO: 717181 - protein, 10 aa, Homo sapiens
  CDR3 for alpha chain variable domain of TCR clone 358591 (TRAV1-2, TRAJ31)
CAFFDARLMF

SEQ ID NO: 717182 - protein, 13 aa, Homo sapiens
  CDR3 for beta chain variable domain of TCR clone 358591 (TRBV20-1, TRBJ1-1)
CSARGGGNTEAFF

SEQ ID NO: 717183 - protein, 14 aa, Homo sapiens
  CDR3 for alpha chain variable domain of TCR clone 358592 (TRAV12-2, TRAJ11)
CAVEGGSGYSTPTF

SEQ ID NO: 717184 - protein, 16 aa, Homo sapiens
  CDR3 for beta chain variable domain of TCR clone 358592 (TRBV2, TRBJ2-3)
FASSTSVEGVTDTQYF

SEQ ID NO: 717185 - protein, 15 aa, Homo sapiens
  CDR3 for alpha chain variable domain of TCR clone 358593 (TRAV26-1, TRAJ12)
IASSVLMDSSYKLIF

SEQ ID NO: 717186 - protein, 11 aa, Homo sapiens
  CDR3 for beta chain variable domain of TCR clone 358593 (TRBV7-9, TRBJ2-3)
CASSPPDTQYF

SEQ ID NO: 717187 - protein, 13 aa, Homo sapiens
  CDR3 for alpha chain variable domain of TCR clone 358594 (TRAV8-2, TRAJ49)
CVVTPNTGNQFYF

SEQ ID NO: 717188 - protein, 15 aa, Homo sapiens
  CDR3 for beta chain variable domain of TCR clone 358594 (TRBV11-2, TRBJ2-1)
CASSLTGGGYNEQFF

SEQ ID NO: 717189 - protein, 14 aa, Homo sapiens
  CDR3 for alpha chain variable domain of TCR clone 358595 (TRAV12-3, TRAJ10)
SHLPLTGGGNKLTF

SEQ ID NO: 717190 - protein, 16 aa, Homo sapiens
  CDR3 for beta chain variable domain of TCR clone 358595 (TRBV10-3, TRBJ2-1)
CALSLTSGNSYNEQFF

SEQ ID NO: 717191 - protein, 13 aa, Homo sapiens
  CDR3 for alpha chain variable domain of TCR clone 358596 (TRAV13-2, TRAJ15)
CRESQPGRNCSDP

SEQ ID NO: 717192 - protein, 16 aa, Homo sapiens
  CDR3 for beta chain variable domain of TCR clone 358596 (TRBV12-4, TRBJ1-2)
CASSPTATGKTRGYTF

SEQ ID NO: 717193 - protein, 17 aa, Homo sapiens
  CDR3 for alpha chain variable domain of TCR clone 358597 (TRAV3, TRAJ38)
CAGRDCLNAGNNRKRIW

SEQ ID NO: 717194 - protein, 14 aa, Homo sapiens
  CDR3 for beta chain variable domain of TCR clone 358597 (TRBV5-5, TRBJ1-5)
CASSGQGVDQPQHF

SEQ ID NO: 717195 - protein, 12 aa, Homo sapiens
  CDR3 for alpha chain variable domain of TCR clone 358598 (TRAV12-1, TRAJ20)
CVVNPDDYKLSF

SEQ ID NO: 717196 - protein, 18 aa, Homo sapiens
  CDR3 for beta chain variable domain of TCR clone 358598 (TRBV24-1, TRBJ2-1)
CATSDLMFLGRGVHEQFF

SEQ ID NO: 717197 - protein, 14 aa, Homo sapiens
  CDR3 for alpha chain variable domain of TCR clone 358599 (TRAV1-1, TRAJ30)
CAVRSLNRDDKIIF

SEQ ID NO: 717198 - protein, 15 aa, Homo sapiens
  CDR3 for beta chain variable domain of TCR clone 358599 (TRBV27, TRBJ1-4)
CASSAKQDLNEKLFF

SEQ ID NO: 717199 - protein, 13 aa, Homo sapiens
  CDR3 for alpha chain variable domain of TCR clone 358600 (TRAV12-2, TRAJ6)
CAALKGGSYIPTF

SEQ ID NO: 717200 - protein, 13 aa, Homo sapiens
  CDR3 for beta chain variable domain of TCR clone 358600 (TRBV4-2, TRBJ1-1)
CASSQAGNTEAFF

SEQ ID NO: 717201 - protein, 14 aa, Homo sapiens
  CDR3 for alpha chain variable domain of TCR clone 358601 (TRAV35, TRAJ33)
CAGSSQDSNYQLIW

SEQ ID NO: 717202 - protein, 16 aa, Homo sapiens
  CDR3 for beta chain variable domain of TCR clone 358601 (TRBV6-4, TRBJ1-2)
CASSEAVGDPNYGYTF

SEQ ID NO: 717203 - protein, 14 aa, Homo sapiens
  CDR3 for alpha chain variable domain of TCR clone 358602 (TRAV27, TRAJ49)
CAGRPEGTGNQFYF

SEQ ID NO: 717204 - protein, 16 aa, Homo sapiens
  CDR3 for beta chain variable domain of TCR clone 358602 (TRBV2, TRBJ2-1)
CASSVGGSLSYNKQFF

SEQ ID NO: 717205 - protein, 14 aa, Homo sapiens
  CDR3 for alpha chain variable domain of TCR clone 358603 (TRAV26-1, TRAJ44)
CIVRPPGTASKLTF

SEQ ID NO: 717206 - protein, 12 aa, Homo sapiens
  CDR3 for beta chain variable domain of TCR clone 358603 (TRBV11-3, TRBJ1-1)
CASSLRDSEAFF

SEQ ID NO: 717207 - protein, 12 aa, Homo sapiens
  CDR3 for alpha chain variable domain of TCR clone 358604 (TRAV1-1, TRAJ9)
CALNTGGFKTIL

SEQ ID NO: 717208 - protein, 13 aa, Homo sapiens
  CDR3 for beta chain variable domain of TCR clone 358604 (TRBV29-1, TRBJ2-5)
CSAGLAGEETQYF

SEQ ID NO: 717209 - protein, 13 aa, Homo sapiens
  CDR3 for alpha chain variable domain of TCR clone 358605 (TRAV36/DV7, TRAJ37)
CAVFSSNTGKLIF

SEQ ID NO: 717210 - protein, 15 aa, Homo sapiens
  CDR3 for beta chain variable domain of TCR clone 358605 (TRBV5-1, TRBJ2-3)
CASSTTSGSTDTQYF

SEQ ID NO: 717211 - protein, 14 aa, Homo sapiens
  CDR3 for alpha chain variable domain of TCR clone 358606 (TRAV17, TRAJ22)
CATVLPGSARQLTF

SEQ ID NO: 717212 - protein, 14 aa, Homo sapiens
  CDR3 for beta chain variable domain of TCR clone 358606 (TRBV12-4, TRBJ2-5)
CASSFGDRGETQYF

SEQ ID NO: 717213 - protein, 12 aa, Homo sapiens
  CDR3 for alpha chain variable domain of TCR clone 358607 (TRAV29/DV5, TRAJ34)
CAARHNTDKLIF

SEQ ID NO: 717214 - protein, 13 aa, Homo sapiens
  CDR3 for beta chain variable domain of TCR clone 358607 (TRBV7-7, TRBJ2-3)
CASSLSRADTQYF

SEQ ID NO: 717215 - protein, 15 aa, Homo sapiens
  CDR3 for alpha chain variable domain of TCR clone 358608 (TRAV4, TRAJ5)
CLVGAMDTGRRALTF

SEQ ID NO: 717216 - protein, 16 aa, Homo sapiens
  CDR3 for beta chain variable domain of TCR clone 358608 (TRBV12-5, TRBJ2-5)
CASGPRTSGKQETQYF

SEQ ID NO: 717217 - protein, 13 aa, Homo sapiens
  CDR3 for alpha chain variable domain of TCR clone 358609 (TRAV12-1, TRAJ39)
CVALNNAGNMLTF

SEQ ID NO: 717218 - protein, 15 aa, Homo sapiens
  CDR3 for beta chain variable domain of TCR clone 358609 (TRBV14, TRBJ2-5)
CASGRRGGVQETQYF

SEQ ID NO: 717219 - protein, 16 aa, Homo sapiens
  CDR3 for alpha chain variable domain of TCR clone 358610 (TRAV3, TRAJ21)
CAVRDIDRGNFTKFYF

SEQ ID NO: 717220 - protein, 13 aa, Homo sapiens
  CDR3 for beta chain variable domain of TCR clone 358610 (TRBV27, TRBJ2-7)
CASSLTTGYEQYF

SEQ ID NO: 717221 - protein, 13 aa, Homo sapiens
  CDR3 for alpha chain variable domain of TCR clone 358611 (TRAV17, TRAJ4)
CATKSGGYNKLIF

SEQ ID NO: 717222 - protein, 14 aa, Homo sapiens
  CDR3 for beta chain variable domain of TCR clone 358611 (TRBV20-1, TRBJ1-5)
CSARNDRGNQPQHF

SEQ ID NO: 717223 - protein, 13 aa, Homo sapiens
  CDR3 for alpha chain variable domain of TCR clone 358612 (TRAV17, TRAJ9)
CATDYTGGFKTIF

SEQ ID NO: 717224 - protein, 14 aa, Homo sapiens
  CDR3 for beta chain variable domain of TCR clone 358612 (TRBV19, TRBJ2-5)
CASSMTGHKETQSF

SEQ ID NO: 717225 - protein, 10 aa, Homo sapiens
  CDR3 for alpha chain variable domain of TCR clone 358613 (TRAV30, TRAJ48)
CGIGNEKLTI

SEQ ID NO: 717226 - protein, 14 aa, Homo sapiens
  CDR3 for beta chain variable domain of TCR clone 358613 (TRBV7-6, TRBJ2-3)
CASSLGTVTDTQYF

SEQ ID NO: 717227 - protein, 11 aa, Homo sapiens
  CDR3 for alpha chain variable domain of TCR clone 358614 (TRAV1-1, TRAJ23)
CAVRQGGKLIF

SEQ ID NO: 717228 - protein, 20 aa, Homo sapiens
  CDR3 for beta chain variable domain of TCR clone 358614 (TRBV7-8, TRBJ2-2)
CASSHLFPGPTIQINGELFF

SEQ ID NO: 717229 - protein, 13 aa, Homo sapiens
  CDR3 for alpha chain variable domain of TCR clone 358615 (TRAV20, TRAJ15)
CATINQVGTALIF

SEQ ID NO: 717230 - protein, 13 aa, Homo sapiens
  CDR3 for beta chain variable domain of TCR clone 358615 (TRBV12-4, TRBJ2-1)
CASRQPSNNEQFF

SEQ ID NO: 717231 - protein, 15 aa, Homo sapiens
  CDR3 for alpha chain variable domain of TCR clone 358616 (TRAV13-1, TRAJ44)
CAASRGGGTASKLTF

SEQ ID NO: 717232 - protein, 15 aa, Homo sapiens
  CDR3 for beta chain variable domain of TCR clone 358616 (TRBV19, TRBJ2-1)
CASSTGTSSYNEQFF

SEQ ID NO: 717233 - protein, 16 aa, Homo sapiens
  CDR3 for alpha chain variable domain of TCR clone 358617 (TRAV16, TRAJ4)
CALSRMFSGGYNKLIF

SEQ ID NO: 717234 - protein, 12 aa, Homo sapiens
  CDR3 for beta chain variable domain of TCR clone 358617 (TRBV19, TRBJ2-1)
CASSQISNEQFF

SEQ ID NO: 717235 - protein, 15 aa, Homo sapiens
  CDR3 for alpha chain variable domain of TCR clone 358618 (TRAV12-3, TRAJ42)
CAMITSVGSQGNLIF

SEQ ID NO: 717236 - protein, 13 aa, Homo sapiens
  CDR3 for beta chain variable domain of TCR clone 358618 (TRBV3-1, TRBJ1-1)
CASSQLQGAEAFF

SEQ ID NO: 717237 - protein, 22 aa, Homo sapiens
  CDR3 for alpha chain variable domain of TCR clone 358619 (TRAV8-2, TRAJ45)
HLTKPSAHMRDAAEYSAYGLTF

SEQ ID NO: 717238 - protein, 13 aa, Homo sapiens
  CDR3 for beta chain variable domain of TCR clone 358619 (TRBV7-3, TRBJ2-1)
CASSPVAYNEQFF

SEQ ID NO: 717239 - protein, 22 aa, Homo sapiens
  CDR3 for alpha chain variable domain of TCR clone 358620 (TRAV27, TRAJ41)
CAVRTQIPDIQHPDPAVYQLRV

SEQ ID NO: 717240 - protein, 16 aa, Homo sapiens
  CDR3 for beta chain variable domain of TCR clone 358620 (TRBV5-1, TRBJ2-3)
CASSLGLAVYTDTQYF

SEQ ID NO: 717241 - protein, 16 aa, Homo sapiens
  CDR3 for alpha chain variable domain of TCR clone 358621 (TRAV17, TRAJ28)
CATDDYSGAGSYQLTF

SEQ ID NO: 717242 - protein, 13 aa, Homo sapiens
  CDR3 for beta chain variable domain of TCR clone 358621 (TRBV7-9, TRBJ1-2)
CASRTGPNYGYTF

SEQ ID NO: 717243 - protein, 16 aa, Homo sapiens
  CDR3 for alpha chain variable domain of TCR clone 358622 (TRAV8-4, TRAJ16)
CAVSPVGRWPEAALCK

SEQ ID NO: 717244 - protein, 17 aa, Homo sapiens
  CDR3 for beta chain variable domain of TCR clone 358622 (TRBV4-3, TRBJ1-2)
CASSSRLQAGGSVGYTF

SEQ ID NO: 717245 - protein, 13 aa, Homo sapiens
  CDR3 for alpha chain variable domain of TCR clone 358623 (TRAV21, TRAJ15)
CAVANQAGTAMIF

SEQ ID NO: 717246 - protein, 14 aa, Homo sapiens
  CDR3 for beta chain variable domain of TCR clone 358623 (TRBV27, TRBJ2-2)
CASSLGAATGELFF

SEQ ID NO: 717247 - protein, 16 aa, Homo sapiens
  CDR3 for alpha chain variable domain of TCR clone 358624 (TRAV23/DV6, TRAJ9)
CAASIGGNTGGFKTIF

SEQ ID NO: 717248 - protein, 14 aa, Homo sapiens
  CDR3 for beta chain variable domain of TCR clone 358624 (TRBV7-9, TRBJ2-3)
CASSLEDGTDTQYF

SEQ ID NO: 717249 - protein, 13 aa, Homo sapiens
  CDR3 for alpha chain variable domain of TCR clone 358625 (TRAV1-2, TRAJ9)
CAALNTGGFKTIF

SEQ ID NO: 717250 - protein, 17 aa, Homo sapiens
  CDR3 for beta chain variable domain of TCR clone 358625 (TRBV5-1, TRBJ2-5)
CASSPVALGQNQETQYF

SEQ ID NO: 717251 - protein, 14 aa, Homo sapiens
  CDR3 for alpha chain variable domain of TCR clone 358626 (TRAV1-2, TRAJ8)
CAVREHTGFQKLVF

SEQ ID NO: 717252 - protein, 15 aa, Homo sapiens
  CDR3 for beta chain variable domain of TCR clone 358626 (TRBV27, TRBJ2-1)
CASSNGGGSSNEQFF

SEQ ID NO: 717253 - protein, 13 aa, Homo sapiens
  CDR3 for alpha chain variable domain of TCR clone 358627 (TRAV21, TRAJ15)
CAVANQAGTALIF

SEQ ID NO: 717254 - protein, 15 aa, Homo sapiens
  CDR3 for beta chain variable domain of TCR clone 358627 (TRBV27, TRBJ2-7)
CASSLGSSVSPEQFF

SEQ ID NO: 717255 - protein, 13 aa, Homo sapiens
  CDR3 for alpha chain variable domain of TCR clone 358628 (TRAV3, TRAJ8)
CAVRFTGFQKLVF

SEQ ID NO: 717256 - protein, 13 aa, Homo sapiens
  CDR3 for beta chain variable domain of TCR clone 358628 (TRBV19, TRBJ2-1)
CASSIGTGNEQFF

SEQ ID NO: 717257 - protein, 11 aa, Homo sapiens
  CDR3 for alpha chain variable domain of TCR clone 358629 (TRAV12-1, TRAJ21)
CVVYNFNKFYF

SEQ ID NO: 717258 - protein, 16 aa, Homo sapiens
  CDR3 for beta chain variable domain of TCR clone 358629 (TRBV6-5, TRBJ2-7)
CARLYFRVGISDEQYF

SEQ ID NO: 717259 - protein, 11 aa, Homo sapiens
  CDR3 for alpha chain variable domain of TCR clone 358630 (TRAV2, TRAJ21)
CAVFNFNKFYF

SEQ ID NO: 717260 - protein, 14 aa, Homo sapiens
  CDR3 for beta chain variable domain of TCR clone 358630 (TRBV7-2, TRBJ2-1)
CASSRGGARNEQLF

SEQ ID NO: 717261 - protein, 13 aa, Homo sapiens
  CDR3 for alpha chain variable domain of TCR clone 358631 (TRAV36/DV7, TRAJ34)
CAVGEVNTDKLIF

SEQ ID NO: 717262 - protein, 12 aa, Homo sapiens
  CDR3 for beta chain variable domain of TCR clone 358631 (TRBV11-3, TRBJ1-1)
CASSHRQGEAFF

SEQ ID NO: 717263 - protein, 16 aa, Homo sapiens
  CDR3 for alpha chain variable domain of TCR clone 358632 (TRAV12-2, TRAJ32)
CAVNLGQGGATNKLIF

SEQ ID NO: 717264 - protein, 17 aa, Homo sapiens
  CDR3 for beta chain variable domain of TCR clone 358632 (TRBV20-1, TRBJ2-2)
RSASGSGQGGLTGELFF

SEQ ID NO: 717265 - protein, 14 aa, Homo sapiens
  CDR3 for alpha chain variable domain of TCR clone 358633 (TRAV9-2, TRAJ39)
CALYIYNAGNMLTF

SEQ ID NO: 717266 - protein, 14 aa, Homo sapiens
  CDR3 for beta chain variable domain of TCR clone 358633 (TRBV5-1, TRBJ2-7)
CASSATGGYDEQYF

SEQ ID NO: 717267 - protein, 14 aa, Homo sapiens
  CDR3 for alpha chain variable domain of TCR clone 358634 (TRAV23/DV6, TRAJ22)
CAASVSGSARQLTF

SEQ ID NO: 717268 - protein, 14 aa, Homo sapiens
  CDR3 for beta chain variable domain of TCR clone 358634 (TRBV11-2, TRBJ2-7)
CASSLGAGAYEQYF

SEQ ID NO: 717269 - protein, 11 aa, Homo sapiens
  CDR3 for alpha chain variable domain of TCR clone 358635 (TRAV12-2, TRAJ29)
CAVTLRSPLVV

SEQ ID NO: 717270 - protein, 16 aa, Homo sapiens
  CDR3 for beta chain variable domain of TCR clone 358635 (TRBV19, TRBJ1-5)
CASSIDRGGPRQPQHF

SEQ ID NO: 717271 - protein, 13 aa, Homo sapiens
  CDR3 for alpha chain variable domain of TCR clone 358636 (TRAV39, TRAJ58)
CAGEETSGFRLTF

SEQ ID NO: 717272 - protein, 13 aa, Homo sapiens
  CDR3 for beta chain variable domain of TCR clone 358636 (TRBV15, TRBJ2-7)
CATSTTGHYEQYF

SEQ ID NO: 717273 - protein, 14 aa, Homo sapiens
  CDR3 for alpha chain variable domain of TCR clone 358637 (TRAV21, TRAJ35)
CAVMPIGFGNVLHC

SEQ ID NO: 717274 - protein, 15 aa, Homo sapiens
  CDR3 for beta chain variable domain of TCR clone 358637 (TRBV20-1, TRBJ1-1)
CSASWDRFLNTEALF

SEQ ID NO: 717275 - protein, 15 aa, Homo sapiens
  CDR3 for alpha chain variable domain of TCR clone 358638 (TRAV12-3, TRAJ27)
CAMRAYNTNAGKSTF

SEQ ID NO: 717276 - protein, 12 aa, Homo sapiens
  CDR3 for beta chain variable domain of TCR clone 358638 (TRBV2, TRBJ2-1)
CAKREGYNEQFF

SEQ ID NO: 717277 - protein, 14 aa, Homo sapiens
  CDR3 for alpha chain variable domain of TCR clone 358639 (TRAV12-2, TRAJ13)
CAVKKTGGYQKVPF

SEQ ID NO: 717278 - protein, 19 aa, Homo sapiens
  CDR3 for beta chain variable domain of TCR clone 358639 (TRBV25-1, TRBJ2-2)
CAILVYRVDRGRKTGELFF

SEQ ID NO: 717279 - protein, 14 aa, Homo sapiens
  CDR3 for alpha chain variable domain of TCR clone 358640 (TRAV12-2, TRAJ13)
CAVRKTGGYQKVTF

SEQ ID NO: 717280 - protein, 15 aa, Homo sapiens
  CDR3 for beta chain variable domain of TCR clone 358640 (TRBV27, TRBJ2-1)
CASGNGGGSSNEQFF

SEQ ID NO: 717281 - protein, 14 aa, Homo sapiens
  CDR3 for alpha chain variable domain of TCR clone 358641 (TRAV23/DV6, TRAJ53)
CTARSGGSNYKLTF

SEQ ID NO: 717282 - protein, 14 aa, Homo sapiens
  CDR3 for beta chain variable domain of TCR clone 358641 (TRBV27, TRBJ1-1)
CASSPQGKRAEAFF

SEQ ID NO: 717283 - protein, 14 aa, Homo sapiens
  CDR3 for alpha chain variable domain of TCR clone 358642 (TRAV38-1, TRAJ45)
CASHSGVGADGLTF

SEQ ID NO: 717284 - protein, 16 aa, Homo sapiens
  CDR3 for beta chain variable domain of TCR clone 358642 (TRBV27, TRBJ2-2)
CASSFRGLVRTGELFF

SEQ ID NO: 717285 - protein, 12 aa, Homo sapiens
  CDR3 for alpha chain variable domain of TCR clone 358643 (TRAV21, TRAJ3)
CCFYSSASKIIF

SEQ ID NO: 717286 - protein, 16 aa, Homo sapiens
  CDR3 for beta chain variable domain of TCR clone 358643 (TRBV19, TRBJ2-1)
CASSKVGPSSYNEQFF

SEQ ID NO: 717287 - protein, 15 aa, Homo sapiens
  CDR3 for alpha chain variable domain of TCR clone 358644 (TRAV26-1, TRAJ37)
CIVKTGSSNTGKIIF

SEQ ID NO: 717288 - protein, 12 aa, Homo sapiens
  CDR3 for beta chain variable domain of TCR clone 358644 (TRBV7-8, TRBJ2-7)
CASSLGDREQYS

SEQ ID NO: 717289 - protein, 18 aa, Homo sapiens
  CDR3 for alpha chain variable domain of TCR clone 358645 (TRAV26-1, TRAJ52)
CIVRVEGAGGTSYGKLTF

SEQ ID NO: 717290 - protein, 16 aa, Homo sapiens
  CDR3 for beta chain variable domain of TCR clone 358645 (TRBV7-3, TRBJ2-1)
CASSLEGDRAYNEQFF

SEQ ID NO: 717291 - protein, 13 aa, Homo sapiens
  CDR3 for alpha chain variable domain of TCR clone 358646 (TRAV12-3, TRAJ4)
CNEQAGGYNKLIS

SEQ ID NO: 717292 - protein, 15 aa, Homo sapiens
  CDR3 for beta chain variable domain of TCR clone 358646 (TRBV5-1, TRBJ1-1)
CASSPSDLGGTEAFF

SEQ ID NO: 717293 - protein, 15 aa, Homo sapiens
  CDR3 for alpha chain variable domain of TCR clone 358647 (TRAV2, TRAJ15)
CAVEDRGQAGTALIF

SEQ ID NO: 717294 - protein, 13 aa, Homo sapiens
  CDR3 for beta chain variable domain of TCR clone 358647 (TRBV10-2, TRBJ2-7)
CASGASGDYEQYF

SEQ ID NO: 717295 - protein, 13 aa, Homo sapiens
  CDR3 for alpha chain variable domain of TCR clone 358648 (TRAV26-1, TRAJ34)
CIVRGHNTEQLIF

SEQ ID NO: 717296 - protein, 15 aa, Homo sapiens
  CDR3 for beta chain variable domain of TCR clone 358648 (TRBV4-1, TRBJ2-7)
CASSQEWGPSYEQYF

SEQ ID NO: 717297 - protein, 12 aa, Homo sapiens
  CDR3 for alpha chain variable domain of TCR clone 358649 (TRAV4, TRAJ26)
CLVGDYGQNFVF

SEQ ID NO: 717298 - protein, 16 aa, Homo sapiens
  CDR3 for beta chain variable domain of TCR clone 358649 (TRBV7-2, TRBJ1-2)
CASSSNLDRRGHGYTF

SEQ ID NO: 717299 - protein, 10 aa, Homo sapiens
  CDR3 for alpha chain variable domain of TCR clone 358650 (TRAV25, TRAJ20)
CAVNDYKLSF

SEQ ID NO: 717300 - protein, 13 aa, Homo sapiens
  CDR3 for beta chain variable domain of TCR clone 358650 (TRBV6-3, TRBJ2-7)
CASSFSGGDEQYF

SEQ ID NO: 717301 - protein, 15 aa, Homo sapiens
  CDR3 for alpha chain variable domain of TCR clone 358651 (TRAV8-4, TRAJ39)
CAVSHHRVAGNMLTF

SEQ ID NO: 717302 - protein, 15 aa, Homo sapiens
  CDR3 for beta chain variable domain of TCR clone 358651 (TRBV20-1, TRBJ1-1)
CSARPRQGVPTEAFF

SEQ ID NO: 717303 - protein, 16 aa, Homo sapiens
  CDR3 for alpha chain variable domain of TCR clone 358652 (TRAV14/DV4, TRAJ13)
CAMSHSVLGGYQKVTF

SEQ ID NO: 717304 - protein, 15 aa, Homo sapiens
  CDR3 for beta chain variable domain of TCR clone 358652 (TRBV7-2, TRBJ2-3)
CASSSTGLETDTQYF

SEQ ID NO: 717305 - protein, 17 aa, Homo sapiens
  CDR3 for alpha chain variable domain of TCR clone 358653 (TRAV3, TRAJ42)
CAVRDRDYGGSQGNLIF

SEQ ID NO: 717306 - protein, 15 aa, Homo sapiens
  CDR3 for beta chain variable domain of TCR clone 358653 (TRBV20-1, TRBJ2-7)
CSARVPAAYFYEQYF

SEQ ID NO: 717307 - protein, 12 aa, Homo sapiens
  CDR3 for alpha chain variable domain of TCR clone 358654 (TRAV29/DV5, TRAJ34)
CAASGNTDKLIF

SEQ ID NO: 717308 - protein, 14 aa, Homo sapiens
  CDR3 for beta chain variable domain of TCR clone 358654 (TRBV5-7, TRBJ2-6)
CASSLAAGANVLTF

SEQ ID NO: 717309 - protein, 14 aa, Homo sapiens
  CDR3 for alpha chain variable domain of TCR clone 358655 (TRAV1-2, TRAJ16)
CAVNRFSYGQKLLF

SEQ ID NO: 717310 - protein, 15 aa, Homo sapiens
  CDR3 for beta chain variable domain of TCR clone 358655 (TRBV29-1, TRBJ2-7)
CSVEFFDRGSYEQYF

SEQ ID NO: 717311 - protein, 10 aa, Homo sapiens
  CDR3 for alpha chain variable domain of TCR clone 358656 (TRAV30, TRAJ48)
CGIGNEKLTF

SEQ ID NO: 717312 - protein, 17 aa, Homo sapiens
  CDR3 for beta chain variable domain of TCR clone 358656 (TRBV4-2, TRBJ1-1)
CASTQFGGGSGNTEAFF

SEQ ID NO: 717313 - protein, 13 aa, Homo sapiens
  CDR3 for alpha chain variable domain of TCR clone 358657 (TRAV2, TRAJ29)
CAAQNSGNTPLVF

SEQ ID NO: 717314 - protein, 15 aa, Homo sapiens
  CDR3 for beta chain variable domain of TCR clone 358657 (TRBV27, TRBJ1-4)
CASSAQQDLNEKLFF

SEQ ID NO: 717315 - protein, 12 aa, Homo sapiens
  CDR3 for alpha chain variable domain of TCR clone 358658 (TRAV17, TRAJ20)
CATDSNDYKLSF

SEQ ID NO: 717316 - protein, 14 aa, Homo sapiens
  CDR3 for beta chain variable domain of TCR clone 358658 (TRBV6-5, TRBJ1-1)
CASSYGQGDTEAFF

SEQ ID NO: 717317 - protein, 11 aa, Homo sapiens
  CDR3 for alpha chain variable domain of TCR clone 358659 (TRAV2, TRAJ13)
CASGGYQKVTF

SEQ ID NO: 717318 - protein, 17 aa, Homo sapiens
  CDR3 for beta chain variable domain of TCR clone 358659 (TRBV11-2, TRBJ2-1)
CASSLCPPGIEYNEQFF

SEQ ID NO: 717319 - protein, 17 aa, Homo sapiens
  CDR3 for alpha chain variable domain of TCR clone 358660 (TRAV12-2, TRAJ4)
CAVNVRPVSGGYNKLIF

SEQ ID NO: 717320 - protein, 17 aa, Homo sapiens
  CDR3 for beta chain variable domain of TCR clone 358660 (TRBV6-3, TRBJ2-1)
CASSYSSGTRGIDEQFF

SEQ ID NO: 717321 - protein, 15 aa, Homo sapiens
  CDR3 for alpha chain variable domain of TCR clone 358661 (TRAV35, TRAJ58)
CAGRRQETSGSRLTF

SEQ ID NO: 717322 - protein, 18 aa, Homo sapiens
  CDR3 for beta chain variable domain of TCR clone 358661 (TRBV7-9, TRBJ2-7)
CASSLTTSGSRTWYEQYF

SEQ ID NO: 717323 - protein, 10 aa, Homo sapiens
  CDR3 for alpha chain variable domain of TCR clone 358662 (TRAV13-1, TRAJ5)
CAASRRALTF

SEQ ID NO: 717324 - protein, 16 aa, Homo sapiens
  CDR3 for beta chain variable domain of TCR clone 358662 (TRBV4-3, TRBJ2-3)
CASSEGGLAGTDTQYF

SEQ ID NO: 717325 - protein, 14 aa, Homo sapiens
  CDR3 for alpha chain variable domain of TCR clone 358663 (TRAV13-1, TRAJ6)
CAASNGGGSYIPIF

SEQ ID NO: 717326 - protein, 15 aa, Homo sapiens
  CDR3 for beta chain variable domain of TCR clone 358663 (TRBV10-3, TRBJ2-5)
CAIRPGDVDLGTQYF

SEQ ID NO: 717327 - protein, 14 aa, Homo sapiens
  CDR3 for alpha chain variable domain of TCR clone 358664 (TRAV26-1, TRAJ38)
CIADNAGNNRKLIW

SEQ ID NO: 717328 - protein, 17 aa, Homo sapiens
  CDR3 for beta chain variable domain of TCR clone 358664 (TRBV13, TRBJ2-3)
CASSRSRVAGGRNTQYF

SEQ ID NO: 717329 - protein, 12 aa, Homo sapiens
  CDR3 for alpha chain variable domain of TCR clone 358665 (TRAV13-1, TRAJ15)
CAAHQAGTALIF

SEQ ID NO: 717330 - protein, 14 aa, Homo sapiens
  CDR3 for beta chain variable domain of TCR clone 358665 (TRBV20-1, TRBJ2-5)
CSARYRGLQETQYF

SEQ ID NO: 717331 - protein, 19 aa, Homo sapiens
  CDR3 for alpha chain variable domain of TCR clone 358666 (TRAV38-2/DV8, TRAJ42)
CAYRSAGRNYGGSQGNITF

SEQ ID NO: 717332 - protein, 14 aa, Homo sapiens
  CDR3 for beta chain variable domain of TCR clone 358666 (TRBV7-2, TRBJ1-2)
CASSQTGSTYGYTF

SEQ ID NO: 717333 - protein, 14 aa, Homo sapiens
  CDR3 for alpha chain variable domain of TCR clone 358667 (TRAV8-2, TRAJ11)
CVVSAKSGYSTLTF

SEQ ID NO: 717334 - protein, 16 aa, Homo sapiens
  CDR3 for beta chain variable domain of TCR clone 358667 (TRBV28, TRBJ2-1)
CASSSPEYPRDNEQFF

SEQ ID NO: 717335 - protein, 14 aa, Homo sapiens
  CDR3 for alpha chain variable domain of TCR clone 358668 (TRAV13-2, TRAJ11)
CAETGNSGYSTLTF

SEQ ID NO: 717336 - protein, 13 aa, Homo sapiens
  CDR3 for beta chain variable domain of TCR clone 358668 (TRBV10-3, TRBJ2-7)
CASKLAVNYEQYF

SEQ ID NO: 717337 - protein, 12 aa, Homo sapiens
  CDR3 for alpha chain variable domain of TCR clone 358669 (TRAV26-1, TRAJ36)
CIVRVRADNLFF

SEQ ID NO: 717338 - protein, 18 aa, Homo sapiens
  CDR3 for beta chain variable domain of TCR clone 358669 (TRBV7-3, TRBJ2-3)
CASSSTGTYPGSTDTQYF

SEQ ID NO: 717339 - protein, 15 aa, Homo sapiens
  CDR3 for alpha chain variable domain of TCR clone 358670 (TRAV17, TRAJ57)
CATGPSQGGSEELVF

SEQ ID NO: 717340 - protein, 14 aa, Homo sapiens
  CDR3 for beta chain variable domain of TCR clone 358670 (TRBV11-2, TRBJ1-2)
CASSLYRGNYGYTF

SEQ ID NO: 717341 - protein, 14 aa, Homo sapiens
  CDR3 for alpha chain variable domain of TCR clone 358671 (TRAV12-2, TRAJ44)
CAVNKAVTASKLTF

SEQ ID NO: 717342 - protein, 16 aa, Homo sapiens
  CDR3 for beta chain variable domain of TCR clone 358671 (TRBV6-1, TRBJ1-3)
CASSEGGVTSGNTIYF

SEQ ID NO: 717343 - protein, 14 aa, Homo sapiens
  CDR3 for alpha chain variable domain of TCR clone 358672 (TRAV1-2, TRAJ16)
CAVNRFSDGQKLLF

SEQ ID NO: 717344 - protein, 16 aa, Homo sapiens
  CDR3 for beta chain variable domain of TCR clone 358672 (TRBV7-8, TRBJ2-6)
CQQRRDRGAGANVLTF

SEQ ID NO: 717345 - protein, 11 aa, Homo sapiens
  CDR3 for alpha chain variable domain of TCR clone 358673 (TRAV23/DV6, TRAJ44)
CAAPTPGKPTF

SEQ ID NO: 717346 - protein, 15 aa, Homo sapiens
  CDR3 for beta chain variable domain of TCR clone 358673 (TRBV7-2, TRBJ2-2)
CASSLVSQFTGELFF

SEQ ID NO: 717347 - protein, 14 aa, Homo sapiens
  CDR3 for alpha chain variable domain of TCR clone 358674 (TRAV12-2, TRAJ17)
CAVLFKAAGNKLPF

SEQ ID NO: 717348 - protein, 15 aa, Homo sapiens
  CDR3 for beta chain variable domain of TCR clone 358674 (TRBV11-3, TRBJ2-3)
CASLKDGREGDTQYF

SEQ ID NO: 717349 - protein, 13 aa, Homo sapiens
  CDR3 for alpha chain variable domain of TCR clone 358675 (TRAV21, TRAJ57)
CAVTQGGPGKLVF

SEQ ID NO: 717350 - protein, 11 aa, Homo sapiens
  CDR3 for beta chain variable domain of TCR clone 358675 (TRBV11-2, TRBJ2-2)
CASSLPGELFF

SEQ ID NO: 717351 - protein, 13 aa, Homo sapiens
  CDR3 for alpha chain variable domain of TCR clone 358676 (TRAV12-2, TRAJ7)
CAGLFYGNNRLAF

SEQ ID NO: 717352 - protein, 14 aa, Homo sapiens
  CDR3 for beta chain variable domain of TCR clone 358676 (TRBV6-1, TRBJ2-1)
CATFTSGQNNEQFF

SEQ ID NO: 717353 - protein, 18 aa, Homo sapiens
  CDR3 for alpha chain variable domain of TCR clone 358677 (TRAV12-3, TRAJ4)
CAMTGAGTRLAVHPYLQN

SEQ ID NO: 717354 - protein, 14 aa, Homo sapiens
  CDR3 for beta chain variable domain of TCR clone 358677 (TRBV10-3, TRBJ1-1)
CAISDTDRGVEAFF

SEQ ID NO: 717355 - protein, 14 aa, Homo sapiens
  CDR3 for alpha chain variable domain of TCR clone 358678 (TRAV29/DV5, TRAJ34)
CAASASRETDKLVF

SEQ ID NO: 717356 - protein, 15 aa, Homo sapiens
  CDR3 for beta chain variable domain of TCR clone 358678 (TRBV7-8, TRBJ2-7)
CASSLERAGSYEQYF

SEQ ID NO: 717357 - protein, 12 aa, Homo sapiens
  CDR3 for alpha chain variable domain of TCR clone 358679 (TRAV13-2, TRAJ8)
CAPWLGFQKLVF

SEQ ID NO: 717358 - protein, 18 aa, Homo sapiens
  CDR3 for beta chain variable domain of TCR clone 358679 (TRBV11-2, TRBJ2-3)
CASRLGGASRGAPNTQYF

SEQ ID NO: 717359 - protein, 13 aa, Homo sapiens
  CDR3 for alpha chain variable domain of TCR clone 358680 (TRAV1-2, TRAJ9)
CAALNTGGFKTIF

SEQ ID NO: 717360 - protein, 13 aa, Homo sapiens
  CDR3 for beta chain variable domain of TCR clone 358680 (TRBV19, TRBJ1-2)
CATSVPGQDGYTF

SEQ ID NO: 717361 - protein, 17 aa, Homo sapiens
  CDR3 for alpha chain variable domain of TCR clone 358681 (TRAV8-3, TRAJ34)
CAIPGKLIFGTGTILQV

SEQ ID NO: 717362 - protein, 15 aa, Homo sapiens
  CDR3 for beta chain variable domain of TCR clone 358681 (TRBV5-7, TRBJ2-1)
CASSRRLAGDNEQFF

SEQ ID NO: 717363 - protein, 17 aa, Homo sapiens
  CDR3 for alpha chain variable domain of TCR clone 358682 (TRAV13-1, TRAJ31)
CAPRDRLMFGDGTQMVV

SEQ ID NO: 717364 - protein, 15 aa, Homo sapiens
  CDR3 for beta chain variable domain of TCR clone 358682 (TRBV5-1, TRBJ2-7)
CASSLYPDGGYEQYF

SEQ ID NO: 717365 - protein, 14 aa, Homo sapiens
  CDR3 for alpha chain variable domain of TCR clone 358683 (TRAV8-3, TRAJ15)
CAVGRHQAGAALIF

SEQ ID NO: 717366 - protein, 13 aa, Homo sapiens
  CDR3 for beta chain variable domain of TCR clone 358683 (TRBV9, TRBJ2-7)
CASSASDSYEQYF

SEQ ID NO: 717367 - protein, 16 aa, Homo sapiens
  CDR3 for alpha chain variable domain of TCR clone 358684 (TRAV16, TRAJ4)
CALSRMFSGGYNKLIF

SEQ ID NO: 717368 - protein, 13 aa, Homo sapiens
  CDR3 for beta chain variable domain of TCR clone 358684 (TRBV7-2, TRBJ1-1)
CASNLKGAKVAFF

SEQ ID NO: 717369 - protein, 13 aa, Homo sapiens
  CDR3 for alpha chain variable domain of TCR clone 358685 (TRAV12-1, TRAJ6)
CVVYPGGSYIPTF

SEQ ID NO: 717370 - protein, 14 aa, Homo sapiens
  CDR3 for beta chain variable domain of TCR clone 358685 (TRBV7-9, TRBJ2-2)
CASSGLADTGELFF

SEQ ID NO: 717371 - protein, 13 aa, Homo sapiens
  CDR3 for alpha chain variable domain of TCR clone 358686 (TRAV3, TRAJ15)
CAVRDQAGTALIF

SEQ ID NO: 717372 - protein, 15 aa, Homo sapiens
  CDR3 for beta chain variable domain of TCR clone 358686 (TRBV6-5, TRBJ2-1)
CASRGDFDSYNGQFF

SEQ ID NO: 717373 - protein, 14 aa, Homo sapiens
  CDR3 for alpha chain variable domain of TCR clone 358687 (TRAV8-4, TRAJ16)
CAVSPVGRWPEAAL

SEQ ID NO: 717374 - protein, 17 aa, Homo sapiens
  CDR3 for beta chain variable domain of TCR clone 358687 (TRBV11-3, TRBJ2-7)
CASSPGPASSTSSTSGR

SEQ ID NO: 717375 - protein, 12 aa, Homo sapiens
  CDR3 for alpha chain variable domain of TCR clone 358688 (TRAV12-1, TRAJ40)
CVFYSGTYKYIF

SEQ ID NO: 717376 - protein, 14 aa, Homo sapiens
  CDR3 for beta chain variable domain of TCR clone 358688 (TRBV28, TRBJ2-7)
CASSLLRISYEQYF

SEQ ID NO: 717377 - protein, 14 aa, Homo sapiens
  CDR3 for alpha chain variable domain of TCR clone 358689 (TRAV3, TRAJ7)
CAVREEEREQQTRF

SEQ ID NO: 717378 - protein, 12 aa, Homo sapiens
  CDR3 for beta chain variable domain of TCR clone 358689 (TRBV7-7, TRBJ2-2)
CASSLGGGELFF

SEQ ID NO: 717379 - protein, 15 aa, Homo sapiens
  CDR3 for alpha chain variable domain of TCR clone 358690 (TRAV8-3, TRAJ13)
CAVAPNSGGYQKVTF

SEQ ID NO: 717380 - protein, 12 aa, Homo sapiens
  CDR3 for beta chain variable domain of TCR clone 358690 (TRBV19, TRBJ2-7)
CASTDRDYEHYF

SEQ ID NO: 717381 - protein, 12 aa, Homo sapiens
  CDR3 for alpha chain variable domain of TCR clone 358691 (TRAV13-1, TRAJ17)
CAARTAGNKLTF

SEQ ID NO: 717382 - protein, 15 aa, Homo sapiens
  CDR3 for beta chain variable domain of TCR clone 358691 (TRBV11-3, TRBJ2-3)
CASLKDGREGDTQYF

SEQ ID NO: 717383 - protein, 16 aa, Homo sapiens
  CDR3 for alpha chain variable domain of TCR clone 358692 (TRAV23/DV6, TRAJ9)
CAASIGGNTGGFKTIF

SEQ ID NO: 717384 - protein, 12 aa, Homo sapiens
  CDR3 for beta chain variable domain of TCR clone 358692 (TRBV11-2, TRBJ2-1)
CASSVQREGQSF

SEQ ID NO: 717385 - protein, 14 aa, Homo sapiens
  CDR3 for alpha chain variable domain of TCR clone 358693 (TRAV1-2, TRAJ8)
CAVREDTGFQKLVF

SEQ ID NO: 717386 - protein, 21 aa, Homo sapiens
  CDR3 for beta chain variable domain of TCR clone 358693 (TRBV11-1, TRBJ2-1)
CASSARERLRPEGPSYNEQFF

SEQ ID NO: 717387 - protein, 13 aa, Homo sapiens
  CDR3 for alpha chain variable domain of TCR clone 358694 (TRAV8-4, TRAJ42)
CAVKEGSQGNLIF

SEQ ID NO: 717388 - protein, 14 aa, Homo sapiens
  CDR3 for beta chain variable domain of TCR clone 358694 (TRBV6-1, TRBJ2-6)
CASQQGAGANVLTF

SEQ ID NO: 717389 - protein, 13 aa, Homo sapiens
  CDR3 for alpha chain variable domain of TCR clone 358695 (TRAV2, TRAJ24)
CAVPTDSWGKLQF

SEQ ID NO: 717390 - protein, 13 aa, Homo sapiens
  CDR3 for beta chain variable domain of TCR clone 358695 (TRBV14, TRBJ1-1)
CASSREFGTEAFF

SEQ ID NO: 717391 - protein, 14 aa, Homo sapiens
  CDR3 for alpha chain variable domain of TCR clone 358696 (TRAV29/DV5, TRAJ44)
CAASALGTASKITF

SEQ ID NO: 717392 - protein, 13 aa, Homo sapiens
  CDR3 for beta chain variable domain of TCR clone 358696 (TRBV29-1, TRBJ2-7)
CSVKRGGNYEQYF

SEQ ID NO: 717393 - protein, 20 aa, Homo sapiens
  CDR3 for alpha chain variable domain of TCR clone 358697 (TRAV21, TRAJ30)
CAVRRRMTRSSLEKGHDFIF

SEQ ID NO: 717394 - protein, 14 aa, Homo sapiens
  CDR3 for beta chain variable domain of TCR clone 358697 (TRBV19, TRBJ2-7)
CASSIFAGTYEQYF

SEQ ID NO: 717395 - protein, 13 aa, Homo sapiens
  CDR3 for alpha chain variable domain of TCR clone 358698 (TRAV26-2, TRAJ54)
CIPRVGGAHKLVF

SEQ ID NO: 717396 - protein, 17 aa, Homo sapiens
  CDR3 for beta chain variable domain of TCR clone 358698 (TRBV24-1, TRBJ2-1)
CATSDVSTSGTYNEQFF

SEQ ID NO: 717397 - protein, 13 aa, Homo sapiens
  CDR3 for alpha chain variable domain of TCR clone 358699 (TRAV26-2, TRAJ43)
CILRAVNNDDMRF

SEQ ID NO: 717398 - protein, 14 aa, Homo sapiens
  CDR3 for beta chain variable domain of TCR clone 358699 (TRBV19, TRBJ2-1)
CASPTFVLSGEQFF

SEQ ID NO: 717399 - protein, 15 aa, Homo sapiens
  CDR3 for alpha chain variable domain of TCR clone 358700 (TRAV3, TRAJ13)
CAVRVYSGGYQKVTF

SEQ ID NO: 717400 - protein, 18 aa, Homo sapiens
  CDR3 for beta chain variable domain of TCR clone 358700 (TRBV7-3, TRBJ2-3)
CASSSTGTYPGSTDTQYF

SEQ ID NO: 717401 - protein, 17 aa, Homo sapiens
  CDR3 for alpha chain variable domain of TCR clone 358701 (TRAV3, TRAJ6)
CAVRDGPRAGGSYIPTF

SEQ ID NO: 717402 - protein, 17 aa, Homo sapiens
  CDR3 for beta chain variable domain of TCR clone 358701 (TRBV20-1, TRBJ1-1)
CSASWDRFLNTEAFLDK

SEQ ID NO: 717403 - protein, 18 aa, Homo sapiens
  CDR3 for alpha chain variable domain of TCR clone 358702 (TRAV13-1, TRAJ52)
CAAKNPNAGGTSYGKLTF

SEQ ID NO: 717404 - protein, 14 aa, Homo sapiens
  CDR3 for beta chain variable domain of TCR clone 358702 (TRBV18, TRBJ2-5)
WASSPGVSQETQYF

SEQ ID NO: 717405 - protein, 17 aa, Homo sapiens
  CDR3 for alpha chain variable domain of TCR clone 358703 (TRAV4, TRAJ13)
CIVGVQGSSGGYQKVTF

SEQ ID NO: 717406 - protein, 13 aa, Homo sapiens
  CDR3 for beta chain variable domain of TCR clone 358703 (TRBV14, TRBJ1-1)
CASSREFGTEAFF

SEQ ID NO: 717407 - protein, 16 aa, Homo sapiens
  CDR3 for alpha chain variable domain of TCR clone 358704 (TRAV16, TRAJ52)
CALSGVGGTSYGKLTF

SEQ ID NO: 717408 - protein, 14 aa, Homo sapiens
  CDR3 for beta chain variable domain of TCR clone 358704 (TRBV19, TRBJ1-2)
CASSLQGQDYGYTF

SEQ ID NO: 717409 - protein, 15 aa, Homo sapiens
  CDR3 for alpha chain variable domain of TCR clone 358705 (TRAV8-3, TRAJ41)
CAVGSNSNYGCARNF

SEQ ID NO: 717410 - protein, 17 aa, Homo sapiens
  CDR3 for beta chain variable domain of TCR clone 358705 (TRBV25-1, TRBJ2-1)
CASSAYGQGRGVYEQFF

SEQ ID NO: 717411 - protein, 12 aa, Homo sapiens
  CDR3 for alpha chain variable domain of TCR clone 358706 (TRAV8-3, TRAJ20)
CAVGANEYKLSF

SEQ ID NO: 717412 - protein, 15 aa, Homo sapiens
  CDR3 for beta chain variable domain of TCR clone 358706 (TRBV11-2, TRBJ2-1)
CASSLGTSGLNEQFF

SEQ ID NO: 717413 - protein, 16 aa, Homo sapiens
  CDR3 for alpha chain variable domain of TCR clone 358707 (TRAV17, TRAJ53)
CATDALSGGSNYKLTF

SEQ ID NO: 717414 - protein, 15 aa, Homo sapiens
  CDR3 for beta chain variable domain of TCR clone 358707 (TRBV20-1, TRBJ2-7)
CSARVRVSGMDEQYF

SEQ ID NO: 717415 - protein, 12 aa, Homo sapiens
  CDR3 for alpha chain variable domain of TCR clone 358708 (TRAV21, TRAJ31)
CAVWGNNARLMV

SEQ ID NO: 717416 - protein, 16 aa, Homo sapiens
  CDR3 for beta chain variable domain of TCR clone 358708 (TRBV27, TRBJ2-5)
CASSYGPGGQKETQYF

SEQ ID NO: 717417 - protein, 16 aa, Homo sapiens
  CDR3 for alpha chain variable domain of TCR clone 358709 (TRAV8-6, TRAJ28)
CAVTSKPGAESYQLTF

SEQ ID NO: 717418 - protein, 16 aa, Homo sapiens
  CDR3 for beta chain variable domain of TCR clone 358709 (TRBV12-4, TRBJ2-5)
CASSWRPSGDLETQYF

SEQ ID NO: 717419 - protein, 14 aa, Homo sapiens
  CDR3 for alpha chain variable domain of TCR clone 358710 (TRAV9-2, TRAJ39)
CALYIYNAGNILTF

SEQ ID NO: 717420 - protein, 18 aa, Homo sapiens
  CDR3 for beta chain variable domain of TCR clone 358710 (TRBV20-1, TRBJ2-6)
CSAETTPTHGSGANVLTF

SEQ ID NO: 717421 - protein, 16 aa, Homo sapiens
  CDR3 for alpha chain variable domain of TCR clone 358711 (TRAV16, TRAJ4)
CALSRMFSGGYNKLIF

SEQ ID NO: 717422 - protein, 13 aa, Homo sapiens
  CDR3 for beta chain variable domain of TCR clone 358711 (TRBV6-1, TRBJ1-1)
CASSRQGNTEAFF

SEQ ID NO: 717423 - protein, 19 aa, Homo sapiens
  CDR3 for alpha chain variable domain of TCR clone 358712 (TRAV26-1, TRAJ52)
CIVRAHRNAGGTSYGKLTF

SEQ ID NO: 717424 - protein, 15 aa, Homo sapiens
  CDR3 for beta chain variable domain of TCR clone 358712 (TRBV29-1, TRBJ2-1)
CSGRDRKSSYNEQFL

SEQ ID NO: 717425 - protein, 12 aa, Homo sapiens
  CDR3 for alpha chain variable domain of TCR clone 358713 (TRAV12-3, TRAJ17)
CAMTLTGNKLTF

SEQ ID NO: 717426 - protein, 15 aa, Homo sapiens
  CDR3 for beta chain variable domain of TCR clone 358713 (TRBV4-3, TRBJ1-5)
CASSQEAVGGQPQHF

SEQ ID NO: 717427 - protein, 11 aa, Homo sapiens
  CDR3 for alpha chain variable domain of TCR clone 358714 (TRAV35, TRAJ30)
CAGPGDDKIIF

SEQ ID NO: 717428 - protein, 14 aa, Homo sapiens
  CDR3 for beta chain variable domain of TCR clone 358714 (TRBV7-6, TRBJ1-6)
CASSQAGGGSPIHF

SEQ ID NO: 717429 - protein, 14 aa, Homo sapiens
  CDR3 for alpha chain variable domain of TCR clone 358715 (TRAV20, TRAJ42)
CAVQAGGSQGNLIF

SEQ ID NO: 717430 - protein, 14 aa, Homo sapiens
  CDR3 for beta chain variable domain of TCR clone 358715 (TRBV28, TRBJ1-2)
CASRIHGANYGDTV

SEQ ID NO: 717431 - protein, 18 aa, Homo sapiens
  CDR3 for alpha chain variable domain of TCR clone 358716 (TRAV3, TRAJ17)
CAVRPRRGGRSCRQQANF

SEQ ID NO: 717432 - protein, 14 aa, Homo sapiens
  CDR3 for beta chain variable domain of TCR clone 358716 (TRBV4-1, TRBJ2-2)
CASSQAVNTGELFF

SEQ ID NO: 717433 - protein, 13 aa, Homo sapiens
  CDR3 for alpha chain variable domain of TCR clone 358717 (TRAV26-1, TRAJ40)
CIVRGTGTYKYIF

SEQ ID NO: 717434 - protein, 14 aa, Homo sapiens
  CDR3 for beta chain variable domain of TCR clone 358717 (TRBV19, TRBJ2-1)
CASPTFVLSGEQFF

SEQ ID NO: 717435 - protein, 19 aa, Homo sapiens
  CDR3 for alpha chain variable domain of TCR clone 358718 (TRAV21, TRAJ45)
CAVEAPRGDQEEVLTDSPF

SEQ ID NO: 717436 - protein, 12 aa, Homo sapiens
  CDR3 for beta chain variable domain of TCR clone 358718 (TRBV29-1, TRBJ1-3)
CSTRDSGNTIYF

SEQ ID NO: 717437 - protein, 15 aa, Homo sapiens
  CDR3 for alpha chain variable domain of TCR clone 358719 (TRAV8-3, TRAJ45)
CASSYSGGGADGLTF

SEQ ID NO: 717438 - protein, 18 aa, Homo sapiens
  CDR3 for beta chain variable domain of TCR clone 358719 (TRBV18, TRBJ1-3)
CASSPRGGAGPSGNAIYF

SEQ ID NO: 717439 - protein, 13 aa, Homo sapiens
  CDR3 for alpha chain variable domain of TCR clone 358720 (TRAV21, TRAJ10)
CAVPTGGGNKLTF

SEQ ID NO: 717440 - protein, 16 aa, Homo sapiens
  CDR3 for beta chain variable domain of TCR clone 358720 (TRBV12-5, TRBJ2-5)
CASGPRTSGNQETQYF

SEQ ID NO: 717441 - protein, 14 aa, Homo sapiens
  CDR3 for alpha chain variable domain of TCR clone 358721 (TRAV1-2, TRAJ8)
CAVGEDTGFQKLVF

SEQ ID NO: 717442 - protein, 13 aa, Homo sapiens
  CDR3 for beta chain variable domain of TCR clone 358721 (TRBV15, TRBJ2-7)
CANSTTGHYEQYF

SEQ ID NO: 717443 - protein, 13 aa, Homo sapiens
  CDR3 for alpha chain variable domain of TCR clone 358722 (TRAV20, TRAJ4)
CCAAGCGYNKLIF

SEQ ID NO: 717444 - protein, 14 aa, Homo sapiens
  CDR3 for beta chain variable domain of TCR clone 358722 (TRBV7-3, TRBJ2-3)
CASSPGASRDTQYF

SEQ ID NO: 717445 - protein, 13 aa, Homo sapiens
  CDR3 for alpha chain variable domain of TCR clone 358723 (TRAV30, TRAJ49)
CGTERNTGNQFYF

SEQ ID NO: 717446 - protein, 14 aa, Homo sapiens
  CDR3 for beta chain variable domain of TCR clone 358723 (TRBV29-1, TRBJ2-1)
CSVEFRGIPFEQFF

SEQ ID NO: 717447 - protein, 12 aa, Homo sapiens
  CDR3 for alpha chain variable domain of TCR clone 358724 (TRAV12-3, TRAJ17)
CAMTLTGNKLTF

SEQ ID NO: 717448 - protein, 15 aa, Homo sapiens
  CDR3 for beta chain variable domain of TCR clone 358724 (TRBV20-1, TRBJ2-7)
CSARDRVSGMEELYF

SEQ ID NO: 717449 - protein, 15 aa, Homo sapiens
  CDR3 for alpha chain variable domain of TCR clone 358725 (TRAV4, TRAJ39)
CLVGPNNNAGNMLTF

SEQ ID NO: 717450 - protein, 19 aa, Homo sapiens
  CDR3 for beta chain variable domain of TCR clone 358725 (TRBV14, TRBJ2-1)
CDSSQDQLWEAPEYNEQFF

SEQ ID NO: 717451 - protein, 11 aa, Homo sapiens
  CDR3 for alpha chain variable domain of TCR clone 358726 (TRAV17, TRAJ39)
CATNPYNMLTF

SEQ ID NO: 717452 - protein, 11 aa, Homo sapiens
  CDR3 for beta chain variable domain of TCR clone 358726 (TRBV5-1, TRBJ2-5)
CASSLAETQYF

SEQ ID NO: 717453 - protein, 13 aa, Homo sapiens
  CDR3 for alpha chain variable domain of TCR clone 358727 (TRAV21, TRAJ27)
CAARPGNAGKSTF

SEQ ID NO: 717454 - protein, 15 aa, Homo sapiens
  CDR3 for beta chain variable domain of TCR clone 358727 (TRBV2, TRBJ2-3)
CASSDVGGPPDTQYF

SEQ ID NO: 717455 - protein, 11 aa, Homo sapiens
  CDR3 for alpha chain variable domain of TCR clone 358728 (TRAV3, TRAJ21)
CAVGNFNNFYF

SEQ ID NO: 717456 - protein, 16 aa, Homo sapiens
  CDR3 for beta chain variable domain of TCR clone 358728 (TRBV19, TRBJ2-1)
CASSKAGPSSYNEQFF

SEQ ID NO: 717457 - protein, 14 aa, Homo sapiens
  CDR3 for alpha chain variable domain of TCR clone 358729 (TRAV38-1, TRAJ45)
CAYYSGGGADGLTF

SEQ ID NO: 717458 - protein, 18 aa, Homo sapiens
  CDR3 for beta chain variable domain of TCR clone 358729 (TRBV20-1, TRBJ2-3)
CSASGLAGGPGTTDTQYF

SEQ ID NO: 717459 - protein, 11 aa, Homo sapiens
  CDR3 for alpha chain variable domain of TCR clone 358730 (TRAV2, TRAJ13)
CASGGYQRVTF

SEQ ID NO: 717460 - protein, 14 aa, Homo sapiens
  CDR3 for beta chain variable domain of TCR clone 358730 (TRBV7-2, TRBJ1-1)
CASSFLTGTTEAFF

SEQ ID NO: 717461 - protein, 12 aa, Homo sapiens
  CDR3 for alpha chain variable domain of TCR clone 358731 (TRAV12-2, TRAJ20)
CAVRHSDYKLSF

SEQ ID NO: 717462 - protein, 14 aa, Homo sapiens
  CDR3 for beta chain variable domain of TCR clone 358731 (TRBV6-1, TRBJ2-7)
CASNRARPDYEQYF

SEQ ID NO: 717463 - protein, 13 aa, Homo sapiens
  CDR3 for alpha chain variable domain of TCR clone 358732 (TRAV35, TRAJ43)
CAGYPYNNNDMLF

SEQ ID NO: 717464 - protein, 15 aa, Homo sapiens
  CDR3 for beta chain variable domain of TCR clone 358732 (TRBV25-1, TRBJ1-4)
CASSKRIASNEKLFF

SEQ ID NO: 717465 - protein, 11 aa, Homo sapiens
  CDR3 for alpha chain variable domain of TCR clone 358733 (TRAV2, TRAJ13)
CASGGYQKVTF

SEQ ID NO: 717466 - protein, 16 aa, Homo sapiens
  CDR3 for beta chain variable domain of TCR clone 358733 (TRBV15, TRBJ2-5)
CATSRYLEAAQETQYF

SEQ ID NO: 717467 - protein, 14 aa, Homo sapiens
  CDR3 for alpha chain variable domain of TCR clone 358734 (TRAV17, TRAJ16)
CATDDFSDGQKLLF

SEQ ID NO: 717468 - protein, 12 aa, Homo sapiens
  CDR3 for beta chain variable domain of TCR clone 358734 (TRBV24-1, TRBJ1-1)
CAALYPDTEAFF

SEQ ID NO: 717469 - protein, 15 aa, Homo sapiens
  CDR3 for alpha chain variable domain of TCR clone 358735 (TRAV21, TRAJ53)
CATLNSGGSNYTLTF

SEQ ID NO: 717470 - protein, 17 aa, Homo sapiens
  CDR3 for beta chain variable domain of TCR clone 358735 (TRBV20-1, TRBJ2-2)
CSASGSGQGGLTGELVF

SEQ ID NO: 717471 - protein, 21 aa, Homo sapiens
  CDR3 for alpha chain variable domain of TCR clone 358736 (TRAV4, TRAJ3)
CCVLLPRGCPPGYSSASQIIF

SEQ ID NO: 717472 - protein, 14 aa, Homo sapiens
  CDR3 for beta chain variable domain of TCR clone 358736 (TRBV2, TRBJ1-6)
CALSPSDPRSPLHF

SEQ ID NO: 717473 - protein, 14 aa, Homo sapiens
  CDR3 for alpha chain variable domain of TCR clone 358737 (TRAV20, TRAJ42)
CAVQAGGSQGNLIF

SEQ ID NO: 717474 - protein, 13 aa, Homo sapiens
  CDR3 for beta chain variable domain of TCR clone 358737 (TRBV19, TRBJ1-2)
CASSVPGQDGYTF

SEQ ID NO: 717475 - protein, 15 aa, Homo sapiens
  CDR3 for alpha chain variable domain of TCR clone 358738 (TRAV3, TRAJ22)
CAMRDRGGSARQLTF

SEQ ID NO: 717476 - protein, 15 aa, Homo sapiens
  CDR3 for beta chain variable domain of TCR clone 358738 (TRBV7-3, TRBJ2-1)
CASSPTGGGEVEQFF

SEQ ID NO: 717477 - protein, 10 aa, Homo sapiens
  CDR3 for alpha chain variable domain of TCR clone 358739 (TRAV16, TRAJ22)
SAMYLRHLTF

SEQ ID NO: 717478 - protein, 13 aa, Homo sapiens
  CDR3 for beta chain variable domain of TCR clone 358739 (TRBV7-9, TRBJ1-2)
CASSLKQNYGYTF

SEQ ID NO: 717479 - protein, 14 aa, Homo sapiens
  CDR3 for alpha chain variable domain of TCR clone 358740 (TRAV12-3, TRAJ10)
SHLPLTGGGNKLTF

SEQ ID NO: 717480 - protein, 13 aa, Homo sapiens
  CDR3 for beta chain variable domain of TCR clone 358740 (TRBV7-7, TRBJ2-5)
CASSRIGQETQYF

SEQ ID NO: 717481 - protein, 15 aa, Homo sapiens
  CDR3 for alpha chain variable domain of TCR clone 358741 (TRAV29/DV5, TRAJ24)
CAASGATDSWGKFQF

SEQ ID NO: 717482 - protein, 14 aa, Homo sapiens
  CDR3 for beta chain variable domain of TCR clone 358741 (TRBV5-1, TRBJ1-1)
CASSLQGASTEAFF

SEQ ID NO: 717483 - protein, 15 aa, Homo sapiens
  CDR3 for alpha chain variable domain of TCR clone 358742 (TRAV8-6, TRAJ37)
CAVIFSSGNTGKLIF

SEQ ID NO: 717484 - protein, 13 aa, Homo sapiens
  CDR3 for beta chain variable domain of TCR clone 358742 (TRBV7-9, TRBJ1-2)
CASSLKQNYGYTF

SEQ ID NO: 717485 - protein, 15 aa, Homo sapiens
  CDR3 for alpha chain variable domain of TCR clone 358743 (TRAV21, TRAJ53)
RATLNSGGSNYKLTF

SEQ ID NO: 717486 - protein, 13 aa, Homo sapiens
  CDR3 for beta chain variable domain of TCR clone 358743 (TRBV12-5, TRBJ2-1)
CASGVGRGNEQFF

SEQ ID NO: 717487 - protein, 14 aa, Homo sapiens
  CDR3 for alpha chain variable domain of TCR clone 358744 (TRAV26-1, TRAJ38)
RIADNAGKNRKLIW

SEQ ID NO: 717488 - protein, 17 aa, Homo sapiens
  CDR3 for beta chain variable domain of TCR clone 358744 (TRBV7-9, TRBJ2-3)
CASSPTVAGDLTDTQYF

SEQ ID NO: 717489 - protein, 12 aa, Homo sapiens
  CDR3 for alpha chain variable domain of TCR clone 358745 (TRAV21, TRAJ12)
CAVMDSSYKLIF

SEQ ID NO: 717490 - protein, 16 aa, Homo sapiens
  CDR3 for beta chain variable domain of TCR clone 358745 (TRBV7-2, TRBJ2-7)
CASSWEAGGPWYEQYF

SEQ ID NO: 717491 - protein, 18 aa, Homo sapiens
  CDR3 for alpha chain variable domain of TCR clone 358746 (TRAV17, TRAJ45)
CATSLDLYSGGGADGLTF

SEQ ID NO: 717492 - protein, 15 aa, Homo sapiens
  CDR3 for beta chain variable domain of TCR clone 358746 (TRBV18, TRBJ2-7)
CASSPRSGTAYEQYF

SEQ ID NO: 717493 - protein, 18 aa, Homo sapiens
  CDR3 for alpha chain variable domain of TCR clone 358747 (TRAV21, TRAJ52)
CAVRPSPAGGTSYGKLTF

SEQ ID NO: 717494 - protein, 13 aa, Homo sapiens
  CDR3 for beta chain variable domain of TCR clone 358747 (TRBV7-2, TRBJ1-1)
CASSRNTNTEAFF

SEQ ID NO: 717495 - protein, 14 aa, Homo sapiens
  CDR3 for alpha chain variable domain of TCR clone 358748 (TRAV26-2, TRAJ23)
CSRTLYNQGGKRIF

SEQ ID NO: 717496 - protein, 15 aa, Homo sapiens
  CDR3 for beta chain variable domain of TCR clone 358748 (TRBV20-1, TRBJ2-7)
CSARDRVSGMDEQYF

SEQ ID NO: 717497 - protein, 13 aa, Homo sapiens
  CDR3 for alpha chain variable domain of TCR clone 358749 (TRAV2, TRAJ34)
CAVEEDNTDKLIF

SEQ ID NO: 717498 - protein, 17 aa, Homo sapiens
  CDR3 for beta chain variable domain of TCR clone 358749 (TRBV7-3, TRBJ2-3)
CASSLMKRMRGADTQYF

SEQ ID NO: 717499 - protein, 13 aa, Homo sapiens
  CDR3 for alpha chain variable domain of TCR clone 358750 (TRAV17, TRAJ9)
CATDYNGGFKIIF

SEQ ID NO: 717500 - protein, 14 aa, Homo sapiens
  CDR3 for beta chain variable domain of TCR clone 358750 (TRBV19, TRBJ2-5)
CASSMTGQQETQYF

SEQ ID NO: 717501 - protein, 15 aa, Homo sapiens
  CDR3 for alpha chain variable domain of TCR clone 358751 (TRAV12-3, TRAJ27)
CAMRAYNTNAGKSTF

SEQ ID NO: 717502 - protein, 14 aa, Homo sapiens
  CDR3 for beta chain variable domain of TCR clone 358751 (TRBV11-2, TRBJ2-5)
CASSRTGGIETQYF

SEQ ID NO: 717503 - protein, 13 aa, Homo sapiens
  CDR3 for alpha chain variable domain of TCR clone 358752 (TRAV8-4, TRAJ30)
CATYKNRDDKIIF

SEQ ID NO: 717504 - protein, 11 aa, Homo sapiens
  CDR3 for beta chain variable domain of TCR clone 358752 (TRBV6-1, TRBJ2-1)
CASGGYNEQFF

SEQ ID NO: 717505 - protein, 14 aa, Homo sapiens
  CDR3 for alpha chain variable domain of TCR clone 358753 (TRAV1-2, TRAJ16)
CAVNRFSDGQKLLF

SEQ ID NO: 717506 - protein, 12 aa, Homo sapiens
  CDR3 for beta chain variable domain of TCR clone 358753 (TRBV28, TRBJ1-1)
CASMGRNTEAFF

SEQ ID NO: 717507 - protein, 14 aa, Homo sapiens
  CDR3 for alpha chain variable domain of TCR clone 358754 (TRAV12-2, TRAJ40)
CAVKIPSGSYKYIF

SEQ ID NO: 717508 - protein, 15 aa, Homo sapiens
  CDR3 for beta chain variable domain of TCR clone 358754 (TRBV20-1, TRBJ1-4)
CSARREWGVNEKLFF

SEQ ID NO: 717509 - protein, 14 aa, Homo sapiens
  CDR3 for alpha chain variable domain of TCR clone 358755 (TRAV30, TRAJ33)
CGTVAPRSNYQLLW

SEQ ID NO: 717510 - protein, 18 aa, Homo sapiens
  CDR3 for beta chain variable domain of TCR clone 358755 (TRBV11-2, TRBJ2-3)
CASSLGGASRGAPNTQYF

SEQ ID NO: 717511 - protein, 13 aa, Homo sapiens
  CDR3 for alpha chain variable domain of TCR clone 358756 (TRAV35, TRAJ33)
CACLMDSNYQLIW

SEQ ID NO: 717512 - protein, 13 aa, Homo sapiens
  CDR3 for beta chain variable domain of TCR clone 358756 (TRBV10-3, TRBJ2-1)
CAISEFSGREQFF

SEQ ID NO: 717513 - protein, 16 aa, Homo sapiens
  CDR3 for alpha chain variable domain of TCR clone 358757 (TRAV4, TRAJ22)
FLVGDLYSGSASQLTF

SEQ ID NO: 717514 - protein, 16 aa, Homo sapiens
  CDR3 for beta chain variable domain of TCR clone 358757 (TRBV7-9, TRBJ2-1)
CASSDVAGGSYNEQFF

SEQ ID NO: 717515 - protein, 11 aa, Homo sapiens
  CDR3 for alpha chain variable domain of TCR clone 358758 (TRAV21, TRAJ11)
CSVNGYSTLTF

SEQ ID NO: 717516 - protein, 11 aa, Homo sapiens
  CDR3 for beta chain variable domain of TCR clone 358758 (TRBV19, TRBJ1-1)
CASSSGSEAFF

SEQ ID NO: 717517 - protein, 12 aa, Homo sapiens
  CDR3 for alpha chain variable domain of TCR clone 358759 (TRAV20, TRAJ4)
CRASGGYNKLIF

SEQ ID NO: 717518 - protein, 18 aa, Homo sapiens
  CDR3 for beta chain variable domain of TCR clone 358759 (TRBV19, TRBJ1-5)
CASSKGQVSIHSNQPQRF

SEQ ID NO: 717519 - protein, 15 aa, Homo sapiens
  CDR3 for alpha chain variable domain of TCR clone 358760 (TRAV12-1, TRAJ44)
CVVDTRQGTASKLTF

SEQ ID NO: 717520 - protein, 14 aa, Homo sapiens
  CDR3 for beta chain variable domain of TCR clone 358760 (TRBV7-9, TRBJ2-1)
CASSPRDSLYEQFF

SEQ ID NO: 717521 - protein, 11 aa, Homo sapiens
  CDR3 for alpha chain variable domain of TCR clone 358761 (TRAV21, TRAJ39)
LLVNAGNILTF

SEQ ID NO: 717522 - protein, 17 aa, Homo sapiens
  CDR3 for beta chain variable domain of TCR clone 358761 (TRBV7-8, TRBJ2-6)
CASSAGTGGAGANVLTF

SEQ ID NO: 717523 - protein, 12 aa, Homo sapiens
  CDR3 for alpha chain variable domain of TCR clone 358762 (TRAV21, TRAJ13)
PGPSGCYQKVTF

SEQ ID NO: 717524 - protein, 15 aa, Homo sapiens
  CDR3 for beta chain variable domain of TCR clone 358762 (TRBV7-9, TRBJ1-6)
CASSSPGRGDSPLHF

SEQ ID NO: 717525 - protein, 14 aa, Homo sapiens
  CDR3 for alpha chain variable domain of TCR clone 358763 (TRAV3, TRAJ21)
CSVRDAYNFNKFYF

SEQ ID NO: 717526 - protein, 15 aa, Homo sapiens
  CDR3 for beta chain variable domain of TCR clone 358763 (TRBV6-5, TRBJ1-5)
CASSYSWDSNQPQHF

SEQ ID NO: 717527 - protein, 16 aa, Homo sapiens
  CDR3 for alpha chain variable domain of TCR clone 358764 (TRAV26-1, TRAJ38)
CIVRVELGGNNRQLIC

SEQ ID NO: 717528 - protein, 14 aa, Homo sapiens
  CDR3 for beta chain variable domain of TCR clone 358764 (TRBV5-1, TRBJ2-3)
CASSPGLAADTQYF

SEQ ID NO: 717529 - protein, 17 aa, Homo sapiens
  CDR3 for alpha chain variable domain of TCR clone 358765 (TRAV4, TRAJ42)
CLVGVLNYGGSQGNLIF

SEQ ID NO: 717530 - protein, 12 aa, Homo sapiens
  CDR3 for beta chain variable domain of TCR clone 358765 (TRBV7-8, TRBJ2-5)
CASSPSVQTQYF

SEQ ID NO: 717531 - protein, 17 aa, Homo sapiens
  CDR3 for alpha chain variable domain of TCR clone 358766 (TRAV3, TRAJ42)
CAVRDRDYGGSQGNPIF

SEQ ID NO: 717532 - protein, 14 aa, Homo sapiens
  CDR3 for beta chain variable domain of TCR clone 358766 (TRBV19, TRBJ2-2)
CASSGQGIAGELFF

SEQ ID NO: 717533 - protein, 14 aa, Homo sapiens
  CDR3 for alpha chain variable domain of TCR clone 358767 (TRAV13-1, TRAJ40)
CAASMTSGTYKYIF

SEQ ID NO: 717534 - protein, 15 aa, Homo sapiens
  CDR3 for beta chain variable domain of TCR clone 358767 (TRBV7-3, TRBJ2-1)
CASSPTGGGQVEQFF

SEQ ID NO: 717535 - protein, 19 aa, Homo sapiens
  CDR3 for alpha chain variable domain of TCR clone 358768 (TRAV2, TRAJ20)
ILQLREADAAVYRDCKLSF

SEQ ID NO: 717536 - protein, 12 aa, Homo sapiens
  CDR3 for beta chain variable domain of TCR clone 358768 (TRBV11-2, TRBJ2-1)
CASSPGNNEQFF

SEQ ID NO: 717537 - protein, 14 aa, Homo sapiens
  CDR3 for alpha chain variable domain of TCR clone 358769 (TRAV12-2, TRAJ24)
CAVTPADSWGKLQF

SEQ ID NO: 717538 - protein, 15 aa, Homo sapiens
  CDR3 for beta chain variable domain of TCR clone 358769 (TRBV10-2, TRBJ2-6)
CASSEQGTGANVLTF

SEQ ID NO: 717539 - protein, 16 aa, Homo sapiens
  CDR3 for alpha chain variable domain of TCR clone 358770 (TRAV26-2, TRAJ45)
CTTASPIGGGADGLTF

SEQ ID NO: 717540 - protein, 15 aa, Homo sapiens
  CDR3 for beta chain variable domain of TCR clone 358770 (TRBV27, TRBJ2-1)
CASSNGGGSSNEQFF

SEQ ID NO: 717541 - protein, 11 aa, Homo sapiens
  CDR3 for alpha chain variable domain of TCR clone 358771 (TRAV27, TRAJ47)
SIVEYGNRLVF

SEQ ID NO: 717542 - protein, 18 aa, Homo sapiens
  CDR3 for beta chain variable domain of TCR clone 358771 (TRBV2, TRBJ2-1)
CASRGLAGGPRTYNAQFF

SEQ ID NO: 717543 - protein, 15 aa, Homo sapiens
  CDR3 for alpha chain variable domain of TCR clone 358772 (TRAV3, TRAJ22)
CAVRDRGGSARQLTF

SEQ ID NO: 717544 - protein, 16 aa, Homo sapiens
  CDR3 for beta chain variable domain of TCR clone 358772 (TRBV11-2, TRBJ2-1)
CASARDSYSHHNEQFF

SEQ ID NO: 717545 - protein, 11 aa, Homo sapiens
  CDR3 for alpha chain variable domain of TCR clone 358773 (TRAV3, TRAJ17)
CAEAAGNKLTF

SEQ ID NO: 717546 - protein, 16 aa, Homo sapiens
  CDR3 for beta chain variable domain of TCR clone 358773 (TRBV11-2, TRBJ1-1)
CASSLRQGGEHSKAFF

SEQ ID NO: 717547 - protein, 16 aa, Homo sapiens
  CDR3 for alpha chain variable domain of TCR clone 358774 (TRAV8-3, TRAJ13)
CAVGAYPSGGYQKVTF

SEQ ID NO: 717548 - protein, 15 aa, Homo sapiens
  CDR3 for beta chain variable domain of TCR clone 358774 (TRBV19, TRBJ1-5)
CASSIVCADNQHQHF

SEQ ID NO: 717549 - protein, 20 aa, Homo sapiens
  CDR3 for alpha chain variable domain of TCR clone 358775 (TRAV12-1, TRAJ32)
SFLPPPTSMNYGGATNKLIF

SEQ ID NO: 717550 - protein, 15 aa, Homo sapiens
  CDR3 for beta chain variable domain of TCR clone 358775 (TRBV7-9, TRBJ2-2)
CASGPLDTFPGELFF

SEQ ID NO: 717551 - protein, 15 aa, Homo sapiens
  CDR3 for alpha chain variable domain of TCR clone 358776 (TRAV13-1, TRAJ44)
CAASRGGGTASKLTC

SEQ ID NO: 717552 - protein, 16 aa, Homo sapiens
  CDR3 for beta chain variable domain of TCR clone 358776 (TRBV29-1, TRBJ2-7)
CSVEAVGTSGSYEQYF

SEQ ID NO: 717553 - protein, 10 aa, Homo sapiens
  CDR3 for alpha chain variable domain of TCR clone 358777 (TRAV30, TRAJ48)
CGIGNEKLTV

SEQ ID NO: 717554 - protein, 14 aa, Homo sapiens
  CDR3 for beta chain variable domain of TCR clone 358777 (TRBV7-6, TRBJ2-3)
CASSVAGGTDAQYF

SEQ ID NO: 717555 - protein, 11 aa, Homo sapiens
  CDR3 for alpha chain variable domain of TCR clone 358778 (TRAV16, TRAJ31)
CALFNNARLMF

SEQ ID NO: 717556 - protein, 15 aa, Homo sapiens
  CDR3 for beta chain variable domain of TCR clone 358778 (TRBV18, TRBJ1-5)
CASSPSDRSNQPQHF

SEQ ID NO: 717557 - protein, 18 aa, Homo sapiens
  CDR3 for alpha chain variable domain of TCR clone 358779 (TRAV21, TRAJ52)
CAVRPSPAGGTSYGKLTF

SEQ ID NO: 717558 - protein, 15 aa, Homo sapiens
  CDR3 for beta chain variable domain of TCR clone 358779 (TRBV7-3, TRBJ2-1)
CQQRQTSGRYNEQFF

SEQ ID NO: 717559 - protein, 14 aa, Homo sapiens
  CDR3 for alpha chain variable domain of TCR clone 358780 (TRAV13-2, TRAJ17)
FAENSKAAGNKLTF

SEQ ID NO: 717560 - protein, 14 aa, Homo sapiens
  CDR3 for beta chain variable domain of TCR clone 358780 (TRBV19, TRBJ2-1)
CASPTFVLSGEQFF

SEQ ID NO: 717561 - protein, 13 aa, Homo sapiens
  CDR3 for alpha chain variable domain of TCR clone 358781 (TRAV12-3, TRAJ43)
CAMRPYNNNDMRF

SEQ ID NO: 717562 - protein, 16 aa, Homo sapiens
  CDR3 for beta chain variable domain of TCR clone 358781 (TRBV11-2, TRBJ2-1)
CASSLLLLSSYNEQIF

SEQ ID NO: 717563 - protein, 18 aa, Homo sapiens
  CDR3 for alpha chain variable domain of TCR clone 358782 (TRAV12-2, )
CAVEYIQNPDPAVYQLRD

SEQ ID NO: 717564 - protein, 20 aa, Homo sapiens
  CDR3 for beta chain variable domain of TCR clone 358782 (TRBV11-3, TRBJ2-7)
CASSQRTSGSLRAVLRAGHQ

SEQ ID NO: 717565 - protein, 14 aa, Homo sapiens
  CDR3 for alpha chain variable domain of TCR clone 358783 (TRAV21, TRAJ45)
CAVSSGGGADGLTF

SEQ ID NO: 717566 - protein, 18 aa, Homo sapiens
  CDR3 for beta chain variable domain of TCR clone 358783 (TRBV13, TRBJ2-1)
CASSLGTASLFSYNEQFF

SEQ ID NO: 717567 - protein, 11 aa, Homo sapiens
  CDR3 for alpha chain variable domain of TCR clone 358784 (TRAV3, TRAJ21)
FAVGNFNKFYF

SEQ ID NO: 717568 - protein, 15 aa, Homo sapiens
  CDR3 for beta chain variable domain of TCR clone 358784 (TRBV4-1, TRBJ2-5)
CASSQWDLYQETQYF

SEQ ID NO: 717569 - protein, 14 aa, Homo sapiens
  CDR3 for alpha chain variable domain of TCR clone 358785 (TRAV36/DV7, TRAJ44)
CCGANTGTASKLTF

SEQ ID NO: 717570 - protein, 14 aa, Homo sapiens
  CDR3 for beta chain variable domain of TCR clone 358785 (TRBV20-1, TRBJ1-3)
CSASPTGAGNTIYC

SEQ ID NO: 717571 - protein, 12 aa, Homo sapiens
  CDR3 for alpha chain variable domain of TCR clone 358786 (TRAV20, TRAJ36)
RAQVTAANNLFF

SEQ ID NO: 717572 - protein, 14 aa, Homo sapiens
  CDR3 for beta chain variable domain of TCR clone 358786 (TRBV6-1, TRBJ2-2)
CASSQRQATGELFF

SEQ ID NO: 717573 - protein, 13 aa, Homo sapiens
  CDR3 for alpha chain variable domain of TCR clone 358787 (TRAV12-2, TRAJ24)
CAVSTYSWGKLQF

SEQ ID NO: 717574 - protein, 12 aa, Homo sapiens
  CDR3 for beta chain variable domain of TCR clone 358787 (TRBV7-6, TRBJ2-7)
CASSLADSEQYF

SEQ ID NO: 717575 - protein, 12 aa, Homo sapiens
  CDR3 for alpha chain variable domain of TCR clone 358788 (TRAV36/DV7, TRAJ40)
CAVGTGTYKYIF

SEQ ID NO: 717576 - protein, 13 aa, Homo sapiens
  CDR3 for beta chain variable domain of TCR clone 358788 (TRBV7-7, TRBJ1-5)
CASSAGKNQPQHF

SEQ ID NO: 717577 - protein, 12 aa, Homo sapiens
  CDR3 for alpha chain variable domain of TCR clone 358789 (TRAV13-1, TRAJ21)
CAAKEGFNKFYF

SEQ ID NO: 717578 - protein, 13 aa, Homo sapiens
  CDR3 for beta chain variable domain of TCR clone 358789 (TRBV7-9, TRBJ2-3)
CASSPGSTDTQYF

SEQ ID NO: 717579 - protein, 14 aa, Homo sapiens
  CDR3 for alpha chain variable domain of TCR clone 358790 (TRAV8-4, TRAJ9)
CAVRVNTGGFKTIF

SEQ ID NO: 717580 - protein, 15 aa, Homo sapiens
  CDR3 for beta chain variable domain of TCR clone 358790 (TRBV4-1, TRBJ2-7)
CASSQNTGRLYEQYF

SEQ ID NO: 717581 - protein, 14 aa, Homo sapiens
  CDR3 for alpha chain variable domain of TCR clone 358791 (TRAV8-6, TRAJ12)
CAVKSADSSYKLIF

SEQ ID NO: 717582 - protein, 15 aa, Homo sapiens
  CDR3 for beta chain variable domain of TCR clone 358791 (TRBV5-1, TRBJ2-5)
CASSLGLAEQETQYF

SEQ ID NO: 717583 - protein, 14 aa, Homo sapiens
  CDR3 for alpha chain variable domain of TCR clone 358792 (TRAV17, TRAJ45)
CATASGGGADGLTF

SEQ ID NO: 717584 - protein, 14 aa, Homo sapiens
  CDR3 for beta chain variable domain of TCR clone 358792 (TRBV7-2, TRBJ2-1)
CASSRGGARNEQFF

SEQ ID NO: 717585 - protein, 13 aa, Homo sapiens
  CDR3 for alpha chain variable domain of TCR clone 358793 (TRAV26-2, TRAJ33)
CILTLDSNYQLIW

SEQ ID NO: 717586 - protein, 13 aa, Homo sapiens
  CDR3 for beta chain variable domain of TCR clone 358793 (TRBV20-1, TRBJ1-6)
CSAPLGVGSPLHF

SEQ ID NO: 717587 - protein, 12 aa, Homo sapiens
  CDR3 for alpha chain variable domain of TCR clone 358794 (TRAV12-1, TRAJ40)
CVFYSGTYKYIF

SEQ ID NO: 717588 - protein, 16 aa, Homo sapiens
  CDR3 for beta chain variable domain of TCR clone 358794 (TRBV7-3, TRBJ2-2)
CASSLKRGTLSGELFF

SEQ ID NO: 717589 - protein, 14 aa, Homo sapiens
  CDR3 for alpha chain variable domain of TCR clone 358795 (TRAV26-1, TRAJ22)
CIVRVYGSARQLTF

SEQ ID NO: 717590 - protein, 16 aa, Homo sapiens
  CDR3 for beta chain variable domain of TCR clone 358795 (TRBV7-3, TRBJ2-1)
CASSLSSGGGAKEQFF

SEQ ID NO: 717591 - protein, 16 aa, Homo sapiens
  CDR3 for alpha chain variable domain of TCR clone 358796 (TRAV4, TRAJ22)
CLVGDLYSGSARQLTF

SEQ ID NO: 717592 - protein, 16 aa, Homo sapiens
  CDR3 for beta chain variable domain of TCR clone 358796 (TRBV7-9, TRBJ2-1)
CASSDVAGGADNEQFF

SEQ ID NO: 717593 - protein, 13 aa, Homo sapiens
  CDR3 for alpha chain variable domain of TCR clone 358797 (TRAV23/DV6, TRAJ34)
CAAIENNTDKLIF

SEQ ID NO: 717594 - protein, 14 aa, Homo sapiens
  CDR3 for beta chain variable domain of TCR clone 358797 (TRBV2, TRBJ1-5)
CASSENRGGQPQYF

SEQ ID NO: 717595 - protein, 14 aa, Homo sapiens
  CDR3 for alpha chain variable domain of TCR clone 358798 (TRAV13-1, TRAJ35)
CAASKGGFGNVLHC

SEQ ID NO: 717596 - protein, 13 aa, Homo sapiens
  CDR3 for beta chain variable domain of TCR clone 358798 (TRBV7-3, TRBJ1-1)
CASSQDWGAEAIC

SEQ ID NO: 717597 - protein, 11 aa, Homo sapiens
  CDR3 for alpha chain variable domain of TCR clone 358799 (TRAV13-1, TRAJ39)
CASHAGNMLTF

SEQ ID NO: 717598 - protein, 17 aa, Homo sapiens
  CDR3 for beta chain variable domain of TCR clone 358799 (TRBV4-1, TRBJ2-7)
GASSRDPLGVRGGEQYF

SEQ ID NO: 717599 - protein, 16 aa, Homo sapiens
  CDR3 for alpha chain variable domain of TCR clone 358800 (TRAV26-1, TRAJ38)
CIVRPLNSGNSRKLIW

SEQ ID NO: 717600 - protein, 13 aa, Homo sapiens
  CDR3 for beta chain variable domain of TCR clone 358800 (TRBV18, TRBJ1-1)
CAGSPNGDTEAFF

SEQ ID NO: 717601 - protein, 12 aa, Homo sapiens
  CDR3 for alpha chain variable domain of TCR clone 358801 (TRAV12-3, TRAJ17)
CAMTLTGNKLTF

SEQ ID NO: 717602 - protein, 12 aa, Homo sapiens
  CDR3 for beta chain variable domain of TCR clone 358801 (TRBV14, TRBJ1-1)
CASSQLKGLAFV

SEQ ID NO: 717603 - protein, 15 aa, Homo sapiens
  CDR3 for alpha chain variable domain of TCR clone 358802 (TRAV17, TRAJ57)
CATGPSQGGSKKLGF

SEQ ID NO: 717604 - protein, 16 aa, Homo sapiens
  CDR3 for beta chain variable domain of TCR clone 358802 (TRBV12-4, TRBJ1-5)
CASSRPVGGSNQPQHF

SEQ ID NO: 717605 - protein, 14 aa, Homo sapiens
  CDR3 for alpha chain variable domain of TCR clone 358803 (TRAV34, TRAJ22)
CGADTSGSARQLTF

SEQ ID NO: 717606 - protein, 14 aa, Homo sapiens
  CDR3 for beta chain variable domain of TCR clone 358803 (TRBV4-1, TRBJ2-2)
CASSQAVNTGELFF

SEQ ID NO: 717607 - protein, 13 aa, Homo sapiens
  CDR3 for alpha chain variable domain of TCR clone 358804 (TRAV21, TRAJ27)
CAARPGNAGKSTF

SEQ ID NO: 717608 - protein, 16 aa, Homo sapiens
  CDR3 for beta chain variable domain of TCR clone 358804 (TRBV5-1, TRBJ1-1)
CASSSGGNSLNTEAFF

SEQ ID NO: 717609 - protein, 12 aa, Homo sapiens
  CDR3 for alpha chain variable domain of TCR clone 358805 (TRAV16, TRAJ27)
CALNHQCRQIIL

SEQ ID NO: 717610 - protein, 17 aa, Homo sapiens
  CDR3 for beta chain variable domain of TCR clone 358805 (TRBV4-1, TRBJ2-7)
CASSRDPLGVRGGEQYF

SEQ ID NO: 717611 - protein, 12 aa, Homo sapiens
  CDR3 for alpha chain variable domain of TCR clone 358806 (TRAV13-2, TRAJ42)
VHPGGSQGNLIF

SEQ ID NO: 717612 - protein, 11 aa, Homo sapiens
  CDR3 for beta chain variable domain of TCR clone 358806 (TRBV29-1, TRBJ2-5)
CSEDRTGTQYF

SEQ ID NO: 717613 - protein, 11 aa, Homo sapiens
  CDR3 for alpha chain variable domain of TCR clone 358807 (TRAV1-2, TRAJ20)
CAVANDYKLSF

SEQ ID NO: 717614 - protein, 17 aa, Homo sapiens
  CDR3 for beta chain variable domain of TCR clone 358807 (TRBV13, TRBJ2-3)
CASSLSRVAGGRNTQYF

SEQ ID NO: 717615 - protein, 14 aa, Homo sapiens
  CDR3 for alpha chain variable domain of TCR clone 358808 (TRAV35, TRAJ33)
CAGSSQDSNYQLIW

SEQ ID NO: 717616 - protein, 18 aa, Homo sapiens
  CDR3 for beta chain variable domain of TCR clone 358808 (TRBV25-1, TRBJ1-2)
CASSGLQNGQGLIFGYTF

SEQ ID NO: 717617 - protein, 13 aa, Homo sapiens
  CDR3 for alpha chain variable domain of TCR clone 358809 (TRAV1-2, TRAJ9)
CAALNTGGFKTIF

SEQ ID NO: 717618 - protein, 12 aa, Homo sapiens
  CDR3 for beta chain variable domain of TCR clone 358809 (TRBV11-3, TRBJ1-1)
CASSHRQGEALF

SEQ ID NO: 717619 - protein, 15 aa, Homo sapiens
  CDR3 for alpha chain variable domain of TCR clone 358810 (TRAV12-3, TRAJ6)
CAMSATTGGSYIPTF

SEQ ID NO: 717620 - protein, 16 aa, Homo sapiens
  CDR3 for beta chain variable domain of TCR clone 358810 (TRBV13, TRBJ2-2)
CASSPRTGEHTAELFF

SEQ ID NO: 717621 - protein, 14 aa, Homo sapiens
  CDR3 for alpha chain variable domain of TCR clone 358811 (TRAV16, TRAJ33)
CSLSAMDSNYQLIW

SEQ ID NO: 717622 - protein, 16 aa, Homo sapiens
  CDR3 for beta chain variable domain of TCR clone 358811 (TRBV25-1, TRBJ2-7)
CASSELTGGGIYEQYF

SEQ ID NO: 717623 - protein, 12 aa, Homo sapiens
  CDR3 for alpha chain variable domain of TCR clone 358812 (TRAV17, TRAJ12)
CATLRSSYKLIF

SEQ ID NO: 717624 - protein, 14 aa, Homo sapiens
  CDR3 for beta chain variable domain of TCR clone 358812 (TRBV19, TRBJ2-1)
CARGARSSQWEQFF

SEQ ID NO: 717625 - protein, 13 aa, Homo sapiens
  CDR3 for alpha chain variable domain of TCR clone 358813 (TRAV6, TRAJ12)
RALDPYSSYKLIF

SEQ ID NO: 717626 - protein, 15 aa, Homo sapiens
  CDR3 for beta chain variable domain of TCR clone 358813 (TRBV7-3, TRBJ2-1)
CASSLAGAGADEQFF

SEQ ID NO: 717627 - protein, 19 aa, Homo sapiens
  CDR3 for alpha chain variable domain of TCR clone 358814 (TRAV3, TRAJ6)
CAVRDRNPSRSGGSYIPTF

SEQ ID NO: 717628 - protein, 14 aa, Homo sapiens
  CDR3 for beta chain variable domain of TCR clone 358814 (TRBV7-2, TRBJ2-7)
CASSPKTSFYEQYF

SEQ ID NO: 717629 - protein, 15 aa, Homo sapiens
  CDR3 for alpha chain variable domain of TCR clone 358815 (TRAV3, TRAJ5)
CAVRDLDTSRRALTF

SEQ ID NO: 717630 - protein, 13 aa, Homo sapiens
  CDR3 for beta chain variable domain of TCR clone 358815 (TRBV12-4, TRBJ2-7)
CASSPTETCEQYF

SEQ ID NO: 717631 - protein, 14 aa, Homo sapiens
  CDR3 for alpha chain variable domain of TCR clone 358816 (TRAV8-3, TRAJ4)
CAVGAAGGYNKLIF

SEQ ID NO: 717632 - protein, 14 aa, Homo sapiens
  CDR3 for beta chain variable domain of TCR clone 358816 (TRBV6-3, TRBJ1-1)
CASSYQRRDTEAFF

SEQ ID NO: 717633 - protein, 12 aa, Homo sapiens
  CDR3 for alpha chain variable domain of TCR clone 358817 (TRAV13-2, TRAJ23)
CAERHRGGKLIF

SEQ ID NO: 717634 - protein, 19 aa, Homo sapiens
  CDR3 for beta chain variable domain of TCR clone 358817 (TRBV19, TRBJ2-5)
CDSSIGQVTDFFLGETQYF

SEQ ID NO: 717635 - protein, 16 aa, Homo sapiens
  CDR3 for alpha chain variable domain of TCR clone 358818 (TRAV3, TRAJ37)
CAVRGKGSGNTGKLIF

SEQ ID NO: 717636 - protein, 15 aa, Homo sapiens
  CDR3 for beta chain variable domain of TCR clone 358818 (TRBV7-2, TRBJ2-1)
CASSSGLAGGYEQFF

SEQ ID NO: 717637 - protein, 15 aa, Homo sapiens
  CDR3 for alpha chain variable domain of TCR clone 358819 (TRAV26-1, TRAJ29)
CIVRVEGSGNTPLVF

SEQ ID NO: 717638 - protein, 14 aa, Homo sapiens
  CDR3 for beta chain variable domain of TCR clone 358819 (TRBV25-1, TRBJ1-1)
CASAHLGGNTEAFF

SEQ ID NO: 717639 - protein, 13 aa, Homo sapiens
  CDR3 for alpha chain variable domain of TCR clone 358820 (TRAV3, TRAJ21)
CAVREPDFNKFYF

SEQ ID NO: 717640 - protein, 15 aa, Homo sapiens
  CDR3 for beta chain variable domain of TCR clone 358820 (TRBV18, TRBJ1-1)
CASSPRQGENAEAFF

SEQ ID NO: 717641 - protein, 11 aa, Homo sapiens
  CDR3 for alpha chain variable domain of TCR clone 358821 (TRAV2, TRAJ13)
CASGGYQKVAF

SEQ ID NO: 717642 - protein, 14 aa, Homo sapiens
  CDR3 for beta chain variable domain of TCR clone 358821 (TRBV6-3, TRBJ1-1)
CASSNLLPGAEAFF

SEQ ID NO: 717643 - protein, 15 aa, Homo sapiens
  CDR3 for alpha chain variable domain of TCR clone 358822 (TRAV16, TRAJ17)
CALSGNKAAGNKLTF

SEQ ID NO: 717644 - protein, 16 aa, Homo sapiens
  CDR3 for beta chain variable domain of TCR clone 358822 (TRBV19, TRBJ2-2)
CASRSPGTGATGELFF

SEQ ID NO: 717645 - protein, 15 aa, Homo sapiens
  CDR3 for alpha chain variable domain of TCR clone 358823 (TRAV22, TRAJ56)
CAVEEYTGANSKLTF

SEQ ID NO: 717646 - protein, 19 aa, Homo sapiens
  CDR3 for beta chain variable domain of TCR clone 358823 (TRBV28, TRBJ2-4)
CASSFQPGGPAHSKNIQYF

SEQ ID NO: 717647 - protein, 12 aa, Homo sapiens
  CDR3 for alpha chain variable domain of TCR clone 358824 (TRAV38-2/DV8, TRAJ48)
CALLSGNEKLTF

SEQ ID NO: 717648 - protein, 15 aa, Homo sapiens
  CDR3 for beta chain variable domain of TCR clone 358824 (TRBV25-1, TRBJ1-4)
CASSPGDSTNEKLFF

SEQ ID NO: 717649 - protein, 15 aa, Homo sapiens
  CDR3 for alpha chain variable domain of TCR clone 358825 (TRAV17, TRAJ35)
CATAFVIGFGNVLHC

SEQ ID NO: 717650 - protein, 12 aa, Homo sapiens
  CDR3 for beta chain variable domain of TCR clone 358825 (TRBV19, TRBJ1-5)
CASSIAQQPQHF

SEQ ID NO: 717651 - protein, 15 aa, Homo sapiens
  CDR3 for alpha chain variable domain of TCR clone 358826 (TRAV13-1, TRAJ32)
CAASIYGGATNKLIF

SEQ ID NO: 717652 - protein, 14 aa, Homo sapiens
  CDR3 for beta chain variable domain of TCR clone 358826 (TRBV7-9, TRBJ2-1)
CASSLASGSNEQFL

SEQ ID NO: 717653 - protein, 15 aa, Homo sapiens
  CDR3 for alpha chain variable domain of TCR clone 358827 (TRAV22, TRAJ24)
CAVPLSTDSWGKLQF

SEQ ID NO: 717654 - protein, 16 aa, Homo sapiens
  CDR3 for beta chain variable domain of TCR clone 358827 (TRBV5-1, TRBJ1-1)
CASSSGGNSLNTEAFF

SEQ ID NO: 717655 - protein, 17 aa, Homo sapiens
  CDR3 for alpha chain variable domain of TCR clone 358828 (TRAV14/DV4, TRAJ4)
CAMREASGRGGYNKLIF

SEQ ID NO: 717656 - protein, 13 aa, Homo sapiens
  CDR3 for beta chain variable domain of TCR clone 358828 (TRBV19, TRBJ1-2)
CASSVPGQDGYIF

SEQ ID NO: 717657 - protein, 12 aa, Homo sapiens
  CDR3 for alpha chain variable domain of TCR clone 358829 (TRAV8-3, TRAJ26)
CAGDNYGQNFVF

SEQ ID NO: 717658 - protein, 16 aa, Homo sapiens
  CDR3 for beta chain variable domain of TCR clone 358829 (TRBV9, TRBJ2-1)
CASSKAGPSSYNEQFF

SEQ ID NO: 717659 - protein, 14 aa, Homo sapiens
  CDR3 for alpha chain variable domain of TCR clone 358830 (TRAV12-3, TRAJ42)
CAMNYGGSQGNLIF

SEQ ID NO: 717660 - protein, 15 aa, Homo sapiens
  CDR3 for beta chain variable domain of TCR clone 358830 (TRBV5-7, TRBJ1-5)
CASSYGKLWDEPQHF

SEQ ID NO: 717661 - protein, 14 aa, Homo sapiens
  CDR3 for alpha chain variable domain of TCR clone 358831 (TRAV29/DV5, TRAJ48)
CAAGGNFGNEKLTF

SEQ ID NO: 717662 - protein, 12 aa, Homo sapiens
  CDR3 for beta chain variable domain of TCR clone 358831 (TRBV2, TRBJ2-1)
CAKREGYNEQFF

SEQ ID NO: 717663 - protein, 13 aa, Homo sapiens
  CDR3 for alpha chain variable domain of TCR clone 358832 (TRAV8-3, TRAJ43)
CAVGPDNNNDMRF

SEQ ID NO: 717664 - protein, 12 aa, Homo sapiens
  CDR3 for beta chain variable domain of TCR clone 358832 (TRBV7-2, TRBJ1-6)
YASSLSSSPLHF

SEQ ID NO: 717665 - protein, 13 aa, Homo sapiens
  CDR3 for alpha chain variable domain of TCR clone 358833 (TRAV12-2, TRAJ10)
CAVPTGGGNKLTF

SEQ ID NO: 717666 - protein, 16 aa, Homo sapiens
  CDR3 for beta chain variable domain of TCR clone 358833 (TRBV6-1, TRBJ1-3)
CASVQGGVETPYILER

SEQ ID NO: 717667 - protein, 13 aa, Homo sapiens
  CDR3 for alpha chain variable domain of TCR clone 358834 (TRAV25, TRAJ30)
CAGRVDRDDKIIF

SEQ ID NO: 717668 - protein, 14 aa, Homo sapiens
  CDR3 for beta chain variable domain of TCR clone 358834 (TRBV19, TRBJ2-1)
CASPTFVLSGEQFF

SEQ ID NO: 717669 - protein, 13 aa, Homo sapiens
  CDR3 for alpha chain variable domain of TCR clone 358835 (TRAV16, TRAJ28)
CALTGAGSYQLTF

SEQ ID NO: 717670 - protein, 16 aa, Homo sapiens
  CDR3 for beta chain variable domain of TCR clone 358835 (TRBV7-3, TRBJ2-2)
CASSLKRGTLSGELFF

SEQ ID NO: 717671 - protein, 12 aa, Homo sapiens
  CDR3 for alpha chain variable domain of TCR clone 358836 (TRAV21, TRAJ23)
CAVGPQGGKLIF

SEQ ID NO: 717672 - protein, 13 aa, Homo sapiens
  CDR3 for beta chain variable domain of TCR clone 358836 (TRBV20-1, TRBJ2-7)
GSARTGAGYEQYF

SEQ ID NO: 717673 - protein, 14 aa, Homo sapiens
  CDR3 for alpha chain variable domain of TCR clone 358837 (TRAV12-3, TRAJ29)
CAMILLSGNTPLVF

SEQ ID NO: 717674 - protein, 16 aa, Homo sapiens
  CDR3 for beta chain variable domain of TCR clone 358837 (TRBV13, TRBJ2-2)
CASSEVFGANTGELFF

SEQ ID NO: 717675 - protein, 12 aa, Homo sapiens
  CDR3 for alpha chain variable domain of TCR clone 358838 (TRAV8-3, TRAJ26)
CAGDNYGQNFVF

SEQ ID NO: 717676 - protein, 15 aa, Homo sapiens
  CDR3 for beta chain variable domain of TCR clone 358838 (TRBV5-1, TRBJ2-7)
CASSLNGGPAREQYF

SEQ ID NO: 717677 - protein, 14 aa, Homo sapiens
  CDR3 for alpha chain variable domain of TCR clone 358839 (TRAV12-2, TRAJ6)
CAVIASGGSYIPTL

SEQ ID NO: 717678 - protein, 12 aa, Homo sapiens
  CDR3 for beta chain variable domain of TCR clone 358839 (TRBV5-1, TRBJ1-2)
CASSQDTYGYTF

SEQ ID NO: 717679 - protein, 15 aa, Homo sapiens
  CDR3 for alpha chain variable domain of TCR clone 358840 (TRAV2, TRAJ15)
CAVEDRGQAGTDLIF

SEQ ID NO: 717680 - protein, 13 aa, Homo sapiens
  CDR3 for beta chain variable domain of TCR clone 358840 (TRBV12-4, TRBJ2-5)
CASSLGGSRTQYF

SEQ ID NO: 717681 - protein, 14 aa, Homo sapiens
  CDR3 for alpha chain variable domain of TCR clone 358841 (TRAV1-2, TRAJ16)
CAVNRFSDGQKLLF

SEQ ID NO: 717682 - protein, 15 aa, Homo sapiens
  CDR3 for beta chain variable domain of TCR clone 358841 (TRBV20-1, TRBJ2-7)
CSARDRVSGRDEQYF

SEQ ID NO: 717683 - protein, 14 aa, Homo sapiens
  CDR3 for alpha chain variable domain of TCR clone 358842 (TRAV13-1, TRAJ3)
CAAEGYSSASKKIF

SEQ ID NO: 717684 - protein, 14 aa, Homo sapiens
  CDR3 for beta chain variable domain of TCR clone 358842 (TRBV19, TRBJ2-5)
CASSSSGIQETQYF

SEQ ID NO: 717685 - protein, 14 aa, Homo sapiens
  CDR3 for alpha chain variable domain of TCR clone 358843 (TRAV8-3, TRAJ4)
CAVGAAGGYNQLIF

SEQ ID NO: 717686 - protein, 16 aa, Homo sapiens
  CDR3 for beta chain variable domain of TCR clone 358843 (TRBV13, TRBJ2-2)
CASSPRTGEHTGELFF

SEQ ID NO: 717687 - protein, 14 aa, Homo sapiens
  CDR3 for alpha chain variable domain of TCR clone 358844 (TRAV12-2, TRAJ17)
CAVLFKAAGNKLTF

SEQ ID NO: 717688 - protein, 15 aa, Homo sapiens
  CDR3 for beta chain variable domain of TCR clone 358844 (TRBV5-7, TRBJ2-7)
CASSGGRPVPYEQYF

SEQ ID NO: 717689 - protein, 14 aa, Homo sapiens
  CDR3 for alpha chain variable domain of TCR clone 358845 (TRAV16, TRAJ40)
CALHESYYLRNLQI

SEQ ID NO: 717690 - protein, 12 aa, Homo sapiens
  CDR3 for beta chain variable domain of TCR clone 358845 (TRBV7-8, TRBJ2-7)
CASSLGDREQYF

SEQ ID NO: 717691 - protein, 15 aa, Homo sapiens
  CDR3 for alpha chain variable domain of TCR clone 358846 (TRAV26-1, TRAJ29)
CIVRVEGSGNTPLVF

SEQ ID NO: 717692 - protein, 15 aa, Homo sapiens
  CDR3 for beta chain variable domain of TCR clone 358846 (TRBV7-9, TRBJ1-5)
CVSSQGHQPNQTQHF

SEQ ID NO: 717693 - protein, 14 aa, Homo sapiens
  CDR3 for alpha chain variable domain of TCR clone 358847 (TRAV12-2, TRAJ36)
CAVNPPTWANNLFF

SEQ ID NO: 717694 - protein, 13 aa, Homo sapiens
  CDR3 for beta chain variable domain of TCR clone 358847 (TRBV20-1, TRBJ1-6)
CSAPTGLGSPLHF

SEQ ID NO: 717695 - protein, 15 aa, Homo sapiens
  CDR3 for alpha chain variable domain of TCR clone 358848 (TRAV12-3, TRAJ11)
CAMSEENSGYSTLTF

SEQ ID NO: 717696 - protein, 15 aa, Homo sapiens
  CDR3 for beta chain variable domain of TCR clone 358848 (TRBV28, TRBJ1-2)
CASSSHSIANYGYTF

SEQ ID NO: 717697 - protein, 17 aa, Homo sapiens
  CDR3 for alpha chain variable domain of TCR clone 358849 (TRAV3, TRAJ6)
CAVRDDPRAGGSYIPTF

SEQ ID NO: 717698 - protein, 15 aa, Homo sapiens
  CDR3 for beta chain variable domain of TCR clone 358849 (TRBV27, TRBJ2-1)
CASSNGGGSSNEQFF

SEQ ID NO: 717699 - protein, 12 aa, Homo sapiens
  CDR3 for alpha chain variable domain of TCR clone 358850 (TRAV23/DV6, TRAJ31)
CAARRIGARLMF

SEQ ID NO: 717700 - protein, 13 aa, Homo sapiens
  CDR3 for beta chain variable domain of TCR clone 358850 (TRBV28, TRBJ2-7)
CASNAGGVYEQYF

SEQ ID NO: 717701 - protein, 14 aa, Homo sapiens
  CDR3 for alpha chain variable domain of TCR clone 358851 (TRAV8-4, TRAJ23)
CVVSAPGSGGKLIF

SEQ ID NO: 717702 - protein, 17 aa, Homo sapiens
  CDR3 for beta chain variable domain of TCR clone 358851 (TRBV4-3, TRBJ2-3)
CASSQDPLAGAVDTQYF

SEQ ID NO: 717703 - protein, 11 aa, Homo sapiens
  CDR3 for alpha chain variable domain of TCR clone 358852 (TRAV13-1, TRAJ39)
CASHAGNMLTF

SEQ ID NO: 717704 - protein, 14 aa, Homo sapiens
  CDR3 for beta chain variable domain of TCR clone 358852 (TRBV18, TRBJ1-5)
CASSPGNSNQPQHF

SEQ ID NO: 717705 - protein, 11 aa, Homo sapiens
  CDR3 for alpha chain variable domain of TCR clone 358853 (TRAV21, TRAJ48)
CAVDGNEKLTF

SEQ ID NO: 717706 - protein, 11 aa, Homo sapiens
  CDR3 for beta chain variable domain of TCR clone 358853 (TRBV6-3, TRBJ2-1)
CASSHTSEQFF

SEQ ID NO: 717707 - protein, 18 aa, Homo sapiens
  CDR3 for alpha chain variable domain of TCR clone 358854 (TRAV13-1, TRAJ37)
CAPPPGPHGSSNTGKLIF

SEQ ID NO: 717708 - protein, 15 aa, Homo sapiens
  CDR3 for beta chain variable domain of TCR clone 358854 (TRBV5-4, TRBJ2-7)
CASSRCGTGSYEQYF

SEQ ID NO: 717709 - protein, 13 aa, Homo sapiens
  CDR3 for alpha chain variable domain of TCR clone 358855 (TRAV13-1, TRAJ21)
CAASIYNFNKLYF

SEQ ID NO: 717710 - protein, 14 aa, Homo sapiens
  CDR3 for beta chain variable domain of TCR clone 358855 (TRBV5-1, TRBJ2-2)
CASSLIWIPGELFF

SEQ ID NO: 717711 - protein, 12 aa, Homo sapiens
  CDR3 for alpha chain variable domain of TCR clone 358856 (TRAV8-6, TRAJ36)
WAVSDWLGQTTS

SEQ ID NO: 717712 - protein, 14 aa, Homo sapiens
  CDR3 for beta chain variable domain of TCR clone 358856 (TRBV7-9, TRBJ2-1)
CASSPRDSLYEQFF

SEQ ID NO: 717713 - protein, 12 aa, Homo sapiens
  CDR3 for alpha chain variable domain of TCR clone 358857 (TRAV27, TRAJ42)
CAGGGSQGNLIF

SEQ ID NO: 717714 - protein, 14 aa, Homo sapiens
  CDR3 for beta chain variable domain of TCR clone 358857 (TRBV20-1, TRBJ1-1)
CSAQTRIGGTEAFF

SEQ ID NO: 717715 - protein, 15 aa, Homo sapiens
  CDR3 for alpha chain variable domain of TCR clone 358858 (TRAV12-3, TRAJ18)
CAMSGGGSTLGRLYF

SEQ ID NO: 717716 - protein, 16 aa, Homo sapiens
  CDR3 for beta chain variable domain of TCR clone 358858 (TRBV7-3, TRBJ2-1)
CASSLEGYRSYNEQFF

SEQ ID NO: 717717 - protein, 15 aa, Homo sapiens
  CDR3 for alpha chain variable domain of TCR clone 358859 (TRAV30, TRAJ32)
CGTEILGGATNKLIF

SEQ ID NO: 717718 - protein, 17 aa, Homo sapiens
  CDR3 for beta chain variable domain of TCR clone 358859 (TRBV5-4, TRBJ2-1)
CASSSAGGRGPDNEQFF

SEQ ID NO: 717719 - protein, 13 aa, Homo sapiens
  CDR3 for alpha chain variable domain of TCR clone 358860 (TRAV21, TRAJ57)
CAVIEGGSEKLVF

SEQ ID NO: 717720 - protein, 15 aa, Homo sapiens
  CDR3 for beta chain variable domain of TCR clone 358860 (TRBV10-3, TRBJ2-5)
CAISEFGGGQETQYF

SEQ ID NO: 717721 - protein, 15 aa, Homo sapiens
  CDR3 for alpha chain variable domain of TCR clone 358861 (TRAV26-1, TRAJ29)
CIVRVEGSGNTPLVF

SEQ ID NO: 717722 - protein, 13 aa, Homo sapiens
  CDR3 for beta chain variable domain of TCR clone 358861 (TRBV28, TRBJ1-1)
CASSKQGWTEAFV

SEQ ID NO: 717723 - protein, 15 aa, Homo sapiens
  CDR3 for alpha chain variable domain of TCR clone 358862 (TRAV12-1, TRAJ23)
CGERSRCNQGGKLIF

SEQ ID NO: 717724 - protein, 16 aa, Homo sapiens
  CDR3 for beta chain variable domain of TCR clone 358862 (TRBV29-1, TRBJ2-7)
CSVEVVGTSGSYEQYF

SEQ ID NO: 717725 - protein, 11 aa, Homo sapiens
  CDR3 for alpha chain variable domain of TCR clone 358863 (TRAV2, TRAJ34)
TTVVVNDKLIF

SEQ ID NO: 717726 - protein, 15 aa, Homo sapiens
  CDR3 for beta chain variable domain of TCR clone 358863 (TRBV20-1, TRBJ2-3)
CSARPSGFYTDTQYF

SEQ ID NO: 717727 - protein, 15 aa, Homo sapiens
  CDR3 for alpha chain variable domain of TCR clone 358864 (TRAV2, TRAJ9)
CAVAALNTGGFKTIF

SEQ ID NO: 717728 - protein, 15 aa, Homo sapiens
  CDR3 for beta chain variable domain of TCR clone 358864 (TRBV6-5, TRBJ1-2)
CASSYSQAFNYGYTF

SEQ ID NO: 717729 - protein, 15 aa, Homo sapiens
  CDR3 for alpha chain variable domain of TCR clone 358865 (TRAV21, TRAJ56)
CAVTKYTGANSKLTF

SEQ ID NO: 717730 - protein, 15 aa, Homo sapiens
  CDR3 for beta chain variable domain of TCR clone 358865 (TRBV7-3, TRBJ2-1)
CASSLGQGPFGEQFF

SEQ ID NO: 717731 - protein, 13 aa, Homo sapiens
  CDR3 for alpha chain variable domain of TCR clone 358866 (TRAV12-2, TRAJ4)
CAGFSGGYNKLIF

SEQ ID NO: 717732 - protein, 13 aa, Homo sapiens
  CDR3 for beta chain variable domain of TCR clone 358866 (TRBV24-1, TRBJ1-6)
CASSLVLVSPLHF

SEQ ID NO: 717733 - protein, 14 aa, Homo sapiens
  CDR3 for alpha chain variable domain of TCR clone 358867 (TRAV27, TRAJ42)
CAGEKVGSRGNLIF

SEQ ID NO: 717734 - protein, 15 aa, Homo sapiens
  CDR3 for beta chain variable domain of TCR clone 358867 (TRBV7-2, TRBJ2-2)
CASSLVAGSAGELFF

SEQ ID NO: 717735 - protein, 14 aa, Homo sapiens
  CDR3 for alpha chain variable domain of TCR clone 358868 (TRAV4, TRAJ30)
CLLTLMNRDDKIIF

SEQ ID NO: 717736 - protein, 15 aa, Homo sapiens
  CDR3 for beta chain variable domain of TCR clone 358868 (TRBV5-1, TRBJ2-2)
CASTIQGGDTGELFF

SEQ ID NO: 717737 - protein, 16 aa, Homo sapiens
  CDR3 for alpha chain variable domain of TCR clone 358869 (TRAV30, TRAJ24)
CGTEIVDADSRGKFQF

SEQ ID NO: 717738 - protein, 14 aa, Homo sapiens
  CDR3 for beta chain variable domain of TCR clone 358869 (TRBV12-5, TRBJ2-5)
CASGSRRHQETQYF

SEQ ID NO: 717739 - protein, 12 aa, Homo sapiens
  CDR3 for alpha chain variable domain of TCR clone 358870 (TRAV21, TRAJ33)
CAKMDSNYQLIW

SEQ ID NO: 717740 - protein, 12 aa, Homo sapiens
  CDR3 for beta chain variable domain of TCR clone 358870 (TRBV11-2, TRBJ2-2)
CASSLPTGELFF

SEQ ID NO: 717741 - protein, 14 aa, Homo sapiens
  CDR3 for alpha chain variable domain of TCR clone 358871 (TRAV12-3, TRAJ10)
SHLPLTGGGNKLTF

SEQ ID NO: 717742 - protein, 16 aa, Homo sapiens
  CDR3 for beta chain variable domain of TCR clone 358871 (TRBV4-3, TRBJ2-3)
CASSLGLAGEGDTQYF

SEQ ID NO: 717743 - protein, 21 aa, Homo sapiens
  CDR3 for alpha chain variable domain of TCR clone 358872 (TRAV4, TRAJ28)
CCVLLPRGGQGSGAGSYQLTF

SEQ ID NO: 717744 - protein, 14 aa, Homo sapiens
  CDR3 for beta chain variable domain of TCR clone 358872 (TRBV4-1, TRBJ2-7)
CASSPVAGGDEQYF

SEQ ID NO: 717745 - protein, 14 aa, Homo sapiens
  CDR3 for alpha chain variable domain of TCR clone 358873 (TRAV1-2, TRAJ16)
CAVNRFSDGQKLLF

SEQ ID NO: 717746 - protein, 16 aa, Homo sapiens
  CDR3 for beta chain variable domain of TCR clone 358873 (TRBV20-1, TRBJ1-4)
CSAPGQGVLANEKLFF

SEQ ID NO: 717747 - protein, 18 aa, Homo sapiens
  CDR3 for alpha chain variable domain of TCR clone 358874 (TRAV12-2, )
CAVEDIQNLDPAVYQLRD

SEQ ID NO: 717748 - protein, 16 aa, Homo sapiens
  CDR3 for beta chain variable domain of TCR clone 358874 (TRBV6-1, TRBJ1-2)
CASSGAWQGRSHGDTF

SEQ ID NO: 717749 - protein, 15 aa, Homo sapiens
  CDR3 for alpha chain variable domain of TCR clone 358875 (TRAV21, TRAJ53)
CATLNSGGSNYKLTF

SEQ ID NO: 717750 - protein, 14 aa, Homo sapiens
  CDR3 for beta chain variable domain of TCR clone 358875 (TRBV15, TRBJ2-5)
CATSMGGLGETQYF

SEQ ID NO: 717751 - protein, 14 aa, Homo sapiens
  CDR3 for alpha chain variable domain of TCR clone 358876 (TRAV29/DV5, TRAJ36)
CAARRKTGANNLFF

SEQ ID NO: 717752 - protein, 13 aa, Homo sapiens
  CDR3 for beta chain variable domain of TCR clone 358876 (TRBV6-5, TRBJ2-5)
CASSSPGGETQYF

SEQ ID NO: 717753 - protein, 15 aa, Homo sapiens
  CDR3 for alpha chain variable domain of TCR clone 358877 (TRAV3, TRAJ22)
CAMRDRGGSARQLTF

SEQ ID NO: 717754 - protein, 18 aa, Homo sapiens
  CDR3 for beta chain variable domain of TCR clone 358877 (TRBV28, TRBJ2-1)
CASSSTSGRANSYNEQFF

SEQ ID NO: 717755 - protein, 13 aa, Homo sapiens
  CDR3 for alpha chain variable domain of TCR clone 358878 (TRAV17, TRAJ9)
CATDYTGGYKTIF

SEQ ID NO: 717756 - protein, 16 aa, Homo sapiens
  CDR3 for beta chain variable domain of TCR clone 358878 (TRBV7-7, TRBJ2-1)
CASSLASGTSYNEQFF

SEQ ID NO: 717757 - protein, 13 aa, Homo sapiens
  CDR3 for alpha chain variable domain of TCR clone 358879 (TRAV4, TRAJ42)
WLVGGGSQGNLIF

SEQ ID NO: 717758 - protein, 16 aa, Homo sapiens
  CDR3 for beta chain variable domain of TCR clone 358879 (TRBV5-1, TRBJ2-3)
CASSLQGRVGADTQYF

SEQ ID NO: 717759 - protein, 23 aa, Homo sapiens
  CDR3 for alpha chain variable domain of TCR clone 358880 (TRAV26-1, TRAJ38)
CIADNAGNNHIQNPAPAVYQLRD

SEQ ID NO: 717760 - protein, 16 aa, Homo sapiens
  CDR3 for beta chain variable domain of TCR clone 358880 (TRBV7-3, TRBJ2-1)
CASSLEGYRSYNEQFF

SEQ ID NO: 717761 - protein, 15 aa, Homo sapiens
  CDR3 for alpha chain variable domain of TCR clone 358881 (TRAV14/DV4, TRAJ12)
CAMREERDSSYKSIF

SEQ ID NO: 717762 - protein, 16 aa, Homo sapiens
  CDR3 for beta chain variable domain of TCR clone 358881 (TRBV9, TRBJ1-2)
CASSVELGGTGYGYAF

SEQ ID NO: 717763 - protein, 13 aa, Homo sapiens
  CDR3 for alpha chain variable domain of TCR clone 358882 (TRAV3, TRAJ21)
CAVREPDFNKFYF

SEQ ID NO: 717764 - protein, 14 aa, Homo sapiens
  CDR3 for beta chain variable domain of TCR clone 358882 (TRBV4-3, TRBJ2-1)
YASGLDRAYNEQFF

SEQ ID NO: 717765 - protein, 14 aa, Homo sapiens
  CDR3 for alpha chain variable domain of TCR clone 358883 (TRAV34, TRAJ22)
CGADTSGSARQLTF

SEQ ID NO: 717766 - protein, 11 aa, Homo sapiens
  CDR3 for beta chain variable domain of TCR clone 358883 (TRBV29-1, TRBJ2-5)
CSEDRTGTQYF

SEQ ID NO: 717767 - protein, 17 aa, Homo sapiens
  CDR3 for alpha chain variable domain of TCR clone 358884 (TRAV3, TRAJ12)
CAVRDGGRMDSSYKLIF

SEQ ID NO: 717768 - protein, 13 aa, Homo sapiens
  CDR3 for beta chain variable domain of TCR clone 358884 (TRBV4-3, TRBJ1-1)
CASSQAGNTEAFF

SEQ ID NO: 717769 - protein, 14 aa, Homo sapiens
  CDR3 for alpha chain variable domain of TCR clone 358885 (TRAV25, TRAJ45)
CAGNSGGGAYGLTF

SEQ ID NO: 717770 - protein, 14 aa, Homo sapiens
  CDR3 for beta chain variable domain of TCR clone 358885 (TRBV29-1, TRBJ1-2)
CSARRGTQTSGYTF

SEQ ID NO: 717771 - protein, 14 aa, Homo sapiens
  CDR3 for alpha chain variable domain of TCR clone 358886 (TRAV17, TRAJ39)
CATDPVRAGNMLTF

SEQ ID NO: 717772 - protein, 15 aa, Homo sapiens
  CDR3 for beta chain variable domain of TCR clone 358886 (TRBV13, TRBJ1-5)
RASSFGQGGVQPQHF

SEQ ID NO: 717773 - protein, 15 aa, Homo sapiens
  CDR3 for alpha chain variable domain of TCR clone 358887 (TRAV3, TRAJ5)
CAVRDLYTGRRALTF

SEQ ID NO: 717774 - protein, 16 aa, Homo sapiens
  CDR3 for beta chain variable domain of TCR clone 358887 (TRBV20-1, TRBJ1-4)
CGAPGQGLLTNEKLFF

SEQ ID NO: 717775 - protein, 13 aa, Homo sapiens
  CDR3 for alpha chain variable domain of TCR clone 358888 (TRAV12-1, TRAJ33)
CGDAPDSNYQLIW

SEQ ID NO: 717776 - protein, 16 aa, Homo sapiens
  CDR3 for beta chain variable domain of TCR clone 358888 (TRBV19, TRBJ2-2)
CASSFPGQGLAGELFF

SEQ ID NO: 717777 - protein, 14 aa, Homo sapiens
  CDR3 for alpha chain variable domain of TCR clone 358889 (TRAV12-3, TRAJ10)
SHLPLTGGGNKLTF

SEQ ID NO: 717778 - protein, 16 aa, Homo sapiens
  CDR3 for beta chain variable domain of TCR clone 358889 (TRBV6-1, TRBJ2-1)
CASILRQGSSYNEQFF

SEQ ID NO: 717779 - protein, 14 aa, Homo sapiens
  CDR3 for alpha chain variable domain of TCR clone 358890 (TRAV13-1, TRAJ50)
CAASIRTSYDKVIF

SEQ ID NO: 717780 - protein, 16 aa, Homo sapiens
  CDR3 for beta chain variable domain of TCR clone 358890 (TRBV28, TRBJ2-7)
CASSLFFETGGPEQYF

SEQ ID NO: 717781 - protein, 17 aa, Homo sapiens
  CDR3 for alpha chain variable domain of TCR clone 358891 (TRAV3, TRAJ12)
CAVRDGGRMDSSYKLIF

SEQ ID NO: 717782 - protein, 14 aa, Homo sapiens
  CDR3 for beta chain variable domain of TCR clone 358891 (TRBV11-2, TRBJ1-2)
CASSLYRGNYGYTF

SEQ ID NO: 717783 - protein, 13 aa, Homo sapiens
  CDR3 for alpha chain variable domain of TCR clone 358892 (TRAV8-4, TRAJ49)
CAVRTLTGNQFYF

SEQ ID NO: 717784 - protein, 16 aa, Homo sapiens
  CDR3 for beta chain variable domain of TCR clone 358892 (TRBV5-7, TRBJ2-5)
CASPLAPAGGRETQYF

SEQ ID NO: 717785 - protein, 17 aa, Homo sapiens
  CDR3 for alpha chain variable domain of TCR clone 358893 (TRAV3, TRAJ6)
CAVRDGPRAGGSYIPTF

SEQ ID NO: 717786 - protein, 14 aa, Homo sapiens
  CDR3 for beta chain variable domain of TCR clone 358893 (TRBV4-1, TRBJ2-3)
CASSQDWSTDTQYF

SEQ ID NO: 717787 - protein, 14 aa, Homo sapiens
  CDR3 for alpha chain variable domain of TCR clone 358894 (TRAV1-1, TRAJ27)
CAVIYNTNAGKSTF

SEQ ID NO: 717788 - protein, 13 aa, Homo sapiens
  CDR3 for beta chain variable domain of TCR clone 358894 (TRBV27, TRBJ2-7)
CASSLTTGYEQYF

SEQ ID NO: 717789 - protein, 14 aa, Homo sapiens
  CDR3 for alpha chain variable domain of TCR clone 358895 (TRAV12-2, TRAJ40)
CAVKIPSGTFKYIF

SEQ ID NO: 717790 - protein, 14 aa, Homo sapiens
  CDR3 for beta chain variable domain of TCR clone 358895 (TRBV20-1, TRBJ1-1)
CSAQTRIGGTEAFF

SEQ ID NO: 717791 - protein, 12 aa, Homo sapiens
  CDR3 for alpha chain variable domain of TCR clone 358896 (TRAV20, TRAJ33)
CAVRGSNYQLIW

SEQ ID NO: 717792 - protein, 13 aa, Homo sapiens
  CDR3 for beta chain variable domain of TCR clone 358896 (TRBV4-3, TRBJ1-1)
CASSPTGNTVAFF

SEQ ID NO: 717793 - protein, 16 aa, Homo sapiens
  CDR3 for alpha chain variable domain of TCR clone 358897 (TRAV30, TRAJ24)
CGTEIVDADSWGKFEF

SEQ ID NO: 717794 - protein, 16 aa, Homo sapiens
  CDR3 for beta chain variable domain of TCR clone 358897 (TRBV12-5, TRBJ2-5)
CASGPRTSGNQETQYF

SEQ ID NO: 717795 - protein, 12 aa, Homo sapiens
  CDR3 for alpha chain variable domain of TCR clone 358898 (TRAV12-3, TRAJ17)
CAMTLTGNKLTF

SEQ ID NO: 717796 - protein, 16 aa, Homo sapiens
  CDR3 for beta chain variable domain of TCR clone 358898 (TRBV20-1, TRBJ1-4)
CSAPGQGLVTNEKLFF

SEQ ID NO: 717797 - protein, 15 aa, Homo sapiens
  CDR3 for alpha chain variable domain of TCR clone 358899 (TRAV16, TRAJ17)
FALSGQEAAGNKLTF

SEQ ID NO: 717798 - protein, 15 aa, Homo sapiens
  CDR3 for beta chain variable domain of TCR clone 358899 (TRBV12-4, TRBJ1-5)
CASTQGTGPLQPQHF

SEQ ID NO: 717799 - protein, 16 aa, Homo sapiens
  CDR3 for alpha chain variable domain of TCR clone 358900 (TRAV30, TRAJ24)
CGTEVVDADSWGNSSL

SEQ ID NO: 717800 - protein, 14 aa, Homo sapiens
  CDR3 for beta chain variable domain of TCR clone 358900 (TRBV12-5, TRBJ2-5)
CASGSRTHQETQYF

SEQ ID NO: 717801 - protein, 15 aa, Homo sapiens
  CDR3 for alpha chain variable domain of TCR clone 358901 (TRAV21, TRAJ52)
CAVRGGGTSYGKLTF

SEQ ID NO: 717802 - protein, 15 aa, Homo sapiens
  CDR3 for beta chain variable domain of TCR clone 358901 (TRBV18, TRBJ1-5)
CASSPSGRSNQPQHF

SEQ ID NO: 717803 - protein, 15 aa, Homo sapiens
  CDR3 for alpha chain variable domain of TCR clone 358902 (TRAV29/DV5, TRAJ57)
CAASLLRGGSEKLVF

SEQ ID NO: 717804 - protein, 15 aa, Homo sapiens
  CDR3 for beta chain variable domain of TCR clone 358902 (TRBV5-1, TRBJ1-3)
CASSLEGGSGNAIYF

SEQ ID NO: 717805 - protein, 18 aa, Homo sapiens
  CDR3 for alpha chain variable domain of TCR clone 358903 (TRAV29/DV5, TRAJ26)
CSVLLCSTRKPEGQNFVF

SEQ ID NO: 717806 - protein, 17 aa, Homo sapiens
  CDR3 for beta chain variable domain of TCR clone 358903 (TRBV20-1, TRBJ2-2)
CSASGSGQGGLTGELFF

SEQ ID NO: 717807 - protein, 15 aa, Homo sapiens
  CDR3 for alpha chain variable domain of TCR clone 358904 (TRAV3, TRAJ3)
CAVRDRDSSASKIIF

SEQ ID NO: 717808 - protein, 12 aa, Homo sapiens
  CDR3 for beta chain variable domain of TCR clone 358904 (TRBV28, TRBJ2-7)
CASSFSSYEQYF

SEQ ID NO: 717809 - protein, 14 aa, Homo sapiens
  CDR3 for alpha chain variable domain of TCR clone 358905 (TRAV36/DV7, TRAJ40)
CAVETTSGTYNYIF

SEQ ID NO: 717810 - protein, 13 aa, Homo sapiens
  CDR3 for beta chain variable domain of TCR clone 358905 (TRBV10-3, TRBJ2-5)
CAMTSGAGETQYV

SEQ ID NO: 717811 - protein, 12 aa, Homo sapiens
  CDR3 for alpha chain variable domain of TCR clone 358906 (TRAV12-3, TRAJ17)
CAMTLTGNKLTF

SEQ ID NO: 717812 - protein, 15 aa, Homo sapiens
  CDR3 for beta chain variable domain of TCR clone 358906 (TRBV4-2, TRBJ1-2)
CASSRNTGAGYGYTF

SEQ ID NO: 717813 - protein, 15 aa, Homo sapiens
  CDR3 for alpha chain variable domain of TCR clone 358907 (TRAV3, TRAJ22)
CAVRDRGGSARQLTF

SEQ ID NO: 717814 - protein, 11 aa, Homo sapiens
  CDR3 for beta chain variable domain of TCR clone 358907 (TRBV24-1, TRBJ2-3)
CATSDLDTQYF

SEQ ID NO: 717815 - protein, 14 aa, Homo sapiens
  CDR3 for alpha chain variable domain of TCR clone 358908 (TRAV9-2, TRAJ9)
CALSLIGGVFKTIF

SEQ ID NO: 717816 - protein, 18 aa, Homo sapiens
  CDR3 for beta chain variable domain of TCR clone 358908 (TRBV28, TRBJ2-6)
CASSLAGRAVSGANVLTF

SEQ ID NO: 717817 - protein, 11 aa, Homo sapiens
  CDR3 for alpha chain variable domain of TCR clone 358909 (TRAV12-1, TRAJ34)
CVVNKGRELIF

SEQ ID NO: 717818 - protein, 15 aa, Homo sapiens
  CDR3 for beta chain variable domain of TCR clone 358909 (TRBV10-2, TRBJ2-6)
CASSEQGTGANVLTF

SEQ ID NO: 717819 - protein, 15 aa, Homo sapiens
  CDR3 for alpha chain variable domain of TCR clone 358910 (TRAV26-1, TRAJ23)
CIVRVAGYQVGKLIF

SEQ ID NO: 717820 - protein, 15 aa, Homo sapiens
  CDR3 for beta chain variable domain of TCR clone 358910 (TRBV9, TRBJ1-6)
CASSVAGTGDSPLHF

SEQ ID NO: 717821 - protein, 13 aa, Homo sapiens
  CDR3 for alpha chain variable domain of TCR clone 358911 (TRAV2, TRAJ40)
CAVVTSGTYKYIF

SEQ ID NO: 717822 - protein, 16 aa, Homo sapiens
  CDR3 for beta chain variable domain of TCR clone 358911 (TRBV29-1, TRBJ2-6)
CSVEDITYAGANVLTF

SEQ ID NO: 717823 - protein, 15 aa, Homo sapiens
  CDR3 for alpha chain variable domain of TCR clone 358912 (TRAV27, TRAJ38)
CAARRNAGNNRKLIW

SEQ ID NO: 717824 - protein, 16 aa, Homo sapiens
  CDR3 for beta chain variable domain of TCR clone 358912 (TRBV4-2, TRBJ2-3)
CASSQELAGDTDTQYF

SEQ ID NO: 717825 - protein, 13 aa, Homo sapiens
  CDR3 for alpha chain variable domain of TCR clone 358913 (TRAV12-2, TRAJ6)
CAVNVSRKLHTYI

SEQ ID NO: 717826 - protein, 12 aa, Homo sapiens
  CDR3 for beta chain variable domain of TCR clone 358913 (TRBV29-1, TRBJ2-3)
CSVTGGAETQYF

SEQ ID NO: 717827 - protein, 13 aa, Homo sapiens
  CDR3 for alpha chain variable domain of TCR clone 358914 (TRAV12-3, TRAJ13)
CAMTSGGHQKVTF

SEQ ID NO: 717828 - protein, 14 aa, Homo sapiens
  CDR3 for beta chain variable domain of TCR clone 358914 (TRBV6-1, TRBJ2-7)
CASSERVNPYEQYF

SEQ ID NO: 717829 - protein, 18 aa, Homo sapiens
  CDR3 for alpha chain variable domain of TCR clone 358915 (TRAV29/DV5, TRAJ52)
CAAGFRGAGGTNFGKLTF

SEQ ID NO: 717830 - protein, 16 aa, Homo sapiens
  CDR3 for beta chain variable domain of TCR clone 358915 (TRBV7-3, TRBJ2-2)
CASSLKRGTLSGELFF

SEQ ID NO: 717831 - protein, 14 aa, Homo sapiens
  CDR3 for alpha chain variable domain of TCR clone 358916 (TRAV13-1, TRAJ44)
CAAKATGTASKLTC

SEQ ID NO: 717832 - protein, 13 aa, Homo sapiens
  CDR3 for beta chain variable domain of TCR clone 358916 (TRBV5-5, TRBJ1-2)
CASSFWRGEDYTF

SEQ ID NO: 717833 - protein, 22 aa, Homo sapiens
  CDR3 for alpha chain variable domain of TCR clone 358917 (TRAV8-6, TRAJ38)
CAVSSNAGNNHIQNPDPAVYQL

SEQ ID NO: 717834 - protein, 17 aa, Homo sapiens
  CDR3 for beta chain variable domain of TCR clone 358917 (TRBV24-1, TRBJ2-1)
CATSDVSTSGTYNEQFF

SEQ ID NO: 717835 - protein, 13 aa, Homo sapiens
  CDR3 for alpha chain variable domain of TCR clone 358918 (TRAV36/DV7, TRAJ37)
CAVFSSNTGKLIF

SEQ ID NO: 717836 - protein, 16 aa, Homo sapiens
  CDR3 for beta chain variable domain of TCR clone 358918 (TRBV12-4, TRBJ2-5)
CASSFFVRGRRETQYC

SEQ ID NO: 717837 - protein, 14 aa, Homo sapiens
  CDR3 for alpha chain variable domain of TCR clone 358919 (TRAV17, TRAJ12)
CAILPIDSSYKLIF

SEQ ID NO: 717838 - protein, 11 aa, Homo sapiens
  CDR3 for beta chain variable domain of TCR clone 358919 (TRBV19, TRBJ1-1)
CASSIGSEAFF

SEQ ID NO: 717839 - protein, 14 aa, Homo sapiens
  CDR3 for alpha chain variable domain of TCR clone 358920 (TRAV12-1, TRAJ17)
CVVKYKAAGNKLTF

SEQ ID NO: 717840 - protein, 17 aa, Homo sapiens
  CDR3 for beta chain variable domain of TCR clone 358920 (TRBV20-1, TRBJ2-1)
RSASSSGLAGSYNEQFF

SEQ ID NO: 717841 - protein, 15 aa, Homo sapiens
  CDR3 for alpha chain variable domain of TCR clone 358921 (TRAV26-1, TRAJ39)
CIVGVASNAGNMLTF

SEQ ID NO: 717842 - protein, 14 aa, Homo sapiens
  CDR3 for beta chain variable domain of TCR clone 358921 (TRBV7-6, TRBJ2-3)
CASSVAGGTDTQYF

SEQ ID NO: 717843 - protein, 14 aa, Homo sapiens
  CDR3 for alpha chain variable domain of TCR clone 358922 (TRAV17, TRAJ57)
CATEPQGGSEKLVF

SEQ ID NO: 717844 - protein, 18 aa, Homo sapiens
  CDR3 for beta chain variable domain of TCR clone 358922 (TRBV6-6, TRBJ1-3)
CASSYSKWDSISGNTIYF

SEQ ID NO: 717845 - protein, 14 aa, Homo sapiens
  CDR3 for alpha chain variable domain of TCR clone 358923 (TRAV1-2, TRAJ17)
CAVRDMTAGNTLTF

SEQ ID NO: 717846 - protein, 15 aa, Homo sapiens
  CDR3 for beta chain variable domain of TCR clone 358923 (TRBV20-1, TRBJ2-7)
CSARDRVSAMDEQYF

SEQ ID NO: 717847 - protein, 14 aa, Homo sapiens
  CDR3 for alpha chain variable domain of TCR clone 358924 (TRAV26-1, TRAJ40)
CIVRVARGTYKYIF

SEQ ID NO: 717848 - protein, 13 aa, Homo sapiens
  CDR3 for beta chain variable domain of TCR clone 358924 (TRBV19, TRBJ2-2)
CASSIWSTGELFF

SEQ ID NO: 717849 - protein, 16 aa, Homo sapiens
  CDR3 for alpha chain variable domain of TCR clone 358925 (TRAV14/DV4, TRAJ54)
CAMREGRIQGAQKLGF

SEQ ID NO: 717850 - protein, 18 aa, Homo sapiens
  CDR3 for beta chain variable domain of TCR clone 358925 (TRBV18, TRBJ1-3)
CASSPRGGAGPSGNTIYS

SEQ ID NO: 717851 - protein, 13 aa, Homo sapiens
  CDR3 for alpha chain variable domain of TCR clone 358926 (TRAV21, TRAJ27)
CAARPGNAGKSTF

SEQ ID NO: 717852 - protein, 15 aa, Homo sapiens
  CDR3 for beta chain variable domain of TCR clone 358926 (TRBV2, TRBJ2-3)
CGSSDAGGPPDTQYF

SEQ ID NO: 717853 - protein, 14 aa, Homo sapiens
  CDR3 for alpha chain variable domain of TCR clone 358927 (TRAV35, TRAJ22)
CAGLRPGSARQLTF

SEQ ID NO: 717854 - protein, 13 aa, Homo sapiens
  CDR3 for beta chain variable domain of TCR clone 358927 (TRBV27, TRBJ1-4)
CASSLMGDEKLFF

SEQ ID NO: 717855 - protein, 14 aa, Homo sapiens
  CDR3 for alpha chain variable domain of TCR clone 358928 (TRAV12-2, TRAJ9)
CAVNALEGGFKTIF

SEQ ID NO: 717856 - protein, 12 aa, Homo sapiens
  CDR3 for beta chain variable domain of TCR clone 358928 (TRBV11-2, TRBJ2-5)
CASSKRLETQYF

SEQ ID NO: 717857 - protein, 15 aa, Homo sapiens
  CDR3 for alpha chain variable domain of TCR clone 358929 (TRAV26-1, TRAJ17)
CIVRVVTAAGNKLTF

SEQ ID NO: 717858 - protein, 16 aa, Homo sapiens
  CDR3 for beta chain variable domain of TCR clone 358929 (TRBV7-9, TRBJ2-1)
CASSLVSGPSYNEQFF

SEQ ID NO: 717859 - protein, 13 aa, Homo sapiens
  CDR3 for alpha chain variable domain of TCR clone 358930 (TRAV12-2, TRAJ20)
CAVYPSNDYKLSF

SEQ ID NO: 717860 - protein, 12 aa, Homo sapiens
  CDR3 for beta chain variable domain of TCR clone 358930 (TRBV7-8, TRBJ2-7)
CASSLAGYEQYF

SEQ ID NO: 717861 - protein, 14 aa, Homo sapiens
  CDR3 for alpha chain variable domain of TCR clone 358931 (TRAV12-2, TRAJ13)
CAVKKTGGYKKVTF

SEQ ID NO: 717862 - protein, 17 aa, Homo sapiens
  CDR3 for beta chain variable domain of TCR clone 358931 (TRBV20-1, TRBJ2-2)
CSASGSGQGGLTGELFF

SEQ ID NO: 717863 - protein, 15 aa, Homo sapiens
  CDR3 for alpha chain variable domain of TCR clone 358932 (TRAV12-1, TRAJ44)
CVVDEYTGTASKLTL

SEQ ID NO: 717864 - protein, 15 aa, Homo sapiens
  CDR3 for beta chain variable domain of TCR clone 358932 (TRBV9, TRBJ1-6)
CASSVAGTGDSPLHF

SEQ ID NO: 717865 - protein, 17 aa, Homo sapiens
  CDR3 for alpha chain variable domain of TCR clone 358933 (TRAV4, TRAJ42)
CLVGVLNCGGSQGDLIF

SEQ ID NO: 717866 - protein, 12 aa, Homo sapiens
  CDR3 for beta chain variable domain of TCR clone 358933 (TRBV20-1, TRBJ2-1)
CSAQYTYNEQFF

SEQ ID NO: 717867 - protein, 13 aa, Homo sapiens
  CDR3 for alpha chain variable domain of TCR clone 358934 (TRAV2, TRAJ40)
CAVVTSGTYTYIF

SEQ ID NO: 717868 - protein, 16 aa, Homo sapiens
  CDR3 for beta chain variable domain of TCR clone 358934 (TRBV19, TRBJ2-2)
CASRSPGTGATGELFF

SEQ ID NO: 717869 - protein, 12 aa, Homo sapiens
  CDR3 for alpha chain variable domain of TCR clone 358935 (TRAV13-2, TRAJ23)
CAERHRGGKPIF

SEQ ID NO: 717870 - protein, 16 aa, Homo sapiens
  CDR3 for beta chain variable domain of TCR clone 358935 (TRBV20-1, TRBJ1-4)
CSAPVQGLLTNEKLFF

SEQ ID NO: 717871 - protein, 13 aa, Homo sapiens
  CDR3 for alpha chain variable domain of TCR clone 358936 (TRAV36/DV7, TRAJ57)
CAVVLGGSEKLVF

SEQ ID NO: 717872 - protein, 14 aa, Homo sapiens
  CDR3 for beta chain variable domain of TCR clone 358936 (TRBV4-1, TRBJ1-2)
CASSQDGQVRGYSF

SEQ ID NO: 717873 - protein, 17 aa, Homo sapiens
  CDR3 for alpha chain variable domain of TCR clone 358937 (TRAV3, TRAJ6)
CAVRDGPRAGGSYIPTF

SEQ ID NO: 717874 - protein, 14 aa, Homo sapiens
  CDR3 for beta chain variable domain of TCR clone 358937 (TRBV7-2, TRBJ2-7)
CASSPETSFYEQYF

SEQ ID NO: 717875 - protein, 12 aa, Homo sapiens
  CDR3 for alpha chain variable domain of TCR clone 358938 (TRAV8-1, TRAJ9)
CAVGTGGFKTIF

SEQ ID NO: 717876 - protein, 18 aa, Homo sapiens
  CDR3 for beta chain variable domain of TCR clone 358938 (TRBV6-6, TRBJ1-3)
CASSYSKWDSISGNTIYF

SEQ ID NO: 717877 - protein, 10 aa, Homo sapiens
  CDR3 for alpha chain variable domain of TCR clone 358939 (TRAV23/DV6, TRAJ57)
CAASSTLSQG

SEQ ID NO: 717878 - protein, 15 aa, Homo sapiens
  CDR3 for beta chain variable domain of TCR clone 358939 (TRBV7-9, TRBJ1-4)
CASSRTGGFNEKLFF

SEQ ID NO: 717879 - protein, 15 aa, Homo sapiens
  CDR3 for alpha chain variable domain of TCR clone 358940 (TRAV3, TRAJ22)
CAVRDRGGSARQLTL

SEQ ID NO: 717880 - protein, 16 aa, Homo sapiens
  CDR3 for beta chain variable domain of TCR clone 358940 (TRBV9, TRBJ2-2)
CASSAMGKGNTGELFF

SEQ ID NO: 717881 - protein, 11 aa, Homo sapiens
  CDR3 for alpha chain variable domain of TCR clone 358941 (TRAV1-1, TRAJ23)
CAVRQGGKLIF

SEQ ID NO: 717882 - protein, 16 aa, Homo sapiens
  CDR3 for beta chain variable domain of TCR clone 358941 (TRBV4-1, TRBJ2-7)
CASRPSGGGADNEQYF

SEQ ID NO: 717883 - protein, 17 aa, Homo sapiens
  CDR3 for alpha chain variable domain of TCR clone 358942 (TRAV3, TRAJ6)
CAVRDGPRAGGSYIPTF

SEQ ID NO: 717884 - protein, 13 aa, Homo sapiens
  CDR3 for beta chain variable domain of TCR clone 358942 (TRBV19, TRBJ2-2)
CASSIWSTGELFF

SEQ ID NO: 717885 - protein, 12 aa, Homo sapiens
  CDR3 for alpha chain variable domain of TCR clone 358943 (TRAV3, TRAJ20)
CAVRDPDYKLSF

SEQ ID NO: 717886 - protein, 14 aa, Homo sapiens
  CDR3 for beta chain variable domain of TCR clone 358943 (TRBV4-2, TRBJ1-2)
CASSPGGSNYGYTF

SEQ ID NO: 717887 - protein, 15 aa, Homo sapiens
  CDR3 for alpha chain variable domain of TCR clone 358944 (TRAV23/DV6, TRAJ18)
CAARYRGSTLGRLYF

SEQ ID NO: 717888 - protein, 17 aa, Homo sapiens
  CDR3 for beta chain variable domain of TCR clone 358944 (TRBV4-1, TRBJ1-4)
CASSQEGPRGVEEKLFF

SEQ ID NO: 717889 - protein, 13 aa, Homo sapiens
  CDR3 for alpha chain variable domain of TCR clone 358945 (TRAV12-3, TRAJ40)
CAMSARGTYKYIF

SEQ ID NO: 717890 - protein, 15 aa, Homo sapiens
  CDR3 for beta chain variable domain of TCR clone 358945 (TRBV7-2, TRBJ2-1)
CASSLASGRVNEQFF

SEQ ID NO: 717891 - protein, 14 aa, Homo sapiens
  CDR3 for alpha chain variable domain of TCR clone 358946 (TRAV1-1, TRAJ27)
CAVIYNTNSGKSTF

SEQ ID NO: 717892 - protein, 14 aa, Homo sapiens
  CDR3 for beta chain variable domain of TCR clone 358946 (TRBV25-1, TRBJ1-1)
CASTHLGGNTEAFF

SEQ ID NO: 717893 - protein, 16 aa, Homo sapiens
  CDR3 for alpha chain variable domain of TCR clone 358947 (TRAV4, TRAJ18)
CCVLLIGGSTLGRLYF

SEQ ID NO: 717894 - protein, 12 aa, Homo sapiens
  CDR3 for beta chain variable domain of TCR clone 358947 (TRBV6-3, TRBJ2-7)
YASSLTPYEQYF

SEQ ID NO: 717895 - protein, 15 aa, Homo sapiens
  CDR3 for alpha chain variable domain of TCR clone 358948 (TRAV2, TRAJ9)
CAVEDRGTGGFKTIF

SEQ ID NO: 717896 - protein, 16 aa, Homo sapiens
  CDR3 for beta chain variable domain of TCR clone 358948 (TRBV24-1, TRBJ2-3)
CATSDPGTGATDTQDF

SEQ ID NO: 717897 - protein, 13 aa, Homo sapiens
  CDR3 for alpha chain variable domain of TCR clone 358949 (TRAV8-4, TRAJ30)
CAVSVNRDDKIIF

SEQ ID NO: 717898 - protein, 13 aa, Homo sapiens
  CDR3 for beta chain variable domain of TCR clone 358949 (TRBV3-1, TRBJ2-2)
CASLARGSGEQFF

SEQ ID NO: 717899 - protein, 17 aa, Homo sapiens
  CDR3 for alpha chain variable domain of TCR clone 358950 (TRAV12-3, TRAJ26)
CAMSGGRWDNYGQNFVF

SEQ ID NO: 717900 - protein, 12 aa, Homo sapiens
  CDR3 for beta chain variable domain of TCR clone 358950 (TRBV19, TRBJ1-1)
CACSTTGIEAFF

SEQ ID NO: 717901 - protein, 15 aa, Homo sapiens
  CDR3 for alpha chain variable domain of TCR clone 358951 (TRAV8-2, TRAJ40)
CVVLGTTSGTYKYIF

SEQ ID NO: 717902 - protein, 16 aa, Homo sapiens
  CDR3 for beta chain variable domain of TCR clone 358951 (TRBV7-3, TRBJ2-1)
CASSLEGYSSYNEQLF

SEQ ID NO: 717903 - protein, 17 aa, Homo sapiens
  CDR3 for alpha chain variable domain of TCR clone 358952 (TRAV3, TRAJ12)
CAVRDGGRMDSSYKLIF

SEQ ID NO: 717904 - protein, 14 aa, Homo sapiens
  CDR3 for beta chain variable domain of TCR clone 358952 (TRBV7-9, TRBJ2-1)
CASSPRDSLYEQFF

SEQ ID NO: 717905 - protein, 19 aa, Homo sapiens
  CDR3 for alpha chain variable domain of TCR clone 358953 (TRAV29/DV5, TRAJ49)
CSVLLCSTLTVDTGNQFYF

SEQ ID NO: 717906 - protein, 17 aa, Homo sapiens
  CDR3 for beta chain variable domain of TCR clone 358953 (TRBV13, TRBJ2-3)
CASSLSRVAGGRNTQYF

SEQ ID NO: 717907 - protein, 13 aa, Homo sapiens
  CDR3 for alpha chain variable domain of TCR clone 358954 (TRAV8-3, TRAJ36)
CAVGATGANDLFF

SEQ ID NO: 717908 - protein, 12 aa, Homo sapiens
  CDR3 for beta chain variable domain of TCR clone 358954 (TRBV20-1, TRBJ2-7)
CSAGLKMGEQYF

SEQ ID NO: 717909 - protein, 14 aa, Homo sapiens
  CDR3 for alpha chain variable domain of TCR clone 358955 (TRAV23/DV6, TRAJ57)
CAALAQGGSEKLVF

SEQ ID NO: 717910 - protein, 15 aa, Homo sapiens
  CDR3 for beta chain variable domain of TCR clone 358955 (TRBV6-6, TRBJ2-5)
CASSPGGGLEETQYF

SEQ ID NO: 717911 - protein, 10 aa, Homo sapiens
  CDR3 for alpha chain variable domain of TCR clone 358956 (TRAV12-2, TRAJ43)
CAVKILSMRF

SEQ ID NO: 717912 - protein, 14 aa, Homo sapiens
  CDR3 for beta chain variable domain of TCR clone 358956 (TRBV11-2, TRBJ2-7)
CASSLGSSLYEQYF

SEQ ID NO: 717913 - protein, 14 aa, Homo sapiens
  CDR3 for alpha chain variable domain of TCR clone 358957 (TRAV2, TRAJ37)
CAVDFTSNTGKLIF

SEQ ID NO: 717914 - protein, 15 aa, Homo sapiens
  CDR3 for beta chain variable domain of TCR clone 358957 (TRBV20-1, TRBJ1-1)
CSASRGVTGNTEPFF

SEQ ID NO: 717915 - protein, 15 aa, Homo sapiens
  CDR3 for alpha chain variable domain of TCR clone 358958 (TRAV4, TRAJ39)
CLVGPNNNAGNMLTF

SEQ ID NO: 717916 - protein, 15 aa, Homo sapiens
  CDR3 for beta chain variable domain of TCR clone 358958 (TRBV18, TRBJ1-1)
CASSPRQGENTEAFF

SEQ ID NO: 717917 - protein, 13 aa, Homo sapiens
  CDR3 for alpha chain variable domain of TCR clone 358959 (TRAV29/DV5, TRAJ31)
CAASRNNNARLMC

SEQ ID NO: 717918 - protein, 12 aa, Homo sapiens
  CDR3 for beta chain variable domain of TCR clone 358959 (TRBV14, TRBJ2-5)
CASSQLKETQYF

SEQ ID NO: 717919 - protein, 13 aa, Homo sapiens
  CDR3 for alpha chain variable domain of TCR clone 358960 (TRAV12-1, TRAJ39)
CVVPQRAGNMLTF

SEQ ID NO: 717920 - protein, 17 aa, Homo sapiens
  CDR3 for beta chain variable domain of TCR clone 358960 (TRBV4-1, TRBJ2-5)
CASGRDLTGGPIETQYF

SEQ ID NO: 717921 - protein, 12 aa, Homo sapiens
  CDR3 for alpha chain variable domain of TCR clone 358961 (TRAV12-2, TRAJ31)
CAVNTPDARLMF

SEQ ID NO: 717922 - protein, 17 aa, Homo sapiens
  CDR3 for beta chain variable domain of TCR clone 358961 (TRBV20-1, TRBJ1-6)
GSARGGYTFSYNSPLHF

SEQ ID NO: 717923 - protein, 14 aa, Homo sapiens
  CDR3 for alpha chain variable domain of TCR clone 358962 (TRAV1-2, TRAJ8)
CAVREDTGFQKLVF

SEQ ID NO: 717924 - protein, 16 aa, Homo sapiens
  CDR3 for beta chain variable domain of TCR clone 358962 (TRBV10-3, TRBJ2-6)
CAISTSGDLGANVLTF

SEQ ID NO: 717925 - protein, 18 aa, Homo sapiens
  CDR3 for alpha chain variable domain of TCR clone 358963 (TRAV21, TRAJ52)
CAVRPSPAGGTSYGKLTF

SEQ ID NO: 717926 - protein, 17 aa, Homo sapiens
  CDR3 for beta chain variable domain of TCR clone 358963 (TRBV6-4, TRBJ2-3)
CASSLSRVAGGRNTQYF

SEQ ID NO: 717927 - protein, 16 aa, Homo sapiens
  CDR3 for alpha chain variable domain of TCR clone 358964 (TRAV23/DV6, TRAJ9)
CAASIGGNTGGFKTIL

SEQ ID NO: 717928 - protein, 12 aa, Homo sapiens
  CDR3 for beta chain variable domain of TCR clone 358964 (TRBV11-2, TRBJ2-1)
CASSVQREGQFF

SEQ ID NO: 717929 - protein, 13 aa, Homo sapiens
  CDR3 for alpha chain variable domain of TCR clone 358965 (TRAV8-6, TRAJ49)
CAVITNTGNQFYF

SEQ ID NO: 717930 - protein, 13 aa, Homo sapiens
  CDR3 for beta chain variable domain of TCR clone 358965 (TRBV11-3, TRBJ1-1)
CATEEGLNTEAFF

SEQ ID NO: 717931 - protein, 17 aa, Homo sapiens
  CDR3 for alpha chain variable domain of TCR clone 358966 (TRAV13-1, TRAJ52)
CAAGRNAGGTSYGKLTL

SEQ ID NO: 717932 - protein, 15 aa, Homo sapiens
  CDR3 for beta chain variable domain of TCR clone 358966 (TRBV6-3, TRBJ2-7)
CASSSPGTVFYEQYF

SEQ ID NO: 717933 - protein, 16 aa, Homo sapiens
  CDR3 for alpha chain variable domain of TCR clone 358967 (TRAV30, TRAJ24)
CGTEIVDADSRRKSQF

SEQ ID NO: 717934 - protein, 14 aa, Homo sapiens
  CDR3 for beta chain variable domain of TCR clone 358967 (TRBV12-5, TRBJ2-5)
CASGSRTHQETQYF

SEQ ID NO: 717935 - protein, 18 aa, Homo sapiens
  CDR3 for alpha chain variable domain of TCR clone 358968 (TRAV21, TRAJ53)
CAVKGGEYSGGSNYKLTF

SEQ ID NO: 717936 - protein, 13 aa, Homo sapiens
  CDR3 for beta chain variable domain of TCR clone 358968 (TRBV7-2, TRBJ1-1)
CASNLKGAKVAFF

SEQ ID NO: 717937 - protein, 12 aa, Homo sapiens
  CDR3 for alpha chain variable domain of TCR clone 358969 (TRAV26-2, TRAJ48)
CILRKGNEKLTF

SEQ ID NO: 717938 - protein, 14 aa, Homo sapiens
  CDR3 for beta chain variable domain of TCR clone 358969 (TRBV28, TRBJ2-7)
CASRTLRGRFEQYF

SEQ ID NO: 717939 - protein, 12 aa, Homo sapiens
  CDR3 for alpha chain variable domain of TCR clone 358970 (TRAV13-1, TRAJ15)
CAANQAGTALIF

SEQ ID NO: 717940 - protein, 14 aa, Homo sapiens
  CDR3 for beta chain variable domain of TCR clone 358970 (TRBV25-1, TRBJ1-1)
CASTHLGGNTEAFF

SEQ ID NO: 717941 - protein, 15 aa, Homo sapiens
  CDR3 for alpha chain variable domain of TCR clone 358971 (TRAV8-4, TRAJ13)
CAVSDWSGGYQKVTF

SEQ ID NO: 717942 - protein, 19 aa, Homo sapiens
  CDR3 for beta chain variable domain of TCR clone 358971 (TRBV19, TRBJ2-5)
CASSIGQVTDFFLGETQYF

SEQ ID NO: 717943 - protein, 15 aa, Homo sapiens
  CDR3 for alpha chain variable domain of TCR clone 358972 (TRAV8-6, TRAJ38)
CAVRSNAGNNRKLVL

SEQ ID NO: 717944 - protein, 14 aa, Homo sapiens
  CDR3 for beta chain variable domain of TCR clone 358972 (TRBV14, TRBJ2-1)
CASSQVQGRGEQFF

SEQ ID NO: 717945 - protein, 14 aa, Homo sapiens
  CDR3 for alpha chain variable domain of TCR clone 358973 (TRAV13-2, TRAJ17)
CAENSKAAGNKPTF

SEQ ID NO: 717946 - protein, 16 aa, Homo sapiens
  CDR3 for beta chain variable domain of TCR clone 358973 (TRBV7-3, TRBJ2-3)
CASSLSGYRPEDTQYF

SEQ ID NO: 717947 - protein, 14 aa, Homo sapiens
  CDR3 for alpha chain variable domain of TCR clone 358974 (TRAV1-2, TRAJ16)
CAVNRFSDGHKLLF

SEQ ID NO: 717948 - protein, 14 aa, Homo sapiens
  CDR3 for beta chain variable domain of TCR clone 358974 (TRBV7-9, TRBJ2-3)
CASSLEDGTDTQYF

SEQ ID NO: 717949 - protein, 12 aa, Homo sapiens
  CDR3 for alpha chain variable domain of TCR clone 358975 (TRAV38-1, TRAJ47)
CAFETYGNKLVF

SEQ ID NO: 717950 - protein, 15 aa, Homo sapiens
  CDR3 for beta chain variable domain of TCR clone 358975 (TRBV7-9, TRBJ2-7)
CASSLALAEAYEQYF

SEQ ID NO: 717951 - protein, 12 aa, Homo sapiens
  CDR3 for alpha chain variable domain of TCR clone 358976 (TRAV29/DV5, TRAJ49)
CAATDTGNQFYF

SEQ ID NO: 717952 - protein, 16 aa, Homo sapiens
  CDR3 for beta chain variable domain of TCR clone 358976 (TRBV6-1, TRBJ2-1)
CASILRQGSSYNEQFF

SEQ ID NO: 717953 - protein, 11 aa, Homo sapiens
  CDR3 for alpha chain variable domain of TCR clone 358977 (TRAV12-2, TRAJ29)
CAVTLRSPLVF

SEQ ID NO: 717954 - protein, 15 aa, Homo sapiens
  CDR3 for beta chain variable domain of TCR clone 358977 (TRBV11-3, TRBJ2-3)
CASLKDGREGDTQYF

SEQ ID NO: 717955 - protein, 12 aa, Homo sapiens
  CDR3 for alpha chain variable domain of TCR clone 358978 (TRAV26-1, TRAJ43)
CIVRPRGDDIRF

SEQ ID NO: 717956 - protein, 16 aa, Homo sapiens
  CDR3 for beta chain variable domain of TCR clone 358978 (TRBV3-1, TRBJ2-1)
RASSQGGRRSFDEQFF

SEQ ID NO: 717957 - protein, 13 aa, Homo sapiens
  CDR3 for alpha chain variable domain of TCR clone 358979 (TRAV8-3, TRAJ21)
CAVGVYNFNKFYF

SEQ ID NO: 717958 - protein, 15 aa, Homo sapiens
  CDR3 for beta chain variable domain of TCR clone 358979 (TRBV4-1, TRBJ1-4)
CASSDTGGTNEKLFF

SEQ ID NO: 717959 - protein, 18 aa, Homo sapiens
  CDR3 for alpha chain variable domain of TCR clone 358980 (TRAV21, TRAJ53)
CAVNGGENSGGSNYKLTF

SEQ ID NO: 717960 - protein, 13 aa, Homo sapiens
  CDR3 for beta chain variable domain of TCR clone 358980 (TRBV9, TRBJ2-1)
CASSPSGGSEQFF

SEQ ID NO: 717961 - protein, 15 aa, Homo sapiens
  CDR3 for alpha chain variable domain of TCR clone 358981 (TRAV3, TRAJ5)
CAVRDLDTGRSALTF

SEQ ID NO: 717962 - protein, 13 aa, Homo sapiens
  CDR3 for beta chain variable domain of TCR clone 358981 (TRBV12-4, TRBJ2-7)
CASSPRETYEQYF

SEQ ID NO: 717963 - protein, 14 aa, Homo sapiens
  CDR3 for alpha chain variable domain of TCR clone 358982 (TRAV12-2, TRAJ13)
CAVKKTGGYQKVTF

SEQ ID NO: 717964 - protein, 15 aa, Homo sapiens
  CDR3 for beta chain variable domain of TCR clone 358982 (TRBV19, TRBJ2-1)
CASSIQAASYNEQFF

SEQ ID NO: 717965 - protein, 15 aa, Homo sapiens
  CDR3 for alpha chain variable domain of TCR clone 358983 (TRAV12-1, TRAJ4)
CVVNPFSGGYNKLIF

SEQ ID NO: 717966 - protein, 16 aa, Homo sapiens
  CDR3 for beta chain variable domain of TCR clone 358983 (TRBV5-1, TRBJ1-1)
CASSKTGTEVGTEAVF

SEQ ID NO: 717967 - protein, 13 aa, Homo sapiens
  CDR3 for alpha chain variable domain of TCR clone 358984 (TRAV3, TRAJ3)
CAVADSSASKIIF

SEQ ID NO: 717968 - protein, 16 aa, Homo sapiens
  CDR3 for beta chain variable domain of TCR clone 358984 (TRBV24-1, TRBJ2-3)
CATSDPGTGATDTQYF

SEQ ID NO: 717969 - protein, 14 aa, Homo sapiens
  CDR3 for alpha chain variable domain of TCR clone 358985 (TRAV17, TRAJ39)
CATDPARAGNMPTF

SEQ ID NO: 717970 - protein, 15 aa, Homo sapiens
  CDR3 for beta chain variable domain of TCR clone 358985 (TRBV13, TRBJ1-5)
CASSFGQGGVQPQHF

SEQ ID NO: 717971 - protein, 16 aa, Homo sapiens
  CDR3 for alpha chain variable domain of TCR clone 358986 (TRAV3, TRAJ37)
CAVRGKGSGNTGKLLF

SEQ ID NO: 717972 - protein, 13 aa, Homo sapiens
  CDR3 for beta chain variable domain of TCR clone 358986 (TRBV20-1, TRBJ1-1)
CSAGTVGNTEAFF

SEQ ID NO: 717973 - protein, 15 aa, Homo sapiens
  CDR3 for alpha chain variable domain of TCR clone 358987 (TRAV13-1, TRAJ52)
SYYNAGGTSYGKLTF

SEQ ID NO: 717974 - protein, 17 aa, Homo sapiens
  CDR3 for beta chain variable domain of TCR clone 358987 (TRBV7-8, TRBJ2-6)
CASSAGTGGAGANVLTF

SEQ ID NO: 717975 - protein, 15 aa, Homo sapiens
  CDR3 for alpha chain variable domain of TCR clone 358988 (TRAV2, TRAJ9)
CAVEDRGTGGFKTIF

SEQ ID NO: 717976 - protein, 14 aa, Homo sapiens
  CDR3 for beta chain variable domain of TCR clone 358988 (TRBV4-1, TRBJ2-7)
CASRLTSGSYEQYF

SEQ ID NO: 717977 - protein, 13 aa, Homo sapiens
  CDR3 for alpha chain variable domain of TCR clone 358989 (TRAV2, TRAJ40)
CAVVTSGTYKYIF

SEQ ID NO: 717978 - protein, 14 aa, Homo sapiens
  CDR3 for beta chain variable domain of TCR clone 358989 (TRBV4-1, TRBJ2-7)
CASSPVAGGDEQYF

SEQ ID NO: 717979 - protein, 16 aa, Homo sapiens
  CDR3 for alpha chain variable domain of TCR clone 358990 (TRAV3, TRAJ37)
CVVRVRGSGNTGKLIF

SEQ ID NO: 717980 - protein, 11 aa, Homo sapiens
  CDR3 for beta chain variable domain of TCR clone 358990 (TRBV11-2, TRBJ2-2)
CASSLPGELFF

SEQ ID NO: 717981 - protein, 13 aa, Homo sapiens
  CDR3 for alpha chain variable domain of TCR clone 358991 (TRAV9-2, TRAJ21)
CALSSYNFNKFYF

SEQ ID NO: 717982 - protein, 15 aa, Homo sapiens
  CDR3 for beta chain variable domain of TCR clone 358991 (TRBV13, TRBJ1-5)
CASSFGQGGVQPQHF

SEQ ID NO: 717983 - protein, 16 aa, Homo sapiens
  CDR3 for alpha chain variable domain of TCR clone 358992 (TRAV29/DV5, TRAJ39)
CAASLLFNNAGNMLNF

SEQ ID NO: 717984 - protein, 16 aa, Homo sapiens
  CDR3 for beta chain variable domain of TCR clone 358992 (TRBV19, TRBJ2-6)
CASSMSGLSGANILTF

SEQ ID NO: 717985 - protein, 14 aa, Homo sapiens
  CDR3 for alpha chain variable domain of TCR clone 358993 (TRAV2, TRAJ22)
CAVGRGGSARQLTF

SEQ ID NO: 717986 - protein, 13 aa, Homo sapiens
  CDR3 for beta chain variable domain of TCR clone 358993 (TRBV7-2, TRBJ2-2)
CASSLAVTGELFF

SEQ ID NO: 717987 - protein, 13 aa, Homo sapiens
  CDR3 for alpha chain variable domain of TCR clone 358994 (TRAV29/DV5, TRAJ9)
CSASETGGFKTIF

SEQ ID NO: 717988 - protein, 15 aa, Homo sapiens
  CDR3 for beta chain variable domain of TCR clone 358994 (TRBV19, TRBJ2-1)
CASSMGSGTGRQQFF

SEQ ID NO: 717989 - protein, 15 aa, Homo sapiens
  CDR3 for alpha chain variable domain of TCR clone 358995 (TRAV3, TRAJ22)
CAVRDRGGSARQLTF

SEQ ID NO: 717990 - protein, 18 aa, Homo sapiens
  CDR3 for beta chain variable domain of TCR clone 358995 (TRBV28, TRBJ2-1)
CASSSTSGRANSYNEQFV

SEQ ID NO: 717991 - protein, 17 aa, Homo sapiens
  CDR3 for alpha chain variable domain of TCR clone 358996 (TRAV3, TRAJ6)
CAVIDVPRAGGSYIPTF

SEQ ID NO: 717992 - protein, 14 aa, Homo sapiens
  CDR3 for beta chain variable domain of TCR clone 358996 (TRBV7-2, TRBJ2-7)
CASSPKTSFYEQYF

SEQ ID NO: 717993 - protein, 17 aa, Homo sapiens
  CDR3 for alpha chain variable domain of TCR clone 358997 (TRAV8-6, TRAJ58)
CAVSSWVGETSGSRLTF

SEQ ID NO: 717994 - protein, 16 aa, Homo sapiens
  CDR3 for beta chain variable domain of TCR clone 358997 (TRBV11-2, TRBJ2-3)
CASSSRTSGGAGTQYF

SEQ ID NO: 717995 - protein, 12 aa, Homo sapiens
  CDR3 for alpha chain variable domain of TCR clone 358998 (TRAV13-2, TRAJ23)
CAERHRGGKLIF

SEQ ID NO: 717996 - protein, 15 aa, Homo sapiens
  CDR3 for beta chain variable domain of TCR clone 358998 (TRBV27, TRBJ1-6)
CASRNYRVENSPLHF

SEQ ID NO: 717997 - protein, 11 aa, Homo sapiens
  CDR3 for alpha chain variable domain of TCR clone 358999 (TRAV12-1, TRAJ30)
CVVNGQDKIIF

SEQ ID NO: 717998 - protein, 15 aa, Homo sapiens
  CDR3 for beta chain variable domain of TCR clone 358999 (TRBV2, TRBJ2-1)
CASSELAGSYNEQFF

SEQ ID NO: 717999 - protein, 15 aa, Homo sapiens
  CDR3 for alpha chain variable domain of TCR clone 359000 (TRAV8-3, TRAJ27)
CAVGSSKTNAGKSTF

SEQ ID NO: 718000 - protein, 16 aa, Homo sapiens
  CDR3 for beta chain variable domain of TCR clone 359000 (TRBV7-2, TRBJ1-2)
CASSSNQDRRGHGYTF

SEQ ID NO: 718001 - protein, 14 aa, Homo sapiens
  CDR3 for alpha chain variable domain of TCR clone 359001 (TRAV13-1, TRAJ50)
CAARSKTSYDKVLF

SEQ ID NO: 718002 - protein, 17 aa, Homo sapiens
  CDR3 for beta chain variable domain of TCR clone 359001 (TRBV13, TRBJ2-3)
CASSLSRVAGGRNTQYF

SEQ ID NO: 718003 - protein, 18 aa, Homo sapiens
  CDR3 for alpha chain variable domain of TCR clone 359002 (TRAV12-2, )
CAVEDIQNPDPAVYQLRD

SEQ ID NO: 718004 - protein, 15 aa, Homo sapiens
  CDR3 for beta chain variable domain of TCR clone 359002 (TRBV2, TRBJ1-2)
CASSEIGGANYGYAF

SEQ ID NO: 718005 - protein, 13 aa, Homo sapiens
  CDR3 for alpha chain variable domain of TCR clone 359003 (TRAV8-3, TRAJ43)
CAVGPDNNNDMRF

SEQ ID NO: 718006 - protein, 17 aa, Homo sapiens
  CDR3 for beta chain variable domain of TCR clone 359003 (TRBV4-1, TRBJ2-3)
CASSQGYVSEGTDTQYF

SEQ ID NO: 718007 - protein, 13 aa, Homo sapiens
  CDR3 for alpha chain variable domain of TCR clone 359004 (TRAV12-3, TRAJ7)
CAMTPHGNNRLAF

SEQ ID NO: 718008 - protein, 16 aa, Homo sapiens
  CDR3 for beta chain variable domain of TCR clone 359004 (TRBV20-1, TRBJ1-4)
SSARPYGGELNEKLFF

SEQ ID NO: 718009 - protein, 12 aa, Homo sapiens
  CDR3 for alpha chain variable domain of TCR clone 359005 (TRAV13-2, TRAJ23)
CAERHRGGKLIF

SEQ ID NO: 718010 - protein, 15 aa, Homo sapiens
  CDR3 for beta chain variable domain of TCR clone 359005 (TRBV12-4, TRBJ1-6)
CASSLGGLGTSPLHF

SEQ ID NO: 718011 - protein, 14 aa, Homo sapiens
  CDR3 for alpha chain variable domain of TCR clone 359006 (TRAV12-3, TRAJ58)
CAMSTETRGSRLTF

SEQ ID NO: 718012 - protein, 15 aa, Homo sapiens
  CDR3 for beta chain variable domain of TCR clone 359006 (TRBV4-1, TRBJ1-4)
CASSDTGGTNEKLFF

SEQ ID NO: 718013 - protein, 10 aa, Homo sapiens
  CDR3 for alpha chain variable domain of TCR clone 359007 (TRAV9-2, TRAJ49)
CALTGNQFYF

SEQ ID NO: 718014 - protein, 16 aa, Homo sapiens
  CDR3 for beta chain variable domain of TCR clone 359007 (TRBV19, TRBJ2-3)
CASSPGAGSRTDAQYF

SEQ ID NO: 718015 - protein, 14 aa, Homo sapiens
  CDR3 for alpha chain variable domain of TCR clone 359008 (TRAV2, TRAJ9)
CAVEDRSGGFKTIF

SEQ ID NO: 718016 - protein, 15 aa, Homo sapiens
  CDR3 for beta chain variable domain of TCR clone 359008 (TRBV4-2, TRBJ2-3)
CASSPSRRPTDTQYF

SEQ ID NO: 718017 - protein, 10 aa, Homo sapiens
  CDR3 for alpha chain variable domain of TCR clone 359009 (TRAV23/DV6, TRAJ57)
CAASSTLSQG

SEQ ID NO: 718018 - protein, 14 aa, Homo sapiens
  CDR3 for beta chain variable domain of TCR clone 359009 (TRBV7-9, TRBJ2-1)
CASSDNSGYNEQFF

SEQ ID NO: 718019 - protein, 14 aa, Homo sapiens
  CDR3 for alpha chain variable domain of TCR clone 359010 (TRAV3, TRAJ9)
CAVRLNTGGFKTIF

SEQ ID NO: 718020 - protein, 16 aa, Homo sapiens
  CDR3 for beta chain variable domain of TCR clone 359010 (TRBV5-4, TRBJ2-3)
CASQQPGAGGADTQYF

SEQ ID NO: 718021 - protein, 17 aa, Homo sapiens
  CDR3 for alpha chain variable domain of TCR clone 359011 (TRAV23/DV6, TRAJ57)
CAASSTLSQGGAEKLVF

SEQ ID NO: 718022 - protein, 14 aa, Homo sapiens
  CDR3 for beta chain variable domain of TCR clone 359011 (TRBV25-1, TRBJ1-1)
CASTHLGGTTEAFF

SEQ ID NO: 718023 - protein, 15 aa, Homo sapiens
  CDR3 for alpha chain variable domain of TCR clone 359012 (TRAV21, TRAJ32)
CAVNSYGGATNKLIF

SEQ ID NO: 718024 - protein, 14 aa, Homo sapiens
  CDR3 for beta chain variable domain of TCR clone 359012 (TRBV4-2, TRBJ2-1)
CASGLDRAYNEQFF

SEQ ID NO: 718025 - protein, 12 aa, Homo sapiens
  CDR3 for alpha chain variable domain of TCR clone 359013 (TRAV12-2, TRAJ47)
CAVAEYGNKPVL

SEQ ID NO: 718026 - protein, 14 aa, Homo sapiens
  CDR3 for beta chain variable domain of TCR clone 359013 (TRBV20-1, TRBJ1-1)
CSAMGGTANTEAFF

SEQ ID NO: 718027 - protein, 13 aa, Homo sapiens
  CDR3 for alpha chain variable domain of TCR clone 359014 (TRAV13-1, TRAJ49)
CAAMLYTGNQFYF

SEQ ID NO: 718028 - protein, 12 aa, Homo sapiens
  CDR3 for beta chain variable domain of TCR clone 359014 (TRBV19, TRBJ2-1)
CASSMQDTEQFF

SEQ ID NO: 718029 - protein, 13 aa, Homo sapiens
  CDR3 for alpha chain variable domain of TCR clone 359015 (TRAV2, TRAJ40)
CSVVTSGTYKYIF

SEQ ID NO: 718030 - protein, 16 aa, Homo sapiens
  CDR3 for beta chain variable domain of TCR clone 359015 (TRBV2, TRBJ2-1)
CASSVGGSLSYNEQFF

SEQ ID NO: 718031 - protein, 14 aa, Homo sapiens
  CDR3 for alpha chain variable domain of TCR clone 359016 (TRAV21, TRAJ48)
CAVRSNFGNEKLTF

SEQ ID NO: 718032 - protein, 17 aa, Homo sapiens
  CDR3 for beta chain variable domain of TCR clone 359016 (TRBV13, TRBJ2-3)
CASSLSRVAGGRNTQYF

SEQ ID NO: 718033 - protein, 14 aa, Homo sapiens
  CDR3 for alpha chain variable domain of TCR clone 359017 (TRAV1-1, TRAJ27)
CAVIYNTNAGKSTF

SEQ ID NO: 718034 - protein, 16 aa, Homo sapiens
  CDR3 for beta chain variable domain of TCR clone 359017 (TRBV6-1, TRBJ2-5)
CASSETLDRGAETQYF

SEQ ID NO: 718035 - protein, 11 aa, Homo sapiens
  CDR3 for alpha chain variable domain of TCR clone 359018 (TRAV21, TRAJ34)
CAVTNTDKLIF

SEQ ID NO: 718036 - protein, 12 aa, Homo sapiens
  CDR3 for beta chain variable domain of TCR clone 359018 (TRBV7-8, TRBJ2-7)
CASSLGDSEQYF

SEQ ID NO: 718037 - protein, 15 aa, Homo sapiens
  CDR3 for alpha chain variable domain of TCR clone 359019 (TRAV30, TRAJ32)
CGTEILGGATIKLIF

SEQ ID NO: 718038 - protein, 13 aa, Homo sapiens
  CDR3 for beta chain variable domain of TCR clone 359019 (TRBV6-3, TRBJ2-7)
CASSFSGGYEQYF

SEQ ID NO: 718039 - protein, 14 aa, Homo sapiens
  CDR3 for alpha chain variable domain of TCR clone 359020 (TRAV13-1, TRAJ44)
CAAKATGTASKLTF

SEQ ID NO: 718040 - protein, 14 aa, Homo sapiens
  CDR3 for beta chain variable domain of TCR clone 359020 (TRBV7-2, TRBJ2-5)
CASSRRDGQETQYF

SEQ ID NO: 718041 - protein, 14 aa, Homo sapiens
  CDR3 for alpha chain variable domain of TCR clone 359021 (TRAV20, TRAJ22)
CAVQVSGSARQLTF

SEQ ID NO: 718042 - protein, 13 aa, Homo sapiens
  CDR3 for beta chain variable domain of TCR clone 359021 (TRBV20-1, TRBJ2-5)
CSAREGGKEAQYF

SEQ ID NO: 718043 - protein, 11 aa, Homo sapiens
  CDR3 for alpha chain variable domain of TCR clone 359022 (TRAV12-3, TRAJ43)
CAMSVSNELRF

SEQ ID NO: 718044 - protein, 13 aa, Homo sapiens
  CDR3 for beta chain variable domain of TCR clone 359022 (TRBV20-1, TRBJ1-1)
CSAPLGGGTEAFF

SEQ ID NO: 718045 - protein, 11 aa, Homo sapiens
  CDR3 for alpha chain variable domain of TCR clone 359023 (TRAV20, TRAJ23)
CACNQGGKLIF

SEQ ID NO: 718046 - protein, 14 aa, Homo sapiens
  CDR3 for beta chain variable domain of TCR clone 359023 (TRBV7-9, TRBJ2-1)
CASSPRDSLYEQFF

SEQ ID NO: 718047 - protein, 14 aa, Homo sapiens
  CDR3 for alpha chain variable domain of TCR clone 359024 (TRAV1-2, TRAJ16)
CAVNRFSDGQKLLF

SEQ ID NO: 718048 - protein, 14 aa, Homo sapiens
  CDR3 for beta chain variable domain of TCR clone 359024 (TRBV7-9, TRBJ2-3)
CARSLEDGTDTQYF

SEQ ID NO: 718049 - protein, 14 aa, Homo sapiens
  CDR3 for alpha chain variable domain of TCR clone 359025 (TRAV1-2, TRAJ16)
CSVNRFSDGQKLLF

SEQ ID NO: 718050 - protein, 15 aa, Homo sapiens
  CDR3 for beta chain variable domain of TCR clone 359025 (TRBV28, TRBJ1-3)
CASGATGNSGNTIYF

SEQ ID NO: 718051 - protein, 13 aa, Homo sapiens
  CDR3 for alpha chain variable domain of TCR clone 359026 (TRAV13-2, TRAJ48)
CAEMDFGNEKLTF

SEQ ID NO: 718052 - protein, 15 aa, Homo sapiens
  CDR3 for beta chain variable domain of TCR clone 359026 (TRBV7-9, TRBJ1-6)
CASSSPGRGHSPLHF

SEQ ID NO: 718053 - protein, 13 aa, Homo sapiens
  CDR3 for alpha chain variable domain of TCR clone 359027 (TRAV8-3, TRAJ36)
CAVGATGANNLFF

SEQ ID NO: 718054 - protein, 16 aa, Homo sapiens
  CDR3 for beta chain variable domain of TCR clone 359027 (TRBV15, TRBJ2-5)
CATSRYLEAAQETQYF

SEQ ID NO: 718055 - protein, 15 aa, Homo sapiens
  CDR3 for alpha chain variable domain of TCR clone 359028 (TRAV8-2, TRAJ15)
CVVTMGNQAGTALIF

SEQ ID NO: 718056 - protein, 16 aa, Homo sapiens
  CDR3 for beta chain variable domain of TCR clone 359028 (TRBV7-3, TRBJ2-2)
CASSLKRGTLSGELFF

SEQ ID NO: 718057 - protein, 14 aa, Homo sapiens
  CDR3 for alpha chain variable domain of TCR clone 359029 (TRAV17, TRAJ11)
CATEGESGYSTLTF

SEQ ID NO: 718058 - protein, 15 aa, Homo sapiens
  CDR3 for beta chain variable domain of TCR clone 359029 (TRBV6-6, TRBJ2-7)
CASSYSYGGSYEQYF

SEQ ID NO: 718059 - protein, 12 aa, Homo sapiens
  CDR3 for alpha chain variable domain of TCR clone 359030 (TRAV17, TRAJ49)
CATVTTGNQFYF

SEQ ID NO: 718060 - protein, 16 aa, Homo sapiens
  CDR3 for beta chain variable domain of TCR clone 359030 (TRBV5-1, TRBJ2-2)
CASRNTGEANTGELFF

SEQ ID NO: 718061 - protein, 17 aa, Homo sapiens
  CDR3 for alpha chain variable domain of TCR clone 359031 (TRAV12-2, TRAJ42)
CAVNILNYGGSQGNPIF

SEQ ID NO: 718062 - protein, 13 aa, Homo sapiens
  CDR3 for beta chain variable domain of TCR clone 359031 (TRBV3-1, TRBJ1-5)
CASSQDLDQPQHF

SEQ ID NO: 718063 - protein, 16 aa, Homo sapiens
  CDR3 for alpha chain variable domain of TCR clone 359032 (TRAV1-2, TRAJ10)
CAVRGVLTGGGNKLTF

SEQ ID NO: 718064 - protein, 19 aa, Homo sapiens
  CDR3 for beta chain variable domain of TCR clone 359032 (TRBV6-5, TRBJ2-1)
CASRSGGLAGESSYNEQFF

SEQ ID NO: 718065 - protein, 17 aa, Homo sapiens
  CDR3 for alpha chain variable domain of TCR clone 359033 (TRAV3, TRAJ6)
CAVRDGPRVGGSYIPTF

SEQ ID NO: 718066 - protein, 14 aa, Homo sapiens
  CDR3 for beta chain variable domain of TCR clone 359033 (TRBV7-3, TRBJ2-1)
CASSTSGGWDEQFF

SEQ ID NO: 718067 - protein, 14 aa, Homo sapiens
  CDR3 for alpha chain variable domain of TCR clone 359034 (TRAV8-3, TRAJ44)
CAVGNTVTASKLTF

SEQ ID NO: 718068 - protein, 15 aa, Homo sapiens
  CDR3 for beta chain variable domain of TCR clone 359034 (TRBV28, TRBJ2-7)
CASSFRGQGRYEQYF

SEQ ID NO: 718069 - protein, 15 aa, Homo sapiens
  CDR3 for alpha chain variable domain of TCR clone 359035 (TRAV8-3, TRAJ45)
CASSYSGGGADGLTF

SEQ ID NO: 718070 - protein, 13 aa, Homo sapiens
  CDR3 for beta chain variable domain of TCR clone 359035 (TRBV20-1, TRBJ1-1)
CSAFDKETTAAFF

SEQ ID NO: 718071 - protein, 16 aa, Homo sapiens
  CDR3 for alpha chain variable domain of TCR clone 359036 (TRAV21, TRAJ37)
CAVRTAGSSNTGKLLF

SEQ ID NO: 718072 - protein, 13 aa, Homo sapiens
  CDR3 for beta chain variable domain of TCR clone 359036 (TRBV7-9, TRBJ2-5)
RASLPSGRETQYF

SEQ ID NO: 718073 - protein, 14 aa, Homo sapiens
  CDR3 for alpha chain variable domain of TCR clone 359037 (TRAV12-2, TRAJ17)
CAVLFKAAGNKLTF

SEQ ID NO: 718074 - protein, 15 aa, Homo sapiens
  CDR3 for beta chain variable domain of TCR clone 359037 (TRBV18, TRBJ2-1)
CASLPDRGRDNEQFF

SEQ ID NO: 718075 - protein, 14 aa, Homo sapiens
  CDR3 for alpha chain variable domain of TCR clone 359038 (TRAV17, TRAJ42)
CATSPPGSQGNLIF

SEQ ID NO: 718076 - protein, 14 aa, Homo sapiens
  CDR3 for beta chain variable domain of TCR clone 359038 (TRBV7-3, TRBJ2-3)
CASSSTGVADTQYF

SEQ ID NO: 718077 - protein, 14 aa, Homo sapiens
  CDR3 for alpha chain variable domain of TCR clone 359039 (TRAV1-2, TRAJ16)
CAINRFSDGQKLLV

SEQ ID NO: 718078 - protein, 15 aa, Homo sapiens
  CDR3 for beta chain variable domain of TCR clone 359039 (TRBV9, TRBJ1-6)
CASSVAGTGDSPLHF

SEQ ID NO: 718079 - protein, 12 aa, Homo sapiens
  CDR3 for alpha chain variable domain of TCR clone 359040 (TRAV2, TRAJ9)
CAVGAGGFKTIF

SEQ ID NO: 718080 - protein, 13 aa, Homo sapiens
  CDR3 for beta chain variable domain of TCR clone 359040 (TRBV12-4, TRBJ2-7)
CASSFVPTAEQYF

SEQ ID NO: 718081 - protein, 17 aa, Homo sapiens
  CDR3 for alpha chain variable domain of TCR clone 359041 (TRAV3, TRAJ6)
CAVRDGPRAGGSYRPTF

SEQ ID NO: 718082 - protein, 13 aa, Homo sapiens
  CDR3 for beta chain variable domain of TCR clone 359041 (TRBV7-9, TRBJ1-2)
CASSLKQNYGYTF

SEQ ID NO: 718083 - protein, 15 aa, Homo sapiens
  CDR3 for alpha chain variable domain of TCR clone 359042 (TRAV12-2, TRAJ53)
CAVNGGGGSNYKLTF

SEQ ID NO: 718084 - protein, 17 aa, Homo sapiens
  CDR3 for beta chain variable domain of TCR clone 359042 (TRBV7-3, TRBJ2-3)
CASSLMKRMRVADTQYF

SEQ ID NO: 718085 - protein, 13 aa, Homo sapiens
  CDR3 for alpha chain variable domain of TCR clone 359043 (TRAV8-6, TRAJ21)
CAVSPSSLNKFYF

SEQ ID NO: 718086 - protein, 16 aa, Homo sapiens
  CDR3 for beta chain variable domain of TCR clone 359043 (TRBV19, TRBJ2-1)
CASSKAGPSSYNEQFF

SEQ ID NO: 718087 - protein, 16 aa, Homo sapiens
  CDR3 for alpha chain variable domain of TCR clone 359044 (TRAV3, TRAJ6)
CAVRDGPRAGSYIPTF

SEQ ID NO: 718088 - protein, 15 aa, Homo sapiens
  CDR3 for beta chain variable domain of TCR clone 359044 (TRBV29-1, TRBJ2-5)
CSVEGLAVNQETQYF

SEQ ID NO: 718089 - protein, 14 aa, Homo sapiens
  CDR3 for alpha chain variable domain of TCR clone 359045 (TRAV9-2, TRAJ39)
CALYIYNAGNMLTF

SEQ ID NO: 718090 - protein, 16 aa, Homo sapiens
  CDR3 for beta chain variable domain of TCR clone 359045 (TRBV7-2, TRBJ2-6)
CAILSGVSWGANVLTF

SEQ ID NO: 718091 - protein, 16 aa, Homo sapiens
  CDR3 for alpha chain variable domain of TCR clone 359046 (TRAV12-3, TRAJ50)
CAMGDPMKTSYDKVIF

SEQ ID NO: 718092 - protein, 13 aa, Homo sapiens
  CDR3 for beta chain variable domain of TCR clone 359046 (TRBV4-1, TRBJ2-3)
CASSLDFTDTQYF

SEQ ID NO: 718093 - protein, 14 aa, Homo sapiens
  CDR3 for alpha chain variable domain of TCR clone 359047 (TRAV8-4, TRAJ23)
CAVSGGNQGGKLIF

SEQ ID NO: 718094 - protein, 14 aa, Homo sapiens
  CDR3 for beta chain variable domain of TCR clone 359047 (TRBV25-1, TRBJ1-1)
CASTHLGGNTEAFF

SEQ ID NO: 718095 - protein, 14 aa, Homo sapiens
  CDR3 for alpha chain variable domain of TCR clone 359048 (TRAV17, TRAJ57)
CATDPQGGSEKLVF

SEQ ID NO: 718096 - protein, 14 aa, Homo sapiens
  CDR3 for beta chain variable domain of TCR clone 359048 (TRBV6-1, TRBJ2-1)
CASAKDGFYNEQFF

SEQ ID NO: 718097 - protein, 13 aa, Homo sapiens
  CDR3 for alpha chain variable domain of TCR clone 359049 (TRAV35, TRAJ21)
CAGQLSNFNKFYF

SEQ ID NO: 718098 - protein, 11 aa, Homo sapiens
  CDR3 for beta chain variable domain of TCR clone 359049 (TRBV7-6, TRBJ2-5)
CPSSSQETQYF

SEQ ID NO: 718099 - protein, 19 aa, Homo sapiens
  CDR3 for alpha chain variable domain of TCR clone 359050 (TRAV13-1, TRAJ52)
CAASPYQNAGGTSYGKLTF

SEQ ID NO: 718100 - protein, 15 aa, Homo sapiens
  CDR3 for beta chain variable domain of TCR clone 359050 (TRBV9, TRBJ1-6)
CASSVAGTGDSPLLF

SEQ ID NO: 718101 - protein, 11 aa, Homo sapiens
  CDR3 for alpha chain variable domain of TCR clone 359051 (TRAV13-2, TRAJ15)
CSHQAGTALIF

SEQ ID NO: 718102 - protein, 15 aa, Homo sapiens
  CDR3 for beta chain variable domain of TCR clone 359051 (TRBV20-1, TRBJ1-5)
CSALWGWGVGVAWFF

SEQ ID NO: 718103 - protein, 15 aa, Homo sapiens
  CDR3 for alpha chain variable domain of TCR clone 359052 (TRAV21, TRAJ24)
CAARSSTDSWGKLQC

SEQ ID NO: 718104 - protein, 15 aa, Homo sapiens
  CDR3 for beta chain variable domain of TCR clone 359052 (TRBV5-1, TRBJ2-1)
CASSPPRAPYNEQFF

SEQ ID NO: 718105 - protein, 12 aa, Homo sapiens
  CDR3 for alpha chain variable domain of TCR clone 359053 (TRAV20, TRAJ56)
CAVTGANSKLTF

SEQ ID NO: 718106 - protein, 14 aa, Homo sapiens
  CDR3 for beta chain variable domain of TCR clone 359053 (TRBV7-2, TRBJ1-2)
CASSQTGSTYGYTF

SEQ ID NO: 718107 - protein, 13 aa, Homo sapiens
  CDR3 for alpha chain variable domain of TCR clone 359054 (TRAV21, TRAJ44)
CAAYTGTASKLTF

SEQ ID NO: 718108 - protein, 13 aa, Homo sapiens
  CDR3 for beta chain variable domain of TCR clone 359054 (TRBV7-3, TRBJ1-1)
CASSQDWGAEAFF

SEQ ID NO: 718109 - protein, 13 aa, Homo sapiens
  CDR3 for alpha chain variable domain of TCR clone 359055 (TRAV2, TRAJ12)
CAVGADSSYKLIF

SEQ ID NO: 718110 - protein, 15 aa, Homo sapiens
  CDR3 for beta chain variable domain of TCR clone 359055 (TRBV11-3, TRBJ2-3)
CASLKDGREGDTQYF

SEQ ID NO: 718111 - protein, 10 aa, Homo sapiens
  CDR3 for alpha chain variable domain of TCR clone 359056 (TRAV23/DV6, TRAJ57)
CAASSTLSQG

SEQ ID NO: 718112 - protein, 14 aa, Homo sapiens
  CDR3 for beta chain variable domain of TCR clone 359056 (TRBV7-8, TRBJ2-5)
CASSARGGQETQYF

SEQ ID NO: 718113 - protein, 21 aa, Homo sapiens
  CDR3 for alpha chain variable domain of TCR clone 359057 (TRAV9-2, )
CALIQIGDIQNPDPAVYQLRD

SEQ ID NO: 718114 - protein, 14 aa, Homo sapiens
  CDR3 for beta chain variable domain of TCR clone 359057 (TRBV7-3, TRBJ1-1)
CASSLKGGNTEAFF

SEQ ID NO: 718115 - protein, 14 aa, Homo sapiens
  CDR3 for alpha chain variable domain of TCR clone 359058 (TRAV8-3, TRAJ4)
CAVGASGGYNKLSF

SEQ ID NO: 718116 - protein, 13 aa, Homo sapiens
  CDR3 for beta chain variable domain of TCR clone 359058 (TRBV27, TRBJ2-7)
CASGRGGAYEQYF

SEQ ID NO: 718117 - protein, 11 aa, Homo sapiens
  CDR3 for alpha chain variable domain of TCR clone 359059 (TRAV17, TRAJ39)
CASGAGNMLTF

SEQ ID NO: 718118 - protein, 16 aa, Homo sapiens
  CDR3 for beta chain variable domain of TCR clone 359059 (TRBV5-1, TRBJ2-1)
CASSFGVSGSYNEQFF

SEQ ID NO: 718119 - protein, 13 aa, Homo sapiens
  CDR3 for alpha chain variable domain of TCR clone 359060 (TRAV3, TRAJ20)
CAVRDGGDYKLSF

SEQ ID NO: 718120 - protein, 16 aa, Homo sapiens
  CDR3 for beta chain variable domain of TCR clone 359060 (TRBV4-1, TRBJ2-5)
CASSQTSGGPLETLYF

SEQ ID NO: 718121 - protein, 12 aa, Homo sapiens
  CDR3 for alpha chain variable domain of TCR clone 359061 (TRAV27, TRAJ13)
CAGVRGYQKVTF

SEQ ID NO: 718122 - protein, 16 aa, Homo sapiens
  CDR3 for beta chain variable domain of TCR clone 359061 (TRBV28, TRBJ2-1)
CASSSSYSGSHNEQFF

SEQ ID NO: 718123 - protein, 14 aa, Homo sapiens
  CDR3 for alpha chain variable domain of TCR clone 359062 (TRAV13-1, TRAJ35)
CAASKGGFGNVLHC

SEQ ID NO: 718124 - protein, 15 aa, Homo sapiens
  CDR3 for beta chain variable domain of TCR clone 359062 (TRBV2, TRBJ2-7)
CASTILGSGATEQYF

SEQ ID NO: 718125 - protein, 15 aa, Homo sapiens
  CDR3 for alpha chain variable domain of TCR clone 359063 (TRAV26-2, TRAJ28)
CILVESGSGSYQLTF

SEQ ID NO: 718126 - protein, 11 aa, Homo sapiens
  CDR3 for beta chain variable domain of TCR clone 359063 (TRBV25-1, TRBJ2-7)
CASSTSYEQYF

SEQ ID NO: 718127 - protein, 17 aa, Homo sapiens
  CDR3 for alpha chain variable domain of TCR clone 359064 (TRAV12-2, TRAJ6)
CAPQGPPRAGGSYIPTF

SEQ ID NO: 718128 - protein, 16 aa, Homo sapiens
  CDR3 for beta chain variable domain of TCR clone 359064 (TRBV19, TRBJ2-2)
CDSSTARASNTGELFF

SEQ ID NO: 718129 - protein, 15 aa, Homo sapiens
  CDR3 for alpha chain variable domain of TCR clone 359065 (TRAV8-3, TRAJ45)
CASSYSGGGADGLTF

SEQ ID NO: 718130 - protein, 14 aa, Homo sapiens
  CDR3 for beta chain variable domain of TCR clone 359065 (TRBV12-5, TRBJ2-7)
CASGRTGNSYEQYF

SEQ ID NO: 718131 - protein, 16 aa, Homo sapiens
  CDR3 for alpha chain variable domain of TCR clone 359066 (TRAV3, TRAJ27)
CAVRDPKGTNAGKSTF

SEQ ID NO: 718132 - protein, 17 aa, Homo sapiens
  CDR3 for beta chain variable domain of TCR clone 359066 (TRBV4-1, TRBJ2-7)
CASNQGRGLQTSYEQYF

SEQ ID NO: 718133 - protein, 16 aa, Homo sapiens
  CDR3 for alpha chain variable domain of TCR clone 359067 (TRAV2, TRAJ4)
CAVEDRFSCGYNKMIF

SEQ ID NO: 718134 - protein, 13 aa, Homo sapiens
  CDR3 for beta chain variable domain of TCR clone 359067 (TRBV7-7, TRBJ2-5)
CASSRSGQETQYF

SEQ ID NO: 718135 - protein, 11 aa, Homo sapiens
  CDR3 for alpha chain variable domain of TCR clone 359068 (TRAV3, TRAJ21)
CAVGNFNKFYF

SEQ ID NO: 718136 - protein, 13 aa, Homo sapiens
  CDR3 for beta chain variable domain of TCR clone 359068 (TRBV7-9, TRBJ1-2)
CASSLKQNYGYSF

SEQ ID NO: 718137 - protein, 10 aa, Homo sapiens
  CDR3 for alpha chain variable domain of TCR clone 359069 (TRAV25, TRAJ52)
CAGRPGGTSY

SEQ ID NO: 718138 - protein, 17 aa, Homo sapiens
  CDR3 for beta chain variable domain of TCR clone 359069 (TRBV7-8, TRBJ2-6)
CASSAGTGGAGANVLTF

SEQ ID NO: 718139 - protein, 14 aa, Homo sapiens
  CDR3 for alpha chain variable domain of TCR clone 359070 (TRAV13-1, TRAJ35)
CAASKGGFGNVLHC

SEQ ID NO: 718140 - protein, 15 aa, Homo sapiens
  CDR3 for beta chain variable domain of TCR clone 359070 (TRBV12-4, TRBJ1-2)
CASRLGVAGNYGYTF

SEQ ID NO: 718141 - protein, 12 aa, Homo sapiens
  CDR3 for alpha chain variable domain of TCR clone 359071 (TRAV12-3, TRAJ17)
CAMTLAGNKLTF

SEQ ID NO: 718142 - protein, 13 aa, Homo sapiens
  CDR3 for beta chain variable domain of TCR clone 359071 (TRBV9, TRBJ2-2)
CASSPRPAGELFF

SEQ ID NO: 718143 - protein, 20 aa, Homo sapiens
  CDR3 for alpha chain variable domain of TCR clone 359072 (TRAV26-1, TRAJ42)
CCVLLHRQTYYGGSQGNLIF

SEQ ID NO: 718144 - protein, 18 aa, Homo sapiens
  CDR3 for beta chain variable domain of TCR clone 359072 (TRBV20-1, TRBJ2-6)
CSAETTPTHGSGANVLTF

SEQ ID NO: 718145 - protein, 13 aa, Homo sapiens
  CDR3 for alpha chain variable domain of TCR clone 359073 (TRAV9-2, TRAJ53)
CALRGGSNYKLTF

SEQ ID NO: 718146 - protein, 15 aa, Homo sapiens
  CDR3 for beta chain variable domain of TCR clone 359073 (TRBV9, TRBJ1-6)
CASSVAGTGDSPLHF

SEQ ID NO: 718147 - protein, 16 aa, Homo sapiens
  CDR3 for alpha chain variable domain of TCR clone 359074 (TRAV16, TRAJ52)
CALSGVGGTSYGKLTF

SEQ ID NO: 718148 - protein, 15 aa, Homo sapiens
  CDR3 for beta chain variable domain of TCR clone 359074 (TRBV11-3, TRBJ2-3)
CASLKDGREGDTQYF

SEQ ID NO: 718149 - protein, 11 aa, Homo sapiens
  CDR3 for alpha chain variable domain of TCR clone 359075 (TRAV13-1, TRAJ6)
CATLGSYIPTF

SEQ ID NO: 718150 - protein, 16 aa, Homo sapiens
  CDR3 for beta chain variable domain of TCR clone 359075 (TRBV5-1, TRBJ1-1)
CASSLGVMGARTEAFF

SEQ ID NO: 718151 - protein, 12 aa, Homo sapiens
  CDR3 for alpha chain variable domain of TCR clone 359076 (TRAV3, TRAJ20)
CAVRDPDYNLSF

SEQ ID NO: 718152 - protein, 14 aa, Homo sapiens
  CDR3 for beta chain variable domain of TCR clone 359076 (TRBV11-2, TRBJ2-7)
CASSSTGEGYEQYF

SEQ ID NO: 718153 - protein, 13 aa, Homo sapiens
  CDR3 for alpha chain variable domain of TCR clone 359077 (TRAV12-3, TRAJ7)
CAMSASGNNRLAF

SEQ ID NO: 718154 - protein, 14 aa, Homo sapiens
  CDR3 for beta chain variable domain of TCR clone 359077 (TRBV2, TRBJ2-1)
CASSEALDGNEQFF

SEQ ID NO: 718155 - protein, 14 aa, Homo sapiens
  CDR3 for alpha chain variable domain of TCR clone 359078 (TRAV1-2, TRAJ8)
CAVREGTGFQKLVF

SEQ ID NO: 718156 - protein, 15 aa, Homo sapiens
  CDR3 for beta chain variable domain of TCR clone 359078 (TRBV7-9, TRBJ1-4)
CASSARTGGNEKLFF

SEQ ID NO: 718157 - protein, 15 aa, Homo sapiens
  CDR3 for alpha chain variable domain of TCR clone 359079 (TRAV8-3, TRAJ45)
CASSYSGGGADGLTL

SEQ ID NO: 718158 - protein, 12 aa, Homo sapiens
  CDR3 for beta chain variable domain of TCR clone 359079 (TRBV6-3, TRBJ2-7)
CASSLTPYEQYV

SEQ ID NO: 718159 - protein, 14 aa, Homo sapiens
  CDR3 for alpha chain variable domain of TCR clone 359080 (TRAV1-2, TRAJ16)
CAVNRVSDGQKLLF

SEQ ID NO: 718160 - protein, 14 aa, Homo sapiens
  CDR3 for beta chain variable domain of TCR clone 359080 (TRBV20-1, TRBJ1-1)
CSAQTRIGGTEAFF

SEQ ID NO: 718161 - protein, 13 aa, Homo sapiens
  CDR3 for alpha chain variable domain of TCR clone 359081 (TRAV1-1, TRAJ11)
CAVLNSGYSTLTC

SEQ ID NO: 718162 - protein, 17 aa, Homo sapiens
  CDR3 for beta chain variable domain of TCR clone 359081 (TRBV6-3, TRBJ2-2)
CASSYAGQGINTGELFF

SEQ ID NO: 718163 - protein, 16 aa, Homo sapiens
  CDR3 for alpha chain variable domain of TCR clone 359082 (TRAV16, TRAJ4)
CALSRMFSGGYNKLIF

SEQ ID NO: 718164 - protein, 11 aa, Homo sapiens
  CDR3 for beta chain variable domain of TCR clone 359082 (TRBV19, TRBJ1-2)
CASSISSGYTF

SEQ ID NO: 718165 - protein, 16 aa, Homo sapiens
  CDR3 for alpha chain variable domain of TCR clone 359083 (TRAV16, TRAJ52)
CALSAAGGTSYGKLTF

SEQ ID NO: 718166 - protein, 19 aa, Homo sapiens
  CDR3 for beta chain variable domain of TCR clone 359083 (TRBV19, TRBJ2-5)
CASSIGQVTDFFLGETQCF

SEQ ID NO: 718167 - protein, 14 aa, Homo sapiens
  CDR3 for alpha chain variable domain of TCR clone 359084 (TRAV1-2, TRAJ16)
CAVNRFSDGQKMLF

SEQ ID NO: 718168 - protein, 11 aa, Homo sapiens
  CDR3 for beta chain variable domain of TCR clone 359084 (TRBV7-8, TRBJ2-7)
CASSLSLEQYF

SEQ ID NO: 718169 - protein, 17 aa, Homo sapiens
  CDR3 for alpha chain variable domain of TCR clone 359085 (TRAV3, TRAJ42)
CALRGRDYGGSQGNPIF

SEQ ID NO: 718170 - protein, 15 aa, Homo sapiens
  CDR3 for beta chain variable domain of TCR clone 359085 (TRBV6-6, TRBJ2-7)
CASSYSYGGSYEQYF

SEQ ID NO: 718171 - protein, 12 aa, Homo sapiens
  CDR3 for alpha chain variable domain of TCR clone 359086 (TRAV26-1, TRAJ43)
CIVRGNNNDMRL

SEQ ID NO: 718172 - protein, 13 aa, Homo sapiens
  CDR3 for beta chain variable domain of TCR clone 359086 (TRBV20-1, TRBJ2-3)
CSAIYPGADTQYF

SEQ ID NO: 718173 - protein, 11 aa, Homo sapiens
  CDR3 for alpha chain variable domain of TCR clone 359087 (TRAV17, TRAJ9)
CATTGGFKNIF

SEQ ID NO: 718174 - protein, 14 aa, Homo sapiens
  CDR3 for beta chain variable domain of TCR clone 359087 (TRBV7-9, TRBJ2-2)
CASSGLADTGELFF

SEQ ID NO: 718175 - protein, 18 aa, Homo sapiens
  CDR3 for alpha chain variable domain of TCR clone 359088 (TRAV21, TRAJ52)
CAVRPSPAGGTSYGQLTF

SEQ ID NO: 718176 - protein, 17 aa, Homo sapiens
  CDR3 for beta chain variable domain of TCR clone 359088 (TRBV13, TRBJ2-3)
CARSLSRVAGGRNTQYF

SEQ ID NO: 718177 - protein, 11 aa, Homo sapiens
  CDR3 for alpha chain variable domain of TCR clone 359089 (TRAV8-4, TRAJ20)
CAVTNVLTTTS

SEQ ID NO: 718178 - protein, 14 aa, Homo sapiens
  CDR3 for beta chain variable domain of TCR clone 359089 (TRBV6-1, TRBJ1-3)
CASVQGGGGNTIYF

SEQ ID NO: 718179 - protein, 15 aa, Homo sapiens
  CDR3 for alpha chain variable domain of TCR clone 359090 (TRAV12-1, TRAJ44)
CVVFVNTGTASKLTF

SEQ ID NO: 718180 - protein, 14 aa, Homo sapiens
  CDR3 for beta chain variable domain of TCR clone 359090 (TRBV13, TRBJ2-3)
CASSSGSPTDTQYF

SEQ ID NO: 718181 - protein, 10 aa, Homo sapiens
  CDR3 for alpha chain variable domain of TCR clone 359091 (TRAV26-2, TRAJ49)
RLNTGNQFYF

SEQ ID NO: 718182 - protein, 12 aa, Homo sapiens
  CDR3 for beta chain variable domain of TCR clone 359091 (TRBV11-2, TRBJ2-2)
CASSLGGGELFF

SEQ ID NO: 718183 - protein, 14 aa, Homo sapiens
  CDR3 for alpha chain variable domain of TCR clone 359092 (TRAV35, TRAJ22)
CGGLRPGYARQLTF

SEQ ID NO: 718184 - protein, 15 aa, Homo sapiens
  CDR3 for beta chain variable domain of TCR clone 359092 (TRBV12-4, TRBJ2-5)
CASSPPTGLQETQYF

SEQ ID NO: 718185 - protein, 11 aa, Homo sapiens
  CDR3 for alpha chain variable domain of TCR clone 359093 (TRAV17, TRAJ9)
CATTGGFKTIF

SEQ ID NO: 718186 - protein, 15 aa, Homo sapiens
  CDR3 for beta chain variable domain of TCR clone 359093 (TRBV27, TRBJ2-1)
CASSNGGGSSNEQFF

SEQ ID NO: 718187 - protein, 18 aa, Homo sapiens
  CDR3 for alpha chain variable domain of TCR clone 359094 (TRAV13-1, TRAJ52)
CAAKNPNAGGTSYEKLTF

SEQ ID NO: 718188 - protein, 14 aa, Homo sapiens
  CDR3 for beta chain variable domain of TCR clone 359094 (TRBV2, TRBJ2-7)
CASSLTSGGYEQYF

SEQ ID NO: 718189 - protein, 14 aa, Homo sapiens
  CDR3 for alpha chain variable domain of TCR clone 359095 (TRAV1-2, TRAJ16)
CAVNRFSDGQKLLF

SEQ ID NO: 718190 - protein, 16 aa, Homo sapiens
  CDR3 for beta chain variable domain of TCR clone 359095 (TRBV19, TRBJ2-3)
CASSTEWDRGTDTQYF

SEQ ID NO: 718191 - protein, 10 aa, Homo sapiens
  CDR3 for alpha chain variable domain of TCR clone 359096 (TRAV5, TRAJ34)
CAEDTDKLIF

SEQ ID NO: 718192 - protein, 12 aa, Homo sapiens
  CDR3 for beta chain variable domain of TCR clone 359096 (TRBV7-9, TRBJ1-5)
CASSPQGQPQHF

SEQ ID NO: 718193 - protein, 16 aa, Homo sapiens
  CDR3 for alpha chain variable domain of TCR clone 359097 (TRAV38-1, TRAJ53)
CACPLNSGGSNYKLTF

SEQ ID NO: 718194 - protein, 18 aa, Homo sapiens
  CDR3 for beta chain variable domain of TCR clone 359097 (TRBV20-1, TRBJ2-1)
CSARGDRGPLGIQNEQFF

SEQ ID NO: 718195 - protein, 16 aa, Homo sapiens
  CDR3 for alpha chain variable domain of TCR clone 359098 (TRAV12-2, TRAJ18)
CAVPTDRGSTLGRLYF

SEQ ID NO: 718196 - protein, 13 aa, Homo sapiens
  CDR3 for beta chain variable domain of TCR clone 359098 (TRBV19, TRBJ2-3)
CATWDKITDTQYF

SEQ ID NO: 718197 - protein, 15 aa, Homo sapiens
  CDR3 for alpha chain variable domain of TCR clone 359099 (TRAV21, TRAJ24)
CASRSSTGSWGKLQF

SEQ ID NO: 718198 - protein, 13 aa, Homo sapiens
  CDR3 for beta chain variable domain of TCR clone 359099 (TRBV10-3, TRBJ2-7)
CASKLAVNYEQYF

SEQ ID NO: 718199 - protein, 12 aa, Homo sapiens
  CDR3 for alpha chain variable domain of TCR clone 359100 (TRAV12-2, TRAJ16)
CAVNLDGQKLLF

SEQ ID NO: 718200 - protein, 14 aa, Homo sapiens
  CDR3 for beta chain variable domain of TCR clone 359100 (TRBV5-7, TRBJ2-7)
CASSVQGASSTSGR

SEQ ID NO: 718201 - protein, 10 aa, Homo sapiens
  CDR3 for alpha chain variable domain of TCR clone 359101 (TRAV1-2, TRAJ20)
CALNDYKLSF

SEQ ID NO: 718202 - protein, 14 aa, Homo sapiens
  CDR3 for beta chain variable domain of TCR clone 359101 (TRBV19, TRBJ2-1)
CASPTFVLSGKQFF

SEQ ID NO: 718203 - protein, 13 aa, Homo sapiens
  CDR3 for alpha chain variable domain of TCR clone 359102 (TRAV12-2, TRAJ47)
CAVFMEYGNKLVF

SEQ ID NO: 718204 - protein, 14 aa, Homo sapiens
  CDR3 for beta chain variable domain of TCR clone 359102 (TRBV4-2, TRBJ2-1)
CASGLDRAYNEQFF

SEQ ID NO: 718205 - protein, 14 aa, Homo sapiens
  CDR3 for alpha chain variable domain of TCR clone 359103 (TRAV8-6, TRAJ52)
CAVVGGTSYGKLTF

SEQ ID NO: 718206 - protein, 14 aa, Homo sapiens
  CDR3 for beta chain variable domain of TCR clone 359103 (TRBV11-2, TRBJ2-7)
CASSLTSGGYEQYF

SEQ ID NO: 718207 - protein, 13 aa, Homo sapiens
  CDR3 for alpha chain variable domain of TCR clone 359104 (TRAV3, TRAJ21)
CAVREPDFNKFYF

SEQ ID NO: 718208 - protein, 17 aa, Homo sapiens
  CDR3 for beta chain variable domain of TCR clone 359104 (TRBV7-8, TRBJ2-6)
CASSAGTGGGGANDLTF

SEQ ID NO: 718209 - protein, 15 aa, Homo sapiens
  CDR3 for alpha chain variable domain of TCR clone 359105 (TRAV12-3, TRAJ53)
CNEPGSGGRNYKLTF

SEQ ID NO: 718210 - protein, 11 aa, Homo sapiens
  CDR3 for beta chain variable domain of TCR clone 359105 (TRBV29-1, TRBJ2-5)
CSEDRTGTQYF

SEQ ID NO: 718211 - protein, 17 aa, Homo sapiens
  CDR3 for alpha chain variable domain of TCR clone 359106 (TRAV8-6, TRAJ58)
CAVSSWVGETSGSRLTF

SEQ ID NO: 718212 - protein, 13 aa, Homo sapiens
  CDR3 for beta chain variable domain of TCR clone 359106 (TRBV5-1, TRBJ2-1)
CASSSEGFEEQFF

SEQ ID NO: 718213 - protein, 16 aa, Homo sapiens
  CDR3 for alpha chain variable domain of TCR clone 359107 (TRAV8-6, TRAJ42)
CAVSEGYGGSQGNPIF

SEQ ID NO: 718214 - protein, 16 aa, Homo sapiens
  CDR3 for beta chain variable domain of TCR clone 359107 (TRBV13, TRBJ2-2)
CASSPRTGEHTGELFF

SEQ ID NO: 718215 - protein, 15 aa, Homo sapiens
  CDR3 for alpha chain variable domain of TCR clone 359108 (TRAV13-1, TRAJ10)
CAATILTGGGNKLTF

SEQ ID NO: 718216 - protein, 15 aa, Homo sapiens
  CDR3 for beta chain variable domain of TCR clone 359108 (TRBV2, TRBJ2-7)
CARTLLGSGATEQYF

SEQ ID NO: 718217 - protein, 13 aa, Homo sapiens
  CDR3 for alpha chain variable domain of TCR clone 359109 (TRAV36/DV7, TRAJ49)
CAGDSNTGNQFYF

SEQ ID NO: 718218 - protein, 18 aa, Homo sapiens
  CDR3 for beta chain variable domain of TCR clone 359109 (TRBV19, TRBJ2-6)
CASSADRAGSSGANVLTF

SEQ ID NO: 718219 - protein, 11 aa, Homo sapiens
  CDR3 for alpha chain variable domain of TCR clone 359110 (TRAV12-3, TRAJ41)
CAMNAREALNF

SEQ ID NO: 718220 - protein, 16 aa, Homo sapiens
  CDR3 for beta chain variable domain of TCR clone 359110 (TRBV7-8, TRBJ2-3)
CASSTEGQREKDTQYF

SEQ ID NO: 718221 - protein, 13 aa, Homo sapiens
  CDR3 for alpha chain variable domain of TCR clone 359111 (TRAV13-1, TRAJ12)
CAASPDSSYKLIF

SEQ ID NO: 718222 - protein, 15 aa, Homo sapiens
  CDR3 for beta chain variable domain of TCR clone 359111 (TRBV27, TRBJ2-1)
CASSNGGGSSNEQFF

SEQ ID NO: 718223 - protein, 11 aa, Homo sapiens
  CDR3 for alpha chain variable domain of TCR clone 359112 (TRAV1-2, TRAJ31)
CAVNNNARLMF

SEQ ID NO: 718224 - protein, 15 aa, Homo sapiens
  CDR3 for beta chain variable domain of TCR clone 359112 (TRBV28, TRBJ2-1)
CASSIITGGRSEQFF

SEQ ID NO: 718225 - protein, 14 aa, Homo sapiens
  CDR3 for alpha chain variable domain of TCR clone 359113 (TRAV1-2, TRAJ8)
CAVREDTGFQKLVF

SEQ ID NO: 718226 - protein, 17 aa, Homo sapiens
  CDR3 for beta chain variable domain of TCR clone 359113 (TRBV7-8, TRBJ2-6)
CASSAGTGGAGANVLTS

SEQ ID NO: 718227 - protein, 15 aa, Homo sapiens
  CDR3 for alpha chain variable domain of TCR clone 359114 (TRAV8-3, TRAJ45)
CASSYSGGGADVITF

SEQ ID NO: 718228 - protein, 13 aa, Homo sapiens
  CDR3 for beta chain variable domain of TCR clone 359114 (TRBV10-3, TRBJ2-7)
CASKLAVSYEQYF

SEQ ID NO: 718229 - protein, 16 aa, Homo sapiens
  CDR3 for alpha chain variable domain of TCR clone 359115 (TRAV13-1, TRAJ48)
CAASIFGNFGNEKLTC

SEQ ID NO: 718230 - protein, 12 aa, Homo sapiens
  CDR3 for beta chain variable domain of TCR clone 359115 (TRBV14, TRBJ2-4)
CASSNLKSIQYF

SEQ ID NO: 718231 - protein, 14 aa, Homo sapiens
  CDR3 for alpha chain variable domain of TCR clone 359116 (TRAV12-2, TRAJ45)
CAVNIGGGADGLTF

SEQ ID NO: 718232 - protein, 15 aa, Homo sapiens
  CDR3 for beta chain variable domain of TCR clone 359116 (TRBV6-1, TRBJ1-5)
CASSELREGNQPQHF

SEQ ID NO: 718233 - protein, 14 aa, Homo sapiens
  CDR3 for alpha chain variable domain of TCR clone 359117 (TRAV1-2, TRAJ16)
CAVNRFSDGQKLLF

SEQ ID NO: 718234 - protein, 14 aa, Homo sapiens
  CDR3 for beta chain variable domain of TCR clone 359117 (TRBV11-1, TRBJ1-1)
CASSLEHPNTEAFF

SEQ ID NO: 718235 - protein, 13 aa, Homo sapiens
  CDR3 for alpha chain variable domain of TCR clone 359118 (TRAV21, TRAJ27)
CAARPGNAGKSTF

SEQ ID NO: 718236 - protein, 20 aa, Homo sapiens
  CDR3 for beta chain variable domain of TCR clone 359118 (TRBV7-8, TRBJ2-2)
CASSHLVPGPTIHSTGELFF

SEQ ID NO: 718237 - protein, 13 aa, Homo sapiens
  CDR3 for alpha chain variable domain of TCR clone 359119 (TRAV27, TRAJ57)
CRKHQGGSEKLVF

SEQ ID NO: 718238 - protein, 16 aa, Homo sapiens
  CDR3 for beta chain variable domain of TCR clone 359119 (TRBV5-4, TRBJ2-1)
CASSLVGSGQDNEQFF

SEQ ID NO: 718239 - protein, 16 aa, Homo sapiens
  CDR3 for alpha chain variable domain of TCR clone 359120 (TRAV12-2, TRAJ10)
CAVNRVLTGGGNKLTF

SEQ ID NO: 718240 - protein, 14 aa, Homo sapiens
  CDR3 for beta chain variable domain of TCR clone 359120 (TRBV6-6, TRBJ1-4)
CANRTDREYEKLFF

SEQ ID NO: 718241 - protein, 12 aa, Homo sapiens
  CDR3 for alpha chain variable domain of TCR clone 359121 (TRAV12-3, TRAJ20)
CAMVRGDYKLSF

SEQ ID NO: 718242 - protein, 13 aa, Homo sapiens
  CDR3 for beta chain variable domain of TCR clone 359121 (TRBV23-1, TRBJ1-4)
CASKGKFNEKLFF

SEQ ID NO: 718243 - protein, 10 aa, Homo sapiens
  CDR3 for alpha chain variable domain of TCR clone 359122 (TRAV23/DV6, TRAJ57)
CAASSTLSQG

SEQ ID NO: 718244 - protein, 16 aa, Homo sapiens
  CDR3 for beta chain variable domain of TCR clone 359122 (TRBV6-1, TRBJ2-5)
CASSETLYRGAETQYF

SEQ ID NO: 718245 - protein, 16 aa, Homo sapiens
  CDR3 for alpha chain variable domain of TCR clone 359123 (TRAV12-2, TRAJ32)
CAVNSGQGVATNKLIF

SEQ ID NO: 718246 - protein, 15 aa, Homo sapiens
  CDR3 for beta chain variable domain of TCR clone 359123 (TRBV20-1, TRBJ2-7)
CSARGPLAGGREQYF

SEQ ID NO: 718247 - protein, 12 aa, Homo sapiens
  CDR3 for alpha chain variable domain of TCR clone 359124 (TRAV8-2, TRAJ49)
CVVSDTGNQVYF

SEQ ID NO: 718248 - protein, 14 aa, Homo sapiens
  CDR3 for beta chain variable domain of TCR clone 359124 (TRBV28, TRBJ1-2)
CASSDPDRVYGYTF

SEQ ID NO: 718249 - protein, 13 aa, Homo sapiens
  CDR3 for alpha chain variable domain of TCR clone 359125 (TRAV20, TRAJ21)
CAVEGYNFNKFYF

SEQ ID NO: 718250 - protein, 14 aa, Homo sapiens
  CDR3 for beta chain variable domain of TCR clone 359125 (TRBV12-4, TRBJ2-7)
CASSSREGHYEQYF

SEQ ID NO: 718251 - protein, 14 aa, Homo sapiens
  CDR3 for alpha chain variable domain of TCR clone 359126 (TRAV12-3, TRAJ33)
CAMSVPGSNYQLIW

SEQ ID NO: 718252 - protein, 12 aa, Homo sapiens
  CDR3 for beta chain variable domain of TCR clone 359126 (TRBV7-3, TRBJ2-1)
CASSFINNEQFF

SEQ ID NO: 718253 - protein, 13 aa, Homo sapiens
  CDR3 for alpha chain variable domain of TCR clone 359127 (TRAV12-2, TRAJ9)
CAVKWAGSFKTIF

SEQ ID NO: 718254 - protein, 15 aa, Homo sapiens
  CDR3 for beta chain variable domain of TCR clone 359127 (TRBV5-1, TRBJ1-4)
CASSLTADSDEKLFF

SEQ ID NO: 718255 - protein, 13 aa, Homo sapiens
  CDR3 for alpha chain variable domain of TCR clone 359128 (TRAV2, TRAJ29)
CAAGGPGNTPLVF

SEQ ID NO: 718256 - protein, 12 aa, Homo sapiens
  CDR3 for beta chain variable domain of TCR clone 359128 (TRBV11-2, TRBJ2-2)
CASSLGGGELFF

SEQ ID NO: 718257 - protein, 15 aa, Homo sapiens
  CDR3 for alpha chain variable domain of TCR clone 359129 (TRAV2, TRAJ15)
CSVEDREQAGTALIF

SEQ ID NO: 718258 - protein, 14 aa, Homo sapiens
  CDR3 for beta chain variable domain of TCR clone 359129 (TRBV11-2, TRBJ2-7)
CASSLGAGAYEQYF

SEQ ID NO: 718259 - protein, 14 aa, Homo sapiens
  CDR3 for alpha chain variable domain of TCR clone 359130 (TRAV8-3, TRAJ12)
CAVGARDSSYKLIF

SEQ ID NO: 718260 - protein, 15 aa, Homo sapiens
  CDR3 for beta chain variable domain of TCR clone 359130 (TRBV10-3, TRBJ2-2)
CAISPGRTNTGELFF

SEQ ID NO: 718261 - protein, 15 aa, Homo sapiens
  CDR3 for alpha chain variable domain of TCR clone 359131 (TRAV17, TRAJ57)
CATCPSQGGSEKLVF

SEQ ID NO: 718262 - protein, 13 aa, Homo sapiens
  CDR3 for beta chain variable domain of TCR clone 359131 (TRBV4-2, TRBJ1-1)
CACSQAGNTEAFF

SEQ ID NO: 718263 - protein, 16 aa, Homo sapiens
  CDR3 for alpha chain variable domain of TCR clone 359132 (TRAV16, TRAJ4)
CALSRMFSGGYNKLIF

SEQ ID NO: 718264 - protein, 14 aa, Homo sapiens
  CDR3 for beta chain variable domain of TCR clone 359132 (TRBV7-2, TRBJ2-1)
CASILSGVYNEQFF

SEQ ID NO: 718265 - protein, 14 aa, Homo sapiens
  CDR3 for alpha chain variable domain of TCR clone 359133 (TRAV24, TRAJ16)
CAFPPFSDGQKLLF

SEQ ID NO: 718266 - protein, 13 aa, Homo sapiens
  CDR3 for beta chain variable domain of TCR clone 359133 (TRBV19, TRBJ1-1)
CVPVPAGGGEAFF

SEQ ID NO: 718267 - protein, 13 aa, Homo sapiens
  CDR3 for alpha chain variable domain of TCR clone 359134 (TRAV17, TRAJ40)
CATAPGGTYKYIF

SEQ ID NO: 718268 - protein, 12 aa, Homo sapiens
  CDR3 for beta chain variable domain of TCR clone 359134 (TRBV2, TRBJ1-5)
CASSENRTPQHY

SEQ ID NO: 718269 - protein, 11 aa, Homo sapiens
  CDR3 for alpha chain variable domain of TCR clone 359135 (TRAV12-2, TRAJ29)
CAVTLLSPLVF

SEQ ID NO: 718270 - protein, 16 aa, Homo sapiens
  CDR3 for beta chain variable domain of TCR clone 359135 (TRBV29-1, TRBJ2-2)
CSVETRASGNTGELFF

SEQ ID NO: 718271 - protein, 15 aa, Homo sapiens
  CDR3 for alpha chain variable domain of TCR clone 359136 (TRAV26-1, TRAJ42)
CIVRVAEGSQGNLIF

SEQ ID NO: 718272 - protein, 15 aa, Homo sapiens
  CDR3 for beta chain variable domain of TCR clone 359136 (TRBV29-1, TRBJ2-6)
CSVGDRGSGANVLTF

SEQ ID NO: 718273 - protein, 14 aa, Homo sapiens
  CDR3 for alpha chain variable domain of TCR clone 359137 (TRAV13-1, TRAJ5)
CAASPGSRRRALTF

SEQ ID NO: 718274 - protein, 16 aa, Homo sapiens
  CDR3 for beta chain variable domain of TCR clone 359137 (TRBV5-1, TRBJ2-3)
CASSLGLAVYTDTQYF

SEQ ID NO: 718275 - protein, 12 aa, Homo sapiens
  CDR3 for alpha chain variable domain of TCR clone 359138 (TRAV13-1, TRAJ15)
CAASQARTALIF

SEQ ID NO: 718276 - protein, 14 aa, Homo sapiens
  CDR3 for beta chain variable domain of TCR clone 359138 (TRBV19, TRBJ2-2)
CASSALHRSGELFF

SEQ ID NO: 718277 - protein, 16 aa, Homo sapiens
  CDR3 for alpha chain variable domain of TCR clone 359139 (TRAV12-2, TRAJ6)
CAAPLAGSGGSYITTF

SEQ ID NO: 718278 - protein, 10 aa, Homo sapiens
  CDR3 for beta chain variable domain of TCR clone 359139 (TRBV28, TRBJ1-2)
CSSSSDRDVF

SEQ ID NO: 718279 - protein, 16 aa, Homo sapiens
  CDR3 for alpha chain variable domain of TCR clone 359140 (TRAV8-3, TRAJ10)
CAVGPGVTGGGNKRTL

SEQ ID NO: 718280 - protein, 13 aa, Homo sapiens
  CDR3 for beta chain variable domain of TCR clone 359140 (TRBV18, TRBJ1-1)
CASSPGPSGEAFF

SEQ ID NO: 718281 - protein, 15 aa, Homo sapiens
  CDR3 for alpha chain variable domain of TCR clone 359141 (TRAV26-1, TRAJ29)
CIVRVEGSGNTPLIF

SEQ ID NO: 718282 - protein, 16 aa, Homo sapiens
  CDR3 for beta chain variable domain of TCR clone 359141 (TRBV7-3, TRBJ2-2)
CAISLKRGTLSGELFF

SEQ ID NO: 718283 - protein, 11 aa, Homo sapiens
  CDR3 for alpha chain variable domain of TCR clone 359142 (TRAV21, TRAJ20)
CAVRDDYNLIF

SEQ ID NO: 718284 - protein, 14 aa, Homo sapiens
  CDR3 for beta chain variable domain of TCR clone 359142 (TRBV7-2, TRBJ2-7)
CASSPKTSFYEQYF

SEQ ID NO: 718285 - protein, 15 aa, Homo sapiens
  CDR3 for alpha chain variable domain of TCR clone 359143 (TRAV26-1, TRAJ23)
CIVRVLNNQGGKLIF

SEQ ID NO: 718286 - protein, 14 aa, Homo sapiens
  CDR3 for beta chain variable domain of TCR clone 359143 (TRBV13, TRBJ2-3)
CASSLGARTDTQYF

SEQ ID NO: 718287 - protein, 15 aa, Homo sapiens
  CDR3 for alpha chain variable domain of TCR clone 359144 (TRAV8-4, TRAJ7)
CAVSGGNYGNNRPAF

SEQ ID NO: 718288 - protein, 11 aa, Homo sapiens
  CDR3 for beta chain variable domain of TCR clone 359144 (TRBV20-1, TRBJ2-1)
CSLSSGSEQFF

SEQ ID NO: 718289 - protein, 15 aa, Homo sapiens
  CDR3 for alpha chain variable domain of TCR clone 359145 (TRAV13-2, TRAJ53)
CAERGSRGSYYKLTF

SEQ ID NO: 718290 - protein, 14 aa, Homo sapiens
  CDR3 for beta chain variable domain of TCR clone 359145 (TRBV4-1, TRBJ2-2)
CASSQYPDTGELFF

SEQ ID NO: 718291 - protein, 19 aa, Homo sapiens
  CDR3 for alpha chain variable domain of TCR clone 359146 (TRAV2, TRAJ20)
ILQVREADAAVYRDCKLSF

SEQ ID NO: 718292 - protein, 11 aa, Homo sapiens
  CDR3 for beta chain variable domain of TCR clone 359146 (TRBV19, TRBJ1-1)
CASSIGSEAFF

SEQ ID NO: 718293 - protein, 14 aa, Homo sapiens
  CDR3 for alpha chain variable domain of TCR clone 359147 (TRAV16, TRAJ39)
CALSKNNAGNMITF

SEQ ID NO: 718294 - protein, 19 aa, Homo sapiens
  CDR3 for beta chain variable domain of TCR clone 359147 (TRBV6-6, TRBJ2-1)
AAPSQTSVYFCASSYEQFF

SEQ ID NO: 718295 - protein, 13 aa, Homo sapiens
  CDR3 for alpha chain variable domain of TCR clone 359148 (TRAV2, TRAJ40)
CAVVTSGTYQYIF

SEQ ID NO: 718296 - protein, 17 aa, Homo sapiens
  CDR3 for beta chain variable domain of TCR clone 359148 (TRBV7-3, TRBJ2-3)
CASSLMKRMRGADTQYF

SEQ ID NO: 718297 - protein, 18 aa, Homo sapiens
  CDR3 for alpha chain variable domain of TCR clone 359149 (TRAV12-3, TRAJ52)
CAMSVGGAGGTSYGKLTF

SEQ ID NO: 718298 - protein, 17 aa, Homo sapiens
  CDR3 for beta chain variable domain of TCR clone 359149 (TRBV11-2, TRBJ2-6)
CASSQRDIFSGANVLTF

SEQ ID NO: 718299 - protein, 16 aa, Homo sapiens
  CDR3 for alpha chain variable domain of TCR clone 359150 (TRAV12-3, TRAJ53)
CAMSPGSGGSNYKLTF

SEQ ID NO: 718300 - protein, 14 aa, Homo sapiens
  CDR3 for beta chain variable domain of TCR clone 359150 (TRBV4-2, TRBJ2-1)
CASGLDRACNEQFF

SEQ ID NO: 718301 - protein, 15 aa, Homo sapiens
  CDR3 for alpha chain variable domain of TCR clone 359151 (TRAV8-3, TRAJ40)
CAAPSLGSGTYRYLF

SEQ ID NO: 718302 - protein, 16 aa, Homo sapiens
  CDR3 for beta chain variable domain of TCR clone 359151 (TRBV7-3, TRBJ2-3)
CASSLSGYRPEDTQYF

SEQ ID NO: 718303 - protein, 16 aa, Homo sapiens
  CDR3 for alpha chain variable domain of TCR clone 359152 (TRAV35, TRAJ28)
CAGQKYYGAGSYQLTF

SEQ ID NO: 718304 - protein, 16 aa, Homo sapiens
  CDR3 for beta chain variable domain of TCR clone 359152 (TRBV7-3, TRBJ2-2)
CASSLKRVTLSGELFF

SEQ ID NO: 718305 - protein, 13 aa, Homo sapiens
  CDR3 for alpha chain variable domain of TCR clone 359153 (TRAV12-3, TRAJ57)
CAMSQSGSEKLVF

SEQ ID NO: 718306 - protein, 16 aa, Homo sapiens
  CDR3 for beta chain variable domain of TCR clone 359153 (TRBV12-4, TRBJ2-5)
CASSFFVRGRQETQYF

SEQ ID NO: 718307 - protein, 11 aa, Homo sapiens
  CDR3 for alpha chain variable domain of TCR clone 359154 (TRAV21, TRAJ34)
CAVTNTDKLIF

SEQ ID NO: 718308 - protein, 14 aa, Homo sapiens
  CDR3 for beta chain variable domain of TCR clone 359154 (TRBV18, TRBJ2-1)
CASSPGSSYNEQFF

SEQ ID NO: 718309 - protein, 12 aa, Homo sapiens
  CDR3 for alpha chain variable domain of TCR clone 359155 (TRAV8-3, TRAJ26)
CAGDDYGQNFVF

SEQ ID NO: 718310 - protein, 12 aa, Homo sapiens
  CDR3 for beta chain variable domain of TCR clone 359155 (TRBV11-2, TRBJ2-1)
CASSPGNNEQFF

SEQ ID NO: 718311 - protein, 18 aa, Homo sapiens
  CDR3 for alpha chain variable domain of TCR clone 359156 (TRAV1-2, TRAJ8)
CLLPLCCERGHRLSELVF

SEQ ID NO: 718312 - protein, 15 aa, Homo sapiens
  CDR3 for beta chain variable domain of TCR clone 359156 (TRBV7-3, TRBJ2-2)
CASSETGQGTGELFF

SEQ ID NO: 718313 - protein, 12 aa, Homo sapiens
  CDR3 for alpha chain variable domain of TCR clone 359157 (TRAV12-1, TRAJ40)
CVVYSGTYKYIF

SEQ ID NO: 718314 - protein, 18 aa, Homo sapiens
  CDR3 for beta chain variable domain of TCR clone 359157 (TRBV11-3, TRBJ2-3)
CASSFGGASRGAPNTQYF

SEQ ID NO: 718315 - protein, 14 aa, Homo sapiens
  CDR3 for alpha chain variable domain of TCR clone 359158 (TRAV22, TRAJ6)
CAGVGPGGSYIPTF

SEQ ID NO: 718316 - protein, 14 aa, Homo sapiens
  CDR3 for beta chain variable domain of TCR clone 359158 (TRBV19, TRBJ1-6)
CASSSGTGYSPLHF

SEQ ID NO: 718317 - protein, 12 aa, Homo sapiens
  CDR3 for alpha chain variable domain of TCR clone 359159 (TRAV12-3, TRAJ54)
CGADRGAQKLVF

SEQ ID NO: 718318 - protein, 15 aa, Homo sapiens
  CDR3 for beta chain variable domain of TCR clone 359159 (TRBV27, TRBJ2-1)
CASSLAGGAFNEQFF

SEQ ID NO: 718319 - protein, 15 aa, Homo sapiens
  CDR3 for alpha chain variable domain of TCR clone 359160 (TRAV21, TRAJ40)
CGVRPQTSGTYKYIF

SEQ ID NO: 718320 - protein, 13 aa, Homo sapiens
  CDR3 for beta chain variable domain of TCR clone 359160 (TRBV7-2, TRBJ2-2)
CASSSVRAGELFF

SEQ ID NO: 718321 - protein, 14 aa, Homo sapiens
  CDR3 for alpha chain variable domain of TCR clone 359161 (TRAV26-1, TRAJ26)
CIVSDYNYGQNFVF

SEQ ID NO: 718322 - protein, 15 aa, Homo sapiens
  CDR3 for beta chain variable domain of TCR clone 359161 (TRBV7-2, TRBJ2-1)
CASSSGLAGGNEQFF

SEQ ID NO: 718323 - protein, 16 aa, Homo sapiens
  CDR3 for alpha chain variable domain of TCR clone 359162 (TRAV21, TRAJ37)
CAVRPRGSSNTGKLIF

SEQ ID NO: 718324 - protein, 14 aa, Homo sapiens
  CDR3 for beta chain variable domain of TCR clone 359162 (TRBV11-2, TRBJ1-2)
CASSLGTANYGYTF

SEQ ID NO: 718325 - protein, 14 aa, Homo sapiens
  CDR3 for alpha chain variable domain of TCR clone 359163 (TRAV36/DV7, TRAJ40)
CAVETTSGTYKYIF

SEQ ID NO: 718326 - protein, 16 aa, Homo sapiens
  CDR3 for beta chain variable domain of TCR clone 359163 (TRBV7-3, TRBJ2-2)
CASSLKRGTLSGELFF

SEQ ID NO: 718327 - protein, 12 aa, Homo sapiens
  CDR3 for alpha chain variable domain of TCR clone 359164 (TRAV12-2, TRAJ44)
CADTGTASKLTF

SEQ ID NO: 718328 - protein, 17 aa, Homo sapiens
  CDR3 for beta chain variable domain of TCR clone 359164 (TRBV20-1, TRBJ1-1)
CSARGTGGCYGNTGAFF

SEQ ID NO: 718329 - protein, 14 aa, Homo sapiens
  CDR3 for alpha chain variable domain of TCR clone 359165 (TRAV16, TRAJ33)
CALSAMDSNYQLIW

SEQ ID NO: 718330 - protein, 14 aa, Homo sapiens
  CDR3 for beta chain variable domain of TCR clone 359165 (TRBV7-8, TRBJ1-5)
CASSLGAFNQPQHF

SEQ ID NO: 718331 - protein, 17 aa, Homo sapiens
  CDR3 for alpha chain variable domain of TCR clone 359166 (TRAV12-3, TRAJ31)
CAMKDRLMFGDGTQLVV

SEQ ID NO: 718332 - protein, 17 aa, Homo sapiens
  CDR3 for beta chain variable domain of TCR clone 359166 (TRBV7-9, TRBJ2-3)
CASSPTVAGDLTDTQYF

SEQ ID NO: 718333 - protein, 12 aa, Homo sapiens
  CDR3 for alpha chain variable domain of TCR clone 359167 (TRAV3, TRAJ20)
CAVRDPDYKLSF

SEQ ID NO: 718334 - protein, 18 aa, Homo sapiens
  CDR3 for beta chain variable domain of TCR clone 359167 (TRBV11-2, TRBJ2-3)
CASSLGGASRGAPNTQYF

SEQ ID NO: 718335 - protein, 13 aa, Homo sapiens
  CDR3 for alpha chain variable domain of TCR clone 359168 (TRAV12-2, TRAJ37)
CAGGSGNTGKLIF

SEQ ID NO: 718336 - protein, 14 aa, Homo sapiens
  CDR3 for beta chain variable domain of TCR clone 359168 (TRBV11-3, TRBJ2-7)
CASSPGWGTYEQYF

SEQ ID NO: 718337 - protein, 12 aa, Homo sapiens
  CDR3 for alpha chain variable domain of TCR clone 359169 (TRAV12-3, TRAJ34)
CAMGYNTDKLIF

SEQ ID NO: 718338 - protein, 12 aa, Homo sapiens
  CDR3 for beta chain variable domain of TCR clone 359169 (TRBV7-9, TRBJ1-1)
CASSHSSTEAFF

SEQ ID NO: 718339 - protein, 15 aa, Homo sapiens
  CDR3 for alpha chain variable domain of TCR clone 359170 (TRAV4, TRAJ39)
CLVGPNNNAGNMLTF

SEQ ID NO: 718340 - protein, 14 aa, Homo sapiens
  CDR3 for beta chain variable domain of TCR clone 359170 (TRBV4-2, TRBJ2-3)
CASSQERGTDTQYF

SEQ ID NO: 718341 - protein, 13 aa, Homo sapiens
  CDR3 for alpha chain variable domain of TCR clone 359171 (TRAV27, TRAJ41)
CAGEGNSGYALNF

SEQ ID NO: 718342 - protein, 15 aa, Homo sapiens
  CDR3 for beta chain variable domain of TCR clone 359171 (TRBV20-1, TRBJ1-1)
CSASRGVTGNTEAFF

SEQ ID NO: 718343 - protein, 14 aa, Homo sapiens
  CDR3 for alpha chain variable domain of TCR clone 359172 (TRAV12-2, TRAJ13)
CAVKETGGYQKVTF

SEQ ID NO: 718344 - protein, 16 aa, Homo sapiens
  CDR3 for beta chain variable domain of TCR clone 359172 (TRBV5-1, TRBJ2-1)
CASSMRTGTEHNEQFF

SEQ ID NO: 718345 - protein, 13 aa, Homo sapiens
  CDR3 for alpha chain variable domain of TCR clone 359173 (TRAV21, TRAJ27)
CAVRPGHAGKSTF

SEQ ID NO: 718346 - protein, 13 aa, Homo sapiens
  CDR3 for beta chain variable domain of TCR clone 359173 (TRBV13, TRBJ2-1)
CASILGGRGEQFF

SEQ ID NO: 718347 - protein, 13 aa, Homo sapiens
  CDR3 for alpha chain variable domain of TCR clone 359174 (TRAV8-3, TRAJ42)
CARYGGSQGNLIF

SEQ ID NO: 718348 - protein, 14 aa, Homo sapiens
  CDR3 for beta chain variable domain of TCR clone 359174 (TRBV20-1, TRBJ2-1)
CSALNRGTYNEQFF

SEQ ID NO: 718349 - protein, 11 aa, Homo sapiens
  CDR3 for alpha chain variable domain of TCR clone 359175 (TRAV1-2, TRAJ31)
VAVNNNARLMF

SEQ ID NO: 718350 - protein, 15 aa, Homo sapiens
  CDR3 for beta chain variable domain of TCR clone 359175 (TRBV28, TRBJ2-1)
CASSIIAGGRSEQFF

SEQ ID NO: 718351 - protein, 14 aa, Homo sapiens
  CDR3 for alpha chain variable domain of TCR clone 359176 (TRAV2, TRAJ37)
CAVEDQGNTGKLIL

SEQ ID NO: 718352 - protein, 14 aa, Homo sapiens
  CDR3 for beta chain variable domain of TCR clone 359176 (TRBV4-1, TRBJ2-2)
CASSQAVNTGELFF

SEQ ID NO: 718353 - protein, 14 aa, Homo sapiens
  CDR3 for alpha chain variable domain of TCR clone 359177 (TRAV12-2, TRAJ11)
CAVNMNPGYSTLTF

SEQ ID NO: 718354 - protein, 15 aa, Homo sapiens
  CDR3 for beta chain variable domain of TCR clone 359177 (TRBV11-3, TRBJ2-3)
CASLKDGREGDTQYF

SEQ ID NO: 718355 - protein, 14 aa, Homo sapiens
  CDR3 for alpha chain variable domain of TCR clone 359178 (TRAV12-1, TRAJ17)
CVVNYKAAGNKLTF

SEQ ID NO: 718356 - protein, 11 aa, Homo sapiens
  CDR3 for beta chain variable domain of TCR clone 359178 (TRBV11-2, TRBJ2-2)
CASSLPGELFF

SEQ ID NO: 718357 - protein, 16 aa, Homo sapiens
  CDR3 for alpha chain variable domain of TCR clone 359179 (TRAV12-3, TRAJ53)
CAMSPGSGGGNYKLAF

SEQ ID NO: 718358 - protein, 11 aa, Homo sapiens
  CDR3 for beta chain variable domain of TCR clone 359179 (TRBV29-1, TRBJ2-5)
CSGDRTGTQYF

SEQ ID NO: 718359 - protein, 23 aa, Homo sapiens
  CDR3 for alpha chain variable domain of TCR clone 359180 (TRAV26-1, TRAJ38)
CIADNAGNNHIQNPDPAVYQLRD

SEQ ID NO: 718360 - protein, 15 aa, Homo sapiens
  CDR3 for beta chain variable domain of TCR clone 359180 (TRBV20-1, TRBJ1-1)
CSARGGGNTEASLDK

SEQ ID NO: 718361 - protein, 10 aa, Homo sapiens
  CDR3 for alpha chain variable domain of TCR clone 359181 (TRAV12-1, TRAJ33)
CVASNYQLIW

SEQ ID NO: 718362 - protein, 16 aa, Homo sapiens
  CDR3 for beta chain variable domain of TCR clone 359181 (TRBV7-3, TRBJ2-2)
CASSLKRGTLSGELFF

SEQ ID NO: 718363 - protein, 14 aa, Homo sapiens
  CDR3 for alpha chain variable domain of TCR clone 359182 (TRAV16, TRAJ16)
CSLSVLSDGQKLLF

SEQ ID NO: 718364 - protein, 12 aa, Homo sapiens
  CDR3 for beta chain variable domain of TCR clone 359182 (TRBV5-5, TRBJ1-2)
CASSALNYGYTF

SEQ ID NO: 718365 - protein, 14 aa, Homo sapiens
  CDR3 for alpha chain variable domain of TCR clone 359183 (TRAV2, TRAJ42)
CAVVGGGSQGNHIF

SEQ ID NO: 718366 - protein, 15 aa, Homo sapiens
  CDR3 for beta chain variable domain of TCR clone 359183 (TRBV11-3, TRBJ2-3)
CASSFRAAFPDTQYF

SEQ ID NO: 718367 - protein, 14 aa, Homo sapiens
  CDR3 for alpha chain variable domain of TCR clone 359184 (TRAV8-3, TRAJ39)
CAVGANNAGNMLTF

SEQ ID NO: 718368 - protein, 12 aa, Homo sapiens
  CDR3 for beta chain variable domain of TCR clone 359184 (TRBV28, TRBJ1-2)
CASLTLAEGYAF

SEQ ID NO: 718369 - protein, 14 aa, Homo sapiens
  CDR3 for alpha chain variable domain of TCR clone 359185 (TRAV13-1, TRAJ35)
CAASKGGFGNVLHC

SEQ ID NO: 718370 - protein, 14 aa, Homo sapiens
  CDR3 for beta chain variable domain of TCR clone 359185 (TRBV20-1, TRBJ2-7)
CSAKRGRSSYEQYF

SEQ ID NO: 718371 - protein, 15 aa, Homo sapiens
  CDR3 for alpha chain variable domain of TCR clone 359186 (TRAV12-2, TRAJ50)
CAVNGVETSYDKVIF

SEQ ID NO: 718372 - protein, 14 aa, Homo sapiens
  CDR3 for beta chain variable domain of TCR clone 359186 (TRBV7-2, TRBJ1-1)
CASSFLTGTTEAFF

SEQ ID NO: 718373 - protein, 13 aa, Homo sapiens
  CDR3 for alpha chain variable domain of TCR clone 359187 (TRAV35, TRAJ36)
CAGPRIWAKNLFF

SEQ ID NO: 718374 - protein, 15 aa, Homo sapiens
  CDR3 for beta chain variable domain of TCR clone 359187 (TRBV28, TRBJ2-5)
CASSPPWSYQETQYF

SEQ ID NO: 718375 - protein, 16 aa, Homo sapiens
  CDR3 for alpha chain variable domain of TCR clone 359188 (TRAV30, TRAJ24)
CGTEIVDADSWGKFQF

SEQ ID NO: 718376 - protein, 15 aa, Homo sapiens
  CDR3 for beta chain variable domain of TCR clone 359188 (TRBV20-1, TRBJ2-7)
CSARDRGSGMDEQYF

SEQ ID NO: 718377 - protein, 17 aa, Homo sapiens
  CDR3 for alpha chain variable domain of TCR clone 359189 (TRAV8-4, TRAJ53)
CAVSGPRREGSNYKLTF

SEQ ID NO: 718378 - protein, 14 aa, Homo sapiens
  CDR3 for beta chain variable domain of TCR clone 359189 (TRBV7-3, TRBJ2-1)
CASSALAGGAEQFF

SEQ ID NO: 718379 - protein, 13 aa, Homo sapiens
  CDR3 for alpha chain variable domain of TCR clone 359190 (TRAV12-2, TRAJ20)
CAVYPSNDYKLSF

SEQ ID NO: 718380 - protein, 12 aa, Homo sapiens
  CDR3 for beta chain variable domain of TCR clone 359190 (TRBV7-3, TRBJ2-1)
CASSFINNEQFF

SEQ ID NO: 718381 - protein, 12 aa, Homo sapiens
  CDR3 for alpha chain variable domain of TCR clone 359191 (TRAV12-1, TRAJ9)
LVLNTGGFKTIF

SEQ ID NO: 718382 - protein, 13 aa, Homo sapiens
  CDR3 for beta chain variable domain of TCR clone 359191 (TRBV20-1, TRBJ1-1)
CSARSGGNTEAFF

SEQ ID NO: 718383 - protein, 14 aa, Homo sapiens
  CDR3 for alpha chain variable domain of TCR clone 359192 (TRAV13-1, TRAJ40)
CAASRASGTYKHIF

SEQ ID NO: 718384 - protein, 13 aa, Homo sapiens
  CDR3 for beta chain variable domain of TCR clone 359192 (TRBV29-1, TRBJ2-7)
CSVGRTGGYEQYF

SEQ ID NO: 718385 - protein, 16 aa, Homo sapiens
  CDR3 for alpha chain variable domain of TCR clone 359193 (TRAV35, TRAJ28)
CAGQKYSGAGSYQLTF

SEQ ID NO: 718386 - protein, 11 aa, Homo sapiens
  CDR3 for beta chain variable domain of TCR clone 359193 (TRBV7-3, TRBJ2-5)
CASSLSETQYF

SEQ ID NO: 718387 - protein, 13 aa, Homo sapiens
  CDR3 for alpha chain variable domain of TCR clone 359194 (TRAV26-1, TRAJ29)
CIVRRSGNTPLVF

SEQ ID NO: 718388 - protein, 14 aa, Homo sapiens
  CDR3 for beta chain variable domain of TCR clone 359194 (TRBV20-1, TRBJ1-1)
CSAKTRGANTEAFF

SEQ ID NO: 718389 - protein, 14 aa, Homo sapiens
  CDR3 for alpha chain variable domain of TCR clone 359195 (TRAV1-2, TRAJ16)
RAVNRFSDGQKLLF

SEQ ID NO: 718390 - protein, 15 aa, Homo sapiens
  CDR3 for beta chain variable domain of TCR clone 359195 (TRBV9, TRBJ1-6)
CASSVAGTGDSHLHF

SEQ ID NO: 718391 - protein, 12 aa, Homo sapiens
  CDR3 for alpha chain variable domain of TCR clone 359196 (TRAV20, TRAJ39)
CAVGNAGNMLTF

SEQ ID NO: 718392 - protein, 16 aa, Homo sapiens
  CDR3 for beta chain variable domain of TCR clone 359196 (TRBV15, TRBJ1-2)
CATSRGSRTGGGGYTF

SEQ ID NO: 718393 - protein, 13 aa, Homo sapiens
  CDR3 for alpha chain variable domain of TCR clone 359197 (TRAV20, TRAJ42)
CAVQVGSQGNLIF

SEQ ID NO: 718394 - protein, 15 aa, Homo sapiens
  CDR3 for beta chain variable domain of TCR clone 359197 (TRBV10-1, TRBJ2-1)
CASSEWRGTYNEQFF

SEQ ID NO: 718395 - protein, 14 aa, Homo sapiens
  CDR3 for alpha chain variable domain of TCR clone 359198 (TRAV17, TRAJ57)
CATDPQGGSEELVF

SEQ ID NO: 718396 - protein, 15 aa, Homo sapiens
  CDR3 for beta chain variable domain of TCR clone 359198 (TRBV7-9, TRBJ2-1)
CASSLAGLAHNEQFF

SEQ ID NO: 718397 - protein, 14 aa, Homo sapiens
  CDR3 for alpha chain variable domain of TCR clone 359199 (TRAV23/DV6, TRAJ40)
CEASLTSGTYRYIF

SEQ ID NO: 718398 - protein, 14 aa, Homo sapiens
  CDR3 for beta chain variable domain of TCR clone 359199 (TRBV5-1, TRBJ2-3)
CASSRGQGGGTQYF

SEQ ID NO: 718399 - protein, 14 aa, Homo sapiens
  CDR3 for alpha chain variable domain of TCR clone 359200 (TRAV20, TRAJ42)
CAVQAGGSQGNIIL

SEQ ID NO: 718400 - protein, 14 aa, Homo sapiens
  CDR3 for beta chain variable domain of TCR clone 359200 (TRBV28, TRBJ1-2)
CASRIQGANYGYTF

SEQ ID NO: 718401 - protein, 15 aa, Homo sapiens
  CDR3 for alpha chain variable domain of TCR clone 359201 (TRAV17, TRAJ57)
CATGPSQGGSEKLVF

SEQ ID NO: 718402 - protein, 13 aa, Homo sapiens
  CDR3 for beta chain variable domain of TCR clone 359201 (TRBV12-5, TRBJ1-2)
CASGVRTGNGYTF

SEQ ID NO: 718403 - protein, 18 aa, Homo sapiens
  CDR3 for alpha chain variable domain of TCR clone 359202 (TRAV26-2, TRAJ45)
CILRDRVDQEEVLSDSPL

SEQ ID NO: 718404 - protein, 15 aa, Homo sapiens
  CDR3 for beta chain variable domain of TCR clone 359202 (TRBV7-6, TRBJ2-5)
CASSKPTGPQETQYF

SEQ ID NO: 718405 - protein, 14 aa, Homo sapiens
  CDR3 for alpha chain variable domain of TCR clone 359203 (TRAV13-1, TRAJ40)
CAASMTSGTYKYIF

SEQ ID NO: 718406 - protein, 15 aa, Homo sapiens
  CDR3 for beta chain variable domain of TCR clone 359203 (TRBV7-3, TRBJ2-1)
CACSPTGGGEVEEFF

SEQ ID NO: 718407 - protein, 15 aa, Homo sapiens
  CDR3 for alpha chain variable domain of TCR clone 359204 (TRAV27, TRAJ38)
CAARRNAGNNRKLIW

SEQ ID NO: 718408 - protein, 13 aa, Homo sapiens
  CDR3 for beta chain variable domain of TCR clone 359204 (TRBV7-3, TRBJ2-1)
CASSVDSYNEQFF

SEQ ID NO: 718409 - protein, 12 aa, Homo sapiens
  CDR3 for alpha chain variable domain of TCR clone 359205 (TRAV2, TRAJ31)
CAVEDNNARLMF

SEQ ID NO: 718410 - protein, 16 aa, Homo sapiens
  CDR3 for beta chain variable domain of TCR clone 359205 (TRBV25-1, TRBJ1-1)
CASSGDRDRGRIEAFF

SEQ ID NO: 718411 - protein, 16 aa, Homo sapiens
  CDR3 for alpha chain variable domain of TCR clone 359206 (TRAV8-4, TRAJ9)
CAVTFNTGGFKNYLWS

SEQ ID NO: 718412 - protein, 20 aa, Homo sapiens
  CDR3 for beta chain variable domain of TCR clone 359206 (TRBV7-8, TRBJ2-2)
CASSHLFPGPTIHITGELFF

SEQ ID NO: 718413 - protein, 14 aa, Homo sapiens
  CDR3 for alpha chain variable domain of TCR clone 359207 (TRAV29/DV5, TRAJ45)
CAASFRGGADGLTF

SEQ ID NO: 718414 - protein, 13 aa, Homo sapiens
  CDR3 for beta chain variable domain of TCR clone 359207 (TRBV4-1, TRBJ2-5)
CASSLTRGETQYF

SEQ ID NO: 718415 - protein, 15 aa, Homo sapiens
  CDR3 for alpha chain variable domain of TCR clone 359208 (TRAV16, TRAJ12)
CSKWPLRDSSYKLIF

SEQ ID NO: 718416 - protein, 13 aa, Homo sapiens
  CDR3 for beta chain variable domain of TCR clone 359208 (TRBV4-2, TRBJ1-1)
CASSQAGNTEDFF

SEQ ID NO: 718417 - protein, 14 aa, Homo sapiens
  CDR3 for alpha chain variable domain of TCR clone 359209 (TRAV13-2, TRAJ17)
CAENGKAAGKKLTF

SEQ ID NO: 718418 - protein, 13 aa, Homo sapiens
  CDR3 for beta chain variable domain of TCR clone 359209 (TRBV7-3, TRBJ1-2)
CASSLKRGYGYTF

SEQ ID NO: 718419 - protein, 11 aa, Homo sapiens
  CDR3 for alpha chain variable domain of TCR clone 359210 (TRAV13-1, TRAJ20)
CAASKNYKLRF

SEQ ID NO: 718420 - protein, 16 aa, Homo sapiens
  CDR3 for beta chain variable domain of TCR clone 359210 (TRBV20-1, TRBJ1-4)
CSAPGQGLLTNEKLFF

SEQ ID NO: 718421 - protein, 13 aa, Homo sapiens
  CDR3 for alpha chain variable domain of TCR clone 359211 (TRAV8-6, TRAJ41)
CAVSENSGYALNF

SEQ ID NO: 718422 - protein, 12 aa, Homo sapiens
  CDR3 for beta chain variable domain of TCR clone 359211 (TRBV7-3, TRBJ2-5)
CASSYPGGTQYF

SEQ ID NO: 718423 - protein, 16 aa, Homo sapiens
  CDR3 for alpha chain variable domain of TCR clone 359212 (TRAV4, TRAJ18)
CCVLLIGGSTLGRLYF

SEQ ID NO: 718424 - protein, 15 aa, Homo sapiens
  CDR3 for beta chain variable domain of TCR clone 359212 (TRBV20-1, TRBJ2-7)
CSAESGTSGAYEQYF

SEQ ID NO: 718425 - protein, 14 aa, Homo sapiens
  CDR3 for alpha chain variable domain of TCR clone 359213 (TRAV23/DV6, TRAJ24)
CVASLSDSWGKLQF

SEQ ID NO: 718426 - protein, 16 aa, Homo sapiens
  CDR3 for beta chain variable domain of TCR clone 359213 (TRBV12-5, TRBJ2-5)
CASGPRTSGNQETQYF

SEQ ID NO: 718427 - protein, 14 aa, Homo sapiens
  CDR3 for alpha chain variable domain of TCR clone 359214 (TRAV8-6, TRAJ52)
CAVIGGTSYGKLTF

SEQ ID NO: 718428 - protein, 15 aa, Homo sapiens
  CDR3 for beta chain variable domain of TCR clone 359214 (TRBV27, TRBJ2-1)
CASSNGGGSSNEQFF

SEQ ID NO: 718429 - protein, 12 aa, Homo sapiens
  CDR3 for alpha chain variable domain of TCR clone 359215 (TRAV3, TRAJ20)
CAVRDGDYKLSF

SEQ ID NO: 718430 - protein, 15 aa, Homo sapiens
  CDR3 for beta chain variable domain of TCR clone 359215 (TRBV19, TRBJ1-6)
CASSTQGAVGSPLHF

SEQ ID NO: 718431 - protein, 14 aa, Homo sapiens
  CDR3 for alpha chain variable domain of TCR clone 359216 (TRAV13-1, TRAJ44)
CEAKATGTASKLTF

SEQ ID NO: 718432 - protein, 11 aa, Homo sapiens
  CDR3 for beta chain variable domain of TCR clone 359216 (TRBV12-4, TRBJ2-3)
CASTATDTQYF

SEQ ID NO: 718433 - protein, 13 aa, Homo sapiens
  CDR3 for alpha chain variable domain of TCR clone 359217 (TRAV12-3, TRAJ9)
CAMSADGGFKTIF

SEQ ID NO: 718434 - protein, 14 aa, Homo sapiens
  CDR3 for beta chain variable domain of TCR clone 359217 (TRBV28, TRBJ1-2)
CASRIQGANYGYTF

SEQ ID NO: 718435 - protein, 14 aa, Homo sapiens
  CDR3 for alpha chain variable domain of TCR clone 359218 (TRAV12-3, TRAJ43)
CAMSLGGAGTRLTV

SEQ ID NO: 718436 - protein, 14 aa, Homo sapiens
  CDR3 for beta chain variable domain of TCR clone 359218 (TRBV18, TRBJ2-5)
CASSPGVSQETQYF

SEQ ID NO: 718437 - protein, 13 aa, Homo sapiens
  CDR3 for alpha chain variable domain of TCR clone 359219 (TRAV12-1, TRAJ26)
CVVRRNYGQNFVF

SEQ ID NO: 718438 - protein, 13 aa, Homo sapiens
  CDR3 for beta chain variable domain of TCR clone 359219 (TRBV14, TRBJ1-1)
CASSQEAGTEAFF

SEQ ID NO: 718439 - protein, 16 aa, Homo sapiens
  CDR3 for alpha chain variable domain of TCR clone 359220 (TRAV30, TRAJ24)
CGTEIVDADSWGKCQF

SEQ ID NO: 718440 - protein, 14 aa, Homo sapiens
  CDR3 for beta chain variable domain of TCR clone 359220 (TRBV12-5, TRBJ2-5)
CASGSRTQQETQYF

SEQ ID NO: 718441 - protein, 16 aa, Homo sapiens
  CDR3 for alpha chain variable domain of TCR clone 359221 (TRAV26-1, TRAJ32)
CIVRTNYGGATNKLIF

SEQ ID NO: 718442 - protein, 14 aa, Homo sapiens
  CDR3 for beta chain variable domain of TCR clone 359221 (TRBV12-4, TRBJ2-7)
CASTCGLSTYEQYF

SEQ ID NO: 718443 - protein, 10 aa, Homo sapiens
  CDR3 for alpha chain variable domain of TCR clone 359222 (TRAV25, TRAJ20)
CAVNDYKLSF

SEQ ID NO: 718444 - protein, 14 aa, Homo sapiens
  CDR3 for beta chain variable domain of TCR clone 359222 (TRBV5-1, TRBJ2-7)
CASSRGESLYEQYF

SEQ ID NO: 718445 - protein, 11 aa, Homo sapiens
  CDR3 for alpha chain variable domain of TCR clone 359223 (TRAV2, TRAJ33)
YAVQSNYQLIW

SEQ ID NO: 718446 - protein, 15 aa, Homo sapiens
  CDR3 for beta chain variable domain of TCR clone 359223 (TRBV19, TRBJ1-1)
CASTSGQIQNTEAFF

SEQ ID NO: 718447 - protein, 12 aa, Homo sapiens
  CDR3 for alpha chain variable domain of TCR clone 359224 (TRAV21, TRAJ13)
PCPSGGYQKVTF

SEQ ID NO: 718448 - protein, 15 aa, Homo sapiens
  CDR3 for beta chain variable domain of TCR clone 359224 (TRBV27, TRBJ2-5)
CASSLYPRGGETQYF

SEQ ID NO: 718449 - protein, 14 aa, Homo sapiens
  CDR3 for alpha chain variable domain of TCR clone 359225 (TRAV8-6, TRAJ12)
CAVKAADSSYKLIF

SEQ ID NO: 718450 - protein, 12 aa, Homo sapiens
  CDR3 for beta chain variable domain of TCR clone 359225 (TRBV7-9, TRBJ2-7)
CAGSIKREEQYF

SEQ ID NO: 718451 - protein, 18 aa, Homo sapiens
  CDR3 for alpha chain variable domain of TCR clone 359226 (TRAV13-1, TRAJ52)
CAASKRSAGGTSYGKLTF

SEQ ID NO: 718452 - protein, 15 aa, Homo sapiens
  CDR3 for beta chain variable domain of TCR clone 359226 (TRBV7-3, TRBJ1-1)
CASSPRADRNTEAFF

SEQ ID NO: 718453 - protein, 17 aa, Homo sapiens
  CDR3 for alpha chain variable domain of TCR clone 359227 (TRAV13-1, TRAJ28)
FSASPPYSGAGSYQLTF

SEQ ID NO: 718454 - protein, 15 aa, Homo sapiens
  CDR3 for beta chain variable domain of TCR clone 359227 (TRBV6-3, TRBJ2-2)
CASSFLATLTGELFF

SEQ ID NO: 718455 - protein, 14 aa, Homo sapiens
  CDR3 for alpha chain variable domain of TCR clone 359228 (TRAV13-1, TRAJ44)
CAAQATGTASKLTF

SEQ ID NO: 718456 - protein, 17 aa, Homo sapiens
  CDR3 for beta chain variable domain of TCR clone 359228 (TRBV7-3, TRBJ2-3)
SASSLMKRMRGADTQYF

SEQ ID NO: 718457 - protein, 11 aa, Homo sapiens
  CDR3 for alpha chain variable domain of TCR clone 359229 (TRAV12-3, TRAJ27)
CAMANAGKSTF

SEQ ID NO: 718458 - protein, 12 aa, Homo sapiens
  CDR3 for beta chain variable domain of TCR clone 359229 (TRBV11-2, TRBJ2-2)
CASSPGGGELFF

SEQ ID NO: 718459 - protein, 12 aa, Homo sapiens
  CDR3 for alpha chain variable domain of TCR clone 359230 (TRAV4, TRAJ21)
CLVGDYFNKFYF

SEQ ID NO: 718460 - protein, 17 aa, Homo sapiens
  CDR3 for beta chain variable domain of TCR clone 359230 (TRBV3-1, TRBJ2-7)
CASSQDLTGLSSYEQYF

SEQ ID NO: 718461 - protein, 19 aa, Homo sapiens
  CDR3 for alpha chain variable domain of TCR clone 359231 (TRAV26-1, TRAJ52)
CIVRGANNAGGTSYGKLTF

SEQ ID NO: 718462 - protein, 14 aa, Homo sapiens
  CDR3 for beta chain variable domain of TCR clone 359231 (TRBV19, TRBJ1-2)
CASSIGAGSYGYTF

SEQ ID NO: 718463 - protein, 14 aa, Homo sapiens
  CDR3 for alpha chain variable domain of TCR clone 359232 (TRAV1-2, TRAJ16)
CAVNRVSDGQKLLF

SEQ ID NO: 718464 - protein, 13 aa, Homo sapiens
  CDR3 for beta chain variable domain of TCR clone 359232 (TRBV10-2, TRBJ2-7)
CASGASGGYEQYF

SEQ ID NO: 718465 - protein, 15 aa, Homo sapiens
  CDR3 for alpha chain variable domain of TCR clone 359233 (TRAV13-1, TRAJ8)
CAASIPNTGFQKLVF

SEQ ID NO: 718466 - protein, 14 aa, Homo sapiens
  CDR3 for beta chain variable domain of TCR clone 359233 (TRBV19, TRBJ2-1)
CASPTFVLSGEQFF

SEQ ID NO: 718467 - protein, 13 aa, Homo sapiens
  CDR3 for alpha chain variable domain of TCR clone 359234 (TRAV8-3, TRAJ48)
CAVVRFGNEKLTF

SEQ ID NO: 718468 - protein, 14 aa, Homo sapiens
  CDR3 for beta chain variable domain of TCR clone 359234 (TRBV6-1, TRBJ1-3)
CASVQGGGGNTIYF

SEQ ID NO: 718469 - protein, 12 aa, Homo sapiens
  CDR3 for alpha chain variable domain of TCR clone 359235 (TRAV21, TRAJ47)
CCEEEYGNKLVF

SEQ ID NO: 718470 - protein, 16 aa, Homo sapiens
  CDR3 for beta chain variable domain of TCR clone 359235 (TRBV12-5, TRBJ2-5)
CASGPRTSGNQGTQYF

SEQ ID NO: 718471 - protein, 12 aa, Homo sapiens
  CDR3 for alpha chain variable domain of TCR clone 359236 (TRAV12-3, TRAJ17)
CAMTLTGNKLTF

SEQ ID NO: 718472 - protein, 14 aa, Homo sapiens
  CDR3 for beta chain variable domain of TCR clone 359236 (TRBV11-3, TRBJ1-6)
CASSFSGGDSPLHF

SEQ ID NO: 718473 - protein, 17 aa, Homo sapiens
  CDR3 for alpha chain variable domain of TCR clone 359237 (TRAV38-2/DV8, TRAJ28)
CAFLTLYSGAGSYQLTF

SEQ ID NO: 718474 - protein, 14 aa, Homo sapiens
  CDR3 for beta chain variable domain of TCR clone 359237 (TRBV7-2, TRBJ2-5)
CASRLSGGGETQYF

SEQ ID NO: 718475 - protein, 15 aa, Homo sapiens
  CDR3 for alpha chain variable domain of TCR clone 359238 (TRAV10, TRAJ44)
CVVSGATYTASKLTF

SEQ ID NO: 718476 - protein, 15 aa, Homo sapiens
  CDR3 for beta chain variable domain of TCR clone 359238 (TRBV12-4, TRBJ1-5)
CASTRQGSGNQPQHF

SEQ ID NO: 718477 - protein, 16 aa, Homo sapiens
  CDR3 for alpha chain variable domain of TCR clone 359239 (TRAV27, TRAJ52)
CAGAPAGGTSYGKLTF

SEQ ID NO: 718478 - protein, 12 aa, Homo sapiens
  CDR3 for beta chain variable domain of TCR clone 359239 (TRBV27, TRBJ2-1)
WASRGFYNEQFF

SEQ ID NO: 718479 - protein, 14 aa, Homo sapiens
  CDR3 for alpha chain variable domain of TCR clone 359240 (TRAV39, TRAJ54)
CAVGLIQGAQKLVF

SEQ ID NO: 718480 - protein, 13 aa, Homo sapiens
  CDR3 for beta chain variable domain of TCR clone 359240 (TRBV12-5, TRBJ2-3)
CASGDRQSDTQYF

SEQ ID NO: 718481 - protein, 15 aa, Homo sapiens
  CDR3 for alpha chain variable domain of TCR clone 359241 (TRAV3, TRAJ22)
CAVRDRGGSARQLTF

SEQ ID NO: 718482 - protein, 14 aa, Homo sapiens
  CDR3 for beta chain variable domain of TCR clone 359241 (TRBV19, TRBJ2-1)
CASSRIASINEQFF

SEQ ID NO: 718483 - protein, 16 aa, Homo sapiens
  CDR3 for alpha chain variable domain of TCR clone 359242 (TRAV26-1, TRAJ37)
CIVRGDGSGNTGKLIF

SEQ ID NO: 718484 - protein, 15 aa, Homo sapiens
  CDR3 for beta chain variable domain of TCR clone 359242 (TRBV4-1, TRBJ1-4)
CASSDTGGTNEKLFF

SEQ ID NO: 718485 - protein, 15 aa, Homo sapiens
  CDR3 for alpha chain variable domain of TCR clone 359243 (TRAV27, TRAJ38)
CAARRNAGNNRKLIW

SEQ ID NO: 718486 - protein, 13 aa, Homo sapiens
  CDR3 for beta chain variable domain of TCR clone 359243 (TRBV2, TRBJ2-7)
CASSVGGSGEQYF

SEQ ID NO: 718487 - protein, 13 aa, Homo sapiens
  CDR3 for alpha chain variable domain of TCR clone 359244 (TRAV2, TRAJ40)
CAVVTLGTSKYIF

SEQ ID NO: 718488 - protein, 14 aa, Homo sapiens
  CDR3 for beta chain variable domain of TCR clone 359244 (TRBV19, TRBJ2-1)
CASPTFVLSGEQFF

SEQ ID NO: 718489 - protein, 13 aa, Homo sapiens
  CDR3 for alpha chain variable domain of TCR clone 359245 (TRAV27, TRAJ29)
CAGAHSGNTTLVF

SEQ ID NO: 718490 - protein, 14 aa, Homo sapiens
  CDR3 for beta chain variable domain of TCR clone 359245 (TRBV7-9, TRBJ2-7)
CASSIGQGAGEQYF

SEQ ID NO: 718491 - protein, 19 aa, Homo sapiens
  CDR3 for alpha chain variable domain of TCR clone 359246 (TRAV8-3, TRAJ34)
LSTSVLWVWGLRNTDKLIF

SEQ ID NO: 718492 - protein, 15 aa, Homo sapiens
  CDR3 for beta chain variable domain of TCR clone 359246 (TRBV13, TRBJ1-2)
CASSLGRQPGYGYTF

SEQ ID NO: 718493 - protein, 15 aa, Homo sapiens
  CDR3 for alpha chain variable domain of TCR clone 359247 (TRAV20, TRAJ58)
CAVQDLETSSSRLTF

SEQ ID NO: 718494 - protein, 12 aa, Homo sapiens
  CDR3 for beta chain variable domain of TCR clone 359247 (TRBV9, TRBJ2-2)
CASSARTGELFF

SEQ ID NO: 718495 - protein, 10 aa, Homo sapiens
  CDR3 for alpha chain variable domain of TCR clone 359248 (TRAV27, TRAJ37)
CAGGVGKLIF

SEQ ID NO: 718496 - protein, 13 aa, Homo sapiens
  CDR3 for beta chain variable domain of TCR clone 359248 (TRBV27, TRBJ1-2)
CASSRGLVYGYAF

SEQ ID NO: 718497 - protein, 17 aa, Homo sapiens
  CDR3 for alpha chain variable domain of TCR clone 359249 (TRAV17, TRAJ28)
CATDPRRGGAGSYQRTF

SEQ ID NO: 718498 - protein, 17 aa, Homo sapiens
  CDR3 for beta chain variable domain of TCR clone 359249 (TRBV11-2, TRBJ2-1)
CASSLYPPGVEYNEQFF

SEQ ID NO: 718499 - protein, 15 aa, Homo sapiens
  CDR3 for alpha chain variable domain of TCR clone 359250 (TRAV8-3, TRAJ11)
CAVCLLNSGYSTLTF

SEQ ID NO: 718500 - protein, 14 aa, Homo sapiens
  CDR3 for beta chain variable domain of TCR clone 359250 (TRBV6-1, TRBJ1-3)
CASVQGGGGNTIYF

SEQ ID NO: 718501 - protein, 20 aa, Homo sapiens
  CDR3 for alpha chain variable domain of TCR clone 359251 (TRAV12-3, TRAJ52)
CAMTQSYQNAGGTSYGKLTF

SEQ ID NO: 718502 - protein, 16 aa, Homo sapiens
  CDR3 for beta chain variable domain of TCR clone 359251 (TRBV9, TRBJ1-3)
CGSSVGLASSGNTIYF

SEQ ID NO: 718503 - protein, 15 aa, Homo sapiens
  CDR3 for alpha chain variable domain of TCR clone 359252 (TRAV17, TRAJ4)
CATGTWSGGYNKLIF

SEQ ID NO: 718504 - protein, 16 aa, Homo sapiens
  CDR3 for beta chain variable domain of TCR clone 359252 (TRBV13, TRBJ2-2)
CACSPRTGEHTGELFF

SEQ ID NO: 718505 - protein, 19 aa, Homo sapiens
  CDR3 for alpha chain variable domain of TCR clone 359253 (TRAV2, TRAJ20)
ILQVREADAAVYRDCKFSF

SEQ ID NO: 718506 - protein, 13 aa, Homo sapiens
  CDR3 for beta chain variable domain of TCR clone 359253 (TRBV7-3, TRBJ1-1)
CASSQDWGAEAFF

SEQ ID NO: 718507 - protein, 17 aa, Homo sapiens
  CDR3 for alpha chain variable domain of TCR clone 359254 (TRAV3, TRAJ6)
CAVRDGPRPGGSYIPTF

SEQ ID NO: 718508 - protein, 14 aa, Homo sapiens
  CDR3 for beta chain variable domain of TCR clone 359254 (TRBV27, TRBJ2-2)
CASRPGVNTGELFF

SEQ ID NO: 718509 - protein, 12 aa, Homo sapiens
  CDR3 for alpha chain variable domain of TCR clone 359255 (TRAV8-3, TRAJ41)
CAVALSGYALNV

SEQ ID NO: 718510 - protein, 18 aa, Homo sapiens
  CDR3 for beta chain variable domain of TCR clone 359255 (TRBV20-1, TRBJ2-6)
CSAETTPTHGSGANVLTF

SEQ ID NO: 718511 - protein, 14 aa, Homo sapiens
  CDR3 for alpha chain variable domain of TCR clone 359256 (TRAV12-3, TRAJ29)
CALILLSGNTPLVF

SEQ ID NO: 718512 - protein, 16 aa, Homo sapiens
  CDR3 for beta chain variable domain of TCR clone 359256 (TRBV28, TRBJ2-7)
CASSSGTSGRGYEQYF

SEQ ID NO: 718513 - protein, 15 aa, Homo sapiens
  CDR3 for alpha chain variable domain of TCR clone 359257 (TRAV8-3, TRAJ45)
CAASYSGGGADVLTF

SEQ ID NO: 718514 - protein, 13 aa, Homo sapiens
  CDR3 for beta chain variable domain of TCR clone 359257 (TRBV10-3, TRBJ2-7)
CASKLAVNYEQYF

SEQ ID NO: 718515 - protein, 13 aa, Homo sapiens
  CDR3 for alpha chain variable domain of TCR clone 359258 (TRAV12-3, TRAJ13)
CAMGTGGYQKVTF

SEQ ID NO: 718516 - protein, 14 aa, Homo sapiens
  CDR3 for beta chain variable domain of TCR clone 359258 (TRBV7-2, TRBJ2-5)
CASSTGGELKTQYY

SEQ ID NO: 718517 - protein, 13 aa, Homo sapiens
  CDR3 for alpha chain variable domain of TCR clone 359259 (TRAV1-2, TRAJ9)
FAALNPGGFKTIF

SEQ ID NO: 718518 - protein, 14 aa, Homo sapiens
  CDR3 for beta chain variable domain of TCR clone 359259 (TRBV13, TRBJ2-3)
CASSSGSPTDTQYF

SEQ ID NO: 718519 - protein, 19 aa, Homo sapiens
  CDR3 for alpha chain variable domain of TCR clone 359260 (TRAV26-1, TRAJ28)
CIVRVAHAYSGAGSYQLTF

SEQ ID NO: 718520 - protein, 17 aa, Homo sapiens
  CDR3 for beta chain variable domain of TCR clone 359260 (TRBV9, TRBJ2-2)
CASSVGGQGTDTGELSF

SEQ ID NO: 718521 - protein, 13 aa, Homo sapiens
  CDR3 for alpha chain variable domain of TCR clone 359261 (TRAV21, TRAJ20)
CAVGLRVDYKLSF

SEQ ID NO: 718522 - protein, 13 aa, Homo sapiens
  CDR3 for beta chain variable domain of TCR clone 359261 (TRBV29-1, TRBJ2-1)
CSVEGRRVNEQFF

SEQ ID NO: 718523 - protein, 13 aa, Homo sapiens
  CDR3 for alpha chain variable domain of TCR clone 359262 (TRAV29/DV5, TRAJ31)
CAASRNNNARLMF

SEQ ID NO: 718524 - protein, 14 aa, Homo sapiens
  CDR3 for beta chain variable domain of TCR clone 359262 (TRBV7-2, TRBJ2-7)
CASSPKTSFHEQYF

SEQ ID NO: 718525 - protein, 15 aa, Homo sapiens
  CDR3 for alpha chain variable domain of TCR clone 359263 (TRAV8-3, TRAJ45)
CASSYSGGGADGLTF

SEQ ID NO: 718526 - protein, 16 aa, Homo sapiens
  CDR3 for beta chain variable domain of TCR clone 359263 (TRBV5-1, TRBJ1-1)
CASSSGGNSLNTEAFF

SEQ ID NO: 718527 - protein, 19 aa, Homo sapiens
  CDR3 for alpha chain variable domain of TCR clone 359264 (TRAV12-1, TRAJ45)
CVVTHDVGYSGGGADGLTF

SEQ ID NO: 718528 - protein, 16 aa, Homo sapiens
  CDR3 for beta chain variable domain of TCR clone 359264 (TRBV6-1, TRBJ2-5)
CASSETLDRGAETQYF

SEQ ID NO: 718529 - protein, 12 aa, Homo sapiens
  CDR3 for alpha chain variable domain of TCR clone 359265 (TRAV41, TRAJ58)
CAVETSGSRLTF

SEQ ID NO: 718530 - protein, 15 aa, Homo sapiens
  CDR3 for beta chain variable domain of TCR clone 359265 (TRBV28, TRBJ2-1)
CASSIIAGGRSEQFF

SEQ ID NO: 718531 - protein, 12 aa, Homo sapiens
  CDR3 for alpha chain variable domain of TCR clone 359266 (TRAV21, TRAJ49)
CAVKDGGNQFYF

SEQ ID NO: 718532 - protein, 14 aa, Homo sapiens
  CDR3 for beta chain variable domain of TCR clone 359266 (TRBV12-5, TRBJ2-5)
CASGSRTHQETQYF

SEQ ID NO: 718533 - protein, 14 aa, Homo sapiens
  CDR3 for alpha chain variable domain of TCR clone 359267 (TRAV3, TRAJ21)
CAVRDAYNFNKFYF

SEQ ID NO: 718534 - protein, 19 aa, Homo sapiens
  CDR3 for beta chain variable domain of TCR clone 359267 (TRBV20-1, TRBJ1-6)
CSARGGYTFSYNAPLTLGM

SEQ ID NO: 718535 - protein, 13 aa, Homo sapiens
  CDR3 for alpha chain variable domain of TCR clone 359268 (TRAV17, TRAJ8)
CATGPVGFQKLVF

SEQ ID NO: 718536 - protein, 15 aa, Homo sapiens
  CDR3 for beta chain variable domain of TCR clone 359268 (TRBV20-1, TRBJ2-5)
CSAGRLPSGQDTQYF

SEQ ID NO: 718537 - protein, 12 aa, Homo sapiens
  CDR3 for alpha chain variable domain of TCR clone 359269 (TRAV17, TRAJ57)
FATDGGSEKLVF

SEQ ID NO: 718538 - protein, 12 aa, Homo sapiens
  CDR3 for beta chain variable domain of TCR clone 359269 (TRBV29-1, TRBJ2-2)
CSVDKYTGELFF

SEQ ID NO: 718539 - protein, 12 aa, Homo sapiens
  CDR3 for alpha chain variable domain of TCR clone 359270 (TRAV8-3, TRAJ20)
CAVGANDYELSF

SEQ ID NO: 718540 - protein, 16 aa, Homo sapiens
  CDR3 for beta chain variable domain of TCR clone 359270 (TRBV19, TRBJ2-2)
CASRSRGTGATGELFF

SEQ ID NO: 718541 - protein, 16 aa, Homo sapiens
  CDR3 for alpha chain variable domain of TCR clone 359271 (TRAV23/DV6, TRAJ9)
CAASIGGNTGGFKTIF

SEQ ID NO: 718542 - protein, 13 aa, Homo sapiens
  CDR3 for beta chain variable domain of TCR clone 359271 (TRBV12-4, TRBJ1-1)
CASSPGTGFEAFV

SEQ ID NO: 718543 - protein, 12 aa, Homo sapiens
  CDR3 for alpha chain variable domain of TCR clone 359272 (TRAV29/DV5, TRAJ34)
CAASGNTDKLIF

SEQ ID NO: 718544 - protein, 14 aa, Homo sapiens
  CDR3 for beta chain variable domain of TCR clone 359272 (TRBV4-2, TRBJ2-1)
CASGLDRAYNEQFF

SEQ ID NO: 718545 - protein, 13 aa, Homo sapiens
  CDR3 for alpha chain variable domain of TCR clone 359273 (TRAV30, TRAJ34)
CGTVGYNTEKLIF

SEQ ID NO: 718546 - protein, 16 aa, Homo sapiens
  CDR3 for beta chain variable domain of TCR clone 359273 (TRBV7-9, TRBJ1-2)
CASSLGFSSGEDGYTF

SEQ ID NO: 718547 - protein, 14 aa, Homo sapiens
  CDR3 for alpha chain variable domain of TCR clone 359274 (TRAV1-2, TRAJ8)
CAVREDTGFQKRLF

SEQ ID NO: 718548 - protein, 15 aa, Homo sapiens
  CDR3 for beta chain variable domain of TCR clone 359274 (TRBV6-3, TRBJ2-7)
CASSSPGTVFYEQYF

SEQ ID NO: 718549 - protein, 14 aa, Homo sapiens
  CDR3 for alpha chain variable domain of TCR clone 359275 (TRAV12-3, TRAJ9)
YAMSVETGGFKTIF

SEQ ID NO: 718550 - protein, 14 aa, Homo sapiens
  CDR3 for beta chain variable domain of TCR clone 359275 (TRBV7-2, TRBJ2-7)
CASRSQGAAYEQYF

SEQ ID NO: 718551 - protein, 16 aa, Homo sapiens
  CDR3 for alpha chain variable domain of TCR clone 359276 (TRAV26-1, TRAJ36)
CIVRAICRSGANNLFF

SEQ ID NO: 718552 - protein, 14 aa, Homo sapiens
  CDR3 for beta chain variable domain of TCR clone 359276 (TRBV25-1, TRBJ2-1)
CASSKTGGYNEQFF

SEQ ID NO: 718553 - protein, 13 aa, Homo sapiens
  CDR3 for alpha chain variable domain of TCR clone 359277 (TRAV2, TRAJ40)
CAVVTSGTYKCIF

SEQ ID NO: 718554 - protein, 13 aa, Homo sapiens
  CDR3 for beta chain variable domain of TCR clone 359277 (TRBV7-9, TRBJ2-5)
CASLPSGRETQYF

SEQ ID NO: 718555 - protein, 22 aa, Homo sapiens
  CDR3 for alpha chain variable domain of TCR clone 359278 (TRAV2, TRAJ10)
ILQVREADAAVYYTGGGDKLTF

SEQ ID NO: 718556 - protein, 16 aa, Homo sapiens
  CDR3 for beta chain variable domain of TCR clone 359278 (TRBV5-7, TRBJ1-2)
CASSRGVTGGSYGYTF

SEQ ID NO: 718557 - protein, 18 aa, Homo sapiens
  CDR3 for alpha chain variable domain of TCR clone 359279 (TRAV21, TRAJ52)
CAVRPSPAGGTSYGKLTF

SEQ ID NO: 718558 - protein, 17 aa, Homo sapiens
  CDR3 for beta chain variable domain of TCR clone 359279 (TRBV7-9, TRBJ2-1)
CASSLVASYPSYNEQFF

SEQ ID NO: 718559 - protein, 14 aa, Homo sapiens
  CDR3 for alpha chain variable domain of TCR clone 359280 (TRAV17, TRAJ15)
CATGPNQAGTVLIF

SEQ ID NO: 718560 - protein, 15 aa, Homo sapiens
  CDR3 for beta chain variable domain of TCR clone 359280 (TRBV11-2, TRBJ2-2)
CASSSDRVNAGELFF

SEQ ID NO: 718561 - protein, 15 aa, Homo sapiens
  CDR3 for alpha chain variable domain of TCR clone 359281 (TRAV2, TRAJ9)
CAVAALNTGGFKTIF

SEQ ID NO: 718562 - protein, 15 aa, Homo sapiens
  CDR3 for beta chain variable domain of TCR clone 359281 (TRBV7-3, TRBJ1-1)
CASSPRADRNTEAFF

SEQ ID NO: 718563 - protein, 13 aa, Homo sapiens
  CDR3 for alpha chain variable domain of TCR clone 359282 (TRAV35, TRAJ42)
CAGFPGSQGNLIF

SEQ ID NO: 718564 - protein, 17 aa, Homo sapiens
  CDR3 for beta chain variable domain of TCR clone 359282 (TRBV11-2, TRBJ2-1)
CASSLYPPGVEYNEQFF

SEQ ID NO: 718565 - protein, 18 aa, Homo sapiens
  CDR3 for alpha chain variable domain of TCR clone 359283 (TRAV21, TRAJ52)
CAVRPSPAGGTSYGRLTF

SEQ ID NO: 718566 - protein, 14 aa, Homo sapiens
  CDR3 for beta chain variable domain of TCR clone 359283 (TRBV7-8, TRBJ1-2)
CASSPDSLSYGYTF

SEQ ID NO: 718567 - protein, 13 aa, Homo sapiens
  CDR3 for alpha chain variable domain of TCR clone 359284 (TRAV27, TRAJ57)
CRSAQCGSEKLVF

SEQ ID NO: 718568 - protein, 11 aa, Homo sapiens
  CDR3 for beta chain variable domain of TCR clone 359284 (TRBV11-2, TRBJ1-1)
CASSINTEAFF

SEQ ID NO: 718569 - protein, 15 aa, Homo sapiens
  CDR3 for alpha chain variable domain of TCR clone 359285 (TRAV21, TRAJ22)
CAVRLFFWFCKATDL

SEQ ID NO: 718570 - protein, 15 aa, Homo sapiens
  CDR3 for beta chain variable domain of TCR clone 359285 (TRBV19, TRBJ1-5)
ISVPVEPDSFLSQHF

SEQ ID NO: 718571 - protein, 14 aa, Homo sapiens
  CDR3 for alpha chain variable domain of TCR clone 359286 (TRAV17, TRAJ48)
CATEGNFGNEKLTF

SEQ ID NO: 718572 - protein, 14 aa, Homo sapiens
  CDR3 for beta chain variable domain of TCR clone 359286 (TRBV10-2, TRBJ1-5)
CASSSTGRNQPQHF

SEQ ID NO: 718573 - protein, 11 aa, Homo sapiens
  CDR3 for alpha chain variable domain of TCR clone 359287 (TRAV2, TRAJ33)
CAIDSNYQLIW

SEQ ID NO: 718574 - protein, 14 aa, Homo sapiens
  CDR3 for beta chain variable domain of TCR clone 359287 (TRBV11-2, TRBJ2-3)
CASSRLARTDTQYF

SEQ ID NO: 718575 - protein, 14 aa, Homo sapiens
  CDR3 for alpha chain variable domain of TCR clone 359288 (TRAV16, TRAJ33)
CALSAMDSNYQLIW

SEQ ID NO: 718576 - protein, 15 aa, Homo sapiens
  CDR3 for beta chain variable domain of TCR clone 359288 (TRBV7-2, TRBJ2-1)
CASSSGLAGGNEQFF

SEQ ID NO: 718577 - protein, 11 aa, Homo sapiens
  CDR3 for alpha chain variable domain of TCR clone 359289 (TRAV2, TRAJ23)
CAVETRGKLLF

SEQ ID NO: 718578 - protein, 14 aa, Homo sapiens
  CDR3 for beta chain variable domain of TCR clone 359289 (TRBV2, TRBJ2-3)
CASSEGQNTDTQYF

SEQ ID NO: 718579 - protein, 16 aa, Homo sapiens
  CDR3 for alpha chain variable domain of TCR clone 359290 (TRAV26-1, TRAJ32)
CIVRTNYDGATNKLIF

SEQ ID NO: 718580 - protein, 14 aa, Homo sapiens
  CDR3 for beta chain variable domain of TCR clone 359290 (TRBV27, TRBJ1-1)
CASSLLSGLSEAFF

SEQ ID NO: 718581 - protein, 14 aa, Homo sapiens
  CDR3 for alpha chain variable domain of TCR clone 359291 (TRAV12-1, TRAJ30)
CVVNIGGRADKIIF

SEQ ID NO: 718582 - protein, 14 aa, Homo sapiens
  CDR3 for beta chain variable domain of TCR clone 359291 (TRBV20-1, TRBJ2-1)
CSAQIGGSANEQFF

SEQ ID NO: 718583 - protein, 14 aa, Homo sapiens
  CDR3 for alpha chain variable domain of TCR clone 359292 (TRAV12-1, TRAJ12)
CVVTSMDSSYKLIF

SEQ ID NO: 718584 - protein, 13 aa, Homo sapiens
  CDR3 for beta chain variable domain of TCR clone 359292 (TRBV20-1, TRBJ1-1)
CSARGGGNTEAFF

SEQ ID NO: 718585 - protein, 14 aa, Homo sapiens
  CDR3 for alpha chain variable domain of TCR clone 359293 (TRAV3, TRAJ24)
CAVILTDSWGKLQF

SEQ ID NO: 718586 - protein, 15 aa, Homo sapiens
  CDR3 for beta chain variable domain of TCR clone 359293 (TRBV11-2, TRBJ2-1)
CASSSPSTRYNEQFF

SEQ ID NO: 718587 - protein, 16 aa, Homo sapiens
  CDR3 for alpha chain variable domain of TCR clone 359294 (TRAV14/DV4, TRAJ15)
CAMREGPAQAGTALIF

SEQ ID NO: 718588 - protein, 12 aa, Homo sapiens
  CDR3 for beta chain variable domain of TCR clone 359294 (TRBV28, TRBJ2-6)
CAIQAGANVPTF

SEQ ID NO: 718589 - protein, 13 aa, Homo sapiens
  CDR3 for alpha chain variable domain of TCR clone 359295 (TRAV12-3, TRAJ35)
CAMAIGFGNVLHC

SEQ ID NO: 718590 - protein, 15 aa, Homo sapiens
  CDR3 for beta chain variable domain of TCR clone 359295 (TRBV20-1, TRBJ2-1)
CSARGSGTHYNEQFF

SEQ ID NO: 718591 - protein, 14 aa, Homo sapiens
  CDR3 for alpha chain variable domain of TCR clone 359296 (TRAV12-3, TRAJ28)
CAMWSGAGSYQLTF

SEQ ID NO: 718592 - protein, 14 aa, Homo sapiens
  CDR3 for beta chain variable domain of TCR clone 359296 (TRBV19, TRBJ1-5)
CASSLSGGSQFQHF

SEQ ID NO: 718593 - protein, 13 aa, Homo sapiens
  CDR3 for alpha chain variable domain of TCR clone 359297 (TRAV23/DV6, TRAJ12)
WAPRVDSSYKLIF

SEQ ID NO: 718594 - protein, 12 aa, Homo sapiens
  CDR3 for beta chain variable domain of TCR clone 359297 (TRBV7-6, TRBJ2-5)
CASSLSQETQYF

SEQ ID NO: 718595 - protein, 11 aa, Homo sapiens
  CDR3 for alpha chain variable domain of TCR clone 359298 (TRAV35, TRAJ34)
CWARNTVKLIF

SEQ ID NO: 718596 - protein, 13 aa, Homo sapiens
  CDR3 for beta chain variable domain of TCR clone 359298 (TRBV19, TRBJ2-7)
CASSIDRTYEQYF

SEQ ID NO: 718597 - protein, 11 aa, Homo sapiens
  CDR3 for alpha chain variable domain of TCR clone 359299 (TRAV9-2, TRAJ49)
CAPRTGNKFSF

SEQ ID NO: 718598 - protein, 12 aa, Homo sapiens
  CDR3 for beta chain variable domain of TCR clone 359299 (TRBV30, TRBJ1-5)
CAWNRGNQPQHF

SEQ ID NO: 718599 - protein, 19 aa, Homo sapiens
  CDR3 for alpha chain variable domain of TCR clone 359300 (TRAV8-3, TRAJ34)
LSTSVLWVWGLRNTDKLIF

SEQ ID NO: 718600 - protein, 12 aa, Homo sapiens
  CDR3 for beta chain variable domain of TCR clone 359300 (TRBV12-5, TRBJ2-5)
CASGQGVETQYF

SEQ ID NO: 718601 - protein, 13 aa, Homo sapiens
  CDR3 for alpha chain variable domain of TCR clone 359301 (TRAV21, TRAJ15)
FAVRNQAGTALIF

SEQ ID NO: 718602 - protein, 16 aa, Homo sapiens
  CDR3 for beta chain variable domain of TCR clone 359301 (TRBV20-1, TRBJ2-5)
CSPGGTSGGYMETQYF

SEQ ID NO: 718603 - protein, 13 aa, Homo sapiens
  CDR3 for alpha chain variable domain of TCR clone 359302 (TRAV13-2, TRAJ13)
CAERPGGYQKVTF

SEQ ID NO: 718604 - protein, 14 aa, Homo sapiens
  CDR3 for beta chain variable domain of TCR clone 359302 (TRBV7-3, TRBJ1-1)
CASSLKGGNTEAFF

SEQ ID NO: 718605 - protein, 17 aa, Homo sapiens
  CDR3 for alpha chain variable domain of TCR clone 359303 (TRAV26-2, TRAJ42)
YILRDVGYGGSQGNIIF

SEQ ID NO: 718606 - protein, 16 aa, Homo sapiens
  CDR3 for beta chain variable domain of TCR clone 359303 (TRBV12-4, TRBJ2-7)
CASSLIGGTGTYEQYF

SEQ ID NO: 718607 - protein, 15 aa, Homo sapiens
  CDR3 for alpha chain variable domain of TCR clone 359304 (TRAV27, TRAJ38)
CAARRNAGYNRKLIW

SEQ ID NO: 718608 - protein, 13 aa, Homo sapiens
  CDR3 for beta chain variable domain of TCR clone 359304 (TRBV12-5, TRBJ2-3)
RASGDRQSDTQYF

SEQ ID NO: 718609 - protein, 15 aa, Homo sapiens
  CDR3 for alpha chain variable domain of TCR clone 359305 (TRAV25, TRAJ52)
CAGRPGGTSYGKLTF

SEQ ID NO: 718610 - protein, 12 aa, Homo sapiens
  CDR3 for beta chain variable domain of TCR clone 359305 (TRBV5-1, TRBJ2-1)
CASIGGYNEQFF

SEQ ID NO: 718611 - protein, 16 aa, Homo sapiens
  CDR3 for alpha chain variable domain of TCR clone 359306 (TRAV3, TRAJ37)
CAVRPHGSGNTGKLIF

SEQ ID NO: 718612 - protein, 15 aa, Homo sapiens
  CDR3 for beta chain variable domain of TCR clone 359306 (TRBV10-3, TRBJ2-3)
CAISRTSGGTDTQYF

SEQ ID NO: 718613 - protein, 14 aa, Homo sapiens
  CDR3 for alpha chain variable domain of TCR clone 359307 (TRAV2, TRAJ37)
CAVDFTSNTGKLIF

SEQ ID NO: 718614 - protein, 14 aa, Homo sapiens
  CDR3 for beta chain variable domain of TCR clone 359307 (TRBV7-2, TRBJ2-7)
CASSPRTSFYEQYF

SEQ ID NO: 718615 - protein, 14 aa, Homo sapiens
  CDR3 for alpha chain variable domain of TCR clone 359308 (TRAV35, TRAJ53)
CAGNSGGSNYKLAF

SEQ ID NO: 718616 - protein, 15 aa, Homo sapiens
  CDR3 for beta chain variable domain of TCR clone 359308 (TRBV7-9, TRBJ2-1)
CASSLGWGRANEQFF

SEQ ID NO: 718617 - protein, 14 aa, Homo sapiens
  CDR3 for alpha chain variable domain of TCR clone 359309 (TRAV29/DV5, TRAJ45)
CAASFRGGADGLTF

SEQ ID NO: 718618 - protein, 12 aa, Homo sapiens
  CDR3 for beta chain variable domain of TCR clone 359309 (TRBV5-1, TRBJ1-2)
CASSQDTYGYTF

SEQ ID NO: 718619 - protein, 13 aa, Homo sapiens
  CDR3 for alpha chain variable domain of TCR clone 359310 (TRAV23/DV6, TRAJ34)
CAAIEKKTDKLIF

SEQ ID NO: 718620 - protein, 13 aa, Homo sapiens
  CDR3 for beta chain variable domain of TCR clone 359310 (TRBV29-1, TRBJ2-7)
CSVGPSGSYEQYF

SEQ ID NO: 718621 - protein, 14 aa, Homo sapiens
  CDR3 for alpha chain variable domain of TCR clone 359311 (TRAV12-3, TRAJ10)
GHLPLTGGGNKLTF

SEQ ID NO: 718622 - protein, 16 aa, Homo sapiens
  CDR3 for beta chain variable domain of TCR clone 359311 (TRBV4-3, TRBJ2-1)
CASSPALDRGVNEQFF

SEQ ID NO: 718623 - protein, 14 aa, Homo sapiens
  CDR3 for alpha chain variable domain of TCR clone 359312 (TRAV35, TRAJ22)
CAGLRPGSARQLTF

SEQ ID NO: 718624 - protein, 15 aa, Homo sapiens
  CDR3 for beta chain variable domain of TCR clone 359312 (TRBV12-4, TRBJ2-5)
CASSPPTGLKETQYV

SEQ ID NO: 718625 - protein, 13 aa, Homo sapiens
  CDR3 for alpha chain variable domain of TCR clone 359313 (TRAV27, TRAJ45)
CRGGGGGAEGLTV

SEQ ID NO: 718626 - protein, 13 aa, Homo sapiens
  CDR3 for beta chain variable domain of TCR clone 359313 (TRBV20-1, TRBJ1-1)
CSAPEGGNTEAFF

SEQ ID NO: 718627 - protein, 15 aa, Homo sapiens
  CDR3 for alpha chain variable domain of TCR clone 359314 (TRAV16, TRAJ12)
CSKWPLRDSSYKLSF

SEQ ID NO: 718628 - protein, 13 aa, Homo sapiens
  CDR3 for beta chain variable domain of TCR clone 359314 (TRBV4-2, TRBJ1-1)
CASSQAGNTEAFF

SEQ ID NO: 718629 - protein, 13 aa, Homo sapiens
  CDR3 for alpha chain variable domain of TCR clone 359315 (TRAV13-1, TRAJ10)
RAALEGGGNKLTF

SEQ ID NO: 718630 - protein, 17 aa, Homo sapiens
  CDR3 for beta chain variable domain of TCR clone 359315 (TRBV7-3, TRBJ2-2)
CASSLSGTSGGTGELFF

SEQ ID NO: 718631 - protein, 11 aa, Homo sapiens
  CDR3 for alpha chain variable domain of TCR clone 359316 (TRAV4, TRAJ20)
CLVGDKVTTTS

SEQ ID NO: 718632 - protein, 15 aa, Homo sapiens
  CDR3 for beta chain variable domain of TCR clone 359316 (TRBV18, TRBJ2-7)
CASSPASTGNYEQYF

SEQ ID NO: 718633 - protein, 13 aa, Homo sapiens
  CDR3 for alpha chain variable domain of TCR clone 359317 (TRAV38-1, TRAJ49)
CAFMKYTGNQFYF

SEQ ID NO: 718634 - protein, 16 aa, Homo sapiens
  CDR3 for beta chain variable domain of TCR clone 359317 (TRBV5-1, TRBJ1-1)
CASSFLQGGVKLSLDK

SEQ ID NO: 718635 - protein, 17 aa, Homo sapiens
  CDR3 for alpha chain variable domain of TCR clone 359318 (TRAV13-1, TRAJ28)
CAASPPYSGAGSYQLTF

SEQ ID NO: 718636 - protein, 12 aa, Homo sapiens
  CDR3 for beta chain variable domain of TCR clone 359318 (TRBV11-2, TRBJ2-2)
CASSLPTGELFF

SEQ ID NO: 718637 - protein, 15 aa, Homo sapiens
  CDR3 for alpha chain variable domain of TCR clone 359319 (TRAV26-1, TRAJ29)
CIVRVEGSGNTPLVF

SEQ ID NO: 718638 - protein, 14 aa, Homo sapiens
  CDR3 for beta chain variable domain of TCR clone 359319 (TRBV5-4, TRBJ1-4)
CASSLNLGREKLFF

SEQ ID NO: 718639 - protein, 23 aa, Homo sapiens
  CDR3 for alpha chain variable domain of TCR clone 359320 (TRAV23/DV6, TRAJ47)
SLHIMDSQPGDSATGGEGNKLVF

SEQ ID NO: 718640 - protein, 15 aa, Homo sapiens
  CDR3 for beta chain variable domain of TCR clone 359320 (TRBV6-3, TRBJ2-7)
CASSSPGTVFYEQYF

SEQ ID NO: 718641 - protein, 11 aa, Homo sapiens
  CDR3 for alpha chain variable domain of TCR clone 359321 (TRAV20, TRAJ34)
CRTKGTDKLIF

SEQ ID NO: 718642 - protein, 15 aa, Homo sapiens
  CDR3 for beta chain variable domain of TCR clone 359321 (TRBV19, TRBJ1-1)
CASTSGQIQNTEAFF

SEQ ID NO: 718643 - protein, 13 aa, Homo sapiens
  CDR3 for alpha chain variable domain of TCR clone 359322 (TRAV12-2, TRAJ20)
CAVYPSNDYKLSF

SEQ ID NO: 718644 - protein, 12 aa, Homo sapiens
  CDR3 for beta chain variable domain of TCR clone 359322 (TRBV19, TRBJ2-7)
CASTDRGYEQYF

SEQ ID NO: 718645 - protein, 17 aa, Homo sapiens
  CDR3 for alpha chain variable domain of TCR clone 359323 (TRAV8-6, TRAJ8)
CAVKEGIENTGFQKLVF

SEQ ID NO: 718646 - protein, 12 aa, Homo sapiens
  CDR3 for beta chain variable domain of TCR clone 359323 (TRBV19, TRBJ1-4)
YASKDWPGGLFF

SEQ ID NO: 718647 - protein, 14 aa, Homo sapiens
  CDR3 for alpha chain variable domain of TCR clone 359324 (TRAV39, TRAJ33)
CAVDIKNSHYQLIW

SEQ ID NO: 718648 - protein, 16 aa, Homo sapiens
  CDR3 for beta chain variable domain of TCR clone 359324 (TRBV19, TRBJ2-1)
CASSKAGPSSYNEQFF

SEQ ID NO: 718649 - protein, 12 aa, Homo sapiens
  CDR3 for alpha chain variable domain of TCR clone 359325 (TRAV27, TRAJ11)
CAGAGGYSTLTF

SEQ ID NO: 718650 - protein, 14 aa, Homo sapiens
  CDR3 for beta chain variable domain of TCR clone 359325 (TRBV12-5, TRBJ1-3)
CASGPAGSGNTIYF

SEQ ID NO: 718651 - protein, 16 aa, Homo sapiens
  CDR3 for alpha chain variable domain of TCR clone 359326 (TRAV3, TRAJ27)
CAVRDPQGTNAGKSTF

SEQ ID NO: 718652 - protein, 17 aa, Homo sapiens
  CDR3 for beta chain variable domain of TCR clone 359326 (TRBV4-1, TRBJ2-7)
YASSQGRGLQTSYEQYL

SEQ ID NO: 718653 - protein, 12 aa, Homo sapiens
  CDR3 for alpha chain variable domain of TCR clone 359327 (TRAV12-3, TRAJ17)
CAMTLTGNKLTF

SEQ ID NO: 718654 - protein, 15 aa, Homo sapiens
  CDR3 for beta chain variable domain of TCR clone 359327 (TRBV19, TRBJ2-1)
CASSILWEGRNEQFF

SEQ ID NO: 718655 - protein, 13 aa, Homo sapiens
  CDR3 for alpha chain variable domain of TCR clone 359328 (TRAV1-2, TRAJ31)
CAVRPNNNARLMF

SEQ ID NO: 718656 - protein, 17 aa, Homo sapiens
  CDR3 for beta chain variable domain of TCR clone 359328 (TRBV7-3, TRBJ2-3)
CASSLMKRMRGADTQYF

SEQ ID NO: 718657 - protein, 14 aa, Homo sapiens
  CDR3 for alpha chain variable domain of TCR clone 359329 (TRAV1-1, TRAJ9)
CAVRGGNGGFKTIF

SEQ ID NO: 718658 - protein, 14 aa, Homo sapiens
  CDR3 for beta chain variable domain of TCR clone 359329 (TRBV11-2, TRBJ2-3)
CASSRLARTDTQYF

SEQ ID NO: 718659 - protein, 18 aa, Homo sapiens
  CDR3 for alpha chain variable domain of TCR clone 359330 (TRAV26-1, TRAJ30)
CCVLLHRQRTNRDDKIIF

SEQ ID NO: 718660 - protein, 18 aa, Homo sapiens
  CDR3 for beta chain variable domain of TCR clone 359330 (TRBV4-1, TRBJ1-5)
CASSQDPRGQGLNQPQHF

SEQ ID NO: 718661 - protein, 14 aa, Homo sapiens
  CDR3 for alpha chain variable domain of TCR clone 359331 (TRAV2, TRAJ37)
GAVEDQGNTGKLIF

SEQ ID NO: 718662 - protein, 14 aa, Homo sapiens
  CDR3 for beta chain variable domain of TCR clone 359331 (TRBV18, TRBJ2-1)
CASSPQGRFNEQFF

SEQ ID NO: 718663 - protein, 17 aa, Homo sapiens
  CDR3 for alpha chain variable domain of TCR clone 359332 (TRAV3, TRAJ6)
CAVRDGPRAGGSYIPTF

SEQ ID NO: 718664 - protein, 14 aa, Homo sapiens
  CDR3 for beta chain variable domain of TCR clone 359332 (TRBV27, TRBJ2-2)
CASRPGVNTGELFF

SEQ ID NO: 718665 - protein, 12 aa, Homo sapiens
  CDR3 for alpha chain variable domain of TCR clone 359333 (TRAV12-3, TRAJ17)
CAMTLTGNKLTF

SEQ ID NO: 718666 - protein, 15 aa, Homo sapiens
  CDR3 for beta chain variable domain of TCR clone 359333 (TRBV20-1, TRBJ2-7)
CSARDRVSLMDEQYF

SEQ ID NO: 718667 - protein, 17 aa, Homo sapiens
  CDR3 for alpha chain variable domain of TCR clone 359334 (TRAV8-3, TRAJ50)
CAVGAVDTETSYDKVIF

SEQ ID NO: 718668 - protein, 13 aa, Homo sapiens
  CDR3 for beta chain variable domain of TCR clone 359334 (TRBV7-9, TRBJ2-2)
CASSCAGTGELFF

SEQ ID NO: 718669 - protein, 14 aa, Homo sapiens
  CDR3 for alpha chain variable domain of TCR clone 359335 (TRAV16, TRAJ33)
CALSAMDINYQLIW

SEQ ID NO: 718670 - protein, 12 aa, Homo sapiens
  CDR3 for beta chain variable domain of TCR clone 359335 (TRBV5-1, TRBJ1-2)
CASSQDTYGYTF

SEQ ID NO: 718671 - protein, 15 aa, Homo sapiens
  CDR3 for alpha chain variable domain of TCR clone 359336 (TRAV8-3, TRAJ40)
CAVGPYTSGTYKYLF

SEQ ID NO: 718672 - protein, 16 aa, Homo sapiens
  CDR3 for beta chain variable domain of TCR clone 359336 (TRBV7-2, TRBJ2-7)
CASSLDPGGGSGEQYF

SEQ ID NO: 718673 - protein, 16 aa, Homo sapiens
  CDR3 for alpha chain variable domain of TCR clone 359337 (TRAV12-2, TRAJ43)
CAGDDMRFGAGTRLTV

SEQ ID NO: 718674 - protein, 18 aa, Homo sapiens
  CDR3 for beta chain variable domain of TCR clone 359337 (TRBV2, TRBJ2-4)
CASSEARAGNKTFSTSAP

SEQ ID NO: 718675 - protein, 14 aa, Homo sapiens
  CDR3 for alpha chain variable domain of TCR clone 359338 (TRAV17, TRAJ23)
CATASYNQGGKLIF

SEQ ID NO: 718676 - protein, 15 aa, Homo sapiens
  CDR3 for beta chain variable domain of TCR clone 359338 (TRBV12-4, TRBJ1-5)
CQQPTGRGSNQPQHF

SEQ ID NO: 718677 - protein, 14 aa, Homo sapiens
  CDR3 for alpha chain variable domain of TCR clone 359339 (TRAV1-2, TRAJ16)
CAVNRFSDGQKLLF

SEQ ID NO: 718678 - protein, 11 aa, Homo sapiens
  CDR3 for beta chain variable domain of TCR clone 359339 (TRBV4-1, TRBJ2-4)
CASNGTHIQYF

SEQ ID NO: 718679 - protein, 18 aa, Homo sapiens
  CDR3 for alpha chain variable domain of TCR clone 359340 (TRAV21, TRAJ52)
CAVRPSPAGGTNYGKLTF

SEQ ID NO: 718680 - protein, 17 aa, Homo sapiens
  CDR3 for beta chain variable domain of TCR clone 359340 (TRBV13, TRBJ2-3)
CASSLYRVAGGRNTQYF

SEQ ID NO: 718681 - protein, 15 aa, Homo sapiens
  CDR3 for alpha chain variable domain of TCR clone 359341 (TRAV2, TRAJ9)
CAVEDRGTGGFKTIF

SEQ ID NO: 718682 - protein, 13 aa, Homo sapiens
  CDR3 for beta chain variable domain of TCR clone 359341 (TRBV4-1, TRBJ2-2)
CASSQENTGELFF

SEQ ID NO: 718683 - protein, 14 aa, Homo sapiens
  CDR3 for alpha chain variable domain of TCR clone 359342 (TRAV12-2, TRAJ13)
CAVKKTGGYQKVTF

SEQ ID NO: 718684 - protein, 16 aa, Homo sapiens
  CDR3 for beta chain variable domain of TCR clone 359342 (TRBV10-3, TRBJ2-1)
CAISGVGDGGGGEQSF

SEQ ID NO: 718685 - protein, 12 aa, Homo sapiens
  CDR3 for alpha chain variable domain of TCR clone 359343 (TRAV3, TRAJ31)
CAVRPRGPRLMV

SEQ ID NO: 718686 - protein, 17 aa, Homo sapiens
  CDR3 for beta chain variable domain of TCR clone 359343 (TRBV7-9, TRBJ1-5)
CASSASQGGYSNQPQHF

SEQ ID NO: 718687 - protein, 12 aa, Homo sapiens
  CDR3 for alpha chain variable domain of TCR clone 359344 (TRAV10, TRAJ6)
CVVSEGSYIPTS

SEQ ID NO: 718688 - protein, 15 aa, Homo sapiens
  CDR3 for beta chain variable domain of TCR clone 359344 (TRBV4-3, TRBJ2-7)
CASSQGGRGIYEQYF

SEQ ID NO: 718689 - protein, 11 aa, Homo sapiens
  CDR3 for alpha chain variable domain of TCR clone 359345 (TRAV2, TRAJ13)
CASGGYQKDTF

SEQ ID NO: 718690 - protein, 15 aa, Homo sapiens
  CDR3 for beta chain variable domain of TCR clone 359345 (TRBV10-3, TRBJ2-1)
CAISGVGDGGGEQFF

SEQ ID NO: 718691 - protein, 15 aa, Homo sapiens
  CDR3 for alpha chain variable domain of TCR clone 359346 (TRAV12-2, TRAJ43)
CAFDMRFGAGTRLTV

SEQ ID NO: 718692 - protein, 13 aa, Homo sapiens
  CDR3 for beta chain variable domain of TCR clone 359346 (TRBV4-2, TRBJ1-1)
CASSQAGYTEAFF

SEQ ID NO: 718693 - protein, 16 aa, Homo sapiens
  CDR3 for alpha chain variable domain of TCR clone 359347 (TRAV3, TRAJ10)
CAVRDMRAGGGNKRTF

SEQ ID NO: 718694 - protein, 17 aa, Homo sapiens
  CDR3 for beta chain variable domain of TCR clone 359347 (TRBV11-2, TRBJ2-1)
CASSLYPPGVEYNEQFF

SEQ ID NO: 718695 - protein, 14 aa, Homo sapiens
  CDR3 for alpha chain variable domain of TCR clone 359348 (TRAV4, TRAJ26)
FLVGPPNYGQNFVF

SEQ ID NO: 718696 - protein, 17 aa, Homo sapiens
  CDR3 for beta chain variable domain of TCR clone 359348 (TRBV20-1, TRBJ2-1)
CSASSSGLAGSYNEQFF

SEQ ID NO: 718697 - protein, 15 aa, Homo sapiens
  CDR3 for alpha chain variable domain of TCR clone 359349 (TRAV6, TRAJ4)
CAPGGFSGGYNKLIF

SEQ ID NO: 718698 - protein, 13 aa, Homo sapiens
  CDR3 for beta chain variable domain of TCR clone 359349 (TRBV19, TRBJ1-2)
CASSVPGQDGYTF

SEQ ID NO: 718699 - protein, 13 aa, Homo sapiens
  CDR3 for alpha chain variable domain of TCR clone 359350 (TRAV26-2, TRAJ37)
CIRGSSNTGKLIF

SEQ ID NO: 718700 - protein, 14 aa, Homo sapiens
  CDR3 for beta chain variable domain of TCR clone 359350 (TRBV11-1, TRBJ2-7)
CASSFRQGSYEQYF

SEQ ID NO: 718701 - protein, 13 aa, Homo sapiens
  CDR3 for alpha chain variable domain of TCR clone 359351 (TRAV12-3, TRAJ13)
CAMTSGGYQKVTF

SEQ ID NO: 718702 - protein, 13 aa, Homo sapiens
  CDR3 for beta chain variable domain of TCR clone 359351 (TRBV19, TRBJ1-1)
CASSFGRMPEAFL

SEQ ID NO: 718703 - protein, 17 aa, Homo sapiens
  CDR3 for alpha chain variable domain of TCR clone 359352 (TRAV3, TRAJ42)
CAVRDRDYGGSQGNLIF

SEQ ID NO: 718704 - protein, 15 aa, Homo sapiens
  CDR3 for beta chain variable domain of TCR clone 359352 (TRBV6-6, TRBJ2-1)
CATRQGVSSYNEQFF

SEQ ID NO: 718705 - protein, 15 aa, Homo sapiens
  CDR3 for alpha chain variable domain of TCR clone 359353 (TRAV38-1, TRAJ37)
CAFIFGSGNTGKLIF

SEQ ID NO: 718706 - protein, 12 aa, Homo sapiens
  CDR3 for beta chain variable domain of TCR clone 359353 (TRBV7-9, TRBJ2-7)
CACSLEGYEQYF

SEQ ID NO: 718707 - protein, 11 aa, Homo sapiens
  CDR3 for alpha chain variable domain of TCR clone 359354 (TRAV1-2, TRAJ40)
CAVPGTHKYIF

SEQ ID NO: 718708 - protein, 14 aa, Homo sapiens
  CDR3 for beta chain variable domain of TCR clone 359354 (TRBV7-2, TRBJ1-3)
CASSLSRSGNTIYF

SEQ ID NO: 718709 - protein, 12 aa, Homo sapiens
  CDR3 for alpha chain variable domain of TCR clone 359355 (TRAV35, TRAJ54)
CADLQGAQKLVF

SEQ ID NO: 718710 - protein, 14 aa, Homo sapiens
  CDR3 for beta chain variable domain of TCR clone 359355 (TRBV25-1, TRBJ1-1)
CASTHLGGNTEAFF

SEQ ID NO: 718711 - protein, 17 aa, Homo sapiens
  CDR3 for alpha chain variable domain of TCR clone 359356 (TRAV3, TRAJ6)
CAVRDGPRAGGIYITTF

SEQ ID NO: 718712 - protein, 14 aa, Homo sapiens
  CDR3 for beta chain variable domain of TCR clone 359356 (TRBV7-2, TRBJ2-7)
CASSPKTSFYEQYF

SEQ ID NO: 718713 - protein, 11 aa, Homo sapiens
  CDR3 for alpha chain variable domain of TCR clone 359357 (TRAV13-1, TRAJ33)
CAANSNYQLIW

SEQ ID NO: 718714 - protein, 14 aa, Homo sapiens
  CDR3 for beta chain variable domain of TCR clone 359357 (TRBV20-1, TRBJ2-1)
CSAQIGGPANEQFF

SEQ ID NO: 718715 - protein, 15 aa, Homo sapiens
  CDR3 for alpha chain variable domain of TCR clone 359358 (TRAV13-1, TRAJ50)
CAAKGSETSYDKVIF

SEQ ID NO: 718716 - protein, 13 aa, Homo sapiens
  CDR3 for beta chain variable domain of TCR clone 359358 (TRBV20-1, TRBJ2-3)
CSARAGGRDTQYL

SEQ ID NO: 718717 - protein, 15 aa, Homo sapiens
  CDR3 for alpha chain variable domain of TCR clone 359359 (TRAV12-2, )
CAVEDIQNPDPAVYQ

SEQ ID NO: 718718 - protein, 17 aa, Homo sapiens
  CDR3 for beta chain variable domain of TCR clone 359359 (TRBV3-1, TRBJ2-3)
CASSPPVNLQVTDTQYF

SEQ ID NO: 718719 - protein, 15 aa, Homo sapiens
  CDR3 for alpha chain variable domain of TCR clone 359360 (TRAV12-1, TRAJ10)
CVVNKLTGGGNKLTF

SEQ ID NO: 718720 - protein, 17 aa, Homo sapiens
  CDR3 for beta chain variable domain of TCR clone 359360 (TRBV5-1, TRBJ1-6)
CASSPSLQGSDKSPLHF

SEQ ID NO: 718721 - protein, 12 aa, Homo sapiens
  CDR3 for alpha chain variable domain of TCR clone 359361 (TRAV27, TRAJ9)
CAGESGGFKTIF

SEQ ID NO: 718722 - protein, 15 aa, Homo sapiens
  CDR3 for beta chain variable domain of TCR clone 359361 (TRBV7-9, TRBJ2-7)
CASSLALAEAYEQYF

SEQ ID NO: 718723 - protein, 13 aa, Homo sapiens
  CDR3 for alpha chain variable domain of TCR clone 359362 (TRAV35, TRAJ44)
CAGLSGTASKLTF

SEQ ID NO: 718724 - protein, 17 aa, Homo sapiens
  CDR3 for beta chain variable domain of TCR clone 359362 (TRBV7-8, TRBJ1-2)
CASSLRPLQGHLYGNTF

SEQ ID NO: 718725 - protein, 13 aa, Homo sapiens
  CDR3 for alpha chain variable domain of TCR clone 359363 (TRAV29/DV5, TRAJ47)
CAASAEYGNKLVS

SEQ ID NO: 718726 - protein, 15 aa, Homo sapiens
  CDR3 for beta chain variable domain of TCR clone 359363 (TRBV7-9, TRBJ1-4)
CASSARTGGNEKLFF

SEQ ID NO: 718727 - protein, 10 aa, Homo sapiens
  CDR3 for alpha chain variable domain of TCR clone 359364 (TRAV12-2, TRAJ48)
CAVTSEKLTF

SEQ ID NO: 718728 - protein, 17 aa, Homo sapiens
  CDR3 for beta chain variable domain of TCR clone 359364 (TRBV7-3, TRBJ2-3)
CASSLMKRMRGADTQYF

SEQ ID NO: 718729 - protein, 16 aa, Homo sapiens
  CDR3 for alpha chain variable domain of TCR clone 359365 (TRAV1-2, TRAJ10)
CAVRGVLTGGGNKLTF

SEQ ID NO: 718730 - protein, 19 aa, Homo sapiens
  CDR3 for beta chain variable domain of TCR clone 359365 (TRBV4-3, TRBJ2-7)
CASSQEFIGWQVTPYEQYF

SEQ ID NO: 718731 - protein, 14 aa, Homo sapiens
  CDR3 for alpha chain variable domain of TCR clone 359366 (TRAV13-1, TRAJ3)
CAASKSSSASKIIF

SEQ ID NO: 718732 - protein, 16 aa, Homo sapiens
  CDR3 for beta chain variable domain of TCR clone 359366 (TRBV15, TRBJ2-3)
RATSRDLGIVTDTQYF

SEQ ID NO: 718733 - protein, 13 aa, Homo sapiens
  CDR3 for alpha chain variable domain of TCR clone 359367 (TRAV3, TRAJ17)
CAVPRAAGNKLTF

SEQ ID NO: 718734 - protein, 12 aa, Homo sapiens
  CDR3 for beta chain variable domain of TCR clone 359367 (TRBV7-8, TRBJ2-7)
CASSLGDREQYF

SEQ ID NO: 718735 - protein, 16 aa, Homo sapiens
  CDR3 for alpha chain variable domain of TCR clone 359368 (TRAV30, TRAJ24)
CGTEIVDADSWGKFQF

SEQ ID NO: 718736 - protein, 13 aa, Homo sapiens
  CDR3 for beta chain variable domain of TCR clone 359368 (TRBV28, TRBJ1-5)
CASSLRGNQPQHF

SEQ ID NO: 718737 - protein, 16 aa, Homo sapiens
  CDR3 for alpha chain variable domain of TCR clone 359369 (TRAV26-1, TRAJ17)
CCVLLHRQVCRQKLTF

SEQ ID NO: 718738 - protein, 15 aa, Homo sapiens
  CDR3 for beta chain variable domain of TCR clone 359369 (TRBV7-6, TRBJ1-2)
CASSSGGRGGYGYTF

SEQ ID NO: 718739 - protein, 17 aa, Homo sapiens
  CDR3 for alpha chain variable domain of TCR clone 359370 (TRAV3, TRAJ6)
CAVRDGPRAGGSSIPTF

SEQ ID NO: 718740 - protein, 14 aa, Homo sapiens
  CDR3 for beta chain variable domain of TCR clone 359370 (TRBV2, TRBJ1-5)
CASSENRGGQPQHF

SEQ ID NO: 718741 - protein, 15 aa, Homo sapiens
  CDR3 for alpha chain variable domain of TCR clone 359371 (TRAV20, TRAJ58)
FAVQDLETSGSRLTF

SEQ ID NO: 718742 - protein, 15 aa, Homo sapiens
  CDR3 for beta chain variable domain of TCR clone 359371 (TRBV28, TRBJ2-5)
CASSFRRPGPETQYF

SEQ ID NO: 718743 - protein, 13 aa, Homo sapiens
  CDR3 for alpha chain variable domain of TCR clone 359372 (TRAV40, TRAJ41)
CLLGAQSGYALNF

SEQ ID NO: 718744 - protein, 16 aa, Homo sapiens
  CDR3 for beta chain variable domain of TCR clone 359372 (TRBV5-1, TRBJ2-2)
CASSLWDTTNTGELFF

SEQ ID NO: 718745 - protein, 14 aa, Homo sapiens
  CDR3 for alpha chain variable domain of TCR clone 359373 (TRAV1-2, TRAJ16)
CAVNRFSDGQKLLF

SEQ ID NO: 718746 - protein, 14 aa, Homo sapiens
  CDR3 for beta chain variable domain of TCR clone 359373 (TRBV7-3, TRBJ2-3)
CASSSTGVADTQYF

SEQ ID NO: 718747 - protein, 15 aa, Homo sapiens
  CDR3 for alpha chain variable domain of TCR clone 359374 (TRAV8-4, TRAJ40)
CAVSSITSGTYKSIF

SEQ ID NO: 718748 - protein, 13 aa, Homo sapiens
  CDR3 for beta chain variable domain of TCR clone 359374 (TRBV2, TRBJ2-1)
CATSRGTDNEQFF

SEQ ID NO: 718749 - protein, 11 aa, Homo sapiens
  CDR3 for alpha chain variable domain of TCR clone 359375 (TRAV1-2, TRAJ11)
CAVRGYSTLTF

SEQ ID NO: 718750 - protein, 13 aa, Homo sapiens
  CDR3 for beta chain variable domain of TCR clone 359375 (TRBV7-6, TRBJ1-2)
CAGSLVADYGYTF

SEQ ID NO: 718751 - protein, 13 aa, Homo sapiens
  CDR3 for alpha chain variable domain of TCR clone 359376 (TRAV23/DV6, )
CAASIGGNTGVSQ

SEQ ID NO: 718752 - protein, 16 aa, Homo sapiens
  CDR3 for beta chain variable domain of TCR clone 359376 (TRBV13, TRBJ2-2)
CASSPRTGEHTGELFF

SEQ ID NO: 718753 - protein, 14 aa, Homo sapiens
  CDR3 for alpha chain variable domain of TCR clone 359377 (TRAV2, TRAJ37)
CAVDFTSNTGKLIF

SEQ ID NO: 718754 - protein, 14 aa, Homo sapiens
  CDR3 for beta chain variable domain of TCR clone 359377 (TRBV2, TRBJ2-5)
CASKKATGLETQYF

SEQ ID NO: 718755 - protein, 15 aa, Homo sapiens
  CDR3 for alpha chain variable domain of TCR clone 359378 (TRAV26-1, TRAJ29)
CIVRVEGSGNTPLVF

SEQ ID NO: 718756 - protein, 15 aa, Homo sapiens
  CDR3 for beta chain variable domain of TCR clone 359378 (TRBV7-9, TRBJ1-5)
CASRQGHQPNQAQHF

SEQ ID NO: 718757 - protein, 12 aa, Homo sapiens
  CDR3 for alpha chain variable domain of TCR clone 359379 (TRAV3, TRAJ20)
CAVRDHDYKLSF

SEQ ID NO: 718758 - protein, 11 aa, Homo sapiens
  CDR3 for beta chain variable domain of TCR clone 359379 (TRBV7-9, TRBJ2-3)
CASSPTDTQYF

SEQ ID NO: 718759 - protein, 12 aa, Homo sapiens
  CDR3 for alpha chain variable domain of TCR clone 359380 (TRAV16, TRAJ10)
CSRTGGGNKRTF

SEQ ID NO: 718760 - protein, 15 aa, Homo sapiens
  CDR3 for beta chain variable domain of TCR clone 359380 (TRBV6-3, TRBJ2-7)
CASSSPGTVFYEQDF

SEQ ID NO: 718761 - protein, 13 aa, Homo sapiens
  CDR3 for alpha chain variable domain of TCR clone 359381 (TRAV29/DV5, TRAJ31)
CAASRNNNARLMF

SEQ ID NO: 718762 - protein, 16 aa, Homo sapiens
  CDR3 for beta chain variable domain of TCR clone 359381 (TRBV7-3, TRBJ2-2)
CASSLKRGTLSGELFF

SEQ ID NO: 718763 - protein, 12 aa, Homo sapiens
  CDR3 for alpha chain variable domain of TCR clone 359382 (TRAV12-3, TRAJ41)
CAMSYSGYALNF

SEQ ID NO: 718764 - protein, 13 aa, Homo sapiens
  CDR3 for beta chain variable domain of TCR clone 359382 (TRBV7-3, TRBJ2-1)
RASSLDSYNEQFF

SEQ ID NO: 718765 - protein, 16 aa, Homo sapiens
  CDR3 for alpha chain variable domain of TCR clone 359383 (TRAV30, TRAJ24)
CGTEIVGADSWGKFQF

SEQ ID NO: 718766 - protein, 15 aa, Homo sapiens
  CDR3 for beta chain variable domain of TCR clone 359383 (TRBV7-9, TRBJ1-4)
SASSARTGGNEKLFF

SEQ ID NO: 718767 - protein, 13 aa, Homo sapiens
  CDR3 for alpha chain variable domain of TCR clone 359384 (TRAV8-6, TRAJ13)
CAVRDGGYQKVTV

SEQ ID NO: 718768 - protein, 15 aa, Homo sapiens
  CDR3 for beta chain variable domain of TCR clone 359384 (TRBV7-9, TRBJ2-2)
CASRPEGTGTGELFF

SEQ ID NO: 718769 - protein, 17 aa, Homo sapiens
  CDR3 for alpha chain variable domain of TCR clone 359385 (TRAV3, TRAJ42)
CAVRDGDYGGSQGNLIF

SEQ ID NO: 718770 - protein, 15 aa, Homo sapiens
  CDR3 for beta chain variable domain of TCR clone 359385 (TRBV6-5, TRBJ2-7)
CAISYSYADSYEHYF

SEQ ID NO: 718771 - protein, 14 aa, Homo sapiens
  CDR3 for alpha chain variable domain of TCR clone 359386 (TRAV8-4, TRAJ48)
CAVSETFGNEKLTF

SEQ ID NO: 718772 - protein, 12 aa, Homo sapiens
  CDR3 for beta chain variable domain of TCR clone 359386 (TRBV7-8, TRBJ2-7)
CASEGGPHGQYF

SEQ ID NO: 718773 - protein, 12 aa, Homo sapiens
  CDR3 for alpha chain variable domain of TCR clone 359387 (TRAV13-1, TRAJ21)
CAAKEGFNKFYF

SEQ ID NO: 718774 - protein, 16 aa, Homo sapiens
  CDR3 for beta chain variable domain of TCR clone 359387 (TRBV25-1, TRBJ2-7)
CASSALTGGGIYEQYF

SEQ ID NO: 718775 - protein, 15 aa, Homo sapiens
  CDR3 for alpha chain variable domain of TCR clone 359388 (TRAV3, TRAJ5)
CAVRDLDTGRRALTF

SEQ ID NO: 718776 - protein, 14 aa, Homo sapiens
  CDR3 for beta chain variable domain of TCR clone 359388 (TRBV25-1, TRBJ1-1)
CASTHLGGNTDAFF

SEQ ID NO: 718777 - protein, 19 aa, Homo sapiens
  CDR3 for alpha chain variable domain of TCR clone 359389 (TRAV26-1, TRAJ52)
CIVRAHRNAGGTSYGKLTF

SEQ ID NO: 718778 - protein, 17 aa, Homo sapiens
  CDR3 for beta chain variable domain of TCR clone 359389 (TRBV7-8, TRBJ2-6)
CASSAGTGGAGANVLTF

SEQ ID NO: 718779 - protein, 14 aa, Homo sapiens
  CDR3 for alpha chain variable domain of TCR clone 359390 (TRAV1-2, TRAJ16)
CAVNRFSDGQKLLF

SEQ ID NO: 718780 - protein, 15 aa, Homo sapiens
  CDR3 for beta chain variable domain of TCR clone 359390 (TRBV18, TRBJ2-7)
CASSPLQGRTYEQYF

SEQ ID NO: 718781 - protein, 13 aa, Homo sapiens
  CDR3 for alpha chain variable domain of TCR clone 359391 (TRAV12-2, TRAJ52)
CAVGGTSYGKLTF

SEQ ID NO: 718782 - protein, 18 aa, Homo sapiens
  CDR3 for beta chain variable domain of TCR clone 359391 (TRBV11-2, TRBJ2-3)
CASSLGGASRGAPNTQYF

SEQ ID NO: 718783 - protein, 15 aa, Homo sapiens
  CDR3 for alpha chain variable domain of TCR clone 359392 (TRAV38-2/DV8, TRAJ48)
CAYTSPESGNEKLTF

SEQ ID NO: 718784 - protein, 17 aa, Homo sapiens
  CDR3 for beta chain variable domain of TCR clone 359392 (TRBV20-1, TRBJ2-1)
CSASSSGLAGSYNEQFF

SEQ ID NO: 718785 - protein, 14 aa, Homo sapiens
  CDR3 for alpha chain variable domain of TCR clone 359393 (TRAV26-1, TRAJ38)
CIADNAGNNRKLIW

SEQ ID NO: 718786 - protein, 12 aa, Homo sapiens
  CDR3 for beta chain variable domain of TCR clone 359393 (TRBV7-3, TRBJ2-3)
CASSSLTDTQYV

SEQ ID NO: 718787 - protein, 11 aa, Homo sapiens
  CDR3 for alpha chain variable domain of TCR clone 359394 (TRAV13-1, TRAJ49)
CACVGGNQFYF

SEQ ID NO: 718788 - protein, 16 aa, Homo sapiens
  CDR3 for beta chain variable domain of TCR clone 359394 (TRBV11-2, TRBJ2-2)
CASSLRTGTLIGELFF

SEQ ID NO: 718789 - protein, 13 aa, Homo sapiens
  CDR3 for alpha chain variable domain of TCR clone 359395 (TRAV12-2, TRAJ53)
CAGVGGSNYKLTF

SEQ ID NO: 718790 - protein, 14 aa, Homo sapiens
  CDR3 for beta chain variable domain of TCR clone 359395 (TRBV19, TRBJ2-1)
CASPTFVLSGEQFF

SEQ ID NO: 718791 - protein, 16 aa, Homo sapiens
  CDR3 for alpha chain variable domain of TCR clone 359396 (TRAV21, TRAJ52)
CAVTNAGGTSYGKLTF

SEQ ID NO: 718792 - protein, 13 aa, Homo sapiens
  CDR3 for beta chain variable domain of TCR clone 359396 (TRBV20-1, TRBJ2-3)
CSARLAGTDTQDF

SEQ ID NO: 718793 - protein, 13 aa, Homo sapiens
  CDR3 for alpha chain variable domain of TCR clone 359397 (TRAV3, TRAJ20)
CAVRLSNDYKLSF

SEQ ID NO: 718794 - protein, 17 aa, Homo sapiens
  CDR3 for beta chain variable domain of TCR clone 359397 (TRBV11-2, TRBJ2-1)
CASSLYPPGVEYNEQFF

SEQ ID NO: 718795 - protein, 16 aa, Homo sapiens
  CDR3 for alpha chain variable domain of TCR clone 359398 (TRAV30, TRAJ24)
CGTEIVDADSWGKFLF

SEQ ID NO: 718796 - protein, 14 aa, Homo sapiens
  CDR3 for beta chain variable domain of TCR clone 359398 (TRBV5-5, TRBJ1-2)
CASSLDPYNYGYTF

SEQ ID NO: 718797 - protein, 17 aa, Homo sapiens
  CDR3 for alpha chain variable domain of TCR clone 359399 (TRAV3, TRAJ42)
CAVRDRDYGGSKGHLIF

SEQ ID NO: 718798 - protein, 15 aa, Homo sapiens
  CDR3 for beta chain variable domain of TCR clone 359399 (TRBV6-6, TRBJ2-7)
CASSYSYGGSYEQYF

SEQ ID NO: 718799 - protein, 14 aa, Homo sapiens
  CDR3 for alpha chain variable domain of TCR clone 359400 (TRAV1-2, TRAJ16)
CAVNRFSDCQKLLF

SEQ ID NO: 718800 - protein, 16 aa, Homo sapiens
  CDR3 for beta chain variable domain of TCR clone 359400 (TRBV19, TRBJ2-1)
CASSEILAGDGNEQFF

SEQ ID NO: 718801 - protein, 12 aa, Homo sapiens
  CDR3 for alpha chain variable domain of TCR clone 359401 (TRAV26-2, TRAJ21)
CFLKGNFNKFYF

SEQ ID NO: 718802 - protein, 14 aa, Homo sapiens
  CDR3 for beta chain variable domain of TCR clone 359401 (TRBV7-9, TRBJ1-1)
CASTPLQSYTEAFF

SEQ ID NO: 718803 - protein, 16 aa, Homo sapiens
  CDR3 for alpha chain variable domain of TCR clone 359402 (TRAV12-2, TRAJ40)
CAVIRGGTSGTYKYTL

SEQ ID NO: 718804 - protein, 14 aa, Homo sapiens
  CDR3 for beta chain variable domain of TCR clone 359402 (TRBV20-1, TRBJ2-5)
CSARDGRAGETQYF

SEQ ID NO: 718805 - protein, 12 aa, Homo sapiens
  CDR3 for alpha chain variable domain of TCR clone 359403 (TRAV12-3, TRAJ17)
CAMTLTGNKLTF

SEQ ID NO: 718806 - protein, 16 aa, Homo sapiens
  CDR3 for beta chain variable domain of TCR clone 359403 (TRBV20-1, TRBJ2-1)
CSARGSSSGMVNEQFF

SEQ ID NO: 718807 - protein, 17 aa, Homo sapiens
  CDR3 for alpha chain variable domain of TCR clone 359404 (TRAV21, TRAJ52)
CAVGVNAGGTSNGKLTF

SEQ ID NO: 718808 - protein, 13 aa, Homo sapiens
  CDR3 for beta chain variable domain of TCR clone 359404 (TRBV5-1, TRBJ1-2)
CASSFQGNYGYTF

SEQ ID NO: 718809 - protein, 14 aa, Homo sapiens
  CDR3 for alpha chain variable domain of TCR clone 359405 (TRAV13-1, TRAJ44)
CAAKATGTASKLTF

SEQ ID NO: 718810 - protein, 13 aa, Homo sapiens
  CDR3 for beta chain variable domain of TCR clone 359405 (TRBV7-9, TRBJ2-2)
CASSLDPTGELFF

SEQ ID NO: 718811 - protein, 15 aa, Homo sapiens
  CDR3 for alpha chain variable domain of TCR clone 359406 (TRAV35, TRAJ40)
CAGQLSTSGTYKYIF

SEQ ID NO: 718812 - protein, 14 aa, Homo sapiens
  CDR3 for beta chain variable domain of TCR clone 359406 (TRBV7-3, TRBJ2-1)
CASSLAGGTNEQFF

SEQ ID NO: 718813 - protein, 16 aa, Homo sapiens
  CDR3 for alpha chain variable domain of TCR clone 359407 (TRAV12-2, TRAJ10)
CAVNRVLTGGGNKLTF

SEQ ID NO: 718814 - protein, 15 aa, Homo sapiens
  CDR3 for beta chain variable domain of TCR clone 359407 (TRBV16, TRBJ1-5)
CASSQSGTADQPQHF

SEQ ID NO: 718815 - protein, 16 aa, Homo sapiens
  CDR3 for alpha chain variable domain of TCR clone 359408 (TRAV12-1, TRAJ4)
CVVRRLPAGGYNKLIF

SEQ ID NO: 718816 - protein, 16 aa, Homo sapiens
  CDR3 for beta chain variable domain of TCR clone 359408 (TRBV19, TRBJ1-1)
CASRPRSEALNTEAFF

SEQ ID NO: 718817 - protein, 15 aa, Homo sapiens
  CDR3 for alpha chain variable domain of TCR clone 359409 (TRAV3, TRAJ47)
CAVRDIGEDGNKLVF

SEQ ID NO: 718818 - protein, 14 aa, Homo sapiens
  CDR3 for beta chain variable domain of TCR clone 359409 (TRBV13, TRBJ2-5)
CASSLERVGETQYF

SEQ ID NO: 718819 - protein, 16 aa, Homo sapiens
  CDR3 for alpha chain variable domain of TCR clone 359410 (TRAV4, TRAJ22)
CLVGDLYSGSARQLTF

SEQ ID NO: 718820 - protein, 18 aa, Homo sapiens
  CDR3 for beta chain variable domain of TCR clone 359410 (TRBV18, TRBJ1-3)
CASSPRGGAGPSGNTIYF

SEQ ID NO: 718821 - protein, 17 aa, Homo sapiens
  CDR3 for alpha chain variable domain of TCR clone 359411 (TRAV3, TRAJ42)
CAVRDRDYGGSKGNLIF

SEQ ID NO: 718822 - protein, 14 aa, Homo sapiens
  CDR3 for beta chain variable domain of TCR clone 359411 (TRBV19, TRBJ2-1)
CASPTFVLSGEQFF

SEQ ID NO: 718823 - protein, 14 aa, Homo sapiens
  CDR3 for alpha chain variable domain of TCR clone 359412 (TRAV1-2, TRAJ16)
CAVNRFSDGPKLLF

SEQ ID NO: 718824 - protein, 17 aa, Homo sapiens
  CDR3 for beta chain variable domain of TCR clone 359412 (TRBV28, TRBJ2-5)
CASSRQGGLSGAETQYF

SEQ ID NO: 718825 - protein, 14 aa, Homo sapiens
  CDR3 for alpha chain variable domain of TCR clone 359413 (TRAV1-2, TRAJ16)
CDVNRFSDGQKLLF

SEQ ID NO: 718826 - protein, 13 aa, Homo sapiens
  CDR3 for beta chain variable domain of TCR clone 359413 (TRBV29-1, TRBJ1-1)
CSVGDSRNTEAFF

SEQ ID NO: 718827 - protein, 12 aa, Homo sapiens
  CDR3 for alpha chain variable domain of TCR clone 359414 (TRAV12-3, TRAJ20)
CAMVRGDYKLSF

SEQ ID NO: 718828 - protein, 15 aa, Homo sapiens
  CDR3 for beta chain variable domain of TCR clone 359414 (TRBV7-3, TRBJ2-3)
CASSLGLTLGDTQYF

SEQ ID NO: 718829 - protein, 13 aa, Homo sapiens
  CDR3 for alpha chain variable domain of TCR clone 359415 (TRAV12-1, TRAJ17)
CVVNKAAGNKLTF

SEQ ID NO: 718830 - protein, 14 aa, Homo sapiens
  CDR3 for beta chain variable domain of TCR clone 359415 (TRBV5-1, TRBJ1-2)
CASSLGDRGPGYTF

SEQ ID NO: 718831 - protein, 14 aa, Homo sapiens
  CDR3 for alpha chain variable domain of TCR clone 359416 (TRAV4, TRAJ17)
CLVGAMAAGNKLTF

SEQ ID NO: 718832 - protein, 14 aa, Homo sapiens
  CDR3 for beta chain variable domain of TCR clone 359416 (TRBV7-6, TRBJ2-3)
CASSLGTVTDTQYF

SEQ ID NO: 718833 - protein, 14 aa, Homo sapiens
  CDR3 for alpha chain variable domain of TCR clone 359417 (TRAV2, TRAJ9)
CAVEDRSGGFKTMF

SEQ ID NO: 718834 - protein, 15 aa, Homo sapiens
  CDR3 for beta chain variable domain of TCR clone 359417 (TRBV7-9, TRBJ1-5)
CASSQGHQPNQPQHF

SEQ ID NO: 718835 - protein, 15 aa, Homo sapiens
  CDR3 for alpha chain variable domain of TCR clone 359418 (TRAV27, TRAJ38)
CAARRNAGNNRELSW

SEQ ID NO: 718836 - protein, 13 aa, Homo sapiens
  CDR3 for beta chain variable domain of TCR clone 359418 (TRBV20-1, TRBJ1-1)
CSARAGGNTEAFF

SEQ ID NO: 718837 - protein, 13 aa, Homo sapiens
  CDR3 for alpha chain variable domain of TCR clone 359419 (TRAV36/DV7, TRAJ37)
CAVFSSNTGKLIF

SEQ ID NO: 718838 - protein, 15 aa, Homo sapiens
  CDR3 for beta chain variable domain of TCR clone 359419 (TRBV12-4, TRBJ2-5)
CQQFFVRRRQETQYF

SEQ ID NO: 718839 - protein, 15 aa, Homo sapiens
  CDR3 for alpha chain variable domain of TCR clone 359420 (TRAV17, TRAJ54)
CATTRSEQGAQKLVF

SEQ ID NO: 718840 - protein, 16 aa, Homo sapiens
  CDR3 for beta chain variable domain of TCR clone 359420 (TRBV12-4, TRBJ2-3)
RASSLRLAETTDTQYF

SEQ ID NO: 718841 - protein, 12 aa, Homo sapiens
  CDR3 for alpha chain variable domain of TCR clone 359421 (TRAV16, TRAJ27)
CALNHQCRQINL

SEQ ID NO: 718842 - protein, 14 aa, Homo sapiens
  CDR3 for beta chain variable domain of TCR clone 359421 (TRBV11-1, TRBJ2-7)
CASSLEREWGEQYF

SEQ ID NO: 718843 - protein, 14 aa, Homo sapiens
  CDR3 for alpha chain variable domain of TCR clone 359422 (TRAV2, TRAJ9)
CAVEDQSGGFKTIF

SEQ ID NO: 718844 - protein, 15 aa, Homo sapiens
  CDR3 for beta chain variable domain of TCR clone 359422 (TRBV7-8, TRBJ2-7)
CASSLERAGSYEQYF

SEQ ID NO: 718845 - protein, 11 aa, Homo sapiens
  CDR3 for alpha chain variable domain of TCR clone 359423 (TRAV2, TRAJ13)
CASGGYQKVTF

SEQ ID NO: 718846 - protein, 14 aa, Homo sapiens
  CDR3 for beta chain variable domain of TCR clone 359423 (TRBV5-1, TRBJ2-7)
CASSLQGAVDEQYF

SEQ ID NO: 718847 - protein, 14 aa, Homo sapiens
  CDR3 for alpha chain variable domain of TCR clone 359424 (TRAV3, TRAJ9)
CAVRLNTGGFKTIF

SEQ ID NO: 718848 - protein, 16 aa, Homo sapiens
  CDR3 for beta chain variable domain of TCR clone 359424 (TRBV12-5, TRBJ2-5)
CASGPRTSRNQETQYF

SEQ ID NO: 718849 - protein, 14 aa, Homo sapiens
  CDR3 for alpha chain variable domain of TCR clone 359425 (TRAV38-1, TRAJ45)
CAYYSGGGADGLTF

SEQ ID NO: 718850 - protein, 14 aa, Homo sapiens
  CDR3 for beta chain variable domain of TCR clone 359425 (TRBV12-4, TRBJ2-3)
CASSLGQGTDTQYF

SEQ ID NO: 718851 - protein, 11 aa, Homo sapiens
  CDR3 for alpha chain variable domain of TCR clone 359426 (TRAV2, TRAJ33)
CAVESNYQLIW

SEQ ID NO: 718852 - protein, 12 aa, Homo sapiens
  CDR3 for beta chain variable domain of TCR clone 359426 (TRBV11-2, TRBJ2-2)
CASSPGGGELFF

SEQ ID NO: 718853 - protein, 13 aa, Homo sapiens
  CDR3 for alpha chain variable domain of TCR clone 359427 (TRAV17, TRAJ5)
CAPMDTGRRALTF

SEQ ID NO: 718854 - protein, 16 aa, Homo sapiens
  CDR3 for beta chain variable domain of TCR clone 359427 (TRBV12-5, TRBJ2-5)
CASGPRTSGNQETQYF

SEQ ID NO: 718855 - protein, 12 aa, Homo sapiens
  CDR3 for alpha chain variable domain of TCR clone 359428 (TRAV13-1, TRAJ21)
CAAKEGFNKFYF

SEQ ID NO: 718856 - protein, 16 aa, Homo sapiens
  CDR3 for beta chain variable domain of TCR clone 359428 (TRBV10-2, TRBJ1-5)
CASSVRDRASNQPQHF

SEQ ID NO: 718857 - protein, 15 aa, Homo sapiens
  CDR3 for alpha chain variable domain of TCR clone 359429 (TRAV8-6, TRAJ6)
CAVSGESGGSYIPTF

SEQ ID NO: 718858 - protein, 14 aa, Homo sapiens
  CDR3 for beta chain variable domain of TCR clone 359429 (TRBV19, TRBJ2-1)
CASSRLASINEQFF

SEQ ID NO: 718859 - protein, 10 aa, Homo sapiens
  CDR3 for alpha chain variable domain of TCR clone 359430 (TRAV12-1, TRAJ33)
APDSNYQLIW

SEQ ID NO: 718860 - protein, 12 aa, Homo sapiens
  CDR3 for beta chain variable domain of TCR clone 359430 (TRBV11-2, TRBJ2-2)
CASSLGGGELFF

SEQ ID NO: 718861 - protein, 12 aa, Homo sapiens
  CDR3 for alpha chain variable domain of TCR clone 359431 (TRAV27, TRAJ36)
ASTPAGANNLFF

SEQ ID NO: 718862 - protein, 13 aa, Homo sapiens
  CDR3 for beta chain variable domain of TCR clone 359431 (TRBV7-9, TRBJ2-3)
CASSPWSTDTQYF

SEQ ID NO: 718863 - protein, 15 aa, Homo sapiens
  CDR3 for alpha chain variable domain of TCR clone 359432 (TRAV29/DV5, TRAJ29)
CAASEVLRGKHTSCL

SEQ ID NO: 718864 - protein, 16 aa, Homo sapiens
  CDR3 for beta chain variable domain of TCR clone 359432 (TRBV6-1, TRBJ2-1)
CASILRQGSSYNEQFF

SEQ ID NO: 718865 - protein, 12 aa, Homo sapiens
  CDR3 for alpha chain variable domain of TCR clone 359433 (TRAV12-2, TRAJ8)
CAVNTGFPKLVF

SEQ ID NO: 718866 - protein, 15 aa, Homo sapiens
  CDR3 for beta chain variable domain of TCR clone 359433 (TRBV7-8, TRBJ1-5)
CASSLERRGLEPQHF

SEQ ID NO: 718867 - protein, 15 aa, Homo sapiens
  CDR3 for alpha chain variable domain of TCR clone 359434 (TRAV26-2, TRAJ21)
CILSNTTSTNFTLDL

SEQ ID NO: 718868 - protein, 16 aa, Homo sapiens
  CDR3 for beta chain variable domain of TCR clone 359434 (TRBV4-2, TRBJ2-6)
CASSQARSSGANVMTF

SEQ ID NO: 718869 - protein, 14 aa, Homo sapiens
  CDR3 for alpha chain variable domain of TCR clone 359435 (TRAV26-1, TRAJ45)
CIEVTGGGSDGLTF

SEQ ID NO: 718870 - protein, 14 aa, Homo sapiens
  CDR3 for beta chain variable domain of TCR clone 359435 (TRBV6-1, TRBJ1-3)
CASVQGGGWKHHIF

SEQ ID NO: 718871 - protein, 14 aa, Homo sapiens
  CDR3 for alpha chain variable domain of TCR clone 359436 (TRAV27, )
CAYIQNPDPAVYQL

SEQ ID NO: 718872 - protein, 13 aa, Homo sapiens
  CDR3 for beta chain variable domain of TCR clone 359436 (TRBV28, TRBJ2-5)
CASSSRNQETQCF

SEQ ID NO: 718873 - protein, 14 aa, Homo sapiens
  CDR3 for alpha chain variable domain of TCR clone 359437 (TRAV35, TRAJ44)
CAGRPSRTASKLTF

SEQ ID NO: 718874 - protein, 19 aa, Homo sapiens
  CDR3 for beta chain variable domain of TCR clone 359437 (TRBV7-2, TRBJ2-3)
CASSFLSRNWGGGTDTQYF

SEQ ID NO: 718875 - protein, 15 aa, Homo sapiens
  CDR3 for alpha chain variable domain of TCR clone 359438 (TRAV20, TRAJ58)
CAVQDLETSGSRLTF

SEQ ID NO: 718876 - protein, 11 aa, Homo sapiens
  CDR3 for beta chain variable domain of TCR clone 359438 (TRBV12-4, TRBJ2-2)
CASSSAGELFF

SEQ ID NO: 718877 - protein, 16 aa, Homo sapiens
  CDR3 for alpha chain variable domain of TCR clone 359439 (TRAV3, TRAJ37)
CAVRGKGSGNTGKLIF

SEQ ID NO: 718878 - protein, 15 aa, Homo sapiens
  CDR3 for beta chain variable domain of TCR clone 359439 (TRBV7-9, TRBJ1-6)
CASSSPGRGNPPLHF

SEQ ID NO: 718879 - protein, 13 aa, Homo sapiens
  CDR3 for alpha chain variable domain of TCR clone 359440 (TRAV12-1, TRAJ39)
CVVPQRAGNMLTF

SEQ ID NO: 718880 - protein, 13 aa, Homo sapiens
  CDR3 for beta chain variable domain of TCR clone 359440 (TRBV20-1, TRBJ1-1)
CSARGGGNTEAFF

SEQ ID NO: 718881 - protein, 12 aa, Homo sapiens
  CDR3 for alpha chain variable domain of TCR clone 359441 (TRAV12-3, TRAJ17)
CAMTLTGNKLTF

SEQ ID NO: 718882 - protein, 15 aa, Homo sapiens
  CDR3 for beta chain variable domain of TCR clone 359441 (TRBV20-1, TRBJ2-7)
CSASDRVSEMDEQYF

SEQ ID NO: 718883 - protein, 15 aa, Homo sapiens
  CDR3 for alpha chain variable domain of TCR clone 359442 (TRAV17, TRAJ42)
CATDHYGGSKGNLIF

SEQ ID NO: 718884 - protein, 14 aa, Homo sapiens
  CDR3 for beta chain variable domain of TCR clone 359442 (TRBV19, TRBJ2-5)
CASSIEHSQETQYF

SEQ ID NO: 718885 - protein, 13 aa, Homo sapiens
  CDR3 for alpha chain variable domain of TCR clone 359443 (TRAV21, TRAJ57)
CAVTQVGSEKLVF

SEQ ID NO: 718886 - protein, 17 aa, Homo sapiens
  CDR3 for beta chain variable domain of TCR clone 359443 (TRBV20-1, TRBJ2-2)
CSASGSGQGGLTGELFF

SEQ ID NO: 718887 - protein, 14 aa, Homo sapiens
  CDR3 for alpha chain variable domain of TCR clone 359444 (TRAV16, TRAJ39)
CALSKNNAGNMLTF

SEQ ID NO: 718888 - protein, 16 aa, Homo sapiens
  CDR3 for beta chain variable domain of TCR clone 359444 (TRBV28, TRBJ2-1)
CASRVPASGRIGEQVF

SEQ ID NO: 718889 - protein, 12 aa, Homo sapiens
  CDR3 for alpha chain variable domain of TCR clone 359445 (TRAV13-1, TRAJ53)
AASGGSNYKLTF

SEQ ID NO: 718890 - protein, 14 aa, Homo sapiens
  CDR3 for beta chain variable domain of TCR clone 359445 (TRBV11-2, TRBJ2-3)
CASSRLARTDTQYF

SEQ ID NO: 718891 - protein, 14 aa, Homo sapiens
  CDR3 for alpha chain variable domain of TCR clone 359446 (TRAV1-2, TRAJ16)
CAVNRLSDGQKLLV

SEQ ID NO: 718892 - protein, 12 aa, Homo sapiens
  CDR3 for beta chain variable domain of TCR clone 359446 (TRBV7-6, TRBJ2-7)
CASSLADSEQYF

SEQ ID NO: 718893 - protein, 14 aa, Homo sapiens
  CDR3 for alpha chain variable domain of TCR clone 359447 (TRAV26-1, TRAJ22)
CIVRVYGSARQLTF

SEQ ID NO: 718894 - protein, 17 aa, Homo sapiens
  CDR3 for beta chain variable domain of TCR clone 359447 (TRBV7-3, TRBJ2-3)
CASSLGGLAGFGDTQYF

SEQ ID NO: 718895 - protein, 23 aa, Homo sapiens
  CDR3 for alpha chain variable domain of TCR clone 359448 (TRAV13-2, TRAJ6)
CAEEVHQEEATYLHLEEEPALLF

SEQ ID NO: 718896 - protein, 16 aa, Homo sapiens
  CDR3 for beta chain variable domain of TCR clone 359448 (TRBV7-3, TRBJ2-2)
CASSLKRGTLSGELFF

SEQ ID NO: 718897 - protein, 16 aa, Homo sapiens
  CDR3 for alpha chain variable domain of TCR clone 359449 (TRAV30, TRAJ24)
CGTEIVDADSWGKFQF

SEQ ID NO: 718898 - protein, 14 aa, Homo sapiens
  CDR3 for beta chain variable domain of TCR clone 359449 (TRBV7-8, TRBJ2-3)
CSSSLEAGTDAQYF

SEQ ID NO: 718899 - protein, 13 aa, Homo sapiens
  CDR3 for alpha chain variable domain of TCR clone 359450 (TRAV12-3, TRAJ33)
CAMSVNSNYQLIW

SEQ ID NO: 718900 - protein, 16 aa, Homo sapiens
  CDR3 for beta chain variable domain of TCR clone 359450 (TRBV28, TRBJ1-4)
CASSPPYRGRSEKLFF

SEQ ID NO: 718901 - protein, 14 aa, Homo sapiens
  CDR3 for alpha chain variable domain of TCR clone 359451 (TRAV16, TRAJ17)
CALSGCAAGNKLTF

SEQ ID NO: 718902 - protein, 15 aa, Homo sapiens
  CDR3 for beta chain variable domain of TCR clone 359451 (TRBV3-1, TRBJ1-2)
CASSPTRLHEGGYTF

SEQ ID NO: 718903 - protein, 16 aa, Homo sapiens
  CDR3 for alpha chain variable domain of TCR clone 359452 (TRAV1-2, TRAJ10)
CAVRGVLTGGGKKLTF

SEQ ID NO: 718904 - protein, 15 aa, Homo sapiens
  CDR3 for beta chain variable domain of TCR clone 359452 (TRBV5-5, TRBJ1-5)
CASSSTPGSNQPQHF

SEQ ID NO: 718905 - protein, 15 aa, Homo sapiens
  CDR3 for alpha chain variable domain of TCR clone 359453 (TRAV17, TRAJ57)
CATGPSQGGSEQLVF

SEQ ID NO: 718906 - protein, 15 aa, Homo sapiens
  CDR3 for beta chain variable domain of TCR clone 359453 (TRBV9, TRBJ1-6)
CASSVAGTGDSPLHF

SEQ ID NO: 718907 - protein, 11 aa, Homo sapiens
  CDR3 for alpha chain variable domain of TCR clone 359454 (TRAV12-2, TRAJ29)
CAVTLRSPIVF

SEQ ID NO: 718908 - protein, 16 aa, Homo sapiens
  CDR3 for beta chain variable domain of TCR clone 359454 (TRBV19, TRBJ1-5)
CASSIDRGGPRQPQHF

SEQ ID NO: 718909 - protein, 12 aa, Homo sapiens
  CDR3 for alpha chain variable domain of TCR clone 359455 (TRAV23/DV6, TRAJ30)
CAASKGDDKIIF

SEQ ID NO: 718910 - protein, 18 aa, Homo sapiens
  CDR3 for beta chain variable domain of TCR clone 359455 (TRBV10-3, TRBJ2-3)
CAISESREGPMRGDTQYF

SEQ ID NO: 718911 - protein, 15 aa, Homo sapiens
  CDR3 for alpha chain variable domain of TCR clone 359456 (TRAV12-1, TRAJ36)
CVVNEHQTGATNLFF

SEQ ID NO: 718912 - protein, 12 aa, Homo sapiens
  CDR3 for beta chain variable domain of TCR clone 359456 (TRBV29-1, TRBJ2-3)
CSVTGGADTQYF

SEQ ID NO: 718913 - protein, 13 aa, Homo sapiens
  CDR3 for alpha chain variable domain of TCR clone 359457 (TRAV12-3, TRAJ46)
CAMKKSSGDKLTF

SEQ ID NO: 718914 - protein, 14 aa, Homo sapiens
  CDR3 for beta chain variable domain of TCR clone 359457 (TRBV7-9, TRBJ2-1)
CASSPRDSLYEQFF

SEQ ID NO: 718915 - protein, 13 aa, Homo sapiens
  CDR3 for alpha chain variable domain of TCR clone 359458 (TRAV9-2, TRAJ49)
FALIQIGGNQFYF

SEQ ID NO: 718916 - protein, 13 aa, Homo sapiens
  CDR3 for beta chain variable domain of TCR clone 359458 (TRBV20-1, TRBJ1-1)
CSARGGGNTEAFF

SEQ ID NO: 718917 - protein, 12 aa, Homo sapiens
  CDR3 for alpha chain variable domain of TCR clone 359459 (TRAV13-1, TRAJ53)
CAAGGSNYKLTF

SEQ ID NO: 718918 - protein, 11 aa, Homo sapiens
  CDR3 for beta chain variable domain of TCR clone 359459 (TRBV2, TRBJ1-1)
CASRESTEAFV

SEQ ID NO: 718919 - protein, 18 aa, Homo sapiens
  CDR3 for alpha chain variable domain of TCR clone 359460 (TRAV21, TRAJ52)
CAVRPFPAGGTSYGKLTF

SEQ ID NO: 718920 - protein, 15 aa, Homo sapiens
  CDR3 for beta chain variable domain of TCR clone 359460 (TRBV20-1, TRBJ2-7)
CSARDRVSGMDEQYF

SEQ ID NO: 718921 - protein, 11 aa, Homo sapiens
  CDR3 for alpha chain variable domain of TCR clone 359461 (TRAV35, TRAJ34)
CWARNTDKLIF

SEQ ID NO: 718922 - protein, 14 aa, Homo sapiens
  CDR3 for beta chain variable domain of TCR clone 359461 (TRBV7-9, TRBJ2-2)
CASSLTANTGELFF

SEQ ID NO: 718923 - protein, 14 aa, Homo sapiens
  CDR3 for alpha chain variable domain of TCR clone 359462 (TRAV2, TRAJ39)
CAVEGDNAGNMLTF

SEQ ID NO: 718924 - protein, 14 aa, Homo sapiens
  CDR3 for beta chain variable domain of TCR clone 359462 (TRBV28, TRBJ2-7)
RASSLRARGNEQYF

SEQ ID NO: 718925 - protein, 16 aa, Homo sapiens
  CDR3 for alpha chain variable domain of TCR clone 359463 (TRAV20, TRAJ10)
CAVLRGLTGGGNKLTF

SEQ ID NO: 718926 - protein, 14 aa, Homo sapiens
  CDR3 for beta chain variable domain of TCR clone 359463 (TRBV19, TRBJ1-5)
CASRAPDRFLAQHF

SEQ ID NO: 718927 - protein, 17 aa, Homo sapiens
  CDR3 for alpha chain variable domain of TCR clone 359464 (TRAV3, TRAJ12)
CCERRDGTMDSSYKLIF

SEQ ID NO: 718928 - protein, 15 aa, Homo sapiens
  CDR3 for beta chain variable domain of TCR clone 359464 (TRBV5-5, TRBJ1-5)
CASSLKGGGEQAQHF

SEQ ID NO: 718929 - protein, 12 aa, Homo sapiens
  CDR3 for alpha chain variable domain of TCR clone 359465 (TRAV12-2, TRAJ42)
CREKRKPRNLIF

SEQ ID NO: 718930 - protein, 15 aa, Homo sapiens
  CDR3 for beta chain variable domain of TCR clone 359465 (TRBV25-1, TRBJ1-4)
CASSPGDSTNEKLFF

SEQ ID NO: 718931 - protein, 16 aa, Homo sapiens
  CDR3 for alpha chain variable domain of TCR clone 359466 (TRAV8-3, TRAJ13)
CAVGAHPSGGYQKVTF

SEQ ID NO: 718932 - protein, 12 aa, Homo sapiens
  CDR3 for beta chain variable domain of TCR clone 359466 (TRBV7-8, TRBJ2-7)
CASSLGDREQYF

SEQ ID NO: 718933 - protein, 16 aa, Homo sapiens
  CDR3 for alpha chain variable domain of TCR clone 359467 (TRAV14/DV4, TRAJ20)
CAMREGRSRDDYKPSF

SEQ ID NO: 718934 - protein, 17 aa, Homo sapiens
  CDR3 for beta chain variable domain of TCR clone 359467 (TRBV7-9, TRBJ2-5)
CASSPGLAGGGREPQYF

SEQ ID NO: 718935 - protein, 16 aa, Homo sapiens
  CDR3 for alpha chain variable domain of TCR clone 359468 (TRAV3, TRAJ37)
CAVRGKWSGNTGKLIF

SEQ ID NO: 718936 - protein, 15 aa, Homo sapiens
  CDR3 for beta chain variable domain of TCR clone 359468 (TRBV7-9, TRBJ2-2)
CASGPLDTFPGELFF

SEQ ID NO: 718937 - protein, 11 aa, Homo sapiens
  CDR3 for alpha chain variable domain of TCR clone 359469 (TRAV23/DV6, TRAJ58)
CAARLLRGETS

SEQ ID NO: 718938 - protein, 14 aa, Homo sapiens
  CDR3 for beta chain variable domain of TCR clone 359469 (TRBV6-5, TRBJ1-2)
CASSYDGTGGGYTF

SEQ ID NO: 718939 - protein, 12 aa, Homo sapiens
  CDR3 for alpha chain variable domain of TCR clone 359470 (TRAV23/DV6, TRAJ53)
CAASKLGSGGSN

SEQ ID NO: 718940 - protein, 17 aa, Homo sapiens
  CDR3 for beta chain variable domain of TCR clone 359470 (TRBV7-3, TRBJ2-3)
CASSLMKRMRGADTQYF

SEQ ID NO: 718941 - protein, 16 aa, Homo sapiens
  CDR3 for alpha chain variable domain of TCR clone 359471 (TRAV8-6, TRAJ37)
CAASGLRSSNTGKLIF

SEQ ID NO: 718942 - protein, 15 aa, Homo sapiens
  CDR3 for beta chain variable domain of TCR clone 359471 (TRBV20-1, TRBJ1-5)
CSARSGPSMNQPQHF

SEQ ID NO: 718943 - protein, 18 aa, Homo sapiens
  CDR3 for alpha chain variable domain of TCR clone 359472 (TRAV13-1, TRAJ52)
CAAKNPNAGGTSYGKLTF

SEQ ID NO: 718944 - protein, 16 aa, Homo sapiens
  CDR3 for beta chain variable domain of TCR clone 359472 (TRBV7-2, TRBJ2-1)
CASSLVGGPELNEQFF

SEQ ID NO: 718945 - protein, 15 aa, Homo sapiens
  CDR3 for alpha chain variable domain of TCR clone 359473 (TRAV12-1, TRAJ44)
RVADLPTGTASKLTL

SEQ ID NO: 718946 - protein, 13 aa, Homo sapiens
  CDR3 for beta chain variable domain of TCR clone 359473 (TRBV6-4, TRBJ2-3)
CASRDSGTDTQYF

SEQ ID NO: 718947 - protein, 13 aa, Homo sapiens
  CDR3 for alpha chain variable domain of TCR clone 359474 (TRAV13-1, TRAJ39)
WAASIWAGDMLTF

SEQ ID NO: 718948 - protein, 14 aa, Homo sapiens
  CDR3 for beta chain variable domain of TCR clone 359474 (TRBV5-4, TRBJ2-2)
CASRLDGGTGELFF

SEQ ID NO: 718949 - protein, 13 aa, Homo sapiens
  CDR3 for alpha chain variable domain of TCR clone 359475 (TRAV3, TRAJ27)
CAVRPLGAGKSTF

SEQ ID NO: 718950 - protein, 12 aa, Homo sapiens
  CDR3 for beta chain variable domain of TCR clone 359475 (TRBV7-9, TRBJ2-3)
CQQPGSTDTQYF

SEQ ID NO: 718951 - protein, 11 aa, Homo sapiens
  CDR3 for alpha chain variable domain of TCR clone 359476 (TRAV1-2, TRAJ40)
CAIPGTYKYIF

SEQ ID NO: 718952 - protein, 16 aa, Homo sapiens
  CDR3 for beta chain variable domain of TCR clone 359476 (TRBV7-3, TRBJ2-2)
CASSLKRGTLSGELIF

SEQ ID NO: 718953 - protein, 15 aa, Homo sapiens
  CDR3 for alpha chain variable domain of TCR clone 359477 (TRAV26-1, TRAJ44)
CIVRANTGTASKLTF

SEQ ID NO: 718954 - protein, 12 aa, Homo sapiens
  CDR3 for beta chain variable domain of TCR clone 359477 (TRBV28, TRBJ2-3)
CASSLHRDTQYF

SEQ ID NO: 718955 - protein, 17 aa, Homo sapiens
  CDR3 for alpha chain variable domain of TCR clone 359478 (TRAV13-1, )
CAANIQNPDPAVYQLRD

SEQ ID NO: 718956 - protein, 14 aa, Homo sapiens
  CDR3 for beta chain variable domain of TCR clone 359478 (TRBV12-4, TRBJ2-5)
CASSFQAHQETQYF

SEQ ID NO: 718957 - protein, 15 aa, Homo sapiens
  CDR3 for alpha chain variable domain of TCR clone 359479 (TRAV26-1, TRAJ29)
CIVRVEGSGNTPLVF

SEQ ID NO: 718958 - protein, 16 aa, Homo sapiens
  CDR3 for beta chain variable domain of TCR clone 359479 (TRBV27, TRBJ1-1)
CASSSRGRTGYTEAFF

SEQ ID NO: 718959 - protein, 12 aa, Homo sapiens
  CDR3 for alpha chain variable domain of TCR clone 359480 (TRAV3, TRAJ26)
CAVRDYGQNFVF

SEQ ID NO: 718960 - protein, 16 aa, Homo sapiens
  CDR3 for beta chain variable domain of TCR clone 359480 (TRBV11-2, TRBJ1-2)
SASSPSGREANYGYTV

SEQ ID NO: 718961 - protein, 15 aa, Homo sapiens
  CDR3 for alpha chain variable domain of TCR clone 359481 (TRAV35, TRAJ38)
CAGFSNAGNNRKLLW

SEQ ID NO: 718962 - protein, 18 aa, Homo sapiens
  CDR3 for beta chain variable domain of TCR clone 359481 (TRBV3-1, TRBJ1-2)
CASSQDVIGWNGDYGYAF

SEQ ID NO: 718963 - protein, 13 aa, Homo sapiens
  CDR3 for alpha chain variable domain of TCR clone 359482 (TRAV21, TRAJ12)
CAVLMDSSYKLIF

SEQ ID NO: 718964 - protein, 15 aa, Homo sapiens
  CDR3 for beta chain variable domain of TCR clone 359482 (TRBV27, TRBJ2-3)
CASSPQGNPTDTQYF

SEQ ID NO: 718965 - protein, 14 aa, Homo sapiens
  CDR3 for alpha chain variable domain of TCR clone 359483 (TRAV9-2, TRAJ39)
CALYIYNAGNMLTF

SEQ ID NO: 718966 - protein, 14 aa, Homo sapiens
  CDR3 for beta chain variable domain of TCR clone 359483 (TRBV7-9, TRBJ2-3)
CASSLEQGTNTQYF

SEQ ID NO: 718967 - protein, 14 aa, Homo sapiens
  CDR3 for alpha chain variable domain of TCR clone 359484 (TRAV1-2, TRAJ16)
CAVNRFSDGQKLLF

SEQ ID NO: 718968 - protein, 15 aa, Homo sapiens
  CDR3 for beta chain variable domain of TCR clone 359484 (TRBV5-4, TRBJ2-7)
CASSLEWGPSYEQYF

SEQ ID NO: 718969 - protein, 11 aa, Homo sapiens
  CDR3 for alpha chain variable domain of TCR clone 359485 (TRAV12-1, TRAJ9)
CVVKNGFKTIF

SEQ ID NO: 718970 - protein, 15 aa, Homo sapiens
  CDR3 for beta chain variable domain of TCR clone 359485 (TRBV18, TRBJ2-5)
CASSPGTGVQETQYF

SEQ ID NO: 718971 - protein, 14 aa, Homo sapiens
  CDR3 for alpha chain variable domain of TCR clone 359486 (TRAV12-1, TRAJ3)
CVVILYTSASKIIF

SEQ ID NO: 718972 - protein, 17 aa, Homo sapiens
  CDR3 for beta chain variable domain of TCR clone 359486 (TRBV20-1, TRBJ2-1)
CSASSSGLAGSYNEQFF

SEQ ID NO: 718973 - protein, 16 aa, Homo sapiens
  CDR3 for alpha chain variable domain of TCR clone 359487 (TRAV30, TRAJ24)
CGTEIVAADSWGKFQF

SEQ ID NO: 718974 - protein, 13 aa, Homo sapiens
  CDR3 for beta chain variable domain of TCR clone 359487 (TRBV20-1, TRBJ1-1)
CSARGGGNTEAFF

SEQ ID NO: 718975 - protein, 13 aa, Homo sapiens
  CDR3 for alpha chain variable domain of TCR clone 359488 (TRAV13-2, TRAJ48)
CADSNFGNEKLTF

SEQ ID NO: 718976 - protein, 14 aa, Homo sapiens
  CDR3 for beta chain variable domain of TCR clone 359488 (TRBV4-1, TRBJ2-2)
CASSQAVNTGELFF

SEQ ID NO: 718977 - protein, 16 aa, Homo sapiens
  CDR3 for alpha chain variable domain of TCR clone 359489 (TRAV16, TRAJ42)
CALSGYYGGSKGNLIF

SEQ ID NO: 718978 - protein, 14 aa, Homo sapiens
  CDR3 for beta chain variable domain of TCR clone 359489 (TRBV3-1, TRBJ2-5)
CASSQAVRQETQYF

SEQ ID NO: 718979 - protein, 16 aa, Homo sapiens
  CDR3 for alpha chain variable domain of TCR clone 359490 (TRAV1-2, TRAJ10)
CAVRGVLTGGGNKLTF

SEQ ID NO: 718980 - protein, 14 aa, Homo sapiens
  CDR3 for beta chain variable domain of TCR clone 359490 (TRBV12-4, TRBJ1-2)
CASTAQALRYGYTF

SEQ ID NO: 718981 - protein, 14 aa, Homo sapiens
  CDR3 for alpha chain variable domain of TCR clone 359491 (TRAV1-2, TRAJ16)
CAVNRFSDGQKLLF

SEQ ID NO: 718982 - protein, 13 aa, Homo sapiens
  CDR3 for beta chain variable domain of TCR clone 359491 (TRBV2, TRBJ2-7)
CASSGAAAYEQYF

SEQ ID NO: 718983 - protein, 14 aa, Homo sapiens
  CDR3 for alpha chain variable domain of TCR clone 359492 (TRAV13-1, TRAJ26)
CAASSAHYVQNFVF

SEQ ID NO: 718984 - protein, 17 aa, Homo sapiens
  CDR3 for beta chain variable domain of TCR clone 359492 (TRBV25-1, TRBJ2-5)
CASSRRGGRGGQETQYF

SEQ ID NO: 718985 - protein, 13 aa, Homo sapiens
  CDR3 for alpha chain variable domain of TCR clone 359493 (TRAV27, TRAJ8)
CAGGPTGFQKPVF

SEQ ID NO: 718986 - protein, 15 aa, Homo sapiens
  CDR3 for beta chain variable domain of TCR clone 359493 (TRBV6-1, TRBJ2-7)
CASSESMGDFYEQYF

SEQ ID NO: 718987 - protein, 14 aa, Homo sapiens
  CDR3 for alpha chain variable domain of TCR clone 359494 (TRAV1-2, TRAJ8)
CAVREDTGFQKLVF

SEQ ID NO: 718988 - protein, 15 aa, Homo sapiens
  CDR3 for beta chain variable domain of TCR clone 359494 (TRBV11-3, TRBJ2-3)
CASLRDGREGDTQYF

SEQ ID NO: 718989 - protein, 13 aa, Homo sapiens
  CDR3 for alpha chain variable domain of TCR clone 359495 (TRAV12-3, TRAJ7)
CAMSASGNNRLAF

SEQ ID NO: 718990 - protein, 16 aa, Homo sapiens
  CDR3 for beta chain variable domain of TCR clone 359495 (TRBV12-5, TRBJ2-5)
CASGPRTSGNQETQYF

SEQ ID NO: 718991 - protein, 13 aa, Homo sapiens
  CDR3 for alpha chain variable domain of TCR clone 359496 (TRAV3, TRAJ41)
CAVSSNSGYALNF

SEQ ID NO: 718992 - protein, 17 aa, Homo sapiens
  CDR3 for beta chain variable domain of TCR clone 359496 (TRBV4-1, TRBJ2-7)
CASSRDPLGVRGGEQYF

SEQ ID NO: 718993 - protein, 14 aa, Homo sapiens
  CDR3 for alpha chain variable domain of TCR clone 359497 (TRAV8-4, TRAJ48)
CAVSETFGNEKLTF

SEQ ID NO: 718994 - protein, 15 aa, Homo sapiens
  CDR3 for beta chain variable domain of TCR clone 359497 (TRBV4-1, TRBJ1-4)
CASSDTGGTNGKLFF

SEQ ID NO: 718995 - protein, 11 aa, Homo sapiens
  CDR3 for alpha chain variable domain of TCR clone 359498 (TRAV17, TRAJ21)
CATGNSNKFYF

SEQ ID NO: 718996 - protein, 13 aa, Homo sapiens
  CDR3 for beta chain variable domain of TCR clone 359498 (TRBV12-4, TRBJ1-2)
CASSLRQGKGYTF

SEQ ID NO: 718997 - protein, 14 aa, Homo sapiens
  CDR3 for alpha chain variable domain of TCR clone 359499 (TRAV12-3, TRAJ10)
SHLPLTGGGNKLTF

SEQ ID NO: 718998 - protein, 16 aa, Homo sapiens
  CDR3 for beta chain variable domain of TCR clone 359499 (TRBV19, TRBJ2-2)
CASSFPGQGLAGELFF

SEQ ID NO: 718999 - protein, 16 aa, Homo sapiens
  CDR3 for alpha chain variable domain of TCR clone 359500 (TRAV8-6, TRAJ53)
CAVTSNSGGSNYKLTF

SEQ ID NO: 719000 - protein, 14 aa, Homo sapiens
  CDR3 for beta chain variable domain of TCR clone 359500 (TRBV25-1, TRBJ1-1)
CASTHLGGNTEAFF

SEQ ID NO: 719001 - protein, 14 aa, Homo sapiens
  CDR3 for alpha chain variable domain of TCR clone 359501 (TRAV1-2, TRAJ16)
CAVNRFSDGQKLFF

SEQ ID NO: 719002 - protein, 15 aa, Homo sapiens
  CDR3 for beta chain variable domain of TCR clone 359501 (TRBV9, TRBJ1-6)
CANSVAGTGDSALHF

SEQ ID NO: 719003 - protein, 12 aa, Homo sapiens
  CDR3 for alpha chain variable domain of TCR clone 359502 (TRAV1-1, TRAJ9)
CAFNTGGFKTIF

SEQ ID NO: 719004 - protein, 13 aa, Homo sapiens
  CDR3 for beta chain variable domain of TCR clone 359502 (TRBV29-1, TRBJ2-5)
CSAGLAGEETQYF

SEQ ID NO: 719005 - protein, 14 aa, Homo sapiens
  CDR3 for alpha chain variable domain of TCR clone 359503 (TRAV8-3, TRAJ13)
CAVGAQEGYQKVTF

SEQ ID NO: 719006 - protein, 13 aa, Homo sapiens
  CDR3 for beta chain variable domain of TCR clone 359503 (TRBV11-2, TRBJ2-5)
CASSTTGEETQYF

SEQ ID NO: 719007 - protein, 16 aa, Homo sapiens
  CDR3 for alpha chain variable domain of TCR clone 359504 (TRAV3, TRAJ10)
CAVREMRAGGGNKLTF

SEQ ID NO: 719008 - protein, 14 aa, Homo sapiens
  CDR3 for beta chain variable domain of TCR clone 359504 (TRBV6-1, TRBJ1-3)
CASVQGGGGNTIYF

SEQ ID NO: 719009 - protein, 11 aa, Homo sapiens
  CDR3 for alpha chain variable domain of TCR clone 359505 (TRAV13-1, TRAJ30)
CAASRDDKIIF

SEQ ID NO: 719010 - protein, 14 aa, Homo sapiens
  CDR3 for beta chain variable domain of TCR clone 359505 (TRBV6-1, TRBJ1-3)
CASVQGGGGNTMYF

SEQ ID NO: 719011 - protein, 17 aa, Homo sapiens
  CDR3 for alpha chain variable domain of TCR clone 359506 (TRAV23/DV6, TRAJ57)
CAASSTLSQGGPEKLVF

SEQ ID NO: 719012 - protein, 14 aa, Homo sapiens
  CDR3 for beta chain variable domain of TCR clone 359506 (TRBV25-1, TRBJ1-1)
CASTYLGGNTEAFF

SEQ ID NO: 719013 - protein, 14 aa, Homo sapiens
  CDR3 for alpha chain variable domain of TCR clone 359507 (TRAV12-2, TRAJ11)
CAENRESGYSTLTF

SEQ ID NO: 719014 - protein, 10 aa, Homo sapiens
  CDR3 for beta chain variable domain of TCR clone 359507 (TRBV20-1, TRBJ2-5)
CSARFETQYF

SEQ ID NO: 719015 - protein, 12 aa, Homo sapiens
  CDR3 for alpha chain variable domain of TCR clone 359508 (TRAV12-1, )
CVVNSWISRTLT

SEQ ID NO: 719016 - protein, 15 aa, Homo sapiens
  CDR3 for beta chain variable domain of TCR clone 359508 (TRBV7-9, TRBJ1-5)
CASSQGHQPNQPQHF

SEQ ID NO: 719017 - protein, 14 aa, Homo sapiens
  CDR3 for alpha chain variable domain of TCR clone 359509 (TRAV26-1, TRAJ37)
CIVPSSSNTGKLIF

SEQ ID NO: 719018 - protein, 16 aa, Homo sapiens
  CDR3 for beta chain variable domain of TCR clone 359509 (TRBV19, TRBJ2-1)
CASSKAGPSSYNEQFF

SEQ ID NO: 719019 - protein, 13 aa, Homo sapiens
  CDR3 for alpha chain variable domain of TCR clone 359510 (TRAV13-1, TRAJ6)
CAASKGGSSIPTF

SEQ ID NO: 719020 - protein, 14 aa, Homo sapiens
  CDR3 for beta chain variable domain of TCR clone 359510 (TRBV7-2, TRBJ2-1)
CASSLGVGYNEQFF

SEQ ID NO: 719021 - protein, 16 aa, Homo sapiens
  CDR3 for alpha chain variable domain of TCR clone 359511 (TRAV30, TRAJ24)
CGTEIVYADSWGKFQF

SEQ ID NO: 719022 - protein, 13 aa, Homo sapiens
  CDR3 for beta chain variable domain of TCR clone 359511 (TRBV6-1, TRBJ1-1)
CASSRQGNTEAFF

SEQ ID NO: 719023 - protein, 14 aa, Homo sapiens
  CDR3 for alpha chain variable domain of TCR clone 359512 (TRAV12-2, TRAJ45)
CALPERGGADGLTF

SEQ ID NO: 719024 - protein, 14 aa, Homo sapiens
  CDR3 for beta chain variable domain of TCR clone 359512 (TRBV18, TRBJ1-5)
CASSLGNSNQPQHF

SEQ ID NO: 719025 - protein, 14 aa, Homo sapiens
  CDR3 for alpha chain variable domain of TCR clone 359513 (TRAV26-1, TRAJ21)
CIVRVVYNFNKFYF

SEQ ID NO: 719026 - protein, 14 aa, Homo sapiens
  CDR3 for beta chain variable domain of TCR clone 359513 (TRBV7-6, TRBJ2-3)
CASSLGTVTDTQYF

SEQ ID NO: 719027 - protein, 11 aa, Homo sapiens
  CDR3 for alpha chain variable domain of TCR clone 359514 (TRAV3, TRAJ21)
CAVGNFNKFYF

SEQ ID NO: 719028 - protein, 15 aa, Homo sapiens
  CDR3 for beta chain variable domain of TCR clone 359514 (TRBV7-8, TRBJ2-7)
CASSLGTGNPYEQYF

SEQ ID NO: 719029 - protein, 15 aa, Homo sapiens
  CDR3 for alpha chain variable domain of TCR clone 359515 (TRAV13-2, TRAJ16)
CAENDRFSDGQKLLF

SEQ ID NO: 719030 - protein, 14 aa, Homo sapiens
  CDR3 for beta chain variable domain of TCR clone 359515 (TRBV18, TRBJ2-7)
CASSPRGGAYEQYF

SEQ ID NO: 719031 - protein, 13 aa, Homo sapiens
  CDR3 for alpha chain variable domain of TCR clone 359516 (TRAV2, TRAJ40)
CAVVTSGTYKYIF

SEQ ID NO: 719032 - protein, 12 aa, Homo sapiens
  CDR3 for beta chain variable domain of TCR clone 359516 (TRBV24-1, TRBJ2-7)
CATSDPGYEQYF

SEQ ID NO: 719033 - protein, 17 aa, Homo sapiens
  CDR3 for alpha chain variable domain of TCR clone 359517 (TRAV4, TRAJ18)
CLVGEMSVGSTLGRLYF

SEQ ID NO: 719034 - protein, 16 aa, Homo sapiens
  CDR3 for beta chain variable domain of TCR clone 359517 (TRBV19, TRBJ2-1)
CASSKAGPSSYNEQFF

SEQ ID NO: 719035 - protein, 21 aa, Homo sapiens
  CDR3 for alpha chain variable domain of TCR clone 359518 (TRAV12-2, TRAJ52)
CSSETPSPVIQPPTSSRSTSY

SEQ ID NO: 719036 - protein, 11 aa, Homo sapiens
  CDR3 for beta chain variable domain of TCR clone 359518 (TRBV11-2, TRBJ2-2)
CASSLPGELFF

SEQ ID NO: 719037 - protein, 17 aa, Homo sapiens
  CDR3 for alpha chain variable domain of TCR clone 359519 (TRAV21, TRAJ40)
CAVRPPSGTSGTSKYIF

SEQ ID NO: 719038 - protein, 13 aa, Homo sapiens
  CDR3 for beta chain variable domain of TCR clone 359519 (TRBV12-4, TRBJ2-7)
CASSPSQDTTRSF

SEQ ID NO: 719039 - protein, 16 aa, Homo sapiens
  CDR3 for alpha chain variable domain of TCR clone 359520 (TRAV21, TRAJ37)
CAVRPRGSSNTGKLIF

SEQ ID NO: 719040 - protein, 12 aa, Homo sapiens
  CDR3 for beta chain variable domain of TCR clone 359520 (TRBV5-1, TRBJ2-1)
CASIGGYNEQFF

SEQ ID NO: 719041 - protein, 14 aa, Homo sapiens
  CDR3 for alpha chain variable domain of TCR clone 359521 (TRAV1-2, TRAJ16)
CAVNRFSDGQKLLF

SEQ ID NO: 719042 - protein, 12 aa, Homo sapiens
  CDR3 for beta chain variable domain of TCR clone 359521 (TRBV7-8, TRBJ2-5)
CASRPNSDDQYF

SEQ ID NO: 719043 - protein, 14 aa, Homo sapiens
  CDR3 for alpha chain variable domain of TCR clone 359522 (TRAV26-1, TRAJ49)
CIVRVATGGNQFYF

SEQ ID NO: 719044 - protein, 16 aa, Homo sapiens
  CDR3 for beta chain variable domain of TCR clone 359522 (TRBV6-6, TRBJ1-6)
CASSLHGPGRGSHLHF

SEQ ID NO: 719045 - protein, 21 aa, Homo sapiens
  CDR3 for alpha chain variable domain of TCR clone 359523 (TRAV1-1, TRAJ6)
CLLLLRCERLERTGGSYIPTF

SEQ ID NO: 719046 - protein, 14 aa, Homo sapiens
  CDR3 for beta chain variable domain of TCR clone 359523 (TRBV18, TRBJ2-7)
CASSPRGGAYEQYF

SEQ ID NO: 719047 - protein, 15 aa, Homo sapiens
  CDR3 for alpha chain variable domain of TCR clone 359524 (TRAV8-3, TRAJ45)
CASSYSGGGADGLTF

SEQ ID NO: 719048 - protein, 15 aa, Homo sapiens
  CDR3 for beta chain variable domain of TCR clone 359524 (TRBV7-2, TRBJ1-5)
CASSLEGGGSRPQHF

SEQ ID NO: 719049 - protein, 12 aa, Homo sapiens
  CDR3 for alpha chain variable domain of TCR clone 359525 (TRAV13-1, TRAJ27)
CAAHTNAGKSTF

SEQ ID NO: 719050 - protein, 16 aa, Homo sapiens
  CDR3 for beta chain variable domain of TCR clone 359525 (TRBV6-1, TRBJ2-5)
CASSETLDRGAETQYF

SEQ ID NO: 719051 - protein, 16 aa, Homo sapiens
  CDR3 for alpha chain variable domain of TCR clone 359526 (TRAV38-1, TRAJ32)
CAFIKGGGGATNKLIF

SEQ ID NO: 719052 - protein, 13 aa, Homo sapiens
  CDR3 for beta chain variable domain of TCR clone 359526 (TRBV20-1, TRBJ2-5)
CSAREAFQETQYF

SEQ ID NO: 719053 - protein, 17 aa, Homo sapiens
  CDR3 for alpha chain variable domain of TCR clone 359527 (TRAV13-1, TRAJ31)
CAPRDRLMFGDGTQLDV

SEQ ID NO: 719054 - protein, 12 aa, Homo sapiens
  CDR3 for beta chain variable domain of TCR clone 359527 (TRBV7-9, TRBJ2-7)
CASSLEGYEQYF

SEQ ID NO: 719055 - protein, 14 aa, Homo sapiens
  CDR3 for alpha chain variable domain of TCR clone 359528 (TRAV1-1, TRAJ23)
CAVSIYNQGGKLIF

SEQ ID NO: 719056 - protein, 15 aa, Homo sapiens
  CDR3 for beta chain variable domain of TCR clone 359528 (TRBV20-1, TRBJ2-7)
CSARDRVSGMDEQYF

SEQ ID NO: 719057 - protein, 16 aa, Homo sapiens
  CDR3 for alpha chain variable domain of TCR clone 359529 (TRAV12-3, TRAJ53)
CAMTPGSGGSNYKLTF

SEQ ID NO: 719058 - protein, 20 aa, Homo sapiens
  CDR3 for beta chain variable domain of TCR clone 359529 (TRBV7-8, TRBJ2-2)
CASSHLFPGPTIHITGELFF

SEQ ID NO: 719059 - protein, 14 aa, Homo sapiens
  CDR3 for alpha chain variable domain of TCR clone 359530 (TRAV17, TRAJ6)
CATNPAGGSYITTF

SEQ ID NO: 719060 - protein, 16 aa, Homo sapiens
  CDR3 for beta chain variable domain of TCR clone 359530 (TRBV5-1, TRBJ2-2)
CASSLWDTTNTGELFF

SEQ ID NO: 719061 - protein, 15 aa, Homo sapiens
  CDR3 for alpha chain variable domain of TCR clone 359531 (TRAV8-3, TRAJ42)
CAVGSQAGSQGNLIF

SEQ ID NO: 719062 - protein, 14 aa, Homo sapiens
  CDR3 for beta chain variable domain of TCR clone 359531 (TRBV7-9, TRBJ1-1)
CASSLVPVWTEAFF

SEQ ID NO: 719063 - protein, 14 aa, Homo sapiens
  CDR3 for alpha chain variable domain of TCR clone 359532 (TRAV3, TRAJ6)
CAVSDWGGSYIPTF

SEQ ID NO: 719064 - protein, 17 aa, Homo sapiens
  CDR3 for beta chain variable domain of TCR clone 359532 (TRBV6-5, TRBJ2-1)
CASRLSGRFESYNEQFF

SEQ ID NO: 719065 - protein, 15 aa, Homo sapiens
  CDR3 for alpha chain variable domain of TCR clone 359533 (TRAV26-1, TRAJ42)
CIVRVKGGSQGNLIF

SEQ ID NO: 719066 - protein, 15 aa, Homo sapiens
  CDR3 for beta chain variable domain of TCR clone 359533 (TRBV19, TRBJ1-1)
CASTSGQIQNTEASF

SEQ ID NO: 719067 - protein, 14 aa, Homo sapiens
  CDR3 for alpha chain variable domain of TCR clone 359534 (TRAV1-1, TRAJ27)
CAVIYNTNAGKSTF

SEQ ID NO: 719068 - protein, 15 aa, Homo sapiens
  CDR3 for beta chain variable domain of TCR clone 359534 (TRBV6-3, TRBJ2-7)
CASSFPGTVFYEQYF

SEQ ID NO: 719069 - protein, 11 aa, Homo sapiens
  CDR3 for alpha chain variable domain of TCR clone 359535 (TRAV1-2, TRAJ20)
CAVANDYNLSF

SEQ ID NO: 719070 - protein, 14 aa, Homo sapiens
  CDR3 for beta chain variable domain of TCR clone 359535 (TRBV7-9, TRBJ1-1)
CASTPLQSYTEAFF

SEQ ID NO: 719071 - protein, 13 aa, Homo sapiens
  CDR3 for alpha chain variable domain of TCR clone 359536 (TRAV2, TRAJ40)
CAVLTSGTYKYIF

SEQ ID NO: 719072 - protein, 16 aa, Homo sapiens
  CDR3 for beta chain variable domain of TCR clone 359536 (TRBV19, TRBJ2-1)
CASSKAGPSSYNEQFF

SEQ ID NO: 719073 - protein, 15 aa, Homo sapiens
  CDR3 for alpha chain variable domain of TCR clone 359537 (TRAV8-3, TRAJ27)
CAVGPSKPNAGKSTF

SEQ ID NO: 719074 - protein, 13 aa, Homo sapiens
  CDR3 for beta chain variable domain of TCR clone 359537 (TRBV19, TRBJ1-2)
CASSVPGQDGYTF

SEQ ID NO: 719075 - protein, 13 aa, Homo sapiens
  CDR3 for alpha chain variable domain of TCR clone 359538 (TRAV12-2, TRAJ45)
CREHWGGADGLTF

SEQ ID NO: 719076 - protein, 13 aa, Homo sapiens
  CDR3 for beta chain variable domain of TCR clone 359538 (TRBV19, TRBJ2-2)
CASSIWSTGELFL

SEQ ID NO: 719077 - protein, 15 aa, Homo sapiens
  CDR3 for alpha chain variable domain of TCR clone 359539 (TRAV26-1, TRAJ39)
CIVRRYNNAGNMLTF

SEQ ID NO: 719078 - protein, 13 aa, Homo sapiens
  CDR3 for beta chain variable domain of TCR clone 359539 (TRBV10-3, TRBJ1-2)
CAISERDSYGYTF

SEQ ID NO: 719079 - protein, 13 aa, Homo sapiens
  CDR3 for alpha chain variable domain of TCR clone 359540 (TRAV12-3, TRAJ33)
CAMSVNSHYQLIW

SEQ ID NO: 719080 - protein, 13 aa, Homo sapiens
  CDR3 for beta chain variable domain of TCR clone 359540 (TRBV7-2, TRBJ2-2)
CASSLAVTGELFF

SEQ ID NO: 719081 - protein, 14 aa, Homo sapiens
  CDR3 for alpha chain variable domain of TCR clone 359541 (TRAV1-2, TRAJ8)
CAVREDTGFQKLIF

SEQ ID NO: 719082 - protein, 15 aa, Homo sapiens
  CDR3 for beta chain variable domain of TCR clone 359541 (TRBV4-1, TRBJ2-7)
CASSQNTGRLYEQYF

SEQ ID NO: 719083 - protein, 12 aa, Homo sapiens
  CDR3 for alpha chain variable domain of TCR clone 359542 (TRAV12-2, TRAJ52)
IGGGTSYGKLTF

SEQ ID NO: 719084 - protein, 15 aa, Homo sapiens
  CDR3 for beta chain variable domain of TCR clone 359542 (TRBV27, TRBJ2-1)
CASSNGGGSSNEQFF

SEQ ID NO: 719085 - protein, 17 aa, Homo sapiens
  CDR3 for alpha chain variable domain of TCR clone 359543 (TRAV13-1, TRAJ52)
CAAGRNAGGTSYGKQTF

SEQ ID NO: 719086 - protein, 13 aa, Homo sapiens
  CDR3 for beta chain variable domain of TCR clone 359543 (TRBV7-2, TRBJ1-1)
CASNLKGAKVAFF

SEQ ID NO: 719087 - protein, 12 aa, Homo sapiens
  CDR3 for alpha chain variable domain of TCR clone 359544 (TRAV17, TRAJ20)
CATYSKDYKLSF

SEQ ID NO: 719088 - protein, 11 aa, Homo sapiens
  CDR3 for beta chain variable domain of TCR clone 359544 (TRBV4-1, TRBJ2-2)
CASEHTGELFF

SEQ ID NO: 719089 - protein, 13 aa, Homo sapiens
  CDR3 for alpha chain variable domain of TCR clone 359545 (TRAV1-2, TRAJ9)
CAALTTGGFKTIF

SEQ ID NO: 719090 - protein, 20 aa, Homo sapiens
  CDR3 for beta chain variable domain of TCR clone 359545 (TRBV28, TRBJ2-1)
CASTPIGRSPGLAGGNEQFF

SEQ ID NO: 719091 - protein, 12 aa, Homo sapiens
  CDR3 for alpha chain variable domain of TCR clone 359546 (TRAV12-3, TRAJ17)
CAMTLTGNKLTF

SEQ ID NO: 719092 - protein, 11 aa, Homo sapiens
  CDR3 for beta chain variable domain of TCR clone 359546 (TRBV19, TRBJ1-1)
CATLRNTEAFF

SEQ ID NO: 719093 - protein, 14 aa, Homo sapiens
  CDR3 for alpha chain variable domain of TCR clone 359547 (TRAV23/DV6, TRAJ11)
CAARLASGYSTLTF

SEQ ID NO: 719094 - protein, 15 aa, Homo sapiens
  CDR3 for beta chain variable domain of TCR clone 359547 (TRBV28, TRBJ2-7)
CASSSPGTEPFEQYF

SEQ ID NO: 719095 - protein, 14 aa, Homo sapiens
  CDR3 for alpha chain variable domain of TCR clone 359548 (TRAV1-2, TRAJ8)
CAVREDTGFQKLVF

SEQ ID NO: 719096 - protein, 16 aa, Homo sapiens
  CDR3 for beta chain variable domain of TCR clone 359548 (TRBV20-1, TRBJ2-4)
CSARAILSGQGDIQYF

SEQ ID NO: 719097 - protein, 14 aa, Homo sapiens
  CDR3 for alpha chain variable domain of TCR clone 359549 (TRAV29/DV5, TRAJ34)
CAASASRETDKLIF

SEQ ID NO: 719098 - protein, 15 aa, Homo sapiens
  CDR3 for beta chain variable domain of TCR clone 359549 (TRBV7-8, TRBJ2-7)
CASSLERPGSYEHYF

SEQ ID NO: 719099 - protein, 16 aa, Homo sapiens
  CDR3 for alpha chain variable domain of TCR clone 359550 (TRAV23/DV6, TRAJ9)
CAASIGGNTGGFKTIF

SEQ ID NO: 719100 - protein, 13 aa, Homo sapiens
  CDR3 for beta chain variable domain of TCR clone 359550 (TRBV6-5, TRBJ2-5)
CASSPQGGETQYF

SEQ ID NO: 719101 - protein, 12 aa, Homo sapiens
  CDR3 for alpha chain variable domain of TCR clone 359551 (TRAV12-2, TRAJ31)
CAVNTPDSRLMF

SEQ ID NO: 719102 - protein, 17 aa, Homo sapiens
  CDR3 for beta chain variable domain of TCR clone 359551 (TRBV20-1, TRBJ1-6)
CSAQGGYTFSYNSPLHF

SEQ ID NO: 719103 - protein, 14 aa, Homo sapiens
  CDR3 for alpha chain variable domain of TCR clone 359552 (TRAV35, TRAJ13)
CAGSPSGGYQKVTF

SEQ ID NO: 719104 - protein, 20 aa, Homo sapiens
  CDR3 for beta chain variable domain of TCR clone 359552 (TRBV19, TRBJ2-1)
CASSISRTVTSTRLNNEQFF

SEQ ID NO: 719105 - protein, 16 aa, Homo sapiens
  CDR3 for alpha chain variable domain of TCR clone 359553 (TRAV30, TRAJ24)
CGTEIVDADSWGKFQF

SEQ ID NO: 719106 - protein, 14 aa, Homo sapiens
  CDR3 for beta chain variable domain of TCR clone 359553 (TRBV12-5, TRBJ2-5)
CASGSRTRQETRYF

SEQ ID NO: 719107 - protein, 15 aa, Homo sapiens
  CDR3 for alpha chain variable domain of TCR clone 359554 (TRAV3, TRAJ4)
CAVRDGTGGYNKLIS

SEQ ID NO: 719108 - protein, 16 aa, Homo sapiens
  CDR3 for beta chain variable domain of TCR clone 359554 (TRBV27, TRBJ2-2)
CASSSSGVSNTGELFF

SEQ ID NO: 719109 - protein, 14 aa, Homo sapiens
  CDR3 for alpha chain variable domain of TCR clone 359555 (TRAV8-4, TRAJ17)
CAVSDQAADNKLTF

SEQ ID NO: 719110 - protein, 15 aa, Homo sapiens
  CDR3 for beta chain variable domain of TCR clone 359555 (TRBV7-2, TRBJ1-2)
CASSLAPDRGLGYTF

SEQ ID NO: 719111 - protein, 11 aa, Homo sapiens
  CDR3 for alpha chain variable domain of TCR clone 359556 (TRAV13-1, TRAJ39)
CASHAGNMLTF

SEQ ID NO: 719112 - protein, 14 aa, Homo sapiens
  CDR3 for beta chain variable domain of TCR clone 359556 (TRBV5-1, TRBJ2-3)
CASRGQTSTDTQYF

SEQ ID NO: 719113 - protein, 14 aa, Homo sapiens
  CDR3 for alpha chain variable domain of TCR clone 359557 (TRAV12-2, TRAJ36)
CAVNPPTGANNLFV

SEQ ID NO: 719114 - protein, 13 aa, Homo sapiens
  CDR3 for beta chain variable domain of TCR clone 359557 (TRBV20-1, TRBJ1-6)
CSAPTGLGSPLHF

SEQ ID NO: 719115 - protein, 14 aa, Homo sapiens
  CDR3 for alpha chain variable domain of TCR clone 359558 (TRAV1-2, TRAJ8)
CAVREDTGFQKLVF

SEQ ID NO: 719116 - protein, 16 aa, Homo sapiens
  CDR3 for beta chain variable domain of TCR clone 359558 (TRBV7-9, TRBJ1-2)
CASSLGFSSGEDGYPF

SEQ ID NO: 719117 - protein, 12 aa, Homo sapiens
  CDR3 for alpha chain variable domain of TCR clone 359559 (TRAV3, TRAJ43)
CAVRDPNNDMRF

SEQ ID NO: 719118 - protein, 15 aa, Homo sapiens
  CDR3 for beta chain variable domain of TCR clone 359559 (TRBV18, TRBJ1-1)
CASSPSSWVNTEAFF

SEQ ID NO: 719119 - protein, 15 aa, Homo sapiens
  CDR3 for alpha chain variable domain of TCR clone 359560 (TRAV21, TRAJ22)
CAVRLFFWFCKATDL

SEQ ID NO: 719120 - protein, 13 aa, Homo sapiens
  CDR3 for beta chain variable domain of TCR clone 359560 (TRBV7-3, TRBJ2-1)
CASSVDSYNEQFF

SEQ ID NO: 719121 - protein, 13 aa, Homo sapiens
  CDR3 for alpha chain variable domain of TCR clone 359561 (TRAV1-2, TRAJ9)
CAVLNTGGFKTIF

SEQ ID NO: 719122 - protein, 15 aa, Homo sapiens
  CDR3 for beta chain variable domain of TCR clone 359561 (TRBV7-9, TRBJ1-4)
CASSARTGGNEKLFF

SEQ ID NO: 719123 - protein, 14 aa, Homo sapiens
  CDR3 for alpha chain variable domain of TCR clone 359562 (TRAV17, TRAJ43)
CATDHPYNNNDMRF

SEQ ID NO: 719124 - protein, 14 aa, Homo sapiens
  CDR3 for beta chain variable domain of TCR clone 359562 (TRBV7-2, TRBJ2-7)
CASRSQGAAYEQYF

SEQ ID NO: 719125 - protein, 13 aa, Homo sapiens
  CDR3 for alpha chain variable domain of TCR clone 359563 (TRAV14/DV4, TRAJ4)
SMTTSGGYNKLIF

SEQ ID NO: 719126 - protein, 15 aa, Homo sapiens
  CDR3 for beta chain variable domain of TCR clone 359563 (TRBV12-4, TRBJ1-2)
CASRLGVAGNYGYTF

SEQ ID NO: 719127 - protein, 14 aa, Homo sapiens
  CDR3 for alpha chain variable domain of TCR clone 359564 (TRAV17, TRAJ53)
CATDAGGSNDKLTF

SEQ ID NO: 719128 - protein, 16 aa, Homo sapiens
  CDR3 for beta chain variable domain of TCR clone 359564 (TRBV4-1, TRBJ1-1)
CASSQDAGMGNTEAFF

SEQ ID NO: 719129 - protein, 12 aa, Homo sapiens
  CDR3 for alpha chain variable domain of TCR clone 359565 (TRAV26-1, TRAJ26)
CIVFIYGQNFVL

SEQ ID NO: 719130 - protein, 13 aa, Homo sapiens
  CDR3 for beta chain variable domain of TCR clone 359565 (TRBV27, TRBJ1-1)
CASSLSIGAEAFF

SEQ ID NO: 719131 - protein, 14 aa, Homo sapiens
  CDR3 for alpha chain variable domain of TCR clone 359566 (TRAV12-1, TRAJ17)
CVVNYKAAGNKLTF

SEQ ID NO: 719132 - protein, 15 aa, Homo sapiens
  CDR3 for beta chain variable domain of TCR clone 359566 (TRBV5-1, TRBJ2-5)
CAGSFKGGDQETQYF

SEQ ID NO: 719133 - protein, 12 aa, Homo sapiens
  CDR3 for alpha chain variable domain of TCR clone 359567 (TRAV12-3, TRAJ17)
CAMTLTGNKITF

SEQ ID NO: 719134 - protein, 16 aa, Homo sapiens
  CDR3 for beta chain variable domain of TCR clone 359567 (TRBV29-1, TRBJ2-7)
CSVEDAEDGTAYEQYF

SEQ ID NO: 719135 - protein, 15 aa, Homo sapiens
  CDR3 for alpha chain variable domain of TCR clone 359568 (TRAV29/DV5, TRAJ24)
CAASGATDSWGKFQF

SEQ ID NO: 719136 - protein, 15 aa, Homo sapiens
  CDR3 for beta chain variable domain of TCR clone 359568 (TRBV19, TRBJ1-2)
CASSVGQVLNYGYTF

SEQ ID NO: 719137 - protein, 13 aa, Homo sapiens
  CDR3 for alpha chain variable domain of TCR clone 359569 (TRAV12-2, TRAJ34)
CAVRGYNTDKLIF

SEQ ID NO: 719138 - protein, 15 aa, Homo sapiens
  CDR3 for beta chain variable domain of TCR clone 359569 (TRBV5-8, TRBJ2-3)
CASSPNFGGRDTQYF

SEQ ID NO: 719139 - protein, 16 aa, Homo sapiens
  CDR3 for alpha chain variable domain of TCR clone 359570 (TRAV3, TRAJ13)
CAVRDPNSGGYHNVTF

SEQ ID NO: 719140 - protein, 13 aa, Homo sapiens
  CDR3 for beta chain variable domain of TCR clone 359570 (TRBV7-9, TRBJ2-7)
CASSLQGSYEQYF

SEQ ID NO: 719141 - protein, 15 aa, Homo sapiens
  CDR3 for alpha chain variable domain of TCR clone 359571 (TRAV8-3, TRAJ45)
CASSYSGGGADGLTF

SEQ ID NO: 719142 - protein, 13 aa, Homo sapiens
  CDR3 for beta chain variable domain of TCR clone 359571 (TRBV10-3, TRBJ2-7)
CDYKLAVNYEQYF

SEQ ID NO: 719143 - protein, 14 aa, Homo sapiens
  CDR3 for alpha chain variable domain of TCR clone 359572 (TRAV13-2, TRAJ43)
CAEIPTYNNNDMRF

SEQ ID NO: 719144 - protein, 13 aa, Homo sapiens
  CDR3 for beta chain variable domain of TCR clone 359572 (TRBV20-1, TRBJ1-1)
CSAPLGGGTEAFF

SEQ ID NO: 719145 - protein, 21 aa, Homo sapiens
  CDR3 for alpha chain variable domain of TCR clone 359573 (TRAV2, TRAJ23)
ILQVREADAAVCYCVGGKLIF

SEQ ID NO: 719146 - protein, 20 aa, Homo sapiens
  CDR3 for beta chain variable domain of TCR clone 359573 (TRBV20-1, TRBJ2-5)
CSARAGLAGRLAGHLETQYF

SEQ ID NO: 719147 - protein, 17 aa, Homo sapiens
  CDR3 for alpha chain variable domain of TCR clone 359574 (TRAV16, TRAJ58)
CITVLSNGETSGSRSTF

SEQ ID NO: 719148 - protein, 13 aa, Homo sapiens
  CDR3 for beta chain variable domain of TCR clone 359574 (TRBV20-1, TRBJ2-2)
CSASAAGTGELFF

SEQ ID NO: 719149 - protein, 12 aa, Homo sapiens
  CDR3 for alpha chain variable domain of TCR clone 359575 (TRAV8-3, TRAJ43)
CAVGRTDNDMRF

SEQ ID NO: 719150 - protein, 15 aa, Homo sapiens
  CDR3 for beta chain variable domain of TCR clone 359575 (TRBV20-1, TRBJ2-7)
CSARDRVSGMDEQYF

SEQ ID NO: 719151 - protein, 16 aa, Homo sapiens
  CDR3 for alpha chain variable domain of TCR clone 359576 (TRAV27, TRAJ13)
CAGSKSDSGGYQNVTF

SEQ ID NO: 719152 - protein, 15 aa, Homo sapiens
  CDR3 for beta chain variable domain of TCR clone 359576 (TRBV29-1, TRBJ2-1)
CSVGRHALFYNEQFF

SEQ ID NO: 719153 - protein, 13 aa, Homo sapiens
  CDR3 for alpha chain variable domain of TCR clone 359577 (TRAV23/DV6, TRAJ20)
CAAGGFHDYKLVF

SEQ ID NO: 719154 - protein, 14 aa, Homo sapiens
  CDR3 for beta chain variable domain of TCR clone 359577 (TRBV3-1, TRBJ2-7)
CASSQSGAHYEQYF

SEQ ID NO: 719155 - protein, 11 aa, Homo sapiens
  CDR3 for alpha chain variable domain of TCR clone 359578 (TRAV2, TRAJ13)
CASGGYQKVTF

SEQ ID NO: 719156 - protein, 14 aa, Homo sapiens
  CDR3 for beta chain variable domain of TCR clone 359578 (TRBV7-6, TRBJ2-3)
CASSLTGGTDTQYF

SEQ ID NO: 719157 - protein, 13 aa, Homo sapiens
  CDR3 for alpha chain variable domain of TCR clone 359579 (TRAV21, TRAJ15)
CAVRNQPGTALIF

SEQ ID NO: 719158 - protein, 16 aa, Homo sapiens
  CDR3 for beta chain variable domain of TCR clone 359579 (TRBV20-1, TRBJ2-5)
CSPGGTSGGYMETQYF

SEQ ID NO: 719159 - protein, 18 aa, Homo sapiens
  CDR3 for alpha chain variable domain of TCR clone 359580 (TRAV26-2, TRAJ45)
CLLRVDKYSGGGADGLHF

SEQ ID NO: 719160 - protein, 11 aa, Homo sapiens
  CDR3 for beta chain variable domain of TCR clone 359580 (TRBV29-1, TRBJ2-5)
CSEDRTGTQYF

SEQ ID NO: 719161 - protein, 12 aa, Homo sapiens
  CDR3 for alpha chain variable domain of TCR clone 359581 (TRAV16, TRAJ49)
CALTEGGKQFYF

SEQ ID NO: 719162 - protein, 14 aa, Homo sapiens
  CDR3 for beta chain variable domain of TCR clone 359581 (TRBV7-9, TRBJ2-1)
CASRPTGLRNEQFF

SEQ ID NO: 719163 - protein, 12 aa, Homo sapiens
  CDR3 for alpha chain variable domain of TCR clone 359582 (TRAV2, TRAJ9)
CAVWAGGFKTIF

SEQ ID NO: 719164 - protein, 16 aa, Homo sapiens
  CDR3 for beta chain variable domain of TCR clone 359582 (TRBV13, TRBJ2-2)
CASIPRTGEHTGELFF

SEQ ID NO: 719165 - protein, 14 aa, Homo sapiens
  CDR3 for alpha chain variable domain of TCR clone 359583 (TRAV8-1, TRAJ5)
CAVSMDTGSRALTF

SEQ ID NO: 719166 - protein, 15 aa, Homo sapiens
  CDR3 for beta chain variable domain of TCR clone 359583 (TRBV19, TRBJ2-4)
CASRGPRRGENIQYF

SEQ ID NO: 719167 - protein, 14 aa, Homo sapiens
  CDR3 for alpha chain variable domain of TCR clone 359584 (TRAV12-2, TRAJ13)
CAVKKTGGYQKVTF

SEQ ID NO: 719168 - protein, 15 aa, Homo sapiens
  CDR3 for beta chain variable domain of TCR clone 359584 (TRBV27, TRBJ2-1)
CASSNGEGPPMSSYS

SEQ ID NO: 719169 - protein, 11 aa, Homo sapiens
  CDR3 for alpha chain variable domain of TCR clone 359585 (TRAV8-3, TRAJ49)
CAVNTGNQFYF

SEQ ID NO: 719170 - protein, 16 aa, Homo sapiens
  CDR3 for beta chain variable domain of TCR clone 359585 (TRBV4-1, TRBJ2-7)
CASRPSGGGADNEQYF

SEQ ID NO: 719171 - protein, 12 aa, Homo sapiens
  CDR3 for alpha chain variable domain of TCR clone 359586 (TRAV36/DV7, TRAJ54)
CAVVRGAQKLVF

SEQ ID NO: 719172 - protein, 17 aa, Homo sapiens
  CDR3 for beta chain variable domain of TCR clone 359586 (TRBV7-2, TRBJ2-3)
CASSPQGRARVQDTQYF

SEQ ID NO: 719173 - protein, 14 aa, Homo sapiens
  CDR3 for alpha chain variable domain of TCR clone 359587 (TRAV13-1, TRAJ35)
CAASKGGFGNVLHC

SEQ ID NO: 719174 - protein, 14 aa, Homo sapiens
  CDR3 for beta chain variable domain of TCR clone 359587 (TRBV9, TRBJ2-1)
CASSVDPRGKEQFF

SEQ ID NO: 719175 - protein, 19 aa, Homo sapiens
  CDR3 for alpha chain variable domain of TCR clone 359588 (TRAV25, TRAJ20)
TATQTTDVGILPHDYKLSF

SEQ ID NO: 719176 - protein, 17 aa, Homo sapiens
  CDR3 for beta chain variable domain of TCR clone 359588 (TRBV4-3, TRBJ2-1)
CARSQFSSGRASGEQFF

SEQ ID NO: 719177 - protein, 15 aa, Homo sapiens
  CDR3 for alpha chain variable domain of TCR clone 359589 (TRAV8-3, TRAJ45)
CASSYSGGVADGRTF

SEQ ID NO: 719178 - protein, 13 aa, Homo sapiens
  CDR3 for beta chain variable domain of TCR clone 359589 (TRBV10-3, TRBJ2-7)
CASKLAVNYEQYF

SEQ ID NO: 719179 - protein, 16 aa, Homo sapiens
  CDR3 for alpha chain variable domain of TCR clone 359590 (TRAV30, TRAJ24)
CGTETVDADSWGKFQF

SEQ ID NO: 719180 - protein, 15 aa, Homo sapiens
  CDR3 for beta chain variable domain of TCR clone 359590 (TRBV15, TRBJ1-5)
CATSRDPVSNQPQHF

SEQ ID NO: 719181 - protein, 15 aa, Homo sapiens
  CDR3 for alpha chain variable domain of TCR clone 359591 (TRAV3, TRAJ22)
CAVRDRGGSARQLTF

SEQ ID NO: 719182 - protein, 17 aa, Homo sapiens
  CDR3 for beta chain variable domain of TCR clone 359591 (TRBV28, TRBJ2-5)
CASSTPEGGALQETQYF

SEQ ID NO: 719183 - protein, 14 aa, Homo sapiens
  CDR3 for alpha chain variable domain of TCR clone 359592 (TRAV35, TRAJ13)
CAGSPSGGYQKVTF

SEQ ID NO: 719184 - protein, 13 aa, Homo sapiens
  CDR3 for beta chain variable domain of TCR clone 359592 (TRBV7-7, TRBJ2-3)
CASSLSRADTQYF

SEQ ID NO: 719185 - protein, 13 aa, Homo sapiens
  CDR3 for alpha chain variable domain of TCR clone 359593 (TRAV17, TRAJ5)
CAPMDTGRRALTF

SEQ ID NO: 719186 - protein, 15 aa, Homo sapiens
  CDR3 for beta chain variable domain of TCR clone 359593 (TRBV27, TRBJ2-1)
CASSNGGGSSNEQFF

SEQ ID NO: 719187 - protein, 23 aa, Homo sapiens
  CDR3 for alpha chain variable domain of TCR clone 359594 (TRAV30, TRAJ43)
CTLRPPRSVTQEPTSAALSDMRF

SEQ ID NO: 719188 - protein, 13 aa, Homo sapiens
  CDR3 for beta chain variable domain of TCR clone 359594 (TRBV12-4, TRBJ2-2)
CASSITGSGELFF

SEQ ID NO: 719189 - protein, 13 aa, Homo sapiens
  CDR3 for alpha chain variable domain of TCR clone 359595 (TRAV23/DV6, TRAJ15)
CAALPAGRTCPDL

SEQ ID NO: 719190 - protein, 14 aa, Homo sapiens
  CDR3 for beta chain variable domain of TCR clone 359595 (TRBV7-9, TRBJ1-2)
CASSRQGANYGYTF

SEQ ID NO: 719191 - protein, 15 aa, Homo sapiens
  CDR3 for alpha chain variable domain of TCR clone 359596 (TRAV8-3, TRAJ45)
CASSYSGGGADGLTF

SEQ ID NO: 719192 - protein, 17 aa, Homo sapiens
  CDR3 for beta chain variable domain of TCR clone 359596 (TRBV7-8, TRBJ1-2)
CASSLRPLQGHWYGYTF

SEQ ID NO: 719193 - protein, 14 aa, Homo sapiens
  CDR3 for alpha chain variable domain of TCR clone 359597 (TRAV9-2, TRAJ39)
CALYIYNAGNMLTF

SEQ ID NO: 719194 - protein, 14 aa, Homo sapiens
  CDR3 for beta chain variable domain of TCR clone 359597 (TRBV6-1, TRBJ1-3)
CASVQGGGGNIIYF

SEQ ID NO: 719195 - protein, 13 aa, Homo sapiens
  CDR3 for alpha chain variable domain of TCR clone 359598 (TRAV8-6, TRAJ41)
CAVSENSGYALNF

SEQ ID NO: 719196 - protein, 17 aa, Homo sapiens
  CDR3 for beta chain variable domain of TCR clone 359598 (TRBV7-2, TRBJ2-3)
CASSLEARGTSTDTQYL

SEQ ID NO: 719197 - protein, 13 aa, Homo sapiens
  CDR3 for alpha chain variable domain of TCR clone 359599 (TRAV29/DV5, TRAJ31)
CAASRNNNARLMF

SEQ ID NO: 719198 - protein, 17 aa, Homo sapiens
  CDR3 for beta chain variable domain of TCR clone 359599 (TRBV5-4, TRBJ2-3)
CISVPEVLTASTDTQYF

SEQ ID NO: 719199 - protein, 16 aa, Homo sapiens
  CDR3 for alpha chain variable domain of TCR clone 359600 (TRAV30, TRAJ24)
CGTEIVDADSWGKFQF

SEQ ID NO: 719200 - protein, 15 aa, Homo sapiens
  CDR3 for beta chain variable domain of TCR clone 359600 (TRBV7-8, TRBJ1-5)
CASSLEGSGNQPQHF

SEQ ID NO: 719201 - protein, 12 aa, Homo sapiens
  CDR3 for alpha chain variable domain of TCR clone 359601 (TRAV12-3, TRAJ17)
CAMTLTGNKLTF

SEQ ID NO: 719202 - protein, 15 aa, Homo sapiens
  CDR3 for beta chain variable domain of TCR clone 359601 (TRBV7-9, TRBJ1-6)
CASSSPGRGNSPRHF

SEQ ID NO: 719203 - protein, 16 aa, Homo sapiens
  CDR3 for alpha chain variable domain of TCR clone 359602 (TRAV27, TRAJ13)
CAGAKSDSGGYQKVTF

SEQ ID NO: 719204 - protein, 12 aa, Homo sapiens
  CDR3 for beta chain variable domain of TCR clone 359602 (TRBV19, TRBJ2-7)
CASTDRDYEQYF

SEQ ID NO: 719205 - protein, 15 aa, Homo sapiens
  CDR3 for alpha chain variable domain of TCR clone 359603 (TRAV3, TRAJ11)
CAVRDRGSGYSTLTF

SEQ ID NO: 719206 - protein, 14 aa, Homo sapiens
  CDR3 for beta chain variable domain of TCR clone 359603 (TRBV11-1, TRBJ2-7)
CASSFRQGSYEQYF

SEQ ID NO: 719207 - protein, 14 aa, Homo sapiens
  CDR3 for alpha chain variable domain of TCR clone 359604 (TRAV12-3, TRAJ56)
CAMSVTGANSKLTF

SEQ ID NO: 719208 - protein, 14 aa, Homo sapiens
  CDR3 for beta chain variable domain of TCR clone 359604 (TRBV7-2, TRBJ2-7)
CASSPKTSFYEQYF

SEQ ID NO: 719209 - protein, 18 aa, Homo sapiens
  CDR3 for alpha chain variable domain of TCR clone 359605 (TRAV13-1, TRAJ52)
CAASKRSAGGTSYGKLTF

SEQ ID NO: 719210 - protein, 15 aa, Homo sapiens
  CDR3 for beta chain variable domain of TCR clone 359605 (TRBV7-8, TRBJ2-7)
CASSLERAGSYEQYF

SEQ ID NO: 719211 - protein, 16 aa, Homo sapiens
  CDR3 for alpha chain variable domain of TCR clone 359606 (TRAV8-3, TRAJ18)
CAVALDRGSTLGRLYF

SEQ ID NO: 719212 - protein, 11 aa, Homo sapiens
  CDR3 for beta chain variable domain of TCR clone 359606 (TRBV29-1, TRBJ1-1)
CSVEILTEAVF

SEQ ID NO: 719213 - protein, 11 aa, Homo sapiens
  CDR3 for alpha chain variable domain of TCR clone 359607 (TRAV2, TRAJ13)
CASGGYQKVTF

SEQ ID NO: 719214 - protein, 11 aa, Homo sapiens
  CDR3 for beta chain variable domain of TCR clone 359607 (TRBV6-3, TRBJ2-3)
YSVGQADTQYF

SEQ ID NO: 719215 - protein, 23 aa, Homo sapiens
  CDR3 for alpha chain variable domain of TCR clone 359608 (TRAV12-3, TRAJ6)
CAMSATTGGSYIPTFVRGTSLIF

SEQ ID NO: 719216 - protein, 16 aa, Homo sapiens
  CDR3 for beta chain variable domain of TCR clone 359608 (TRBV20-1, TRBJ1-2)
CSASMGQGVANYGYTF

SEQ ID NO: 719217 - protein, 13 aa, Homo sapiens
  CDR3 for alpha chain variable domain of TCR clone 359609 (TRAV3, TRAJ21)
CAVREPAFHKFYF

SEQ ID NO: 719218 - protein, 14 aa, Homo sapiens
  CDR3 for beta chain variable domain of TCR clone 359609 (TRBV4-2, TRBJ2-1)
CASGLDRAYNEQFF

SEQ ID NO: 719219 - protein, 15 aa, Homo sapiens
  CDR3 for alpha chain variable domain of TCR clone 359610 (TRAV21, TRAJ53)
CSTLNSGGSNYKLTF

SEQ ID NO: 719220 - protein, 15 aa, Homo sapiens
  CDR3 for beta chain variable domain of TCR clone 359610 (TRBV20-1, TRBJ2-7)
CSARDRVSGMDEQYF

SEQ ID NO: 719221 - protein, 13 aa, Homo sapiens
  CDR3 for alpha chain variable domain of TCR clone 359611 (TRAV13-2, TRAJ48)
CSEMDFGNEKLTF

SEQ ID NO: 719222 - protein, 14 aa, Homo sapiens
  CDR3 for beta chain variable domain of TCR clone 359611 (TRBV20-1, TRBJ2-7)
CSAKRGRSSYEQYF

SEQ ID NO: 719223 - protein, 11 aa, Homo sapiens
  CDR3 for alpha chain variable domain of TCR clone 359612 (TRAV12-3, TRAJ17)
CNDAYRQQATF

SEQ ID NO: 719224 - protein, 15 aa, Homo sapiens
  CDR3 for beta chain variable domain of TCR clone 359612 (TRBV20-1, TRBJ2-7)
CSVRDRVSGMDEQYF

SEQ ID NO: 719225 - protein, 16 aa, Homo sapiens
  CDR3 for alpha chain variable domain of TCR clone 359613 (TRAV26-1, TRAJ46)
CIVRVGKEKQRRQADF

SEQ ID NO: 719226 - protein, 16 aa, Homo sapiens
  CDR3 for beta chain variable domain of TCR clone 359613 (TRBV27, TRBJ2-2)
CASSFRGLVRTGELFF

SEQ ID NO: 719227 - protein, 11 aa, Homo sapiens
  CDR3 for alpha chain variable domain of TCR clone 359614 (TRAV21, TRAJ11)
CAVNGYSTLTF

SEQ ID NO: 719228 - protein, 15 aa, Homo sapiens
  CDR3 for beta chain variable domain of TCR clone 359614 (TRBV12-4, TRBJ1-6)
CASSLGGQGTSPLHF

SEQ ID NO: 719229 - protein, 15 aa, Homo sapiens
  CDR3 for alpha chain variable domain of TCR clone 359615 (TRAV26-1, TRAJ56)
CIVRVDDGANSKLTF

SEQ ID NO: 719230 - protein, 13 aa, Homo sapiens
  CDR3 for beta chain variable domain of TCR clone 359615 (TRBV7-3, TRBJ1-1)
CASSQDWGAEAFF

SEQ ID NO: 719231 - protein, 13 aa, Homo sapiens
  CDR3 for alpha chain variable domain of TCR clone 359616 (TRAV12-1, TRAJ12)
CVVNIESSYKLIF

SEQ ID NO: 719232 - protein, 18 aa, Homo sapiens
  CDR3 for beta chain variable domain of TCR clone 359616 (TRBV5-1, TRBJ2-2)
CSSSLVALGGRDTGELFF

SEQ ID NO: 719233 - protein, 16 aa, Homo sapiens
  CDR3 for alpha chain variable domain of TCR clone 359617 (TRAV21, TRAJ17)
CAVRPGEEAAGNKLTF

SEQ ID NO: 719234 - protein, 16 aa, Homo sapiens
  CDR3 for beta chain variable domain of TCR clone 359617 (TRBV2, TRBJ2-7)
CASREPWTGPSYEQYF

SEQ ID NO: 719235 - protein, 13 aa, Homo sapiens
  CDR3 for alpha chain variable domain of TCR clone 359618 (TRAV30, TRAJ32)
CGIFGDATNKLIF

SEQ ID NO: 719236 - protein, 13 aa, Homo sapiens
  CDR3 for beta chain variable domain of TCR clone 359618 (TRBV7-2, TRBJ1-1)
CASSVQGYTEAFF

SEQ ID NO: 719237 - protein, 18 aa, Homo sapiens
  CDR3 for alpha chain variable domain of TCR clone 359619 (TRAV21, TRAJ52)
CAVRPSPAGGISYGKLTF

SEQ ID NO: 719238 - protein, 18 aa, Homo sapiens
  CDR3 for beta chain variable domain of TCR clone 359619 (TRBV6-5, TRBJ1-1)
CASSYSAPGGTGGTEAFF

SEQ ID NO: 719239 - protein, 18 aa, Homo sapiens
  CDR3 for alpha chain variable domain of TCR clone 359620 (TRAV17, TRAJ45)
CGTSLDLYSGGGADGLTF

SEQ ID NO: 719240 - protein, 15 aa, Homo sapiens
  CDR3 for beta chain variable domain of TCR clone 359620 (TRBV11-2, TRBJ2-1)
CASSKNRGLIYEQFF

SEQ ID NO: 719241 - protein, 13 aa, Homo sapiens
  CDR3 for alpha chain variable domain of TCR clone 359621 (TRAV27, TRAJ6)
CAGGPRGSYIPTF

SEQ ID NO: 719242 - protein, 14 aa, Homo sapiens
  CDR3 for beta chain variable domain of TCR clone 359621 (TRBV6-3, TRBJ1-1)
CASSYQRRDTEAFF

SEQ ID NO: 719243 - protein, 16 aa, Homo sapiens
  CDR3 for alpha chain variable domain of TCR clone 359622 (TRAV29/DV5, TRAJ36)
CAASAHYQSGAHNLFF

SEQ ID NO: 719244 - protein, 16 aa, Homo sapiens
  CDR3 for beta chain variable domain of TCR clone 359622 (TRBV4-2, TRBJ2-3)
CASSQELAGDTDTQYF

SEQ ID NO: 719245 - protein, 14 aa, Homo sapiens
  CDR3 for alpha chain variable domain of TCR clone 359623 (TRAV17, TRAJ12)
CATDEQDSSYKLIF

SEQ ID NO: 719246 - protein, 16 aa, Homo sapiens
  CDR3 for beta chain variable domain of TCR clone 359623 (TRBV11-2, TRBJ2-1)
CASSPRLAGVYNEQFF

SEQ ID NO: 719247 - protein, 11 aa, Homo sapiens
  CDR3 for alpha chain variable domain of TCR clone 359624 (TRAV12-3, TRAJ49)
CAANTGNQFYF

SEQ ID NO: 719248 - protein, 16 aa, Homo sapiens
  CDR3 for beta chain variable domain of TCR clone 359624 (TRBV7-9, TRBJ2-3)
CASSPWREVGPDTQYF

SEQ ID NO: 719249 - protein, 16 aa, Homo sapiens
  CDR3 for alpha chain variable domain of TCR clone 359625 (TRAV13-1, TRAJ48)
CAASIFGNLGNEKLTF

SEQ ID NO: 719250 - protein, 14 aa, Homo sapiens
  CDR3 for beta chain variable domain of TCR clone 359625 (TRBV24-1, TRBJ1-1)
WATSIPRGDTEAFF

SEQ ID NO: 719251 - protein, 15 aa, Homo sapiens
  CDR3 for alpha chain variable domain of TCR clone 359626 (TRAV26-1, TRAJ22)
CIVIVSFLFCKATDL

SEQ ID NO: 719252 - protein, 13 aa, Homo sapiens
  CDR3 for beta chain variable domain of TCR clone 359626 (TRBV7-9, TRBJ1-2)
CASSLKQNYGYTF

SEQ ID NO: 719253 - protein, 11 aa, Homo sapiens
  CDR3 for alpha chain variable domain of TCR clone 359627 (TRAV16, TRAJ31)
CALFNNARLML

SEQ ID NO: 719254 - protein, 14 aa, Homo sapiens
  CDR3 for beta chain variable domain of TCR clone 359627 (TRBV15, TRBJ1-1)
CATSREWGNTEAFF

SEQ ID NO: 719255 - protein, 15 aa, Homo sapiens
  CDR3 for alpha chain variable domain of TCR clone 359628 (TRAV26-1, TRAJ22)
CIVRVSFWFCKATDL

SEQ ID NO: 719256 - protein, 13 aa, Homo sapiens
  CDR3 for beta chain variable domain of TCR clone 359628 (TRBV2, TRBJ2-7)
CASSVVEAYEQYF

SEQ ID NO: 719257 - protein, 12 aa, Homo sapiens
  CDR3 for alpha chain variable domain of TCR clone 359629 (TRAV21, TRAJ29)
CAVTSGNTPLVF

SEQ ID NO: 719258 - protein, 13 aa, Homo sapiens
  CDR3 for beta chain variable domain of TCR clone 359629 (TRBV10-3, TRBJ2-7)
CASKLAVNYERYF

SEQ ID NO: 719259 - protein, 14 aa, Homo sapiens
  CDR3 for alpha chain variable domain of TCR clone 359630 (TRAV1-2, TRAJ16)
CAVNRFSDGHKLLF

SEQ ID NO: 719260 - protein, 16 aa, Homo sapiens
  CDR3 for beta chain variable domain of TCR clone 359630 (TRBV13, TRBJ2-2)
CASSPRTGEHTGELFF

SEQ ID NO: 719261 - protein, 14 aa, Homo sapiens
  CDR3 for alpha chain variable domain of TCR clone 359631 (TRAV26-2, TRAJ32)
CILFRGGATNKLIF

SEQ ID NO: 719262 - protein, 14 aa, Homo sapiens
  CDR3 for beta chain variable domain of TCR clone 359631 (TRBV11-3, TRBJ2-1)
CASSATTSGSIQFF

SEQ ID NO: 719263 - protein, 14 aa, Homo sapiens
  CDR3 for alpha chain variable domain of TCR clone 359632 (TRAV12-2, TRAJ53)
CRERGGGSNDKLTF

SEQ ID NO: 719264 - protein, 17 aa, Homo sapiens
  CDR3 for beta chain variable domain of TCR clone 359632 (TRBV7-3, TRBJ2-3)
CASSLMKRMRGADTQYF

SEQ ID NO: 719265 - protein, 14 aa, Homo sapiens
  CDR3 for alpha chain variable domain of TCR clone 359633 (TRAV26-1, TRAJ21)
CIVRPPYNFNKFYF

SEQ ID NO: 719266 - protein, 11 aa, Homo sapiens
  CDR3 for beta chain variable domain of TCR clone 359633 (TRBV10-3, TRBJ2-7)
CAIREGLEQYF

SEQ ID NO: 719267 - protein, 14 aa, Homo sapiens
  CDR3 for alpha chain variable domain of TCR clone 359634 (TRAV8-3, TRAJ4)
CAVGAAGGYNKLIF

SEQ ID NO: 719268 - protein, 15 aa, Homo sapiens
  CDR3 for beta chain variable domain of TCR clone 359634 (TRBV7-2, TRBJ2-1)
CASSLASGRVNEQFF

SEQ ID NO: 719269 - protein, 15 aa, Homo sapiens
  CDR3 for alpha chain variable domain of TCR clone 359635 (TRAV12-1, TRAJ44)
CVVFVNTGTASKLTF

SEQ ID NO: 719270 - protein, 15 aa, Homo sapiens
  CDR3 for beta chain variable domain of TCR clone 359635 (TRBV7-9, TRBJ1-6)
CASSSPGRGNSPLHF

SEQ ID NO: 719271 - protein, 14 aa, Homo sapiens
  CDR3 for alpha chain variable domain of TCR clone 359636 (TRAV17, TRAJ40)
GATALTSGTYKYIF

SEQ ID NO: 719272 - protein, 13 aa, Homo sapiens
  CDR3 for beta chain variable domain of TCR clone 359636 (TRBV27, TRBJ2-1)
CASSSGSYNEQFF

SEQ ID NO: 719273 - protein, 12 aa, Homo sapiens
  CDR3 for alpha chain variable domain of TCR clone 359637 (TRAV12-3, TRAJ17)
CVMTPTGNKLTF

SEQ ID NO: 719274 - protein, 15 aa, Homo sapiens
  CDR3 for beta chain variable domain of TCR clone 359637 (TRBV20-1, TRBJ2-7)
CSARDRVSGMDEQYF

SEQ ID NO: 719275 - protein, 17 aa, Homo sapiens
  CDR3 for alpha chain variable domain of TCR clone 359638 (TRAV3, TRAJ6)
CAVRDGPRAGGSYQPTF

SEQ ID NO: 719276 - protein, 14 aa, Homo sapiens
  CDR3 for beta chain variable domain of TCR clone 359638 (TRBV7-2, TRBJ2-7)
CASSPKTSFYEQYF

SEQ ID NO: 719277 - protein, 13 aa, Homo sapiens
  CDR3 for alpha chain variable domain of TCR clone 359639 (TRAV12-2, TRAJ20)
CAVYPSNDYKLSF

SEQ ID NO: 719278 - protein, 13 aa, Homo sapiens
  CDR3 for beta chain variable domain of TCR clone 359639 (TRBV28, TRBJ2-5)
CASSFAGGETQYF

SEQ ID NO: 719279 - protein, 12 aa, Homo sapiens
  CDR3 for alpha chain variable domain of TCR clone 359640 (TRAV12-1, TRAJ15)
CVVNQAGTALTF

SEQ ID NO: 719280 - protein, 14 aa, Homo sapiens
  CDR3 for beta chain variable domain of TCR clone 359640 (TRBV11-3, TRBJ2-1)
CASSLAVSYNEQFF

SEQ ID NO: 719281 - protein, 15 aa, Homo sapiens
  CDR3 for alpha chain variable domain of TCR clone 359641 (TRAV3, TRAJ3)
CAVRDMSSSASRIIF

SEQ ID NO: 719282 - protein, 14 aa, Homo sapiens
  CDR3 for beta chain variable domain of TCR clone 359641 (TRBV19, TRBJ2-1)
CASPTFVLSGEQFF

SEQ ID NO: 719283 - protein, 15 aa, Homo sapiens
  CDR3 for alpha chain variable domain of TCR clone 359642 (TRAV12-1, TRAJ9)
WVVSFGDTGGFKTIF

SEQ ID NO: 719284 - protein, 19 aa, Homo sapiens
  CDR3 for beta chain variable domain of TCR clone 359642 (TRBV25-1, TRBJ2-2)
CAILVYRVDRGRKTGELFF

SEQ ID NO: 719285 - protein, 14 aa, Homo sapiens
  CDR3 for alpha chain variable domain of TCR clone 359643 (TRAV6, TRAJ6)
CALPTSGGSYIPTF

SEQ ID NO: 719286 - protein, 17 aa, Homo sapiens
  CDR3 for beta chain variable domain of TCR clone 359643 (TRBV5-1, TRBJ2-5)
CASSTVAPGQNQETQYF

SEQ ID NO: 719287 - protein, 12 aa, Homo sapiens
  CDR3 for alpha chain variable domain of TCR clone 359644 (TRAV23/DV6, TRAJ8)
CAANTGFQKLVF

SEQ ID NO: 719288 - protein, 15 aa, Homo sapiens
  CDR3 for beta chain variable domain of TCR clone 359644 (TRBV5-1, TRBJ2-3)
CASSVTSGSTDTQYF

SEQ ID NO: 719289 - protein, 16 aa, Homo sapiens
  CDR3 for alpha chain variable domain of TCR clone 359645 (TRAV12-3, TRAJ53)
CAMSPGSGGSNYKLPL

SEQ ID NO: 719290 - protein, 11 aa, Homo sapiens
  CDR3 for beta chain variable domain of TCR clone 359645 (TRBV29-1, TRBJ2-5)
CSEDRTGTQYF

SEQ ID NO: 719291 - protein, 14 aa, Homo sapiens
  CDR3 for alpha chain variable domain of TCR clone 359646 (TRAV38-1, TRAJ40)
CALRPTSGTYKYIF

SEQ ID NO: 719292 - protein, 15 aa, Homo sapiens
  CDR3 for beta chain variable domain of TCR clone 359646 (TRBV7-2, TRBJ2-1)
CASTHGTGIYNEQFF

SEQ ID NO: 719293 - protein, 11 aa, Homo sapiens
  CDR3 for alpha chain variable domain of TCR clone 359647 (TRAV21, TRAJ34)
CAHYNTDKLIF

SEQ ID NO: 719294 - protein, 17 aa, Homo sapiens
  CDR3 for beta chain variable domain of TCR clone 359647 (TRBV2, TRBJ1-6)
CASSLRSGGLMTSPLHF

SEQ ID NO: 719295 - protein, 14 aa, Homo sapiens
  CDR3 for alpha chain variable domain of TCR clone 359648 (TRAV1-2, TRAJ16)
CAVNRFSDGQKLLL

SEQ ID NO: 719296 - protein, 14 aa, Homo sapiens
  CDR3 for beta chain variable domain of TCR clone 359648 (TRBV15, TRBJ2-3)
CATRSGTSTDTQYF

SEQ ID NO: 719297 - protein, 10 aa, Homo sapiens
  CDR3 for alpha chain variable domain of TCR clone 359649 (TRAV35, TRAJ41)
DANSGYALNF

SEQ ID NO: 719298 - protein, 14 aa, Homo sapiens
  CDR3 for beta chain variable domain of TCR clone 359649 (TRBV9, TRBJ2-3)
CASSVGLSTDTHYF

SEQ ID NO: 719299 - protein, 14 aa, Homo sapiens
  CDR3 for alpha chain variable domain of TCR clone 359650 (TRAV13-1, TRAJ44)
CAAKANGTASKLTF

SEQ ID NO: 719300 - protein, 14 aa, Homo sapiens
  CDR3 for beta chain variable domain of TCR clone 359650 (TRBV25-1, TRBJ1-1)
CASTHLGGNTEAFF

SEQ ID NO: 719301 - protein, 15 aa, Homo sapiens
  CDR3 for alpha chain variable domain of TCR clone 359651 (TRAV3, TRAJ22)
CAVRDRVGSARQLTF

SEQ ID NO: 719302 - protein, 13 aa, Homo sapiens
  CDR3 for beta chain variable domain of TCR clone 359651 (TRBV20-1, TRBJ1-1)
CSARVGGNTEAFF

SEQ ID NO: 719303 - protein, 14 aa, Homo sapiens
  CDR3 for alpha chain variable domain of TCR clone 359652 (TRAV26-1, TRAJ39)
CIVFTNNAGNMLTF

SEQ ID NO: 719304 - protein, 15 aa, Homo sapiens
  CDR3 for beta chain variable domain of TCR clone 359652 (TRBV19, TRBJ2-4)
CASSVTGLTKNIQYF

SEQ ID NO: 719305 - protein, 13 aa, Homo sapiens
  CDR3 for alpha chain variable domain of TCR clone 359653 (TRAV2, TRAJ15)
CAAASQAGTALIF

SEQ ID NO: 719306 - protein, 16 aa, Homo sapiens
  CDR3 for beta chain variable domain of TCR clone 359653 (TRBV7-8, TRBJ2-4)
CASSAERTLAKNIQYF

SEQ ID NO: 719307 - protein, 14 aa, Homo sapiens
  CDR3 for alpha chain variable domain of TCR clone 359654 (TRAV17, TRAJ6)
CATAERRGSYIPTF

SEQ ID NO: 719308 - protein, 13 aa, Homo sapiens
  CDR3 for beta chain variable domain of TCR clone 359654 (TRBV27, TRBJ2-1)
CASSLGRIWGQFF

SEQ ID NO: 719309 - protein, 13 aa, Homo sapiens
  CDR3 for alpha chain variable domain of TCR clone 359655 (TRAV21, TRAJ3)
CCEPYSSAYKIIF

SEQ ID NO: 719310 - protein, 15 aa, Homo sapiens
  CDR3 for beta chain variable domain of TCR clone 359655 (TRBV7-3, TRBJ2-1)
CASSPTGGGEVEQFF

SEQ ID NO: 719311 - protein, 14 aa, Homo sapiens
  CDR3 for alpha chain variable domain of TCR clone 359656 (TRAV1-2, TRAJ13)
CAVKHSGGYQKVTF

SEQ ID NO: 719312 - protein, 12 aa, Homo sapiens
  CDR3 for beta chain variable domain of TCR clone 359656 (TRBV7-3, TRBJ2-5)
CASSSPGGNQYF

SEQ ID NO: 719313 - protein, 13 aa, Homo sapiens
  CDR3 for alpha chain variable domain of TCR clone 359657 (TRAV27, TRAJ41)
CAGEGNSGYALNF

SEQ ID NO: 719314 - protein, 16 aa, Homo sapiens
  CDR3 for beta chain variable domain of TCR clone 359657 (TRBV18, TRBJ2-7)
CASSPYRDGQTYEQYF

SEQ ID NO: 719315 - protein, 18 aa, Homo sapiens
  CDR3 for alpha chain variable domain of TCR clone 359658 (TRAV13-1, TRAJ10)
CVASKGRAVTGGGNKLTF

SEQ ID NO: 719316 - protein, 14 aa, Homo sapiens
  CDR3 for beta chain variable domain of TCR clone 359658 (TRBV18, TRBJ2-7)
CASSPRGGAYEQYF

SEQ ID NO: 719317 - protein, 13 aa, Homo sapiens
  CDR3 for alpha chain variable domain of TCR clone 359659 (TRAV21, TRAJ20)
CAVGLRVDYKLSF

SEQ ID NO: 719318 - protein, 11 aa, Homo sapiens
  CDR3 for beta chain variable domain of TCR clone 359659 (TRBV19, TRBJ2-5)
CASSIKETQYF

SEQ ID NO: 719319 - protein, 14 aa, Homo sapiens
  CDR3 for alpha chain variable domain of TCR clone 359660 (TRAV8-3, TRAJ35)
CAVVPQGFGNVLPC

SEQ ID NO: 719320 - protein, 15 aa, Homo sapiens
  CDR3 for beta chain variable domain of TCR clone 359660 (TRBV6-1, TRBJ2-2)
CASSAGQGYTGELFF

SEQ ID NO: 719321 - protein, 15 aa, Homo sapiens
  CDR3 for alpha chain variable domain of TCR clone 359661 (TRAV26-1, TRAJ48)
CIVRVGDFGNEKLTL

SEQ ID NO: 719322 - protein, 16 aa, Homo sapiens
  CDR3 for beta chain variable domain of TCR clone 359661 (TRBV4-1, TRBJ2-3)
CASSQRAGGLTDTQYF

SEQ ID NO: 719323 - protein, 14 aa, Homo sapiens
  CDR3 for alpha chain variable domain of TCR clone 359662 (TRAV27, TRAJ58)
CAGDGETSGSRLTF

SEQ ID NO: 719324 - protein, 13 aa, Homo sapiens
  CDR3 for beta chain variable domain of TCR clone 359662 (TRBV7-9, TRBJ1-2)
CASSLKQNYGYTF

SEQ ID NO: 719325 - protein, 15 aa, Homo sapiens
  CDR3 for alpha chain variable domain of TCR clone 359663 (TRAV3, TRAJ5)
CAVRDRKTGRRALTF

SEQ ID NO: 719326 - protein, 15 aa, Homo sapiens
  CDR3 for beta chain variable domain of TCR clone 359663 (TRBV7-8, TRBJ2-1)
CASSLAYSLYNEQFF

SEQ ID NO: 719327 - protein, 17 aa, Homo sapiens
  CDR3 for alpha chain variable domain of TCR clone 359664 (TRAV3, TRAJ6)
CAVRDGPRAGGSYIPTF

SEQ ID NO: 719328 - protein, 15 aa, Homo sapiens
  CDR3 for beta chain variable domain of TCR clone 359664 (TRBV24-1, TRBJ2-5)
CATSETTGAVGAQYF

SEQ ID NO: 719329 - protein, 12 aa, Homo sapiens
  CDR3 for alpha chain variable domain of TCR clone 359665 (TRAV13-2, TRAJ4)
CAENTGYNKLIF

SEQ ID NO: 719330 - protein, 16 aa, Homo sapiens
  CDR3 for beta chain variable domain of TCR clone 359665 (TRBV7-8, TRBJ2-7)
CASSLAPGDRGTEQYF

SEQ ID NO: 719331 - protein, 14 aa, Homo sapiens
  CDR3 for alpha chain variable domain of TCR clone 359666 (TRAV27, TRAJ17)
CRSTIRAAGNKLTF

SEQ ID NO: 719332 - protein, 13 aa, Homo sapiens
  CDR3 for beta chain variable domain of TCR clone 359666 (TRBV19, TRBJ2-7)
CASRKAGGSEQYF

SEQ ID NO: 719333 - protein, 12 aa, Homo sapiens
  CDR3 for alpha chain variable domain of TCR clone 359667 (TRAV17, TRAJ13)
CATDGGYQKVTF

SEQ ID NO: 719334 - protein, 14 aa, Homo sapiens
  CDR3 for beta chain variable domain of TCR clone 359667 (TRBV19, TRBJ2-3)
CASSAPRGTDTQYF

SEQ ID NO: 719335 - protein, 13 aa, Homo sapiens
  CDR3 for alpha chain variable domain of TCR clone 359668 (TRAV12-1, TRAJ11)
CVVTRGGYSTLTF

SEQ ID NO: 719336 - protein, 14 aa, Homo sapiens
  CDR3 for beta chain variable domain of TCR clone 359668 (TRBV12-5, TRBJ2-5)
CASGSRTHQGTQYF

SEQ ID NO: 719337 - protein, 16 aa, Homo sapiens
  CDR3 for alpha chain variable domain of TCR clone 359669 (TRAV3, TRAJ37)
CAVRGKGSGNTGKLIF

SEQ ID NO: 719338 - protein, 12 aa, Homo sapiens
  CDR3 for beta chain variable domain of TCR clone 359669 (TRBV7-8, TRBJ2-7)
CDSSLSDIGQYF

SEQ ID NO: 719339 - protein, 16 aa, Homo sapiens
  CDR3 for alpha chain variable domain of TCR clone 359670 (TRAV3, TRAJ18)
CAVGDGRGSTLGRLYF

SEQ ID NO: 719340 - protein, 17 aa, Homo sapiens
  CDR3 for beta chain variable domain of TCR clone 359670 (TRBV5-1, TRBJ2-3)
CASSKIGLADRTDTQYF

SEQ ID NO: 719341 - protein, 15 aa, Homo sapiens
  CDR3 for alpha chain variable domain of TCR clone 359671 (TRAV12-1, TRAJ6)
CVVNPGPRGSYIPTF

SEQ ID NO: 719342 - protein, 15 aa, Homo sapiens
  CDR3 for beta chain variable domain of TCR clone 359671 (TRBV19, TRBJ2-3)
CASSIPRTGEDTQYF

SEQ ID NO: 719343 - protein, 13 aa, Homo sapiens
  CDR3 for alpha chain variable domain of TCR clone 359672 (TRAV8-4, TRAJ48)
CAVSLFENEKLTF

SEQ ID NO: 719344 - protein, 15 aa, Homo sapiens
  CDR3 for beta chain variable domain of TCR clone 359672 (TRBV20-1, TRBJ2-7)
CSARKGLVESYEQYF

SEQ ID NO: 719345 - protein, 13 aa, Homo sapiens
  CDR3 for alpha chain variable domain of TCR clone 359673 (TRAV26-1, TRAJ52)
CIVGGTSYGKLTF

SEQ ID NO: 719346 - protein, 16 aa, Homo sapiens
  CDR3 for beta chain variable domain of TCR clone 359673 (TRBV28, TRBJ2-7)
CASSLFFETGGPEQYF

SEQ ID NO: 719347 - protein, 23 aa, Homo sapiens
  CDR3 for alpha chain variable domain of TCR clone 359674 (TRAV12-2, TRAJ43)
SLLIRDSQPSDSATYLFAFDMRF

SEQ ID NO: 719348 - protein, 13 aa, Homo sapiens
  CDR3 for beta chain variable domain of TCR clone 359674 (TRBV4-2, TRBJ1-1)
CASSQAGNTEAFF

SEQ ID NO: 719349 - protein, 13 aa, Homo sapiens
  CDR3 for alpha chain variable domain of TCR clone 359675 (TRAV27, TRAJ37)
CAGGPSNTGKLIF

SEQ ID NO: 719350 - protein, 11 aa, Homo sapiens
  CDR3 for beta chain variable domain of TCR clone 359675 (TRBV19, TRBJ2-5)
CASSIKETQYF

SEQ ID NO: 719351 - protein, 14 aa, Homo sapiens
  CDR3 for alpha chain variable domain of TCR clone 359676 (TRAV8-6, TRAJ13)
CAVFSSGVYQKVTF

SEQ ID NO: 719352 - protein, 14 aa, Homo sapiens
  CDR3 for beta chain variable domain of TCR clone 359676 (TRBV7-2, TRBJ1-5)
CASSLTGNNQPQHF

SEQ ID NO: 719353 - protein, 16 aa, Homo sapiens
  CDR3 for alpha chain variable domain of TCR clone 359677 (TRAV3, TRAJ13)
CAVRDENSGGYQKVTF

SEQ ID NO: 719354 - protein, 14 aa, Homo sapiens
  CDR3 for beta chain variable domain of TCR clone 359677 (TRBV7-2, TRBJ1-1)
CASSFLTGTTEAFF

SEQ ID NO: 719355 - protein, 14 aa, Homo sapiens
  CDR3 for alpha chain variable domain of TCR clone 359678 (TRAV27, TRAJ22)
CAGLPSGSARQLTF

SEQ ID NO: 719356 - protein, 14 aa, Homo sapiens
  CDR3 for beta chain variable domain of TCR clone 359678 (TRBV27, TRBJ2-5)
CASSSLKGWETQYF

SEQ ID NO: 719357 - protein, 18 aa, Homo sapiens
  CDR3 for alpha chain variable domain of TCR clone 359679 (TRAV13-1, TRAJ52)
CAAKNPNPGGTSYGKLTF

SEQ ID NO: 719358 - protein, 17 aa, Homo sapiens
  CDR3 for beta chain variable domain of TCR clone 359679 (TRBV11-2, TRBJ2-1)
CASSLYPPGVEYNEQFF

SEQ ID NO: 719359 - protein, 11 aa, Homo sapiens
  CDR3 for alpha chain variable domain of TCR clone 359680 (TRAV3, TRAJ49)
CAPITGNQFYF

SEQ ID NO: 719360 - protein, 16 aa, Homo sapiens
  CDR3 for beta chain variable domain of TCR clone 359680 (TRBV5-1, TRBJ2-3)
CASSVFPVSSTDTQYF

SEQ ID NO: 719361 - protein, 16 aa, Homo sapiens
  CDR3 for alpha chain variable domain of TCR clone 359681 (TRAV3, TRAJ13)
CAVRDPNPGGYQKVTF

SEQ ID NO: 719362 - protein, 13 aa, Homo sapiens
  CDR3 for beta chain variable domain of TCR clone 359681 (TRBV7-9, TRBJ2-7)
CASSLQGSYEQYF

SEQ ID NO: 719363 - protein, 14 aa, Homo sapiens
  CDR3 for alpha chain variable domain of TCR clone 359682 (TRAV3, TRAJ27)
CAVRDDTNAGKSTF

SEQ ID NO: 719364 - protein, 13 aa, Homo sapiens
  CDR3 for beta chain variable domain of TCR clone 359682 (TRBV10-3, TRBJ2-7)
CASKLAVNYEQYF

SEQ ID NO: 719365 - protein, 13 aa, Homo sapiens
  CDR3 for alpha chain variable domain of TCR clone 359683 (TRAV29/DV5, TRAJ44)
CAASTGTASKLTF

SEQ ID NO: 719366 - protein, 14 aa, Homo sapiens
  CDR3 for beta chain variable domain of TCR clone 359683 (TRBV27, TRBJ1-5)
CASSSQGSNQPQHF

SEQ ID NO: 719367 - protein, 14 aa, Homo sapiens
  CDR3 for alpha chain variable domain of TCR clone 359684 (TRAV23/DV6, TRAJ17)
CAARGRAAGNKLTF

SEQ ID NO: 719368 - protein, 12 aa, Homo sapiens
  CDR3 for beta chain variable domain of TCR clone 359684 (TRBV7-9, TRBJ2-3)
CASSFFTDTQYF

SEQ ID NO: 719369 - protein, 13 aa, Homo sapiens
  CDR3 for alpha chain variable domain of TCR clone 359685 (TRAV27, TRAJ11)
CAGGGSGYSTLTF

SEQ ID NO: 719370 - protein, 14 aa, Homo sapiens
  CDR3 for beta chain variable domain of TCR clone 359685 (TRBV7-6, TRBJ2-3)
CASSLGTVTDTQYF

SEQ ID NO: 719371 - protein, 13 aa, Homo sapiens
  CDR3 for alpha chain variable domain of TCR clone 359686 (TRAV20, TRAJ21)
CAVEGYNFNKFYF

SEQ ID NO: 719372 - protein, 14 aa, Homo sapiens
  CDR3 for beta chain variable domain of TCR clone 359686 (TRBV12-5, TRBJ2-5)
CASGSRTHQETQYF

SEQ ID NO: 719373 - protein, 15 aa, Homo sapiens
  CDR3 for alpha chain variable domain of TCR clone 359687 (TRAV17, TRAJ52)
CATEAGGTSYGKLTF

SEQ ID NO: 719374 - protein, 14 aa, Homo sapiens
  CDR3 for beta chain variable domain of TCR clone 359687 (TRBV28, TRBJ1-5)
CASSLGVLFKPQHF

SEQ ID NO: 719375 - protein, 14 aa, Homo sapiens
  CDR3 for alpha chain variable domain of TCR clone 359688 (TRAV36/DV7, TRAJ40)
CAVGTTSGTYKYIF

SEQ ID NO: 719376 - protein, 13 aa, Homo sapiens
  CDR3 for beta chain variable domain of TCR clone 359688 (TRBV10-3, TRBJ2-5)
CAMTSGAGETQYF

SEQ ID NO: 719377 - protein, 12 aa, Homo sapiens
  CDR3 for alpha chain variable domain of TCR clone 359689 (TRAV12-3, TRAJ17)
CARTLTGNKLTF

SEQ ID NO: 719378 - protein, 12 aa, Homo sapiens
  CDR3 for beta chain variable domain of TCR clone 359689 (TRBV7-8, TRBJ2-7)
CASSLGDREQYF

SEQ ID NO: 719379 - protein, 13 aa, Homo sapiens
  CDR3 for alpha chain variable domain of TCR clone 359690 (TRAV2, TRAJ40)
CAVVTSGTYKYIF

SEQ ID NO: 719380 - protein, 16 aa, Homo sapiens
  CDR3 for beta chain variable domain of TCR clone 359690 (TRBV19, TRBJ2-2)
CASRSPGTAATGELFF

SEQ ID NO: 719381 - protein, 14 aa, Homo sapiens
  CDR3 for alpha chain variable domain of TCR clone 359691 (TRAV8-6, TRAJ52)
CAVIGGTSYGKLTF

SEQ ID NO: 719382 - protein, 15 aa, Homo sapiens
  CDR3 for beta chain variable domain of TCR clone 359691 (TRBV7-3, TRBJ2-1)
CASSSRSSGRNEQFF

SEQ ID NO: 719383 - protein, 18 aa, Homo sapiens
  CDR3 for alpha chain variable domain of TCR clone 359692 (TRAV26-1, TRAJ5)
CIVRVVPPRDTGRRALTC

SEQ ID NO: 719384 - protein, 15 aa, Homo sapiens
  CDR3 for beta chain variable domain of TCR clone 359692 (TRBV7-9, TRBJ2-7)
CASSLPMGQANEQYF

SEQ ID NO: 719385 - protein, 16 aa, Homo sapiens
  CDR3 for alpha chain variable domain of TCR clone 359693 (TRAV16, TRAJ52)
CALSAAGGTSYGKLTF

SEQ ID NO: 719386 - protein, 15 aa, Homo sapiens
  CDR3 for beta chain variable domain of TCR clone 359693 (TRBV27, TRBJ2-1)
CASSNGGGSPNEQFF

SEQ ID NO: 719387 - protein, 13 aa, Homo sapiens
  CDR3 for alpha chain variable domain of TCR clone 359694 (TRAV13-1, TRAJ10)
CAALEGGGNKLTW

SEQ ID NO: 719388 - protein, 13 aa, Homo sapiens
  CDR3 for beta chain variable domain of TCR clone 359694 (TRBV7-9, TRBJ1-2)
CASSLKQNYGYTF

SEQ ID NO: 719389 - protein, 13 aa, Homo sapiens
  CDR3 for alpha chain variable domain of TCR clone 359695 (TRAV3, TRAJ21)
CAVREPDFSKFYF

SEQ ID NO: 719390 - protein, 15 aa, Homo sapiens
  CDR3 for beta chain variable domain of TCR clone 359695 (TRBV3-1, TRBJ2-7)
CASSQAPSGSYEQYF

SEQ ID NO: 719391 - protein, 14 aa, Homo sapiens
  CDR3 for alpha chain variable domain of TCR clone 359696 (TRAV12-2, TRAJ23)
CAVNTYNQGGKLIF

SEQ ID NO: 719392 - protein, 15 aa, Homo sapiens
  CDR3 for beta chain variable domain of TCR clone 359696 (TRBV5-1, TRBJ2-7)
CASSLNGGPAREQYF

SEQ ID NO: 719393 - protein, 13 aa, Homo sapiens
  CDR3 for alpha chain variable domain of TCR clone 359697 (TRAV12-1, TRAJ26)
CVVRRNYGQYFVF

SEQ ID NO: 719394 - protein, 14 aa, Homo sapiens
  CDR3 for beta chain variable domain of TCR clone 359697 (TRBV6-3, TRBJ1-1)
CASRYTGESTEAFF

SEQ ID NO: 719395 - protein, 17 aa, Homo sapiens
  CDR3 for alpha chain variable domain of TCR clone 359698 (TRAV3, TRAJ6)
CAVRDGRRAGGSFIPTF

SEQ ID NO: 719396 - protein, 14 aa, Homo sapiens
  CDR3 for beta chain variable domain of TCR clone 359698 (TRBV7-2, TRBJ2-7)
CASSPKTSFYEQYF

SEQ ID NO: 719397 - protein, 13 aa, Homo sapiens
  CDR3 for alpha chain variable domain of TCR clone 359699 (TRAV12-1, TRAJ26)
CVVRRNYGQNFGF

SEQ ID NO: 719398 - protein, 15 aa, Homo sapiens
  CDR3 for beta chain variable domain of TCR clone 359699 (TRBV28, TRBJ1-3)
CASSMGWASGNTIYF

SEQ ID NO: 719399 - protein, 14 aa, Homo sapiens
  CDR3 for alpha chain variable domain of TCR clone 359700 (TRAV29/DV5, TRAJ36)
CAARRKPGANNLFF

SEQ ID NO: 719400 - protein, 15 aa, Homo sapiens
  CDR3 for beta chain variable domain of TCR clone 359700 (TRBV19, TRBJ1-6)
CASSTQGAVGSPLHF

SEQ ID NO: 719401 - protein, 14 aa, Homo sapiens
  CDR3 for alpha chain variable domain of TCR clone 359701 (TRAV29/DV5, TRAJ45)
CAASFRGGADGLTF

SEQ ID NO: 719402 - protein, 16 aa, Homo sapiens
  CDR3 for beta chain variable domain of TCR clone 359701 (TRBV20-1, TRBJ2-7)
CSARGGLAGARYEQYF

SEQ ID NO: 719403 - protein, 12 aa, Homo sapiens
  CDR3 for alpha chain variable domain of TCR clone 359702 (TRAV3, TRAJ20)
CAVRDPDYKLSF

SEQ ID NO: 719404 - protein, 16 aa, Homo sapiens
  CDR3 for beta chain variable domain of TCR clone 359702 (TRBV2, TRBJ2-3)
CASSTSVEGVTGTQYF

SEQ ID NO: 719405 - protein, 14 aa, Homo sapiens
  CDR3 for alpha chain variable domain of TCR clone 359703 (TRAV12-3, TRAJ10)
SHLPLTGGGNKLTF

SEQ ID NO: 719406 - protein, 13 aa, Homo sapiens
  CDR3 for beta chain variable domain of TCR clone 359703 (TRBV4-1, TRBJ2-2)
CASSQESTGELFF

SEQ ID NO: 719407 - protein, 17 aa, Homo sapiens
  CDR3 for alpha chain variable domain of TCR clone 359704 (TRAV8-6, TRAJ58)
CAVSSWVGETSGSRLTF

SEQ ID NO: 719408 - protein, 14 aa, Homo sapiens
  CDR3 for beta chain variable domain of TCR clone 359704 (TRBV2, TRBJ2-7)
CASRPTGGHYEQYF

SEQ ID NO: 719409 - protein, 14 aa, Homo sapiens
  CDR3 for alpha chain variable domain of TCR clone 359705 (TRAV4, TRAJ17)
CLVGPRAAGNKLTF

SEQ ID NO: 719410 - protein, 17 aa, Homo sapiens
  CDR3 for beta chain variable domain of TCR clone 359705 (TRBV7-8, TRBJ2-6)
CASSAGTGGAGANVLTF

SEQ ID NO: 719411 - protein, 15 aa, Homo sapiens
  CDR3 for alpha chain variable domain of TCR clone 359706 (TRAV27, TRAJ38)
CAARRNAGNNRKLIW

SEQ ID NO: 719412 - protein, 14 aa, Homo sapiens
  CDR3 for beta chain variable domain of TCR clone 359706 (TRBV19, TRBJ2-1)
CASKDPSSYNEQFF

SEQ ID NO: 719413 - protein, 12 aa, Homo sapiens
  CDR3 for alpha chain variable domain of TCR clone 359707 (TRAV12-3, TRAJ17)
CAMTLTGNKLTF

SEQ ID NO: 719414 - protein, 15 aa, Homo sapiens
  CDR3 for beta chain variable domain of TCR clone 359707 (TRBV12-4, TRBJ2-5)
CASSPPTGFQETQYF

SEQ ID NO: 719415 - protein, 14 aa, Homo sapiens
  CDR3 for alpha chain variable domain of TCR clone 359708 (TRAV1-2, TRAJ16)
CAVNRFSDGQKLLF

SEQ ID NO: 719416 - protein, 10 aa, Homo sapiens
  CDR3 for beta chain variable domain of TCR clone 359708 (TRBV9, TRBJ1-6)
CASSVAGRGF

SEQ ID NO: 719417 - protein, 13 aa, Homo sapiens
  CDR3 for alpha chain variable domain of TCR clone 359709 (TRAV12-2, TRAJ4)
CAGFSGGYNELLF

SEQ ID NO: 719418 - protein, 15 aa, Homo sapiens
  CDR3 for beta chain variable domain of TCR clone 359709 (TRBV6-3, TRBJ2-7)
CASSSPGTVFYEQYF

SEQ ID NO: 719419 - protein, 13 aa, Homo sapiens
  CDR3 for alpha chain variable domain of TCR clone 359710 (TRAV29/DV5, TRAJ31)
CAASRNNNARLMF

SEQ ID NO: 719420 - protein, 12 aa, Homo sapiens
  CDR3 for beta chain variable domain of TCR clone 359710 (TRBV14, TRBJ1-1)
RASSQLKGLAFF

SEQ ID NO: 719421 - protein, 12 aa, Homo sapiens
  CDR3 for alpha chain variable domain of TCR clone 359711 (TRAV13-1, TRAJ20)
CAASTGDYKLSF

SEQ ID NO: 719422 - protein, 15 aa, Homo sapiens
  CDR3 for beta chain variable domain of TCR clone 359711 (TRBV11-3, TRBJ2-3)
CASNGGLDGTDTQYF

SEQ ID NO: 719423 - protein, 14 aa, Homo sapiens
  CDR3 for alpha chain variable domain of TCR clone 359712 (TRAV8-3, TRAJ9)
CAVVYNTGGFKTIF

SEQ ID NO: 719424 - protein, 13 aa, Homo sapiens
  CDR3 for beta chain variable domain of TCR clone 359712 (TRBV2, TRBJ2-1)
CATSRGTDNEQFF

SEQ ID NO: 719425 - protein, 15 aa, Homo sapiens
  CDR3 for alpha chain variable domain of TCR clone 359713 (TRAV27, TRAJ38)
CSARRNAGNNRKLIW

SEQ ID NO: 719426 - protein, 17 aa, Homo sapiens
  CDR3 for beta chain variable domain of TCR clone 359713 (TRBV13, TRBJ2-3)
CASSLSRVAGGRNTQYF

SEQ ID NO: 719427 - protein, 14 aa, Homo sapiens
  CDR3 for alpha chain variable domain of TCR clone 359714 (TRAV14/DV4, TRAJ20)
CAMRESLNDYKLSF

SEQ ID NO: 719428 - protein, 13 aa, Homo sapiens
  CDR3 for beta chain variable domain of TCR clone 359714 (TRBV12-4, TRBJ1-2)
CASSVRQGKGYTF

SEQ ID NO: 719429 - protein, 12 aa, Homo sapiens
  CDR3 for alpha chain variable domain of TCR clone 359715 (TRAV8-4, TRAJ31)
CAVSDSNARLMF

SEQ ID NO: 719430 - protein, 15 aa, Homo sapiens
  CDR3 for beta chain variable domain of TCR clone 359715 (TRBV19, TRBJ1-1)
CASTSGQIQNTEAFF

SEQ ID NO: 719431 - protein, 16 aa, Homo sapiens
  CDR3 for alpha chain variable domain of TCR clone 359716 (TRAV3, TRAJ4)
CAVRPSPSGGYDKLIF

SEQ ID NO: 719432 - protein, 12 aa, Homo sapiens
  CDR3 for beta chain variable domain of TCR clone 359716 (TRBV7-9, TRBJ2-7)
CASSQGVYEQYF

SEQ ID NO: 719433 - protein, 11 aa, Homo sapiens
  CDR3 for alpha chain variable domain of TCR clone 359717 (TRAV2, TRAJ13)
CASGGYQKVTF

SEQ ID NO: 719434 - protein, 15 aa, Homo sapiens
  CDR3 for beta chain variable domain of TCR clone 359717 (TRBV11-2, TRBJ2-1)
CASSLTSGGYNEQFF

SEQ ID NO: 719435 - protein, 16 aa, Homo sapiens
  CDR3 for alpha chain variable domain of TCR clone 359718 (TRAV13-1, TRAJ45)
CAARGSRKGGADGLTF

SEQ ID NO: 719436 - protein, 13 aa, Homo sapiens
  CDR3 for beta chain variable domain of TCR clone 359718 (TRBV10-3, TRBJ2-7)
CASKLAVNYEQYF

SEQ ID NO: 719437 - protein, 23 aa, Homo sapiens
  CDR3 for alpha chain variable domain of TCR clone 359719 (TRAV17, TRAJ36)
CAQLGQTTSSLGLERESPLFPIS

SEQ ID NO: 719438 - protein, 12 aa, Homo sapiens
  CDR3 for beta chain variable domain of TCR clone 359719 (TRBV29-1, TRBJ2-3)
CSVTGGADTQYF

SEQ ID NO: 719439 - protein, 13 aa, Homo sapiens
  CDR3 for alpha chain variable domain of TCR clone 359720 (TRAV27, TRAJ45)
CRSSGGGADGLTF

SEQ ID NO: 719440 - protein, 17 aa, Homo sapiens
  CDR3 for beta chain variable domain of TCR clone 359720 (TRBV11-2, TRBJ2-1)
CTSRLYPPGVEYNEQFF

SEQ ID NO: 719441 - protein, 14 aa, Homo sapiens
  CDR3 for alpha chain variable domain of TCR clone 359721 (TRAV1-2, TRAJ8)
CAVREDTGFQKLVF

SEQ ID NO: 719442 - protein, 16 aa, Homo sapiens
  CDR3 for beta chain variable domain of TCR clone 359721 (TRBV4-3, TRBJ2-2)
CASSHLQGSGTRELFF

SEQ ID NO: 719443 - protein, 13 aa, Homo sapiens
  CDR3 for alpha chain variable domain of TCR clone 359722 (TRAV12-1, TRAJ11)
CVVNRAGYSTLTF

SEQ ID NO: 719444 - protein, 14 aa, Homo sapiens
  CDR3 for beta chain variable domain of TCR clone 359722 (TRBV19, TRBJ2-2)
CASTVTANTGELFF

SEQ ID NO: 719445 - protein, 17 aa, Homo sapiens
  CDR3 for alpha chain variable domain of TCR clone 359723 (TRAV3, TRAJ6)
CAVRDVPRTGGSYIPTF

SEQ ID NO: 719446 - protein, 20 aa, Homo sapiens
  CDR3 for beta chain variable domain of TCR clone 359723 (TRBV28, TRBJ2-1)
CASTPIGRSPGLAGGNEQFF

SEQ ID NO: 719447 - protein, 12 aa, Homo sapiens
  CDR3 for alpha chain variable domain of TCR clone 359724 (TRAV12-1, TRAJ32)
YELWWCYKQAHL

SEQ ID NO: 719448 - protein, 18 aa, Homo sapiens
  CDR3 for beta chain variable domain of TCR clone 359724 (TRBV20-1, TRBJ2-3)
CSASGLAGGPGTTDTQYF

SEQ ID NO: 719449 - protein, 17 aa, Homo sapiens
  CDR3 for alpha chain variable domain of TCR clone 359725 (TRAV2, TRAJ36)
CAVEDRGNWGKQPLLWD

SEQ ID NO: 719450 - protein, 17 aa, Homo sapiens
  CDR3 for beta chain variable domain of TCR clone 359725 (TRBV7-9, TRBJ2-3)
CASSLSRVAGGRNTQYF

SEQ ID NO: 719451 - protein, 13 aa, Homo sapiens
  CDR3 for alpha chain variable domain of TCR clone 359726 (TRAV8-4, TRAJ54)
CAVRIQGAQKLVF

SEQ ID NO: 719452 - protein, 15 aa, Homo sapiens
  CDR3 for beta chain variable domain of TCR clone 359726 (TRBV27, TRBJ2-1)
CASSNGGGSSYEQFF

SEQ ID NO: 719453 - protein, 13 aa, Homo sapiens
  CDR3 for alpha chain variable domain of TCR clone 359727 (TRAV21, TRAJ37)
CAVSSGNTGKLIF

SEQ ID NO: 719454 - protein, 14 aa, Homo sapiens
  CDR3 for beta chain variable domain of TCR clone 359727 (TRBV7-9, TRBJ1-2)
CASSLVQINYGYTF

SEQ ID NO: 719455 - protein, 11 aa, Homo sapiens
  CDR3 for alpha chain variable domain of TCR clone 359728 (TRAV2, TRAJ13)
CASGGYQKVTF

SEQ ID NO: 719456 - protein, 15 aa, Homo sapiens
  CDR3 for beta chain variable domain of TCR clone 359728 (TRBV7-9, TRBJ2-7)
CISVSEAPPMNEQYF

SEQ ID NO: 719457 - protein, 14 aa, Homo sapiens
  CDR3 for alpha chain variable domain of TCR clone 359729 (TRAV26-1, TRAJ39)
CIVRGSRAGNMLPF

SEQ ID NO: 719458 - protein, 15 aa, Homo sapiens
  CDR3 for beta chain variable domain of TCR clone 359729 (TRBV7-9, TRBJ1-5)
CASSQGRQPNQPQHF

SEQ ID NO: 719459 - protein, 13 aa, Homo sapiens
  CDR3 for alpha chain variable domain of TCR clone 359730 (TRAV12-1, TRAJ40)
CVVNSSGTYKYIF

SEQ ID NO: 719460 - protein, 14 aa, Homo sapiens
  CDR3 for beta chain variable domain of TCR clone 359730 (TRBV25-1, TRBJ1-1)
CASTHLGGNTEAFF

SEQ ID NO: 719461 - protein, 14 aa, Homo sapiens
  CDR3 for alpha chain variable domain of TCR clone 359731 (TRAV23/DV6, TRAJ12)
CAASRMDSSYKLIF

SEQ ID NO: 719462 - protein, 16 aa, Homo sapiens
  CDR3 for beta chain variable domain of TCR clone 359731 (TRBV7-7, TRBJ2-1)
CASSLASGTSYNEQFF

SEQ ID NO: 719463 - protein, 15 aa, Homo sapiens
  CDR3 for alpha chain variable domain of TCR clone 359732 (TRAV8-2, TRAJ40)
CGVLGTTSGTYKYIF

SEQ ID NO: 719464 - protein, 16 aa, Homo sapiens
  CDR3 for beta chain variable domain of TCR clone 359732 (TRBV7-3, TRBJ2-1)
CASSLEAYRSYNEQFF

SEQ ID NO: 719465 - protein, 13 aa, Homo sapiens
  CDR3 for alpha chain variable domain of TCR clone 359733 (TRAV1-2, TRAJ9)
CAVRNTGGFKTIF

SEQ ID NO: 719466 - protein, 14 aa, Homo sapiens
  CDR3 for beta chain variable domain of TCR clone 359733 (TRBV20-1, TRBJ2-3)
CSARGGTSTDTQYF

SEQ ID NO: 719467 - protein, 15 aa, Homo sapiens
  CDR3 for alpha chain variable domain of TCR clone 359734 (TRAV27, TRAJ38)
CAGRFDAGNNRKLIG

SEQ ID NO: 719468 - protein, 13 aa, Homo sapiens
  CDR3 for beta chain variable domain of TCR clone 359734 (TRBV20-1, TRBJ2-1)
TSGALPPGNEQFF

SEQ ID NO: 719469 - protein, 16 aa, Homo sapiens
  CDR3 for alpha chain variable domain of TCR clone 359735 (TRAV26-1, TRAJ32)
CIVRTNYGGATNKLIF

SEQ ID NO: 719470 - protein, 14 aa, Homo sapiens
  CDR3 for beta chain variable domain of TCR clone 359735 (TRBV25-1, TRBJ1-1)
CASSLLSGLSEAFF

SEQ ID NO: 719471 - protein, 14 aa, Homo sapiens
  CDR3 for alpha chain variable domain of TCR clone 359736 (TRAV12-3, TRAJ10)
SPLPLTGGGNKLTF

SEQ ID NO: 719472 - protein, 16 aa, Homo sapiens
  CDR3 for beta chain variable domain of TCR clone 359736 (TRBV20-1, TRBJ1-5)
CSASRGTGYSNQPQHF

SEQ ID NO: 719473 - protein, 14 aa, Homo sapiens
  CDR3 for alpha chain variable domain of TCR clone 359737 (TRAV13-1, TRAJ44)
CAAKATGTASKLTF

SEQ ID NO: 719474 - protein, 16 aa, Homo sapiens
  CDR3 for beta chain variable domain of TCR clone 359737 (TRBV15, TRBJ1-2)
CATSRGPRTGGGGYSF

SEQ ID NO: 719475 - protein, 12 aa, Homo sapiens
  CDR3 for alpha chain variable domain of TCR clone 359738 (TRAV12-3, TRAJ34)
CAMGYNTDKLIF

SEQ ID NO: 719476 - protein, 14 aa, Homo sapiens
  CDR3 for beta chain variable domain of TCR clone 359738 (TRBV5-7, TRBJ1-5)
YASSRTGGGQPQHF

SEQ ID NO: 719477 - protein, 16 aa, Homo sapiens
  CDR3 for alpha chain variable domain of TCR clone 359739 (TRAV13-1, TRAJ45)
CAASWESGGGADGLTS

SEQ ID NO: 719478 - protein, 14 aa, Homo sapiens
  CDR3 for beta chain variable domain of TCR clone 359739 (TRBV12-4, TRBJ1-3)
CASGQTVSGNTIYF

SEQ ID NO: 719479 - protein, 16 aa, Homo sapiens
  CDR3 for alpha chain variable domain of TCR clone 359740 (TRAV3, TRAJ37)
CAVRGKGSGNTGKLIF

SEQ ID NO: 719480 - protein, 13 aa, Homo sapiens
  CDR3 for beta chain variable domain of TCR clone 359740 (TRBV7-3, TRBJ1-1)
CDSSQDWGAEAFF

SEQ ID NO: 719481 - protein, 12 aa, Homo sapiens
  CDR3 for alpha chain variable domain of TCR clone 359741 (TRAV12-3, TRAJ17)
CAITLTGNKLTF

SEQ ID NO: 719482 - protein, 13 aa, Homo sapiens
  CDR3 for beta chain variable domain of TCR clone 359741 (TRBV7-3, TRBJ1-1)
CASSQDWGAEAFF

SEQ ID NO: 719483 - protein, 14 aa, Homo sapiens
  CDR3 for alpha chain variable domain of TCR clone 359742 (TRAV12-2, TRAJ17)
CAALFKAAGNKLTF

SEQ ID NO: 719484 - protein, 20 aa, Homo sapiens
  CDR3 for beta chain variable domain of TCR clone 359742 (TRBV19, TRBJ2-1)
CASSISRTVTSTRLNNEQFF

SEQ ID NO: 719485 - protein, 15 aa, Homo sapiens
  CDR3 for alpha chain variable domain of TCR clone 359743 (TRAV23/DV6, TRAJ37)
CAAGEGSSNTGKLIF

SEQ ID NO: 719486 - protein, 14 aa, Homo sapiens
  CDR3 for beta chain variable domain of TCR clone 359743 (TRBV7-2, TRBJ2-7)
CASSLYPGRYEQYF

SEQ ID NO: 719487 - protein, 18 aa, Homo sapiens
  CDR3 for alpha chain variable domain of TCR clone 359744 (TRAV26-1, TRAJ23)
CIFRVGLEVWNQGGKLIF

SEQ ID NO: 719488 - protein, 16 aa, Homo sapiens
  CDR3 for beta chain variable domain of TCR clone 359744 (TRBV12-4, TRBJ2-5)
CASSFFVRGRQETQYF

SEQ ID NO: 719489 - protein, 22 aa, Homo sapiens
  CDR3 for alpha chain variable domain of TCR clone 359745 (TRAV27, TRAJ41)
CAVRTQIPDIQNPDPAVYQLRD

SEQ ID NO: 719490 - protein, 16 aa, Homo sapiens
  CDR3 for beta chain variable domain of TCR clone 359745 (TRBV11-2, TRBJ2-5)
CASSGQGYSPQETQYF

SEQ ID NO: 719491 - protein, 16 aa, Homo sapiens
  CDR3 for alpha chain variable domain of TCR clone 359746 (TRAV12-3, TRAJ53)
CAMSPGSGGRKYKLTF

SEQ ID NO: 719492 - protein, 11 aa, Homo sapiens
  CDR3 for beta chain variable domain of TCR clone 359746 (TRBV29-1, TRBJ2-5)
CSEDRTGTQYF

SEQ ID NO: 719493 - protein, 11 aa, Homo sapiens
  CDR3 for alpha chain variable domain of TCR clone 359747 (TRAV12-1, TRAJ21)
CVVYNINKFYF

SEQ ID NO: 719494 - protein, 14 aa, Homo sapiens
  CDR3 for beta chain variable domain of TCR clone 359747 (TRBV19, TRBJ2-7)
CASSMGQGAIEQYF

SEQ ID NO: 719495 - protein, 17 aa, Homo sapiens
  CDR3 for alpha chain variable domain of TCR clone 359748 (TRAV8-6, TRAJ8)
CAVKEGIENTGFQKLVF

SEQ ID NO: 719496 - protein, 12 aa, Homo sapiens
  CDR3 for beta chain variable domain of TCR clone 359748 (TRBV19, TRBJ1-4)
CASKDWPGGLFF

SEQ ID NO: 719497 - protein, 16 aa, Homo sapiens
  CDR3 for alpha chain variable domain of TCR clone 359749 (TRAV8-3, TRAJ13)
CAVGAYPSGGYQKVTF

SEQ ID NO: 719498 - protein, 18 aa, Homo sapiens
  CDR3 for beta chain variable domain of TCR clone 359749 (TRBV12-4, TRBJ2-2)
CASSLVAGTRGRTGELFF

SEQ ID NO: 719499 - protein, 13 aa, Homo sapiens
  CDR3 for alpha chain variable domain of TCR clone 359750 (TRAV13-1, TRAJ49)
CAAMLYTGNQFYF

SEQ ID NO: 719500 - protein, 15 aa, Homo sapiens
  CDR3 for beta chain variable domain of TCR clone 359750 (TRBV12-4, TRBJ1-5)
CASTRGSGFGQSQHF

SEQ ID NO: 719501 - protein, 14 aa, Homo sapiens
  CDR3 for alpha chain variable domain of TCR clone 359751 (TRAV17, TRAJ15)
CATAPNHAGTALIF

SEQ ID NO: 719502 - protein, 14 aa, Homo sapiens
  CDR3 for beta chain variable domain of TCR clone 359751 (TRBV19, TRBJ2-7)
CASSMGQGAIEQYF

SEQ ID NO: 719503 - protein, 13 aa, Homo sapiens
  CDR3 for alpha chain variable domain of TCR clone 359752 (TRAV13-2, TRAJ15)
CAERPKAGTALIF

SEQ ID NO: 719504 - protein, 15 aa, Homo sapiens
  CDR3 for beta chain variable domain of TCR clone 359752 (TRBV11-2, TRBJ2-7)
CASGFPGTGGYEQYF

SEQ ID NO: 719505 - protein, 14 aa, Homo sapiens
  CDR3 for alpha chain variable domain of TCR clone 359753 (TRAV12-1, TRAJ23)
CVVNIPNQGGKLIF

SEQ ID NO: 719506 - protein, 16 aa, Homo sapiens
  CDR3 for beta chain variable domain of TCR clone 359753 (TRBV7-3, TRBJ2-1)
CASSLEGYRSYNEQFF

SEQ ID NO: 719507 - protein, 12 aa, Homo sapiens
  CDR3 for alpha chain variable domain of TCR clone 359754 (TRAV2, TRAJ33)
CAFMDSNYQLIW

SEQ ID NO: 719508 - protein, 16 aa, Homo sapiens
  CDR3 for beta chain variable domain of TCR clone 359754 (TRBV7-2, TRBJ1-2)
CASSSNQDRRGHGYTF

SEQ ID NO: 719509 - protein, 16 aa, Homo sapiens
  CDR3 for alpha chain variable domain of TCR clone 359755 (TRAV30, TRAJ49)
SAAQRVGQNTGNQFYF

SEQ ID NO: 719510 - protein, 15 aa, Homo sapiens
  CDR3 for beta chain variable domain of TCR clone 359755 (TRBV2, TRBJ2-1)
CASSELAGSYNEQFF

SEQ ID NO: 719511 - protein, 14 aa, Homo sapiens
  CDR3 for alpha chain variable domain of TCR clone 359756 (TRAV13-1, TRAJ39)
CAASKNNAGNMLTF

SEQ ID NO: 719512 - protein, 12 aa, Homo sapiens
  CDR3 for beta chain variable domain of TCR clone 359756 (TRBV12-4, TRBJ2-7)
CASSLGGYEQYF

SEQ ID NO: 719513 - protein, 18 aa, Homo sapiens
  CDR3 for alpha chain variable domain of TCR clone 359757 (TRAV13-1, TRAJ52)
CAASKRSAGGTSFGKLTF

SEQ ID NO: 719514 - protein, 11 aa, Homo sapiens
  CDR3 for beta chain variable domain of TCR clone 359757 (TRBV11-2, TRBJ2-2)
CASSLPGELFF

SEQ ID NO: 719515 - protein, 12 aa, Homo sapiens
  CDR3 for alpha chain variable domain of TCR clone 359758 (TRAV13-1, TRAJ49)
CAASPMGNKFYF

SEQ ID NO: 719516 - protein, 14 aa, Homo sapiens
  CDR3 for beta chain variable domain of TCR clone 359758 (TRBV20-1, TRBJ2-2)
SAVLVPRAPGSCFF

SEQ ID NO: 719517 - protein, 15 aa, Homo sapiens
  CDR3 for alpha chain variable domain of TCR clone 359759 (TRAV23/DV6, TRAJ57)
CAASSTLSHGGSEKL

SEQ ID NO: 719518 - protein, 14 aa, Homo sapiens
  CDR3 for beta chain variable domain of TCR clone 359759 (TRBV25-1, TRBJ1-1)
CASTHLGGNTEAFF

SEQ ID NO: 719519 - protein, 14 aa, Homo sapiens
  CDR3 for alpha chain variable domain of TCR clone 359760 (TRAV1-2, TRAJ16)
CAVHRFSDGQKLLF

SEQ ID NO: 719520 - protein, 13 aa, Homo sapiens
  CDR3 for beta chain variable domain of TCR clone 359760 (TRBV14, TRBJ1-1)
CASSQEAGTEAFF

SEQ ID NO: 719521 - protein, 14 aa, Homo sapiens
  CDR3 for alpha chain variable domain of TCR clone 359761 (TRAV8-6, TRAJ34)
CAVSDQGNTDKPIF

SEQ ID NO: 719522 - protein, 13 aa, Homo sapiens
  CDR3 for beta chain variable domain of TCR clone 359761 (TRBV27, TRBJ1-1)
CASSLSIGAEAFF

SEQ ID NO: 719523 - protein, 10 aa, Homo sapiens
  CDR3 for alpha chain variable domain of TCR clone 359762 (TRAV16, TRAJ26)
CALTGSEFCL

SEQ ID NO: 719524 - protein, 12 aa, Homo sapiens
  CDR3 for beta chain variable domain of TCR clone 359762 (TRBV11-2, TRBJ2-1)
CASSPGNNEQFF

SEQ ID NO: 719525 - protein, 17 aa, Homo sapiens
  CDR3 for alpha chain variable domain of TCR clone 359763 (TRAV12-1, TRAJ42)
CVVMRMNYGGSQGNLIF

SEQ ID NO: 719526 - protein, 12 aa, Homo sapiens
  CDR3 for beta chain variable domain of TCR clone 359763 (TRBV11-2, TRBJ2-2)
CASSLGGGELFF

SEQ ID NO: 719527 - protein, 15 aa, Homo sapiens
  CDR3 for alpha chain variable domain of TCR clone 359764 (TRAV8-3, TRAJ27)
CAVGPSKTNAGKSTF

SEQ ID NO: 719528 - protein, 15 aa, Homo sapiens
  CDR3 for beta chain variable domain of TCR clone 359764 (TRBV7-2, TRBJ2-3)
CASLKDGREGDTQYF

SEQ ID NO: 719529 - protein, 14 aa, Homo sapiens
  CDR3 for alpha chain variable domain of TCR clone 359765 (TRAV22, TRAJ12)
CAVVRYDSSYKLIF

SEQ ID NO: 719530 - protein, 16 aa, Homo sapiens
  CDR3 for beta chain variable domain of TCR clone 359765 (TRBV4-1, TRBJ2-3)
CASSQSTSGAEDTQYF

SEQ ID NO: 719531 - protein, 11 aa, Homo sapiens
  CDR3 for alpha chain variable domain of TCR clone 359766 (TRAV2, TRAJ13)
CASGGYQKVTF

SEQ ID NO: 719532 - protein, 15 aa, Homo sapiens
  CDR3 for beta chain variable domain of TCR clone 359766 (TRBV11-3, TRBJ2-7)
CASSLNYGASYEQYF

SEQ ID NO: 719533 - protein, 15 aa, Homo sapiens
  CDR3 for alpha chain variable domain of TCR clone 359767 (TRAV13-1, TRAJ36)
CAASIRQTGANNLFF

SEQ ID NO: 719534 - protein, 16 aa, Homo sapiens
  CDR3 for beta chain variable domain of TCR clone 359767 (TRBV20-1, TRBJ1-4)
CSAPGQGLLTNEKLFF

SEQ ID NO: 719535 - protein, 14 aa, Homo sapiens
  CDR3 for alpha chain variable domain of TCR clone 359768 (TRAV12-1, TRAJ36)
CVVNYWGKQPLLWD

SEQ ID NO: 719536 - protein, 12 aa, Homo sapiens
  CDR3 for beta chain variable domain of TCR clone 359768 (TRBV14, TRBJ2-7)
CASSLYKDEQYF

SEQ ID NO: 719537 - protein, 15 aa, Homo sapiens
  CDR3 for alpha chain variable domain of TCR clone 359769 (TRAV13-1, TRAJ17)
CAASIERAAGNKLTF

SEQ ID NO: 719538 - protein, 13 aa, Homo sapiens
  CDR3 for beta chain variable domain of TCR clone 359769 (TRBV11-2, TRBJ2-5)
CASSRGPSETQYF

SEQ ID NO: 719539 - protein, 17 aa, Homo sapiens
  CDR3 for alpha chain variable domain of TCR clone 359770 (TRAV26-1, TRAJ28)
CIVRARYSGAGSYQPTF

SEQ ID NO: 719540 - protein, 10 aa, Homo sapiens
  CDR3 for beta chain variable domain of TCR clone 359770 (TRBV12-4, TRBJ2-7)
CASLTFEQYF

SEQ ID NO: 719541 - protein, 11 aa, Homo sapiens
  CDR3 for alpha chain variable domain of TCR clone 359771 (TRAV12-1, TRAJ21)
CVVNNFNKFYF

SEQ ID NO: 719542 - protein, 16 aa, Homo sapiens
  CDR3 for beta chain variable domain of TCR clone 359771 (TRBV19, TRBJ1-1)
CASRFGGPVTGTEAFF

SEQ ID NO: 719543 - protein, 14 aa, Homo sapiens
  CDR3 for alpha chain variable domain of TCR clone 359772 (TRAV26-1, TRAJ21)
CIVRPPYNFNKFYF

SEQ ID NO: 719544 - protein, 14 aa, Homo sapiens
  CDR3 for beta chain variable domain of TCR clone 359772 (TRBV11-2, TRBJ2-1)
CASSRATSYNEQFF

SEQ ID NO: 719545 - protein, 14 aa, Homo sapiens
  CDR3 for alpha chain variable domain of TCR clone 359773 (TRAV8-2, TRAJ37)
CVVSIAGNTGKLIF

SEQ ID NO: 719546 - protein, 13 aa, Homo sapiens
  CDR3 for beta chain variable domain of TCR clone 359773 (TRBV7-8, TRBJ2-7)
RRVRLTEMGEQYF

SEQ ID NO: 719547 - protein, 14 aa, Homo sapiens
  CDR3 for alpha chain variable domain of TCR clone 359774 (TRAV8-6, TRAJ5)
RAVSVDTGRRALTF

SEQ ID NO: 719548 - protein, 11 aa, Homo sapiens
  CDR3 for beta chain variable domain of TCR clone 359774 (TRBV7-3, TRBJ2-5)
CASSLSETQYF

SEQ ID NO: 719549 - protein, 15 aa, Homo sapiens
  CDR3 for alpha chain variable domain of TCR clone 359775 (TRAV21, TRAJ32)
CAAAPYGGAPNKLIF

SEQ ID NO: 719550 - protein, 13 aa, Homo sapiens
  CDR3 for beta chain variable domain of TCR clone 359775 (TRBV7-9, TRBJ1-2)
CASSLKQNYGYTF

SEQ ID NO: 719551 - protein, 15 aa, Homo sapiens
  CDR3 for alpha chain variable domain of TCR clone 359776 (TRAV12-3, TRAJ6)
CAMSATTGGSYIPTF

SEQ ID NO: 719552 - protein, 14 aa, Homo sapiens
  CDR3 for beta chain variable domain of TCR clone 359776 (TRBV9, TRBJ2-7)
CASSVAGVPYEQYF

SEQ ID NO: 719553 - protein, 15 aa, Homo sapiens
  CDR3 for alpha chain variable domain of TCR clone 359777 (TRAV8-3, TRAJ45)
CASSYSGGGADGLTF

SEQ ID NO: 719554 - protein, 15 aa, Homo sapiens
  CDR3 for beta chain variable domain of TCR clone 359777 (TRBV10-3, TRBJ2-3)
CAISLTSGGTDTQYF

SEQ ID NO: 719555 - protein, 12 aa, Homo sapiens
  CDR3 for alpha chain variable domain of TCR clone 359778 (TRAV13-1, TRAJ42)
SVLRGSQGNLIF

SEQ ID NO: 719556 - protein, 12 aa, Homo sapiens
  CDR3 for beta chain variable domain of TCR clone 359778 (TRBV7-9, TRBJ2-7)
CASSIKRGEQYF

SEQ ID NO: 719557 - protein, 14 aa, Homo sapiens
  CDR3 for alpha chain variable domain of TCR clone 359779 (TRAV12-3, TRAJ9)
CAMSPNTGGFKTIF

SEQ ID NO: 719558 - protein, 15 aa, Homo sapiens
  CDR3 for beta chain variable domain of TCR clone 359779 (TRBV6-5, TRBJ2-1)
CASTYDAGAGNEQFF

SEQ ID NO: 719559 - protein, 12 aa, Homo sapiens
  CDR3 for alpha chain variable domain of TCR clone 359780 (TRAV21, TRAJ29)
CAVTSGNTPPVF

SEQ ID NO: 719560 - protein, 13 aa, Homo sapiens
  CDR3 for beta chain variable domain of TCR clone 359780 (TRBV4-2, TRBJ1-1)
CASSQAGNTEAFF

SEQ ID NO: 719561 - protein, 16 aa, Homo sapiens
  CDR3 for alpha chain variable domain of TCR clone 359781 (TRAV3, TRAJ21)
CAVRDRSASTNFTLDL

SEQ ID NO: 719562 - protein, 15 aa, Homo sapiens
  CDR3 for beta chain variable domain of TCR clone 359781 (TRBV7-2, TRBJ2-5)
CQQLRVSGRTGDQYF

SEQ ID NO: 719563 - protein, 16 aa, Homo sapiens
  CDR3 for alpha chain variable domain of TCR clone 359782 (TRAV8-6, TRAJ37)
CAVSGLGSSHTGKLIF

SEQ ID NO: 719564 - protein, 15 aa, Homo sapiens
  CDR3 for beta chain variable domain of TCR clone 359782 (TRBV20-1, TRBJ1-5)
CSARSGPSMNQPQHF

SEQ ID NO: 719565 - protein, 12 aa, Homo sapiens
  CDR3 for alpha chain variable domain of TCR clone 359783 (TRAV13-1, TRAJ16)
CAAVSDGQKLLF

SEQ ID NO: 719566 - protein, 16 aa, Homo sapiens
  CDR3 for beta chain variable domain of TCR clone 359783 (TRBV7-2, TRBJ2-1)
CASSLVAGVGYNEQFF

SEQ ID NO: 719567 - protein, 15 aa, Homo sapiens
  CDR3 for alpha chain variable domain of TCR clone 359784 (TRAV26-1, TRAJ38)
CIVRAEGGNNRKLIL

SEQ ID NO: 719568 - protein, 14 aa, Homo sapiens
  CDR3 for beta chain variable domain of TCR clone 359784 (TRBV7-6, TRBJ2-5)
CASSSPSGSETQYF

SEQ ID NO: 719569 - protein, 15 aa, Homo sapiens
  CDR3 for alpha chain variable domain of TCR clone 359785 (TRAV3, TRAJ4)
CAVRDGTGVYNKLIF

SEQ ID NO: 719570 - protein, 16 aa, Homo sapiens
  CDR3 for beta chain variable domain of TCR clone 359785 (TRBV27, TRBJ2-2)
CASSSSGVSNTGELFL

SEQ ID NO: 719571 - protein, 14 aa, Homo sapiens
  CDR3 for alpha chain variable domain of TCR clone 359786 (TRAV17, TRAJ57)
CATDPQGGSEKLFF

SEQ ID NO: 719572 - protein, 15 aa, Homo sapiens
  CDR3 for beta chain variable domain of TCR clone 359786 (TRBV5-1, TRBJ2-7)
CASSLDLTSSYEQYF

SEQ ID NO: 719573 - protein, 15 aa, Homo sapiens
  CDR3 for alpha chain variable domain of TCR clone 359787 (TRAV12-2, TRAJ23)
CAVKPIYNQGGKLNF

SEQ ID NO: 719574 - protein, 15 aa, Homo sapiens
  CDR3 for beta chain variable domain of TCR clone 359787 (TRBV5-1, TRBJ1-2)
CASSLVGGQSQGYTF

SEQ ID NO: 719575 - protein, 22 aa, Homo sapiens
  CDR3 for alpha chain variable domain of TCR clone 359788 (TRAV3, TRAJ38)
CAVRDCLNAGNNHIQNPGPAVY

SEQ ID NO: 719576 - protein, 19 aa, Homo sapiens
  CDR3 for beta chain variable domain of TCR clone 359788 (TRBV7-2, TRBJ2-3)
CASSFLSRNWGGGTDTQYF

SEQ ID NO: 719577 - protein, 21 aa, Homo sapiens
  CDR3 for alpha chain variable domain of TCR clone 359789 (TRAV26-1, TRAJ38)
CIVRPLNAGNNHIQNPDPAVY

SEQ ID NO: 719578 - protein, 13 aa, Homo sapiens
  CDR3 for beta chain variable domain of TCR clone 359789 (TRBV18, TRBJ1-1)
CASSPNGDTEAFF

SEQ ID NO: 719579 - protein, 17 aa, Homo sapiens
  CDR3 for alpha chain variable domain of TCR clone 359790 (TRAV26-2, TRAJ42)
CILRDVGYGGSQGNLIF

SEQ ID NO: 719580 - protein, 16 aa, Homo sapiens
  CDR3 for beta chain variable domain of TCR clone 359790 (TRBV12-4, TRBJ2-7)
CSSSLIGGTGTYEQYC

SEQ ID NO: 719581 - protein, 14 aa, Homo sapiens
  CDR3 for alpha chain variable domain of TCR clone 359791 (TRAV26-1, TRAJ34)
CIVRVAYNTDKLIF

SEQ ID NO: 719582 - protein, 15 aa, Homo sapiens
  CDR3 for beta chain variable domain of TCR clone 359791 (TRBV20-1, TRBJ2-7)
CSGRVPAAYFYEQYF

SEQ ID NO: 719583 - protein, 15 aa, Homo sapiens
  CDR3 for alpha chain variable domain of TCR clone 359792 (TRAV26-1, TRAJ22)
CIVRVSFWFCKATDL

SEQ ID NO: 719584 - protein, 13 aa, Homo sapiens
  CDR3 for beta chain variable domain of TCR clone 359792 (TRBV7-9, TRBJ1-2)
CGISLKQNYGYTF

SEQ ID NO: 719585 - protein, 12 aa, Homo sapiens
  CDR3 for alpha chain variable domain of TCR clone 359793 (TRAV12-2, TRAJ10)
WGVTGGGNKHTF

SEQ ID NO: 719586 - protein, 14 aa, Homo sapiens
  CDR3 for beta chain variable domain of TCR clone 359793 (TRBV27, TRBJ2-7)
CASATGTERREQYF

SEQ ID NO: 719587 - protein, 13 aa, Homo sapiens
  CDR3 for alpha chain variable domain of TCR clone 359794 (TRAV1-2, TRAJ9)
CAALNTGGFKTIF

SEQ ID NO: 719588 - protein, 13 aa, Homo sapiens
  CDR3 for beta chain variable domain of TCR clone 359794 (TRBV7-9, TRBJ2-1)
CASSLGTVNEQFF

SEQ ID NO: 719589 - protein, 16 aa, Homo sapiens
  CDR3 for alpha chain variable domain of TCR clone 359795 (TRAV16, TRAJ52)
CALSGVGGTSYGKLTF

SEQ ID NO: 719590 - protein, 14 aa, Homo sapiens
  CDR3 for beta chain variable domain of TCR clone 359795 (TRBV19, TRBJ1-2)
CARSLQGQAYGYTF

SEQ ID NO: 719591 - protein, 10 aa, Homo sapiens
  CDR3 for alpha chain variable domain of TCR clone 359796 (TRAV2, TRAJ34)
CAVVNDRLIF

SEQ ID NO: 719592 - protein, 12 aa, Homo sapiens
  CDR3 for beta chain variable domain of TCR clone 359796 (TRBV7-8, TRBJ2-7)
CASSLGDREQYF

SEQ ID NO: 719593 - protein, 14 aa, Homo sapiens
  CDR3 for alpha chain variable domain of TCR clone 359797 (TRAV26-1, TRAJ48)
CTVRTNFGNEKLTF

SEQ ID NO: 719594 - protein, 12 aa, Homo sapiens
  CDR3 for beta chain variable domain of TCR clone 359797 (TRBV20-1, TRBJ2-7)
CSASSGANEQHF

SEQ ID NO: 719595 - protein, 13 aa, Homo sapiens
  CDR3 for alpha chain variable domain of TCR clone 359798 (TRAV35, TRAJ48)
CAGHAFGNEKLTF

SEQ ID NO: 719596 - protein, 14 aa, Homo sapiens
  CDR3 for beta chain variable domain of TCR clone 359798 (TRBV19, TRBJ2-1)
CASPTFVLSGEQFF

SEQ ID NO: 719597 - protein, 11 aa, Homo sapiens
  CDR3 for alpha chain variable domain of TCR clone 359799 (TRAV1-1, TRAJ23)
CAVRQGGKLIF

SEQ ID NO: 719598 - protein, 13 aa, Homo sapiens
  CDR3 for beta chain variable domain of TCR clone 359799 (TRBV7-3, TRBJ1-1)
CASRQDWGAEAFF

SEQ ID NO: 719599 - protein, 14 aa, Homo sapiens
  CDR3 for alpha chain variable domain of TCR clone 359800 (TRAV1-1, TRAJ23)
CAVSIYNQGGKLIF

SEQ ID NO: 719600 - protein, 13 aa, Homo sapiens
  CDR3 for beta chain variable domain of TCR clone 359800 (TRBV18, TRBJ1-1)
CASSPETKPEAFF

SEQ ID NO: 719601 - protein, 20 aa, Homo sapiens
  CDR3 for alpha chain variable domain of TCR clone 359801 (TRAV1-1, TRAJ4)
CLLLLRCEGFLSGGYNKLIF

SEQ ID NO: 719602 - protein, 14 aa, Homo sapiens
  CDR3 for beta chain variable domain of TCR clone 359801 (TRBV25-1, TRBJ1-1)
CASTHLGGNTEAFF

SEQ ID NO: 719603 - protein, 15 aa, Homo sapiens
  CDR3 for alpha chain variable domain of TCR clone 359802 (TRAV14/DV4, TRAJ46)
CAMREKKSSGVKLTF

SEQ ID NO: 719604 - protein, 13 aa, Homo sapiens
  CDR3 for beta chain variable domain of TCR clone 359802 (TRBV20-1, TRBJ2-5)
CSAREAFQETQYF

SEQ ID NO: 719605 - protein, 22 aa, Homo sapiens
  CDR3 for alpha chain variable domain of TCR clone 359803 (TRAV3, TRAJ38)
CAVRDCLNAGNNHIQNPDPAVY

SEQ ID NO: 719606 - protein, 16 aa, Homo sapiens
  CDR3 for beta chain variable domain of TCR clone 359803 (TRBV12-5, TRBJ2-5)
CASGPRTSGNQETQYF

SEQ ID NO: 719607 - protein, 15 aa, Homo sapiens
  CDR3 for alpha chain variable domain of TCR clone 359804 (TRAV2, TRAJ15)
RAVEDREQAGTALIF

SEQ ID NO: 719608 - protein, 13 aa, Homo sapiens
  CDR3 for beta chain variable domain of TCR clone 359804 (TRBV10-2, TRBJ2-3)
CASSESGDHTQYF

SEQ ID NO: 719609 - protein, 14 aa, Homo sapiens
  CDR3 for alpha chain variable domain of TCR clone 359805 (TRAV17, TRAJ4)
CATDGGYNKLILEQ

SEQ ID NO: 719610 - protein, 13 aa, Homo sapiens
  CDR3 for beta chain variable domain of TCR clone 359805 (TRBV29-1, TRBJ2-2)
CSTTGVNTGELFF

SEQ ID NO: 719611 - protein, 15 aa, Homo sapiens
  CDR3 for alpha chain variable domain of TCR clone 359806 (TRAV3, TRAJ3)
CAVRDRDSSASEIIF

SEQ ID NO: 719612 - protein, 18 aa, Homo sapiens
  CDR3 for beta chain variable domain of TCR clone 359806 (TRBV25-1, TRBJ1-2)
CASSGLQNGQGLIFGYSF

SEQ ID NO: 719613 - protein, 13 aa, Homo sapiens
  CDR3 for alpha chain variable domain of TCR clone 359807 (TRAV21, TRAJ57)
CAVTQGGSEKLVF

SEQ ID NO: 719614 - protein, 13 aa, Homo sapiens
  CDR3 for beta chain variable domain of TCR clone 359807 (TRBV12-4, TRBJ1-2)
CASSLDSNYGYTF

SEQ ID NO: 719615 - protein, 15 aa, Homo sapiens
  CDR3 for alpha chain variable domain of TCR clone 359808 (TRAV26-1, TRAJ44)
CIVRIGTGTASKLTF

SEQ ID NO: 719616 - protein, 18 aa, Homo sapiens
  CDR3 for beta chain variable domain of TCR clone 359808 (TRBV7-9, TRBJ2-7)
CASSLTTSGSRTWYEQYF

SEQ ID NO: 719617 - protein, 14 aa, Homo sapiens
  CDR3 for alpha chain variable domain of TCR clone 359809 (TRAV35, TRAJ22)
CAGLRPGSARQLTF

SEQ ID NO: 719618 - protein, 14 aa, Homo sapiens
  CDR3 for beta chain variable domain of TCR clone 359809 (TRBV7-2, TRBJ1-1)
CASSFLTGTTEAFF

SEQ ID NO: 719619 - protein, 14 aa, Homo sapiens
  CDR3 for alpha chain variable domain of TCR clone 359810 (TRAV2, TRAJ37)
CAVEDQGNTGKLIF

SEQ ID NO: 719620 - protein, 14 aa, Homo sapiens
  CDR3 for beta chain variable domain of TCR clone 359810 (TRBV18, TRBJ2-2)
CASSPGQNTGELFF

SEQ ID NO: 719621 - protein, 16 aa, Homo sapiens
  CDR3 for alpha chain variable domain of TCR clone 359811 (TRAV3, TRAJ37)
CAVRPHGSGNTGKLIF

SEQ ID NO: 719622 - protein, 13 aa, Homo sapiens
  CDR3 for beta chain variable domain of TCR clone 359811 (TRBV12-4, TRBJ1-2)
CASSLRQGKGYTF

SEQ ID NO: 719623 - protein, 20 aa, Homo sapiens
  CDR3 for alpha chain variable domain of TCR clone 359812 (TRAV25, TRAJ21)
TATQTTDVGTYPLSFNKFYF

SEQ ID NO: 719624 - protein, 19 aa, Homo sapiens
  CDR3 for beta chain variable domain of TCR clone 359812 (TRBV19, TRBJ2-5)
CASSIGQVTDFFLGETQYF

SEQ ID NO: 719625 - protein, 12 aa, Homo sapiens
  CDR3 for alpha chain variable domain of TCR clone 359813 (TRAV17, TRAJ20)
CATDSNDYKLSF

SEQ ID NO: 719626 - protein, 15 aa, Homo sapiens
  CDR3 for beta chain variable domain of TCR clone 359813 (TRBV4-1, TRBJ2-5)
CASSQWDLHQETQYF

SEQ ID NO: 719627 - protein, 14 aa, Homo sapiens
  CDR3 for alpha chain variable domain of TCR clone 359814 (TRAV1-2, TRAJ16)
CAVNRISDGQKLLF

SEQ ID NO: 719628 - protein, 14 aa, Homo sapiens
  CDR3 for beta chain variable domain of TCR clone 359814 (TRBV7-9, TRBJ2-2)
CASSTVLGRGELFF

SEQ ID NO: 719629 - protein, 11 aa, Homo sapiens
  CDR3 for alpha chain variable domain of TCR clone 359815 (TRAV3, TRAJ17)
CAEAAGNKLTF

SEQ ID NO: 719630 - protein, 14 aa, Homo sapiens
  CDR3 for beta chain variable domain of TCR clone 359815 (TRBV20-1, TRBJ2-2)
SAVLALRRTGELVF

SEQ ID NO: 719631 - protein, 12 aa, Homo sapiens
  CDR3 for alpha chain variable domain of TCR clone 359816 (TRAV21, TRAJ23)
CAVGPQGGKLLF

SEQ ID NO: 719632 - protein, 13 aa, Homo sapiens
  CDR3 for beta chain variable domain of TCR clone 359816 (TRBV20-1, TRBJ2-7)
CSARTGAGYEQYF

SEQ ID NO: 719633 - protein, 15 aa, Homo sapiens
  CDR3 for alpha chain variable domain of TCR clone 359817 (TRAV2, TRAJ9)
CAVAALNTGGFKTIF

SEQ ID NO: 719634 - protein, 17 aa, Homo sapiens
  CDR3 for beta chain variable domain of TCR clone 359817 (TRBV25-1, TRBJ2-7)
CASSDARVVFSSYEQYF

SEQ ID NO: 719635 - protein, 14 aa, Homo sapiens
  CDR3 for alpha chain variable domain of TCR clone 359818 (TRAV14/DV4, TRAJ32)
SNVLPLTPTNKLIF

SEQ ID NO: 719636 - protein, 17 aa, Homo sapiens
  CDR3 for beta chain variable domain of TCR clone 359818 (TRBV20-1, TRBJ2-1)
CSASSSGLAGSYNEQFV

SEQ ID NO: 719637 - protein, 15 aa, Homo sapiens
  CDR3 for alpha chain variable domain of TCR clone 359819 (TRAV27, TRAJ38)
CAARRNAGNNRKLLW

SEQ ID NO: 719638 - protein, 17 aa, Homo sapiens
  CDR3 for beta chain variable domain of TCR clone 359819 (TRBV13, TRBJ2-3)
CASNLSRVAGGRNTQYF

SEQ ID NO: 719639 - protein, 16 aa, Homo sapiens
  CDR3 for alpha chain variable domain of TCR clone 359820 (TRAV3, TRAJ18)
CAVRDGRGSTLGRLYF

SEQ ID NO: 719640 - protein, 17 aa, Homo sapiens
  CDR3 for beta chain variable domain of TCR clone 359820 (TRBV7-9, TRBJ1-6)
CASSSPGREIHPSTLGT

SEQ ID NO: 719641 - protein, 14 aa, Homo sapiens
  CDR3 for alpha chain variable domain of TCR clone 359821 (TRAV4, TRAJ6)
CLVGEAGGSYIPTF

SEQ ID NO: 719642 - protein, 16 aa, Homo sapiens
  CDR3 for beta chain variable domain of TCR clone 359821 (TRBV12-4, TRBJ2-5)
CASSFFVRGRQETQFF

SEQ ID NO: 719643 - protein, 14 aa, Homo sapiens
  CDR3 for alpha chain variable domain of TCR clone 359822 (TRAV29/DV5, TRAJ32)
CAAAYGGATNKLIF

SEQ ID NO: 719644 - protein, 11 aa, Homo sapiens
  CDR3 for beta chain variable domain of TCR clone 359822 (TRBV11-2, TRBJ2-2)
CSSSLPGELFF

SEQ ID NO: 719645 - protein, 11 aa, Homo sapiens
  CDR3 for alpha chain variable domain of TCR clone 359823 (TRAV12-2, TRAJ36)
CAVDGANNLFF

SEQ ID NO: 719646 - protein, 19 aa, Homo sapiens
  CDR3 for beta chain variable domain of TCR clone 359823 (TRBV7-2, TRBJ2-3)
YASSFLSRNWGGGTDTQYF

SEQ ID NO: 719647 - protein, 12 aa, Homo sapiens
  CDR3 for alpha chain variable domain of TCR clone 359824 (TRAV8-3, TRAJ41)
CAVGALGYALNF

SEQ ID NO: 719648 - protein, 19 aa, Homo sapiens
  CDR3 for beta chain variable domain of TCR clone 359824 (TRBV18, TRBJ1-3)
CASSPLSRTGMSSGNTIYF

SEQ ID NO: 719649 - protein, 14 aa, Homo sapiens
  CDR3 for alpha chain variable domain of TCR clone 359825 (TRAV3, TRAJ9)
CAVRLNTGGFKTIF

SEQ ID NO: 719650 - protein, 14 aa, Homo sapiens
  CDR3 for beta chain variable domain of TCR clone 359825 (TRBV12-4, TRBJ2-3)
CASTIAGWGDTQYF

SEQ ID NO: 719651 - protein, 12 aa, Homo sapiens
  CDR3 for alpha chain variable domain of TCR clone 359826 (TRAV36/DV7, TRAJ50)
CAVEPENLLRQG

SEQ ID NO: 719652 - protein, 16 aa, Homo sapiens
  CDR3 for beta chain variable domain of TCR clone 359826 (TRBV10-3, TRBJ1-1)
CAISTGFPAMNTEAFF

SEQ ID NO: 719653 - protein, 14 aa, Homo sapiens
  CDR3 for alpha chain variable domain of TCR clone 359827 (TRAV12-2, TRAJ5)
CAVNRSTGRRALTF

SEQ ID NO: 719654 - protein, 14 aa, Homo sapiens
  CDR3 for beta chain variable domain of TCR clone 359827 (TRBV7-2, TRBJ2-5)
CASSPRGSSETQYF

SEQ ID NO: 719655 - protein, 14 aa, Homo sapiens
  CDR3 for alpha chain variable domain of TCR clone 359828 (TRAV1-2, TRAJ16)
CAVNRFSDGQKLLF

SEQ ID NO: 719656 - protein, 14 aa, Homo sapiens
  CDR3 for beta chain variable domain of TCR clone 359828 (TRBV19, TRBJ2-1)
CASPSFVLSGEQFF

SEQ ID NO: 719657 - protein, 17 aa, Homo sapiens
  CDR3 for alpha chain variable domain of TCR clone 359829 (TRAV3, TRAJ6)
CAVRDGPRAGGSYIPTF

SEQ ID NO: 719658 - protein, 18 aa, Homo sapiens
  CDR3 for beta chain variable domain of TCR clone 359829 (TRBV20-1, TRBJ2-3)
CSARDPWGQGLSTDTQYF

SEQ ID NO: 719659 - protein, 14 aa, Homo sapiens
  CDR3 for alpha chain variable domain of TCR clone 359830 (TRAV3, TRAJ20)
CAVPPAPNDYKPSF

SEQ ID NO: 719660 - protein, 16 aa, Homo sapiens
  CDR3 for beta chain variable domain of TCR clone 359830 (TRBV12-5, TRBJ2-5)
CASGPRTSGNQETQYF

SEQ ID NO: 719661 - protein, 17 aa, Homo sapiens
  CDR3 for alpha chain variable domain of TCR clone 359831 (TRAV3, TRAJ42)
CAVRDRDYGGSHGNLIF

SEQ ID NO: 719662 - protein, 20 aa, Homo sapiens
  CDR3 for beta chain variable domain of TCR clone 359831 (TRBV28, TRBJ2-1)
CAITPIGRSPGLAGGNEQFF

SEQ ID NO: 719663 - protein, 14 aa, Homo sapiens
  CDR3 for alpha chain variable domain of TCR clone 359832 (TRAV4, TRAJ17)
CLVGDMAAGNKLTS

SEQ ID NO: 719664 - protein, 13 aa, Homo sapiens
  CDR3 for beta chain variable domain of TCR clone 359832 (TRBV18, TRBJ2-7)
CASQSGGGYEQYF

SEQ ID NO: 719665 - protein, 12 aa, Homo sapiens
  CDR3 for alpha chain variable domain of TCR clone 359833 (TRAV10, TRAJ31)
CVVRAHRARLMF

SEQ ID NO: 719666 - protein, 15 aa, Homo sapiens
  CDR3 for beta chain variable domain of TCR clone 359833 (TRBV5-1, TRBJ2-3)
CASSSTSGSTDTQYF

SEQ ID NO: 719667 - protein, 17 aa, Homo sapiens
  CDR3 for alpha chain variable domain of TCR clone 359834 (TRAV26-1, TRAJ53)
CIVRVDDRGGSNNKLTF

SEQ ID NO: 719668 - protein, 15 aa, Homo sapiens
  CDR3 for beta chain variable domain of TCR clone 359834 (TRBV20-1, TRBJ2-7)
CSARVPAAYFYEQYF

SEQ ID NO: 719669 - protein, 10 aa, Homo sapiens
  CDR3 for alpha chain variable domain of TCR clone 359835 (TRAV23/DV6, TRAJ31)
CAHGGARLMF

SEQ ID NO: 719670 - protein, 13 aa, Homo sapiens
  CDR3 for beta chain variable domain of TCR clone 359835 (TRBV7-2, TRBJ1-1)
CASNLKGAKVAFF

SEQ ID NO: 719671 - protein, 16 aa, Homo sapiens
  CDR3 for alpha chain variable domain of TCR clone 359836 (TRAV16, TRAJ42)
CARKMNYGGSKGNLIF

SEQ ID NO: 719672 - protein, 14 aa, Homo sapiens
  CDR3 for beta chain variable domain of TCR clone 359836 (TRBV14, TRBJ2-3)
CQQPDDRDTDTQYF

SEQ ID NO: 719673 - protein, 14 aa, Homo sapiens
  CDR3 for alpha chain variable domain of TCR clone 359837 (TRAV12-2, TRAJ15)
CAPHTGQAGTALIF

SEQ ID NO: 719674 - protein, 17 aa, Homo sapiens
  CDR3 for beta chain variable domain of TCR clone 359837 (TRBV5-5, TRBJ1-2)
CSSSLGSLDGQSEGYTF

SEQ ID NO: 719675 - protein, 13 aa, Homo sapiens
  CDR3 for alpha chain variable domain of TCR clone 359838 (TRAV8-1, TRAJ30)
CSVLMNRDDKIIF

SEQ ID NO: 719676 - protein, 14 aa, Homo sapiens
  CDR3 for beta chain variable domain of TCR clone 359838 (TRBV7-2, TRBJ1-6)
CASSLQGANSPLHF

SEQ ID NO: 719677 - protein, 17 aa, Homo sapiens
  CDR3 for alpha chain variable domain of TCR clone 359839 (TRAV13-1, TRAJ28)
CAASPPYSGPGSYQLTF

SEQ ID NO: 719678 - protein, 19 aa, Homo sapiens
  CDR3 for beta chain variable domain of TCR clone 359839 (TRBV25-1, TRBJ2-2)
CAILVYRVDRGRKTGELFF

SEQ ID NO: 719679 - protein, 13 aa, Homo sapiens
  CDR3 for alpha chain variable domain of TCR clone 359840 (TRAV22, TRAJ20)
CAVRFSNDYKLSF

SEQ ID NO: 719680 - protein, 13 aa, Homo sapiens
  CDR3 for beta chain variable domain of TCR clone 359840 (TRBV7-7, TRBJ1-1)
CASSLGANTEAFF

SEQ ID NO: 719681 - protein, 14 aa, Homo sapiens
  CDR3 for alpha chain variable domain of TCR clone 359841 (TRAV27, TRAJ22)
CAGLPSGSARQLTF

SEQ ID NO: 719682 - protein, 17 aa, Homo sapiens
  CDR3 for beta chain variable domain of TCR clone 359841 (TRBV7-9, TRBJ2-2)
CASSLGVAGMNTGELFF

SEQ ID NO: 719683 - protein, 13 aa, Homo sapiens
  CDR3 for alpha chain variable domain of TCR clone 359842 (TRAV21, TRAJ15)
CAVANQAGTALIF

SEQ ID NO: 719684 - protein, 15 aa, Homo sapiens
  CDR3 for beta chain variable domain of TCR clone 359842 (TRBV27, TRBJ2-7)
CASSLGSSGSPEQYF

SEQ ID NO: 719685 - protein, 14 aa, Homo sapiens
  CDR3 for alpha chain variable domain of TCR clone 359843 (TRAV8-1, TRAJ5)
CAGSMDTGRRALTF

SEQ ID NO: 719686 - protein, 15 aa, Homo sapiens
  CDR3 for beta chain variable domain of TCR clone 359843 (TRBV19, TRBJ2-4)
CASRGPRRGENIQYF

SEQ ID NO: 719687 - protein, 11 aa, Homo sapiens
  CDR3 for alpha chain variable domain of TCR clone 359844 (TRAV3, TRAJ32)
CPVREGIMVVL

SEQ ID NO: 719688 - protein, 13 aa, Homo sapiens
  CDR3 for beta chain variable domain of TCR clone 359844 (TRBV2, TRBJ1-1)
CASSEGGNTEAFF

SEQ ID NO: 719689 - protein, 13 aa, Homo sapiens
  CDR3 for alpha chain variable domain of TCR clone 359845 (TRAV12-3, TRAJ13)
CAMPSGGYQKVTF

SEQ ID NO: 719690 - protein, 13 aa, Homo sapiens
  CDR3 for beta chain variable domain of TCR clone 359845 (TRBV20-1, TRBJ2-2)
CSALSGGAGELFF

SEQ ID NO: 719691 - protein, 15 aa, Homo sapiens
  CDR3 for alpha chain variable domain of TCR clone 359846 (TRAV8-3, TRAJ11)
CAVGLLHSGYSTLTF

SEQ ID NO: 719692 - protein, 23 aa, Homo sapiens
  CDR3 for beta chain variable domain of TCR clone 359846 (TRBV7-9, TRBJ1-2)
EAQLEKSRLLSDRFSSGEDGYTF

SEQ ID NO: 719693 - protein, 12 aa, Homo sapiens
  CDR3 for alpha chain variable domain of TCR clone 359847 (TRAV8-4, TRAJ31)
CAVSDSNARPMF

SEQ ID NO: 719694 - protein, 14 aa, Homo sapiens
  CDR3 for beta chain variable domain of TCR clone 359847 (TRBV20-1, TRBJ2-7)
CSAKRGRSSYEQYF

SEQ ID NO: 719695 - protein, 14 aa, Homo sapiens
  CDR3 for alpha chain variable domain of TCR clone 359848 (TRAV8-1, TRAJ5)
CAVRTDSGRRALTF

SEQ ID NO: 719696 - protein, 14 aa, Homo sapiens
  CDR3 for beta chain variable domain of TCR clone 359848 (TRBV19, TRBJ2-1)
CASPTFVLSGEQFF

SEQ ID NO: 719697 - protein, 14 aa, Homo sapiens
  CDR3 for alpha chain variable domain of TCR clone 359849 (TRAV13-1, TRAJ44)
CAVKATGTASKLTF

SEQ ID NO: 719698 - protein, 15 aa, Homo sapiens
  CDR3 for beta chain variable domain of TCR clone 359849 (TRBV7-2, TRBJ2-2)
CASRRPGQNTGELFF

SEQ ID NO: 719699 - protein, 16 aa, Homo sapiens
  CDR3 for alpha chain variable domain of TCR clone 359850 (TRAV26-1, TRAJ40)
CIVRGYPTSGTYKYIF

SEQ ID NO: 719700 - protein, 14 aa, Homo sapiens
  CDR3 for beta chain variable domain of TCR clone 359850 (TRBV5-1, TRBJ1-4)
CASGSGQGGEKLFF

SEQ ID NO: 719701 - protein, 14 aa, Homo sapiens
  CDR3 for alpha chain variable domain of TCR clone 359851 (TRAV8-4, TRAJ48)
CAVSETFGNEKLTF

SEQ ID NO: 719702 - protein, 15 aa, Homo sapiens
  CDR3 for beta chain variable domain of TCR clone 359851 (TRBV5-5, TRBJ2-2)
CASSRQASGAGELFF

SEQ ID NO: 719703 - protein, 14 aa, Homo sapiens
  CDR3 for alpha chain variable domain of TCR clone 359852 (TRAV1-2, TRAJ16)
CAVNRFSYGQKLLF

SEQ ID NO: 719704 - protein, 16 aa, Homo sapiens
  CDR3 for beta chain variable domain of TCR clone 359852 (TRBV20-1, TRBJ1-4)
CSAPGQGLLTNDKLFF

SEQ ID NO: 719705 - protein, 15 aa, Homo sapiens
  CDR3 for alpha chain variable domain of TCR clone 359853 (TRAV4, TRAJ36)
CLVGDRQTGANNLFF

SEQ ID NO: 719706 - protein, 17 aa, Homo sapiens
  CDR3 for beta chain variable domain of TCR clone 359853 (TRBV5-1, TRBJ2-2)
CASSEKPNFANTGELFF

SEQ ID NO: 719707 - protein, 13 aa, Homo sapiens
  CDR3 for alpha chain variable domain of TCR clone 359854 (TRAV8-3, TRAJ21)
CAVGAYNFNKFYF

SEQ ID NO: 719708 - protein, 14 aa, Homo sapiens
  CDR3 for beta chain variable domain of TCR clone 359854 (TRBV11-2, TRBJ2-3)
CASSRLARTDTQYF

SEQ ID NO: 719709 - protein, 14 aa, Homo sapiens
  CDR3 for alpha chain variable domain of TCR clone 359855 (TRAV12-3, TRAJ57)
CAMSAWGGSEKLVF

SEQ ID NO: 719710 - protein, 14 aa, Homo sapiens
  CDR3 for beta chain variable domain of TCR clone 359855 (TRBV18, TRBJ2-5)
CASSPGVTQETQYF

SEQ ID NO: 719711 - protein, 14 aa, Homo sapiens
  CDR3 for alpha chain variable domain of TCR clone 359856 (TRAV12-2, TRAJ40)
CAFNIPSGTYKYIF

SEQ ID NO: 719712 - protein, 14 aa, Homo sapiens
  CDR3 for beta chain variable domain of TCR clone 359856 (TRBV20-1, TRBJ1-1)
CSAQTRIGGTEAFF

SEQ ID NO: 719713 - protein, 16 aa, Homo sapiens
  CDR3 for alpha chain variable domain of TCR clone 359857 (TRAV3, TRAJ21)
CAVRDIERGNFNKFYF

SEQ ID NO: 719714 - protein, 16 aa, Homo sapiens
  CDR3 for beta chain variable domain of TCR clone 359857 (TRBV12-4, TRBJ1-5)
CASSRPVGGSNQPQHV

SEQ ID NO: 719715 - protein, 18 aa, Homo sapiens
  CDR3 for alpha chain variable domain of TCR clone 359858 (TRAV26-1, TRAJ39)
CIVRPPDLYNNAGNMLTF

SEQ ID NO: 719716 - protein, 13 aa, Homo sapiens
  CDR3 for beta chain variable domain of TCR clone 359858 (TRBV19, TRBJ1-2)
CASSVPGQDGYTF

SEQ ID NO: 719717 - protein, 14 aa, Homo sapiens
  CDR3 for alpha chain variable domain of TCR clone 359859 (TRAV1-2, TRAJ16)
CAVNRYSDGQKLLF

SEQ ID NO: 719718 - protein, 15 aa, Homo sapiens
  CDR3 for beta chain variable domain of TCR clone 359859 (TRBV7-9, TRBJ1-6)
CASSSPGRGNSPLHF

SEQ ID NO: 719719 - protein, 11 aa, Homo sapiens
  CDR3 for alpha chain variable domain of TCR clone 359860 (TRAV12-3, TRAJ11)
CAMKGYSTLTL

SEQ ID NO: 719720 - protein, 16 aa, Homo sapiens
  CDR3 for beta chain variable domain of TCR clone 359860 (TRBV11-2, TRBJ2-3)
CASSLGVSGGQDTQYF

SEQ ID NO: 719721 - protein, 17 aa, Homo sapiens
  CDR3 for alpha chain variable domain of TCR clone 359861 (TRAV3, TRAJ12)
CAVRDGGRMDSSYKLIF

SEQ ID NO: 719722 - protein, 13 aa, Homo sapiens
  CDR3 for beta chain variable domain of TCR clone 359861 (TRBV20-1, TRBJ1-1)
CSAPLGGGTGAFF

SEQ ID NO: 719723 - protein, 16 aa, Homo sapiens
  CDR3 for alpha chain variable domain of TCR clone 359862 (TRAV8-4, TRAJ27)
CAVKEGGFTNAGKSTF

SEQ ID NO: 719724 - protein, 16 aa, Homo sapiens
  CDR3 for beta chain variable domain of TCR clone 359862 (TRBV13, TRBJ2-2)
CASSPRTGEHTGELFF

SEQ ID NO: 719725 - protein, 12 aa, Homo sapiens
  CDR3 for alpha chain variable domain of TCR clone 359863 (TRAV12-3, TRAJ17)
CAMTLTGNKLTF

SEQ ID NO: 719726 - protein, 15 aa, Homo sapiens
  CDR3 for beta chain variable domain of TCR clone 359863 (TRBV20-1, TRBJ2-7)
CSARDWVSEMDEQYF

SEQ ID NO: 719727 - protein, 17 aa, Homo sapiens
  CDR3 for alpha chain variable domain of TCR clone 359864 (TRAV3, TRAJ42)
CALRDRDYGGSQGNLIF

SEQ ID NO: 719728 - protein, 14 aa, Homo sapiens
  CDR3 for beta chain variable domain of TCR clone 359864 (TRBV7-2, TRBJ2-5)
CASSPRGSSETQYF

SEQ ID NO: 719729 - protein, 19 aa, Homo sapiens
  CDR3 for alpha chain variable domain of TCR clone 359865 (TRAV26-1, TRAJ52)
CIVRAHRNAGGTSYGKLTF

SEQ ID NO: 719730 - protein, 13 aa, Homo sapiens
  CDR3 for beta chain variable domain of TCR clone 359865 (TRBV24-1, TRBJ2-1)
CATSAGPYNEQFF

SEQ ID NO: 719731 - protein, 12 aa, Homo sapiens
  CDR3 for alpha chain variable domain of TCR clone 359866 (TRAV16, TRAJ26)
CALRMYGQNFVF

SEQ ID NO: 719732 - protein, 13 aa, Homo sapiens
  CDR3 for beta chain variable domain of TCR clone 359866 (TRBV28, TRBJ2-7)
CAGAQQGLDEQYF

SEQ ID NO: 719733 - protein, 13 aa, Homo sapiens
  CDR3 for alpha chain variable domain of TCR clone 359867 (TRAV20, TRAJ54)
CALTFEGAQKLVF

SEQ ID NO: 719734 - protein, 15 aa, Homo sapiens
  CDR3 for beta chain variable domain of TCR clone 359867 (TRBV20-1, TRBJ1-1)
CSASRGVTGNTEAFF

SEQ ID NO: 719735 - protein, 15 aa, Homo sapiens
  CDR3 for alpha chain variable domain of TCR clone 359868 (TRAV8-3, TRAJ45)
CASSYSGGGADGLTF

SEQ ID NO: 719736 - protein, 15 aa, Homo sapiens
  CDR3 for beta chain variable domain of TCR clone 359868 (TRBV27, TRBJ1-4)
CASSPRHATNEKLFC

SEQ ID NO: 719737 - protein, 16 aa, Homo sapiens
  CDR3 for alpha chain variable domain of TCR clone 359869 (TRAV12-1, TRAJ4)
CLVNPGISGAYNKLIF

SEQ ID NO: 719738 - protein, 14 aa, Homo sapiens
  CDR3 for beta chain variable domain of TCR clone 359869 (TRBV5-7, TRBJ2-3)
CASRTSGGTDTQYV

SEQ ID NO: 719739 - protein, 13 aa, Homo sapiens
  CDR3 for alpha chain variable domain of TCR clone 359870 (TRAV3, TRAJ21)
CAVREPDFNKFYF

SEQ ID NO: 719740 - protein, 14 aa, Homo sapiens
  CDR3 for beta chain variable domain of TCR clone 359870 (TRBV19, TRBJ1-5)
CASRAPYSFLSQHF

SEQ ID NO: 719741 - protein, 18 aa, Homo sapiens
  CDR3 for alpha chain variable domain of TCR clone 359871 (TRAV26-1, TRAJ23)
CIVRVGLEVWNQGGKLIF

SEQ ID NO: 719742 - protein, 13 aa, Homo sapiens
  CDR3 for beta chain variable domain of TCR clone 359871 (TRBV12-4, TRBJ2-7)
CASSPTETYEQYF

SEQ ID NO: 719743 - protein, 15 aa, Homo sapiens
  CDR3 for alpha chain variable domain of TCR clone 359872 (TRAV8-3, TRAJ45)
CASSYSRGGTDGLTF

SEQ ID NO: 719744 - protein, 13 aa, Homo sapiens
  CDR3 for beta chain variable domain of TCR clone 359872 (TRBV10-3, TRBJ2-7)
CASKLAVNYEQYF

SEQ ID NO: 719745 - protein, 16 aa, Homo sapiens
  CDR3 for alpha chain variable domain of TCR clone 359873 (TRAV4, TRAJ22)
CFVGDLYSGSARQLTF

SEQ ID NO: 719746 - protein, 16 aa, Homo sapiens
  CDR3 for beta chain variable domain of TCR clone 359873 (TRBV7-9, TRBJ2-1)
CASSDVAGGSYNEQFF

SEQ ID NO: 719747 - protein, 11 aa, Homo sapiens
  CDR3 for alpha chain variable domain of TCR clone 359874 (TRAV4, TRAJ23)
CLVAPGGKLIF

SEQ ID NO: 719748 - protein, 15 aa, Homo sapiens
  CDR3 for beta chain variable domain of TCR clone 359874 (TRBV7-2, TRBJ2-1)
CASSIQADEYNEQFF

SEQ ID NO: 719749 - protein, 19 aa, Homo sapiens
  CDR3 for alpha chain variable domain of TCR clone 359875 (TRAV3, TRAJ6)
CAVRDRNPSRSGGSYIPTF

SEQ ID NO: 719750 - protein, 15 aa, Homo sapiens
  CDR3 for beta chain variable domain of TCR clone 359875 (TRBV18, TRBJ2-7)
CASSPTFMDSYEQNF

SEQ ID NO: 719751 - protein, 14 aa, Homo sapiens
  CDR3 for alpha chain variable domain of TCR clone 359876 (TRAV8-3, TRAJ4)
CAVGTAGGYNKLIF

SEQ ID NO: 719752 - protein, 13 aa, Homo sapiens
  CDR3 for beta chain variable domain of TCR clone 359876 (TRBV7-2, TRBJ2-1)
CASNRDRWNEQFF

SEQ ID NO: 719753 - protein, 13 aa, Homo sapiens
  CDR3 for alpha chain variable domain of TCR clone 359877 (TRAV12-3, TRAJ58)
CAMSVTSGSRLTF

SEQ ID NO: 719754 - protein, 13 aa, Homo sapiens
  CDR3 for beta chain variable domain of TCR clone 359877 (TRBV2, TRBJ1-1)
CASRWTVNTEAFF

SEQ ID NO: 719755 - protein, 14 aa, Homo sapiens
  CDR3 for alpha chain variable domain of TCR clone 359878 (TRAV3, TRAJ34)
CAVGDINNTYKLIF

SEQ ID NO: 719756 - protein, 14 aa, Homo sapiens
  CDR3 for beta chain variable domain of TCR clone 359878 (TRBV7-2, TRBJ2-2)
CASSLGQNTGELFF

SEQ ID NO: 719757 - protein, 16 aa, Homo sapiens
  CDR3 for alpha chain variable domain of TCR clone 359879 (TRAV3, TRAJ37)
CAVSGRGSGNTGKLIF

SEQ ID NO: 719758 - protein, 13 aa, Homo sapiens
  CDR3 for beta chain variable domain of TCR clone 359879 (TRBV14, TRBJ2-7)
CASSQDRRGEQYF

SEQ ID NO: 719759 - protein, 14 aa, Homo sapiens
  CDR3 for alpha chain variable domain of TCR clone 359880 (TRAV12-1, TRAJ9)
CVVNRGTGGFKTIF

SEQ ID NO: 719760 - protein, 14 aa, Homo sapiens
  CDR3 for beta chain variable domain of TCR clone 359880 (TRBV25-1, TRBJ1-1)
RASTHLGGNTEAFF

SEQ ID NO: 719761 - protein, 12 aa, Homo sapiens
  CDR3 for alpha chain variable domain of TCR clone 359881 (TRAV13-2, TRAJ23)
CAERHRGGKLIF

SEQ ID NO: 719762 - protein, 14 aa, Homo sapiens
  CDR3 for beta chain variable domain of TCR clone 359881 (TRBV19, TRBJ2-5)
CASSMTGQQETQYL

SEQ ID NO: 719763 - protein, 14 aa, Homo sapiens
  CDR3 for alpha chain variable domain of TCR clone 359882 (TRAV12-1, TRAJ3)
CGAARYSSASKIIF

SEQ ID NO: 719764 - protein, 16 aa, Homo sapiens
  CDR3 for beta chain variable domain of TCR clone 359882 (TRBV4-3, TRBJ2-2)
CASSHLQRSGTGELFF

SEQ ID NO: 719765 - protein, 14 aa, Homo sapiens
  CDR3 for alpha chain variable domain of TCR clone 359883 (TRAV12-3, TRAJ42)
CAINYGGSQGNLIF

SEQ ID NO: 719766 - protein, 15 aa, Homo sapiens
  CDR3 for beta chain variable domain of TCR clone 359883 (TRBV5-6, TRBJ1-5)
CASSYGKLWDQPQHF

SEQ ID NO: 719767 - protein, 14 aa, Homo sapiens
  CDR3 for alpha chain variable domain of TCR clone 359884 (TRAV17, TRAJ15)
CATDRGQAGTALIF

SEQ ID NO: 719768 - protein, 17 aa, Homo sapiens
  CDR3 for beta chain variable domain of TCR clone 359884 (TRBV29-1, TRBJ2-1)
CSVVGLAGAYSYNVQFF

SEQ ID NO: 719769 - protein, 16 aa, Homo sapiens
  CDR3 for alpha chain variable domain of TCR clone 359885 (TRAV30, TRAJ24)
CGTEIVDADSWGKFQF

SEQ ID NO: 719770 - protein, 18 aa, Homo sapiens
  CDR3 for beta chain variable domain of TCR clone 359885 (TRBV7-9, TRBJ2-7)
CASSLTTSGSRMWYEQYF

SEQ ID NO: 719771 - protein, 13 aa, Homo sapiens
  CDR3 for alpha chain variable domain of TCR clone 359886 (TRAV20, TRAJ54)
CAVQAGGAQKLVF

SEQ ID NO: 719772 - protein, 14 aa, Homo sapiens
  CDR3 for beta chain variable domain of TCR clone 359886 (TRBV4-1, TRBJ2-2)
CASSHAVNTGELFF

SEQ ID NO: 719773 - protein, 15 aa, Homo sapiens
  CDR3 for alpha chain variable domain of TCR clone 359887 (TRAV13-1, TRAJ44)
CAASRGGGTASKLTF

SEQ ID NO: 719774 - protein, 14 aa, Homo sapiens
  CDR3 for beta chain variable domain of TCR clone 359887 (TRBV7-2, TRBJ2-5)
CASSPRGSSETQYY

SEQ ID NO: 719775 - protein, 14 aa, Homo sapiens
  CDR3 for alpha chain variable domain of TCR clone 359888 (TRAV12-1, TRAJ17)
CVVNYKAAGNELTF

SEQ ID NO: 719776 - protein, 16 aa, Homo sapiens
  CDR3 for beta chain variable domain of TCR clone 359888 (TRBV12-4, TRBJ1-5)
CASSRPVGGSNQPQHF

SEQ ID NO: 719777 - protein, 17 aa, Homo sapiens
  CDR3 for alpha chain variable domain of TCR clone 359889 (TRAV3, TRAJ6)
CAVRDGPRARGSYIPTF

SEQ ID NO: 719778 - protein, 14 aa, Homo sapiens
  CDR3 for beta chain variable domain of TCR clone 359889 (TRBV7-2, TRBJ2-7)
CASSPKTSFYEQYL

SEQ ID NO: 719779 - protein, 11 aa, Homo sapiens
  CDR3 for alpha chain variable domain of TCR clone 359890 (TRAV29/DV5, TRAJ31)
CAASSRDRLMF

SEQ ID NO: 719780 - protein, 19 aa, Homo sapiens
  CDR3 for beta chain variable domain of TCR clone 359890 (TRBV19, TRBJ2-5)
CASSIGQVTDFFLGETQYF

SEQ ID NO: 719781 - protein, 14 aa, Homo sapiens
  CDR3 for alpha chain variable domain of TCR clone 359891 (TRAV12-2, TRAJ13)
CAVKKTGGYQKVTF

SEQ ID NO: 719782 - protein, 17 aa, Homo sapiens
  CDR3 for beta chain variable domain of TCR clone 359891 (TRBV7-2, TRBJ2-1)
CASSRGTSGAVGWEQFF

SEQ ID NO: 719783 - protein, 15 aa, Homo sapiens
  CDR3 for alpha chain variable domain of TCR clone 359892 (TRAV8-3, TRAJ45)
CASSYSGGGADGLTF

SEQ ID NO: 719784 - protein, 14 aa, Homo sapiens
  CDR3 for beta chain variable domain of TCR clone 359892 (TRBV15, TRBJ2-1)
CATSGVEDYNEQFF

SEQ ID NO: 719785 - protein, 14 aa, Homo sapiens
  CDR3 for alpha chain variable domain of TCR clone 359893 (TRAV1-2, TRAJ8)
CAVREDTGFQKLVF

SEQ ID NO: 719786 - protein, 16 aa, Homo sapiens
  CDR3 for beta chain variable domain of TCR clone 359893 (TRBV15, TRBJ2-1)
CATSRKTPGLRNEQFF

SEQ ID NO: 719787 - protein, 13 aa, Homo sapiens
  CDR3 for alpha chain variable domain of TCR clone 359894 (TRAV12-1, TRAJ26)
CVVRRYYGQNFVF

SEQ ID NO: 719788 - protein, 13 aa, Homo sapiens
  CDR3 for beta chain variable domain of TCR clone 359894 (TRBV24-1, TRBJ1-4)
CATNNGRSEKLFF

SEQ ID NO: 719789 - protein, 16 aa, Homo sapiens
  CDR3 for alpha chain variable domain of TCR clone 359895 (TRAV16, TRAJ57)
CAPYLITQGGSEKLVF

SEQ ID NO: 719790 - protein, 17 aa, Homo sapiens
  CDR3 for beta chain variable domain of TCR clone 359895 (TRBV24-1, TRBJ2-4)
CATSDTEARGVRNIQYF

SEQ ID NO: 719791 - protein, 17 aa, Homo sapiens
  CDR3 for alpha chain variable domain of TCR clone 359896 (TRAV3, TRAJ6)
CAVRDGPRAGGSYIPTF

SEQ ID NO: 719792 - protein, 15 aa, Homo sapiens
  CDR3 for beta chain variable domain of TCR clone 359896 (TRBV29-1, TRBJ2-5)
CSVEGLAVYQETQYF

SEQ ID NO: 719793 - protein, 16 aa, Homo sapiens
  CDR3 for alpha chain variable domain of TCR clone 359897 (TRAV38-1, TRAJ56)
CAFMKRQTGANSKLTF

SEQ ID NO: 719794 - protein, 14 aa, Homo sapiens
  CDR3 for beta chain variable domain of TCR clone 359897 (TRBV12-5, TRBJ2-5)
CASGSRTHQETQYF

SEQ ID NO: 719795 - protein, 13 aa, Homo sapiens
  CDR3 for alpha chain variable domain of TCR clone 359898 (TRAV12-2, TRAJ52)
CAVSGTSYGKLTF

SEQ ID NO: 719796 - protein, 16 aa, Homo sapiens
  CDR3 for beta chain variable domain of TCR clone 359898 (TRBV5-7, TRBJ2-7)
CASSPTSGRDLDEQYF

SEQ ID NO: 719797 - protein, 12 aa, Homo sapiens
  CDR3 for alpha chain variable domain of TCR clone 359899 (TRAV1-1, TRAJ23)
CAVTNQGGKLMF

SEQ ID NO: 719798 - protein, 16 aa, Homo sapiens
  CDR3 for beta chain variable domain of TCR clone 359899 (TRBV19, TRBJ2-2)
CASRSPGTGATGELFF

SEQ ID NO: 719799 - protein, 15 aa, Homo sapiens
  CDR3 for alpha chain variable domain of TCR clone 359900 (TRAV25, TRAJ52)
CAGRPGGTSYGKLTF

SEQ ID NO: 719800 - protein, 13 aa, Homo sapiens
  CDR3 for beta chain variable domain of TCR clone 359900 (TRBV19, TRBJ1-2)
CASSVPGQDGYTF

SEQ ID NO: 719801 - protein, 16 aa, Homo sapiens
  CDR3 for alpha chain variable domain of TCR clone 359901 (TRAV3, TRAJ10)
CAVRDMRAGGGNKLTF

SEQ ID NO: 719802 - protein, 15 aa, Homo sapiens
  CDR3 for beta chain variable domain of TCR clone 359901 (TRBV5-1, TRBJ2-5)
CASSFKGGDQETQYF

SEQ ID NO: 719803 - protein, 15 aa, Homo sapiens
  CDR3 for alpha chain variable domain of TCR clone 359902 (TRAV26-1, TRAJ29)
CIVRVEGSGNTPLVF

SEQ ID NO: 719804 - protein, 15 aa, Homo sapiens
  CDR3 for beta chain variable domain of TCR clone 359902 (TRBV28, TRBJ2-5)
CASSPGQGSIESQYF

SEQ ID NO: 719805 - protein, 14 aa, Homo sapiens
  CDR3 for alpha chain variable domain of TCR clone 359903 (TRAV1-2, TRAJ27)
CAPAEYTNASKSTF

SEQ ID NO: 719806 - protein, 18 aa, Homo sapiens
  CDR3 for beta chain variable domain of TCR clone 359903 (TRBV28, TRBJ1-2)
CASRQQQGKRGSNYGYTF

SEQ ID NO: 719807 - protein, 10 aa, Homo sapiens
  CDR3 for alpha chain variable domain of TCR clone 359904 (TRAV12-3, TRAJ49)
CAMNDDQFYF

SEQ ID NO: 719808 - protein, 14 aa, Homo sapiens
  CDR3 for beta chain variable domain of TCR clone 359904 (TRBV7-2, TRBJ1-2)
CASSQTGSTYGYTF

SEQ ID NO: 719809 - protein, 15 aa, Homo sapiens
  CDR3 for alpha chain variable domain of TCR clone 359905 (TRAV12-3, TRAJ6)
CAVSATTGGSYIPTF

SEQ ID NO: 719810 - protein, 15 aa, Homo sapiens
  CDR3 for beta chain variable domain of TCR clone 359905 (TRBV5-1, TRBJ2-7)
CASSLNGGPAREQYF

SEQ ID NO: 719811 - protein, 16 aa, Homo sapiens
  CDR3 for alpha chain variable domain of TCR clone 359906 (TRAV30, TRAJ24)
CGTEIVDAASWGKFQF

SEQ ID NO: 719812 - protein, 14 aa, Homo sapiens
  CDR3 for beta chain variable domain of TCR clone 359906 (TRBV12-5, TRBJ2-5)
CASVSRTHQETQYF

SEQ ID NO: 719813 - protein, 12 aa, Homo sapiens
  CDR3 for alpha chain variable domain of TCR clone 359907 (TRAV4, TRAJ34)
CLVGEGTDKLIF

SEQ ID NO: 719814 - protein, 13 aa, Homo sapiens
  CDR3 for beta chain variable domain of TCR clone 359907 (TRBV2, TRBJ2-7)
CPTSMGLVYEQYF

SEQ ID NO: 719815 - protein, 12 aa, Homo sapiens
  CDR3 for alpha chain variable domain of TCR clone 359908 (TRAV12-1, TRAJ40)
FVVYSGTYKYIF

SEQ ID NO: 719816 - protein, 14 aa, Homo sapiens
  CDR3 for beta chain variable domain of TCR clone 359908 (TRBV7-6, TRBJ2-1)
CASSLGGGADEQFF

SEQ ID NO: 719817 - protein, 14 aa, Homo sapiens
  CDR3 for alpha chain variable domain of TCR clone 359909 (TRAV1-2, TRAJ8)
CAVREDTGFQKLVF

SEQ ID NO: 719818 - protein, 15 aa, Homo sapiens
  CDR3 for beta chain variable domain of TCR clone 359909 (TRBV7-9, TRBJ1-1)
CASSHRWTVNTEAFF

SEQ ID NO: 719819 - protein, 11 aa, Homo sapiens
  CDR3 for alpha chain variable domain of TCR clone 359910 (TRAV1-2, TRAJ40)
CAVPGTYKYIF

SEQ ID NO: 719820 - protein, 12 aa, Homo sapiens
  CDR3 for beta chain variable domain of TCR clone 359910 (TRBV6-5, TRBJ2-3)
CASSDTTDTQYF

SEQ ID NO: 719821 - protein, 10 aa, Homo sapiens
  CDR3 for alpha chain variable domain of TCR clone 359911 (TRAV12-2, TRAJ10)
CAAWTGVETH

SEQ ID NO: 719822 - protein, 14 aa, Homo sapiens
  CDR3 for beta chain variable domain of TCR clone 359911 (TRBV7-6, TRBJ2-3)
CASSLGTVTDTQYF

SEQ ID NO: 719823 - protein, 13 aa, Homo sapiens
  CDR3 for alpha chain variable domain of TCR clone 359912 (TRAV26-1, TRAJ36)
CIVVGTGANNLFF

SEQ ID NO: 719824 - protein, 13 aa, Homo sapiens
  CDR3 for beta chain variable domain of TCR clone 359912 (TRBV6-5, TRBJ2-6)
CASSTSGPPRLDF

SEQ ID NO: 719825 - protein, 16 aa, Homo sapiens
  CDR3 for alpha chain variable domain of TCR clone 359913 (TRAV13-1, TRAJ48)
CAASIFGNFGNEKLPF

SEQ ID NO: 719826 - protein, 13 aa, Homo sapiens
  CDR3 for beta chain variable domain of TCR clone 359913 (TRBV7-7, TRBJ2-3)
CASSLSRADTQYF

SEQ ID NO: 719827 - protein, 16 aa, Homo sapiens
  CDR3 for alpha chain variable domain of TCR clone 359914 (TRAV3, TRAJ37)
CAVRPHGSGNPGKLIF

SEQ ID NO: 719828 - protein, 17 aa, Homo sapiens
  CDR3 for beta chain variable domain of TCR clone 359914 (TRBV20-1, TRBJ2-1)
CSASSAGLAGSYNEQFF

SEQ ID NO: 719829 - protein, 14 aa, Homo sapiens
  CDR3 for alpha chain variable domain of TCR clone 359915 (TRAV12-3, TRAJ9)
CAMSVETGGFKTIF

SEQ ID NO: 719830 - protein, 13 aa, Homo sapiens
  CDR3 for beta chain variable domain of TCR clone 359915 (TRBV7-3, TRBJ1-1)
CASSQDWGAEAFF

SEQ ID NO: 719831 - protein, 16 aa, Homo sapiens
  CDR3 for alpha chain variable domain of TCR clone 359916 (TRAV3, TRAJ23)
YAVKIGIYNQGGKLIF

SEQ ID NO: 719832 - protein, 17 aa, Homo sapiens
  CDR3 for beta chain variable domain of TCR clone 359916 (TRBV10-3, TRBJ2-6)
CAISESTAPSGADVLTF

SEQ ID NO: 719833 - protein, 14 aa, Homo sapiens
  CDR3 for alpha chain variable domain of TCR clone 359917 (TRAV12-3, TRAJ10)
SHLPLTGGGNKLTF

SEQ ID NO: 719834 - protein, 13 aa, Homo sapiens
  CDR3 for beta chain variable domain of TCR clone 359917 (TRBV6-1, TRBJ2-1)
CASSPDRNNEQFF

SEQ ID NO: 719835 - protein, 13 aa, Homo sapiens
  CDR3 for alpha chain variable domain of TCR clone 359918 (TRAV13-1, TRAJ6)
CARGSGGSYIPTF

SEQ ID NO: 719836 - protein, 17 aa, Homo sapiens
  CDR3 for beta chain variable domain of TCR clone 359918 (TRBV10-3, TRBJ1-1)
CAISESGTGGGTTEAFF

SEQ ID NO: 719837 - protein, 15 aa, Homo sapiens
  CDR3 for alpha chain variable domain of TCR clone 359919 (TRAV2, TRAJ15)
CAVEDRGQAVTALIF

SEQ ID NO: 719838 - protein, 13 aa, Homo sapiens
  CDR3 for beta chain variable domain of TCR clone 359919 (TRBV10-2, TRBJ2-7)
CASGASGGYEQYF

SEQ ID NO: 719839 - protein, 14 aa, Homo sapiens
  CDR3 for alpha chain variable domain of TCR clone 359920 (TRAV23/DV6, TRAJ8)
CEASKATGFQKLDF

SEQ ID NO: 719840 - protein, 15 aa, Homo sapiens
  CDR3 for beta chain variable domain of TCR clone 359920 (TRBV28, TRBJ2-3)
CASSPDRQGANTQYF

SEQ ID NO: 719841 - protein, 14 aa, Homo sapiens
  CDR3 for alpha chain variable domain of TCR clone 359921 (TRAV12-1, TRAJ17)
CVVNSKAAGNKLTF

SEQ ID NO: 719842 - protein, 16 aa, Homo sapiens
  CDR3 for beta chain variable domain of TCR clone 359921 (TRBV12-4, TRBJ1-5)
CASSRPVGGSNQPQHF

SEQ ID NO: 719843 - protein, 13 aa, Homo sapiens
  CDR3 for alpha chain variable domain of TCR clone 359922 (TRAV12-1, TRAJ42)
CGGVGGSQGNLIF

SEQ ID NO: 719844 - protein, 14 aa, Homo sapiens
  CDR3 for beta chain variable domain of TCR clone 359922 (TRBV13, TRBJ2-5)
CASYRRLAEETQYF

SEQ ID NO: 719845 - protein, 13 aa, Homo sapiens
  CDR3 for alpha chain variable domain of TCR clone 359923 (TRAV8-3, TRAJ34)
CAVGGGNTDKLIF

SEQ ID NO: 719846 - protein, 13 aa, Homo sapiens
  CDR3 for beta chain variable domain of TCR clone 359923 (TRBV18, TRBJ1-1)
CASSGGRNTEAFF

SEQ ID NO: 719847 - protein, 14 aa, Homo sapiens
  CDR3 for alpha chain variable domain of TCR clone 359924 (TRAV26-1, TRAJ26)
CIVRATFLGQNFVF

SEQ ID NO: 719848 - protein, 16 aa, Homo sapiens
  CDR3 for beta chain variable domain of TCR clone 359924 (TRBV12-4, TRBJ2-7)
CASRSTGTGASYEQYF

SEQ ID NO: 719849 - protein, 11 aa, Homo sapiens
  CDR3 for alpha chain variable domain of TCR clone 359925 (TRAV21, TRAJ31)
CAVRNNARLMF

SEQ ID NO: 719850 - protein, 15 aa, Homo sapiens
  CDR3 for beta chain variable domain of TCR clone 359925 (TRBV2, TRBJ2-3)
CASSDFEKATDTQYF

SEQ ID NO: 719851 - protein, 14 aa, Homo sapiens
  CDR3 for alpha chain variable domain of TCR clone 359926 (TRAV12-2, TRAJ11)
CAVEGGSGSSTLTF

SEQ ID NO: 719852 - protein, 16 aa, Homo sapiens
  CDR3 for beta chain variable domain of TCR clone 359926 (TRBV6-1, TRBJ1-2)
CASSGAWQGRSHGYTF

SEQ ID NO: 719853 - protein, 14 aa, Homo sapiens
  CDR3 for alpha chain variable domain of TCR clone 359927 (TRAV3, TRAJ40)
CAVRDRRGTYKYTF

SEQ ID NO: 719854 - protein, 15 aa, Homo sapiens
  CDR3 for beta chain variable domain of TCR clone 359927 (TRBV11-1, TRBJ1-3)
CASTDPRAFGNTIYF

SEQ ID NO: 719855 - protein, 12 aa, Homo sapiens
  CDR3 for alpha chain variable domain of TCR clone 359928 (TRAV8-3, TRAJ20)
CAVGANDYKLSF

SEQ ID NO: 719856 - protein, 13 aa, Homo sapiens
  CDR3 for beta chain variable domain of TCR clone 359928 (TRBV4-1, TRBJ2-2)
CASSQENTGELFF

SEQ ID NO: 719857 - protein, 17 aa, Homo sapiens
  CDR3 for alpha chain variable domain of TCR clone 359929 (TRAV3, TRAJ6)
CAVRDGPRAGGSYIPTF

SEQ ID NO: 719858 - protein, 13 aa, Homo sapiens
  CDR3 for beta chain variable domain of TCR clone 359929 (TRBV19, TRBJ1-5)
CASSINFNQPQHF

SEQ ID NO: 719859 - protein, 13 aa, Homo sapiens
  CDR3 for alpha chain variable domain of TCR clone 359930 (TRAV3, TRAJ21)
CAVREPHFNKFYF

SEQ ID NO: 719860 - protein, 14 aa, Homo sapiens
  CDR3 for beta chain variable domain of TCR clone 359930 (TRBV4-1, TRBJ2-2)
CASSQAVNTGELFF

SEQ ID NO: 719861 - protein, 11 aa, Homo sapiens
  CDR3 for alpha chain variable domain of TCR clone 359931 (TRAV12-3, TRAJ43)
CAMSVSNDLRF

SEQ ID NO: 719862 - protein, 11 aa, Homo sapiens
  CDR3 for beta chain variable domain of TCR clone 359931 (TRBV29-1, TRBJ2-5)
CSEDRTGTQYF

SEQ ID NO: 719863 - protein, 13 aa, Homo sapiens
  CDR3 for alpha chain variable domain of TCR clone 359932 (TRAV13-1, TRAJ39)
CSKYSNAGNMLTF

SEQ ID NO: 719864 - protein, 16 aa, Homo sapiens
  CDR3 for beta chain variable domain of TCR clone 359932 (TRBV20-1, TRBJ1-4)
CSAPGQGLLTKEKLFF

SEQ ID NO: 719865 - protein, 12 aa, Homo sapiens
  CDR3 for alpha chain variable domain of TCR clone 359933 (TRAV12-3, TRAJ17)
CAMTLTGNKLTF

SEQ ID NO: 719866 - protein, 15 aa, Homo sapiens
  CDR3 for beta chain variable domain of TCR clone 359933 (TRBV11-3, TRBJ2-3)
CASSLRVGGSDTQYF

SEQ ID NO: 719867 - protein, 14 aa, Homo sapiens
  CDR3 for alpha chain variable domain of TCR clone 359934 (TRAV29/DV5, TRAJ44)
CAASATGTASKLTF

SEQ ID NO: 719868 - protein, 12 aa, Homo sapiens
  CDR3 for beta chain variable domain of TCR clone 359934 (TRBV11-2, TRBJ2-3)
CASSPPEDTQYF

SEQ ID NO: 719869 - protein, 14 aa, Homo sapiens
  CDR3 for alpha chain variable domain of TCR clone 359935 (TRAV2, TRAJ37)
CAVDFTSNTGKLIF

SEQ ID NO: 719870 - protein, 13 aa, Homo sapiens
  CDR3 for beta chain variable domain of TCR clone 359935 (TRBV7-8, TRBJ2-7)
CTSSFAGLYEQYF

SEQ ID NO: 719871 - protein, 13 aa, Homo sapiens
  CDR3 for alpha chain variable domain of TCR clone 359936 (TRAV12-2, TRAJ10)
CAVPSGGGNKLTF

SEQ ID NO: 719872 - protein, 11 aa, Homo sapiens
  CDR3 for beta chain variable domain of TCR clone 359936 (TRBV6-1, TRBJ2-1)
CASISSNEQFF

SEQ ID NO: 719873 - protein, 13 aa, Homo sapiens
  CDR3 for alpha chain variable domain of TCR clone 359937 (TRAV26-1, TRAJ29)
CIVRRSGNTPLVF

SEQ ID NO: 719874 - protein, 16 aa, Homo sapiens
  CDR3 for beta chain variable domain of TCR clone 359937 (TRBV11-2, TRBJ2-7)
CASSRAPTGVNYEQYF

SEQ ID NO: 719875 - protein, 18 aa, Homo sapiens
  CDR3 for alpha chain variable domain of TCR clone 359938 (TRAV3, TRAJ32)
CAVRDIRGYGGATNKLIF

SEQ ID NO: 719876 - protein, 10 aa, Homo sapiens
  CDR3 for beta chain variable domain of TCR clone 359938 (TRBV12-4, TRBJ2-2)
CASSLGVRHN

SEQ ID NO: 719877 - protein, 17 aa, Homo sapiens
  CDR3 for alpha chain variable domain of TCR clone 359939 (TRAV29/DV5, TRAJ21)
CAASNKFYFGSGTKLNV

SEQ ID NO: 719878 - protein, 16 aa, Homo sapiens
  CDR3 for beta chain variable domain of TCR clone 359939 (TRBV7-3, TRBJ2-1)
CASSLEGYRSYNEQFF

SEQ ID NO: 719879 - protein, 13 aa, Homo sapiens
  CDR3 for alpha chain variable domain of TCR clone 359940 (TRAV8-6, TRAJ50)
CAVIKTSYDKVIF

SEQ ID NO: 719880 - protein, 15 aa, Homo sapiens
  CDR3 for beta chain variable domain of TCR clone 359940 (TRBV7-2, TRBJ2-2)
CASRRPGQHTGELFF

SEQ ID NO: 719881 - protein, 15 aa, Homo sapiens
  CDR3 for alpha chain variable domain of TCR clone 359941 (TRAV8-3, TRAJ10)
CAVAVLTGGGNKLTF

SEQ ID NO: 719882 - protein, 14 aa, Homo sapiens
  CDR3 for beta chain variable domain of TCR clone 359941 (TRBV5-5, TRBJ1-5)
CASSGQGVDQPQHF

SEQ ID NO: 719883 - protein, 17 aa, Homo sapiens
  CDR3 for alpha chain variable domain of TCR clone 359942 (TRAV26-2, TRAJ52)
CILSSSSGGTSYGKLTF

SEQ ID NO: 719884 - protein, 17 aa, Homo sapiens
  CDR3 for beta chain variable domain of TCR clone 359942 (TRBV7-3, TRBJ2-3)
CASSPGGLAGFGDTQYF

SEQ ID NO: 719885 - protein, 15 aa, Homo sapiens
  CDR3 for alpha chain variable domain of TCR clone 359943 (TRAV8-4, TRAJ47)
CAVSDPEEYGNKLVF

SEQ ID NO: 719886 - protein, 15 aa, Homo sapiens
  CDR3 for beta chain variable domain of TCR clone 359943 (TRBV11-2, TRBJ2-1)
CARSLGPDSYNEQFF

SEQ ID NO: 719887 - protein, 13 aa, Homo sapiens
  CDR3 for alpha chain variable domain of TCR clone 359944 (TRAV12-2, TRAJ20)
CAVYPSNDYKLSF

SEQ ID NO: 719888 - protein, 17 aa, Homo sapiens
  CDR3 for beta chain variable domain of TCR clone 359944 (TRBV18, TRBJ2-2)
CASSQRSSGQGPGELFF

SEQ ID NO: 719889 - protein, 12 aa, Homo sapiens
  CDR3 for alpha chain variable domain of TCR clone 359945 (TRAV22, TRAJ22)
CAPGGSARQLTF

SEQ ID NO: 719890 - protein, 13 aa, Homo sapiens
  CDR3 for beta chain variable domain of TCR clone 359945 (TRBV15, TRBJ1-6)
WATSGGLNSPLHF

SEQ ID NO: 719891 - protein, 12 aa, Homo sapiens
  CDR3 for alpha chain variable domain of TCR clone 359946 (TRAV3, TRAJ43)
CCARGRNNDMRF

SEQ ID NO: 719892 - protein, 12 aa, Homo sapiens
  CDR3 for beta chain variable domain of TCR clone 359946 (TRBV5-1, TRBJ2-7)
CASSLDSYEQYF

SEQ ID NO: 719893 - protein, 16 aa, Homo sapiens
  CDR3 for alpha chain variable domain of TCR clone 359947 (TRAV21, TRAJ37)
CAVRTAGSSNTGKLIF

SEQ ID NO: 719894 - protein, 15 aa, Homo sapiens
  CDR3 for beta chain variable domain of TCR clone 359947 (TRBV7-2, TRBJ2-7)
CASSLAVGQVYEQYF

SEQ ID NO: 719895 - protein, 16 aa, Homo sapiens
  CDR3 for alpha chain variable domain of TCR clone 359948 (TRAV12-2, TRAJ32)
CAVNLGQGGATYKLIF

SEQ ID NO: 719896 - protein, 17 aa, Homo sapiens
  CDR3 for beta chain variable domain of TCR clone 359948 (TRBV7-9, TRBJ2-1)
CASSLVASYPSYNEQFF

SEQ ID NO: 719897 - protein, 12 aa, Homo sapiens
  CDR3 for alpha chain variable domain of TCR clone 359949 (TRAV8-4, TRAJ43)
CAVSVNNNDMGF

SEQ ID NO: 719898 - protein, 14 aa, Homo sapiens
  CDR3 for beta chain variable domain of TCR clone 359949 (TRBV11-2, TRBJ1-2)
CASSLGTANYGYTF

SEQ ID NO: 719899 - protein, 19 aa, Homo sapiens
  CDR3 for alpha chain variable domain of TCR clone 359950 (TRAV1-2, TRAJ26)
CLLPLCCERPDNYGQNFVF

SEQ ID NO: 719900 - protein, 13 aa, Homo sapiens
  CDR3 for beta chain variable domain of TCR clone 359950 (TRBV20-1, TRBJ2-5)
CSARGDYQETQYF

SEQ ID NO: 719901 - protein, 15 aa, Homo sapiens
  CDR3 for alpha chain variable domain of TCR clone 359951 (TRAV3, TRAJ11)
CAVRDRGSGYSTLTF

SEQ ID NO: 719902 - protein, 20 aa, Homo sapiens
  CDR3 for beta chain variable domain of TCR clone 359951 (TRBV28, TRBJ2-1)
CASTPIGRSPGLAGGNEQFF

SEQ ID NO: 719903 - protein, 12 aa, Homo sapiens
  CDR3 for alpha chain variable domain of TCR clone 359952 (TRAV21, TRAJ23)
CAVMLQGGKLIF

SEQ ID NO: 719904 - protein, 14 aa, Homo sapiens
  CDR3 for beta chain variable domain of TCR clone 359952 (TRBV5-4, TRBJ1-1)
CASSLDSRRDEAFF

SEQ ID NO: 719905 - protein, 17 aa, Homo sapiens
  CDR3 for alpha chain variable domain of TCR clone 359953 (TRAV4, TRAJ18)
CLVGERSVGTTLGRLYF

SEQ ID NO: 719906 - protein, 16 aa, Homo sapiens
  CDR3 for beta chain variable domain of TCR clone 359953 (TRBV19, TRBJ2-1)
CASSKAGPSSYNEQFF

SEQ ID NO: 719907 - protein, 14 aa, Homo sapiens
  CDR3 for alpha chain variable domain of TCR clone 359954 (TRAV35, TRAJ22)
CAGLRLGSARQLTF

SEQ ID NO: 719908 - protein, 15 aa, Homo sapiens
  CDR3 for beta chain variable domain of TCR clone 359954 (TRBV12-4, TRBJ2-5)
CACSPPTGLQETQYF

SEQ ID NO: 719909 - protein, 13 aa, Homo sapiens
  CDR3 for alpha chain variable domain of TCR clone 359955 (TRAV12-1, TRAJ33)
CGDAPDSNYQLIW

SEQ ID NO: 719910 - protein, 15 aa, Homo sapiens
  CDR3 for beta chain variable domain of TCR clone 359955 (TRBV6-3, TRBJ2-7)
CASSSPGTVFYEQYF

SEQ ID NO: 719911 - protein, 15 aa, Homo sapiens
  CDR3 for alpha chain variable domain of TCR clone 359956 (TRAV38-1, TRAJ37)
CAFILVSGNTGKLIF

SEQ ID NO: 719912 - protein, 12 aa, Homo sapiens
  CDR3 for beta chain variable domain of TCR clone 359956 (TRBV7-9, TRBJ2-7)
CASSLEGYEQYF

SEQ ID NO: 719913 - protein, 18 aa, Homo sapiens
  CDR3 for alpha chain variable domain of TCR clone 359957 (TRAV13-1, TRAJ52)
CAAKNPNAGGTSYGKLTF

SEQ ID NO: 719914 - protein, 13 aa, Homo sapiens
  CDR3 for beta chain variable domain of TCR clone 359957 (TRBV20-1, TRBJ1-1)
CGARGGGNTEAFC

SEQ ID NO: 719915 - protein, 15 aa, Homo sapiens
  CDR3 for alpha chain variable domain of TCR clone 359958 (TRAV13-2, TRAJ58)
CVTAQKETSGSRLTF

SEQ ID NO: 719916 - protein, 14 aa, Homo sapiens
  CDR3 for beta chain variable domain of TCR clone 359958 (TRBV7-2, TRBJ2-3)
CAGRRGLAADTQYF

SEQ ID NO: 719917 - protein, 12 aa, Homo sapiens
  CDR3 for alpha chain variable domain of TCR clone 359959 (TRAV12-3, TRAJ4)
CAMTGAVTRLAV

SEQ ID NO: 719918 - protein, 14 aa, Homo sapiens
  CDR3 for beta chain variable domain of TCR clone 359959 (TRBV10-3, TRBJ1-1)
CAISDTDRGVEAFF

SEQ ID NO: 719919 - protein, 17 aa, Homo sapiens
  CDR3 for alpha chain variable domain of TCR clone 359960 (TRAV3, TRAJ38)
CAVRDCLNAGNNRKLIW

SEQ ID NO: 719920 - protein, 13 aa, Homo sapiens
  CDR3 for beta chain variable domain of TCR clone 359960 (TRBV11-3, TRBJ2-7)
CASSLDKLYEQYF

SEQ ID NO: 719921 - protein, 14 aa, Homo sapiens
  CDR3 for alpha chain variable domain of TCR clone 359961 (TRAV1-2, TRAJ8)
CAVIEDTGFQKLVV

SEQ ID NO: 719922 - protein, 14 aa, Homo sapiens
  CDR3 for beta chain variable domain of TCR clone 359961 (TRBV7-8, TRBJ2-3)
CASSLEAGTDTQYF

SEQ ID NO: 719923 - protein, 15 aa, Homo sapiens
  CDR3 for alpha chain variable domain of TCR clone 359962 (TRAV26-1, TRAJ47)
CIVRVGWGYGNKLVL

SEQ ID NO: 719924 - protein, 13 aa, Homo sapiens
  CDR3 for beta chain variable domain of TCR clone 359962 (TRBV20-1, TRBJ2-7)
CSARGDTQDEQYF

SEQ ID NO: 719925 - protein, 11 aa, Homo sapiens
  CDR3 for alpha chain variable domain of TCR clone 359963 (TRAV3, TRAJ21)
CAVGNFNKFYF

SEQ ID NO: 719926 - protein, 16 aa, Homo sapiens
  CDR3 for beta chain variable domain of TCR clone 359963 (TRBV19, TRBJ2-1)
CASSKAGPRSYNEQFF

SEQ ID NO: 719927 - protein, 14 aa, Homo sapiens
  CDR3 for alpha chain variable domain of TCR clone 359964 (TRAV26-1, TRAJ49)
CIVRPSNTGNQFYF

SEQ ID NO: 719928 - protein, 15 aa, Homo sapiens
  CDR3 for beta chain variable domain of TCR clone 359964 (TRBV19, TRBJ1-1)
CASMGFRDVNTKAFF

SEQ ID NO: 719929 - protein, 15 aa, Homo sapiens
  CDR3 for alpha chain variable domain of TCR clone 359965 (TRAV13-1, TRAJ32)
CAASIYGRATNKLIF

SEQ ID NO: 719930 - protein, 17 aa, Homo sapiens
  CDR3 for beta chain variable domain of TCR clone 359965 (TRBV7-3, TRBJ2-5)
CASSLGSGRSGSETQYF

SEQ ID NO: 719931 - protein, 12 aa, Homo sapiens
  CDR3 for alpha chain variable domain of TCR clone 359966 (TRAV12-3, TRAJ17)
CAMTFTGNQLTF

SEQ ID NO: 719932 - protein, 15 aa, Homo sapiens
  CDR3 for beta chain variable domain of TCR clone 359966 (TRBV20-1, TRBJ2-7)
CSARDRVSGMDEQYF

SEQ ID NO: 719933 - protein, 13 aa, Homo sapiens
  CDR3 for alpha chain variable domain of TCR clone 359967 (TRAV12-1, TRAJ7)
CVVNMRGNNRLAF

SEQ ID NO: 719934 - protein, 18 aa, Homo sapiens
  CDR3 for beta chain variable domain of TCR clone 359967 (TRBV7-3, TRBJ2-5)
CASSFRGGGDPVLRARHA

SEQ ID NO: 719935 - protein, 13 aa, Homo sapiens
  CDR3 for alpha chain variable domain of TCR clone 359968 (TRAV2, TRAJ24)
CAASTDSWGNLQF

SEQ ID NO: 719936 - protein, 14 aa, Homo sapiens
  CDR3 for beta chain variable domain of TCR clone 359968 (TRBV13, TRBJ2-5)
CASSLGTAQETQYF

SEQ ID NO: 719937 - protein, 15 aa, Homo sapiens
  CDR3 for alpha chain variable domain of TCR clone 359969 (TRAV4, TRAJ10)
CLVGYGSGGGNKPTF

SEQ ID NO: 719938 - protein, 15 aa, Homo sapiens
  CDR3 for beta chain variable domain of TCR clone 359969 (TRBV27, TRBJ2-3)
CASSSLAGVIDTQYF

SEQ ID NO: 719939 - protein, 23 aa, Homo sapiens
  CDR3 for alpha chain variable domain of TCR clone 359970 (TRAV12-2, TRAJ36)
SLLIRDSQPSDSATPERANNLFF

SEQ ID NO: 719940 - protein, 17 aa, Homo sapiens
  CDR3 for beta chain variable domain of TCR clone 359970 (TRBV3-1, TRBJ2-3)
CASSQLLDRGHTDTQYF

SEQ ID NO: 719941 - protein, 19 aa, Homo sapiens
  CDR3 for alpha chain variable domain of TCR clone 359971 (TRAV26-1, TRAJ52)
CIVRVANNAGGTSYGKLTF

SEQ ID NO: 719942 - protein, 14 aa, Homo sapiens
  CDR3 for beta chain variable domain of TCR clone 359971 (TRBV19, TRBJ1-2)
CASSIGAGSYCYTF

SEQ ID NO: 719943 - protein, 10 aa, Homo sapiens
  CDR3 for alpha chain variable domain of TCR clone 359972 (TRAV21, TRAJ30)
CAFGDDKIIF

SEQ ID NO: 719944 - protein, 17 aa, Homo sapiens
  CDR3 for beta chain variable domain of TCR clone 359972 (TRBV5-7, TRBJ2-1)
CASSFGLAGPAYNEQFF

SEQ ID NO: 719945 - protein, 16 aa, Homo sapiens
  CDR3 for alpha chain variable domain of TCR clone 359973 (TRAV3, TRAJ10)
CAVRDMRAGGGSKLTF

SEQ ID NO: 719946 - protein, 12 aa, Homo sapiens
  CDR3 for beta chain variable domain of TCR clone 359973 (TRBV20-1, TRBJ2-7)
CSAGLKMGEQYF

SEQ ID NO: 719947 - protein, 12 aa, Homo sapiens
  CDR3 for alpha chain variable domain of TCR clone 359974 (TRAV27, TRAJ35)
CAGADFGKLLHC

SEQ ID NO: 719948 - protein, 16 aa, Homo sapiens
  CDR3 for beta chain variable domain of TCR clone 359974 (TRBV6-1, TRBJ2-1)
CASILRQGSSYNEQFF

SEQ ID NO: 719949 - protein, 14 aa, Homo sapiens
  CDR3 for alpha chain variable domain of TCR clone 359975 (TRAV1-2, TRAJ8)
CAVREDTGFQKLVF

SEQ ID NO: 719950 - protein, 14 aa, Homo sapiens
  CDR3 for beta chain variable domain of TCR clone 359975 (TRBV5-1, TRBJ1-4)
CASSLDRTHEKLFF

SEQ ID NO: 719951 - protein, 16 aa, Homo sapiens
  CDR3 for alpha chain variable domain of TCR clone 359976 (TRAV3, TRAJ37)
CAVRGKGSGNTGKLIF

SEQ ID NO: 719952 - protein, 15 aa, Homo sapiens
  CDR3 for beta chain variable domain of TCR clone 359976 (TRBV20-1, TRBJ2-1)
CSARGGTRYYNEQLF

SEQ ID NO: 719953 - protein, 15 aa, Homo sapiens
  CDR3 for alpha chain variable domain of TCR clone 359977 (TRAV26-2, TRAJ54)
CILRDVGQGAQKLVF

SEQ ID NO: 719954 - protein, 14 aa, Homo sapiens
  CDR3 for beta chain variable domain of TCR clone 359977 (TRBV7-3, TRBJ2-1)
CASSLAGGTNEQFF

SEQ ID NO: 719955 - protein, 14 aa, Homo sapiens
  CDR3 for alpha chain variable domain of TCR clone 359978 (TRAV1-2, TRAJ16)
CTVNRFSDGQKLLF

SEQ ID NO: 719956 - protein, 12 aa, Homo sapiens
  CDR3 for beta chain variable domain of TCR clone 359978 (TRBV11-2, TRBJ2-2)
CASSLGGGELFF

SEQ ID NO: 719957 - protein, 10 aa, Homo sapiens
  CDR3 for alpha chain variable domain of TCR clone 359979 (TRAV30, TRAJ24)
DADSWGKFQF

SEQ ID NO: 719958 - protein, 16 aa, Homo sapiens
  CDR3 for beta chain variable domain of TCR clone 359979 (TRBV7-3, TRBJ2-2)
CASSLKRGTLSGELFF

SEQ ID NO: 719959 - protein, 16 aa, Homo sapiens
  CDR3 for alpha chain variable domain of TCR clone 359980 (TRAV17, TRAJ53)
CATDALSGGSNYKLTF

SEQ ID NO: 719960 - protein, 15 aa, Homo sapiens
  CDR3 for beta chain variable domain of TCR clone 359980 (TRBV20-1, TRBJ2-7)
CSARDRGSGMDEQYF

SEQ ID NO: 719961 - protein, 15 aa, Homo sapiens
  CDR3 for alpha chain variable domain of TCR clone 359981 (TRAV26-2, TRAJ13)
CILRDLSGGYQKFTF

SEQ ID NO: 719962 - protein, 11 aa, Homo sapiens
  CDR3 for beta chain variable domain of TCR clone 359981 (TRBV7-9, TRBJ2-3)
CASSYTDTQYF

SEQ ID NO: 719963 - protein, 14 aa, Homo sapiens
  CDR3 for alpha chain variable domain of TCR clone 359982 (TRAV21, TRAJ36)
CAVPDQTGANNLFF

SEQ ID NO: 719964 - protein, 18 aa, Homo sapiens
  CDR3 for beta chain variable domain of TCR clone 359982 (TRBV12-4, TRBJ2-2)
CASSLVAGTRGRTGELFF

SEQ ID NO: 719965 - protein, 14 aa, Homo sapiens
  CDR3 for alpha chain variable domain of TCR clone 359983 (TRAV26-2, TRAJ31)
CILIPGNNNARPMF

SEQ ID NO: 719966 - protein, 14 aa, Homo sapiens
  CDR3 for beta chain variable domain of TCR clone 359983 (TRBV7-3, TRBJ1-1)
CASSFLTGTTEAFF

SEQ ID NO: 719967 - protein, 14 aa, Homo sapiens
  CDR3 for alpha chain variable domain of TCR clone 359984 (TRAV26-1, TRAJ45)
CIVRVVGDADGLTF

SEQ ID NO: 719968 - protein, 16 aa, Homo sapiens
  CDR3 for beta chain variable domain of TCR clone 359984 (TRBV7-9, TRBJ1-1)
CASSLTQVRSNTEAFF

SEQ ID NO: 719969 - protein, 15 aa, Homo sapiens
  CDR3 for alpha chain variable domain of TCR clone 359985 (TRAV12-1, TRAJ44)
CVVFVNTGTASKLTF

SEQ ID NO: 719970 - protein, 13 aa, Homo sapiens
  CDR3 for beta chain variable domain of TCR clone 359985 (TRBV7-3, TRBJ1-1)
CASSQDWGAEAFF

SEQ ID NO: 719971 - protein, 14 aa, Homo sapiens
  CDR3 for alpha chain variable domain of TCR clone 359986 (TRAV35, TRAJ33)
CAGSSQDSNYQLIW

SEQ ID NO: 719972 - protein, 13 aa, Homo sapiens
  CDR3 for beta chain variable domain of TCR clone 359986 (TRBV20-1, TRBJ1-1)
CSAPLGGGTEAFF

SEQ ID NO: 719973 - protein, 14 aa, Homo sapiens
  CDR3 for alpha chain variable domain of TCR clone 359987 (TRAV8-3, TRAJ4)
CAVGAAGGYNKLIF

SEQ ID NO: 719974 - protein, 15 aa, Homo sapiens
  CDR3 for beta chain variable domain of TCR clone 359987 (TRBV6-5, TRBJ2-1)
CASSYDAGARNEQFF

SEQ ID NO: 719975 - protein, 16 aa, Homo sapiens
  CDR3 for alpha chain variable domain of TCR clone 359988 (TRAV3, TRAJ37)
CAVRGKGSGNTGKLIF

SEQ ID NO: 719976 - protein, 16 aa, Homo sapiens
  CDR3 for beta chain variable domain of TCR clone 359988 (TRBV2, TRBJ2-4)
CASSEAPGWEQNIQYF

SEQ ID NO: 719977 - protein, 21 aa, Homo sapiens
  CDR3 for alpha chain variable domain of TCR clone 359989 (TRAV1-2, TRAJ9)
CAALNTEASKLSLEQEQDYLL

SEQ ID NO: 719978 - protein, 13 aa, Homo sapiens
  CDR3 for beta chain variable domain of TCR clone 359989 (TRBV19, TRBJ1-2)
CASSVPGQDGYTV

SEQ ID NO: 719979 - protein, 20 aa, Homo sapiens
  CDR3 for alpha chain variable domain of TCR clone 359990 (TRAV21, TRAJ4)
AASQPGDSATLAGGYNKLIF

SEQ ID NO: 719980 - protein, 19 aa, Homo sapiens
  CDR3 for beta chain variable domain of TCR clone 359990 (TRBV18, TRBJ1-3)
CASSPPSRTGMSSGNTMYF

SEQ ID NO: 719981 - protein, 11 aa, Homo sapiens
  CDR3 for alpha chain variable domain of TCR clone 359991 (TRAV17, TRAJ9)
CATTGGFKTIF

SEQ ID NO: 719982 - protein, 11 aa, Homo sapiens
  CDR3 for beta chain variable domain of TCR clone 359991 (TRBV11-2, TRBJ2-2)
CASSLPGELFF

SEQ ID NO: 719983 - protein, 12 aa, Homo sapiens
  CDR3 for alpha chain variable domain of TCR clone 359992 (TRAV25, TRAJ54)
CAGGRGAQKLVF

SEQ ID NO: 719984 - protein, 12 aa, Homo sapiens
  CDR3 for beta chain variable domain of TCR clone 359992 (TRBV7-8, TRBJ2-7)
CASSLGDREQYF

SEQ ID NO: 719985 - protein, 13 aa, Homo sapiens
  CDR3 for alpha chain variable domain of TCR clone 359993 (TRAV8-6, TRAJ49)
CAVITNTGNQFYF

SEQ ID NO: 719986 - protein, 11 aa, Homo sapiens
  CDR3 for beta chain variable domain of TCR clone 359993 (TRBV6-5, TRBJ2-2)
CASSRIGELFF

SEQ ID NO: 719987 - protein, 13 aa, Homo sapiens
  CDR3 for alpha chain variable domain of TCR clone 359994 (TRAV12-2, TRAJ6)
CAVNVSMKLHTYI

SEQ ID NO: 719988 - protein, 12 aa, Homo sapiens
  CDR3 for beta chain variable domain of TCR clone 359994 (TRBV29-1, TRBJ2-3)
CSVTGGADTQYF

SEQ ID NO: 719989 - protein, 16 aa, Homo sapiens
  CDR3 for alpha chain variable domain of TCR clone 359995 (TRAV35, TRAJ52)
CAGQGSCGTSYGKLTF

SEQ ID NO: 719990 - protein, 17 aa, Homo sapiens
  CDR3 for beta chain variable domain of TCR clone 359995 (TRBV13, TRBJ2-3)
CASSLSRVAGGRNTQYF

SEQ ID NO: 719991 - protein, 15 aa, Homo sapiens
  CDR3 for alpha chain variable domain of TCR clone 359996 (TRAV35, TRAJ24)
CAGQSAQGSWGKLQF

SEQ ID NO: 719992 - protein, 17 aa, Homo sapiens
  CDR3 for beta chain variable domain of TCR clone 359996 (TRBV7-8, TRBJ2-6)
CASSAGTGGAGANVLTF

SEQ ID NO: 719993 - protein, 12 aa, Homo sapiens
  CDR3 for alpha chain variable domain of TCR clone 359997 (TRAV26-1, TRAJ46)
SEKKSSGDKLTF

SEQ ID NO: 719994 - protein, 16 aa, Homo sapiens
  CDR3 for beta chain variable domain of TCR clone 359997 (TRBV27, TRBJ2-2)
CASSFRGLVRTGELFF

SEQ ID NO: 719995 - protein, 16 aa, Homo sapiens
  CDR3 for alpha chain variable domain of TCR clone 359998 (TRAV13-2, TRAJ37)
CAENIRGSSNTGKLIF

SEQ ID NO: 719996 - protein, 15 aa, Homo sapiens
  CDR3 for beta chain variable domain of TCR clone 359998 (TRBV5-1, TRBJ2-7)
CASSPQGRPLDGQYF

SEQ ID NO: 719997 - protein, 13 aa, Homo sapiens
  CDR3 for alpha chain variable domain of TCR clone 359999 (TRAV27, TRAJ49)
CAPRPYTGNQFYF

SEQ ID NO: 719998 - protein, 16 aa, Homo sapiens
  CDR3 for beta chain variable domain of TCR clone 359999 (TRBV4-1, TRBJ1-2)
CASSQDVGQVLYGYTF

SEQ ID NO: 719999 - protein, 15 aa, Homo sapiens
  CDR3 for alpha chain variable domain of TCR clone 360000 (TRAV12-3, TRAJ4)
CAMPRGSGGYNKLIF

SEQ ID NO: 720000 - protein, 14 aa, Homo sapiens
  CDR3 for beta chain variable domain of TCR clone 360000 (TRBV4-3, TRBJ2-3)
CASSQAETVDTQYF

SEQ ID NO: 720001 - protein, 18 aa, Homo sapiens
  CDR3 for alpha chain variable domain of TCR clone 360001 (TRAV26-2, TRAJ33)
CCVLLHPEEPASNYQLIW

SEQ ID NO: 720002 - protein, 12 aa, Homo sapiens
  CDR3 for beta chain variable domain of TCR clone 360001 (TRBV7-8, TRBJ2-7)
CASSLGDREQYF

SEQ ID NO: 720003 - protein, 13 aa, Homo sapiens
  CDR3 for alpha chain variable domain of TCR clone 360002 (TRAV12-2, TRAJ7)
CAVNLYGNNRLAF

SEQ ID NO: 720004 - protein, 14 aa, Homo sapiens
  CDR3 for beta chain variable domain of TCR clone 360002 (TRBV25-1, TRBJ1-2)
CASSEATGPYGYSF

SEQ ID NO: 720005 - protein, 14 aa, Homo sapiens
  CDR3 for alpha chain variable domain of TCR clone 360003 (TRAV12-2, TRAJ13)
CAVKKTGGYQKVTF

SEQ ID NO: 720006 - protein, 14 aa, Homo sapiens
  CDR3 for beta chain variable domain of TCR clone 360003 (TRBV7-9, TRBJ1-6)
CASKPGTVNSPLHF

SEQ ID NO: 720007 - protein, 12 aa, Homo sapiens
  CDR3 for alpha chain variable domain of TCR clone 360004 (TRAV12-3, TRAJ17)
CAMTLTGNKLTF

SEQ ID NO: 720008 - protein, 14 aa, Homo sapiens
  CDR3 for beta chain variable domain of TCR clone 360004 (TRBV5-7, TRBJ2-1)
CASSSVANYNEQFF

SEQ ID NO: 720009 - protein, 11 aa, Homo sapiens
  CDR3 for alpha chain variable domain of TCR clone 360005 (TRAV2, TRAJ13)
CASGGYQKVTF

SEQ ID NO: 720010 - protein, 14 aa, Homo sapiens
  CDR3 for beta chain variable domain of TCR clone 360005 (TRBV18, TRBJ1-2)
CASSPDRVVYGYAF

SEQ ID NO: 720011 - protein, 15 aa, Homo sapiens
  CDR3 for alpha chain variable domain of TCR clone 360006 (TRAV8-1, TRAJ6)
CAVNAGAGGIYIPTF

SEQ ID NO: 720012 - protein, 14 aa, Homo sapiens
  CDR3 for beta chain variable domain of TCR clone 360006 (TRBV25-1, TRBJ1-6)
CASSLSADISPLHF

SEQ ID NO: 720013 - protein, 14 aa, Homo sapiens
  CDR3 for alpha chain variable domain of TCR clone 360007 (TRAV8-3, TRAJ37)
CAVGSSGNTGKLIF

SEQ ID NO: 720014 - protein, 13 aa, Homo sapiens
  CDR3 for beta chain variable domain of TCR clone 360007 (TRBV10-2, TRBJ2-7)
CASGTSGGYEQYF

SEQ ID NO: 720015 - protein, 14 aa, Homo sapiens
  CDR3 for alpha chain variable domain of TCR clone 360008 (TRAV12-2, TRAJ13)
CAVKKTGGYQKDTF

SEQ ID NO: 720016 - protein, 16 aa, Homo sapiens
  CDR3 for beta chain variable domain of TCR clone 360008 (TRBV4-1, TRBJ2-3)
CASSQSTSGAEDTQYF

SEQ ID NO: 720017 - protein, 15 aa, Homo sapiens
  CDR3 for alpha chain variable domain of TCR clone 360009 (TRAV4, TRAJ26)
CLVGDMNNYGQNFVF

SEQ ID NO: 720018 - protein, 16 aa, Homo sapiens
  CDR3 for beta chain variable domain of TCR clone 360009 (TRBV28, TRBJ1-4)
CASSSRTGAANETLFF

SEQ ID NO: 720019 - protein, 14 aa, Homo sapiens
  CDR3 for alpha chain variable domain of TCR clone 360010 (TRAV34, TRAJ44)
CGADGTGTASKLTF

SEQ ID NO: 720020 - protein, 20 aa, Homo sapiens
  CDR3 for beta chain variable domain of TCR clone 360010 (TRBV19, TRBJ2-1)
CASSISRTVTSTRLNNEQFF

SEQ ID NO: 720021 - protein, 13 aa, Homo sapiens
  CDR3 for alpha chain variable domain of TCR clone 360011 (TRAV26-2, TRAJ43)
CILRAVNNNDMRF

SEQ ID NO: 720022 - protein, 16 aa, Homo sapiens
  CDR3 for beta chain variable domain of TCR clone 360011 (TRBV7-3, TRBJ2-2)
CASSLTGTGTTGELFF

SEQ ID NO: 720023 - protein, 15 aa, Homo sapiens
  CDR3 for alpha chain variable domain of TCR clone 360012 (TRAV3, TRAJ5)
CAVRDLDTGWRALTF

SEQ ID NO: 720024 - protein, 14 aa, Homo sapiens
  CDR3 for beta chain variable domain of TCR clone 360012 (TRBV20-1, TRBJ1-1)
CSAQTRIGGTEAFF

SEQ ID NO: 720025 - protein, 15 aa, Homo sapiens
  CDR3 for alpha chain variable domain of TCR clone 360013 (TRAV26-1, TRAJ44)
CIVRANTGTASKLTF

SEQ ID NO: 720026 - protein, 15 aa, Homo sapiens
  CDR3 for beta chain variable domain of TCR clone 360013 (TRBV7-7, TRBJ2-5)
CASSFLRGGEETQYF

SEQ ID NO: 720027 - protein, 17 aa, Homo sapiens
  CDR3 for alpha chain variable domain of TCR clone 360014 (TRAV21, TRAJ52)
CAVRVNAGGTSYGKLTF

SEQ ID NO: 720028 - protein, 15 aa, Homo sapiens
  CDR3 for beta chain variable domain of TCR clone 360014 (TRBV18, TRBJ1-1)
CASSPRQGENTEAFF

SEQ ID NO: 720029 - protein, 14 aa, Homo sapiens
  CDR3 for alpha chain variable domain of TCR clone 360015 (TRAV8-3, TRAJ4)
CAVGAAGGYNKLIF

SEQ ID NO: 720030 - protein, 15 aa, Homo sapiens
  CDR3 for beta chain variable domain of TCR clone 360015 (TRBV15, TRBJ2-2)
CATSRGLADTGELFF

SEQ ID NO: 720031 - protein, 12 aa, Homo sapiens
  CDR3 for alpha chain variable domain of TCR clone 360016 (TRAV1-1, TRAJ8)
CAGGTGFQKLVF

SEQ ID NO: 720032 - protein, 14 aa, Homo sapiens
  CDR3 for beta chain variable domain of TCR clone 360016 (TRBV4-1, TRBJ2-2)
CASSLTENTGELFF

SEQ ID NO: 720033 - protein, 14 aa, Homo sapiens
  CDR3 for alpha chain variable domain of TCR clone 360017 (TRAV26-1, TRAJ48)
CIVRVGFGNEKLTF

SEQ ID NO: 720034 - protein, 13 aa, Homo sapiens
  CDR3 for beta chain variable domain of TCR clone 360017 (TRBV11-3, TRBJ2-3)
CASSHETKDTQYF

SEQ ID NO: 720035 - protein, 15 aa, Homo sapiens
  CDR3 for alpha chain variable domain of TCR clone 360018 (TRAV38-2/DV8, TRAJ26)
CAYRSRDNCGQNFVF

SEQ ID NO: 720036 - protein, 14 aa, Homo sapiens
  CDR3 for beta chain variable domain of TCR clone 360018 (TRBV29-1, TRBJ1-3)
CSVADRVVGNTIYF

SEQ ID NO: 720037 - protein, 16 aa, Homo sapiens
  CDR3 for alpha chain variable domain of TCR clone 360019 (TRAV8-3, TRAJ44)
CAVGTLMTGTASKLTF

SEQ ID NO: 720038 - protein, 13 aa, Homo sapiens
  CDR3 for beta chain variable domain of TCR clone 360019 (TRBV11-2, TRBJ2-1)
CASSLRLTHGKFF

SEQ ID NO: 720039 - protein, 13 aa, Homo sapiens
  CDR3 for alpha chain variable domain of TCR clone 360020 (TRAV8-3, TRAJ48)
CAVVPFGIEKLTF

SEQ ID NO: 720040 - protein, 19 aa, Homo sapiens
  CDR3 for beta chain variable domain of TCR clone 360020 (TRBV25-1, TRBJ2-2)
CAILVYRVDRGRKTGELFF

SEQ ID NO: 720041 - protein, 14 aa, Homo sapiens
  CDR3 for alpha chain variable domain of TCR clone 360021 (TRAV1-2, TRAJ16)
CAVNRFSDGKKLLF

SEQ ID NO: 720042 - protein, 14 aa, Homo sapiens
  CDR3 for beta chain variable domain of TCR clone 360021 (TRBV20-1, TRBJ1-1)
CSARTRIGGTEAFF

SEQ ID NO: 720043 - protein, 16 aa, Homo sapiens
  CDR3 for alpha chain variable domain of TCR clone 360022 (TRAV38-1, TRAJ32)
CAFMPFLGGATNKLIF

SEQ ID NO: 720044 - protein, 16 aa, Homo sapiens
  CDR3 for beta chain variable domain of TCR clone 360022 (TRBV4-1, TRBJ2-1)
CASSQEAGQGSDEQFF

SEQ ID NO: 720045 - protein, 16 aa, Homo sapiens
  CDR3 for alpha chain variable domain of TCR clone 360023 (TRAV29/DV5, TRAJ22)
CAACSRDSGSARQLTF

SEQ ID NO: 720046 - protein, 13 aa, Homo sapiens
  CDR3 for beta chain variable domain of TCR clone 360023 (TRBV2, TRBJ1-6)
CASGRGGISPLHF

SEQ ID NO: 720047 - protein, 12 aa, Homo sapiens
  CDR3 for alpha chain variable domain of TCR clone 360024 (TRAV12-3, TRAJ42)
CAPGGSQGNLIF

SEQ ID NO: 720048 - protein, 13 aa, Homo sapiens
  CDR3 for beta chain variable domain of TCR clone 360024 (TRBV5-7, TRBJ2-6)
CASTSSGANVLTY

SEQ ID NO: 720049 - protein, 12 aa, Homo sapiens
  CDR3 for alpha chain variable domain of TCR clone 360025 (TRAV3, TRAJ27)
CAVRDKAGKSTF

SEQ ID NO: 720050 - protein, 12 aa, Homo sapiens
  CDR3 for beta chain variable domain of TCR clone 360025 (TRBV7-8, TRBJ2-7)
CASSLGDREQYF

SEQ ID NO: 720051 - protein, 14 aa, Homo sapiens
  CDR3 for alpha chain variable domain of TCR clone 360026 (TRAV29/DV5, TRAJ36)
CAARRKTGANNLFC

SEQ ID NO: 720052 - protein, 12 aa, Homo sapiens
  CDR3 for beta chain variable domain of TCR clone 360026 (TRBV12-5, TRBJ2-5)
CASGQGVETQYF

SEQ ID NO: 720053 - protein, 15 aa, Homo sapiens
  CDR3 for alpha chain variable domain of TCR clone 360027 (TRAV26-1, TRAJ38)
CIASSNAGNNRKLIW

SEQ ID NO: 720054 - protein, 12 aa, Homo sapiens
  CDR3 for beta chain variable domain of TCR clone 360027 (TRBV5-8, TRBJ1-2)
CASSFGVYGYSF

SEQ ID NO: 720055 - protein, 13 aa, Homo sapiens
  CDR3 for alpha chain variable domain of TCR clone 360028 (TRAV27, TRAJ28)
CAISGAGSYQLTF

SEQ ID NO: 720056 - protein, 17 aa, Homo sapiens
  CDR3 for beta chain variable domain of TCR clone 360028 (TRBV13, TRBJ2-3)
CASSLSRVAGGRNTQYF

SEQ ID NO: 720057 - protein, 14 aa, Homo sapiens
  CDR3 for alpha chain variable domain of TCR clone 360029 (TRAV12-3, TRAJ9)
CAMSPNTGGFKTIF

SEQ ID NO: 720058 - protein, 12 aa, Homo sapiens
  CDR3 for beta chain variable domain of TCR clone 360029 (TRBV12-4, TRBJ2-7)
CASSLGGYEQYF

SEQ ID NO: 720059 - protein, 15 aa, Homo sapiens
  CDR3 for alpha chain variable domain of TCR clone 360030 (TRAV8-3, TRAJ21)
CAVGALPPRGYKFYF

SEQ ID NO: 720060 - protein, 18 aa, Homo sapiens
  CDR3 for beta chain variable domain of TCR clone 360030 (TRBV25-1, TRBJ1-2)
CASSGLQNGQGLIFGDTF

SEQ ID NO: 720061 - protein, 13 aa, Homo sapiens
  CDR3 for alpha chain variable domain of TCR clone 360031 (TRAV12-1, TRAJ13)
CVVIDSGLPESYL

SEQ ID NO: 720062 - protein, 12 aa, Homo sapiens
  CDR3 for beta chain variable domain of TCR clone 360031 (TRBV29-1, TRBJ2-3)
CSVTGGADTQYF

SEQ ID NO: 720063 - protein, 14 aa, Homo sapiens
  CDR3 for alpha chain variable domain of TCR clone 360032 (TRAV12-2, TRAJ10)
CAVNEAGGGNKLTF

SEQ ID NO: 720064 - protein, 12 aa, Homo sapiens
  CDR3 for beta chain variable domain of TCR clone 360032 (TRBV11-2, TRBJ2-2)
CASSLGGGELFF

SEQ ID NO: 720065 - protein, 14 aa, Homo sapiens
  CDR3 for alpha chain variable domain of TCR clone 360033 (TRAV2, TRAJ22)
CAVGRGGSARQLTF

SEQ ID NO: 720066 - protein, 15 aa, Homo sapiens
  CDR3 for beta chain variable domain of TCR clone 360033 (TRBV28, TRBJ2-1)
CASSIIAGGRSEQFF

SEQ ID NO: 720067 - protein, 14 aa, Homo sapiens
  CDR3 for alpha chain variable domain of TCR clone 360034 (TRAV1-2, TRAJ8)
CAVREDSGFQKLVF

SEQ ID NO: 720068 - protein, 16 aa, Homo sapiens
  CDR3 for beta chain variable domain of TCR clone 360034 (TRBV7-2, TRBJ2-5)
CASSLAVSGRGETQYF

SEQ ID NO: 720069 - protein, 15 aa, Homo sapiens
  CDR3 for alpha chain variable domain of TCR clone 360035 (TRAV12-1, TRAJ34)
CVVPPGGGNTDKLIF

SEQ ID NO: 720070 - protein, 16 aa, Homo sapiens
  CDR3 for beta chain variable domain of TCR clone 360035 (TRBV20-1, TRBJ2-1)
CSASASGYSSYNEQFF

SEQ ID NO: 720071 - protein, 10 aa, Homo sapiens
  CDR3 for alpha chain variable domain of TCR clone 360036 (TRAV1-2, TRAJ34)
CAVNTDKLIF

SEQ ID NO: 720072 - protein, 15 aa, Homo sapiens
  CDR3 for beta chain variable domain of TCR clone 360036 (TRBV9, TRBJ1-6)
CASSVAGTGDSPLHF

SEQ ID NO: 720073 - protein, 13 aa, Homo sapiens
  CDR3 for alpha chain variable domain of TCR clone 360037 (TRAV27, TRAJ57)
CAGFQGGSEKLVF

SEQ ID NO: 720074 - protein, 14 aa, Homo sapiens
  CDR3 for beta chain variable domain of TCR clone 360037 (TRBV20-1, TRBJ1-2)
CSGRKDGRDYGYTF

SEQ ID NO: 720075 - protein, 10 aa, Homo sapiens
  CDR3 for alpha chain variable domain of TCR clone 360038 (TRAV12-3, TRAJ50)
CAMSAMGNLL

SEQ ID NO: 720076 - protein, 17 aa, Homo sapiens
  CDR3 for beta chain variable domain of TCR clone 360038 (TRBV7-8, TRBJ2-6)
CASSAGTGGAGANVLTF

SEQ ID NO: 720077 - protein, 17 aa, Homo sapiens
  CDR3 for alpha chain variable domain of TCR clone 360039 (TRAV3, TRAJ6)
CAVRDGPRAGGSYILTF

SEQ ID NO: 720078 - protein, 14 aa, Homo sapiens
  CDR3 for beta chain variable domain of TCR clone 360039 (TRBV7-2, TRBJ2-7)
CASNPKTSFYEQYF

SEQ ID NO: 720079 - protein, 16 aa, Homo sapiens
  CDR3 for alpha chain variable domain of TCR clone 360040 (TRAV12-2, TRAJ32)
CAVNMNYGGATNKLIF

SEQ ID NO: 720080 - protein, 15 aa, Homo sapiens
  CDR3 for beta chain variable domain of TCR clone 360040 (TRBV7-8, TRBJ2-3)
CQQHRGAAETDTQYF

SEQ ID NO: 720081 - protein, 17 aa, Homo sapiens
  CDR3 for alpha chain variable domain of TCR clone 360041 (TRAV3, TRAJ6)
CAVRDGPRAGGSYIPTF

SEQ ID NO: 720082 - protein, 13 aa, Homo sapiens
  CDR3 for beta chain variable domain of TCR clone 360041 (TRBV2, TRBJ1-4)
CASSERAGEKLFF

SEQ ID NO: 720083 - protein, 12 aa, Homo sapiens
  CDR3 for alpha chain variable domain of TCR clone 360042 (TRAV2, TRAJ9)
CAVGAGGFKTIF

SEQ ID NO: 720084 - protein, 13 aa, Homo sapiens
  CDR3 for beta chain variable domain of TCR clone 360042 (TRBV5-7, TRBJ2-1)
CASSLVESVEQFF

SEQ ID NO: 720085 - protein, 14 aa, Homo sapiens
  CDR3 for alpha chain variable domain of TCR clone 360043 (TRAV26-1, TRAJ21)
CIVIVVYNFNKFYF

SEQ ID NO: 720086 - protein, 11 aa, Homo sapiens
  CDR3 for beta chain variable domain of TCR clone 360043 (TRBV5-6, TRBJ2-5)
CASSLERTQYF

SEQ ID NO: 720087 - protein, 14 aa, Homo sapiens
  CDR3 for alpha chain variable domain of TCR clone 360044 (TRAV12-3, TRAJ42)
CAMNYGGSQGNLIF

SEQ ID NO: 720088 - protein, 15 aa, Homo sapiens
  CDR3 for beta chain variable domain of TCR clone 360044 (TRBV5-7, TRBJ1-5)
CASTYGKLWDQPQHF

SEQ ID NO: 720089 - protein, 17 aa, Homo sapiens
  CDR3 for alpha chain variable domain of TCR clone 360045 (TRAV27, TRAJ52)
CAGARWAGGTSYGKLTF

SEQ ID NO: 720090 - protein, 16 aa, Homo sapiens
  CDR3 for beta chain variable domain of TCR clone 360045 (TRBV19, TRBJ2-1)
CASSKAGPSSYNEQFF

SEQ ID NO: 720091 - protein, 16 aa, Homo sapiens
  CDR3 for alpha chain variable domain of TCR clone 360046 (TRAV30, TRAJ24)
CGTEIVGADSWGKFKF

SEQ ID NO: 720092 - protein, 15 aa, Homo sapiens
  CDR3 for beta chain variable domain of TCR clone 360046 (TRBV7-9, TRBJ1-4)
CASSARTGGNDKLFF

SEQ ID NO: 720093 - protein, 19 aa, Homo sapiens
  CDR3 for alpha chain variable domain of TCR clone 360047 (TRAV26-1, TRAJ28)
CIVRVAHAYSGAWSYQLTF

SEQ ID NO: 720094 - protein, 15 aa, Homo sapiens
  CDR3 for beta chain variable domain of TCR clone 360047 (TRBV20-1, TRBJ1-1)
CSASRGVTGNTEAFF

SEQ ID NO: 720095 - protein, 12 aa, Homo sapiens
  CDR3 for alpha chain variable domain of TCR clone 360048 (TRAV17, TRAJ39)
CATGAAGNMLTF

SEQ ID NO: 720096 - protein, 18 aa, Homo sapiens
  CDR3 for beta chain variable domain of TCR clone 360048 (TRBV4-1, TRBJ2-1)
CASSLVGGELAGFNEQFF

SEQ ID NO: 720097 - protein, 12 aa, Homo sapiens
  CDR3 for alpha chain variable domain of TCR clone 360049 (TRAV13-2, TRAJ23)
CAERHRGGKLIF

SEQ ID NO: 720098 - protein, 16 aa, Homo sapiens
  CDR3 for beta chain variable domain of TCR clone 360049 (TRBV20-1, TRBJ1-4)
CSAPGQALLTNEKLFF

SEQ ID NO: 720099 - protein, 14 aa, Homo sapiens
  CDR3 for alpha chain variable domain of TCR clone 360050 (TRAV1-2, TRAJ8)
CAVREDTGFQKPVF

SEQ ID NO: 720100 - protein, 12 aa, Homo sapiens
  CDR3 for beta chain variable domain of TCR clone 360050 (TRBV11-2, TRBJ2-2)
CASSLPTGELFF

SEQ ID NO: 720101 - protein, 14 aa, Homo sapiens
  CDR3 for alpha chain variable domain of TCR clone 360051 (TRAV8-6, TRAJ49)
CAVSDPVTGNQFYF

SEQ ID NO: 720102 - protein, 13 aa, Homo sapiens
  CDR3 for beta chain variable domain of TCR clone 360051 (TRBV7-9, TRBJ1-2)
CASSLKQNYGYTF

SEQ ID NO: 720103 - protein, 14 aa, Homo sapiens
  CDR3 for alpha chain variable domain of TCR clone 360052 (TRAV8-4, TRAJ27)
CAVSKGTNAGKSTF

SEQ ID NO: 720104 - protein, 16 aa, Homo sapiens
  CDR3 for beta chain variable domain of TCR clone 360052 (TRBV2, TRBJ2-7)
CASSSTRWGSSYEQYF

SEQ ID NO: 720105 - protein, 13 aa, Homo sapiens
  CDR3 for alpha chain variable domain of TCR clone 360053 (TRAV21, TRAJ3)
CAVTGSSASKIIF

SEQ ID NO: 720106 - protein, 13 aa, Homo sapiens
  CDR3 for beta chain variable domain of TCR clone 360053 (TRBV15, TRBJ1-6)
CATSGGLNSPLHF

SEQ ID NO: 720107 - protein, 15 aa, Homo sapiens
  CDR3 for alpha chain variable domain of TCR clone 360054 (TRAV8-6, TRAJ11)
CAVSDRRSGYSTLTF

SEQ ID NO: 720108 - protein, 11 aa, Homo sapiens
  CDR3 for beta chain variable domain of TCR clone 360054 (TRBV27, TRBJ2-3)
CASSLGDTQYF

SEQ ID NO: 720109 - protein, 12 aa, Homo sapiens
  CDR3 for alpha chain variable domain of TCR clone 360055 (TRAV27, TRAJ21)
CAGVRQLQQILL

SEQ ID NO: 720110 - protein, 18 aa, Homo sapiens
  CDR3 for beta chain variable domain of TCR clone 360055 (TRBV11-2, TRBJ2-3)
CASSLGGASRGAPNTQYF

SEQ ID NO: 720111 - protein, 16 aa, Homo sapiens
  CDR3 for alpha chain variable domain of TCR clone 360056 (TRAV30, TRAJ24)
CGAEIVDADSWGKFQF

SEQ ID NO: 720112 - protein, 14 aa, Homo sapiens
  CDR3 for beta chain variable domain of TCR clone 360056 (TRBV12-5, TRBJ2-5)
CASGSRIHQETQYF

SEQ ID NO: 720113 - protein, 13 aa, Homo sapiens
  CDR3 for alpha chain variable domain of TCR clone 360057 (TRAV13-2, TRAJ40)
CAETLSGTYKYIF

SEQ ID NO: 720114 - protein, 12 aa, Homo sapiens
  CDR3 for beta chain variable domain of TCR clone 360057 (TRBV7-9, TRBJ2-7)
CASSIKREEQYF

SEQ ID NO: 720115 - protein, 15 aa, Homo sapiens
  CDR3 for alpha chain variable domain of TCR clone 360058 (TRAV12-3, TRAJ6)
CAMSATTGGRYIPTF

SEQ ID NO: 720116 - protein, 12 aa, Homo sapiens
  CDR3 for beta chain variable domain of TCR clone 360058 (TRBV11-2, TRBJ2-1)
CASSPGNNEQFF

SEQ ID NO: 720117 - protein, 11 aa, Homo sapiens
  CDR3 for alpha chain variable domain of TCR clone 360059 (TRAV35, TRAJ30)
CAGPSDDKIIF

SEQ ID NO: 720118 - protein, 14 aa, Homo sapiens
  CDR3 for beta chain variable domain of TCR clone 360059 (TRBV7-6, TRBJ1-6)
CASSQAGGGSPLHF

SEQ ID NO: 720119 - protein, 15 aa, Homo sapiens
  CDR3 for alpha chain variable domain of TCR clone 360060 (TRAV23/DV6, TRAJ18)
CAARYRGSTLGRLYF

SEQ ID NO: 720120 - protein, 15 aa, Homo sapiens
  CDR3 for beta chain variable domain of TCR clone 360060 (TRBV15, TRBJ1-1)
CATSLQGGRNTEAFF

SEQ ID NO: 720121 - protein, 14 aa, Homo sapiens
  CDR3 for alpha chain variable domain of TCR clone 360061 (TRAV34, TRAJ22)
CGADTSGSARQLTF

SEQ ID NO: 720122 - protein, 14 aa, Homo sapiens
  CDR3 for beta chain variable domain of TCR clone 360061 (TRBV12-4, TRBJ2-3)
CASSGQGSTDTQYF

SEQ ID NO: 720123 - protein, 13 aa, Homo sapiens
  CDR3 for alpha chain variable domain of TCR clone 360062 (TRAV4, TRAJ42)
CLVGGGSQGNLIF

SEQ ID NO: 720124 - protein, 15 aa, Homo sapiens
  CDR3 for beta chain variable domain of TCR clone 360062 (TRBV27, TRBJ2-1)
CASSNGGGSSNEKFF

SEQ ID NO: 720125 - protein, 23 aa, Homo sapiens
  CDR3 for alpha chain variable domain of TCR clone 360063 (TRAV21, TRAJ39)
AASQSGDSSTYPLLVNAGNMLTF

SEQ ID NO: 720126 - protein, 17 aa, Homo sapiens
  CDR3 for beta chain variable domain of TCR clone 360063 (TRBV7-8, TRBJ2-6)
CASSAGTGGAGANVLTF

SEQ ID NO: 720127 - protein, 15 aa, Homo sapiens
  CDR3 for alpha chain variable domain of TCR clone 360064 (TRAV26-1, TRAJ44)
CIARVHFGPASKLIF

SEQ ID NO: 720128 - protein, 15 aa, Homo sapiens
  CDR3 for beta chain variable domain of TCR clone 360064 (TRBV20-1, TRBJ1-1)
CSASRGVTGNTEAFF

SEQ ID NO: 720129 - protein, 15 aa, Homo sapiens
  CDR3 for alpha chain variable domain of TCR clone 360065 (TRAV3, TRAJ3)
CAVRDGHSSAPKIIF

SEQ ID NO: 720130 - protein, 14 aa, Homo sapiens
  CDR3 for beta chain variable domain of TCR clone 360065 (TRBV28, TRBJ1-4)
CASSFGTFDEKLFF

SEQ ID NO: 720131 - protein, 13 aa, Homo sapiens
  CDR3 for alpha chain variable domain of TCR clone 360066 (TRAV34, TRAJ22)
CGAGAGSARQLTF

SEQ ID NO: 720132 - protein, 13 aa, Homo sapiens
  CDR3 for beta chain variable domain of TCR clone 360066 (TRBV4-1, TRBJ2-2)
CASSQENTGELFF

SEQ ID NO: 720133 - protein, 13 aa, Homo sapiens
  CDR3 for alpha chain variable domain of TCR clone 360067 (TRAV36/DV7, TRAJ38)
CVANAGNNRKLIW

SEQ ID NO: 720134 - protein, 14 aa, Homo sapiens
  CDR3 for beta chain variable domain of TCR clone 360067 (TRBV7-2, TRBJ2-7)
CASSLRWEVKEQYF

SEQ ID NO: 720135 - protein, 13 aa, Homo sapiens
  CDR3 for alpha chain variable domain of TCR clone 360068 (TRAV30, TRAJ24)
CGTVTDSWGKLQF

SEQ ID NO: 720136 - protein, 14 aa, Homo sapiens
  CDR3 for beta chain variable domain of TCR clone 360068 (TRBV6-3, TRBJ2-2)
CASTYTPDTGELFF

SEQ ID NO: 720137 - protein, 15 aa, Homo sapiens
  CDR3 for alpha chain variable domain of TCR clone 360069 (TRAV26-1, TRAJ22)
CIVRESFWFCKATDL

SEQ ID NO: 720138 - protein, 13 aa, Homo sapiens
  CDR3 for beta chain variable domain of TCR clone 360069 (TRBV7-9, TRBJ1-2)
CASSLKQNYGDSF

SEQ ID NO: 720139 - protein, 15 aa, Homo sapiens
  CDR3 for alpha chain variable domain of TCR clone 360070 (TRAV36/DV7, TRAJ54)
CAVEKPVKGAQKLVF

SEQ ID NO: 720140 - protein, 14 aa, Homo sapiens
  CDR3 for beta chain variable domain of TCR clone 360070 (TRBV4-3, TRBJ2-2)
CASSQGHVTGELFF

SEQ ID NO: 720141 - protein, 14 aa, Homo sapiens
  CDR3 for alpha chain variable domain of TCR clone 360071 (TRAV1-2, TRAJ8)
CAVREGTGFQKLVF

SEQ ID NO: 720142 - protein, 17 aa, Homo sapiens
  CDR3 for beta chain variable domain of TCR clone 360071 (TRBV7-3, TRBJ2-3)
CASSLMKRMRGADTQYF

SEQ ID NO: 720143 - protein, 23 aa, Homo sapiens
  CDR3 for alpha chain variable domain of TCR clone 360072 (TRAV26-1, TRAJ38)
CIADNAGNNHIQDPDPAVYQLRD

SEQ ID NO: 720144 - protein, 17 aa, Homo sapiens
  CDR3 for beta chain variable domain of TCR clone 360072 (TRBV11-2, TRBJ2-6)
CASSQRDIFSGANVLTF

SEQ ID NO: 720145 - protein, 14 aa, Homo sapiens
  CDR3 for alpha chain variable domain of TCR clone 360073 (TRAV26-1, TRAJ49)
CIVRLTNTGNQCYF

SEQ ID NO: 720146 - protein, 13 aa, Homo sapiens
  CDR3 for beta chain variable domain of TCR clone 360073 (TRBV4-1, TRBJ2-7)
CASSQGQAYEQYF

SEQ ID NO: 720147 - protein, 14 aa, Homo sapiens
  CDR3 for alpha chain variable domain of TCR clone 360074 (TRAV1-2, TRAJ8)
CAVREDTGFQKILF

SEQ ID NO: 720148 - protein, 15 aa, Homo sapiens
  CDR3 for beta chain variable domain of TCR clone 360074 (TRBV6-3, TRBJ2-7)
CASSSPGTVFYEQYF

SEQ ID NO: 720149 - protein, 14 aa, Homo sapiens
  CDR3 for alpha chain variable domain of TCR clone 360075 (TRAV27, TRAJ22)
CAGVVPGSARQRTF

SEQ ID NO: 720150 - protein, 16 aa, Homo sapiens
  CDR3 for beta chain variable domain of TCR clone 360075 (TRBV9, TRBJ2-7)
CASSVGRGGGTYEQYF

SEQ ID NO: 720151 - protein, 14 aa, Homo sapiens
  CDR3 for alpha chain variable domain of TCR clone 360076 (TRAV12-1, TRAJ12)
CVVTRIDSSYKLIF

SEQ ID NO: 720152 - protein, 13 aa, Homo sapiens
  CDR3 for beta chain variable domain of TCR clone 360076 (TRBV20-1, TRBJ1-1)
CSARGGGNTEAYF

SEQ ID NO: 720153 - protein, 12 aa, Homo sapiens
  CDR3 for alpha chain variable domain of TCR clone 360077 (TRAV2, TRAJ9)
CAVGAGGFKTIF

SEQ ID NO: 720154 - protein, 15 aa, Homo sapiens
  CDR3 for beta chain variable domain of TCR clone 360077 (TRBV11-3, TRBJ1-1)
CASSLGGPGDNEAFF

SEQ ID NO: 720155 - protein, 14 aa, Homo sapiens
  CDR3 for alpha chain variable domain of TCR clone 360078 (TRAV12-3, TRAJ57)
CAMSAWGGSEKLVF

SEQ ID NO: 720156 - protein, 14 aa, Homo sapiens
  CDR3 for beta chain variable domain of TCR clone 360078 (TRBV7-6, TRBJ2-3)
CASSLGTVTDTQYF

SEQ ID NO: 720157 - protein, 18 aa, Homo sapiens
  CDR3 for alpha chain variable domain of TCR clone 360079 (TRAV13-1, TRAJ4)
CSKYKEVPWRGGHNKLIF

SEQ ID NO: 720158 - protein, 13 aa, Homo sapiens
  CDR3 for beta chain variable domain of TCR clone 360079 (TRBV7-9, TRBJ1-2)
CASSLKQNYGYTF

SEQ ID NO: 720159 - protein, 16 aa, Homo sapiens
  CDR3 for alpha chain variable domain of TCR clone 360080 (TRAV3, TRAJ37)
CAVRGKGSGNTGKLIF

SEQ ID NO: 720160 - protein, 13 aa, Homo sapiens
  CDR3 for beta chain variable domain of TCR clone 360080 (TRBV10-3, TRBJ1-2)
CAISERDSYGYTV

SEQ ID NO: 720161 - protein, 15 aa, Homo sapiens
  CDR3 for alpha chain variable domain of TCR clone 360081 (TRAV17, TRAJ54)
CATTRSEQGAQKLVF

SEQ ID NO: 720162 - protein, 13 aa, Homo sapiens
  CDR3 for beta chain variable domain of TCR clone 360081 (TRBV15, TRBJ1-6)
CATSGGLNSPLHF

SEQ ID NO: 720163 - protein, 15 aa, Homo sapiens
  CDR3 for alpha chain variable domain of TCR clone 360082 (TRAV27, TRAJ45)
CAPVDSGGGADGLTF

SEQ ID NO: 720164 - protein, 23 aa, Homo sapiens
  CDR3 for beta chain variable domain of TCR clone 360082 (TRBV23-1, TRBJ1-5)
TVSLRQQSIEGTGLRGLYQPQHF

SEQ ID NO: 720165 - protein, 15 aa, Homo sapiens
  CDR3 for alpha chain variable domain of TCR clone 360083 (TRAV12-2, TRAJ43)
CAFDMRFGAGTRLTV

SEQ ID NO: 720166 - protein, 14 aa, Homo sapiens
  CDR3 for beta chain variable domain of TCR clone 360083 (TRBV7-9, TRBJ2-5)
CASSLAPDQETQYF

SEQ ID NO: 720167 - protein, 13 aa, Homo sapiens
  CDR3 for alpha chain variable domain of TCR clone 360084 (TRAV2, TRAJ15)
CAVASQAGTALSF

SEQ ID NO: 720168 - protein, 16 aa, Homo sapiens
  CDR3 for beta chain variable domain of TCR clone 360084 (TRBV20-1, TRBJ1-4)
CSAPGQGLLTNEKLFF

SEQ ID NO: 720169 - protein, 13 aa, Homo sapiens
  CDR3 for alpha chain variable domain of TCR clone 360085 (TRAV2, TRAJ15)
CGVASQAGTALIF

SEQ ID NO: 720170 - protein, 15 aa, Homo sapiens
  CDR3 for beta chain variable domain of TCR clone 360085 (TRBV11-2, TRBJ2-1)
CASSLTSGGYNEQFF

SEQ ID NO: 720171 - protein, 17 aa, Homo sapiens
  CDR3 for alpha chain variable domain of TCR clone 360086 (TRAV3, TRAJ42)
CAVRDRDYGGSQGNVIL

SEQ ID NO: 720172 - protein, 15 aa, Homo sapiens
  CDR3 for beta chain variable domain of TCR clone 360086 (TRBV6-6, TRBJ2-7)
CASSYSYGGSYEQYF

SEQ ID NO: 720173 - protein, 16 aa, Homo sapiens
  CDR3 for alpha chain variable domain of TCR clone 360087 (TRAV30, TRAJ24)
CGTEIMDADSWGKLQF

SEQ ID NO: 720174 - protein, 14 aa, Homo sapiens
  CDR3 for beta chain variable domain of TCR clone 360087 (TRBV12-5, TRBJ2-5)
CASGSRTHQETQYF

SEQ ID NO: 720175 - protein, 12 aa, Homo sapiens
  CDR3 for alpha chain variable domain of TCR clone 360088 (TRAV13-1, TRAJ42)
VNYGGSQGNLIF

SEQ ID NO: 720176 - protein, 12 aa, Homo sapiens
  CDR3 for beta chain variable domain of TCR clone 360088 (TRBV7-9, TRBJ1-5)
CASSSEQAPQHF

SEQ ID NO: 720177 - protein, 13 aa, Homo sapiens
  CDR3 for alpha chain variable domain of TCR clone 360089 (TRAV8-4, TRAJ10)
CAAFTGGGNKLTF

SEQ ID NO: 720178 - protein, 15 aa, Homo sapiens
  CDR3 for beta chain variable domain of TCR clone 360089 (TRBV15, TRBJ1-2)
CATSRVRASGSGYTF

SEQ ID NO: 720179 - protein, 12 aa, Homo sapiens
  CDR3 for alpha chain variable domain of TCR clone 360090 (TRAV27, TRAJ42)
CAGGGSQGNLIF

SEQ ID NO: 720180 - protein, 13 aa, Homo sapiens
  CDR3 for beta chain variable domain of TCR clone 360090 (TRBV19, TRBJ2-7)
CASSIGSSYEQYF

SEQ ID NO: 720181 - protein, 14 aa, Homo sapiens
  CDR3 for alpha chain variable domain of TCR clone 360091 (TRAV17, TRAJ34)
CATDSLEGTDKLIF

SEQ ID NO: 720182 - protein, 15 aa, Homo sapiens
  CDR3 for beta chain variable domain of TCR clone 360091 (TRBV7-9, TRBJ1-6)
CASSSPGRGNSPLHF

SEQ ID NO: 720183 - protein, 16 aa, Homo sapiens
  CDR3 for alpha chain variable domain of TCR clone 360092 (TRAV3, TRAJ21)
CAVRDIGRGNFNKFYF

SEQ ID NO: 720184 - protein, 15 aa, Homo sapiens
  CDR3 for beta chain variable domain of TCR clone 360092 (TRBV7-6, TRBJ2-5)
CASSKPTGPQETQYF

SEQ ID NO: 720185 - protein, 14 aa, Homo sapiens
  CDR3 for alpha chain variable domain of TCR clone 360093 (TRAV26-1, TRAJ34)
CIVRVAYNTDKLIF

SEQ ID NO: 720186 - protein, 14 aa, Homo sapiens
  CDR3 for beta chain variable domain of TCR clone 360093 (TRBV7-2, TRBJ2-5)
CASSPRGSSETQYF

SEQ ID NO: 720187 - protein, 17 aa, Homo sapiens
  CDR3 for alpha chain variable domain of TCR clone 360094 (TRAV16, TRAJ58)
CITVLSNGETSGSRLTF

SEQ ID NO: 720188 - protein, 17 aa, Homo sapiens
  CDR3 for beta chain variable domain of TCR clone 360094 (TRBV18, TRBJ2-1)
CASSKGLSVGADNEQFF

SEQ ID NO: 720189 - protein, 15 aa, Homo sapiens
  CDR3 for alpha chain variable domain of TCR clone 360095 (TRAV3, TRAJ22)
CAVRARGGSAWQLTF

SEQ ID NO: 720190 - protein, 16 aa, Homo sapiens
  CDR3 for beta chain variable domain of TCR clone 360095 (TRBV5-4, TRBJ2-3)
CASQQPGAGGADTQYF

SEQ ID NO: 720191 - protein, 11 aa, Homo sapiens
  CDR3 for alpha chain variable domain of TCR clone 360096 (TRAV21, TRAJ34)
CAVTNTDKLIL

SEQ ID NO: 720192 - protein, 14 aa, Homo sapiens
  CDR3 for beta chain variable domain of TCR clone 360096 (TRBV19, TRBJ2-1)
FASPTFVLSGEQFF

SEQ ID NO: 720193 - protein, 16 aa, Homo sapiens
  CDR3 for alpha chain variable domain of TCR clone 360097 (TRAV8-3, TRAJ13)
CAVGAYPSGGYQKVTF

SEQ ID NO: 720194 - protein, 13 aa, Homo sapiens
  CDR3 for beta chain variable domain of TCR clone 360097 (TRBV29-1, TRBJ1-1)
CSANPGENTEAFF

SEQ ID NO: 720195 - protein, 15 aa, Homo sapiens
  CDR3 for alpha chain variable domain of TCR clone 360098 (TRAV4, TRAJ39)
CLVGPNKNAGNRLTF

SEQ ID NO: 720196 - protein, 13 aa, Homo sapiens
  CDR3 for beta chain variable domain of TCR clone 360098 (TRBV11-2, TRBJ2-5)
CASSSIGEETQYF

SEQ ID NO: 720197 - protein, 17 aa, Homo sapiens
  CDR3 for alpha chain variable domain of TCR clone 360099 (TRAV26-1, TRAJ37)
CIVRVITVSSNTGKLIF

SEQ ID NO: 720198 - protein, 13 aa, Homo sapiens
  CDR3 for beta chain variable domain of TCR clone 360099 (TRBV6-5, TRBJ2-5)
CASSPQGGETQYF

SEQ ID NO: 720199 - protein, 13 aa, Homo sapiens
  CDR3 for alpha chain variable domain of TCR clone 360100 (TRAV2, TRAJ10)
CAVETGGGNKLTF

SEQ ID NO: 720200 - protein, 14 aa, Homo sapiens
  CDR3 for beta chain variable domain of TCR clone 360100 (TRBV20-1, TRBJ2-3)
CSAGGGRGTDTQYF

SEQ ID NO: 720201 - protein, 13 aa, Homo sapiens
  CDR3 for alpha chain variable domain of TCR clone 360101 (TRAV2, TRAJ40)
CAVVTSGTYKYIF

SEQ ID NO: 720202 - protein, 17 aa, Homo sapiens
  CDR3 for beta chain variable domain of TCR clone 360101 (TRBV11-2, TRBJ2-3)
CQQLRGASRGAPNTQYF

SEQ ID NO: 720203 - protein, 15 aa, Homo sapiens
  CDR3 for alpha chain variable domain of TCR clone 360102 (TRAV17, TRAJ6)
CATDLSSGGSYIPTF

SEQ ID NO: 720204 - protein, 16 aa, Homo sapiens
  CDR3 for beta chain variable domain of TCR clone 360102 (TRBV4-1, TRBJ2-7)
CASSQDPTGYSYEQYF

SEQ ID NO: 720205 - protein, 14 aa, Homo sapiens
  CDR3 for alpha chain variable domain of TCR clone 360103 (TRAV12-2, TRAJ17)
CAVLFKAAGNKLTF

SEQ ID NO: 720206 - protein, 15 aa, Homo sapiens
  CDR3 for beta chain variable domain of TCR clone 360103 (TRBV20-1, TRBJ1-1)
CSASRGVTGNTEAFF

SEQ ID NO: 720207 - protein, 11 aa, Homo sapiens
  CDR3 for alpha chain variable domain of TCR clone 360104 (TRAV1-2, TRAJ20)
CAVANDYKPSF

SEQ ID NO: 720208 - protein, 16 aa, Homo sapiens
  CDR3 for beta chain variable domain of TCR clone 360104 (TRBV20-1, TRBJ2-7)
CSAKGLAGAPDYEQYF

SEQ ID NO: 720209 - protein, 16 aa, Homo sapiens
  CDR3 for alpha chain variable domain of TCR clone 360105 (TRAV16, TRAJ4)
CSLSRMFSGGYNKLIF

SEQ ID NO: 720210 - protein, 16 aa, Homo sapiens
  CDR3 for beta chain variable domain of TCR clone 360105 (TRBV24-1, TRBJ2-3)
CATSDPGKGATDTQYF

SEQ ID NO: 720211 - protein, 13 aa, Homo sapiens
  CDR3 for alpha chain variable domain of TCR clone 360106 (TRAV2, TRAJ40)
CAVVTSGTYKYIF

SEQ ID NO: 720212 - protein, 14 aa, Homo sapiens
  CDR3 for beta chain variable domain of TCR clone 360106 (TRBV19, TRBJ1-1)
CASSIEVSGGSAFF

SEQ ID NO: 720213 - protein, 14 aa, Homo sapiens
  CDR3 for alpha chain variable domain of TCR clone 360107 (TRAV26-1, TRAJ49)
CIVRLTNTGNQFYF

SEQ ID NO: 720214 - protein, 13 aa, Homo sapiens
  CDR3 for beta chain variable domain of TCR clone 360107 (TRBV4-1, TRBJ2-7)
CAISQGQAYEQYF

SEQ ID NO: 720215 - protein, 15 aa, Homo sapiens
  CDR3 for alpha chain variable domain of TCR clone 360108 (TRAV8-4, TRAJ12)
CAVSDRVDSSYKLIF

SEQ ID NO: 720216 - protein, 15 aa, Homo sapiens
  CDR3 for beta chain variable domain of TCR clone 360108 (TRBV11-3, TRBJ2-1)
CASSLAGETYNEQFF

SEQ ID NO: 720217 - protein, 15 aa, Homo sapiens
  CDR3 for alpha chain variable domain of TCR clone 360109 (TRAV29/DV5, TRAJ24)
CAASGATDSWGKFQF

SEQ ID NO: 720218 - protein, 12 aa, Homo sapiens
  CDR3 for beta chain variable domain of TCR clone 360109 (TRBV11-2, TRBJ2-2)
CASRLPTGELFF

SEQ ID NO: 720219 - protein, 16 aa, Homo sapiens
  CDR3 for alpha chain variable domain of TCR clone 360110 (TRAV3, TRAJ10)
CAVRDMGAGGGNKLTF

SEQ ID NO: 720220 - protein, 15 aa, Homo sapiens
  CDR3 for beta chain variable domain of TCR clone 360110 (TRBV6-1, TRBJ1-1)
CLGGSSRQGNTEAFF

SEQ ID NO: 720221 - protein, 13 aa, Homo sapiens
  CDR3 for alpha chain variable domain of TCR clone 360111 (TRAV29/DV5, TRAJ33)
CAASVESNYQLIW

SEQ ID NO: 720222 - protein, 13 aa, Homo sapiens
  CDR3 for beta chain variable domain of TCR clone 360111 (TRBV19, TRBJ1-2)
CASSVPGQDGYTF

SEQ ID NO: 720223 - protein, 14 aa, Homo sapiens
  CDR3 for alpha chain variable domain of TCR clone 360112 (TRAV22, TRAJ40)
CSVESTSGTYEYIF

SEQ ID NO: 720224 - protein, 17 aa, Homo sapiens
  CDR3 for beta chain variable domain of TCR clone 360112 (TRBV7-9, TRBJ2-2)
CASSLGVAGMNTGELFF

SEQ ID NO: 720225 - protein, 14 aa, Homo sapiens
  CDR3 for alpha chain variable domain of TCR clone 360113 (TRAV1-2, TRAJ33)
CAVRAPDSNYQLIW

SEQ ID NO: 720226 - protein, 16 aa, Homo sapiens
  CDR3 for beta chain variable domain of TCR clone 360113 (TRBV15, TRBJ2-6)
CATSVNGGFLANDLTF

SEQ ID NO: 720227 - protein, 12 aa, Homo sapiens
  CDR3 for alpha chain variable domain of TCR clone 360114 (TRAV1-2, TRAJ29)
CAVPSGNTPLVF

SEQ ID NO: 720228 - protein, 13 aa, Homo sapiens
  CDR3 for beta chain variable domain of TCR clone 360114 (TRBV25-1, TRBJ1-5)
CASSGQVNQPQHF

SEQ ID NO: 720229 - protein, 18 aa, Homo sapiens
  CDR3 for alpha chain variable domain of TCR clone 360115 (TRAV13-1, TRAJ52)
CAASKRSAGGTSYGKLTF

SEQ ID NO: 720230 - protein, 15 aa, Homo sapiens
  CDR3 for beta chain variable domain of TCR clone 360115 (TRBV2, TRBJ2-1)
CASSEEREGDNEQFF

SEQ ID NO: 720231 - protein, 14 aa, Homo sapiens
  CDR3 for alpha chain variable domain of TCR clone 360116 (TRAV17, TRAJ39)
CATDASGAGNMLTF

SEQ ID NO: 720232 - protein, 14 aa, Homo sapiens
  CDR3 for beta chain variable domain of TCR clone 360116 (TRBV25-1, TRBJ1-1)
CASTHLGGNTEAFF

SEQ ID NO: 720233 - protein, 15 aa, Homo sapiens
  CDR3 for alpha chain variable domain of TCR clone 360117 (TRAV8-1, TRAJ23)
CAVNSHYNQGGKLIF

SEQ ID NO: 720234 - protein, 15 aa, Homo sapiens
  CDR3 for beta chain variable domain of TCR clone 360117 (TRBV11-2, TRBJ1-6)
CASTLRGTGNSPLHC

SEQ ID NO: 720235 - protein, 15 aa, Homo sapiens
  CDR3 for alpha chain variable domain of TCR clone 360118 (TRAV12-1, TRAJ45)
CVVLSGGGGADVLTF

SEQ ID NO: 720236 - protein, 15 aa, Homo sapiens
  CDR3 for beta chain variable domain of TCR clone 360118 (TRBV12-5, TRBJ2-5)
CASGSGLAGRETQYF

SEQ ID NO: 720237 - protein, 12 aa, Homo sapiens
  CDR3 for alpha chain variable domain of TCR clone 360119 (TRAV25, TRAJ31)
CAGHLNNARLMF

SEQ ID NO: 720238 - protein, 13 aa, Homo sapiens
  CDR3 for beta chain variable domain of TCR clone 360119 (TRBV19, TRBJ1-5)
CASSIGGEQPQHF

SEQ ID NO: 720239 - protein, 14 aa, Homo sapiens
  CDR3 for alpha chain variable domain of TCR clone 360120 (TRAV1-2, TRAJ8)
CAVREDTGFQKLVF

SEQ ID NO: 720240 - protein, 12 aa, Homo sapiens
  CDR3 for beta chain variable domain of TCR clone 360120 (TRBV28, TRBJ2-7)
CATLAGGYEQYF

SEQ ID NO: 720241 - protein, 11 aa, Homo sapiens
  CDR3 for alpha chain variable domain of TCR clone 360121 (TRAV17, TRAJ9)
CGFTGGFKTIF

SEQ ID NO: 720242 - protein, 14 aa, Homo sapiens
  CDR3 for beta chain variable domain of TCR clone 360121 (TRBV28, TRBJ1-2)
CASRIQGANYGYTF

SEQ ID NO: 720243 - protein, 18 aa, Homo sapiens
  CDR3 for alpha chain variable domain of TCR clone 360122 (TRAV21, TRAJ52)
CAVRPSPAGGTSYGKLTF

SEQ ID NO: 720244 - protein, 15 aa, Homo sapiens
  CDR3 for beta chain variable domain of TCR clone 360122 (TRBV28, TRBJ2-3)
CASSQELGGTDTQYF

SEQ ID NO: 720245 - protein, 14 aa, Homo sapiens
  CDR3 for alpha chain variable domain of TCR clone 360123 (TRAV12-2, TRAJ9)
CAVNMEGGGFKTIF

SEQ ID NO: 720246 - protein, 14 aa, Homo sapiens
  CDR3 for beta chain variable domain of TCR clone 360123 (TRBV2, TRBJ2-5)
CASSEVLEQETQYF

SEQ ID NO: 720247 - protein, 14 aa, Homo sapiens
  CDR3 for alpha chain variable domain of TCR clone 360124 (TRAV12-1, TRAJ24)
CVVRSTDSWWKFQF

SEQ ID NO: 720248 - protein, 13 aa, Homo sapiens
  CDR3 for beta chain variable domain of TCR clone 360124 (TRBV2, TRBJ2-3)
CASILAGGQGQYL

SEQ ID NO: 720249 - protein, 14 aa, Homo sapiens
  CDR3 for alpha chain variable domain of TCR clone 360125 (TRAV12-1, TRAJ22)
CVVPTSGSARQLTF

SEQ ID NO: 720250 - protein, 12 aa, Homo sapiens
  CDR3 for beta chain variable domain of TCR clone 360125 (TRBV5-1, TRBJ1-1)
CASSLTGAEAFF

SEQ ID NO: 720251 - protein, 15 aa, Homo sapiens
  CDR3 for alpha chain variable domain of TCR clone 360126 (TRAV12-1, TRAJ45)
CVVLSGGGGADGLTF

SEQ ID NO: 720252 - protein, 13 aa, Homo sapiens
  CDR3 for beta chain variable domain of TCR clone 360126 (TRBV5-4, TRBJ2-1)
CASSVLAGDEQFF

SEQ ID NO: 720253 - protein, 12 aa, Homo sapiens
  CDR3 for alpha chain variable domain of TCR clone 360127 (TRAV16, TRAJ12)
CALEDSSYKLIF

SEQ ID NO: 720254 - protein, 16 aa, Homo sapiens
  CDR3 for beta chain variable domain of TCR clone 360127 (TRBV7-9, TRBJ2-3)
CASSPWREVGTDTQYF

SEQ ID NO: 720255 - protein, 14 aa, Homo sapiens
  CDR3 for alpha chain variable domain of TCR clone 360128 (TRAV1-2, TRAJ29)
CAVRELTSATPLIF

SEQ ID NO: 720256 - protein, 14 aa, Homo sapiens
  CDR3 for beta chain variable domain of TCR clone 360128 (TRBV3-1, TRBJ2-5)
CASSQGPDQETQFF

SEQ ID NO: 720257 - protein, 16 aa, Homo sapiens
  CDR3 for alpha chain variable domain of TCR clone 360129 (TRAV30, TRAJ24)
CGTEIVDADSWGKFQF

SEQ ID NO: 720258 - protein, 17 aa, Homo sapiens
  CDR3 for beta chain variable domain of TCR clone 360129 (TRBV28, TRBJ2-2)
CASSLATGMGDAGELFF

SEQ ID NO: 720259 - protein, 15 aa, Homo sapiens
  CDR3 for alpha chain variable domain of TCR clone 360130 (TRAV13-1, TRAJ52)
CAATSPRTSYGKLPF

SEQ ID NO: 720260 - protein, 16 aa, Homo sapiens
  CDR3 for beta chain variable domain of TCR clone 360130 (TRBV7-3, TRBJ2-2)
CASSLKRGTLSGELFF

SEQ ID NO: 720261 - protein, 12 aa, Homo sapiens
  CDR3 for alpha chain variable domain of TCR clone 360131 (TRAV12-3, TRAJ17)
CAMTLTGNKLTS

SEQ ID NO: 720262 - protein, 14 aa, Homo sapiens
  CDR3 for beta chain variable domain of TCR clone 360131 (TRBV23-1, TRBJ2-5)
CASSFLRSQETQYF

SEQ ID NO: 720263 - protein, 12 aa, Homo sapiens
  CDR3 for alpha chain variable domain of TCR clone 360132 (TRAV35, TRAJ28)
GVEGAGSYQLTF

SEQ ID NO: 720264 - protein, 13 aa, Homo sapiens
  CDR3 for beta chain variable domain of TCR clone 360132 (TRBV4-1, TRBJ2-2)
CASSQENTGELFF

SEQ ID NO: 720265 - protein, 15 aa, Homo sapiens
  CDR3 for alpha chain variable domain of TCR clone 360133 (TRAV17, TRAJ57)
CATGPSQGGSEKLVF

SEQ ID NO: 720266 - protein, 14 aa, Homo sapiens
  CDR3 for beta chain variable domain of TCR clone 360133 (TRBV12-5, TRBJ2-5)
FASGSRTHQETQYF

SEQ ID NO: 720267 - protein, 15 aa, Homo sapiens
  CDR3 for alpha chain variable domain of TCR clone 360134 (TRAV8-3, TRAJ27)
CAVGPSKTIAGKSTF

SEQ ID NO: 720268 - protein, 15 aa, Homo sapiens
  CDR3 for beta chain variable domain of TCR clone 360134 (TRBV7-2, TRBJ2-3)
CASSLAGAFIDTQYF

SEQ ID NO: 720269 - protein, 14 aa, Homo sapiens
  CDR3 for alpha chain variable domain of TCR clone 360135 (TRAV8-1, TRAJ49)
CASSIANTGNQFYF

SEQ ID NO: 720270 - protein, 13 aa, Homo sapiens
  CDR3 for beta chain variable domain of TCR clone 360135 (TRBV7-7, TRBJ2-3)
CASSLSRADTQYF

SEQ ID NO: 720271 - protein, 15 aa, Homo sapiens
  CDR3 for alpha chain variable domain of TCR clone 360136 (TRAV4, TRAJ10)
CLVGDGSGGGNKLTV

SEQ ID NO: 720272 - protein, 15 aa, Homo sapiens
  CDR3 for beta chain variable domain of TCR clone 360136 (TRBV27, TRBJ2-3)
CASSSLAGVIDTQYF

SEQ ID NO: 720273 - protein, 14 aa, Homo sapiens
  CDR3 for alpha chain variable domain of TCR clone 360137 (TRAV1-2, TRAJ16)
CAVTRFSDGQKLLF

SEQ ID NO: 720274 - protein, 15 aa, Homo sapiens
  CDR3 for beta chain variable domain of TCR clone 360137 (TRBV28, TRBJ2-1)
CASSGLAEVDNEQFF

SEQ ID NO: 720275 - protein, 14 aa, Homo sapiens
  CDR3 for alpha chain variable domain of TCR clone 360138 (TRAV1-2, TRAJ16)
CAVNRFSDGQKLLL

SEQ ID NO: 720276 - protein, 13 aa, Homo sapiens
  CDR3 for beta chain variable domain of TCR clone 360138 (TRBV15, TRBJ1-6)
CATSGGLNSPLHF

SEQ ID NO: 720277 - protein, 16 aa, Homo sapiens
  CDR3 for alpha chain variable domain of TCR clone 360139 (TRAV3, TRAJ37)
CAVRGKGSGNTGKLIF

SEQ ID NO: 720278 - protein, 17 aa, Homo sapiens
  CDR3 for beta chain variable domain of TCR clone 360139 (TRBV20-1, TRBJ2-1)
CSAPPRLAGTRYNEQFF

SEQ ID NO: 720279 - protein, 16 aa, Homo sapiens
  CDR3 for alpha chain variable domain of TCR clone 360140 (TRAV35, TRAJ42)
GRMERDYGGSQGNLIF

SEQ ID NO: 720280 - protein, 15 aa, Homo sapiens
  CDR3 for beta chain variable domain of TCR clone 360140 (TRBV6-1, TRBJ2-7)
CASSDWDKPNYEQYF

SEQ ID NO: 720281 - protein, 20 aa, Homo sapiens
  CDR3 for alpha chain variable domain of TCR clone 360141 (TRAV21, TRAJ30)
CAVRRRMTRSSLEKGHDFIF

SEQ ID NO: 720282 - protein, 13 aa, Homo sapiens
  CDR3 for beta chain variable domain of TCR clone 360141 (TRBV12-4, TRBJ2-5)
CASSPGTEETQSC

SEQ ID NO: 720283 - protein, 13 aa, Homo sapiens
  CDR3 for alpha chain variable domain of TCR clone 360142 (TRAV8-4, TRAJ48)
CAVSLFGNEKLTF

SEQ ID NO: 720284 - protein, 14 aa, Homo sapiens
  CDR3 for beta chain variable domain of TCR clone 360142 (TRBV19, TRBJ2-2)
CASSGQGIAGELFF

SEQ ID NO: 720285 - protein, 16 aa, Homo sapiens
  CDR3 for alpha chain variable domain of TCR clone 360143 (TRAV16, TRAJ21)
CACGWATTSTDFTLDL

SEQ ID NO: 720286 - protein, 15 aa, Homo sapiens
  CDR3 for beta chain variable domain of TCR clone 360143 (TRBV19, TRBJ2-1)
CASSIQATSYNEQFF

SEQ ID NO: 720287 - protein, 14 aa, Homo sapiens
  CDR3 for alpha chain variable domain of TCR clone 360144 (TRAV12-1, TRAJ26)
CVVKGSNYGQNFVF

SEQ ID NO: 720288 - protein, 13 aa, Homo sapiens
  CDR3 for beta chain variable domain of TCR clone 360144 (TRBV7-2, TRBJ2-2)
CASSLAVTGELFF

SEQ ID NO: 720289 - protein, 15 aa, Homo sapiens
  CDR3 for alpha chain variable domain of TCR clone 360145 (TRAV21, TRAJ53)
CATLNRGGSNYKLTF

SEQ ID NO: 720290 - protein, 13 aa, Homo sapiens
  CDR3 for beta chain variable domain of TCR clone 360145 (TRBV7-9, TRBJ2-3)
CASSPGSTDTQYF

SEQ ID NO: 720291 - protein, 11 aa, Homo sapiens
  CDR3 for alpha chain variable domain of TCR clone 360146 (TRAV2, TRAJ13)
CASGGYQKVTF

SEQ ID NO: 720292 - protein, 18 aa, Homo sapiens
  CDR3 for beta chain variable domain of TCR clone 360146 (TRBV19, TRBJ2-6)
CASIGPTSGGSGANVLPF

SEQ ID NO: 720293 - protein, 14 aa, Homo sapiens
  CDR3 for alpha chain variable domain of TCR clone 360147 (TRAV1-2, TRAJ8)
CAVREDTGFQKLVF

SEQ ID NO: 720294 - protein, 15 aa, Homo sapiens
  CDR3 for beta chain variable domain of TCR clone 360147 (TRBV7-9, TRBJ2-2)
CASGPLDAFPGELFF

SEQ ID NO: 720295 - protein, 11 aa, Homo sapiens
  CDR3 for alpha chain variable domain of TCR clone 360148 (TRAV17, TRAJ43)
CATDVTGDMRV

SEQ ID NO: 720296 - protein, 14 aa, Homo sapiens
  CDR3 for beta chain variable domain of TCR clone 360148 (TRBV12-4, TRBJ1-1)
CASRPGQGRTEAFF

SEQ ID NO: 720297 - protein, 13 aa, Homo sapiens
  CDR3 for alpha chain variable domain of TCR clone 360149 (TRAV12-2, TRAJ34)
CAARGYNTDKLIF

SEQ ID NO: 720298 - protein, 15 aa, Homo sapiens
  CDR3 for beta chain variable domain of TCR clone 360149 (TRBV28, TRBJ2-1)
CASRTGAGVIARQFF

SEQ ID NO: 720299 - protein, 14 aa, Homo sapiens
  CDR3 for alpha chain variable domain of TCR clone 360150 (TRAV12-1, TRAJ12)
CVVTRMDSSYKLIF

SEQ ID NO: 720300 - protein, 15 aa, Homo sapiens
  CDR3 for beta chain variable domain of TCR clone 360150 (TRBV20-1, TRBJ1-1)
CSARGGGTLKRSLDK

SEQ ID NO: 720301 - protein, 16 aa, Homo sapiens
  CDR3 for alpha chain variable domain of TCR clone 360151 (TRAV12-3, TRAJ53)
CAMSPGSGGSNYNLPF

SEQ ID NO: 720302 - protein, 11 aa, Homo sapiens
  CDR3 for beta chain variable domain of TCR clone 360151 (TRBV29-1, TRBJ2-5)
CSEDRTGTQYF

SEQ ID NO: 720303 - protein, 13 aa, Homo sapiens
  CDR3 for alpha chain variable domain of TCR clone 360152 (TRAV29/DV5, TRAJ31)
CAASRKNNARLMF

SEQ ID NO: 720304 - protein, 12 aa, Homo sapiens
  CDR3 for beta chain variable domain of TCR clone 360152 (TRBV14, TRBJ2-7)
CASSRLKGEQYF

SEQ ID NO: 720305 - protein, 14 aa, Homo sapiens
  CDR3 for alpha chain variable domain of TCR clone 360153 (TRAV17, TRAJ12)
CAILPMDSRYKLIF

SEQ ID NO: 720306 - protein, 15 aa, Homo sapiens
  CDR3 for beta chain variable domain of TCR clone 360153 (TRBV5-1, TRBJ1-1)
CASSLGEGGNTEAFF

SEQ ID NO: 720307 - protein, 13 aa, Homo sapiens
  CDR3 for alpha chain variable domain of TCR clone 360154 (TRAV16, TRAJ28)
CALIGAGSYQLTF

SEQ ID NO: 720308 - protein, 16 aa, Homo sapiens
  CDR3 for beta chain variable domain of TCR clone 360154 (TRBV28, TRBJ1-5)
CASSLTGQGWNQPQHF

SEQ ID NO: 720309 - protein, 10 aa, Homo sapiens
  CDR3 for alpha chain variable domain of TCR clone 360155 (TRAV30, TRAJ16)
CGTGGQKLLF

SEQ ID NO: 720310 - protein, 17 aa, Homo sapiens
  CDR3 for beta chain variable domain of TCR clone 360155 (TRBV11-3, TRBJ2-3)
CASSLGLTGGGTDTQYF

SEQ ID NO: 720311 - protein, 13 aa, Homo sapiens
  CDR3 for alpha chain variable domain of TCR clone 360156 (TRAV21, TRAJ15)
CCEPQPGGTALIF

SEQ ID NO: 720312 - protein, 11 aa, Homo sapiens
  CDR3 for beta chain variable domain of TCR clone 360156 (TRBV20-1, TRBJ2-7)
CSARTSYEQYF

SEQ ID NO: 720313 - protein, 11 aa, Homo sapiens
  CDR3 for alpha chain variable domain of TCR clone 360157 (TRAV26-1, TRAJ37)
CIVRVGRKLIF

SEQ ID NO: 720314 - protein, 14 aa, Homo sapiens
  CDR3 for beta chain variable domain of TCR clone 360157 (TRBV7-2, TRBJ2-7)
CAGSLPPGQGPQYF

SEQ ID NO: 720315 - protein, 14 aa, Homo sapiens
  CDR3 for alpha chain variable domain of TCR clone 360158 (TRAV1-2, TRAJ8)
CAVREDPGFQKLVF

SEQ ID NO: 720316 - protein, 14 aa, Homo sapiens
  CDR3 for beta chain variable domain of TCR clone 360158 (TRBV15, TRBJ2-3)
CATRSGTSTDTQYF

SEQ ID NO: 720317 - protein, 13 aa, Homo sapiens
  CDR3 for alpha chain variable domain of TCR clone 360159 (TRAV35, TRAJ42)
CAGFPGSQGNPIF

SEQ ID NO: 720318 - protein, 14 aa, Homo sapiens
  CDR3 for beta chain variable domain of TCR clone 360159 (TRBV19, TRBJ2-1)
CASPTFVLSGEQFI

SEQ ID NO: 720319 - protein, 15 aa, Homo sapiens
  CDR3 for alpha chain variable domain of TCR clone 360160 (TRAV8-4, TRAJ37)
CAVSRGSGNTGKLIF

SEQ ID NO: 720320 - protein, 15 aa, Homo sapiens
  CDR3 for beta chain variable domain of TCR clone 360160 (TRBV12-4, TRBJ1-6)
CASSLGQGFRSPLHF

SEQ ID NO: 720321 - protein, 14 aa, Homo sapiens
  CDR3 for alpha chain variable domain of TCR clone 360161 (TRAV6, TRAJ18)
CAPHRGPTLGRLYF

SEQ ID NO: 720322 - protein, 14 aa, Homo sapiens
  CDR3 for beta chain variable domain of TCR clone 360161 (TRBV4-1, TRBJ2-2)
CASSHYPDTGELFF

SEQ ID NO: 720323 - protein, 14 aa, Homo sapiens
  CDR3 for alpha chain variable domain of TCR clone 360162 (TRAV17, TRAJ6)
CATNPAGGSYIPTF

SEQ ID NO: 720324 - protein, 17 aa, Homo sapiens
  CDR3 for beta chain variable domain of TCR clone 360162 (TRBV5-5, TRBJ1-2)
CASSLGSLDGQSEGYTF

SEQ ID NO: 720325 - protein, 12 aa, Homo sapiens
  CDR3 for alpha chain variable domain of TCR clone 360163 (TRAV20, TRAJ39)
CAVGSAGSMLTF

SEQ ID NO: 720326 - protein, 15 aa, Homo sapiens
  CDR3 for beta chain variable domain of TCR clone 360163 (TRBV27, TRBJ2-1)
CASSNGGGSSNEQFF

SEQ ID NO: 720327 - protein, 13 aa, Homo sapiens
  CDR3 for alpha chain variable domain of TCR clone 360164 (TRAV2, TRAJ40)
CAVVTSGTYKHIF

SEQ ID NO: 720328 - protein, 14 aa, Homo sapiens
  CDR3 for beta chain variable domain of TCR clone 360164 (TRBV19, TRBJ2-1)
CASPTFVLSGEHFF

SEQ ID NO: 720329 - protein, 14 aa, Homo sapiens
  CDR3 for alpha chain variable domain of TCR clone 360165 (TRAV2, TRAJ8)
CAWRGNTGFQKLVF

SEQ ID NO: 720330 - protein, 13 aa, Homo sapiens
  CDR3 for beta chain variable domain of TCR clone 360165 (TRBV6-5, TRBJ2-7)
CASRTSGIHEQYF

SEQ ID NO: 720331 - protein, 15 aa, Homo sapiens
  CDR3 for alpha chain variable domain of TCR clone 360166 (TRAV12-1, TRAJ42)
CVVTRDGGSQGNLIF

SEQ ID NO: 720332 - protein, 14 aa, Homo sapiens
  CDR3 for beta chain variable domain of TCR clone 360166 (TRBV11-2, TRBJ2-3)
CVSSLGGGANTQYF

SEQ ID NO: 720333 - protein, 15 aa, Homo sapiens
  CDR3 for alpha chain variable domain of TCR clone 360167 (TRAV23/DV6, TRAJ13)
CAAWPGGGGYQKVTF

SEQ ID NO: 720334 - protein, 17 aa, Homo sapiens
  CDR3 for beta chain variable domain of TCR clone 360167 (TRBV19, TRBJ2-7)
CASSISFYDNYPYEQYF

SEQ ID NO: 720335 - protein, 14 aa, Homo sapiens
  CDR3 for alpha chain variable domain of TCR clone 360168 (TRAV8-4, TRAJ17)
CAVSEGAAGNKLTF

SEQ ID NO: 720336 - protein, 13 aa, Homo sapiens
  CDR3 for beta chain variable domain of TCR clone 360168 (TRBV19, TRBJ2-1)
SASSMYRVNEQFF

SEQ ID NO: 720337 - protein, 15 aa, Homo sapiens
  CDR3 for alpha chain variable domain of TCR clone 360169 (TRAV13-1, TRAJ50)
CAAKGTETSYDKVIF

SEQ ID NO: 720338 - protein, 18 aa, Homo sapiens
  CDR3 for beta chain variable domain of TCR clone 360169 (TRBV10-3, TRBJ2-1)
CTSVPSVSLRGGVDEQFF

SEQ ID NO: 720339 - protein, 10 aa, Homo sapiens
  CDR3 for alpha chain variable domain of TCR clone 360170 (TRAV1-2, TRAJ20)
CACNDYKLSF

SEQ ID NO: 720340 - protein, 16 aa, Homo sapiens
  CDR3 for beta chain variable domain of TCR clone 360170 (TRBV20-1, TRBJ2-1)
CVARDLKQGMNNEQFF

SEQ ID NO: 720341 - protein, 13 aa, Homo sapiens
  CDR3 for alpha chain variable domain of TCR clone 360171 (TRAV1-1, TRAJ9)
CAAKHTGGFTTIF

SEQ ID NO: 720342 - protein, 16 aa, Homo sapiens
  CDR3 for beta chain variable domain of TCR clone 360171 (TRBV7-2, TRBJ2-5)
CASSSKWLSGQETQYF

SEQ ID NO: 720343 - protein, 15 aa, Homo sapiens
  CDR3 for alpha chain variable domain of TCR clone 360172 (TRAV3, TRAJ13)
CAVRVYSGGYQKVTF

SEQ ID NO: 720344 - protein, 13 aa, Homo sapiens
  CDR3 for beta chain variable domain of TCR clone 360172 (TRBV7-3, TRBJ1-1)
CASSQDWGAEAFF

SEQ ID NO: 720345 - protein, 14 aa, Homo sapiens
  CDR3 for alpha chain variable domain of TCR clone 360173 (TRAV26-1, TRAJ34)
CIVRVAYNTDKLIF

SEQ ID NO: 720346 - protein, 20 aa, Homo sapiens
  CDR3 for beta chain variable domain of TCR clone 360173 (TRBV28, TRBJ2-1)
CASTPIGRSPGLAGGNEQFF

SEQ ID NO: 720347 - protein, 14 aa, Homo sapiens
  CDR3 for alpha chain variable domain of TCR clone 360174 (TRAV1-2, TRAJ16)
CAFNRFSDGQKLLF

SEQ ID NO: 720348 - protein, 17 aa, Homo sapiens
  CDR3 for beta chain variable domain of TCR clone 360174 (TRBV11-2, TRBJ2-1)
CASSLYPPGVEYNEQFF

SEQ ID NO: 720349 - protein, 15 aa, Homo sapiens
  CDR3 for alpha chain variable domain of TCR clone 360175 (TRAV13-1, TRAJ52)
CAASSPSTSYGKLTF

SEQ ID NO: 720350 - protein, 12 aa, Homo sapiens
  CDR3 for beta chain variable domain of TCR clone 360175 (TRBV14, TRBJ2-5)
CASSHLKETQYF

SEQ ID NO: 720351 - protein, 14 aa, Homo sapiens
  CDR3 for alpha chain variable domain of TCR clone 360176 (TRAV20, TRAJ13)
CAVLNSGGYQKVTF

SEQ ID NO: 720352 - protein, 15 aa, Homo sapiens
  CDR3 for beta chain variable domain of TCR clone 360176 (TRBV5-1, TRBJ2-1)
CASSLVSGGTNEQFF

SEQ ID NO: 720353 - protein, 14 aa, Homo sapiens
  CDR3 for alpha chain variable domain of TCR clone 360177 (TRAV8-4, TRAJ17)
CAVSDQAAGNKLTF

SEQ ID NO: 720354 - protein, 15 aa, Homo sapiens
  CDR3 for beta chain variable domain of TCR clone 360177 (TRBV7-2, TRBJ1-2)
CASSLAPDRGLGYTY

SEQ ID NO: 720355 - protein, 13 aa, Homo sapiens
  CDR3 for alpha chain variable domain of TCR clone 360178 (TRAV8-3, TRAJ36)
CAVGATGANNLFF

SEQ ID NO: 720356 - protein, 16 aa, Homo sapiens
  CDR3 for beta chain variable domain of TCR clone 360178 (TRBV6-6, TRBJ2-3)
CASSYSHAGSTDTQYF

SEQ ID NO: 720357 - protein, 14 aa, Homo sapiens
  CDR3 for alpha chain variable domain of TCR clone 360179 (TRAV12-1, TRAJ15)
CLPPANQAGTALIF

SEQ ID NO: 720358 - protein, 13 aa, Homo sapiens
  CDR3 for beta chain variable domain of TCR clone 360179 (TRBV7-2, TRBJ2-4)
CASSREYANSQYF

SEQ ID NO: 720359 - protein, 10 aa, Homo sapiens
  CDR3 for alpha chain variable domain of TCR clone 360180 (TRAV1-2, TRAJ20)
FACNDYKLSF

SEQ ID NO: 720360 - protein, 16 aa, Homo sapiens
  CDR3 for beta chain variable domain of TCR clone 360180 (TRBV20-1, TRBJ2-1)
CSARDLRQGMNNEQFF

SEQ ID NO: 720361 - protein, 15 aa, Homo sapiens
  CDR3 for alpha chain variable domain of TCR clone 360181 (TRAV17, TRAJ52)
CATEAGGTSHGKLTF

SEQ ID NO: 720362 - protein, 14 aa, Homo sapiens
  CDR3 for beta chain variable domain of TCR clone 360181 (TRBV28, TRBJ1-5)
CASSLGGLVKPQHF

SEQ ID NO: 720363 - protein, 15 aa, Homo sapiens
  CDR3 for alpha chain variable domain of TCR clone 360182 (TRAV26-1, TRAJ17)
CIVSSFKAAGNKLTF

SEQ ID NO: 720364 - protein, 16 aa, Homo sapiens
  CDR3 for beta chain variable domain of TCR clone 360182 (TRBV28, TRBJ1-4)
CASSPAFGTEEGVVFF

SEQ ID NO: 720365 - protein, 13 aa, Homo sapiens
  CDR3 for alpha chain variable domain of TCR clone 360183 (TRAV36/DV7, TRAJ49)
CAVEANTGNQFYF

SEQ ID NO: 720366 - protein, 13 aa, Homo sapiens
  CDR3 for beta chain variable domain of TCR clone 360183 (TRBV10-3, TRBJ2-7)
CASKLAVNYEQYV

SEQ ID NO: 720367 - protein, 12 aa, Homo sapiens
  CDR3 for alpha chain variable domain of TCR clone 360184 (TRAV38-1, TRAJ44)
CASAGTASKLTF

SEQ ID NO: 720368 - protein, 13 aa, Homo sapiens
  CDR3 for beta chain variable domain of TCR clone 360184 (TRBV18, TRBJ1-1)
CASSPYGDTEAFF

SEQ ID NO: 720369 - protein, 15 aa, Homo sapiens
  CDR3 for alpha chain variable domain of TCR clone 360185 (TRAV1-2, TRAJ18)
CAVRDRGSTLGRLYF

SEQ ID NO: 720370 - protein, 15 aa, Homo sapiens
  CDR3 for beta chain variable domain of TCR clone 360185 (TRBV10-3, TRBJ2-1)
CAVSGGREGSDEQFF

SEQ ID NO: 720371 - protein, 18 aa, Homo sapiens
  CDR3 for alpha chain variable domain of TCR clone 360186 (TRAV13-1, TRAJ52)
CAASKRSAGGTSYGKLTF

SEQ ID NO: 720372 - protein, 15 aa, Homo sapiens
  CDR3 for beta chain variable domain of TCR clone 360186 (TRBV4-3, TRBJ2-7)
CASSQGDWGDYEQYF

SEQ ID NO: 720373 - protein, 14 aa, Homo sapiens
  CDR3 for alpha chain variable domain of TCR clone 360187 (TRAV35, TRAJ24)
CAGPRRDSWGKLQF

SEQ ID NO: 720374 - protein, 12 aa, Homo sapiens
  CDR3 for beta chain variable domain of TCR clone 360187 (TRBV12-4, TRBJ2-3)
CASSLGHDTQYF

SEQ ID NO: 720375 - protein, 13 aa, Homo sapiens
  CDR3 for alpha chain variable domain of TCR clone 360188 (TRAV17, TRAJ5)
CALRGTGRRALIF

SEQ ID NO: 720376 - protein, 14 aa, Homo sapiens
  CDR3 for beta chain variable domain of TCR clone 360188 (TRBV12-5, TRBJ2-5)
CASGSRTHQETQYF

SEQ ID NO: 720377 - protein, 14 aa, Homo sapiens
  CDR3 for alpha chain variable domain of TCR clone 360189 (TRAV9-2, TRAJ6)
CALSDPGGSYIPTL

SEQ ID NO: 720378 - protein, 16 aa, Homo sapiens
  CDR3 for beta chain variable domain of TCR clone 360189 (TRBV19, TRBJ2-2)
CASRSPGTGATGELFF

SEQ ID NO: 720379 - protein, 11 aa, Homo sapiens
  CDR3 for alpha chain variable domain of TCR clone 360190 (TRAV23/DV6, TRAJ58)
CAARLLRGETS

SEQ ID NO: 720380 - protein, 13 aa, Homo sapiens
  CDR3 for beta chain variable domain of TCR clone 360190 (TRBV7-8, TRBJ2-7)
CASSLTGGREQYF

SEQ ID NO: 720381 - protein, 12 aa, Homo sapiens
  CDR3 for alpha chain variable domain of TCR clone 360191 (TRAV12-3, TRAJ17)
CAMTLTGNKLTF

SEQ ID NO: 720382 - protein, 13 aa, Homo sapiens
  CDR3 for beta chain variable domain of TCR clone 360191 (TRBV28, TRBJ2-5)
CASRFAGGETQYF

SEQ ID NO: 720383 - protein, 15 aa, Homo sapiens
  CDR3 for alpha chain variable domain of TCR clone 360192 (TRAV3, TRAJ22)
CAVRDRGGSARELAF

SEQ ID NO: 720384 - protein, 13 aa, Homo sapiens
  CDR3 for beta chain variable domain of TCR clone 360192 (TRBV2, TRBJ1-5)
CATAGPGNQPQHF

SEQ ID NO: 720385 - protein, 17 aa, Homo sapiens
  CDR3 for alpha chain variable domain of TCR clone 360193 (TRAV8-4, TRAJ8)
CAVSDGEANTGFQKLVF

SEQ ID NO: 720386 - protein, 15 aa, Homo sapiens
  CDR3 for beta chain variable domain of TCR clone 360193 (TRBV6-3, TRBJ2-7)
CASSSPGTVFYEQYF

SEQ ID NO: 720387 - protein, 14 aa, Homo sapiens
  CDR3 for alpha chain variable domain of TCR clone 360194 (TRAV38-1, TRAJ57)
CAFMNTGGSEKLVS

SEQ ID NO: 720388 - protein, 12 aa, Homo sapiens
  CDR3 for beta chain variable domain of TCR clone 360194 (TRBV20-1, TRBJ1-5)
CSTSQGNQPQHF

SEQ ID NO: 720389 - protein, 16 aa, Homo sapiens
  CDR3 for alpha chain variable domain of TCR clone 360195 (TRAV3, TRAJ28)
CAVLPRSGAGSYQLTF

SEQ ID NO: 720390 - protein, 13 aa, Homo sapiens
  CDR3 for beta chain variable domain of TCR clone 360195 (TRBV12-4, TRBJ2-5)
CANRLAVQETQYF

SEQ ID NO: 720391 - protein, 12 aa, Homo sapiens
  CDR3 for alpha chain variable domain of TCR clone 360196 (TRAV13-1, TRAJ21)
CAAKEGFNKFYS

SEQ ID NO: 720392 - protein, 17 aa, Homo sapiens
  CDR3 for beta chain variable domain of TCR clone 360196 (TRBV20-1, TRBJ2-1)
CSASSSGLAGSYNEQFF

SEQ ID NO: 720393 - protein, 14 aa, Homo sapiens
  CDR3 for alpha chain variable domain of TCR clone 360197 (TRAV3, TRAJ7)
CAVREEEREQQTRF

SEQ ID NO: 720394 - protein, 12 aa, Homo sapiens
  CDR3 for beta chain variable domain of TCR clone 360197 (TRBV7-8, TRBJ2-7)
CASSLGDREQSF

SEQ ID NO: 720395 - protein, 13 aa, Homo sapiens
  CDR3 for alpha chain variable domain of TCR clone 360198 (TRAV12-3, TRAJ7)
CAMTPYGNKRLAF

SEQ ID NO: 720396 - protein, 20 aa, Homo sapiens
  CDR3 for beta chain variable domain of TCR clone 360198 (TRBV7-8, TRBJ2-2)
CASSHLFPGPTIHITGELFF

SEQ ID NO: 720397 - protein, 14 aa, Homo sapiens
  CDR3 for alpha chain variable domain of TCR clone 360199 (TRAV1-2, TRAJ16)
CAVNRFSDGQKLLF

SEQ ID NO: 720398 - protein, 14 aa, Homo sapiens
  CDR3 for beta chain variable domain of TCR clone 360199 (TRBV7-2, TRBJ2-7)
CASSPRDGAYEQYF

SEQ ID NO: 720399 - protein, 11 aa, Homo sapiens
  CDR3 for alpha chain variable domain of TCR clone 360200 (TRAV13-2, TRAJ39)
CAENAGNMLTF

SEQ ID NO: 720400 - protein, 12 aa, Homo sapiens
  CDR3 for beta chain variable domain of TCR clone 360200 (TRBV12-4, TRBJ2-7)
CASSLGGYEQYF

SEQ ID NO: 720401 - protein, 12 aa, Homo sapiens
  CDR3 for alpha chain variable domain of TCR clone 360201 (TRAV13-1, TRAJ20)
CAASMWDYKLSF

SEQ ID NO: 720402 - protein, 15 aa, Homo sapiens
  CDR3 for beta chain variable domain of TCR clone 360201 (TRBV11-3, TRBJ2-3)
CASNGGLDSTDTQYF

SEQ ID NO: 720403 - protein, 14 aa, Homo sapiens
  CDR3 for alpha chain variable domain of TCR clone 360202 (TRAV27, TRAJ44)
CAASFTGTASKLTF

SEQ ID NO: 720404 - protein, 11 aa, Homo sapiens
  CDR3 for beta chain variable domain of TCR clone 360202 (TRBV29-1, TRBJ2-5)
CSEDRTGTQYF

SEQ ID NO: 720405 - protein, 14 aa, Homo sapiens
  CDR3 for alpha chain variable domain of TCR clone 360203 (TRAV12-3, TRAJ9)
CAMSPNTGGFKTIF

SEQ ID NO: 720406 - protein, 12 aa, Homo sapiens
  CDR3 for beta chain variable domain of TCR clone 360203 (TRBV19, TRBJ1-5)
CASSIAQQQQQF

SEQ ID NO: 720407 - protein, 12 aa, Homo sapiens
  CDR3 for alpha chain variable domain of TCR clone 360204 (TRAV26-1, TRAJ43)
CIVRPRGDDMRF

SEQ ID NO: 720408 - protein, 14 aa, Homo sapiens
  CDR3 for beta chain variable domain of TCR clone 360204 (TRBV25-1, TRBJ1-1)
CASTHLGGNTEAFF

SEQ ID NO: 720409 - protein, 15 aa, Homo sapiens
  CDR3 for alpha chain variable domain of TCR clone 360205 (TRAV38-2/DV8, TRAJ43)
CAYRSWALCPITCAF

SEQ ID NO: 720410 - protein, 12 aa, Homo sapiens
  CDR3 for beta chain variable domain of TCR clone 360205 (TRBV28, TRBJ1-1)
CASNSGDTEAFF

SEQ ID NO: 720411 - protein, 15 aa, Homo sapiens
  CDR3 for alpha chain variable domain of TCR clone 360206 (TRAV27, TRAJ33)
CAGADIMGSNYQLIW

SEQ ID NO: 720412 - protein, 13 aa, Homo sapiens
  CDR3 for beta chain variable domain of TCR clone 360206 (TRBV28, TRBJ1-2)
CASSLQGRGGYTF

SEQ ID NO: 720413 - protein, 12 aa, Homo sapiens
  CDR3 for alpha chain variable domain of TCR clone 360207 (TRAV12-3, TRAJ17)
CAMTLTGNKLTF

SEQ ID NO: 720414 - protein, 15 aa, Homo sapiens
  CDR3 for beta chain variable domain of TCR clone 360207 (TRBV12-4, TRBJ2-5)
CASSPSTGLQETQYF

SEQ ID NO: 720415 - protein, 12 aa, Homo sapiens
  CDR3 for alpha chain variable domain of TCR clone 360208 (TRAV8-3, TRAJ20)
CAVGANDYKLSF

SEQ ID NO: 720416 - protein, 14 aa, Homo sapiens
  CDR3 for beta chain variable domain of TCR clone 360208 (TRBV7-3, TRBJ1-1)
CASSLKGGNTEAFF

SEQ ID NO: 720417 - protein, 12 aa, Homo sapiens
  CDR3 for alpha chain variable domain of TCR clone 360209 (TRAV12-3, TRAJ42)
CAPGGSQGNLIL

SEQ ID NO: 720418 - protein, 13 aa, Homo sapiens
  CDR3 for beta chain variable domain of TCR clone 360209 (TRBV5-7, TRBJ2-6)
CASTSSGANVLTF

SEQ ID NO: 720419 - protein, 12 aa, Homo sapiens
  CDR3 for alpha chain variable domain of TCR clone 360210 (TRAV29/DV5, TRAJ49)
CAATDTGNQFYF

SEQ ID NO: 720420 - protein, 16 aa, Homo sapiens
  CDR3 for beta chain variable domain of TCR clone 360210 (TRBV5-4, TRBJ2-1)
CASSLVGSGQDNEQFF

SEQ ID NO: 720421 - protein, 16 aa, Homo sapiens
  CDR3 for alpha chain variable domain of TCR clone 360211 (TRAV30, TRAJ24)
CGTEIVDADSWGKFQF

SEQ ID NO: 720422 - protein, 15 aa, Homo sapiens
  CDR3 for beta chain variable domain of TCR clone 360211 (TRBV7-2, TRBJ1-1)
CASSFAGDRDTEAFF

SEQ ID NO: 720423 - protein, 13 aa, Homo sapiens
  CDR3 for alpha chain variable domain of TCR clone 360212 (TRAV8-3, TRAJ43)
CAVGPDNNNDMRF

SEQ ID NO: 720424 - protein, 16 aa, Homo sapiens
  CDR3 for beta chain variable domain of TCR clone 360212 (TRBV12-4, TRBJ1-5)
CASSRPVGGSNQPQHF

SEQ ID NO: 720425 - protein, 14 aa, Homo sapiens
  CDR3 for alpha chain variable domain of TCR clone 360213 (TRAV38-2/DV8, TRAJ47)
CAYRTLEYGNKLDF

SEQ ID NO: 720426 - protein, 17 aa, Homo sapiens
  CDR3 for beta chain variable domain of TCR clone 360213 (TRBV3-1, TRBJ1-6)
CASSHRTGARGNSPLHF

SEQ ID NO: 720427 - protein, 15 aa, Homo sapiens
  CDR3 for alpha chain variable domain of TCR clone 360214 (TRAV21, TRAJ53)
CATLNSGGSNYKLTF

SEQ ID NO: 720428 - protein, 16 aa, Homo sapiens
  CDR3 for beta chain variable domain of TCR clone 360214 (TRBV24-1, TRBJ2-3)
CATSDLGTGATDTQYF

SEQ ID NO: 720429 - protein, 22 aa, Homo sapiens
  CDR3 for alpha chain variable domain of TCR clone 360215 (TRAV27, TRAJ41)
CAVRTQIPDIQNPDPPVYQLRD

SEQ ID NO: 720430 - protein, 16 aa, Homo sapiens
  CDR3 for beta chain variable domain of TCR clone 360215 (TRBV5-1, TRBJ2-3)
CASSLGLAVYTDTQYF

SEQ ID NO: 720431 - protein, 14 aa, Homo sapiens
  CDR3 for alpha chain variable domain of TCR clone 360216 (TRAV4, TRAJ12)
CLVGYMDRGYKLIF

SEQ ID NO: 720432 - protein, 14 aa, Homo sapiens
  CDR3 for beta chain variable domain of TCR clone 360216 (TRBV27, TRBJ1-1)
CASSPGGGATEAFF

SEQ ID NO: 720433 - protein, 20 aa, Homo sapiens
  CDR3 for alpha chain variable domain of TCR clone 360217 (TRAV13-1, )
CAASPVDIQNPDPAVYQLRD

SEQ ID NO: 720434 - protein, 13 aa, Homo sapiens
  CDR3 for beta chain variable domain of TCR clone 360217 (TRBV20-1, TRBJ2-2)
CSASAAGTGELFF

SEQ ID NO: 720435 - protein, 14 aa, Homo sapiens
  CDR3 for alpha chain variable domain of TCR clone 360218 (TRAV12-3, TRAJ29)
CALSPYSGNTPLVF

SEQ ID NO: 720436 - protein, 15 aa, Homo sapiens
  CDR3 for beta chain variable domain of TCR clone 360218 (TRBV27, TRBJ2-1)
CASSNGGGSSNEQFF

SEQ ID NO: 720437 - protein, 15 aa, Homo sapiens
  CDR3 for alpha chain variable domain of TCR clone 360219 (TRAV17, TRAJ57)
CATGPSPGGSEKLVF

SEQ ID NO: 720438 - protein, 15 aa, Homo sapiens
  CDR3 for beta chain variable domain of TCR clone 360219 (TRBV25-1, TRBJ1-4)
CASSPGDSTNEKLFF

SEQ ID NO: 720439 - protein, 13 aa, Homo sapiens
  CDR3 for alpha chain variable domain of TCR clone 360220 (TRAV8-3, TRAJ4)
WVFYSGGYIKLIF

SEQ ID NO: 720440 - protein, 14 aa, Homo sapiens
  CDR3 for beta chain variable domain of TCR clone 360220 (TRBV7-9, TRBJ2-3)
CASSLEDGTDTQYF

SEQ ID NO: 720441 - protein, 14 aa, Homo sapiens
  CDR3 for alpha chain variable domain of TCR clone 360221 (TRAV3, TRAJ7)
CAVREEEREQQTRF

SEQ ID NO: 720442 - protein, 13 aa, Homo sapiens
  CDR3 for beta chain variable domain of TCR clone 360221 (TRBV12-4, TRBJ1-2)
CASSLRQGKGYTF

SEQ ID NO: 720443 - protein, 14 aa, Homo sapiens
  CDR3 for alpha chain variable domain of TCR clone 360222 (TRAV3, TRAJ34)
CAVRDINNTDKLIF

SEQ ID NO: 720444 - protein, 15 aa, Homo sapiens
  CDR3 for beta chain variable domain of TCR clone 360222 (TRBV20-1, TRBJ2-7)
CSAGDRVSGMDEQYF

SEQ ID NO: 720445 - protein, 15 aa, Homo sapiens
  CDR3 for alpha chain variable domain of TCR clone 360223 (TRAV3, TRAJ29)
CAVRAPLSGNTPLVF

SEQ ID NO: 720446 - protein, 14 aa, Homo sapiens
  CDR3 for beta chain variable domain of TCR clone 360223 (TRBV28, TRBJ1-1)
CQQNKGGLNTEAFF

SEQ ID NO: 720447 - protein, 16 aa, Homo sapiens
  CDR3 for alpha chain variable domain of TCR clone 360224 (TRAV30, TRAJ24)
CGPEIVDADSWGKFQF

SEQ ID NO: 720448 - protein, 14 aa, Homo sapiens
  CDR3 for beta chain variable domain of TCR clone 360224 (TRBV12-5, TRBJ2-5)
CASGSRRHQETQYF

SEQ ID NO: 720449 - protein, 16 aa, Homo sapiens
  CDR3 for alpha chain variable domain of TCR clone 360225 (TRAV3, TRAJ36)
CAVRDPYQTGANNLFF

SEQ ID NO: 720450 - protein, 13 aa, Homo sapiens
  CDR3 for beta chain variable domain of TCR clone 360225 (TRBV25-1, TRBJ1-2)
CASSEAGASGYTF

SEQ ID NO: 720451 - protein, 14 aa, Homo sapiens
  CDR3 for alpha chain variable domain of TCR clone 360226 (TRAV8-3, TRAJ6)
CAVGASGGSYIPTF

SEQ ID NO: 720452 - protein, 16 aa, Homo sapiens
  CDR3 for beta chain variable domain of TCR clone 360226 (TRBV12-4, TRBJ1-5)
CASSRPVGGSNQPQHF

SEQ ID NO: 720453 - protein, 15 aa, Homo sapiens
  CDR3 for alpha chain variable domain of TCR clone 360227 (TRAV26-1, TRAJ29)
CIVRAEGSGNTPLIF

SEQ ID NO: 720454 - protein, 15 aa, Homo sapiens
  CDR3 for beta chain variable domain of TCR clone 360227 (TRBV7-9, TRBJ1-5)
CASSQGHQPNQPQHF

SEQ ID NO: 720455 - protein, 10 aa, Homo sapiens
  CDR3 for alpha chain variable domain of TCR clone 360228 (TRAV5, TRAJ34)
CAEDTGKLIF

SEQ ID NO: 720456 - protein, 12 aa, Homo sapiens
  CDR3 for beta chain variable domain of TCR clone 360228 (TRBV11-2, TRBJ2-2)
CASSLGGGELFF

SEQ ID NO: 720457 - protein, 14 aa, Homo sapiens
  CDR3 for alpha chain variable domain of TCR clone 360229 (TRAV13-2, TRAJ17)
CAENSKAAGNKLTF

SEQ ID NO: 720458 - protein, 14 aa, Homo sapiens
  CDR3 for beta chain variable domain of TCR clone 360229 (TRBV4-2, TRBJ2-1)
CASGLDRAYNEQFF

SEQ ID NO: 720459 - protein, 15 aa, Homo sapiens
  CDR3 for alpha chain variable domain of TCR clone 360230 (TRAV26-1, TRAJ20)
CIVRVAGSNDDKLSF

SEQ ID NO: 720460 - protein, 17 aa, Homo sapiens
  CDR3 for beta chain variable domain of TCR clone 360230 (TRBV11-2, TRBJ2-1)
CASSLYPPGVEYNEQFF

SEQ ID NO: 720461 - protein, 14 aa, Homo sapiens
  CDR3 for alpha chain variable domain of TCR clone 360231 (TRAV38-1, TRAJ45)
CACYSGGRADGLTF

SEQ ID NO: 720462 - protein, 20 aa, Homo sapiens
  CDR3 for beta chain variable domain of TCR clone 360231 (TRBV28, TRBJ2-1)
CASTPIGRSPGLAGGNEQFF

SEQ ID NO: 720463 - protein, 13 aa, Homo sapiens
  CDR3 for alpha chain variable domain of TCR clone 360232 (TRAV1-2, TRAJ9)
CAALNTGGFKTFF

SEQ ID NO: 720464 - protein, 13 aa, Homo sapiens
  CDR3 for beta chain variable domain of TCR clone 360232 (TRBV19, TRBJ1-2)
CASSVPGQDGYTF

SEQ ID NO: 720465 - protein, 14 aa, Homo sapiens
  CDR3 for alpha chain variable domain of TCR clone 360233 (TRAV6, TRAJ8)
CALDNDTGFQKLVF

SEQ ID NO: 720466 - protein, 11 aa, Homo sapiens
  CDR3 for beta chain variable domain of TCR clone 360233 (TRBV11-2, TRBJ1-1)
CASSINTEAFF

SEQ ID NO: 720467 - protein, 13 aa, Homo sapiens
  CDR3 for alpha chain variable domain of TCR clone 360234 (TRAV8-1, TRAJ34)
CAVNAGNTDKLIF

SEQ ID NO: 720468 - protein, 12 aa, Homo sapiens
  CDR3 for beta chain variable domain of TCR clone 360234 (TRBV20-1, TRBJ2-1)
QCWGGTYNEQFF

SEQ ID NO: 720469 - protein, 14 aa, Homo sapiens
  CDR3 for alpha chain variable domain of TCR clone 360235 (TRAV12-2, TRAJ13)
CAVKKTGGYQKVTF

SEQ ID NO: 720470 - protein, 14 aa, Homo sapiens
  CDR3 for beta chain variable domain of TCR clone 360235 (TRBV6-1, TRBJ1-3)
CASVQGGGGNTVYF

SEQ ID NO: 720471 - protein, 16 aa, Homo sapiens
  CDR3 for alpha chain variable domain of TCR clone 360236 (TRAV30, TRAJ24)
CGTEIVDADSWGKFQF

SEQ ID NO: 720472 - protein, 13 aa, Homo sapiens
  CDR3 for beta chain variable domain of TCR clone 360236 (TRBV11-2, TRBJ1-3)
CASSPTGGNTIYF

SEQ ID NO: 720473 - protein, 14 aa, Homo sapiens
  CDR3 for alpha chain variable domain of TCR clone 360237 (TRAV12-1, TRAJ17)
CVVNYKAAGNKLTF

SEQ ID NO: 720474 - protein, 13 aa, Homo sapiens
  CDR3 for beta chain variable domain of TCR clone 360237 (TRBV11-3, TRBJ2-7)
CASSLDKLYEQYF

SEQ ID NO: 720475 - protein, 13 aa, Homo sapiens
  CDR3 for alpha chain variable domain of TCR clone 360238 (TRAV27, TRAJ45)
CRSSGGGADGLTF

SEQ ID NO: 720476 - protein, 14 aa, Homo sapiens
  CDR3 for beta chain variable domain of TCR clone 360238 (TRBV7-9, TRBJ2-3)
CASSSMVGFGEQYF

SEQ ID NO: 720477 - protein, 13 aa, Homo sapiens
  CDR3 for alpha chain variable domain of TCR clone 360239 (TRAV17, TRAJ9)
CATFLTGGFKTIF

SEQ ID NO: 720478 - protein, 16 aa, Homo sapiens
  CDR3 for beta chain variable domain of TCR clone 360239 (TRBV5-6, TRBJ1-4)
CASSPSGGLKTEKLFS

SEQ ID NO: 720479 - protein, 14 aa, Homo sapiens
  CDR3 for alpha chain variable domain of TCR clone 360240 (TRAV12-3, TRAJ10)
SHLPLTGGGNKLTF

SEQ ID NO: 720480 - protein, 12 aa, Homo sapiens
  CDR3 for beta chain variable domain of TCR clone 360240 (TRBV7-3, TRBJ2-1)
CASSFQSGPQFF

SEQ ID NO: 720481 - protein, 15 aa, Homo sapiens
  CDR3 for alpha chain variable domain of TCR clone 360241 (TRAV2, TRAJ9)
CAAEDRGTGGFKTIF

SEQ ID NO: 720482 - protein, 16 aa, Homo sapiens
  CDR3 for beta chain variable domain of TCR clone 360241 (TRBV24-1, TRBJ2-3)
CATSDAGTGATDTQYF

SEQ ID NO: 720483 - protein, 14 aa, Homo sapiens
  CDR3 for alpha chain variable domain of TCR clone 360242 (TRAV16, TRAJ57)
CDLSGQGGSEKLVF

SEQ ID NO: 720484 - protein, 13 aa, Homo sapiens
  CDR3 for beta chain variable domain of TCR clone 360242 (TRBV5-4, TRBJ2-1)
CASSLQGPREQSF

SEQ ID NO: 720485 - protein, 13 aa, Homo sapiens
  CDR3 for alpha chain variable domain of TCR clone 360243 (TRAV13-1, TRAJ10)
CAALEGGGDKLTF

SEQ ID NO: 720486 - protein, 17 aa, Homo sapiens
  CDR3 for beta chain variable domain of TCR clone 360243 (TRBV7-3, TRBJ2-2)
RASSLSGTSGGTGELFF

SEQ ID NO: 720487 - protein, 17 aa, Homo sapiens
  CDR3 for alpha chain variable domain of TCR clone 360244 (TRAV8-6, TRAJ58)
CAVSPWVGETSGSRLTF

SEQ ID NO: 720488 - protein, 14 aa, Homo sapiens
  CDR3 for beta chain variable domain of TCR clone 360244 (TRBV19, TRBJ2-1)
CASPTFVLSGEQFF

SEQ ID NO: 720489 - protein, 13 aa, Homo sapiens
  CDR3 for alpha chain variable domain of TCR clone 360245 (TRAV8-6, TRAJ21)
CAVSPSSLNKFYF

SEQ ID NO: 720490 - protein, 13 aa, Homo sapiens
  CDR3 for beta chain variable domain of TCR clone 360245 (TRBV7-9, TRBJ2-5)
CQQLRHGARDQYF

SEQ ID NO: 720491 - protein, 16 aa, Homo sapiens
  CDR3 for alpha chain variable domain of TCR clone 360246 (TRAV3, TRAJ37)
CAVRPHVSGNTGKLIF

SEQ ID NO: 720492 - protein, 17 aa, Homo sapiens
  CDR3 for beta chain variable domain of TCR clone 360246 (TRBV7-2, TRBJ2-7)
CASSFETSGSTSSTSGR

SEQ ID NO: 720493 - protein, 13 aa, Homo sapiens
  CDR3 for alpha chain variable domain of TCR clone 360247 (TRAV13-1, TRAJ10)
CAANAGGGNKLTF

SEQ ID NO: 720494 - protein, 14 aa, Homo sapiens
  CDR3 for beta chain variable domain of TCR clone 360247 (TRBV12-4, TRBJ2-7)
CASSPAGLKYEQYF

SEQ ID NO: 720495 - protein, 23 aa, Homo sapiens
  CDR3 for alpha chain variable domain of TCR clone 360248 (TRAV9-2, TRAJ38)
CALSNAGNNHIQNPDPAVYQLRD

SEQ ID NO: 720496 - protein, 15 aa, Homo sapiens
  CDR3 for beta chain variable domain of TCR clone 360248 (TRBV29-1, TRBJ2-1)
CSVGRHALFYNEQFF

SEQ ID NO: 720497 - protein, 11 aa, Homo sapiens
  CDR3 for alpha chain variable domain of TCR clone 360249 (TRAV2, TRAJ33)
CAVESNYQLIW

SEQ ID NO: 720498 - protein, 16 aa, Homo sapiens
  CDR3 for beta chain variable domain of TCR clone 360249 (TRBV18, TRBJ2-3)
CASSPLDGLVSDTQYF

SEQ ID NO: 720499 - protein, 15 aa, Homo sapiens
  CDR3 for alpha chain variable domain of TCR clone 360250 (TRAV17, TRAJ56)
CATDANTGANSKLTF

SEQ ID NO: 720500 - protein, 14 aa, Homo sapiens
  CDR3 for beta chain variable domain of TCR clone 360250 (TRBV19, TRBJ1-5)
CASSLGTGGQSQHF

SEQ ID NO: 720501 - protein, 12 aa, Homo sapiens
  CDR3 for alpha chain variable domain of TCR clone 360251 (TRAV13-1, TRAJ49)
CAASPMGNQFYS

SEQ ID NO: 720502 - protein, 10 aa, Homo sapiens
  CDR3 for beta chain variable domain of TCR clone 360251 (TRBV15, TRBJ2-7)
AETGGYEQYF

SEQ ID NO: 720503 - protein, 10 aa, Homo sapiens
  CDR3 for alpha chain variable domain of TCR clone 360252 (TRAV1-2, TRAJ20)
CSLNDYNLSF

SEQ ID NO: 720504 - protein, 16 aa, Homo sapiens
  CDR3 for beta chain variable domain of TCR clone 360252 (TRBV20-1, TRBJ1-1)
CSARALTQGMNTEAFF

SEQ ID NO: 720505 - protein, 14 aa, Homo sapiens
  CDR3 for alpha chain variable domain of TCR clone 360253 (TRAV20, TRAJ9)
CAVQASTGGFKTIF

SEQ ID NO: 720506 - protein, 12 aa, Homo sapiens
  CDR3 for beta chain variable domain of TCR clone 360253 (TRBV5-4, TRBJ2-7)
CASSWAGQGENF

SEQ ID NO: 720507 - protein, 13 aa, Homo sapiens
  CDR3 for alpha chain variable domain of TCR clone 360254 (TRAV26-1, TRAJ31)
CIVRVDSNARLMF

SEQ ID NO: 720508 - protein, 17 aa, Homo sapiens
  CDR3 for beta chain variable domain of TCR clone 360254 (TRBV11-2, TRBJ2-1)
CASSLYPPGVEYNEQFF

SEQ ID NO: 720509 - protein, 11 aa, Homo sapiens
  CDR3 for alpha chain variable domain of TCR clone 360255 (TRAV17, TRAJ43)
CATPRSNDMRF

SEQ ID NO: 720510 - protein, 14 aa, Homo sapiens
  CDR3 for beta chain variable domain of TCR clone 360255 (TRBV11-1, TRBJ2-7)
CASSFRQGSYEQYF

SEQ ID NO: 720511 - protein, 12 aa, Homo sapiens
  CDR3 for alpha chain variable domain of TCR clone 360256 (TRAV12-3, TRAJ17)
CAMTLTGNKLTF

SEQ ID NO: 720512 - protein, 14 aa, Homo sapiens
  CDR3 for beta chain variable domain of TCR clone 360256 (TRBV7-3, TRBJ2-1)
CASSLAVGTNEQFF

SEQ ID NO: 720513 - protein, 13 aa, Homo sapiens
  CDR3 for alpha chain variable domain of TCR clone 360257 (TRAV27, TRAJ37)
CAGGPSNTGKLIF

SEQ ID NO: 720514 - protein, 15 aa, Homo sapiens
  CDR3 for beta chain variable domain of TCR clone 360257 (TRBV6-6, TRBJ2-7)
CASSYSYGGSYEQYF

SEQ ID NO: 720515 - protein, 17 aa, Homo sapiens
  CDR3 for alpha chain variable domain of TCR clone 360258 (TRAV3, TRAJ6)
CAVRDGPRAGGSYLPTF

SEQ ID NO: 720516 - protein, 13 aa, Homo sapiens
  CDR3 for beta chain variable domain of TCR clone 360258 (TRBV7-9, TRBJ2-5)
CASSSTGTGTQYF

SEQ ID NO: 720517 - protein, 15 aa, Homo sapiens
  CDR3 for alpha chain variable domain of TCR clone 360259 (TRAV38-2/DV8, TRAJ57)
CAYKSGLGGPEKLVF

SEQ ID NO: 720518 - protein, 16 aa, Homo sapiens
  CDR3 for beta chain variable domain of TCR clone 360259 (TRBV28, TRBJ1-5)
CASSFRGGYSNQPQHF

SEQ ID NO: 720519 - protein, 14 aa, Homo sapiens
  CDR3 for alpha chain variable domain of TCR clone 360260 (TRAV9-2, TRAJ9)
CALTLSTGGFKTIV

SEQ ID NO: 720520 - protein, 16 aa, Homo sapiens
  CDR3 for beta chain variable domain of TCR clone 360260 (TRBV7-6, TRBJ2-1)
CASSAPGPSSYNEQFF

SEQ ID NO: 720521 - protein, 15 aa, Homo sapiens
  CDR3 for alpha chain variable domain of TCR clone 360261 (TRAV8-3, TRAJ45)
CALSYSGGGADGLTF

SEQ ID NO: 720522 - protein, 17 aa, Homo sapiens
  CDR3 for beta chain variable domain of TCR clone 360261 (TRBV11-2, TRBJ2-1)
CASSLYPPGVEYNEQFF

SEQ ID NO: 720523 - protein, 13 aa, Homo sapiens
  CDR3 for alpha chain variable domain of TCR clone 360262 (TRAV26-1, TRAJ48)
CIVRVVGDEKLTF

SEQ ID NO: 720524 - protein, 15 aa, Homo sapiens
  CDR3 for beta chain variable domain of TCR clone 360262 (TRBV12-4, TRBJ2-5)
CASSPPTGLQETQYF

SEQ ID NO: 720525 - protein, 14 aa, Homo sapiens
  CDR3 for alpha chain variable domain of TCR clone 360263 (TRAV12-2, TRAJ48)
CAVNAFLGDEKLTF

SEQ ID NO: 720526 - protein, 13 aa, Homo sapiens
  CDR3 for beta chain variable domain of TCR clone 360263 (TRBV28, TRBJ2-7)
CAGAQQGLDEQYF

SEQ ID NO: 720527 - protein, 14 aa, Homo sapiens
  CDR3 for alpha chain variable domain of TCR clone 360264 (TRAV35, TRAJ22)
CAGLRPGSARQLTF

SEQ ID NO: 720528 - protein, 13 aa, Homo sapiens
  CDR3 for beta chain variable domain of TCR clone 360264 (TRBV18, TRBJ1-1)
CASSPNGDTEAFF

SEQ ID NO: 720529 - protein, 13 aa, Homo sapiens
  CDR3 for alpha chain variable domain of TCR clone 360265 (TRAV27, TRAJ45)
CRSSGGGADGLTF

SEQ ID NO: 720530 - protein, 15 aa, Homo sapiens
  CDR3 for beta chain variable domain of TCR clone 360265 (TRBV11-2, TRBJ2-1)
CASSLYPQGSSTMSS

SEQ ID NO: 720531 - protein, 14 aa, Homo sapiens
  CDR3 for alpha chain variable domain of TCR clone 360266 (TRAV17, TRAJ6)
CATVFQGGSYIPTF

SEQ ID NO: 720532 - protein, 12 aa, Homo sapiens
  CDR3 for beta chain variable domain of TCR clone 360266 (TRBV7-9, TRBJ1-1)
CASSLVRGEAFF

SEQ ID NO: 720533 - protein, 14 aa, Homo sapiens
  CDR3 for alpha chain variable domain of TCR clone 360267 (TRAV29/DV5, TRAJ36)
CAARRKTGANNLFF

SEQ ID NO: 720534 - protein, 13 aa, Homo sapiens
  CDR3 for beta chain variable domain of TCR clone 360267 (TRBV12-4, TRBJ1-5)
CASSPDRAQPQHF

SEQ ID NO: 720535 - protein, 14 aa, Homo sapiens
  CDR3 for alpha chain variable domain of TCR clone 360268 (TRAV12-3, TRAJ10)
SHLPLTGGGNKLTF

SEQ ID NO: 720536 - protein, 14 aa, Homo sapiens
  CDR3 for beta chain variable domain of TCR clone 360268 (TRBV25-1, TRBJ1-1)
CASTHLGANTEAFF

SEQ ID NO: 720537 - protein, 15 aa, Homo sapiens
  CDR3 for alpha chain variable domain of TCR clone 360269 (TRAV13-2, TRAJ10)
CAENRDTGGGNKLTF

SEQ ID NO: 720538 - protein, 15 aa, Homo sapiens
  CDR3 for beta chain variable domain of TCR clone 360269 (TRBV7-2, TRBJ2-1)
CASSSGLAGGNEQFF

SEQ ID NO: 720539 - protein, 14 aa, Homo sapiens
  CDR3 for alpha chain variable domain of TCR clone 360270 (TRAV39, TRAJ23)
CAVTPTRAGGKLIF

SEQ ID NO: 720540 - protein, 11 aa, Homo sapiens
  CDR3 for beta chain variable domain of TCR clone 360270 (TRBV7-8, TRBJ2-7)
CASSLSLEQYF

SEQ ID NO: 720541 - protein, 14 aa, Homo sapiens
  CDR3 for alpha chain variable domain of TCR clone 360271 (TRAV13-1, TRAJ48)
CAASRSFGNEKLTF

SEQ ID NO: 720542 - protein, 14 aa, Homo sapiens
  CDR3 for beta chain variable domain of TCR clone 360271 (TRBV7-2, TRBJ2-7)
CASSPKTSFYEQYF

SEQ ID NO: 720543 - protein, 12 aa, Homo sapiens
  CDR3 for alpha chain variable domain of TCR clone 360272 (TRAV23/DV6, TRAJ30)
CAASKGDDKVIF

SEQ ID NO: 720544 - protein, 18 aa, Homo sapiens
  CDR3 for beta chain variable domain of TCR clone 360272 (TRBV10-3, TRBJ2-3)
CAISESRVGPMRGYTQYF

SEQ ID NO: 720545 - protein, 11 aa, Homo sapiens
  CDR3 for alpha chain variable domain of TCR clone 360273 (TRAV2, TRAJ13)
CASGGYQKVTF

SEQ ID NO: 720546 - protein, 14 aa, Homo sapiens
  CDR3 for beta chain variable domain of TCR clone 360273 (TRBV4-3, TRBJ2-2)
CASSPGGVNGELFF

SEQ ID NO: 720547 - protein, 11 aa, Homo sapiens
  CDR3 for alpha chain variable domain of TCR clone 360274 (TRAV2, TRAJ33)
CAVESNYQLIC

SEQ ID NO: 720548 - protein, 17 aa, Homo sapiens
  CDR3 for beta chain variable domain of TCR clone 360274 (TRBV13, TRBJ2-3)
CASSLSRVAGGRNTQYF

SEQ ID NO: 720549 - protein, 15 aa, Homo sapiens
  CDR3 for alpha chain variable domain of TCR clone 360275 (TRAV3, TRAJ22)
CAARDRGGSARQLTF

SEQ ID NO: 720550 - protein, 14 aa, Homo sapiens
  CDR3 for beta chain variable domain of TCR clone 360275 (TRBV20-1, TRBJ1-1)
CSAQTRIGGTEAFF

SEQ ID NO: 720551 - protein, 12 aa, Homo sapiens
  CDR3 for alpha chain variable domain of TCR clone 360276 (TRAV3, TRAJ21)
CCERTGLQQILL

SEQ ID NO: 720552 - protein, 13 aa, Homo sapiens
  CDR3 for beta chain variable domain of TCR clone 360276 (TRBV9, TRBJ2-1)
CASSPSGGNEQFF

SEQ ID NO: 720553 - protein, 11 aa, Homo sapiens
  CDR3 for alpha chain variable domain of TCR clone 360277 (TRAV21, TRAJ34)
CAVNNTDKLIF

SEQ ID NO: 720554 - protein, 17 aa, Homo sapiens
  CDR3 for beta chain variable domain of TCR clone 360277 (TRBV20-1, TRBJ2-1)
CSARSPSGGPPTMSSSS

SEQ ID NO: 720555 - protein, 16 aa, Homo sapiens
  CDR3 for alpha chain variable domain of TCR clone 360278 (TRAV1-2, TRAJ40)
CAVRGSRTSGTYNYIF

SEQ ID NO: 720556 - protein, 14 aa, Homo sapiens
  CDR3 for beta chain variable domain of TCR clone 360278 (TRBV4-1, TRBJ2-3)
CASSQDSGTDTQYF

SEQ ID NO: 720557 - protein, 17 aa, Homo sapiens
  CDR3 for alpha chain variable domain of TCR clone 360279 (TRAV14/DV4, TRAJ28)
CAMREVSSGAGSYQLTF

SEQ ID NO: 720558 - protein, 14 aa, Homo sapiens
  CDR3 for beta chain variable domain of TCR clone 360279 (TRBV7-3, TRBJ2-1)
CQQPDGGGEVEQFF

SEQ ID NO: 720559 - protein, 18 aa, Homo sapiens
  CDR3 for alpha chain variable domain of TCR clone 360280 (TRAV1-2, TRAJ18)
CAVRDMGDGGSTPGRLYF

SEQ ID NO: 720560 - protein, 16 aa, Homo sapiens
  CDR3 for beta chain variable domain of TCR clone 360280 (TRBV29-1, TRBJ1-2)
CSVEANRDIANYGYTF

SEQ ID NO: 720561 - protein, 14 aa, Homo sapiens
  CDR3 for alpha chain variable domain of TCR clone 360281 (TRAV26-1, TRAJ49)
CIVRPSNTGNQFYF

SEQ ID NO: 720562 - protein, 15 aa, Homo sapiens
  CDR3 for beta chain variable domain of TCR clone 360281 (TRBV19, TRBJ1-1)
CASMGFRDVNTEAYF

SEQ ID NO: 720563 - protein, 15 aa, Homo sapiens
  CDR3 for alpha chain variable domain of TCR clone 360282 (TRAV26-1, TRAJ21)
CIVRVPNYNFNKFYF

SEQ ID NO: 720564 - protein, 16 aa, Homo sapiens
  CDR3 for beta chain variable domain of TCR clone 360282 (TRBV7-9, TRBJ2-3)
CASSLQGNPGADTQYF

SEQ ID NO: 720565 - protein, 13 aa, Homo sapiens
  CDR3 for alpha chain variable domain of TCR clone 360283 (TRAV13-2, TRAJ48)
CAEMDFGNEKLTF

SEQ ID NO: 720566 - protein, 15 aa, Homo sapiens
  CDR3 for beta chain variable domain of TCR clone 360283 (TRBV7-2, TRBJ2-5)
CASSFLRGGEETQYF

SEQ ID NO: 720567 - protein, 18 aa, Homo sapiens
  CDR3 for alpha chain variable domain of TCR clone 360284 (TRAV26-2, TRAJ54)
CILGDVEVGIQGAQKLVF

SEQ ID NO: 720568 - protein, 14 aa, Homo sapiens
  CDR3 for beta chain variable domain of TCR clone 360284 (TRBV7-2, TRBJ2-7)
CASSPKTSFYEQYF

SEQ ID NO: 720569 - protein, 14 aa, Homo sapiens
  CDR3 for alpha chain variable domain of TCR clone 360285 (TRAV21, TRAJ37)
CAVKGSSNTGKLIF

SEQ ID NO: 720570 - protein, 17 aa, Homo sapiens
  CDR3 for beta chain variable domain of TCR clone 360285 (TRBV11-2, TRBJ2-1)
CASSLYPPGVEYNEQFF

SEQ ID NO: 720571 - protein, 14 aa, Homo sapiens
  CDR3 for alpha chain variable domain of TCR clone 360286 (TRAV12-1, TRAJ30)
CVVNIGGRDGKIIF

SEQ ID NO: 720572 - protein, 14 aa, Homo sapiens
  CDR3 for beta chain variable domain of TCR clone 360286 (TRBV7-6, TRBJ2-3)
CASSLGTVTDTHYF

SEQ ID NO: 720573 - protein, 22 aa, Homo sapiens
  CDR3 for alpha chain variable domain of TCR clone 360287 (TRAV26-1, TRAJ30)
CIARVRTEMTRSSLEKGHDFIF

SEQ ID NO: 720574 - protein, 18 aa, Homo sapiens
  CDR3 for beta chain variable domain of TCR clone 360287 (TRBV4-1, TRBJ1-5)
CASSQDPRGQGLNQPQHF

SEQ ID NO: 720575 - protein, 10 aa, Homo sapiens
  CDR3 for alpha chain variable domain of TCR clone 360288 (TRAV26-1, TRAJ22)
RSGSARQLTF

SEQ ID NO: 720576 - protein, 12 aa, Homo sapiens
  CDR3 for beta chain variable domain of TCR clone 360288 (TRBV24-1, TRBJ1-1)
CATLYPDTEAFF

SEQ ID NO: 720577 - protein, 13 aa, Homo sapiens
  CDR3 for alpha chain variable domain of TCR clone 360289 (TRAV17, TRAJ39)
CATEDNAGNMLTF

SEQ ID NO: 720578 - protein, 16 aa, Homo sapiens
  CDR3 for beta chain variable domain of TCR clone 360289 (TRBV19, TRBJ1-2)
CASSPTGGAGGYTLVR

SEQ ID NO: 720579 - protein, 13 aa, Homo sapiens
  CDR3 for alpha chain variable domain of TCR clone 360290 (TRAV21, TRAJ58)
CAVKGASGSRLTF

SEQ ID NO: 720580 - protein, 12 aa, Homo sapiens
  CDR3 for beta chain variable domain of TCR clone 360290 (TRBV20-1, TRBJ2-1)
CSARLGTDEQFF

SEQ ID NO: 720581 - protein, 14 aa, Homo sapiens
  CDR3 for alpha chain variable domain of TCR clone 360291 (TRAV12-2, TRAJ40)
CAVKIPSGTYKYIF

SEQ ID NO: 720582 - protein, 15 aa, Homo sapiens
  CDR3 for beta chain variable domain of TCR clone 360291 (TRBV11-3, TRBJ2-3)
CASLKDRREGDTQYF

SEQ ID NO: 720583 - protein, 13 aa, Homo sapiens
  CDR3 for alpha chain variable domain of TCR clone 360292 (TRAV1-2, TRAJ33)
CAVSEYSNYQLIW

SEQ ID NO: 720584 - protein, 16 aa, Homo sapiens
  CDR3 for beta chain variable domain of TCR clone 360292 (TRBV4-2, TRBJ2-7)
CASSQDGVERGYEQYF

SEQ ID NO: 720585 - protein, 12 aa, Homo sapiens
  CDR3 for alpha chain variable domain of TCR clone 360293 (TRAV12-3, TRAJ17)
CAMTLTGIKLTF

SEQ ID NO: 720586 - protein, 15 aa, Homo sapiens
  CDR3 for beta chain variable domain of TCR clone 360293 (TRBV20-1, TRBJ2-7)
CSARDQVSGMDEQYF

SEQ ID NO: 720587 - protein, 18 aa, Homo sapiens
  CDR3 for alpha chain variable domain of TCR clone 360294 (TRAV26-1, TRAJ44)
CIVRVAGGGISTASKLPF

SEQ ID NO: 720588 - protein, 16 aa, Homo sapiens
  CDR3 for beta chain variable domain of TCR clone 360294 (TRBV20-1, TRBJ2-3)
CSAIFPIGGLTDTQYF

SEQ ID NO: 720589 - protein, 19 aa, Homo sapiens
  CDR3 for alpha chain variable domain of TCR clone 360295 (TRAV25, TRAJ20)
TATQTTDVGILPHDYKLSF

SEQ ID NO: 720590 - protein, 14 aa, Homo sapiens
  CDR3 for beta chain variable domain of TCR clone 360295 (TRBV29-1, TRBJ2-5)
CSVETSGSGETQYF

SEQ ID NO: 720591 - protein, 16 aa, Homo sapiens
  CDR3 for alpha chain variable domain of TCR clone 360296 (TRAV21, TRAJ37)
CALRPRGSSNTGKLIF

SEQ ID NO: 720592 - protein, 13 aa, Homo sapiens
  CDR3 for beta chain variable domain of TCR clone 360296 (TRBV7-9, TRBJ2-5)
CASLSPGQETQYF

SEQ ID NO: 720593 - protein, 13 aa, Homo sapiens
  CDR3 for alpha chain variable domain of TCR clone 360297 (TRAV13-1, TRAJ5)
CTAEHTGRRALTF

SEQ ID NO: 720594 - protein, 13 aa, Homo sapiens
  CDR3 for beta chain variable domain of TCR clone 360297 (TRBV10-2, TRBJ2-1)
CASGASGDAKQFF

SEQ ID NO: 720595 - protein, 16 aa, Homo sapiens
  CDR3 for alpha chain variable domain of TCR clone 360298 (TRAV30, TRAJ24)
CGTEIVDADSWGKFQF

SEQ ID NO: 720596 - protein, 11 aa, Homo sapiens
  CDR3 for beta chain variable domain of TCR clone 360298 (TRBV7-2, TRBJ2-3)
CASSLGDTQYF

SEQ ID NO: 720597 - protein, 14 aa, Homo sapiens
  CDR3 for alpha chain variable domain of TCR clone 360299 (TRAV8-6, TRAJ8)
CAVNENTAFQKLVF

SEQ ID NO: 720598 - protein, 11 aa, Homo sapiens
  CDR3 for beta chain variable domain of TCR clone 360299 (TRBV29-1, TRBJ2-5)
CSEDRTGTQYF

SEQ ID NO: 720599 - protein, 13 aa, Homo sapiens
  CDR3 for alpha chain variable domain of TCR clone 360300 (TRAV13-2, TRAJ48)
CADMDFGNEKLTF

SEQ ID NO: 720600 - protein, 14 aa, Homo sapiens
  CDR3 for beta chain variable domain of TCR clone 360300 (TRBV19, TRBJ2-1)
CASPTFVLSGEQFF

SEQ ID NO: 720601 - protein, 10 aa, Homo sapiens
  CDR3 for alpha chain variable domain of TCR clone 360301 (TRAV8-4, TRAJ43)
CAVSADDMRF

SEQ ID NO: 720602 - protein, 15 aa, Homo sapiens
  CDR3 for beta chain variable domain of TCR clone 360301 (TRBV15, TRBJ2-1)
CATSRTGTPYNEQFF

SEQ ID NO: 720603 - protein, 14 aa, Homo sapiens
  CDR3 for alpha chain variable domain of TCR clone 360302 (TRAV1-2, TRAJ16)
CAVNRSSDGQTLLF

SEQ ID NO: 720604 - protein, 13 aa, Homo sapiens
  CDR3 for beta chain variable domain of TCR clone 360302 (TRBV7-9, TRBJ1-2)
CASSLKQNYGYTF

SEQ ID NO: 720605 - protein, 14 aa, Homo sapiens
  CDR3 for alpha chain variable domain of TCR clone 360303 (TRAV26-1, TRAJ38)
CIADNAVNNRKLIL

SEQ ID NO: 720606 - protein, 13 aa, Homo sapiens
  CDR3 for beta chain variable domain of TCR clone 360303 (TRBV20-1, TRBJ1-1)
CSARGGGNTEAFF

SEQ ID NO: 720607 - protein, 15 aa, Homo sapiens
  CDR3 for alpha chain variable domain of TCR clone 360304 (TRAV3, TRAJ22)
CAVRDRSGSARQLTF

SEQ ID NO: 720608 - protein, 16 aa, Homo sapiens
  CDR3 for beta chain variable domain of TCR clone 360304 (TRBV11-2, TRBJ2-1)
CASARGSYSHHNEQFF

SEQ ID NO: 720609 - protein, 16 aa, Homo sapiens
  CDR3 for alpha chain variable domain of TCR clone 360305 (TRAV12-3, TRAJ53)
CAMSPGSGGSNYKLTF

SEQ ID NO: 720610 - protein, 12 aa, Homo sapiens
  CDR3 for beta chain variable domain of TCR clone 360305 (TRBV12-4, TRBJ2-1)
CASRQTENEQFF

SEQ ID NO: 720611 - protein, 14 aa, Homo sapiens
  CDR3 for alpha chain variable domain of TCR clone 360306 (TRAV12-2, TRAJ9)
YAVNALEGGFKTIF

SEQ ID NO: 720612 - protein, 16 aa, Homo sapiens
  CDR3 for beta chain variable domain of TCR clone 360306 (TRBV11-2, TRBJ2-7)
CASSPLAGGPRYGQCF

SEQ ID NO: 720613 - protein, 15 aa, Homo sapiens
  CDR3 for alpha chain variable domain of TCR clone 360307 (TRAV27, TRAJ38)
CAARRNAGNNRKLIG

SEQ ID NO: 720614 - protein, 12 aa, Homo sapiens
  CDR3 for beta chain variable domain of TCR clone 360307 (TRBV12-4, TRBJ2-7)
CASSSGPRGQYF

SEQ ID NO: 720615 - protein, 12 aa, Homo sapiens
  CDR3 for alpha chain variable domain of TCR clone 360308 (TRAV21, TRAJ42)
CAVGGSQGNLIF

SEQ ID NO: 720616 - protein, 16 aa, Homo sapiens
  CDR3 for beta chain variable domain of TCR clone 360308 (TRBV11-2, TRBJ2-7)
CASSPTTGGVSYEQYF

SEQ ID NO: 720617 - protein, 17 aa, Homo sapiens
  CDR3 for alpha chain variable domain of TCR clone 360309 (TRAV4, TRAJ13)
CLVGVQGSSGGYQKVTF

SEQ ID NO: 720618 - protein, 16 aa, Homo sapiens
  CDR3 for beta chain variable domain of TCR clone 360309 (TRBV28, TRBJ2-7)
CASSLLFETGGPEQYF

SEQ ID NO: 720619 - protein, 15 aa, Homo sapiens
  CDR3 for alpha chain variable domain of TCR clone 360310 (TRAV12-1, TRAJ44)
CVVFVNTGTASKLTF

SEQ ID NO: 720620 - protein, 14 aa, Homo sapiens
  CDR3 for beta chain variable domain of TCR clone 360310 (TRBV6-1, TRBJ1-3)
CASVQGGGGNTIYF

SEQ ID NO: 720621 - protein, 14 aa, Homo sapiens
  CDR3 for alpha chain variable domain of TCR clone 360311 (TRAV3, TRAJ40)
CAVRDRRGTYKYIF

SEQ ID NO: 720622 - protein, 15 aa, Homo sapiens
  CDR3 for beta chain variable domain of TCR clone 360311 (TRBV11-3, TRBJ2-3)
CASLKDGREGDTQYF

SEQ ID NO: 720623 - protein, 15 aa, Homo sapiens
  CDR3 for alpha chain variable domain of TCR clone 360312 (TRAV17, TRAJ56)
CATEPFTGANSKLTF

SEQ ID NO: 720624 - protein, 13 aa, Homo sapiens
  CDR3 for beta chain variable domain of TCR clone 360312 (TRBV20-1, TRBJ1-6)
CSAPLGVGSPLHF

SEQ ID NO: 720625 - protein, 12 aa, Homo sapiens
  CDR3 for alpha chain variable domain of TCR clone 360313 (TRAV12-3, TRAJ17)
CAMTLTGNKLTF

SEQ ID NO: 720626 - protein, 15 aa, Homo sapiens
  CDR3 for beta chain variable domain of TCR clone 360313 (TRBV20-1, TRBJ2-7)
CSTRDRVSGMDVQYF

SEQ ID NO: 720627 - protein, 15 aa, Homo sapiens
  CDR3 for alpha chain variable domain of TCR clone 360314 (TRAV2, TRAJ24)
CAVFRLKNSWGKLQF

SEQ ID NO: 720628 - protein, 16 aa, Homo sapiens
  CDR3 for beta chain variable domain of TCR clone 360314 (TRBV7-7, TRBJ2-3)
CASSPGTSGSTDTQYF

SEQ ID NO: 720629 - protein, 16 aa, Homo sapiens
  CDR3 for alpha chain variable domain of TCR clone 360315 (TRAV30, TRAJ24)
CGTEIVDADSWGKFQF

SEQ ID NO: 720630 - protein, 14 aa, Homo sapiens
  CDR3 for beta chain variable domain of TCR clone 360315 (TRBV4-2, TRBJ2-5)
CASSQDRGRETQYF

SEQ ID NO: 720631 - protein, 11 aa, Homo sapiens
  CDR3 for alpha chain variable domain of TCR clone 360316 (TRAV2, TRAJ13)
CASGGYQKVTF

SEQ ID NO: 720632 - protein, 15 aa, Homo sapiens
  CDR3 for beta chain variable domain of TCR clone 360316 (TRBV7-2, TRBJ2-3)
CASSLNLRDTDTQYF

SEQ ID NO: 720633 - protein, 16 aa, Homo sapiens
  CDR3 for alpha chain variable domain of TCR clone 360317 (TRAV3, TRAJ5)
CAVRNLMEPGRRALTF

SEQ ID NO: 720634 - protein, 16 aa, Homo sapiens
  CDR3 for beta chain variable domain of TCR clone 360317 (TRBV4-2, TRBJ2-7)
CASSQEGLANSYEQYF

SEQ ID NO: 720635 - protein, 15 aa, Homo sapiens
  CDR3 for alpha chain variable domain of TCR clone 360318 (TRAV17, TRAJ57)
CATGPAQGGSEKLVF

SEQ ID NO: 720636 - protein, 16 aa, Homo sapiens
  CDR3 for beta chain variable domain of TCR clone 360318 (TRBV12-4, TRBJ1-5)
CASSRPVEGSNQPQHF

SEQ ID NO: 720637 - protein, 11 aa, Homo sapiens
  CDR3 for alpha chain variable domain of TCR clone 360319 (TRAV1-1, TRAJ23)
CAVRQGGKLIF

SEQ ID NO: 720638 - protein, 14 aa, Homo sapiens
  CDR3 for beta chain variable domain of TCR clone 360319 (TRBV5-1, TRBJ2-2)
CASSFRERTGELFF

SEQ ID NO: 720639 - protein, 12 aa, Homo sapiens
  CDR3 for alpha chain variable domain of TCR clone 360320 (TRAV21, TRAJ43)
CAVSWNNNDMRF

SEQ ID NO: 720640 - protein, 15 aa, Homo sapiens
  CDR3 for beta chain variable domain of TCR clone 360320 (TRBV19, TRBJ1-5)
CASSDSGPRNHPQHF

SEQ ID NO: 720641 - protein, 13 aa, Homo sapiens
  CDR3 for alpha chain variable domain of TCR clone 360321 (TRAV16, TRAJ48)
CSPLNFGNEKLTF

SEQ ID NO: 720642 - protein, 11 aa, Homo sapiens
  CDR3 for beta chain variable domain of TCR clone 360321 (TRBV7-9, TRBJ2-3)
CASSPTDRQYF

SEQ ID NO: 720643 - protein, 14 aa, Homo sapiens
  CDR3 for alpha chain variable domain of TCR clone 360322 (TRAV1-2, TRAJ16)
CAVNRFSDGQKLLS

SEQ ID NO: 720644 - protein, 15 aa, Homo sapiens
  CDR3 for beta chain variable domain of TCR clone 360322 (TRBV7-9, TRBJ1-4)
CASSARTGGNEKLFF

SEQ ID NO: 720645 - protein, 18 aa, Homo sapiens
  CDR3 for alpha chain variable domain of TCR clone 360323 (TRAV16, TRAJ26)
CALSGTEFCLWSRNQIVR

SEQ ID NO: 720646 - protein, 12 aa, Homo sapiens
  CDR3 for beta chain variable domain of TCR clone 360323 (TRBV11-2, TRBJ2-1)
CASSPGNNEQFF

SEQ ID NO: 720647 - protein, 15 aa, Homo sapiens
  CDR3 for alpha chain variable domain of TCR clone 360324 (TRAV17, TRAJ57)
CATGPSQGGSDKLVF

SEQ ID NO: 720648 - protein, 15 aa, Homo sapiens
  CDR3 for beta chain variable domain of TCR clone 360324 (TRBV10-3, TRBJ2-7)
CAISTFSGVKGEQYF

SEQ ID NO: 720649 - protein, 14 aa, Homo sapiens
  CDR3 for alpha chain variable domain of TCR clone 360325 (TRAV1-1, TRAJ12)
CAVGDQDSSYKLIF

SEQ ID NO: 720650 - protein, 15 aa, Homo sapiens
  CDR3 for beta chain variable domain of TCR clone 360325 (TRBV5-1, TRBJ2-5)
CASSRTGTSGETQYF

SEQ ID NO: 720651 - protein, 13 aa, Homo sapiens
  CDR3 for alpha chain variable domain of TCR clone 360326 (TRAV1-1, TRAJ9)
CAAKNTGGFKAIF

SEQ ID NO: 720652 - protein, 14 aa, Homo sapiens
  CDR3 for beta chain variable domain of TCR clone 360326 (TRBV12-5, TRBJ2-5)
CASGSRTHQETQYF

SEQ ID NO: 720653 - protein, 14 aa, Homo sapiens
  CDR3 for alpha chain variable domain of TCR clone 360327 (TRAV12-2, TRAJ52)
CRCAGGTSYGRLTF

SEQ ID NO: 720654 - protein, 13 aa, Homo sapiens
  CDR3 for beta chain variable domain of TCR clone 360327 (TRBV11-2, TRBJ2-1)
CASSLRLTHEQFF

SEQ ID NO: 720655 - protein, 13 aa, Homo sapiens
  CDR3 for alpha chain variable domain of TCR clone 360328 (TRAV27, TRAJ29)
CAGAHSGNTPLVF

SEQ ID NO: 720656 - protein, 12 aa, Homo sapiens
  CDR3 for beta chain variable domain of TCR clone 360328 (TRBV12-5, TRBJ2-5)
CASGQGVETQYF

SEQ ID NO: 720657 - protein, 13 aa, Homo sapiens
  CDR3 for alpha chain variable domain of TCR clone 360329 (TRAV21, TRAJ27)
CAARPGNAGKSTF

SEQ ID NO: 720658 - protein, 14 aa, Homo sapiens
  CDR3 for beta chain variable domain of TCR clone 360329 (TRBV20-1, TRBJ2-5)
CSARDGRAGETQYF

SEQ ID NO: 720659 - protein, 18 aa, Homo sapiens
  CDR3 for alpha chain variable domain of TCR clone 360330 (TRAV21, TRAJ52)
CAVRPSPAGGTSYGKLTF

SEQ ID NO: 720660 - protein, 17 aa, Homo sapiens
  CDR3 for beta chain variable domain of TCR clone 360330 (TRBV4-1, IGLJ4)
CASSQEGPRGVEEKLFF

SEQ ID NO: 720661 - protein, 23 aa, Homo sapiens
  CDR3 for alpha chain variable domain of TCR clone 360331 (TRAV1-1, TRAJ6)
CAVRRGEATYLHLEEEPALLLIR

SEQ ID NO: 720662 - protein, 15 aa, Homo sapiens
  CDR3 for beta chain variable domain of TCR clone 360331 (TRBV6-6, TRBJ2-1)
CATRQGVSAYNEQFF

SEQ ID NO: 720663 - protein, 12 aa, Homo sapiens
  CDR3 for alpha chain variable domain of TCR clone 360332 (TRAV2, TRAJ31)
CAVEDNNARLMF

SEQ ID NO: 720664 - protein, 12 aa, Homo sapiens
  CDR3 for beta chain variable domain of TCR clone 360332 (TRBV7-8, TRBJ2-7)
CASEGGPHGQYF

SEQ ID NO: 720665 - protein, 12 aa, Homo sapiens
  CDR3 for alpha chain variable domain of TCR clone 360333 (TRAV2, TRAJ39)
CAPKDAGNMLTF

SEQ ID NO: 720666 - protein, 11 aa, Homo sapiens
  CDR3 for beta chain variable domain of TCR clone 360333 (TRBV5-6, TRBJ2-7)
CASSVSYEQYF

SEQ ID NO: 720667 - protein, 15 aa, Homo sapiens
  CDR3 for alpha chain variable domain of TCR clone 360334 (TRAV34, TRAJ38)
CGADFTPGNNRKLIC

SEQ ID NO: 720668 - protein, 16 aa, Homo sapiens
  CDR3 for beta chain variable domain of TCR clone 360334 (TRBV12-5, TRBJ2-5)
CASGPRTSGNQETQYF

SEQ ID NO: 720669 - protein, 14 aa, Homo sapiens
  CDR3 for alpha chain variable domain of TCR clone 360335 (TRAV26-1, TRAJ21)
CIVRVVYNFNKFYF

SEQ ID NO: 720670 - protein, 13 aa, Homo sapiens
  CDR3 for beta chain variable domain of TCR clone 360335 (TRBV12-4, TRBJ1-1)
CASSPGTGFEALF

SEQ ID NO: 720671 - protein, 13 aa, Homo sapiens
  CDR3 for alpha chain variable domain of TCR clone 360336 (TRAV8-4, TRAJ30)
CAVSVNRDDKIIF

SEQ ID NO: 720672 - protein, 19 aa, Homo sapiens
  CDR3 for beta chain variable domain of TCR clone 360336 (TRBV25-1, TRBJ2-2)
CAILVYRVDRGRKTGELFF

SEQ ID NO: 720673 - protein, 11 aa, Homo sapiens
  CDR3 for alpha chain variable domain of TCR clone 360337 (TRAV13-1, TRAJ40)
CAVSGTYIYIF

SEQ ID NO: 720674 - protein, 13 aa, Homo sapiens
  CDR3 for beta chain variable domain of TCR clone 360337 (TRBV19, TRBJ1-5)
CASSIGGNQAQHF

SEQ ID NO: 720675 - protein, 14 aa, Homo sapiens
  CDR3 for alpha chain variable domain of TCR clone 360338 (TRAV8-2, TRAJ4)
CVVSPSGGYNKLIF

SEQ ID NO: 720676 - protein, 11 aa, Homo sapiens
  CDR3 for beta chain variable domain of TCR clone 360338 (TRBV29-1, TRBJ2-5)
CREDRTGTQYF

SEQ ID NO: 720677 - protein, 16 aa, Homo sapiens
  CDR3 for alpha chain variable domain of TCR clone 360339 (TRAV3, TRAJ10)
CAVRDMRAGGGNRLTF

SEQ ID NO: 720678 - protein, 15 aa, Homo sapiens
  CDR3 for beta chain variable domain of TCR clone 360339 (TRBV11-2, TRBJ1-6)
CASTGFGTAVSPLHF

SEQ ID NO: 720679 - protein, 16 aa, Homo sapiens
  CDR3 for alpha chain variable domain of TCR clone 360340 (TRAV3, TRAJ10)
CAVRDMRSGGGNKLTF

SEQ ID NO: 720680 - protein, 14 aa, Homo sapiens
  CDR3 for beta chain variable domain of TCR clone 360340 (TRBV7-8, TRBJ2-3)
CASSLEAGTDTQYF

SEQ ID NO: 720681 - protein, 11 aa, Homo sapiens
  CDR3 for alpha chain variable domain of TCR clone 360341 (TRAV2, TRAJ33)
CAVESNYQLIW

SEQ ID NO: 720682 - protein, 15 aa, Homo sapiens
  CDR3 for beta chain variable domain of TCR clone 360341 (TRBV11-2, TRBJ2-2)
CASSSDRVNAGELFF

SEQ ID NO: 720683 - protein, 14 aa, Homo sapiens
  CDR3 for alpha chain variable domain of TCR clone 360342 (TRAV12-3, TRAJ29)
CAMSPYSGNTPLVF

SEQ ID NO: 720684 - protein, 15 aa, Homo sapiens
  CDR3 for beta chain variable domain of TCR clone 360342 (TRBV27, TRBJ2-1)
CASSNGGWSSNEQFF

SEQ ID NO: 720685 - protein, 13 aa, Homo sapiens
  CDR3 for alpha chain variable domain of TCR clone 360343 (TRAV12-3, TRAJ13)
CAMGTGGYQKVTF

SEQ ID NO: 720686 - protein, 14 aa, Homo sapiens
  CDR3 for beta chain variable domain of TCR clone 360343 (TRBV7-2, TRBJ2-7)
CASRSQGAAYEQYL

SEQ ID NO: 720687 - protein, 13 aa, Homo sapiens
  CDR3 for alpha chain variable domain of TCR clone 360344 (TRAV12-3, TRAJ47)
CAMKKEYGNKLVF

SEQ ID NO: 720688 - protein, 18 aa, Homo sapiens
  CDR3 for beta chain variable domain of TCR clone 360344 (TRBV11-2, TRBJ2-3)
CASSLGGASRGAPNTQYF

SEQ ID NO: 720689 - protein, 14 aa, Homo sapiens
  CDR3 for alpha chain variable domain of TCR clone 360345 (TRAV26-1, TRAJ21)
CIVRVVYNFNKFYF

SEQ ID NO: 720690 - protein, 14 aa, Homo sapiens
  CDR3 for beta chain variable domain of TCR clone 360345 (TRBV11-2, TRBJ2-5)
CASSRTGGIETQYF

SEQ ID NO: 720691 - protein, 14 aa, Homo sapiens
  CDR3 for alpha chain variable domain of TCR clone 360346 (TRAV35, TRAJ33)
FAGSSLDSNYQLIW

SEQ ID NO: 720692 - protein, 15 aa, Homo sapiens
  CDR3 for beta chain variable domain of TCR clone 360346 (TRBV20-1, TRBJ2-7)
CSAESGTSGAYEQYF

SEQ ID NO: 720693 - protein, 14 aa, Homo sapiens
  CDR3 for alpha chain variable domain of TCR clone 360347 (TRAV12-2, TRAJ24)
CAVTPADSWGKLQF

SEQ ID NO: 720694 - protein, 13 aa, Homo sapiens
  CDR3 for beta chain variable domain of TCR clone 360347 (TRBV6-4, TRBJ1-5)
CASSADLNQPQYF

SEQ ID NO: 720695 - protein, 11 aa, Homo sapiens
  CDR3 for alpha chain variable domain of TCR clone 360348 (TRAV12-3, TRAJ43)
CAMSVSNDMRF

SEQ ID NO: 720696 - protein, 11 aa, Homo sapiens
  CDR3 for beta chain variable domain of TCR clone 360348 (TRBV29-1, TRBJ2-5)
CSEVRTGTQYF

SEQ ID NO: 720697 - protein, 14 aa, Homo sapiens
  CDR3 for alpha chain variable domain of TCR clone 360349 (TRAV13-1, TRAJ10)
CAAKEPGGGNKLTF

SEQ ID NO: 720698 - protein, 15 aa, Homo sapiens
  CDR3 for beta chain variable domain of TCR clone 360349 (TRBV11-3, TRBJ2-3)
CASLKDGREGDTQYF

SEQ ID NO: 720699 - protein, 14 aa, Homo sapiens
  CDR3 for alpha chain variable domain of TCR clone 360350 (TRAV12-3, TRAJ29)
CAMSPYSGNTPLVF

SEQ ID NO: 720700 - protein, 15 aa, Homo sapiens
  CDR3 for beta chain variable domain of TCR clone 360350 (TRBV7-9, TRBJ1-5)
CASSQGHQPNQPQHF

SEQ ID NO: 720701 - protein, 13 aa, Homo sapiens
  CDR3 for alpha chain variable domain of TCR clone 360351 (TRAV8-3, TRAJ28)
CAVGAVASYQLTF

SEQ ID NO: 720702 - protein, 15 aa, Homo sapiens
  CDR3 for beta chain variable domain of TCR clone 360351 (TRBV7-9, TRBJ1-5)
CASSQGHQPNQAQHF

SEQ ID NO: 720703 - protein, 16 aa, Homo sapiens
  CDR3 for alpha chain variable domain of TCR clone 360352 (TRAV16, TRAJ42)
CSLSGYYGGSQGNLIF

SEQ ID NO: 720704 - protein, 14 aa, Homo sapiens
  CDR3 for beta chain variable domain of TCR clone 360352 (TRBV3-1, TRBJ2-5)
CASSQAVRQETQYF

SEQ ID NO: 720705 - protein, 13 aa, Homo sapiens
  CDR3 for alpha chain variable domain of TCR clone 360353 (TRAV12-3, TRAJ54)
CALVPQGAQKLGF

SEQ ID NO: 720706 - protein, 15 aa, Homo sapiens
  CDR3 for beta chain variable domain of TCR clone 360353 (TRBV4-1, TRBJ2-2)
CASSQDSRGTGELFF

SEQ ID NO: 720707 - protein, 13 aa, Homo sapiens
  CDR3 for alpha chain variable domain of TCR clone 360354 (TRAV14/DV4, TRAJ23)
CALIDNQGGKLIF

SEQ ID NO: 720708 - protein, 16 aa, Homo sapiens
  CDR3 for beta chain variable domain of TCR clone 360354 (TRBV12-5, TRBJ2-5)
CASGPRTSGNQETQYF

SEQ ID NO: 720709 - protein, 15 aa, Homo sapiens
  CDR3 for alpha chain variable domain of TCR clone 360355 (TRAV8-3, TRAJ45)
CASSYSGGGADGPTF

SEQ ID NO: 720710 - protein, 13 aa, Homo sapiens
  CDR3 for beta chain variable domain of TCR clone 360355 (TRBV10-3, TRBJ2-7)
CASRLAVNYEQYF

SEQ ID NO: 720711 - protein, 11 aa, Homo sapiens
  CDR3 for alpha chain variable domain of TCR clone 360356 (TRAV4, TRAJ31)
CLVGDNARLMF

SEQ ID NO: 720712 - protein, 14 aa, Homo sapiens
  CDR3 for beta chain variable domain of TCR clone 360356 (TRBV19, TRBJ2-1)
CASPTFVLSGEQFF

SEQ ID NO: 720713 - protein, 14 aa, Homo sapiens
  CDR3 for alpha chain variable domain of TCR clone 360357 (TRAV12-3, TRAJ15)
CAIIPPQAGTALIF

SEQ ID NO: 720714 - protein, 14 aa, Homo sapiens
  CDR3 for beta chain variable domain of TCR clone 360357 (TRBV20-1, TRBJ2-2)
CSARKRLATGELFF

SEQ ID NO: 720715 - protein, 11 aa, Homo sapiens
  CDR3 for alpha chain variable domain of TCR clone 360358 (TRAV3, TRAJ21)
CAVANFNKFYF

SEQ ID NO: 720716 - protein, 18 aa, Homo sapiens
  CDR3 for beta chain variable domain of TCR clone 360358 (TRBV12-4, TRBJ2-2)
CASSLVAGTRGRTGELFF

SEQ ID NO: 720717 - protein, 12 aa, Homo sapiens
  CDR3 for alpha chain variable domain of TCR clone 360359 (TRAV1-1, TRAJ24)
CAATDSWGKLQF

SEQ ID NO: 720718 - protein, 15 aa, Homo sapiens
  CDR3 for beta chain variable domain of TCR clone 360359 (TRBV12-4, TRBJ1-6)
CASSLGGQGTSPLLF

SEQ ID NO: 720719 - protein, 14 aa, Homo sapiens
  CDR3 for alpha chain variable domain of TCR clone 360360 (TRAV2, TRAJ9)
CAVDDRSGGFKTIF

SEQ ID NO: 720720 - protein, 15 aa, Homo sapiens
  CDR3 for beta chain variable domain of TCR clone 360360 (TRBV11-3, TRBJ2-3)
CASLKDGREGDTQYF

SEQ ID NO: 720721 - protein, 17 aa, Homo sapiens
  CDR3 for alpha chain variable domain of TCR clone 360361 (TRAV8-4, TRAJ45)
CAVSEGGSGGGADGLTF

SEQ ID NO: 720722 - protein, 14 aa, Homo sapiens
  CDR3 for beta chain variable domain of TCR clone 360361 (TRBV7-2, TRBJ2-7)
CASSPKTSFYEQYF

SEQ ID NO: 720723 - protein, 14 aa, Homo sapiens
  CDR3 for alpha chain variable domain of TCR clone 360362 (TRAV1-2, TRAJ8)
CAVREDTGSQKLVF

SEQ ID NO: 720724 - protein, 13 aa, Homo sapiens
  CDR3 for beta chain variable domain of TCR clone 360362 (TRBV19, TRBJ2-7)
CASRKAGGSEQYF

SEQ ID NO: 720725 - protein, 10 aa, Homo sapiens
  CDR3 for alpha chain variable domain of TCR clone 360363 (TRAV23/DV6, TRAJ4)
CAARDFWRRD

SEQ ID NO: 720726 - protein, 13 aa, Homo sapiens
  CDR3 for beta chain variable domain of TCR clone 360363 (TRBV7-2, TRBJ1-1)
CASSRNTNTEAFF

SEQ ID NO: 720727 - protein, 13 aa, Homo sapiens
  CDR3 for alpha chain variable domain of TCR clone 360364 (TRAV21, TRAJ57)
CAVTQGGSEKLVF

SEQ ID NO: 720728 - protein, 15 aa, Homo sapiens
  CDR3 for beta chain variable domain of TCR clone 360364 (TRBV7-3, TRBJ2-1)
CASSPTGGGEVEQFF

SEQ ID NO: 720729 - protein, 12 aa, Homo sapiens
  CDR3 for alpha chain variable domain of TCR clone 360365 (TRAV13-1, TRAJ21)
CAAKEGFNKFYF

SEQ ID NO: 720730 - protein, 14 aa, Homo sapiens
  CDR3 for beta chain variable domain of TCR clone 360365 (TRBV18, TRBJ2-5)
CASSPGVSQETQYF

SEQ ID NO: 720731 - protein, 15 aa, Homo sapiens
  CDR3 for alpha chain variable domain of TCR clone 360366 (TRAV2, TRAJ37)
CAVEDGSSNTAKLIF

SEQ ID NO: 720732 - protein, 13 aa, Homo sapiens
  CDR3 for beta chain variable domain of TCR clone 360366 (TRBV20-1, TRBJ1-6)
CSTFREGNSPLHF

SEQ ID NO: 720733 - protein, 14 aa, Homo sapiens
  CDR3 for alpha chain variable domain of TCR clone 360367 (TRAV1-2, TRAJ8)
CAVREDTGFQKLVF

SEQ ID NO: 720734 - protein, 13 aa, Homo sapiens
  CDR3 for beta chain variable domain of TCR clone 360367 (TRBV15, TRBJ2-7)
CATSTTGHYEQYV

SEQ ID NO: 720735 - protein, 14 aa, Homo sapiens
  CDR3 for alpha chain variable domain of TCR clone 360368 (TRAV12-2, TRAJ13)
CAVKKTGGYQKVTF

SEQ ID NO: 720736 - protein, 15 aa, Homo sapiens
  CDR3 for beta chain variable domain of TCR clone 360368 (TRBV9, TRBJ1-6)
CASSVAGTGYSPLHF

SEQ ID NO: 720737 - protein, 10 aa, Homo sapiens
  CDR3 for alpha chain variable domain of TCR clone 360369 (TRAV20, TRAJ22)
CAAPARQLTF

SEQ ID NO: 720738 - protein, 17 aa, Homo sapiens
  CDR3 for beta chain variable domain of TCR clone 360369 (TRBV19, TRBJ2-7)
CASSISFYDSYPYEQYF

SEQ ID NO: 720739 - protein, 13 aa, Homo sapiens
  CDR3 for alpha chain variable domain of TCR clone 360370 (TRAV12-1, TRAJ6)
WVVFPGGSDIPTF

SEQ ID NO: 720740 - protein, 14 aa, Homo sapiens
  CDR3 for beta chain variable domain of TCR clone 360370 (TRBV20-1, TRBJ1-3)
CSASPTGAGNTIYF

SEQ ID NO: 720741 - protein, 15 aa, Homo sapiens
  CDR3 for alpha chain variable domain of TCR clone 360371 (TRAV8-4, TRAJ37)
CAVTYGSSNTGKLIF

SEQ ID NO: 720742 - protein, 12 aa, Homo sapiens
  CDR3 for beta chain variable domain of TCR clone 360371 (TRBV12-4, TRBJ2-5)
CQQFGGSRTQYF

SEQ ID NO: 720743 - protein, 16 aa, Homo sapiens
  CDR3 for alpha chain variable domain of TCR clone 360372 (TRAV26-1, TRAJ13)
CIVSPKDSGGYQKVTF

SEQ ID NO: 720744 - protein, 16 aa, Homo sapiens
  CDR3 for beta chain variable domain of TCR clone 360372 (TRBV5-6, TRBJ2-5)
CASIRGQTGYQETQYF

SEQ ID NO: 720745 - protein, 11 aa, Homo sapiens
  CDR3 for alpha chain variable domain of TCR clone 360373 (TRAV13-2, TRAJ20)
CAENMSYKLSF

SEQ ID NO: 720746 - protein, 14 aa, Homo sapiens
  CDR3 for beta chain variable domain of TCR clone 360373 (TRBV4-1, TRBJ2-3)
CASSQDWSTDTQYF

SEQ ID NO: 720747 - protein, 14 aa, Homo sapiens
  CDR3 for alpha chain variable domain of TCR clone 360374 (TRAV23/DV6, TRAJ6)
CAASRSGGSYIPTF

SEQ ID NO: 720748 - protein, 17 aa, Homo sapiens
  CDR3 for beta chain variable domain of TCR clone 360374 (TRBV20-1, TRBJ2-1)
CSAGASGLAGSYNEQFF

SEQ ID NO: 720749 - protein, 14 aa, Homo sapiens
  CDR3 for alpha chain variable domain of TCR clone 360375 (TRAV12-2, TRAJ13)
CAVKKTGGYQKVAF

SEQ ID NO: 720750 - protein, 16 aa, Homo sapiens
  CDR3 for beta chain variable domain of TCR clone 360375 (TRBV12-4, TRBJ2-7)
CASRSTGTGPSYEQYF

SEQ ID NO: 720751 - protein, 15 aa, Homo sapiens
  CDR3 for alpha chain variable domain of TCR clone 360376 (TRAV26-1, TRAJ38)
CIVRAEGGNNRKLIW

SEQ ID NO: 720752 - protein, 14 aa, Homo sapiens
  CDR3 for beta chain variable domain of TCR clone 360376 (TRBV7-7, TRBJ2-5)
CASSSPSGSETQYF

SEQ ID NO: 720753 - protein, 16 aa, Homo sapiens
  CDR3 for alpha chain variable domain of TCR clone 360377 (TRAV12-3, TRAJ53)
CAMSPGSGGSNYKLTI

SEQ ID NO: 720754 - protein, 16 aa, Homo sapiens
  CDR3 for beta chain variable domain of TCR clone 360377 (TRBV5-1, TRBJ2-3)
CASSLEGGSFADTQYF

SEQ ID NO: 720755 - protein, 11 aa, Homo sapiens
  CDR3 for alpha chain variable domain of TCR clone 360378 (TRAV17, TRAJ49)
CATDAGNQIYF

SEQ ID NO: 720756 - protein, 16 aa, Homo sapiens
  CDR3 for beta chain variable domain of TCR clone 360378 (TRBV7-2, TRBJ1-2)
CASSPTSGTSLGGYTF

SEQ ID NO: 720757 - protein, 17 aa, Homo sapiens
  CDR3 for alpha chain variable domain of TCR clone 360379 (TRAV4, TRAJ13)
CLVGVQGSSGGFQKVTF

SEQ ID NO: 720758 - protein, 18 aa, Homo sapiens
  CDR3 for beta chain variable domain of TCR clone 360379 (TRBV15, TRBJ2-3)
CATSRDGARSWDTDTQYF

SEQ ID NO: 720759 - protein, 11 aa, Homo sapiens
  CDR3 for alpha chain variable domain of TCR clone 360380 (TRAV23/DV6, TRAJ43)
CAARNNNDMRF

SEQ ID NO: 720760 - protein, 14 aa, Homo sapiens
  CDR3 for beta chain variable domain of TCR clone 360380 (TRBV7-2, TRBJ1-2)
CASSQTGSTYGYTF

SEQ ID NO: 720761 - protein, 17 aa, Homo sapiens
  CDR3 for alpha chain variable domain of TCR clone 360381 (TRAV3, TRAJ6)
CAVRDGPRAGGSYLPKF

SEQ ID NO: 720762 - protein, 15 aa, Homo sapiens
  CDR3 for beta chain variable domain of TCR clone 360381 (TRBV20-1, TRBJ1-1)
CSASWDRFLNTEAFF

SEQ ID NO: 720763 - protein, 14 aa, Homo sapiens
  CDR3 for alpha chain variable domain of TCR clone 360382 (TRAV1-2, TRAJ16)
CAVNRFSDGQKLLF

SEQ ID NO: 720764 - protein, 17 aa, Homo sapiens
  CDR3 for beta chain variable domain of TCR clone 360382 (TRBV7-3, TRBJ2-3)
CACSLMRRMRGADTQYF

SEQ ID NO: 720765 - protein, 14 aa, Homo sapiens
  CDR3 for alpha chain variable domain of TCR clone 360383 (TRAV1-2, TRAJ8)
CAVSEDTGFQKLVF

SEQ ID NO: 720766 - protein, 16 aa, Homo sapiens
  CDR3 for beta chain variable domain of TCR clone 360383 (TRBV7-2, TRBJ2-5)
CASSPFPTGGEETQYF

SEQ ID NO: 720767 - protein, 15 aa, Homo sapiens
  CDR3 for alpha chain variable domain of TCR clone 360384 (TRAV17, TRAJ56)
CATEPFTGANSKLTY

SEQ ID NO: 720768 - protein, 15 aa, Homo sapiens
  CDR3 for beta chain variable domain of TCR clone 360384 (TRBV28, TRBJ1-5)
CASSRTGGYVQPQHF

SEQ ID NO: 720769 - protein, 14 aa, Homo sapiens
  CDR3 for alpha chain variable domain of TCR clone 360385 (TRAV12-2, TRAJ13)
CAVKKTGGYQKVTC

SEQ ID NO: 720770 - protein, 12 aa, Homo sapiens
  CDR3 for beta chain variable domain of TCR clone 360385 (TRBV12-4, TRBJ1-2)
CASSFIWLHLRF

SEQ ID NO: 720771 - protein, 13 aa, Homo sapiens
  CDR3 for alpha chain variable domain of TCR clone 360386 (TRAV13-2, TRAJ40)
CAEFTSGTYKYIF

SEQ ID NO: 720772 - protein, 17 aa, Homo sapiens
  CDR3 for beta chain variable domain of TCR clone 360386 (TRBV11-2, TRBJ2-1)
CASSLYPPGVEYNEQFF

SEQ ID NO: 720773 - protein, 13 aa, Homo sapiens
  CDR3 for alpha chain variable domain of TCR clone 360387 (TRAV2, TRAJ40)
CAVVTSGTYKYIF

SEQ ID NO: 720774 - protein, 14 aa, Homo sapiens
  CDR3 for beta chain variable domain of TCR clone 360387 (TRBV19, TRBJ2-1)
CASLTCVLSGEQFF

SEQ ID NO: 720775 - protein, 19 aa, Homo sapiens
  CDR3 for alpha chain variable domain of TCR clone 360388 (TRAV25, TRAJ20)
TATQTTDVGILPHDYKLSF

SEQ ID NO: 720776 - protein, 16 aa, Homo sapiens
  CDR3 for beta chain variable domain of TCR clone 360388 (TRBV20-1, TRBJ1-4)
CSALGQGLLTNEKLFF

SEQ ID NO: 720777 - protein, 16 aa, Homo sapiens
  CDR3 for alpha chain variable domain of TCR clone 360389 (TRAV30, TRAJ24)
CGTEIVNADSWGKFQF

SEQ ID NO: 720778 - protein, 15 aa, Homo sapiens
  CDR3 for beta chain variable domain of TCR clone 360389 (TRBV20-1, TRBJ2-4)
CSARDLTGGANIQYI

SEQ ID NO: 720779 - protein, 12 aa, Homo sapiens
  CDR3 for alpha chain variable domain of TCR clone 360390 (TRAV21, TRAJ49)
CAVNDGGNQFYF

SEQ ID NO: 720780 - protein, 18 aa, Homo sapiens
  CDR3 for beta chain variable domain of TCR clone 360390 (TRBV5-5, TRBJ1-5)
CASSLRQVKGSSNQPQHF

SEQ ID NO: 720781 - protein, 16 aa, Homo sapiens
  CDR3 for alpha chain variable domain of TCR clone 360391 (TRAV30, TRAJ24)
CGTEIVDADSWGKFQF

SEQ ID NO: 720782 - protein, 13 aa, Homo sapiens
  CDR3 for beta chain variable domain of TCR clone 360391 (TRBV5-1, TRBJ2-5)
CASSLIPAETQYF

SEQ ID NO: 720783 - protein, 12 aa, Homo sapiens
  CDR3 for alpha chain variable domain of TCR clone 360392 (TRAV16, TRAJ56)
CAPTGANSKLTF

SEQ ID NO: 720784 - protein, 15 aa, Homo sapiens
  CDR3 for beta chain variable domain of TCR clone 360392 (TRBV19, TRBJ2-3)
CAAGDTNAPNDTQYF

SEQ ID NO: 720785 - protein, 11 aa, Homo sapiens
  CDR3 for alpha chain variable domain of TCR clone 360393 (TRAV12-3, TRAJ43)
CAMSVSNDMRF

SEQ ID NO: 720786 - protein, 14 aa, Homo sapiens
  CDR3 for beta chain variable domain of TCR clone 360393 (TRBV12-5, TRBJ2-5)
CARGSRTHQETQYF

SEQ ID NO: 720787 - protein, 16 aa, Homo sapiens
  CDR3 for alpha chain variable domain of TCR clone 360394 (TRAV38-2/DV8, TRAJ47)
CAYRSAIMEYGNNLVF

SEQ ID NO: 720788 - protein, 14 aa, Homo sapiens
  CDR3 for beta chain variable domain of TCR clone 360394 (TRBV19, TRBJ2-7)
CASSIFAGTYEQYF

SEQ ID NO: 720789 - protein, 13 aa, Homo sapiens
  CDR3 for alpha chain variable domain of TCR clone 360395 (TRAV17, TRAJ22)
CAHHSGSARQLTF

SEQ ID NO: 720790 - protein, 14 aa, Homo sapiens
  CDR3 for beta chain variable domain of TCR clone 360395 (TRBV16, TRBJ1-1)
CASSQAGPNTEAFY

SEQ ID NO: 720791 - protein, 13 aa, Homo sapiens
  CDR3 for alpha chain variable domain of TCR clone 360396 (TRAV12-2, TRAJ24)
CAVSTDSWGKLQF

SEQ ID NO: 720792 - protein, 13 aa, Homo sapiens
  CDR3 for beta chain variable domain of TCR clone 360396 (TRBV7-7, TRBJ2-3)
CASSLSRADTQYF

SEQ ID NO: 720793 - protein, 14 aa, Homo sapiens
  CDR3 for alpha chain variable domain of TCR clone 360397 (TRAV8-4, TRAJ48)
CAVSETFGNEKLTF

SEQ ID NO: 720794 - protein, 19 aa, Homo sapiens
  CDR3 for beta chain variable domain of TCR clone 360397 (TRBV7-2, TRBJ2-3)
CASSFLSRKWGGGTDTQYF

SEQ ID NO: 720795 - protein, 14 aa, Homo sapiens
  CDR3 for alpha chain variable domain of TCR clone 360398 (TRAV1-2, TRAJ16)
CAVNRFPDGQKLLF

SEQ ID NO: 720796 - protein, 15 aa, Homo sapiens
  CDR3 for beta chain variable domain of TCR clone 360398 (TRBV28, TRBJ2-1)
CASSIIAGGRSEQFF

SEQ ID NO: 720797 - protein, 12 aa, Homo sapiens
  CDR3 for alpha chain variable domain of TCR clone 360399 (TRAV25, TRAJ11)
CAGASGYSTLTF

SEQ ID NO: 720798 - protein, 15 aa, Homo sapiens
  CDR3 for beta chain variable domain of TCR clone 360399 (TRBV9, TRBJ1-6)
CASSVAATGDSPLHF

SEQ ID NO: 720799 - protein, 14 aa, Homo sapiens
  CDR3 for alpha chain variable domain of TCR clone 360400 (TRAV35, TRAJ41)
CAGQASVRRNALNF

SEQ ID NO: 720800 - protein, 14 aa, Homo sapiens
  CDR3 for beta chain variable domain of TCR clone 360400 (TRBV20-1, TRBJ1-2)
CSASEHGAVYGYTF

SEQ ID NO: 720801 - protein, 12 aa, Homo sapiens
  CDR3 for alpha chain variable domain of TCR clone 360401 (TRAV13-2, TRAJ23)
CAERHRGGKLIF

SEQ ID NO: 720802 - protein, 14 aa, Homo sapiens
  CDR3 for beta chain variable domain of TCR clone 360401 (TRBV7-9, TRBJ2-7)
CASSSRLVLHEQYF

SEQ ID NO: 720803 - protein, 12 aa, Homo sapiens
  CDR3 for alpha chain variable domain of TCR clone 360402 (TRAV8-3, TRAJ4)
WVGSGGYNKLIF

SEQ ID NO: 720804 - protein, 16 aa, Homo sapiens
  CDR3 for beta chain variable domain of TCR clone 360402 (TRBV4-1, TRBJ1-5)
CASSQVGHTTNQPQHF

SEQ ID NO: 720805 - protein, 11 aa, Homo sapiens
  CDR3 for alpha chain variable domain of TCR clone 360403 (TRAV3, TRAJ7)
YSVYGNNRLVF

SEQ ID NO: 720806 - protein, 15 aa, Homo sapiens
  CDR3 for beta chain variable domain of TCR clone 360403 (TRBV12-4, TRBJ2-1)
CASSLGTSAVNEQFF

SEQ ID NO: 720807 - protein, 11 aa, Homo sapiens
  CDR3 for alpha chain variable domain of TCR clone 360404 (TRAV21, TRAJ34)
CAHYNTDKLIF

SEQ ID NO: 720808 - protein, 14 aa, Homo sapiens
  CDR3 for beta chain variable domain of TCR clone 360404 (TRBV6-3, TRBJ2-5)
CASRRDGGEETQYF

SEQ ID NO: 720809 - protein, 15 aa, Homo sapiens
  CDR3 for alpha chain variable domain of TCR clone 360405 (TRAV16, TRAJ20)
CTLKGGLRADYKLSF

SEQ ID NO: 720810 - protein, 16 aa, Homo sapiens
  CDR3 for beta chain variable domain of TCR clone 360405 (TRBV11-3, TRBJ2-2)
CASSSRTSPGTGELFF

SEQ ID NO: 720811 - protein, 11 aa, Homo sapiens
  CDR3 for alpha chain variable domain of TCR clone 360406 (TRAV12-2, TRAJ33)
CAVTSNYQLIW

SEQ ID NO: 720812 - protein, 19 aa, Homo sapiens
  CDR3 for beta chain variable domain of TCR clone 360406 (TRBV25-1, TRBJ2-2)
CAILVYRVDRGRKTGELFF

SEQ ID NO: 720813 - protein, 19 aa, Homo sapiens
  CDR3 for alpha chain variable domain of TCR clone 360407 (TRAV21, TRAJ20)
SLVTQPPTSVLPNDYKLSL

SEQ ID NO: 720814 - protein, 14 aa, Homo sapiens
  CDR3 for beta chain variable domain of TCR clone 360407 (TRBV7-2, TRBJ1-3)
CASSRLRSGNTIYF

SEQ ID NO: 720815 - protein, 15 aa, Homo sapiens
  CDR3 for alpha chain variable domain of TCR clone 360408 (TRAV2, TRAJ13)
CATPSYSGGYQKVTF

SEQ ID NO: 720816 - protein, 17 aa, Homo sapiens
  CDR3 for beta chain variable domain of TCR clone 360408 (TRBV7-8, TRBJ2-6)
CASSAGTGGAGANVLTF

SEQ ID NO: 720817 - protein, 15 aa, Homo sapiens
  CDR3 for alpha chain variable domain of TCR clone 360409 (TRAV3, TRAJ45)
CAVRTPWGGADGLTF

SEQ ID NO: 720818 - protein, 21 aa, Homo sapiens
  CDR3 for beta chain variable domain of TCR clone 360409 (TRBV6-1, TRBJ2-2)
CASSFGQGANTGELFLERALG

SEQ ID NO: 720819 - protein, 12 aa, Homo sapiens
  CDR3 for alpha chain variable domain of TCR clone 360410 (TRAV13-2, TRAJ8)
CFMNTGFQKLVF

SEQ ID NO: 720820 - protein, 15 aa, Homo sapiens
  CDR3 for beta chain variable domain of TCR clone 360410 (TRBV19, TRBJ2-3)
CAAGDTNAPNDTQYS

SEQ ID NO: 720821 - protein, 12 aa, Homo sapiens
  CDR3 for alpha chain variable domain of TCR clone 360411 (TRAV1-2, TRAJ24)
CAVGGSWGKFQF

SEQ ID NO: 720822 - protein, 20 aa, Homo sapiens
  CDR3 for beta chain variable domain of TCR clone 360411 (TRBV7-8, TRBJ2-2)
CASSHLFPGPTIHITGELFF

SEQ ID NO: 720823 - protein, 16 aa, Homo sapiens
  CDR3 for alpha chain variable domain of TCR clone 360412 (TRAV26-1, TRAJ23)
CIVRPHGNNQGGKLIF

SEQ ID NO: 720824 - protein, 14 aa, Homo sapiens
  CDR3 for beta chain variable domain of TCR clone 360412 (TRBV19, TRBJ2-1)
CASPTFVLSGGQFF

SEQ ID NO: 720825 - protein, 12 aa, Homo sapiens
  CDR3 for alpha chain variable domain of TCR clone 360413 (TRAV3, TRAJ20)
CAVRDPDYKLSF

SEQ ID NO: 720826 - protein, 13 aa, Homo sapiens
  CDR3 for beta chain variable domain of TCR clone 360413 (TRBV9, TRBJ2-1)
CARSVGQGGEQFF

SEQ ID NO: 720827 - protein, 11 aa, Homo sapiens
  CDR3 for alpha chain variable domain of TCR clone 360414 (TRAV12-2, TRAJ31)
CAILNNARLMF

SEQ ID NO: 720828 - protein, 15 aa, Homo sapiens
  CDR3 for beta chain variable domain of TCR clone 360414 (TRBV7-9, TRBJ1-6)
CASSSPGRGNSPLHF

SEQ ID NO: 720829 - protein, 12 aa, Homo sapiens
  CDR3 for alpha chain variable domain of TCR clone 360415 (TRAV2, TRAJ31)
CAVADNNARLMF

SEQ ID NO: 720830 - protein, 16 aa, Homo sapiens
  CDR3 for beta chain variable domain of TCR clone 360415 (TRBV11-3, TRBJ2-5)
CASSSVVAGSTETQYF

SEQ ID NO: 720831 - protein, 13 aa, Homo sapiens
  CDR3 for alpha chain variable domain of TCR clone 360416 (TRAV21, TRAJ27)
CAARPGNAGKSTF

SEQ ID NO: 720832 - protein, 14 aa, Homo sapiens
  CDR3 for beta chain variable domain of TCR clone 360416 (TRBV7-9, TRBJ2-1)
CASSDNSGYNEQFF

SEQ ID NO: 720833 - protein, 14 aa, Homo sapiens
  CDR3 for alpha chain variable domain of TCR clone 360417 (TRAV13-2, TRAJ43)
CAEIPTYNNNDMRF

SEQ ID NO: 720834 - protein, 15 aa, Homo sapiens
  CDR3 for beta chain variable domain of TCR clone 360417 (TRBV7-9, TRBJ2-2)
CASGPLDTFHGELFF

SEQ ID NO: 720835 - protein, 15 aa, Homo sapiens
  CDR3 for alpha chain variable domain of TCR clone 360418 (TRAV3, TRAJ22)
CAVRDRGGSARQLTF

SEQ ID NO: 720836 - protein, 13 aa, Homo sapiens
  CDR3 for beta chain variable domain of TCR clone 360418 (TRBV24-1, TRBJ2-1)
CATSRGARNEQFF

SEQ ID NO: 720837 - protein, 14 aa, Homo sapiens
  CDR3 for alpha chain variable domain of TCR clone 360419 (TRAV12-3, TRAJ10)
SHLPLTGGGNKLTF

SEQ ID NO: 720838 - protein, 18 aa, Homo sapiens
  CDR3 for beta chain variable domain of TCR clone 360419 (TRBV28, TRBJ2-1)
CASSSPSGLAGAIYEQFF

SEQ ID NO: 720839 - protein, 13 aa, Homo sapiens
  CDR3 for alpha chain variable domain of TCR clone 360420 (TRAV13-2, TRAJ22)
CRDPSGSARQLTF

SEQ ID NO: 720840 - protein, 13 aa, Homo sapiens
  CDR3 for beta chain variable domain of TCR clone 360420 (TRBV7-2, TRBJ2-5)
CQQLVRGGETQYF

SEQ ID NO: 720841 - protein, 11 aa, Homo sapiens
  CDR3 for alpha chain variable domain of TCR clone 360421 (TRAV20, TRAJ23)
CACNQGGRLIF

SEQ ID NO: 720842 - protein, 16 aa, Homo sapiens
  CDR3 for beta chain variable domain of TCR clone 360421 (TRBV7-8, TRBJ2-5)
CASSFGGQPAQETQYF

SEQ ID NO: 720843 - protein, 19 aa, Homo sapiens
  CDR3 for alpha chain variable domain of TCR clone 360422 (TRAV2, TRAJ20)
ILQVREADAAVYRDCKLSF

SEQ ID NO: 720844 - protein, 15 aa, Homo sapiens
  CDR3 for beta chain variable domain of TCR clone 360422 (TRBV7-2, TRBJ2-5)
CASSFLRGGEETQYF

SEQ ID NO: 720845 - protein, 14 aa, Homo sapiens
  CDR3 for alpha chain variable domain of TCR clone 360423 (TRAV21, TRAJ35)
CAVMPIGFGNVLHC

SEQ ID NO: 720846 - protein, 15 aa, Homo sapiens
  CDR3 for beta chain variable domain of TCR clone 360423 (TRBV19, TRBJ2-1)
CASSISSGGYNEQFF

SEQ ID NO: 720847 - protein, 14 aa, Homo sapiens
  CDR3 for alpha chain variable domain of TCR clone 360424 (TRAV2, TRAJ22)
CAVEDSGSARQLTF

SEQ ID NO: 720848 - protein, 15 aa, Homo sapiens
  CDR3 for beta chain variable domain of TCR clone 360424 (TRBV28, TRBJ1-2)
CASSLPVGHGDGDTF

SEQ ID NO: 720849 - protein, 18 aa, Homo sapiens
  CDR3 for alpha chain variable domain of TCR clone 360425 (TRAV29/DV5, TRAJ52)
CAAGFRGAGGTSYGKLTF

SEQ ID NO: 720850 - protein, 16 aa, Homo sapiens
  CDR3 for beta chain variable domain of TCR clone 360425 (TRBV29-1, TRBJ2-7)
CSVEDAEDGTAYEQYF

SEQ ID NO: 720851 - protein, 14 aa, Homo sapiens
  CDR3 for alpha chain variable domain of TCR clone 360426 (TRAV12-3, TRAJ22)
CAMSLFGSGRQLTF

SEQ ID NO: 720852 - protein, 11 aa, Homo sapiens
  CDR3 for beta chain variable domain of TCR clone 360426 (TRBV12-4, TRBJ2-2)
CASSSAGELFF

SEQ ID NO: 720853 - protein, 14 aa, Homo sapiens
  CDR3 for alpha chain variable domain of TCR clone 360427 (TRAV9-2, TRAJ39)
CALYIYNAGNMLTF

SEQ ID NO: 720854 - protein, 14 aa, Homo sapiens
  CDR3 for beta chain variable domain of TCR clone 360427 (TRBV28, TRBJ2-1)
CQQRGVSSYNEQFF

SEQ ID NO: 720855 - protein, 15 aa, Homo sapiens
  CDR3 for alpha chain variable domain of TCR clone 360428 (TRAV21, TRAJ53)
CATLNSGGSNYKLTF

SEQ ID NO: 720856 - protein, 17 aa, Homo sapiens
  CDR3 for beta chain variable domain of TCR clone 360428 (TRBV7-8, TRBJ2-6)
CASSAGTGGAGANVLIF

SEQ ID NO: 720857 - protein, 16 aa, Homo sapiens
  CDR3 for alpha chain variable domain of TCR clone 360429 (TRAV30, TRAJ24)
CGTEIVDADSWGKFQF

SEQ ID NO: 720858 - protein, 16 aa, Homo sapiens
  CDR3 for beta chain variable domain of TCR clone 360429 (TRBV7-2, TRBJ2-3)
CASSLVALYSTDTQYF

SEQ ID NO: 720859 - protein, 12 aa, Homo sapiens
  CDR3 for alpha chain variable domain of TCR clone 360430 (TRAV12-1, TRAJ40)
CVVYSGTYKYIF

SEQ ID NO: 720860 - protein, 17 aa, Homo sapiens
  CDR3 for beta chain variable domain of TCR clone 360430 (TRBV11-3, TRBJ1-5)
CASSPLTGLRGNQTQHF

SEQ ID NO: 720861 - protein, 14 aa, Homo sapiens
  CDR3 for alpha chain variable domain of TCR clone 360431 (TRAV12-3, TRAJ10)
SHLPLTGGGNKLTF

SEQ ID NO: 720862 - protein, 13 aa, Homo sapiens
  CDR3 for beta chain variable domain of TCR clone 360431 (TRBV2, TRBJ1-6)
CASDRGGISPLHF

SEQ ID NO: 720863 - protein, 17 aa, Homo sapiens
  CDR3 for alpha chain variable domain of TCR clone 360432 (TRAV3, TRAJ42)
CAVRDRDYGGRQGNLIF

SEQ ID NO: 720864 - protein, 15 aa, Homo sapiens
  CDR3 for beta chain variable domain of TCR clone 360432 (TRBV6-6, TRBJ2-7)
CASSYSDGGSYEQYF

SEQ ID NO: 720865 - protein, 13 aa, Homo sapiens
  CDR3 for alpha chain variable domain of TCR clone 360433 (TRAV2, TRAJ15)
CAVASQAGTALIF

SEQ ID NO: 720866 - protein, 14 aa, Homo sapiens
  CDR3 for beta chain variable domain of TCR clone 360433 (TRBV12-4, TRBJ1-1)
CASTWTGHDTEAFF

SEQ ID NO: 720867 - protein, 15 aa, Homo sapiens
  CDR3 for alpha chain variable domain of TCR clone 360434 (TRAV8-3, TRAJ11)
CAVGLLNSGYSTLPF

SEQ ID NO: 720868 - protein, 15 aa, Homo sapiens
  CDR3 for beta chain variable domain of TCR clone 360434 (TRBV13, TRBJ2-1)
CASSLLSGLNNEQLF

SEQ ID NO: 720869 - protein, 16 aa, Homo sapiens
  CDR3 for alpha chain variable domain of TCR clone 360435 (TRAV20, TRAJ28)
CAVRDPSGAGSYQLTF

SEQ ID NO: 720870 - protein, 12 aa, Homo sapiens
  CDR3 for beta chain variable domain of TCR clone 360435 (TRBV11-2, TRBJ2-2)
CASSLGGGELFF

SEQ ID NO: 720871 - protein, 16 aa, Homo sapiens
  CDR3 for alpha chain variable domain of TCR clone 360436 (TRAV26-1, TRAJ37)
CIVRGDGSGNTGKLIF

SEQ ID NO: 720872 - protein, 17 aa, Homo sapiens
  CDR3 for beta chain variable domain of TCR clone 360436 (TRBV4-1, TRBJ2-7)
CASSRDPLGGRGEEQYF

SEQ ID NO: 720873 - protein, 11 aa, Homo sapiens
  CDR3 for alpha chain variable domain of TCR clone 360437 (TRAV16, TRAJ26)
CALSGSEFFLW

SEQ ID NO: 720874 - protein, 12 aa, Homo sapiens
  CDR3 for beta chain variable domain of TCR clone 360437 (TRBV11-2, TRBJ2-1)
CASSPGNNEQLF

SEQ ID NO: 720875 - protein, 11 aa, Homo sapiens
  CDR3 for alpha chain variable domain of TCR clone 360438 (TRAV2, TRAJ20)
CAVSDDYKLSF

SEQ ID NO: 720876 - protein, 20 aa, Homo sapiens
  CDR3 for beta chain variable domain of TCR clone 360438 (TRBV19, TRBJ2-1)
CASSISRTVTCTRLNNEQFF

SEQ ID NO: 720877 - protein, 11 aa, Homo sapiens
  CDR3 for alpha chain variable domain of TCR clone 360439 (TRAV1-1, TRAJ23)
CAVSQGGKLIF

SEQ ID NO: 720878 - protein, 20 aa, Homo sapiens
  CDR3 for beta chain variable domain of TCR clone 360439 (TRBV7-8, TRBJ2-2)
CASSHLFPGPTVHITGELFF

SEQ ID NO: 720879 - protein, 16 aa, Homo sapiens
  CDR3 for alpha chain variable domain of TCR clone 360440 (TRAV30, TRAJ57)
CGTGWAPQGGSEKLVF

SEQ ID NO: 720880 - protein, 14 aa, Homo sapiens
  CDR3 for beta chain variable domain of TCR clone 360440 (TRBV18, TRBJ1-1)
CASSPGIQGVEAFF

SEQ ID NO: 720881 - protein, 11 aa, Homo sapiens
  CDR3 for alpha chain variable domain of TCR clone 360441 (TRAV3, TRAJ13)
CAMTSYQKVTF

SEQ ID NO: 720882 - protein, 17 aa, Homo sapiens
  CDR3 for beta chain variable domain of TCR clone 360441 (TRBV6-1, TRBJ1-2)
CASSGTHSQRGNYGYTF

SEQ ID NO: 720883 - protein, 13 aa, Homo sapiens
  CDR3 for alpha chain variable domain of TCR clone 360442 (TRAV8-3, TRAJ15)
CAVGIQAGTALFF

SEQ ID NO: 720884 - protein, 17 aa, Homo sapiens
  CDR3 for beta chain variable domain of TCR clone 360442 (TRBV20-1, TRBJ2-1)
SAVLEILAGVSYNEQFF

SEQ ID NO: 720885 - protein, 16 aa, Homo sapiens
  CDR3 for alpha chain variable domain of TCR clone 360443 (TRAV13-1, TRAJ42)
SVQQVNYGGSQGNLIF

SEQ ID NO: 720886 - protein, 15 aa, Homo sapiens
  CDR3 for beta chain variable domain of TCR clone 360443 (TRBV20-1, TRBJ2-1)
CSASSAGSSYNEQFF

SEQ ID NO: 720887 - protein, 13 aa, Homo sapiens
  CDR3 for alpha chain variable domain of TCR clone 360444 (TRAV20, TRAJ40)
CAVHFSGTYKYIF

SEQ ID NO: 720888 - protein, 13 aa, Homo sapiens
  CDR3 for beta chain variable domain of TCR clone 360444 (TRBV15, TRBJ2-5)
CATRQSGEETQYF

SEQ ID NO: 720889 - protein, 13 aa, Homo sapiens
  CDR3 for alpha chain variable domain of TCR clone 360445 (TRAV2, TRAJ29)
CCDTPSGNTPLVF

SEQ ID NO: 720890 - protein, 13 aa, Homo sapiens
  CDR3 for beta chain variable domain of TCR clone 360445 (TRBV11-2, TRBJ2-1)
CASSLGLAGGRFF

SEQ ID NO: 720891 - protein, 16 aa, Homo sapiens
  CDR3 for alpha chain variable domain of TCR clone 360446 (TRAV23/DV6, TRAJ9)
CAASIGGNTGGFKTIF

SEQ ID NO: 720892 - protein, 15 aa, Homo sapiens
  CDR3 for beta chain variable domain of TCR clone 360446 (TRBV6-3, TRBJ2-7)
CASSSPGSVLYEQYF

SEQ ID NO: 720893 - protein, 14 aa, Homo sapiens
  CDR3 for alpha chain variable domain of TCR clone 360447 (TRAV12-2, TRAJ53)
CAVTGGGSNYKLTF

SEQ ID NO: 720894 - protein, 16 aa, Homo sapiens
  CDR3 for beta chain variable domain of TCR clone 360447 (TRBV27, TRBJ2-2)
CASSFRGLVRTGELFF

SEQ ID NO: 720895 - protein, 11 aa, Homo sapiens
  CDR3 for alpha chain variable domain of TCR clone 360448 (TRAV12-1, TRAJ21)
CAVNNFNKFYF

SEQ ID NO: 720896 - protein, 14 aa, Homo sapiens
  CDR3 for beta chain variable domain of TCR clone 360448 (TRBV15, TRBJ1-5)
CATSREQSNQPQHF

SEQ ID NO: 720897 - protein, 13 aa, Homo sapiens
  CDR3 for alpha chain variable domain of TCR clone 360449 (TRAV12-1, TRAJ40)
CVVPTSGTYKYIF

SEQ ID NO: 720898 - protein, 16 aa, Homo sapiens
  CDR3 for beta chain variable domain of TCR clone 360449 (TRBV6-1, TRBJ1-3)
CASVQGGVETPYILER

SEQ ID NO: 720899 - protein, 15 aa, Homo sapiens
  CDR3 for alpha chain variable domain of TCR clone 360450 (TRAV1-2, TRAJ9)
CAVRDDGTGGFKTIF

SEQ ID NO: 720900 - protein, 12 aa, Homo sapiens
  CDR3 for beta chain variable domain of TCR clone 360450 (TRBV5-1, TRBJ2-5)
CASSLGLETQYF

SEQ ID NO: 720901 - protein, 16 aa, Homo sapiens
  CDR3 for alpha chain variable domain of TCR clone 360451 (TRAV16, TRAJ57)
CAPYLITQGGSEKLVF

SEQ ID NO: 720902 - protein, 16 aa, Homo sapiens
  CDR3 for beta chain variable domain of TCR clone 360451 (TRBV6-1, TRBJ2-5)
CASSETLDRGAETQYF

SEQ ID NO: 720903 - protein, 11 aa, Homo sapiens
  CDR3 for alpha chain variable domain of TCR clone 360452 (TRAV1-2, TRAJ40)
CAVPGTYKYIF

SEQ ID NO: 720904 - protein, 15 aa, Homo sapiens
  CDR3 for beta chain variable domain of TCR clone 360452 (TRBV11-2, TRBJ2-1)
CASSLAPRAHNEQFF

SEQ ID NO: 720905 - protein, 13 aa, Homo sapiens
  CDR3 for alpha chain variable domain of TCR clone 360453 (TRAV35, TRAJ33)
CAGLMDSNYQLIW

SEQ ID NO: 720906 - protein, 13 aa, Homo sapiens
  CDR3 for beta chain variable domain of TCR clone 360453 (TRBV10-3, TRBJ2-1)
CAISEFRGREQFF

SEQ ID NO: 720907 - protein, 14 aa, Homo sapiens
  CDR3 for alpha chain variable domain of TCR clone 360454 (TRAV1-1, TRAJ23)
CAVSIYNQGGKLIF

SEQ ID NO: 720908 - protein, 15 aa, Homo sapiens
  CDR3 for beta chain variable domain of TCR clone 360454 (TRBV5-8, TRBJ2-2)
CASSLDRGATGELFL

SEQ ID NO: 720909 - protein, 16 aa, Homo sapiens
  CDR3 for alpha chain variable domain of TCR clone 360455 (TRAV8-1, TRAJ39)
FAVNVPSYNAGNMLTF

SEQ ID NO: 720910 - protein, 15 aa, Homo sapiens
  CDR3 for beta chain variable domain of TCR clone 360455 (TRBV4-1, TRBJ2-3)
CASRSTRAGTDTQYF

SEQ ID NO: 720911 - protein, 14 aa, Homo sapiens
  CDR3 for alpha chain variable domain of TCR clone 360456 (TRAV1-2, TRAJ16)
FAVNRFSYGQKLLF

SEQ ID NO: 720912 - protein, 14 aa, Homo sapiens
  CDR3 for beta chain variable domain of TCR clone 360456 (TRBV13, TRBJ2-5)
CASSLGRGQETQYF

SEQ ID NO: 720913 - protein, 13 aa, Homo sapiens
  CDR3 for alpha chain variable domain of TCR clone 360457 (TRAV23/DV6, TRAJ12)
CAPRVDSSYQLIF

SEQ ID NO: 720914 - protein, 12 aa, Homo sapiens
  CDR3 for beta chain variable domain of TCR clone 360457 (TRBV7-8, TRBJ2-7)
CASSLGDREQYF

SEQ ID NO: 720915 - protein, 14 aa, Homo sapiens
  CDR3 for alpha chain variable domain of TCR clone 360458 (TRAV12-3, TRAJ26)
CAPPCGNCGQNFVF

SEQ ID NO: 720916 - protein, 16 aa, Homo sapiens
  CDR3 for beta chain variable domain of TCR clone 360458 (TRBV7-6, TRBJ2-2)
CASSPGLADYTGELFF

SEQ ID NO: 720917 - protein, 15 aa, Homo sapiens
  CDR3 for alpha chain variable domain of TCR clone 360459 (TRAV13-1, TRAJ52)
CALRTGGTSYGNLTF

SEQ ID NO: 720918 - protein, 15 aa, Homo sapiens
  CDR3 for beta chain variable domain of TCR clone 360459 (TRBV7-3, TRBJ2-2)
CASSETGQGTGELFF

SEQ ID NO: 720919 - protein, 12 aa, Homo sapiens
  CDR3 for alpha chain variable domain of TCR clone 360460 (TRAV12-3, TRAJ17)
CAMTLTGNKPTF

SEQ ID NO: 720920 - protein, 14 aa, Homo sapiens
  CDR3 for beta chain variable domain of TCR clone 360460 (TRBV11-2, TRBJ2-7)
CASSLGAGAYEQYF

SEQ ID NO: 720921 - protein, 16 aa, Homo sapiens
  CDR3 for alpha chain variable domain of TCR clone 360461 (TRAV17, TRAJ35)
CATAEGGIGFGNVLHC

SEQ ID NO: 720922 - protein, 16 aa, Homo sapiens
  CDR3 for beta chain variable domain of TCR clone 360461 (TRBV6-5, TRBJ2-7)
CASSSDPTSGFYEQYV

SEQ ID NO: 720923 - protein, 15 aa, Homo sapiens
  CDR3 for alpha chain variable domain of TCR clone 360462 (TRAV27, TRAJ38)
CAARRNAGNNRKLIW

SEQ ID NO: 720924 - protein, 15 aa, Homo sapiens
  CDR3 for beta chain variable domain of TCR clone 360462 (TRBV13, TRBJ1-5)
CASSFGQGGVQPQHF

SEQ ID NO: 720925 - protein, 14 aa, Homo sapiens
  CDR3 for alpha chain variable domain of TCR clone 360463 (TRAV13-1, TRAJ9)
CAASALTGGFKTIF

SEQ ID NO: 720926 - protein, 17 aa, Homo sapiens
  CDR3 for beta chain variable domain of TCR clone 360463 (TRBV4-1, TRBJ1-4)
CASSQEGPRGVEEKLFF

SEQ ID NO: 720927 - protein, 14 aa, Homo sapiens
  CDR3 for alpha chain variable domain of TCR clone 360464 (TRAV38-1, TRAJ45)
CAYYSGGGADGLTF

SEQ ID NO: 720928 - protein, 20 aa, Homo sapiens
  CDR3 for beta chain variable domain of TCR clone 360464 (TRBV28, TRBJ2-1)
CASPPIGWSPGLAGGNEQFF

SEQ ID NO: 720929 - protein, 18 aa, Homo sapiens
  CDR3 for alpha chain variable domain of TCR clone 360465 (TRAV13-1, TRAJ52)
CAAKNPNAGGTSYGKLTV

SEQ ID NO: 720930 - protein, 14 aa, Homo sapiens
  CDR3 for beta chain variable domain of TCR clone 360465 (TRBV7-3, TRBJ2-1)
CASSLAGGTNEQFF

SEQ ID NO: 720931 - protein, 12 aa, Homo sapiens
  CDR3 for alpha chain variable domain of TCR clone 360466 (TRAV13-1, TRAJ20)
SVQQVNDYKLSF

SEQ ID NO: 720932 - protein, 14 aa, Homo sapiens
  CDR3 for beta chain variable domain of TCR clone 360466 (TRBV7-6, TRBJ2-3)
CASSLTGGTDTHYF

SEQ ID NO: 720933 - protein, 13 aa, Homo sapiens
  CDR3 for alpha chain variable domain of TCR clone 360467 (TRAV12-3, TRAJ33)
CAMSVNSNYQLFW

SEQ ID NO: 720934 - protein, 16 aa, Homo sapiens
  CDR3 for beta chain variable domain of TCR clone 360467 (TRBV7-3, TRBJ2-3)
CASSLSGYRPEDTQYF

SEQ ID NO: 720935 - protein, 11 aa, Homo sapiens
  CDR3 for alpha chain variable domain of TCR clone 360468 (TRAV2, TRAJ33)
CAVESNYQLIW

SEQ ID NO: 720936 - protein, 13 aa, Homo sapiens
  CDR3 for beta chain variable domain of TCR clone 360468 (TRBV20-1, TRBJ2-7)
CSATHTSGYEQYF

SEQ ID NO: 720937 - protein, 14 aa, Homo sapiens
  CDR3 for alpha chain variable domain of TCR clone 360469 (TRAV38-1, TRAJ40)
CALRPTSGTYKYIF

SEQ ID NO: 720938 - protein, 13 aa, Homo sapiens
  CDR3 for beta chain variable domain of TCR clone 360469 (TRBV7-9, TRBJ2-5)
CASLSPGQETQYF

SEQ ID NO: 720939 - protein, 13 aa, Homo sapiens
  CDR3 for alpha chain variable domain of TCR clone 360470 (TRAV13-1, TRAJ6)
CAASRGGSYIPTF

SEQ ID NO: 720940 - protein, 15 aa, Homo sapiens
  CDR3 for beta chain variable domain of TCR clone 360470 (TRBV25-1, TRBJ2-5)
CASSDTGTHQETQYF

SEQ ID NO: 720941 - protein, 15 aa, Homo sapiens
  CDR3 for alpha chain variable domain of TCR clone 360471 (TRAV3, TRAJ5)
CAVRDFDTGRRALTF

SEQ ID NO: 720942 - protein, 13 aa, Homo sapiens
  CDR3 for beta chain variable domain of TCR clone 360471 (TRBV12-4, TRBJ2-7)
CASSPTDTYEQYF

SEQ ID NO: 720943 - protein, 19 aa, Homo sapiens
  CDR3 for alpha chain variable domain of TCR clone 360472 (TRAV26-2, TRAJ28)
CCVLLHPCGIWAGSYQLTF

SEQ ID NO: 720944 - protein, 11 aa, Homo sapiens
  CDR3 for beta chain variable domain of TCR clone 360472 (TRBV25-1, TRBJ2-7)
CASSTSYEQYF

SEQ ID NO: 720945 - protein, 14 aa, Homo sapiens
  CDR3 for alpha chain variable domain of TCR clone 360473 (TRAV12-2, TRAJ11)
CAVNRESGYSTLTF

SEQ ID NO: 720946 - protein, 15 aa, Homo sapiens
  CDR3 for beta chain variable domain of TCR clone 360473 (TRBV20-1, TRBJ2-7)
CSARDRVSGMDEQYF

SEQ ID NO: 720947 - protein, 12 aa, Homo sapiens
  CDR3 for alpha chain variable domain of TCR clone 360474 (TRAV8-1, TRAJ6)
CASSGGSYIPTF

SEQ ID NO: 720948 - protein, 14 aa, Homo sapiens
  CDR3 for beta chain variable domain of TCR clone 360474 (TRBV7-2, TRBJ2-7)
CASSPKTSFYEQYF

SEQ ID NO: 720949 - protein, 14 aa, Homo sapiens
  CDR3 for alpha chain variable domain of TCR clone 360475 (TRAV12-2, TRAJ13)
CAVEKTGGYQKVTF

SEQ ID NO: 720950 - protein, 14 aa, Homo sapiens
  CDR3 for beta chain variable domain of TCR clone 360475 (TRBV4-1, TRBJ2-2)
CASSQAVNTGELFF

SEQ ID NO: 720951 - protein, 13 aa, Homo sapiens
  CDR3 for alpha chain variable domain of TCR clone 360476 (TRAV26-1, TRAJ29)
RIVRRSGNTPLVF

SEQ ID NO: 720952 - protein, 16 aa, Homo sapiens
  CDR3 for beta chain variable domain of TCR clone 360476 (TRBV11-2, TRBJ2-7)
CASSLAPTGVNYEQYF

SEQ ID NO: 720953 - protein, 12 aa, Homo sapiens
  CDR3 for alpha chain variable domain of TCR clone 360477 (TRAV5, TRAJ27)
CAEITNAGKSNF

SEQ ID NO: 720954 - protein, 14 aa, Homo sapiens
  CDR3 for beta chain variable domain of TCR clone 360477 (TRBV12-5, TRBJ2-5)
CASGSRTHQETQYF

SEQ ID NO: 720955 - protein, 14 aa, Homo sapiens
  CDR3 for alpha chain variable domain of TCR clone 360478 (TRAV1-2, TRAJ16)
GAVNRFSDGQKLLF

SEQ ID NO: 720956 - protein, 14 aa, Homo sapiens
  CDR3 for beta chain variable domain of TCR clone 360478 (TRBV19, TRBJ2-1)
CASPTFVLSGEQFF

SEQ ID NO: 720957 - protein, 11 aa, Homo sapiens
  CDR3 for alpha chain variable domain of TCR clone 360479 (TRAV17, TRAJ9)
CATTGGFKTIF

SEQ ID NO: 720958 - protein, 15 aa, Homo sapiens
  CDR3 for beta chain variable domain of TCR clone 360479 (TRBV7-2, TRBJ2-7)
CASSLKGALTYEQYF

SEQ ID NO: 720959 - protein, 14 aa, Homo sapiens
  CDR3 for alpha chain variable domain of TCR clone 360480 (TRAV26-1, TRAJ38)
CIADNAGNNRKLIW

SEQ ID NO: 720960 - protein, 14 aa, Homo sapiens
  CDR3 for beta chain variable domain of TCR clone 360480 (TRBV18, TRBJ2-7)
CASSPRGGSYEHYF

SEQ ID NO: 720961 - protein, 13 aa, Homo sapiens
  CDR3 for alpha chain variable domain of TCR clone 360481 (TRAV8-6, TRAJ43)
CAVPGSRNNNMRF

SEQ ID NO: 720962 - protein, 16 aa, Homo sapiens
  CDR3 for beta chain variable domain of TCR clone 360481 (TRBV11-2, TRBJ1-2)
CASSLDTGGADYGYTF

SEQ ID NO: 720963 - protein, 12 aa, Homo sapiens
  CDR3 for alpha chain variable domain of TCR clone 360482 (TRAV27, TRAJ42)
CAGGGSQGNLNF

SEQ ID NO: 720964 - protein, 14 aa, Homo sapiens
  CDR3 for beta chain variable domain of TCR clone 360482 (TRBV19, TRBJ2-1)
CASPTFVLSGEQFF

SEQ ID NO: 720965 - protein, 16 aa, Homo sapiens
  CDR3 for alpha chain variable domain of TCR clone 360483 (TRAV2, TRAJ13)
CAARILGVTRKLPLEL

SEQ ID NO: 720966 - protein, 13 aa, Homo sapiens
  CDR3 for beta chain variable domain of TCR clone 360483 (TRBV24-1, TRBJ2-2)
CATSDWSTGELFF

SEQ ID NO: 720967 - protein, 11 aa, Homo sapiens
  CDR3 for alpha chain variable domain of TCR clone 360484 (TRAV12-3, TRAJ27)
CAMANAGKATF

SEQ ID NO: 720968 - protein, 14 aa, Homo sapiens
  CDR3 for beta chain variable domain of TCR clone 360484 (TRBV4-1, TRBJ2-2)
CASSQAVNTGELFF

SEQ ID NO: 720969 - protein, 16 aa, Homo sapiens
  CDR3 for alpha chain variable domain of TCR clone 360485 (TRAV30, TRAJ24)
CGTEIVDADSWRKFQF

SEQ ID NO: 720970 - protein, 14 aa, Homo sapiens
  CDR3 for beta chain variable domain of TCR clone 360485 (TRBV13, TRBJ2-5)
CASSLERVGETQYF

SEQ ID NO: 720971 - protein, 12 aa, Homo sapiens
  CDR3 for alpha chain variable domain of TCR clone 360486 (TRAV21, TRAJ39)
CAADNAGNMLTF

SEQ ID NO: 720972 - protein, 14 aa, Homo sapiens
  CDR3 for beta chain variable domain of TCR clone 360486 (TRBV6-1, TRBJ1-3)
CASVQGGGGNTIYF

SEQ ID NO: 720973 - protein, 13 aa, Homo sapiens
  CDR3 for alpha chain variable domain of TCR clone 360487 (TRAV1-2, TRAJ9)
CAVLNTGGFKTIF

SEQ ID NO: 720974 - protein, 15 aa, Homo sapiens
  CDR3 for beta chain variable domain of TCR clone 360487 (TRBV19, TRBJ1-5)
CASSIVWADNQPQHF

SEQ ID NO: 720975 - protein, 12 aa, Homo sapiens
  CDR3 for alpha chain variable domain of TCR clone 360488 (TRAV2, TRAJ31)
CAVEAGNARLMF

SEQ ID NO: 720976 - protein, 15 aa, Homo sapiens
  CDR3 for beta chain variable domain of TCR clone 360488 (TRBV11-1, TRBJ2-7)
CASSRGRFKTYEQYF

SEQ ID NO: 720977 - protein, 11 aa, Homo sapiens
  CDR3 for alpha chain variable domain of TCR clone 360489 (TRAV2, TRAJ13)
CASGGYQKVTF

SEQ ID NO: 720978 - protein, 16 aa, Homo sapiens
  CDR3 for beta chain variable domain of TCR clone 360489 (TRBV19, TRBJ2-1)
CACSKAGPSSYSEQFF

SEQ ID NO: 720979 - protein, 15 aa, Homo sapiens
  CDR3 for alpha chain variable domain of TCR clone 360490 (TRAV25, TRAJ52)
CAGTSGGTSYGKLTF

SEQ ID NO: 720980 - protein, 14 aa, Homo sapiens
  CDR3 for beta chain variable domain of TCR clone 360490 (TRBV6-5, TRBJ1-2)
CASSYSGQGGGYTF

SEQ ID NO: 720981 - protein, 11 aa, Homo sapiens
  CDR3 for alpha chain variable domain of TCR clone 360491 (TRAV27, TRAJ20)
CAGLNDYKLSF

SEQ ID NO: 720982 - protein, 14 aa, Homo sapiens
  CDR3 for beta chain variable domain of TCR clone 360491 (TRBV6-3, TRBJ1-1)
CASRYTGESTEAFF

SEQ ID NO: 720983 - protein, 13 aa, Homo sapiens
  CDR3 for alpha chain variable domain of TCR clone 360492 (TRAV3, TRAJ20)
CAVRPLNDYKLSF

SEQ ID NO: 720984 - protein, 20 aa, Homo sapiens
  CDR3 for beta chain variable domain of TCR clone 360492 (TRBV6-1, TRBJ2-1)
CASTPIGRSPGLAGGNEQFF

SEQ ID NO: 720985 - protein, 14 aa, Homo sapiens
  CDR3 for alpha chain variable domain of TCR clone 360493 (TRAV12-2, TRAJ13)
CAVKKTGGYRKVTF

SEQ ID NO: 720986 - protein, 15 aa, Homo sapiens
  CDR3 for beta chain variable domain of TCR clone 360493 (TRBV27, TRBJ2-1)
CASSNGEGPPMSSSS

SEQ ID NO: 720987 - protein, 16 aa, Homo sapiens
  CDR3 for alpha chain variable domain of TCR clone 360494 (TRAV8-3, TRAJ8)
CAVPRDGNPGFQKLGF

SEQ ID NO: 720988 - protein, 15 aa, Homo sapiens
  CDR3 for beta chain variable domain of TCR clone 360494 (TRBV6-1, TRBJ2-6)
CASSSRPSGANALTF

SEQ ID NO: 720989 - protein, 15 aa, Homo sapiens
  CDR3 for alpha chain variable domain of TCR clone 360495 (TRAV3, TRAJ3)
CAVRDRDSSASKIIF

SEQ ID NO: 720990 - protein, 18 aa, Homo sapiens
  CDR3 for beta chain variable domain of TCR clone 360495 (TRBV25-1, TRBJ1-2)
CASSGGGDGQGLIFGYTF

SEQ ID NO: 720991 - protein, 16 aa, Homo sapiens
  CDR3 for alpha chain variable domain of TCR clone 360496 (TRAV3, TRAJ42)
CAVRDIEGGSQGNLIV

SEQ ID NO: 720992 - protein, 14 aa, Homo sapiens
  CDR3 for beta chain variable domain of TCR clone 360496 (TRBV18, TRBJ1-1)
CASSPPTGRTEALF

SEQ ID NO: 720993 - protein, 12 aa, Homo sapiens
  CDR3 for alpha chain variable domain of TCR clone 360497 (TRAV1-2, TRAJ33)
CAALDSNYQLTL

SEQ ID NO: 720994 - protein, 16 aa, Homo sapiens
  CDR3 for beta chain variable domain of TCR clone 360497 (TRBV6-4, TRBJ1-2)
CASSEAVGDPNYGYTF

SEQ ID NO: 720995 - protein, 17 aa, Homo sapiens
  CDR3 for alpha chain variable domain of TCR clone 360498 (TRAV1-1, TRAJ31)
CAVPKQCQTHVWSWNSA

SEQ ID NO: 720996 - protein, 17 aa, Homo sapiens
  CDR3 for beta chain variable domain of TCR clone 360498 (TRBV27, TRBJ2-6)
CASSAGTGFSGANVLTF

SEQ ID NO: 720997 - protein, 20 aa, Homo sapiens
  CDR3 for alpha chain variable domain of TCR clone 360499 (TRAV1-1, TRAJ4)
CLLLLRCEGFLSGGYNKLIF

SEQ ID NO: 720998 - protein, 16 aa, Homo sapiens
  CDR3 for beta chain variable domain of TCR clone 360499 (TRBV28, TRBJ1-4)
CASSPLYRGRSEKLFF

SEQ ID NO: 720999 - protein, 14 aa, Homo sapiens
  CDR3 for alpha chain variable domain of TCR clone 360500 (TRAV9-2, TRAJ38)
WALSNAGKNRKLIG

SEQ ID NO: 721000 - protein, 15 aa, Homo sapiens
  CDR3 for beta chain variable domain of TCR clone 360500 (TRBV19, TRBJ2-1)
CASSIQATSYNEQFF

SEQ ID NO: 721001 - protein, 12 aa, Homo sapiens
  CDR3 for alpha chain variable domain of TCR clone 360501 (TRAV12-1, TRAJ13)
CGGPLGYQKVTF

SEQ ID NO: 721002 - protein, 13 aa, Homo sapiens
  CDR3 for beta chain variable domain of TCR clone 360501 (TRBV20-1, TRBJ2-5)
CSAILTGQETQYF

SEQ ID NO: 721003 - protein, 11 aa, Homo sapiens
  CDR3 for alpha chain variable domain of TCR clone 360502 (TRAV5, TRAJ3)
CAPGSAAKIIF

SEQ ID NO: 721004 - protein, 12 aa, Homo sapiens
  CDR3 for beta chain variable domain of TCR clone 360502 (TRBV18, TRBJ2-1)
CASSSDEDEQFF

SEQ ID NO: 721005 - protein, 17 aa, Homo sapiens
  CDR3 for alpha chain variable domain of TCR clone 360503 (TRAV16, TRAJ16)
CALSGLVTGMARSCSLQ

SEQ ID NO: 721006 - protein, 14 aa, Homo sapiens
  CDR3 for beta chain variable domain of TCR clone 360503 (TRBV7-9, TRBJ2-4)
CASTTGGAKNIQYF

SEQ ID NO: 721007 - protein, 14 aa, Homo sapiens
  CDR3 for alpha chain variable domain of TCR clone 360504 (TRAV17, TRAJ11)
CATDTSRGYSNLTF

SEQ ID NO: 721008 - protein, 13 aa, Homo sapiens
  CDR3 for beta chain variable domain of TCR clone 360504 (TRBV19, TRBJ2-5)
CASRDSRRETQYF

SEQ ID NO: 721009 - protein, 12 aa, Homo sapiens
  CDR3 for alpha chain variable domain of TCR clone 360505 (TRAV12-3, TRAJ17)
CAMTLTGNKLTF

SEQ ID NO: 721010 - protein, 16 aa, Homo sapiens
  CDR3 for beta chain variable domain of TCR clone 360505 (TRBV7-3, TRBJ2-1)
CASSLESYRSYNEQFF

SEQ ID NO: 721011 - protein, 12 aa, Homo sapiens
  CDR3 for alpha chain variable domain of TCR clone 360506 (TRAV27, TRAJ35)
CAGADFGNVLHF

SEQ ID NO: 721012 - protein, 15 aa, Homo sapiens
  CDR3 for beta chain variable domain of TCR clone 360506 (TRBV4-1, TRBJ1-2)
CASSLNTGQGYGYTF

SEQ ID NO: 721013 - protein, 15 aa, Homo sapiens
  CDR3 for alpha chain variable domain of TCR clone 360507 (TRAV35, TRAJ23)
CAVQRGYNQGGKLIF

SEQ ID NO: 721014 - protein, 16 aa, Homo sapiens
  CDR3 for beta chain variable domain of TCR clone 360507 (TRBV27, TRBJ2-1)
CASSSRLAGNYNEQFF

SEQ ID NO: 721015 - protein, 18 aa, Homo sapiens
  CDR3 for alpha chain variable domain of TCR clone 360508 (TRAV26-1, TRAJ52)
FIVRVEGAGGTSYGKLTF

SEQ ID NO: 721016 - protein, 13 aa, Homo sapiens
  CDR3 for beta chain variable domain of TCR clone 360508 (TRBV7-9, TRBJ1-2)
CASSLKQNYGYTL

SEQ ID NO: 721017 - protein, 18 aa, Homo sapiens
  CDR3 for alpha chain variable domain of TCR clone 360509 (TRAV13-1, TRAJ52)
CAASKRSAGGTSYGKLTF

SEQ ID NO: 721018 - protein, 15 aa, Homo sapiens
  CDR3 for beta chain variable domain of TCR clone 360509 (TRBV19, TRBJ2-1)
CASSINREPSHEQFF

SEQ ID NO: 721019 - protein, 12 aa, Homo sapiens
  CDR3 for alpha chain variable domain of TCR clone 360510 (TRAV8-4, TRAJ43)
CAGSVNNNDMRF

SEQ ID NO: 721020 - protein, 13 aa, Homo sapiens
  CDR3 for beta chain variable domain of TCR clone 360510 (TRBV7-7, TRBJ1-1)
CASSLGANTEAFF

SEQ ID NO: 721021 - protein, 14 aa, Homo sapiens
  CDR3 for alpha chain variable domain of TCR clone 360511 (TRAV12-3, TRAJ33)
CNDHGRDSNSQLIW

SEQ ID NO: 721022 - protein, 15 aa, Homo sapiens
  CDR3 for beta chain variable domain of TCR clone 360511 (TRBV28, TRBJ1-5)
CASSLPQQGEQPQHF

SEQ ID NO: 721023 - protein, 14 aa, Homo sapiens
  CDR3 for alpha chain variable domain of TCR clone 360512 (TRAV12-3, TRAJ33)
CAMSAGDSNYQLIW

SEQ ID NO: 721024 - protein, 20 aa, Homo sapiens
  CDR3 for beta chain variable domain of TCR clone 360512 (TRBV19, TRBJ2-1)
CASSISRTVTSTRLNNEQFF

SEQ ID NO: 721025 - protein, 14 aa, Homo sapiens
  CDR3 for alpha chain variable domain of TCR clone 360513 (TRAV2, TRAJ37)
CAVAFTSNKGKIIF

SEQ ID NO: 721026 - protein, 17 aa, Homo sapiens
  CDR3 for beta chain variable domain of TCR clone 360513 (TRBV19, TRBJ2-7)
CASSISFYDSYPYEQYF

SEQ ID NO: 721027 - protein, 17 aa, Homo sapiens
  CDR3 for alpha chain variable domain of TCR clone 360514 (TRAV26-1, TRAJ11)
CIVRVGQSNSGYSTLTF

SEQ ID NO: 721028 - protein, 18 aa, Homo sapiens
  CDR3 for beta chain variable domain of TCR clone 360514 (TRBV11-2, TRBJ2-3)
CASSSGGASRGAPNTQYF

SEQ ID NO: 721029 - protein, 11 aa, Homo sapiens
  CDR3 for alpha chain variable domain of TCR clone 360515 (TRAV1-1, TRAJ23)
CAVRQGGKLIF

SEQ ID NO: 721030 - protein, 14 aa, Homo sapiens
  CDR3 for beta chain variable domain of TCR clone 360515 (TRBV2, TRBJ2-7)
CASSVLGAAYEQYF

SEQ ID NO: 721031 - protein, 17 aa, Homo sapiens
  CDR3 for alpha chain variable domain of TCR clone 360516 (TRAV8-3, TRAJ10)
EASNTVMLTGGGNKLTF

SEQ ID NO: 721032 - protein, 16 aa, Homo sapiens
  CDR3 for beta chain variable domain of TCR clone 360516 (TRBV7-9, TRBJ1-2)
CASSLGFSSGEDGYTF

SEQ ID NO: 721033 - protein, 15 aa, Homo sapiens
  CDR3 for alpha chain variable domain of TCR clone 360517 (TRAV13-1, TRAJ42)
CAASIARGSQGNLIF

SEQ ID NO: 721034 - protein, 15 aa, Homo sapiens
  CDR3 for beta chain variable domain of TCR clone 360517 (TRBV19, TRBJ2-1)
CASSIVRGEGREQFF

SEQ ID NO: 721035 - protein, 12 aa, Homo sapiens
  CDR3 for alpha chain variable domain of TCR clone 360518 (TRAV3, TRAJ31)
CAGRDGNARLMF

SEQ ID NO: 721036 - protein, 14 aa, Homo sapiens
  CDR3 for beta chain variable domain of TCR clone 360518 (TRBV10-3, TRBJ2-1)
CAISPGQGSNEQFF

SEQ ID NO: 721037 - protein, 14 aa, Homo sapiens
  CDR3 for alpha chain variable domain of TCR clone 360519 (TRAV1-2, TRAJ16)
CAVNRFSDGQKLLF

SEQ ID NO: 721038 - protein, 15 aa, Homo sapiens
  CDR3 for beta chain variable domain of TCR clone 360519 (TRBV20-1, TRBJ2-7)
CSVRDRVSGMDEQYF

SEQ ID NO: 721039 - protein, 16 aa, Homo sapiens
  CDR3 for alpha chain variable domain of TCR clone 360520 (TRAV13-1, TRAJ17)
CAASKGVKAAGNKLTF

SEQ ID NO: 721040 - protein, 14 aa, Homo sapiens
  CDR3 for beta chain variable domain of TCR clone 360520 (TRBV5-1, TRBJ2-7)
CASSRGESLYEQYF

SEQ ID NO: 721041 - protein, 11 aa, Homo sapiens
  CDR3 for alpha chain variable domain of TCR clone 360521 (TRAV2, TRAJ13)
CASGGYEKVTF

SEQ ID NO: 721042 - protein, 16 aa, Homo sapiens
  CDR3 for beta chain variable domain of TCR clone 360521 (TRBV2, TRBJ2-1)
CASSVGGSLSYNEQFF

SEQ ID NO: 721043 - protein, 15 aa, Homo sapiens
  CDR3 for alpha chain variable domain of TCR clone 360522 (TRAV25, TRAJ52)
CAGRPGGTSYGKMTF

SEQ ID NO: 721044 - protein, 17 aa, Homo sapiens
  CDR3 for beta chain variable domain of TCR clone 360522 (TRBV7-8, TRBJ2-6)
CASSAGTEGAGANVLTF

SEQ ID NO: 721045 - protein, 16 aa, Homo sapiens
  CDR3 for alpha chain variable domain of TCR clone 360523 (TRAV26-1, TRAJ44)
IASSESRTGTASKLTF

SEQ ID NO: 721046 - protein, 13 aa, Homo sapiens
  CDR3 for beta chain variable domain of TCR clone 360523 (TRBV7-2, TRBJ1-5)
CASSFARNQPQYF

SEQ ID NO: 721047 - protein, 12 aa, Homo sapiens
  CDR3 for alpha chain variable domain of TCR clone 360524 (TRAV13-2, TRAJ23)
CAELHSGGKLIF

SEQ ID NO: 721048 - protein, 16 aa, Homo sapiens
  CDR3 for beta chain variable domain of TCR clone 360524 (TRBV20-1, TRBJ1-4)
CSAPGQGLLTNEKLFF

SEQ ID NO: 721049 - protein, 11 aa, Homo sapiens
  CDR3 for alpha chain variable domain of TCR clone 360525 (TRAV12-3, TRAJ27)
CAMANACKSTF

SEQ ID NO: 721050 - protein, 14 aa, Homo sapiens
  CDR3 for beta chain variable domain of TCR clone 360525 (TRBV12-5, TRBJ2-5)
CASGSRTHQETQYF

SEQ ID NO: 721051 - protein, 15 aa, Homo sapiens
  CDR3 for alpha chain variable domain of TCR clone 360526 (TRAV12-2, TRAJ53)
CAVNGGGGSNYKLTF

SEQ ID NO: 721052 - protein, 14 aa, Homo sapiens
  CDR3 for beta chain variable domain of TCR clone 360526 (TRBV27, TRBJ2-1)
CAGSIAETYNEQFF

SEQ ID NO: 721053 - protein, 14 aa, Homo sapiens
  CDR3 for alpha chain variable domain of TCR clone 360527 (TRAV8-4, TRAJ39)
CAVSLNNAGNMLTF

SEQ ID NO: 721054 - protein, 16 aa, Homo sapiens
  CDR3 for beta chain variable domain of TCR clone 360527 (TRBV13, TRBJ2-7)
CAGSSRESGRTYEQYF

SEQ ID NO: 721055 - protein, 13 aa, Homo sapiens
  CDR3 for alpha chain variable domain of TCR clone 360528 (TRAV25, TRAJ10)
CAGRTGGGNKLTF

SEQ ID NO: 721056 - protein, 14 aa, Homo sapiens
  CDR3 for beta chain variable domain of TCR clone 360528 (TRBV7-2, TRBJ2-7)
CASRSQGAAYEQYF

SEQ ID NO: 721057 - protein, 16 aa, Homo sapiens
  CDR3 for alpha chain variable domain of TCR clone 360529 (TRAV26-1, TRAJ53)
CIVRVAMGGSNYKLTF

SEQ ID NO: 721058 - protein, 17 aa, Homo sapiens
  CDR3 for beta chain variable domain of TCR clone 360529 (TRBV20-1, TRBJ2-7)
CSARETKTGYLSYEQYF

SEQ ID NO: 721059 - protein, 14 aa, Homo sapiens
  CDR3 for alpha chain variable domain of TCR clone 360530 (TRAV12-3, TRAJ21)
CAMEGHQGFNKFYF

SEQ ID NO: 721060 - protein, 16 aa, Homo sapiens
  CDR3 for beta chain variable domain of TCR clone 360530 (TRBV19, TRBJ2-1)
CASNKAGPSSYNEQFF

SEQ ID NO: 721061 - protein, 18 aa, Homo sapiens
  CDR3 for alpha chain variable domain of TCR clone 360531 (TRAV21, TRAJ52)
RAVRPSPAGGTSYGTLTF

SEQ ID NO: 721062 - protein, 15 aa, Homo sapiens
  CDR3 for beta chain variable domain of TCR clone 360531 (TRBV19, TRBJ1-1)
CASTSGQIQNTEAFF

SEQ ID NO: 721063 - protein, 17 aa, Homo sapiens
  CDR3 for alpha chain variable domain of TCR clone 360532 (TRAV3, TRAJ6)
CAVRDGPRAGGSYIPTF

SEQ ID NO: 721064 - protein, 15 aa, Homo sapiens
  CDR3 for beta chain variable domain of TCR clone 360532 (TRBV13, TRBJ2-5)
CASSLPGGIQETQYF

SEQ ID NO: 721065 - protein, 13 aa, Homo sapiens
  CDR3 for alpha chain variable domain of TCR clone 360533 (TRAV29/DV5, TRAJ31)
CAASRNNNARLMF

SEQ ID NO: 721066 - protein, 15 aa, Homo sapiens
  CDR3 for beta chain variable domain of TCR clone 360533 (TRBV12-4, TRBJ2-2)
CASSFKSANTGELFF

SEQ ID NO: 721067 - protein, 23 aa, Homo sapiens
  CDR3 for alpha chain variable domain of TCR clone 360534 (TRAV30, TRAJ43)
CTLRPPSSVTQEPTSAALSDMRF

SEQ ID NO: 721068 - protein, 16 aa, Homo sapiens
  CDR3 for beta chain variable domain of TCR clone 360534 (TRBV11-2, TRBJ2-7)
CASSLAPTGVNYEQYF

SEQ ID NO: 721069 - protein, 22 aa, Homo sapiens
  CDR3 for alpha chain variable domain of TCR clone 360535 (TRAV27, TRAJ38)
CAGRFNAGNNHIQNPDPAVYQL

SEQ ID NO: 721070 - protein, 13 aa, Homo sapiens
  CDR3 for beta chain variable domain of TCR clone 360535 (TRBV20-1, TRBJ1-1)
CSARDGGNTEAFF

SEQ ID NO: 721071 - protein, 14 aa, Homo sapiens
  CDR3 for alpha chain variable domain of TCR clone 360536 (TRAV12-1, TRAJ54)
CVVNIYQGAQKLEF

SEQ ID NO: 721072 - protein, 14 aa, Homo sapiens
  CDR3 for beta chain variable domain of TCR clone 360536 (TRBV12-5, TRBJ2-5)
CASGSRTHQETQYF

SEQ ID NO: 721073 - protein, 15 aa, Homo sapiens
  CDR3 for alpha chain variable domain of TCR clone 360537 (TRAV14/DV4, TRAJ26)
CAMREGQNYGQNFVF

SEQ ID NO: 721074 - protein, 13 aa, Homo sapiens
  CDR3 for beta chain variable domain of TCR clone 360537 (TRBV24-1, TRBJ2-2)
CATSYWSTGELFF

SEQ ID NO: 721075 - protein, 14 aa, Homo sapiens
  CDR3 for alpha chain variable domain of TCR clone 360538 (TRAV12-1, TRAJ17)
CVVNYKAAGNKLTF

SEQ ID NO: 721076 - protein, 11 aa, Homo sapiens
  CDR3 for beta chain variable domain of TCR clone 360538 (TRBV12-4, TRBJ2-3)
CASTATDTQYF

SEQ ID NO: 721077 - protein, 15 aa, Homo sapiens
  CDR3 for alpha chain variable domain of TCR clone 360539 (TRAV2, TRAJ9)
CAVVALNTGGFKTIF

SEQ ID NO: 721078 - protein, 14 aa, Homo sapiens
  CDR3 for beta chain variable domain of TCR clone 360539 (TRBV7-8, TRBJ2-5)
CASSATGGQETQYF

SEQ ID NO: 721079 - protein, 15 aa, Homo sapiens
  CDR3 for alpha chain variable domain of TCR clone 360540 (TRAV8-2, TRAJ24)
CVVSDRTDSWGNCSL

SEQ ID NO: 721080 - protein, 13 aa, Homo sapiens
  CDR3 for beta chain variable domain of TCR clone 360540 (TRBV7-9, TRBJ1-2)
CASSLKQNYGYTF

SEQ ID NO: 721081 - protein, 14 aa, Homo sapiens
  CDR3 for alpha chain variable domain of TCR clone 360541 (TRAV1-2, TRAJ16)
CDVNRFSDGQKLLF

SEQ ID NO: 721082 - protein, 15 aa, Homo sapiens
  CDR3 for beta chain variable domain of TCR clone 360541 (TRBV28, TRBJ2-1)
CASSLGTRLYNEQFF

SEQ ID NO: 721083 - protein, 20 aa, Homo sapiens
  CDR3 for alpha chain variable domain of TCR clone 360542 (TRAV26-1, TRAJ37)
CCVLLHRQINGSSNTGKLIF

SEQ ID NO: 721084 - protein, 13 aa, Homo sapiens
  CDR3 for beta chain variable domain of TCR clone 360542 (TRBV20-1, TRBJ2-7)
CSASTSGNYEQYF

SEQ ID NO: 721085 - protein, 13 aa, Homo sapiens
  CDR3 for alpha chain variable domain of TCR clone 360543 (TRAV17, TRAJ40)
CAGALGGTYKYIF

SEQ ID NO: 721086 - protein, 16 aa, Homo sapiens
  CDR3 for beta chain variable domain of TCR clone 360543 (TRBV11-2, TRBJ1-2)
CASSLDTGGADYGYNF

SEQ ID NO: 721087 - protein, 15 aa, Homo sapiens
  CDR3 for alpha chain variable domain of TCR clone 360544 (TRAV3, TRAJ22)
CAVRGRGGSARQLTF

SEQ ID NO: 721088 - protein, 16 aa, Homo sapiens
  CDR3 for beta chain variable domain of TCR clone 360544 (TRBV4-2, TRBJ2-4)
CASSQELRRAKNIQYF

SEQ ID NO: 721089 - protein, 13 aa, Homo sapiens
  CDR3 for alpha chain variable domain of TCR clone 360545 (TRAV13-1, TRAJ47)
CAATLTGGNKLVF

SEQ ID NO: 721090 - protein, 15 aa, Homo sapiens
  CDR3 for beta chain variable domain of TCR clone 360545 (TRBV7-9, TRBJ1-6)
CASSSPGRGNSPLHF

SEQ ID NO: 721091 - protein, 15 aa, Homo sapiens
  CDR3 for alpha chain variable domain of TCR clone 360546 (TRAV6, TRAJ4)
CALDLRRGGYNKLIF

SEQ ID NO: 721092 - protein, 14 aa, Homo sapiens
  CDR3 for beta chain variable domain of TCR clone 360546 (TRBV6-3, TRBJ2-1)
CASLHSAYYNEQFF

SEQ ID NO: 721093 - protein, 13 aa, Homo sapiens
  CDR3 for alpha chain variable domain of TCR clone 360547 (TRAV20, TRAJ20)
CAVQAGSGYKLSF

SEQ ID NO: 721094 - protein, 14 aa, Homo sapiens
  CDR3 for beta chain variable domain of TCR clone 360547 (TRBV20-1, TRBJ2-3)
CSARGGTSTDTQYF

SEQ ID NO: 721095 - protein, 13 aa, Homo sapiens
  CDR3 for alpha chain variable domain of TCR clone 360548 (TRAV1-2, TRAJ36)
CAVDQTGANNLFF

SEQ ID NO: 721096 - protein, 16 aa, Homo sapiens
  CDR3 for beta chain variable domain of TCR clone 360548 (TRBV12-4, TRBJ1-5)
CASSRPVGGSNQPQHF

SEQ ID NO: 721097 - protein, 14 aa, Homo sapiens
  CDR3 for alpha chain variable domain of TCR clone 360549 (TRAV26-1, TRAJ38)
CIADNAGNNRKLSW

SEQ ID NO: 721098 - protein, 12 aa, Homo sapiens
  CDR3 for beta chain variable domain of TCR clone 360549 (TRBV5-1, TRBJ2-7)
CASSFRGYEQYF

SEQ ID NO: 721099 - protein, 14 aa, Homo sapiens
  CDR3 for alpha chain variable domain of TCR clone 360550 (TRAV8-4, TRAJ54)
CAVSGVLGAQKLVC

SEQ ID NO: 721100 - protein, 13 aa, Homo sapiens
  CDR3 for beta chain variable domain of TCR clone 360550 (TRBV27, TRBJ2-7)
CASSFVSSYEQYF

SEQ ID NO: 721101 - protein, 17 aa, Homo sapiens
  CDR3 for alpha chain variable domain of TCR clone 360551 (TRAV8-3, TRAJ52)
CCGCDLPGDYSYGKLTF

SEQ ID NO: 721102 - protein, 15 aa, Homo sapiens
  CDR3 for beta chain variable domain of TCR clone 360551 (TRBV11-2, TRBJ1-6)
CASSSPGRGNSPLHF

SEQ ID NO: 721103 - protein, 12 aa, Homo sapiens
  CDR3 for alpha chain variable domain of TCR clone 360552 (TRAV13-1, TRAJ40)
CAASWATYKYIF

SEQ ID NO: 721104 - protein, 15 aa, Homo sapiens
  CDR3 for beta chain variable domain of TCR clone 360552 (TRBV7-8, TRBJ2-1)
CASSSRLAAYNEQVF

SEQ ID NO: 721105 - protein, 18 aa, Homo sapiens
  CDR3 for alpha chain variable domain of TCR clone 360553 (TRAV21, TRAJ52)
CAVRPSPEGGTSYGKLTF

SEQ ID NO: 721106 - protein, 13 aa, Homo sapiens
  CDR3 for beta chain variable domain of TCR clone 360553 (TRBV10-3, TRBJ2-7)
CASKLAVNYEQYF

SEQ ID NO: 721107 - protein, 14 aa, Homo sapiens
  CDR3 for alpha chain variable domain of TCR clone 360554 (TRAV12-2, TRAJ15)
CAPHTGQAGTALIF

SEQ ID NO: 721108 - protein, 17 aa, Homo sapiens
  CDR3 for beta chain variable domain of TCR clone 360554 (TRBV5-1, TRBJ2-3)
CASSLGASTSGTDTQYF

SEQ ID NO: 721109 - protein, 13 aa, Homo sapiens
  CDR3 for alpha chain variable domain of TCR clone 360555 (TRAV12-2, TRAJ10)
CAVPTGGGNKLTF

SEQ ID NO: 721110 - protein, 14 aa, Homo sapiens
  CDR3 for beta chain variable domain of TCR clone 360555 (TRBV25-1, TRBJ1-1)
CASTHLEGKTEAFF

SEQ ID NO: 721111 - protein, 13 aa, Homo sapiens
  CDR3 for alpha chain variable domain of TCR clone 360556 (TRAV21, TRAJ45)
CAVMGGGADGLTF

SEQ ID NO: 721112 - protein, 17 aa, Homo sapiens
  CDR3 for beta chain variable domain of TCR clone 360556 (TRBV18, TRBJ2-1)
CASSPRVAGGSYNEQFF

SEQ ID NO: 721113 - protein, 14 aa, Homo sapiens
  CDR3 for alpha chain variable domain of TCR clone 360557 (TRAV17, TRAJ57)
CATDPQGESEKLVF

SEQ ID NO: 721114 - protein, 14 aa, Homo sapiens
  CDR3 for beta chain variable domain of TCR clone 360557 (TRBV13, TRBJ2-7)
CASSLKGASYEQYF

SEQ ID NO: 721115 - protein, 14 aa, Homo sapiens
  CDR3 for alpha chain variable domain of TCR clone 360558 (TRAV26-1, TRAJ38)
CIADNAGNNRKLLW

SEQ ID NO: 721116 - protein, 13 aa, Homo sapiens
  CDR3 for beta chain variable domain of TCR clone 360558 (TRBV20-1, TRBJ1-1)
CSARGGGNTEAFS

SEQ ID NO: 721117 - protein, 12 aa, Homo sapiens
  CDR3 for alpha chain variable domain of TCR clone 360559 (TRAV17, TRAJ20)
CATDENDYKLSF

SEQ ID NO: 721118 - protein, 13 aa, Homo sapiens
  CDR3 for beta chain variable domain of TCR clone 360559 (TRBV11-2, TRBJ2-7)
CASSGTRPYEQYF

SEQ ID NO: 721119 - protein, 16 aa, Homo sapiens
  CDR3 for alpha chain variable domain of TCR clone 360560 (TRAV16, TRAJ42)
CARKMNYGGSQGNLIF

SEQ ID NO: 721120 - protein, 13 aa, Homo sapiens
  CDR3 for beta chain variable domain of TCR clone 360560 (TRBV20-1, TRBJ2-7)
CSASPPSTYEQYF

SEQ ID NO: 721121 - protein, 13 aa, Homo sapiens
  CDR3 for alpha chain variable domain of TCR clone 360561 (TRAV25, TRAJ16)
CAGRTARSSSLQG

SEQ ID NO: 721122 - protein, 18 aa, Homo sapiens
  CDR3 for beta chain variable domain of TCR clone 360561 (TRBV6-5, TRBJ1-1)
CTSVPALFDGLLNTEAFF

SEQ ID NO: 721123 - protein, 14 aa, Homo sapiens
  CDR3 for alpha chain variable domain of TCR clone 360562 (TRAV35, TRAJ40)
YAGSTTSGTYKYIF

SEQ ID NO: 721124 - protein, 13 aa, Homo sapiens
  CDR3 for beta chain variable domain of TCR clone 360562 (TRBV20-1, TRBJ1-6)
CSAPLGVGSPLHF

SEQ ID NO: 721125 - protein, 23 aa, Homo sapiens
  CDR3 for alpha chain variable domain of TCR clone 360563 (TRAV26-1, TRAJ38)
CIADNAGNNHIQNPDPAVYQLRD

SEQ ID NO: 721126 - protein, 15 aa, Homo sapiens
  CDR3 for beta chain variable domain of TCR clone 360563 (TRBV2, TRBJ2-1)
CASSEEREGDNEQFF

SEQ ID NO: 721127 - protein, 13 aa, Homo sapiens
  CDR3 for alpha chain variable domain of TCR clone 360564 (TRAV12-3, TRAJ54)
CAMFAQGGQKLVF

SEQ ID NO: 721128 - protein, 16 aa, Homo sapiens
  CDR3 for beta chain variable domain of TCR clone 360564 (TRBV7-6, TRBJ2-3)
CASSPRRGGLGDTQYF

SEQ ID NO: 721129 - protein, 15 aa, Homo sapiens
  CDR3 for alpha chain variable domain of TCR clone 360565 (TRAV8-3, TRAJ45)
CASSYSGGGADGLTF

SEQ ID NO: 721130 - protein, 15 aa, Homo sapiens
  CDR3 for beta chain variable domain of TCR clone 360565 (TRBV20-1, TRBJ2-7)
CSARKGLAESYEQYF

SEQ ID NO: 721131 - protein, 13 aa, Homo sapiens
  CDR3 for alpha chain variable domain of TCR clone 360566 (TRAV27, TRAJ45)
CRSSGGGADGLTF

SEQ ID NO: 721132 - protein, 17 aa, Homo sapiens
  CDR3 for beta chain variable domain of TCR clone 360566 (TRBV11-2, TRBJ2-1)
CASSLYPPGVAYNEQFF

SEQ ID NO: 721133 - protein, 11 aa, Homo sapiens
  CDR3 for alpha chain variable domain of TCR clone 360567 (TRAV27, TRAJ45)
CAGAQEEVLTD

SEQ ID NO: 721134 - protein, 15 aa, Homo sapiens
  CDR3 for beta chain variable domain of TCR clone 360567 (TRBV4-1, TRBJ2-3)
CASGRGQGIPDTQYF

SEQ ID NO: 721135 - protein, 14 aa, Homo sapiens
  CDR3 for alpha chain variable domain of TCR clone 360568 (TRAV12-1, TRAJ30)
CVVNIGGRDDKIIF

SEQ ID NO: 721136 - protein, 13 aa, Homo sapiens
  CDR3 for beta chain variable domain of TCR clone 360568 (TRBV12-5, TRBJ2-1)
CASGLGKGNEQFF

SEQ ID NO: 721137 - protein, 14 aa, Homo sapiens
  CDR3 for alpha chain variable domain of TCR clone 360569 (TRAV1-2, TRAJ16)
CAVNRFSDGQNLLF

SEQ ID NO: 721138 - protein, 14 aa, Homo sapiens
  CDR3 for beta chain variable domain of TCR clone 360569 (TRBV4-1, TRBJ2-2)
CASSQAVNTGELFF

SEQ ID NO: 721139 - protein, 11 aa, Homo sapiens
  CDR3 for alpha chain variable domain of TCR clone 360570 (TRAV2, TRAJ21)
CAVFNFNKFYF

SEQ ID NO: 721140 - protein, 14 aa, Homo sapiens
  CDR3 for beta chain variable domain of TCR clone 360570 (TRBV7-3, TRBJ2-1)
CASSLAGGTNEQFF

SEQ ID NO: 721141 - protein, 14 aa, Homo sapiens
  CDR3 for alpha chain variable domain of TCR clone 360571 (TRAV3, TRAJ40)
CAVRDRRGTYKYIF

SEQ ID NO: 721142 - protein, 15 aa, Homo sapiens
  CDR3 for beta chain variable domain of TCR clone 360571 (TRBV11-1, TRBJ1-3)
CASTDPRAFGNTIYC

SEQ ID NO: 721143 - protein, 12 aa, Homo sapiens
  CDR3 for alpha chain variable domain of TCR clone 360572 (TRAV1-2, TRAJ26)
CAVRYYGQNFGF

SEQ ID NO: 721144 - protein, 15 aa, Homo sapiens
  CDR3 for beta chain variable domain of TCR clone 360572 (TRBV28, TRBJ2-1)
CASSIIAGGRSEQFF

SEQ ID NO: 721145 - protein, 15 aa, Homo sapiens
  CDR3 for alpha chain variable domain of TCR clone 360573 (TRAV13-2, TRAJ45)
CAESDSGGGADGLTF

SEQ ID NO: 721146 - protein, 15 aa, Homo sapiens
  CDR3 for beta chain variable domain of TCR clone 360573 (TRBV27, TRBJ2-1)
CVSSNGGGSSNEQFF

SEQ ID NO: 721147 - protein, 14 aa, Homo sapiens
  CDR3 for alpha chain variable domain of TCR clone 360574 (TRAV13-1, TRAJ35)
CAASKGGFGNVLHC

SEQ ID NO: 721148 - protein, 14 aa, Homo sapiens
  CDR3 for beta chain variable domain of TCR clone 360574 (TRBV7-2, TRBJ1-2)
CASSQTGSTYGCTF

SEQ ID NO: 721149 - protein, 20 aa, Homo sapiens
  CDR3 for alpha chain variable domain of TCR clone 360575 (TRAV12-3, TRAJ41)
SLFIRDSQPSDSATPVALNF

SEQ ID NO: 721150 - protein, 15 aa, Homo sapiens
  CDR3 for beta chain variable domain of TCR clone 360575 (TRBV5-1, TRBJ2-7)
CASSLDLTSSYEQYF

SEQ ID NO: 721151 - protein, 13 aa, Homo sapiens
  CDR3 for alpha chain variable domain of TCR clone 360576 (TRAV12-3, TRAJ13)
CAMGTGGYQKATF

SEQ ID NO: 721152 - protein, 17 aa, Homo sapiens
  CDR3 for beta chain variable domain of TCR clone 360576 (TRBV11-2, TRBJ2-6)
CASSQRDIFSGANVLTF

SEQ ID NO: 721153 - protein, 12 aa, Homo sapiens
  CDR3 for alpha chain variable domain of TCR clone 360577 (TRAV17, TRAJ26)
CATVGYGQNFVF

SEQ ID NO: 721154 - protein, 14 aa, Homo sapiens
  CDR3 for beta chain variable domain of TCR clone 360577 (TRBV19, TRBJ2-1)
CASPTFVLSGEQFF

SEQ ID NO: 721155 - protein, 13 aa, Homo sapiens
  CDR3 for alpha chain variable domain of TCR clone 360578 (TRAV35, TRAJ42)
CAGFPGSQGNLIF

SEQ ID NO: 721156 - protein, 14 aa, Homo sapiens
  CDR3 for beta chain variable domain of TCR clone 360578 (TRBV19, TRBJ2-1)
CASSTFVLSGEQFF

SEQ ID NO: 721157 - protein, 16 aa, Homo sapiens
  CDR3 for alpha chain variable domain of TCR clone 360579 (TRAV20, TRAJ22)
CAVQATSSGSARQLTF

SEQ ID NO: 721158 - protein, 13 aa, Homo sapiens
  CDR3 for beta chain variable domain of TCR clone 360579 (TRBV7-2, TRBJ2-5)
CASSQTSVETQYF

SEQ ID NO: 721159 - protein, 10 aa, Homo sapiens
  CDR3 for alpha chain variable domain of TCR clone 360580 (TRAV8-3, TRAJ27)
CAVGPSKTNA

SEQ ID NO: 721160 - protein, 13 aa, Homo sapiens
  CDR3 for beta chain variable domain of TCR clone 360580 (TRBV20-1, TRBJ1-1)
CSAPLGGGTEAFF

SEQ ID NO: 721161 - protein, 16 aa, Homo sapiens
  CDR3 for alpha chain variable domain of TCR clone 360581 (TRAV14/DV4, TRAJ53)
CAMREGGGGSNYKLTF

SEQ ID NO: 721162 - protein, 13 aa, Homo sapiens
  CDR3 for beta chain variable domain of TCR clone 360581 (TRBV4-1, TRBJ1-1)
CASSRKMNTEAFF

SEQ ID NO: 721163 - protein, 15 aa, Homo sapiens
  CDR3 for alpha chain variable domain of TCR clone 360582 (TRAV23/DV6, TRAJ18)
CAARNRGSTLGGLYF

SEQ ID NO: 721164 - protein, 13 aa, Homo sapiens
  CDR3 for beta chain variable domain of TCR clone 360582 (TRBV7-2, TRBJ2-7)
CASSSPGGSEQFF

SEQ ID NO: 721165 - protein, 15 aa, Homo sapiens
  CDR3 for alpha chain variable domain of TCR clone 360583 (TRAV12-3, TRAJ6)
CAMSPASGGSYIPTF

SEQ ID NO: 721166 - protein, 13 aa, Homo sapiens
  CDR3 for beta chain variable domain of TCR clone 360583 (TRBV25-1, TRBJ1-1)
CASSDRGRAEAFF

SEQ ID NO: 721167 - protein, 15 aa, Homo sapiens
  CDR3 for alpha chain variable domain of TCR clone 360584 (TRAV25, TRAJ52)
CAGRPGGTSYGKLTF

SEQ ID NO: 721168 - protein, 12 aa, Homo sapiens
  CDR3 for beta chain variable domain of TCR clone 360584 (TRBV28, TRBJ2-3)
CASSLYRDTQYF

SEQ ID NO: 721169 - protein, 14 aa, Homo sapiens
  CDR3 for alpha chain variable domain of TCR clone 360585 (TRAV26-1, TRAJ22)
FIVRVYGSARQLTF

SEQ ID NO: 721170 - protein, 17 aa, Homo sapiens
  CDR3 for beta chain variable domain of TCR clone 360585 (TRBV7-3, TRBJ2-3)
CASSPGGLAGFGETQYF

SEQ ID NO: 721171 - protein, 14 aa, Homo sapiens
  CDR3 for alpha chain variable domain of TCR clone 360586 (TRAV12-1, TRAJ17)
CLGNYKAAGNKLTL

SEQ ID NO: 721172 - protein, 17 aa, Homo sapiens
  CDR3 for beta chain variable domain of TCR clone 360586 (TRBV20-1, TRBJ2-1)
CSASSSGLAGSYNEQFF

SEQ ID NO: 721173 - protein, 13 aa, Homo sapiens
  CDR3 for alpha chain variable domain of TCR clone 360587 (TRAV38-2/DV8, TRAJ29)
CAYRTPGNTPLVF

SEQ ID NO: 721174 - protein, 15 aa, Homo sapiens
  CDR3 for beta chain variable domain of TCR clone 360587 (TRBV19, TRBJ1-1)
CASTSGQIQNTEAFF

SEQ ID NO: 721175 - protein, 12 aa, Homo sapiens
  CDR3 for alpha chain variable domain of TCR clone 360588 (TRAV12-3, TRAJ17)
CAVTLTGNKLTF

SEQ ID NO: 721176 - protein, 12 aa, Homo sapiens
  CDR3 for beta chain variable domain of TCR clone 360588 (TRBV19, TRBJ2-1)
CASSMQDTEQFF

SEQ ID NO: 721177 - protein, 12 aa, Homo sapiens
  CDR3 for alpha chain variable domain of TCR clone 360589 (TRAV4, TRAJ26)
CLVGDYGQNFVF

SEQ ID NO: 721178 - protein, 16 aa, Homo sapiens
  CDR3 for beta chain variable domain of TCR clone 360589 (TRBV6-1, TRBJ1-3)
CASVQGGVETPYILER

SEQ ID NO: 721179 - protein, 15 aa, Homo sapiens
  CDR3 for alpha chain variable domain of TCR clone 360590 (TRAV12-1, TRAJ44)
CVVFVNTGTASKLTF

SEQ ID NO: 721180 - protein, 14 aa, Homo sapiens
  CDR3 for beta chain variable domain of TCR clone 360590 (TRBV18, TRBJ2-5)
CASSPGVSQETQYF

SEQ ID NO: 721181 - protein, 14 aa, Homo sapiens
  CDR3 for alpha chain variable domain of TCR clone 360591 (TRAV12-3, TRAJ10)
SHLPLPGGGNKLTF

SEQ ID NO: 721182 - protein, 14 aa, Homo sapiens
  CDR3 for beta chain variable domain of TCR clone 360591 (TRBV4-3, TRBJ1-5)
CASSQGGQGWPQHF

SEQ ID NO: 721183 - protein, 14 aa, Homo sapiens
  CDR3 for alpha chain variable domain of TCR clone 360592 (TRAV1-2, TRAJ16)
CAVNRFSDGQKLVF

SEQ ID NO: 721184 - protein, 15 aa, Homo sapiens
  CDR3 for beta chain variable domain of TCR clone 360592 (TRBV7-9, TRBJ1-6)
CASSSPGRGNSPLHF

SEQ ID NO: 721185 - protein, 14 aa, Homo sapiens
  CDR3 for alpha chain variable domain of TCR clone 360593 (TRAV12-3, TRAJ10)
SHLPLTGGGNKLTF

SEQ ID NO: 721186 - protein, 13 aa, Homo sapiens
  CDR3 for beta chain variable domain of TCR clone 360593 (TRBV5-4, TRBJ2-3)
CASSRTGLGTQYF

SEQ ID NO: 721187 - protein, 15 aa, Homo sapiens
  CDR3 for alpha chain variable domain of TCR clone 360594 (TRAV12-2, TRAJ43)
CAFDMRFGAGTRLTV

SEQ ID NO: 721188 - protein, 13 aa, Homo sapiens
  CDR3 for beta chain variable domain of TCR clone 360594 (TRBV7-9, TRBJ1-2)
CASSLKQNYGYTL

SEQ ID NO: 721189 - protein, 15 aa, Homo sapiens
  CDR3 for alpha chain variable domain of TCR clone 360595 (TRAV8-3, TRAJ42)
CAVGSQAGSQGNPIF

SEQ ID NO: 721190 - protein, 14 aa, Homo sapiens
  CDR3 for beta chain variable domain of TCR clone 360595 (TRBV13, TRBJ2-5)
CASSLERVGETQYF

SEQ ID NO: 721191 - protein, 12 aa, Homo sapiens
  CDR3 for alpha chain variable domain of TCR clone 360596 (TRAV16, TRAJ9)
CALSAGGFKTIF

SEQ ID NO: 721192 - protein, 13 aa, Homo sapiens
  CDR3 for beta chain variable domain of TCR clone 360596 (TRBV4-3, TRBJ1-1)
CASSQVEGSMAFF

SEQ ID NO: 721193 - protein, 12 aa, Homo sapiens
  CDR3 for alpha chain variable domain of TCR clone 360597 (TRAV13-2, TRAJ23)
CAERHRGGKLIF

SEQ ID NO: 721194 - protein, 13 aa, Homo sapiens
  CDR3 for beta chain variable domain of TCR clone 360597 (TRBV12-4, TRBJ1-2)
CASSLRQGIGYTF

SEQ ID NO: 721195 - protein, 16 aa, Homo sapiens
  CDR3 for alpha chain variable domain of TCR clone 360598 (TRAV3, TRAJ37)
CAVRVRGSGNTGKLLF

SEQ ID NO: 721196 - protein, 13 aa, Homo sapiens
  CDR3 for beta chain variable domain of TCR clone 360598 (TRBV14, TRBJ2-1)
CASSQDRRNEQFF

SEQ ID NO: 721197 - protein, 14 aa, Homo sapiens
  CDR3 for alpha chain variable domain of TCR clone 360599 (TRAV3, TRAJ28)
CAVRRGAGRYQITF

SEQ ID NO: 721198 - protein, 16 aa, Homo sapiens
  CDR3 for beta chain variable domain of TCR clone 360599 (TRBV4-1, TRBJ2-7)
CASSQEWTSGPLEQYF

SEQ ID NO: 721199 - protein, 14 aa, Homo sapiens
  CDR3 for alpha chain variable domain of TCR clone 360600 (TRAV13-1, TRAJ12)
CAASYMDSSYKLIF

SEQ ID NO: 721200 - protein, 13 aa, Homo sapiens
  CDR3 for beta chain variable domain of TCR clone 360600 (TRBV2, TRBJ2-5)
CASSDGIQDTQYF

SEQ ID NO: 721201 - protein, 14 aa, Homo sapiens
  CDR3 for alpha chain variable domain of TCR clone 360601 (TRAV3, TRAJ36)
CAVRDGTGANNLFF

SEQ ID NO: 721202 - protein, 16 aa, Homo sapiens
  CDR3 for beta chain variable domain of TCR clone 360601 (TRBV20-1, TRBJ2-6)
CSAGEGPGVGANVLTF

SEQ ID NO: 721203 - protein, 15 aa, Homo sapiens
  CDR3 for alpha chain variable domain of TCR clone 360602 (TRAV17, TRAJ4)
CATGTWSGGYNKLIF

SEQ ID NO: 721204 - protein, 16 aa, Homo sapiens
  CDR3 for beta chain variable domain of TCR clone 360602 (TRBV13, TRBJ2-2)
CASSPRTGEHTGELFF

SEQ ID NO: 721205 - protein, 10 aa, Homo sapiens
  CDR3 for alpha chain variable domain of TCR clone 360603 (TRAV30, TRAJ32)
CVTEKDMVVL

SEQ ID NO: 721206 - protein, 13 aa, Homo sapiens
  CDR3 for beta chain variable domain of TCR clone 360603 (TRBV10-3, TRBJ2-7)
CASKLAVNYEQYF

SEQ ID NO: 721207 - protein, 13 aa, Homo sapiens
  CDR3 for alpha chain variable domain of TCR clone 360604 (TRAV26-1, TRAJ47)
CILKGEYGNKLVF

SEQ ID NO: 721208 - protein, 13 aa, Homo sapiens
  CDR3 for beta chain variable domain of TCR clone 360604 (TRBV20-1, TRBJ1-1)
CSAGTVGNTEAFF

SEQ ID NO: 721209 - protein, 13 aa, Homo sapiens
  CDR3 for alpha chain variable domain of TCR clone 360605 (TRAV21, TRAJ45)
CAAPGGGADGLTF

SEQ ID NO: 721210 - protein, 12 aa, Homo sapiens
  CDR3 for beta chain variable domain of TCR clone 360605 (TRBV2, TRBJ2-1)
CASSERFREQFF

SEQ ID NO: 721211 - protein, 16 aa, Homo sapiens
  CDR3 for alpha chain variable domain of TCR clone 360606 (TRAV30, TRAJ24)
CGTEVVDADSWGKFQF

SEQ ID NO: 721212 - protein, 16 aa, Homo sapiens
  CDR3 for beta chain variable domain of TCR clone 360606 (TRBV11-2, TRBJ2-7)
CASSLAPTGVNYEQYF

SEQ ID NO: 721213 - protein, 12 aa, Homo sapiens
  CDR3 for alpha chain variable domain of TCR clone 360607 (TRAV8-3, TRAJ26)
CAGDNYGHNFVF

SEQ ID NO: 721214 - protein, 13 aa, Homo sapiens
  CDR3 for beta chain variable domain of TCR clone 360607 (TRBV7-2, TRBJ2-7)
CASSSPSGSEQYF

SEQ ID NO: 721215 - protein, 16 aa, Homo sapiens
  CDR3 for alpha chain variable domain of TCR clone 360608 (TRAV12-2, TRAJ32)
CAVNLGQGGATNQLIF

SEQ ID NO: 721216 - protein, 12 aa, Homo sapiens
  CDR3 for beta chain variable domain of TCR clone 360608 (TRBV29-1, TRBJ2-3)
CSVTGGADTQYF

SEQ ID NO: 721217 - protein, 15 aa, Homo sapiens
  CDR3 for alpha chain variable domain of TCR clone 360609 (TRAV3, TRAJ5)
CAVRDLATGRRALTF

SEQ ID NO: 721218 - protein, 13 aa, Homo sapiens
  CDR3 for beta chain variable domain of TCR clone 360609 (TRBV12-4, TRBJ2-7)
CARSPTETYEQYF

SEQ ID NO: 721219 - protein, 13 aa, Homo sapiens
  CDR3 for alpha chain variable domain of TCR clone 360610 (TRAV17, TRAJ9)
CATEYTGGFKTIF

SEQ ID NO: 721220 - protein, 14 aa, Homo sapiens
  CDR3 for beta chain variable domain of TCR clone 360610 (TRBV19, TRBJ2-5)
CASSMTGQQETQYF

SEQ ID NO: 721221 - protein, 16 aa, Homo sapiens
  CDR3 for alpha chain variable domain of TCR clone 360611 (TRAV13-2, TRAJ22)
CAENRGSSGSARQLTF

SEQ ID NO: 721222 - protein, 15 aa, Homo sapiens
  CDR3 for beta chain variable domain of TCR clone 360611 (TRBV9, TRBJ1-6)
CASSVAGTGDSPLHF

SEQ ID NO: 721223 - protein, 16 aa, Homo sapiens
  CDR3 for alpha chain variable domain of TCR clone 360612 (TRAV8-3, TRAJ8)
CSFPRDGNTGFQKLVF

SEQ ID NO: 721224 - protein, 15 aa, Homo sapiens
  CDR3 for beta chain variable domain of TCR clone 360612 (TRBV6-1, TRBJ2-6)
CASSSRPSGANVLTF

SEQ ID NO: 721225 - protein, 19 aa, Homo sapiens
  CDR3 for alpha chain variable domain of TCR clone 360613 (TRAV12-1, TRAJ42)
SVVQPPTSVKGGSQGNLIF

SEQ ID NO: 721226 - protein, 17 aa, Homo sapiens
  CDR3 for beta chain variable domain of TCR clone 360613 (TRBV7-2, TRBJ2-3)
CASSLAGGLAGTAGQYF

SEQ ID NO: 721227 - protein, 12 aa, Homo sapiens
  CDR3 for alpha chain variable domain of TCR clone 360614 (TRAV17, TRAJ49)
CATASTGNQSYF

SEQ ID NO: 721228 - protein, 15 aa, Homo sapiens
  CDR3 for beta chain variable domain of TCR clone 360614 (TRBV15, TRBJ2-1)
CATSRDLGSYNEQFF

SEQ ID NO: 721229 - protein, 14 aa, Homo sapiens
  CDR3 for alpha chain variable domain of TCR clone 360615 (TRAV14/DV4, TRAJ34)
CAMREGRPHRQAHL

SEQ ID NO: 721230 - protein, 14 aa, Homo sapiens
  CDR3 for beta chain variable domain of TCR clone 360615 (TRBV7-6, TRBJ1-6)
CASSQAGGGSPLHF

SEQ ID NO: 721231 - protein, 17 aa, Homo sapiens
  CDR3 for alpha chain variable domain of TCR clone 360616 (TRAV17, TRAJ7)
CATLGRLAFGMGNQVVV

SEQ ID NO: 721232 - protein, 13 aa, Homo sapiens
  CDR3 for beta chain variable domain of TCR clone 360616 (TRBV12-4, TRBJ2-7)
CASSLERVREQYF

SEQ ID NO: 721233 - protein, 13 aa, Homo sapiens
  CDR3 for alpha chain variable domain of TCR clone 360617 (TRAV27, TRAJ40)
CAGPPSGTYKYIF

SEQ ID NO: 721234 - protein, 11 aa, Homo sapiens
  CDR3 for beta chain variable domain of TCR clone 360617 (TRBV7-9, TRBJ2-3)
CASSPTDTQYF

SEQ ID NO: 721235 - protein, 11 aa, Homo sapiens
  CDR3 for alpha chain variable domain of TCR clone 360618 (TRAV12-2, TRAJ31)
CAILNNARLML

SEQ ID NO: 721236 - protein, 13 aa, Homo sapiens
  CDR3 for beta chain variable domain of TCR clone 360618 (TRBV20-1, TRBJ1-1)
CSARLGQGTEAFF

SEQ ID NO: 721237 - protein, 14 aa, Homo sapiens
  CDR3 for alpha chain variable domain of TCR clone 360619 (TRAV1-2, TRAJ8)
CAVREDTGCQKLVF

SEQ ID NO: 721238 - protein, 14 aa, Homo sapiens
  CDR3 for beta chain variable domain of TCR clone 360619 (TRBV2, TRBJ2-1)
CASSEALDGNEQFF

SEQ ID NO: 721239 - protein, 13 aa, Homo sapiens
  CDR3 for alpha chain variable domain of TCR clone 360620 (TRAV12-3, TRAJ7)
CAMTPYGNNRLVF

SEQ ID NO: 721240 - protein, 16 aa, Homo sapiens
  CDR3 for beta chain variable domain of TCR clone 360620 (TRBV20-1, TRBJ1-4)
CSARPYGGELNEKLFF

SEQ ID NO: 721241 - protein, 16 aa, Homo sapiens
  CDR3 for alpha chain variable domain of TCR clone 360621 (TRAV12-3, TRAJ28)
CAMRAKSGAGSYQLTF

SEQ ID NO: 721242 - protein, 14 aa, Homo sapiens
  CDR3 for beta chain variable domain of TCR clone 360621 (TRBV25-1, TRBJ1-1)
CASTHLGGNTEAFF

SEQ ID NO: 721243 - protein, 20 aa, Homo sapiens
  CDR3 for alpha chain variable domain of TCR clone 360622 (TRAV30, TRAJ54)
SAAQSRSETQVVQGAQKLVF

SEQ ID NO: 721244 - protein, 20 aa, Homo sapiens
  CDR3 for beta chain variable domain of TCR clone 360622 (TRBV7-8, TRBJ2-2)
CASSHLFPGPTIHITGELFF

SEQ ID NO: 721245 - protein, 12 aa, Homo sapiens
  CDR3 for alpha chain variable domain of TCR clone 360623 (TRAV13-1, TRAJ20)
CAASRGDYKLSF

SEQ ID NO: 721246 - protein, 15 aa, Homo sapiens
  CDR3 for beta chain variable domain of TCR clone 360623 (TRBV7-2, TRBJ1-2)
CASSLVSGGDYGYTF

SEQ ID NO: 721247 - protein, 18 aa, Homo sapiens
  CDR3 for alpha chain variable domain of TCR clone 360624 (TRAV13-1, TRAJ52)
CAAKNPTAGGTSYGKLTF

SEQ ID NO: 721248 - protein, 18 aa, Homo sapiens
  CDR3 for beta chain variable domain of TCR clone 360624 (TRBV12-4, TRBJ2-4)
CASSRTGAVDVAKNMQYF

SEQ ID NO: 721249 - protein, 11 aa, Homo sapiens
  CDR3 for alpha chain variable domain of TCR clone 360625 (TRAV21, TRAJ41)
CAVWSGYALNF

SEQ ID NO: 721250 - protein, 13 aa, Homo sapiens
  CDR3 for beta chain variable domain of TCR clone 360625 (TRBV7-9, TRBJ1-2)
CASSLKQNYGDTF

SEQ ID NO: 721251 - protein, 11 aa, Homo sapiens
  CDR3 for alpha chain variable domain of TCR clone 360626 (TRAV12-3, TRAJ43)
CAMIVSDDMRF

SEQ ID NO: 721252 - protein, 14 aa, Homo sapiens
  CDR3 for beta chain variable domain of TCR clone 360626 (TRBV20-1, TRBJ1-1)
SAVLHLGGGTEAFF

SEQ ID NO: 721253 - protein, 13 aa, Homo sapiens
  CDR3 for alpha chain variable domain of TCR clone 360627 (TRAV29/DV5, TRAJ44)
CAASTGTASKLTL

SEQ ID NO: 721254 - protein, 13 aa, Homo sapiens
  CDR3 for beta chain variable domain of TCR clone 360627 (TRBV19, TRBJ2-7)
CASRKAGGSEQYF

SEQ ID NO: 721255 - protein, 11 aa, Homo sapiens
  CDR3 for alpha chain variable domain of TCR clone 360628 (TRAV12-3, TRAJ6)
CAMSGSYIPTF

SEQ ID NO: 721256 - protein, 13 aa, Homo sapiens
  CDR3 for beta chain variable domain of TCR clone 360628 (TRBV7-2, TRBJ2-2)
CASSSVRAGELFF

SEQ ID NO: 721257 - protein, 14 aa, Homo sapiens
  CDR3 for alpha chain variable domain of TCR clone 360629 (TRAV1-2, TRAJ16)
CAVNRFSVGQKLPF

SEQ ID NO: 721258 - protein, 13 aa, Homo sapiens
  CDR3 for beta chain variable domain of TCR clone 360629 (TRBV7-3, TRBJ1-1)
CASSQDWGAEAFF

SEQ ID NO: 721259 - protein, 13 aa, Homo sapiens
  CDR3 for alpha chain variable domain of TCR clone 360630 (TRAV36/DV7, TRAJ49)
CAVEANTGNQFYF

SEQ ID NO: 721260 - protein, 14 aa, Homo sapiens
  CDR3 for beta chain variable domain of TCR clone 360630 (TRBV6-1, TRBJ2-6)
CASQQGAGANVLTF

SEQ ID NO: 721261 - protein, 15 aa, Homo sapiens
  CDR3 for alpha chain variable domain of TCR clone 360631 (TRAV12-3, TRAJ5)
CAMSGLGTGMRALTF

SEQ ID NO: 721262 - protein, 15 aa, Homo sapiens
  CDR3 for beta chain variable domain of TCR clone 360631 (TRBV19, TRBJ1-1)
CASTSGQIQNTEAFF

SEQ ID NO: 721263 - protein, 11 aa, Homo sapiens
  CDR3 for alpha chain variable domain of TCR clone 360632 (TRAV1-2, TRAJ40)
CAVPGTYKYIF

SEQ ID NO: 721264 - protein, 15 aa, Homo sapiens
  CDR3 for beta chain variable domain of TCR clone 360632 (TRBV5-7, TRBJ1-5)
CASSYGKLWEQPQHF

SEQ ID NO: 721265 - protein, 15 aa, Homo sapiens
  CDR3 for alpha chain variable domain of TCR clone 360633 (TRAV29/DV5, TRAJ29)
CAASERSSGKKPLVF

SEQ ID NO: 721266 - protein, 12 aa, Homo sapiens
  CDR3 for beta chain variable domain of TCR clone 360633 (TRBV7-9, TRBJ1-4)
CASSTDREKLFF

SEQ ID NO: 721267 - protein, 15 aa, Homo sapiens
  CDR3 for alpha chain variable domain of TCR clone 360634 (TRAV8-3, TRAJ27)
CAVGPSKNNAGKSTF

SEQ ID NO: 721268 - protein, 12 aa, Homo sapiens
  CDR3 for beta chain variable domain of TCR clone 360634 (TRBV11-2, TRBJ2-2)
CASSLGGGELFF

SEQ ID NO: 721269 - protein, 16 aa, Homo sapiens
  CDR3 for alpha chain variable domain of TCR clone 360635 (TRAV21, TRAJ37)
CAVRTAGSSNTGKLIF

SEQ ID NO: 721270 - protein, 13 aa, Homo sapiens
  CDR3 for beta chain variable domain of TCR clone 360635 (TRBV7-9, TRBJ2-5)
SASLPSGRETQYF

SEQ ID NO: 721271 - protein, 13 aa, Homo sapiens
  CDR3 for alpha chain variable domain of TCR clone 360636 (TRAV8-3, TRAJ6)
CAVEKGGSYIPTF

SEQ ID NO: 721272 - protein, 13 aa, Homo sapiens
  CDR3 for beta chain variable domain of TCR clone 360636 (TRBV18, TRBJ1-1)
CASSGGRNTEAFF

SEQ ID NO: 721273 - protein, 13 aa, Homo sapiens
  CDR3 for alpha chain variable domain of TCR clone 360637 (TRAV12-2, TRAJ20)
CAVYPSNDYKLSF

SEQ ID NO: 721274 - protein, 16 aa, Homo sapiens
  CDR3 for beta chain variable domain of TCR clone 360637 (TRBV12-4, TRBJ2-5)
CASSFFVRGRQETQYF

SEQ ID NO: 721275 - protein, 13 aa, Homo sapiens
  CDR3 for alpha chain variable domain of TCR clone 360638 (TRAV35, TRAJ42)
CAGFPGSHGDLIF

SEQ ID NO: 721276 - protein, 14 aa, Homo sapiens
  CDR3 for beta chain variable domain of TCR clone 360638 (TRBV4-1, TRBJ2-2)
CASSQAVNTGELFF

SEQ ID NO: 721277 - protein, 13 aa, Homo sapiens
  CDR3 for alpha chain variable domain of TCR clone 360639 (TRAV8-3, TRAJ37)
CAVPSSNTGKLSF

SEQ ID NO: 721278 - protein, 12 aa, Homo sapiens
  CDR3 for beta chain variable domain of TCR clone 360639 (TRBV11-2, TRBJ2-1)
CASSPGNNEQFF

SEQ ID NO: 721279 - protein, 14 aa, Homo sapiens
  CDR3 for alpha chain variable domain of TCR clone 360640 (TRAV12-3, TRAJ12)
CAMSRMDSSYKLIF

SEQ ID NO: 721280 - protein, 15 aa, Homo sapiens
  CDR3 for beta chain variable domain of TCR clone 360640 (TRBV27, TRBJ2-1)
CASSNGGGSSNEQFF

SEQ ID NO: 721281 - protein, 15 aa, Homo sapiens
  CDR3 for alpha chain variable domain of TCR clone 360641 (TRAV12-3, TRAJ42)
CAMITSVGSRGNLIF

SEQ ID NO: 721282 - protein, 14 aa, Homo sapiens
  CDR3 for beta chain variable domain of TCR clone 360641 (TRBV12-4, TRBJ2-3)
CASSLGQGTDTQYF

SEQ ID NO: 721283 - protein, 12 aa, Homo sapiens
  CDR3 for alpha chain variable domain of TCR clone 360642 (TRAV12-3, TRAJ17)
CAITLTGNKRTF

SEQ ID NO: 721284 - protein, 15 aa, Homo sapiens
  CDR3 for beta chain variable domain of TCR clone 360642 (TRBV20-1, TRBJ2-7)
CSARDRVSGMDEQYF

SEQ ID NO: 721285 - protein, 20 aa, Homo sapiens
  CDR3 for alpha chain variable domain of TCR clone 360643 (TRAV1-1, TRAJ4)
CLLLLRFEGFLSGGYNKLIF

SEQ ID NO: 721286 - protein, 16 aa, Homo sapiens
  CDR3 for beta chain variable domain of TCR clone 360643 (TRBV28, TRBJ1-4)
CASSPPYRGRSEKLFF

SEQ ID NO: 721287 - protein, 14 aa, Homo sapiens
  CDR3 for alpha chain variable domain of TCR clone 360644 (TRAV8-4, TRAJ8)
CAVSLNTGFQKLEF

SEQ ID NO: 721288 - protein, 13 aa, Homo sapiens
  CDR3 for beta chain variable domain of TCR clone 360644 (TRBV7-9, TRBJ2-3)
CASSPGSTDTQYF

SEQ ID NO: 721289 - protein, 16 aa, Homo sapiens
  CDR3 for alpha chain variable domain of TCR clone 360645 (TRAV16, TRAJ52)
CALSAAGGTSYGKLTF

SEQ ID NO: 721290 - protein, 12 aa, Homo sapiens
  CDR3 for beta chain variable domain of TCR clone 360645 (TRBV29-1, TRBJ2-3)
CSVTGGADTQYF

SEQ ID NO: 721291 - protein, 14 aa, Homo sapiens
  CDR3 for alpha chain variable domain of TCR clone 360646 (TRAV17, TRAJ57)
CATDPQGGPEKLVF

SEQ ID NO: 721292 - protein, 13 aa, Homo sapiens
  CDR3 for beta chain variable domain of TCR clone 360646 (TRBV4-1, TRBJ1-1)
CASSQLGTGEAFF

SEQ ID NO: 721293 - protein, 17 aa, Homo sapiens
  CDR3 for alpha chain variable domain of TCR clone 360647 (TRAV13-1, TRAJ52)
CAASSGAGGISYGKLTF

SEQ ID NO: 721294 - protein, 14 aa, Homo sapiens
  CDR3 for beta chain variable domain of TCR clone 360647 (TRBV12-4, TRBJ2-3)
CASTIAGWGDTQYF

SEQ ID NO: 721295 - protein, 14 aa, Homo sapiens
  CDR3 for alpha chain variable domain of TCR clone 360648 (TRAV12-3, TRAJ54)
CAMRGIQGAQKLVF

SEQ ID NO: 721296 - protein, 12 aa, Homo sapiens
  CDR3 for beta chain variable domain of TCR clone 360648 (TRBV7-8, TRBJ2-7)
CASSLGDREQYF

SEQ ID NO: 721297 - protein, 17 aa, Homo sapiens
  CDR3 for alpha chain variable domain of TCR clone 360649 (TRAV4, TRAJ13)
CILGVQGSSGGYQKVTF

SEQ ID NO: 721298 - protein, 18 aa, Homo sapiens
  CDR3 for beta chain variable domain of TCR clone 360649 (TRBV15, TRBJ2-3)
CATSRDGARSWDTDTQYF

SEQ ID NO: 721299 - protein, 13 aa, Homo sapiens
  CDR3 for alpha chain variable domain of TCR clone 360650 (TRAV12-1, TRAJ7)
CVVDMRGNNRLAF

SEQ ID NO: 721300 - protein, 15 aa, Homo sapiens
  CDR3 for beta chain variable domain of TCR clone 360650 (TRBV7-2, TRBJ2-5)
CASSFLRGGEETQYF

SEQ ID NO: 721301 - protein, 13 aa, Homo sapiens
  CDR3 for alpha chain variable domain of TCR clone 360651 (TRAV1-2, TRAJ34)
CAVRDEATDKLIF

SEQ ID NO: 721302 - protein, 12 aa, Homo sapiens
  CDR3 for beta chain variable domain of TCR clone 360651 (TRBV28, TRBJ1-2)
CASSRSGYGYTF

SEQ ID NO: 721303 - protein, 14 aa, Homo sapiens
  CDR3 for alpha chain variable domain of TCR clone 360652 (TRAV12-3, TRAJ9)
CAMSLNTGGFKTIF

SEQ ID NO: 721304 - protein, 12 aa, Homo sapiens
  CDR3 for beta chain variable domain of TCR clone 360652 (TRBV19, TRBJ1-5)
CASSIAQQPQHF

SEQ ID NO: 721305 - protein, 14 aa, Homo sapiens
  CDR3 for alpha chain variable domain of TCR clone 360653 (TRAV12-2, TRAJ17)
CAVLFKAAGNTLTF

SEQ ID NO: 721306 - protein, 17 aa, Homo sapiens
  CDR3 for beta chain variable domain of TCR clone 360653 (TRBV20-1, TRBJ2-2)
CSASGAGQGGLTGELLF

SEQ ID NO: 721307 - protein, 13 aa, Homo sapiens
  CDR3 for alpha chain variable domain of TCR clone 360654 (TRAV12-2, TRAJ20)
CAVYPSNDYKLSF

SEQ ID NO: 721308 - protein, 16 aa, Homo sapiens
  CDR3 for beta chain variable domain of TCR clone 360654 (TRBV7-3, TRBJ2-1)
CASSLEGYRSYNEQFF

SEQ ID NO: 721309 - protein, 13 aa, Homo sapiens
  CDR3 for alpha chain variable domain of TCR clone 360655 (TRAV1-2, TRAJ12)
CAVSMDSSYKLIF

SEQ ID NO: 721310 - protein, 13 aa, Homo sapiens
  CDR3 for beta chain variable domain of TCR clone 360655 (TRBV12-4, TRBJ1-2)
CASSSGLTVISTF

SEQ ID NO: 721311 - protein, 16 aa, Homo sapiens
  CDR3 for alpha chain variable domain of TCR clone 360656 (TRAV13-1, TRAJ48)
CAASIFGNFGDEKLTF

SEQ ID NO: 721312 - protein, 18 aa, Homo sapiens
  CDR3 for beta chain variable domain of TCR clone 360656 (TRBV4-1, TRBJ1-5)
CASSQDPRGQGLNQPQHF

SEQ ID NO: 721313 - protein, 11 aa, Homo sapiens
  CDR3 for alpha chain variable domain of TCR clone 360657 (TRAV35, TRAJ34)
CWARNTDKLIF

SEQ ID NO: 721314 - protein, 14 aa, Homo sapiens
  CDR3 for beta chain variable domain of TCR clone 360657 (TRBV5-1, TRBJ2-7)
CASSRGESLYEQNF

SEQ ID NO: 721315 - protein, 14 aa, Homo sapiens
  CDR3 for alpha chain variable domain of TCR clone 360658 (TRAV40, TRAJ41)
CLLGPPNSGYALNF

SEQ ID NO: 721316 - protein, 19 aa, Homo sapiens
  CDR3 for beta chain variable domain of TCR clone 360658 (TRBV19, TRBJ2-5)
CASSIGQVTDFFLGETQYF

SEQ ID NO: 721317 - protein, 16 aa, Homo sapiens
  CDR3 for alpha chain variable domain of TCR clone 360659 (TRAV3, TRAJ37)
CAVSGNGSGNTGKLIF

SEQ ID NO: 721318 - protein, 13 aa, Homo sapiens
  CDR3 for beta chain variable domain of TCR clone 360659 (TRBV14, TRBJ2-7)
CASSQDRRYEQYF

SEQ ID NO: 721319 - protein, 15 aa, Homo sapiens
  CDR3 for alpha chain variable domain of TCR clone 360660 (TRAV2, TRAJ15)
CAVEDRGQAGTALLF

SEQ ID NO: 721320 - protein, 14 aa, Homo sapiens
  CDR3 for beta chain variable domain of TCR clone 360660 (TRBV4-1, TRBJ2-2)
CASSQAVNTGELFF

SEQ ID NO: 721321 - protein, 13 aa, Homo sapiens
  CDR3 for alpha chain variable domain of TCR clone 360661 (TRAV17, TRAJ9)
CATGSTGGFKTIF

SEQ ID NO: 721322 - protein, 14 aa, Homo sapiens
  CDR3 for beta chain variable domain of TCR clone 360661 (TRBV7-8, TRBJ2-7)
CASTFRGGANEQYF

SEQ ID NO: 721323 - protein, 12 aa, Homo sapiens
  CDR3 for alpha chain variable domain of TCR clone 360662 (TRAV30, TRAJ43)
CGTGERGNDMRF

SEQ ID NO: 721324 - protein, 17 aa, Homo sapiens
  CDR3 for beta chain variable domain of TCR clone 360662 (TRBV7-8, TRBJ2-6)
CASSAGTGGAGANDLTF

SEQ ID NO: 721325 - protein, 14 aa, Homo sapiens
  CDR3 for alpha chain variable domain of TCR clone 360663 (TRAV12-1, TRAJ12)
CVVTSMDSSYKLIF

SEQ ID NO: 721326 - protein, 14 aa, Homo sapiens
  CDR3 for beta chain variable domain of TCR clone 360663 (TRBV4-1, TRBJ2-7)
CASSPVAGGDEQYF

SEQ ID NO: 721327 - protein, 17 aa, Homo sapiens
  CDR3 for alpha chain variable domain of TCR clone 360664 (TRAV38-2/DV8, TRAJ45)
CAYRSRYSGGGAAGLTF

SEQ ID NO: 721328 - protein, 15 aa, Homo sapiens
  CDR3 for beta chain variable domain of TCR clone 360664 (TRBV19, TRBJ2-1)
CASIKGRGPYNEQFF

SEQ ID NO: 721329 - protein, 15 aa, Homo sapiens
  CDR3 for alpha chain variable domain of TCR clone 360665 (TRAV29/DV5, TRAJ29)
CAASERSSGNTPLVF

SEQ ID NO: 721330 - protein, 16 aa, Homo sapiens
  CDR3 for beta chain variable domain of TCR clone 360665 (TRBV6-1, TRBJ2-5)
CASSETLGRGAETQYF

SEQ ID NO: 721331 - protein, 21 aa, Homo sapiens
  CDR3 for alpha chain variable domain of TCR clone 360666 (TRAV13-1, TRAJ32)
CAASNGWWCYKQAHLWNWHSA

SEQ ID NO: 721332 - protein, 15 aa, Homo sapiens
  CDR3 for beta chain variable domain of TCR clone 360666 (TRBV20-1, TRBJ1-2)
CSAIRTGAFNYGYTF

SEQ ID NO: 721333 - protein, 13 aa, Homo sapiens
  CDR3 for alpha chain variable domain of TCR clone 360667 (TRAV22, TRAJ29)
CAVGGSGNTPLVF
